United States Patent Application Publication US 2026/0022370 A1 - sequence listing, part 3

SEQ ID NO: 11689 - DNA, 583 bp, Homo sapiens
  source 1..583: mol_type = other DNA
tgcctggctgacccaccctccctggcaggatctgccctgtggcccaaatgggcatgttgcccagggggctccctggcactatgggggaagagtctctccttcccctcttatcatctcagttgagtcagacttgggggagggggatacacagtgtgagtcactgggtaccctttctgaccgaggcgatgaggccaggctggtgacagggacactgagtcaggggcaggggccccggtcttactcctgggcctctggatttccacaggtggacaatgccctgggctaggagccagccctcgcaggccctgtgtctagaaaattctgtgaacaccagatcagtgggtctgtcggccctccccgccaccttccagcgcggcggcaccgggggcccagggggtgggcgccctcaaccccgtcccgccgcccgggcggcgcgggggaggggcggcgggggcggggcgtcctgtgcggcgcggcccccacccgcgggccgggcggcattcctgggaggccggcgctctgacgtggacccgggggccgcgggcgcggcgggggggcggcggtccgggggcttcttaaaccc

SEQ ID NO: 11690 - DNA, 660 bp, Homo sapiens
  source 1..660: mol_type = other DNA
gtggcccaaatgggcatgttgcccagggggctccctggcactatgggggaagagtctctccttcccctcttatcatctcagttgagtcagacttgggggagggggatacacagtgtgagtcactgggtaccctttctgaccgaggcgatgaggccaggctggtgacagggacactgagtcaggggcaggggccccggtcttactcctgggcctctggatttccacaggtggacaatgccctgggctaggagccagccctcgcaggccctgtgtctagaaaattctgtgaacaccagatcagtgggtctgtcggccctccccgccaccttccagcgcggcggcaccgggggcccagggggtgggcgccctcaaccccgtcccgccgcccgggcggcgcgggggaggggcggcgggggcggggcgtcctgtgcggcgcggcccccacccgcgggccgggcggcattcctgggaggccggcgctctgacgtggacccgggggccgcgggcgcggcgggggggcggcggtccgggggcttcttaaaccccccgccccggcccagcccgcccttcccgagcaccgctccggccctggagggagagagagccagagagcggccgagcgcctaggaggcccgccgagcctcgccgagccccgccagc

SEQ ID NO: 11691 - DNA, 235 bp, Homo sapiens
  source 1..235: mol_type = other DNA
ctggagtgcaatgggttgaagcaattctcctgcctcagcctctcgagtagctgggactattggccaggctggtctcaaactgcaggtccttcaggtctcagcttagatctgaagcaagcttcttggggaagaacgtgtgttacttgttaactatgtgtcatagttacacacatacataagtaactgcgtaggacgtggtgccgcgcggctgttaatgcgcatgtcccgggcgccg

SEQ ID NO: 11692 - DNA, 255 bp, Homo sapiens
  source 1..255: mol_type = other DNA
agcagttatttactagtgcaaaggactagcagcaatgttaatatcaatatactgttctctggagttagagcaccgctgtaagcagaatgaagacctcttttgggcttaaacatgcagctcagatatggggcacatctcggcgctaatgtcccgcgaggatcttcttcccggctcctggcccggcagggttacttccgggagggtctgtggactcaagagtctagaatcgtttccgagggggcaacttccacggac

SEQ ID NO: 11693 - DNA, 474 bp, Homo sapiens
  source 1..474: mol_type = other DNA
tcagtggctgaaaatttcagaaactatggaatcgaaaacggtgtctgtagggcgagagccaccctcgccaggggtgtaggcaggcgagaggagggcctggagctgtgggtcggccacactgcgccctcatttgtgtgcagccccggaggaccagagtggggaagcaccccaccctctcccagggcccaactgagcactgcagcgggaggtacggggttgtcaaatgacagttttgccattccagattgccaaaagagccagtggccagtctagggcaccgcgccgtctggcatctccctggaggccctgggcctggcccgaggctcagcccggatctgcagttgccaggtcagtgcggggcccggagtggattcgcggggcggggcggggcactgcccgcgcccggagctcagcagcagctgcccaggggcgggggcggcaagacgcggaagtgcccggcaggttggcggaccg

SEQ ID NO: 11694 - DNA, 319 bp, Homo sapiens
  source 1..319: mol_type = other DNA
tccagttcctccccacgaagaacttcctggagggcgccatggcgctggagctgaggcgctgtaggtcagtgtcagcgtaactacagtgttttacacattgtgatcatttatcaaatagcagttatttactagtgcaaaggactagcagcaatgttaatatcaatatactgttctctggagttagagcaccgctgtaagcagaatgaagacctcttttgggcttaaacatgcagctcagatatggggcacatctcggcgctaatgtcccgcgaggatcttcttcccggctcctggcccggcagggttacttccgggaggg

SEQ ID NO: 11695 - DNA, 333 bp, Homo sapiens
  source 1..333: mol_type = other DNA
tttgcttacatcctctaaatgtaaaatttaaaaataatacagaagaaattaactatattcactattcatatccctctatgctgatatatgtatctgaatttcagatgattgccctattagaattataggtgaagaagggtgttgagttctcaacgtgatcgcagacgggcacgcgcctcccaggggacgctgcgggccccgcccatggggcgcgcagtgtaggtcggggcctgaggtcccacggtcttctcgccgcgtgcggccgggagcaaacgcggttccgtggcgcctcgcgcgaggccagaccgggacggggcggggcggggctggagg

SEQ ID NO: 11696 - DNA, 222 bp, Homo sapiens
  source 1..222: mol_type = other DNA
ccaagccagactgtctaaatatttactacaagctacttttacagcctcttttgggtgggggcttgctctaccctctctcagcttccagagacagcgagtccctcgtttcgggcgatgtccctggccagaaggccccccgctccggccggtcgagcagccaatcgcctcgcggggcggggttgcggcgagctgcagggggcggggcctggctcccggcgcgcg

SEQ ID NO: 11697 - DNA, 160 bp, Homo sapiens
  source 1..160: mol_type = other DNA
aagctcaatttccagggcctggaagagtgtcaggcacgtggcatcacctgaggatctgtaatcccagctactcaagaggcggcgccactcacccgaagtgtagacttcacctgcaagagcttctccgaaggttggccgagtgagcgggcctagcctgcgc

SEQ ID NO: 11698 - DNA, 400 bp, Homo sapiens
  source 1..400: mol_type = other DNA
tcacctgaggatctgtaatcccagctactcaagaggcggcgccactcacccgaagtgtagacttcacctgcaagagcttctccgaaggttggccgagtgagcgggcctagcctgcgctctcaccccagtgccaccccagtgggagcgccgcccgcgcccgccccctcgccccgcgcccgccccctcgccccgcgcccgccccctcgccccgcgcccgccgctccggcacgccgaactgggtttccgggcgctggaggccgcggtcggcctcgtactaggtgacggcccatcccgcgcgcgcaagcccggaaccccgctccgctcaccctccgcgcgctgccgctttgccctggcaacggtaaccacggcgaggccctgccccacgcccggtgattgtgcg

SEQ ID NO: 11699 - DNA, 336 bp, Homo sapiens
  source 1..336: mol_type = other DNA
tcccaaacaatcagcctgagtaattctgatggagggagtcttgccgggcatggtgtccgaacgatcgaatggctgaatacattcatatgttgctttgtacaaaaacttgctttcaaatataggttccggccccctccaaacctctgaagcgctccgtgcacgcgacgcggcggcggggtaagctggagccctcgccgcgagccctctccgctgcctgcccgcagcacagccgcgccgacctcctcatcatggcggcggccgggcggggaagccgggccgtgcgtcgcgtgcgtgccctctccctcccctccccctcctcggcggcggcggcggcgg

SEQ ID NO: 11700 - DNA, 520 bp, Homo sapiens
  source 1..520: mol_type = other DNA
gtagaataaggatattaatactaaattatttctgacctgcataccctggtatgcaagcctgaggaagccttgctgtggtctacaatccttggaaacataacagcttgttaaacagagtgttaagggaggttcattacccttaaatccacgaatgtaataatattgccattatttactcttagcccacgccgcggcggcgccccacccctctcagcgagacccgcccctccgatgacgtcacagaggtgacgtcacggcgcccagcgcgtcgcgcggcgcagaggagcgccggggcagggccgcggcggaaccacagccggagaggggcagcccgagccgggcgccgcagggtccccacccccacccggccggacagtgcccggtgttcccccgtgcggggggcggcggcggcggctgacgggaccgccgggaccgcgggggtgttgccacctccaccgaggagccggcgcggccgcgggctcctcagagccggggccccgggcccgtgacagacgggccg

SEQ ID NO: 11701 - DNA, 437 bp, Homo sapiens
  source 1..437: mol_type = other DNA
ctgttgccagcgattctcctgcctcagcctcgcgagtagttgggactacaggcgccagactggtctggaactcccgacctcaggtgatccacccatgtccagcaaggtgattagcacgtaggaggtgctaaataaatatttattggatgaatgaagtatttaaggttgtgtaggaggttcacacactttgcgaaggtagaataaggatattaatactaaattatttctgacctgcataccctggtatgcaagcctgaggaagccttgctgtggtctacaatccttggaaacataacagcttgttaaacagagtgttaagggaggttcattacccttaaatccacgaatgtaataatattgccattatttactcttagcccacgccgcggcggcgccccacccctctcagcgagacccgcccctccgatgacgtcaca

SEQ ID NO: 11702 - DNA, 310 bp, Homo sapiens
  source 1..310: mol_type = other DNA
ccagctgctcttgcagtgatcgcgccattgcactgcaaaaaataaataggacgttttcaataaatatttgttgggtagaaaggtgcaactggagtgcagtggcagctgggatcatgagccacggcgcccggccgtattagttaatattacttgaaaattaagttgaaatctcttatcaacctaaatatgctagttgataaaggaaacgattaatcaagacctaaacagcgtgggccccgcggttagactccaggctgcctcaagaggcggatattaacctcccaggacggaagttccggagccttcaaac

SEQ ID NO: 11703 - DNA, 431 bp, Homo sapiens
  source 1..431: mol_type = other DNA
ttcaagccaaaatttctgtttaattttggaacaatagaaactcctgatcggcacattaaaaattttctttttaaaattttctactagccaaaaggagtttgagcgaacaaaaatattttgccaggtgttatttgaaaagtctttactgatgtaataaaccagaaatggtttctcattggggttttagtgaacattttcccatatttgttaaccaggtttaaaactgtttgatttgaaacccaggaatatctggttcttcaaatatgtgtattatgcgtatatccagtccgcaggcgcggcctctgacactcggtattggcccgcctggccccgcaggagtcggggtgacgccggccagcccagagcggacgatgagagctaggagtggctgcttcattggctgcctttcaccaaggcggtaagtcattggt

SEQ ID NO: 11704 - DNA, 409 bp, Homo sapiens
  source 1..409: mol_type = other DNA
tcatctcctccaggaagctcgcgagagcatgcatctgtgggcctccgctgggtctgggtaataaccaggccgtgcgcctggctcaggcaacttgtaggtatttgtgctaaataaaacaaagctcaaccttttcctcaggatgagcagctcttccaaaaaatacatacgaaaatgtgttattatttttaacctcaaaaccactagcaacttcaataaaacaaattttgggtgtgcttgttaagaatttaggccgggcgcggtgggccacgcctgtaatcccaaaaaccagactggccaacatcaggggaagctaaaattatattaatagatacaaaattcagcttgttacaattattactttttgagtgggagccgctggtaacgctcccctcccgcttgagcttggctt

SEQ ID NO: 11705 - DNA, 419 bp, Homo sapiens
  source 1..419: mol_type = other DNA
cactgcattccagtctgggttcctaagaagaaattgtatgcatttgatgtagttcatagtagtagctgttgtgcatttattcaaggcttaaaaaagaacacagcattatgtattagggctgccataacgcaattaaacaacagaaattatttttttcataattttggaggctgggtctccttgcagacgataccaattgtattggattagggcccttatgacctcatttaactttaattacctccttaaaggccctgtctccaaatagagggaacacagtttgatcggtaatacattagaactgtctatgataatttgcaatggcagcatatacaatttgaataaccttccacaaacttagaagtccaagaagcatttgtcagttcctagaacagttgcttaagtatgtgtcataatag

SEQ ID NO: 11706 - DNA, 631 bp, Homo sapiens
  source 1..631: mol_type = other DNA
acacaaaggacagacgaaaatttccttcttaatataacgtgtatgaacaactaaaattaaataaactatggtttctaaaaataagcagttatattttcttcttaagcaatgaagaacaaagtcagattaatgtagatctatgtttatgaacaagaaaagatcacctttgtttaaagaacagtatacgtgatatggtctaatctttgtttaagaaaaaaactcgagacatatgccaaatggttttctttggatggaagaattattgatggttaaagaaaacactttcttttaattcacactttttataacaagcaacttcattgttgcttgttataggaaatgtcatcagaaagacattttcatttcaatttggtgcaaatgcagatggatcactttcgagaaagtgcaaaattgaatattaaaaggccttctgttttgtacagggacactcagcagatgtggactgagtgactgcagtgtttcaaggtaaacattataagagtaattactagccttttttttgtgtgtgtgtcagagacccagaaaagactttaatacacattggtgatatcacacaggtggatgtctacaaccttgagaatttcacatgcaggtgggaattttcccatgt

SEQ ID NO: 11707 - DNA, 500 bp, Homo sapiens
  source 1..500: mol_type = other DNA
taggaagtataagaaaatcttattatttatttatttatttatttgagggctggagtgcagtggtgcgatcttcacgccattctcctgagtagctgggactaaatcttattattgataaaaccattaagctaatttattcagactaaaacttagtggagtcagaagaattaggcttcagatacataaaagaggccgtgaaattctctggcagggcttgtcattaacttttttattattattctagaggtaattctatgccaggtttataatctgacctctcctaaggataaattccatccaacactgtggaattagcttattcactgaaaaaacactatttaaatttttcagctcctggagcaagttcctgaccttgtaaattgagatgctcaacctttatcacttgaaattggtagggcctgcctgtcacagtcagagttgcaagggtgcttgggaatcacattagcacttgagtcactctcagactctttataaataca

SEQ ID NO: 11708 - DNA, 537 bp, Homo sapiens
  source 1..537: mol_type = other DNA
gcaatggctttagaaagttgttactaaaaatattttcttttgggcaagattgcttaggtatctaacccaccccacctgctaaaaaaatttctaatttagggaatatttaaattaattttctacttacgcctttagaaatgtaagggccagatatgtgctttctattttgtttccagactttagcaagtgcctggaacatagcaggtattcagaggacatttactgagtaaatgattaggtgagtaattaattataagtatagctatgtgtctccgcttcaaatccagccataagctgataattgcagttcataagtatgataattgggtgctcacgcatgcgtgtgtgagatgtgtcaccctcaaaccttgttatgacgtcagcataacaaatccagccattggagatggtgcttccattagccacatgtggctatttaaattttatttaaattaattaaagttaaatacaactccaaaagaggttagtgatagaatatttccattatcacagaaagttctattggaagctatgtca

SEQ ID NO: 11709 - DNA, 551 bp, Homo sapiens
  source 1..551: mol_type = other DNA
gcactatggctctcaccagtgcccaaggtcggggtcctgacacagagcagagcctctctctagggtgagatcagcatccagaacccagtgaattcccctgtgtgggttccagtttctcctggacactgtgcagtcctcacaggggtctgggtctgttcccatgaagggcaaccccgacctcggggccctgtactggggttgggctcctgaccctgctgctgctgcccgggctggactcccacaggaccctaaggccagcaggaggaagtcccacagagggactgccccgcacagggccggggcagcctggacaaagccggtgtggtgacctgctggtctctccaagcagggtccgtgtctgtgcttcacacaggtctaatgggggagagcctgggcctgcctgaggccccagcaggagtggctgcttggagtcctggctccttctaggcagagtcctggctgggactccaggaggcctcgagcccccgctgaccctcaggccccgctggccccagatggtcgggggtggacctgccactttatcatggagg

SEQ ID NO: 11710 - DNA, 565 bp, Homo sapiens
  source 1..565: mol_type = other DNA
tctctagggtgagatcagcatccagaacccagtgaattcccctgtgtgggttccagtttctcctggacactgtgcagtcctcacaggggtctgggtctgttcccatgaagggcaaccccgacctcggggccctgtactggggttgggctcctgaccctgctgctgctgcccgggctggactcccacaggaccctaaggccagcaggaggaagtcccacagagggactgccccgcacagggccggggcagcctggacaaagccggtgtggtgacctgctggtctctccaagcagggtccgtgtctgtgcttcacacaggtctaatgggggagagcctgggcctgcctgaggccccagcaggagtggctgcttggagtcctggctccttctaggcagagtcctggctgggactccaggaggcctcgagcccccgctgaccctcaggccccgctggccccagatggtcgggggtggacctgccactttatcatggagggtgagagggtgtcagagctcagaactcccaccccagcctccccgtgggacaggacccaggtgctggggga

SEQ ID NO: 11711 - DNA, 370 bp, Homo sapiens
  source 1..370: mol_type = other DNA
gtgtgctattattcactaacagacaactggcgaagagcaaaggacaaagggttactgtgttgttcctttcatgtaaaaggaaataataattttgcattttcagatccggaatgggatttctcataaggtgcttattaagtatttgttaaatgaacgagctctatagctagcctaaaagcttttaaagcaccgataattactgtatttacccatgtattttgcataattcgcatattaacttaaccagaaagcccccggctttgcgcaggcgccagcttcccgccctaaggctggagccggcgagccccaggctagccggcgtcccgcgttgccctaacggggcccccattggccggccggggaagacggg

SEQ ID NO: 11712 - DNA, 285 bp, Homo sapiens
  source 1..285: mol_type = other DNA
atcagatttgcattttagaaaaatcaccccaagggtacccgaccccttggtctcattccactgttccacaggggttggtgaaggtagttaataactatcaaattttattatgtaaaagtactcagatcaggccgaatacaattttattctcttttaccctttgcaataggtggcgctgacgcctggcagggagaaggcggcagcacttgtgcgcggacctggcgacgctctagccccgagccgcgtattcgtggccgggtcctccctgggaacagggtgaaggcc

SEQ ID NO: 11713 - DNA, 349 bp, Homo sapiens
  source 1..349: mol_type = other DNA
tcagaaaatgaacactacacttttcaaaggcgtaagggatgccttttaaaggattatggattagaaaacactgttctgtgcagcgcggaccggcgcatgcagcgagcggggctgcgagggcgctgctgtggccaggcgtctggcatgctgaccacgtcgcgctgctgtaaaggaaacctgccccgcgcagcggcggtggctggagcgtggccatacccacgcttcgaacgagggatgggagcaggcgccacggccggcaccccagagccctgctgcccccttggggagggggctcgacacccctgaaggtgccccctaaaggagccactgttagaggggcaccccatcg

SEQ ID NO: 11714 - DNA, 468 bp, Homo sapiens
  source 1..468: mol_type = other DNA
atcttaaatctgtatttcagggaaagaatttctctaggatgtagaatgtaatctaggttagaatttctacccaattagtttcttagctacactcttagacagaatgcacgttaatttagtttcagatggaatcatccaaaaattataaaataggttgggaatggtattacacggtccaaaatctaccctctaaagaccagcctctgggtgattcgggaaccagggaaccgcgcccggggagagcgccttccgcaacgggagggccccgcagtggtcctcccgcctcgctctcttgagactgaggggtccgcagtgctgcgggcgtgggctcccgggtcgcaagccgggagggtcgagccgaagtctccggcgggccgcagtggctgcgtcccgggggccgagggcggccggggagggcgggccttggccccgagtgaaggcgcggcggcccaaccggcgtgagagcgc

SEQ ID NO: 11715 - DNA, 326 bp, Homo sapiens
  source 1..326: mol_type = other DNA
ctgatttcacctaggagagtgtctaatatgtcataaatgttcagcaaatatattgaaataagcaaacactagttttgaatgcacaaatatgtttaaaatttacatttccacttttaaggacaaaacccagtgactatagtctagagtttgggattgcattaatctagaaaatcttctctttaaaggaatgacctggtggatcacaaggtcaagagatcgagaccatcctggcgtcccagcgtgaactgagactgtgccactgcactccagccttgtgacagtcaaaataagagattggcagattttgtttaaatatgcaacacaga

SEQ ID NO: 11716 - DNA, 407 bp, Homo sapiens
  source 1..407: mol_type = other DNA
atcagaatttctcaagatcaaaacgaaaccttctctttaaaaaggaaagaaagtactatcgatacagaaagcgacctctctgtatctatatttagagctgtatgtccatatatttttaaatgacagcaagctcttaaacaccttctgctttatatgatacagagtatggttaagaatatggattcattgaataatcagtgaatcttgtgaatatcattcagtcctcctatatgaaagaaagaaatggtctcgatagagaaaaagttatgctgactctttaaatgaagaaacttgatcctcatgttattcataagggaaactatcccatgaggagtggataagttgtttgacctactgactcatttcataggaattaggaaaacaacctagtgtggtttttattgtta

SEQ ID NO: 11717 - DNA, 258 bp, Homo sapiens
  source 1..258: mol_type = other DNA
ccactaattttgtcatcatttgtaactgactcacagtcccttaaagggtttgtaccataaatcccaaatttctgccttaaagtttttacagacatcgccagatagctattttccattttataaaggaaactgttcagccatgatgaatccggctcggcctggtcaacagtggggccaaggatcccctggggccgcggcctctgcctcgccccctccacccctcccgagtcccggttgcggcgcttccttgaaattgct

SEQ ID NO: 11718 - DNA, 418 bp, Homo sapiens
  source 1..418: mol_type = other DNA
tgcagtggctaagccaaggaataaatatgtcttgatgagaacgttatctagagctgccagataatttagaccaagtcctctaagaagaaggaatagtctttttcctgaagaacttttaggctacaattatgtcagttcaaagtgggcagatttgccaactctgtaaggacttttcaggtctgtgggtgaacgtcattcccgagaggacacgggaccatttccttttcctgtctccatctgagaaaacgccattcccctccaagccccagggaagggcctggaaagcgcttacagacccagtgtcggtcagccgtggcccggcgctgggctgggcggggagcgcgggcggccggggagggcggcggcccctttaagagcaggccacgccccctcccctcctcccgttcgctgccagcgg

SEQ ID NO: 11719 - DNA, 789 bp, Homo sapiens
  source 1..789: mol_type = other DNA
agcctgttttgacccaaaagccctaatctttatagctgttctttatatagcaggaataagagtaataaccactccttgcagagcaattactatattccaggcacggtgcacggtatcagaggcaggtttgccacttacccgttatgtggcctcaggaagtttcttaacctctttttgactcaatattaatatatgtaaagcctggcacacatgttttttaaccatcatctccatttcacaggtaaggaacctacccttggagaggtgaaggagtgaattagtccagcttgcccgctgcacacctagctgcagagagaccccgctcagaagccgtgcgggatgggggccccacaggcaggtgaattgcacttggcaggtgggagatgagcttctccggggtcgctgcagaacgcgcagcagcccgggaggccgtgatgggggtccgcccgctccggatgctcgtagtgcgagggccccggcggtgtgctgggggatcccgccgggcccacttagaagcactcggggggacacaccttcgggacacctgtggacggggcccggctgcaccgcaggagccccccgccctggcccccgcgcaccagccccccaaggcgcggaggccgccggccctcccgcccgtcgcgctccagggcggacacggcccagcgcccgcccagccccggccccggccccgcccggcccggccgccgccgctggcgggctcctgggggagggggaggggcgggggcgggggcgggggccggcgctgacgggacgggccaggagtag

SEQ ID NO: 11720 - DNA, 330 bp, Homo sapiens
  source 1..330: mol_type = other DNA
tgccacttccctcagactaggcagaggtttgggaggtagtgccacccactccccatcagaaaccaccctactggccgggccttgtgcccagcacctgagggtccctccgacggccagcgcccagaggccgaggcggctgagcgcctccctctgagcgcgcgccgtgcgctccggtcaccatcgccaccgccagggtagctccgtgcgggccgaggggacccaggggggtgcgggcggcggcgggtgggagcatgtagggaggcgccccctgccccctctgccggccctcgctctagatgtcagccgcgagctccgagccagcgagagcga

SEQ ID NO: 11721 - DNA, 495 bp, Homo sapiens
  source 1..495: mol_type = other DNA
ctgactcactcagggtgtaaattcatttttttaatggaatgcttcagaaattcattgccaaagcaatcacttttacactgtttttgctgtagcttttctatgtttacatatatttgtacacacaaataccactgtgttacaattgcctacagtatttagtacagtgacatgctgtacatctttgcagcctgggagcaataggttacaccaagtagcccaggtgtgtagtaggctacaccatctgggtttgtgtaagtacactctatgatgtttgcacaaccacagatatctcgaatggcttcattagtatcatgcatctttttcattaaacttgagagaaagattgtgtctctgaacttagtggcctaaatttctagaattatgtcttcaaaaagttgcccagtttgctcccttagcgcgctcaggcgcggggagagaatgtcccatcagcatccgggtcgggtgaaccaatccgggcgccctcgccgagcgggc

SEQ ID NO: 11722 - DNA, 388 bp, Homo sapiens
  source 1..388: mol_type = other DNA
tgttcatttggtcttatgaattaatgactaagccaacggaacttaccggtaaaagtattaacacaaatgtgcattactactaagtatttcatttagcttgaaaaaaaaaaaaaaggaatctgcagtgtggtctgtttgtttttagtacgtgtggttttagaactatctggaaacataaacctaatgtagaaacattagttttacagaatactaaagaaaagcatttctgcttatattcattttcgtattttattggattttttaaaaaatcacttgcactattttggcatcatcagataaatttgatttaaagggtttagctttcctgcgcgcccaggagacggagaaggaaacacgcgcgtcttcacccattggtggagactcctgc

SEQ ID NO: 11723 - DNA, 423 bp, Homo sapiens
  source 1..423: mol_type = other DNA
tccctgcaaggatctctattgtcatcactatggcaataatagttactataattttcattcatgggatttgggtcacataaaatcacactagcataaaatcgtgctttgttatcttgaaagagtattttttttaactgcaaagagagcctgtgcaacaagattaaaataattgccaatgcaggtcacttgactaatataattatttatgggatgctaatagcttttcagacgctttcagatacagtgtcaatttgtccccaaggacaaggcttatcagtttctctttattatctgcaattaaatcataaggacaggaaccatgcctagactgctttagagacattagacactcctgcgatcccactgccccgcctgcagaaggcgagtacgcgcggaggagactacaggccccagaatcctccg

SEQ ID NO: 11724 - DNA, 494 bp, Homo sapiens
  source 1..494: mol_type = other DNA
ataaagtgtgcatacctattttacaaataaagaatagtgccgcactagcttatgtacgtaatatgtgcttaacaaacatttgttcattgagtaagaagtatgccttcttttcacctgattgctgatattggcatttttgcttttcaaagcccccaggtgatttgactgcgcagcaaggctcacctcagcctaattaaatcagaatcatctttaaagctctccaagtgattccaaccaaagatacatatatatatatcagttcaggaagcagagttgtttcagatgctagaacacctccaacgagcagtcacagctctgctgccagcaagtttgttgtgaccctggcggccgagttactcacagcaagacccgcggccgcctatcgcgcgagtcatgccgggcacctcgtccccctgtcctctctggcggagctgcctggcggaagcgccggggctcggacgccccctcggcggtgttggccgcgggagaagggg

SEQ ID NO: 11725 - DNA, 186 bp, Homo sapiens
  source 1..186: mol_type = other DNA
cacctggtatctactaaaaatacagaatatatatatattctgtatatatatatatatatatatatatatatatatatatatatatatgccaggtgtggtggtgagcacctgtaatcccagctactcaggcgctttcgtgccattgcactcttggaatgcttgttccaggggaaacaagttaccatt

SEQ ID NO: 11726 - DNA, 469 bp, Homo sapiens
  source 1..469: mol_type = other DNA
cttcaaggatcttcaagtgacttttcttgatcaatttactattttgtaccttctaatttgaaatactggaagctacaatattagagtcaacagttactgtactggaactcactttccaaagactgatgaaattgattctgaatggacagccttactttccaaattgtctgggcaaacccatattttgtgaaggtgctttgcaaaaggattgcaagccatttttctggcatgcacctttgtctaagaacaaagtgcggtaaactatatgtgtagtcagtatgattcacatagaccaaaactctaaagcattcgctttcccaccatcctttctgccacgcggggcgcgggcgagcgttgggggcggaaatgccactaggaccaggcggaagaagcatccccgccgacccttggggaaggccgccgcggcacccccagcgaggctccttcgcgcagcggcgcgccaaccgcg

SEQ ID NO: 11727 - DNA, 290 bp, Homo sapiens
  source 1..290: mol_type = other DNA
gacgtcagacgccgtgatgaaggtttcttcctgttacagaaggaggcgagtttcggtgcatctattctcagatgcttccatgccaggtgcaagtcatgcatctcatctgggagttacatttctgattgacaaaacaattactcttagtttgacagcaatgcatcgggcccaccagaataatccaggataatccacccctgtgtttctcataagagtataaacttaggattcaaaatgtttggagtacacatattccccatgggaaacgctctaatgcttttccaaatttg

SEQ ID NO: 11728 - DNA, 320 bp, Homo sapiens
  source 1..320: mol_type = other DNA
tggccctggcctgtcatggcgtgtcacagcatggcacaggcctacctgcaattgcaacttttaaaattgaaacgctgcttcctctatttcacagaggaaaccatcacagggaaagcaagcccttgttttttcttccggtctcactgtctgtgctggattgcaactcccaagtagctgggattgcagatattgaatttgttgactcatcctgaacaagcagaactttgcacaaggttgccatgtttaataattcattcacagaagctactgtggccaggctccaactcctcccactgtagatagcagcagccttcttaagc

SEQ ID NO: 11729 - DNA, 254 bp, Homo sapiens
  source 1..254: mol_type = other DNA
actctaagtatccatctccaattgccagaagagatagctattgtactcttgcagatcaaattgtgataccctatcttgttttatctgattgactctttcttagctgagagagtcaatagcttgggagactcaattgagagtcaatatcgagagagccagcagctcctggggaccgagagaatttcaagctctagctcaataaaggactcctgaattagtctcagagtgtggcattctctctagaagacctgact

SEQ ID NO: 11730 - DNA, 304 bp, Homo sapiens
  source 1..304: mol_type = other DNA
gtgtcacaaacctaatgcatttgttaggaggatagcttctaagaagggaatctcgacacatatgcttcaaaacctcgtgtggtagttcaagcctgcttagaagcttttaaggcctaagcttttagggcattttactgcctataaattgggcactttaaaggcatttgttttaatcacaacttttaagacgttaaacgctttctagaacctcaaacacgctggcgtcgaagccaaatgtgctcgtcaagagacctctcctgttccgggagtaggccgggaccgtggccctaggacctgcccacgt

SEQ ID NO: 11731 - DNA, 320 bp, Homo sapiens
  source 1..320: mol_type = other DNA
atgatgtttcagtcaagcacatctgatatgttgactgatattggctttccatatgaaaaaacataagtaacaatatgtataccatttgtgtaagtacattctatgttgtttgcacgacaaaatcacctaatgatgcatttaatcacctcaatttgattgaaatataaagccttattttaaagactgttttcccttcagaatctctaggaattactaaagaaaggtagaaactagatctagattccaatcaattttggtgactcacagtttaagtataatctttacaacccagtgtgcaaaaagatcttcaggccagcagc

SEQ ID NO: 11732 - DNA, 443 bp, Homo sapiens
  source 1..443: mol_type = other DNA
tcattgattttctactccagaatgattgtaaatgactgtatttgctgtggcctggccacagggttcaggaagcctttccccagggcaacactgggttgtacttccctgcctgccctgctctgtaggggagcacgggctctaggcagggcatcccatagagggccacccatgggcttcctataggggccaccctgcatgtgaagggtgccagtgtggcccagcagtgaaccccccaggctggtgtcaggctgactggagccctccggcaaggtttcgaacctctctggctgagttcaaagagttgtgagaattacacagtgtgctgctggtgccacccagatatgtgatcaaacacaggtattttttaggtgattcacatttaaattacactaagagtaaagtagttatcctggatgtggttaggcctcatcacaaaggcctta

SEQ ID NO: 11733 - DNA, 318 bp, Homo sapiens
  source 1..318: mol_type = other DNA
gggatatatgcatctgaatttctaggaatttctagtactccttaggtttattctggccagtattaccgcaagaatttagtctgctcagcagacccggtagaattgcataacaatttaaactcattttgtatgtgcaagtactttgaaaagaaatatactattaaaactgatctgttaaaagattaacatttcttatgattgttcctgacaatggattcacttccagaggccctgctaaggatttcctgagcatgcctagggaatgacaggcatctccacaggcaggctgcatccaccttgctaaacataggggatatg

SEQ ID NO: 11734 - DNA, 597 bp, Homo sapiens
  source 1..597: mol_type = other DNA
taaattttaaaaggtaaaattgtttgcttatagacggtgctattgctatagttattcaagaggcactttatatgcaagagtctacctcgagtccaggagtttagaccctactgcccacagggctgtcctcacacactcctgccctgtggtcagaacaggagcctaccccagggagaagggccctgggatgccctcttagggtttccattcagataattacagactagattggaaagtgtagaaaaatttctttatggtcgatgaaataataagaaggatcaaataaacaccaagatttgaatttctaaagatttataagcagcattaataataccctagaggataaaaaaggggaaaaattcaaacattgtatagttttgcttttgtttggggtttttttagaggggaaaaaacctttgaaaataaaataattggacaatttatttaagaaggtttctgaacttggcttcaaaatctaagttttgttttttgctccttcaaacaaagatgccttcaggtgtgatggcttttctcatgtgcacatactaggattccagaggaagtggaggcctttaagattccaggctgagtttaact

SEQ ID NO: 11735 - DNA, 447 bp, Homo sapiens
  source 1..447: mol_type = other DNA
agagaataatcttaactctattgtggagatcggatttgttctcacttgacagaaagccagtcccacgagcagcttggtacccaaataccagtctgtttagtgctcattagagatgaagaaccatattcatacctcaggaactgggatttggctgctttcacagattctcagtgggaactgtttgctttggaagagaactgcacccggaattaggttgtatatgcatgtaataccatgatcaactgctgagcaaatgcatttttcctttgaccagttacttaccttggaaaaattatttgtagttaagcatataaagtcttcatcaggaaaactactggagatcctggccctgactacccagcaataacatttctggaactcccgaagcaatcagtgctctctgatcgctaaacatgtctattagagagattcaatcagctctctgat

SEQ ID NO: 11736 - DNA, 360 bp, Homo sapiens
  source 1..360: mol_type = other DNA
cctcaggaactgggatttggctgctttcacagattctcagtgggaactgtttgctttggaagagaactgcacccggaattaggttgtatatgcatgtaataccatgatcaactgctgagcaaatgcatttttcctttgaccagttacttaccttggaaaaattatttgtagttaagcatataaagtcttcatcaggaaaactactggagatcctggccctgactacccagcaataacatttctggaactcccgaagcaatcagtgctctctgatcgctaaacatgtctattagagagattcaatcagctctctgattgttcgcccctccgcgggcccagcccacgccctgaccgcccggc

SEQ ID NO: 11737 - DNA, 307 bp, Homo sapiens
  source 1..307: mol_type = other DNA
agataagaaattgatgctcaaagagattaaataatttgctagtatgtaaactcctccttaacccacagttgaaatttccagttggtcatgtgagcaacttacaaaaataaaagctttgttcggctcttattttgaaataaaatagatgttcactgcagtgagaatgctcaggacacaaagttttgtggccacactggtgaataagatataatcaagacatttacctggctctttaaatctaatggacaataaaaagttgtttacatacctcatttctgaaaagtcatgggccactggcaacaaatgt

SEQ ID NO: 11738 - DNA, 555 bp, Homo sapiens
  source 1..555: mol_type = other DNA
ttcatacttttaaactgctattttcagatacttacaaaatacaaagagattatgttaacatcacgaatctcatgacatataacgctttgtgaaaagtgtttatttacattcttatatcatcaaaatctagactttttttcagctgtacttggaaaacttttccaaatagattaccttaccctgtagagctaaagatgagggaaatatgggatgttcatgaataacgtctgttaactaaatgagactacatatagtgatttgcagtcatcaggaaaacatatgctagctgacgattgctataaagaatctctgagctgataattttgagtatttaaggagaaattttccagaatcgaataagcgaattatagtctgtaaaaaatcaagaccaacgtactttttaatattctaacatctccaagtagtagttacaagtattgtacccatgaagtccaggtaattaatttgttcaatgtcacacttgctctactgcctcctctgaggcaacagccgaagtgcatggaaagcctctctgagagcctctctgaccgccct

SEQ ID NO: 11739 - DNA, 340 bp, Homo sapiens
  source 1..340: mol_type = other DNA
atcctaatttatagcgcagatgggaatgtattcatacacagcctgagcagctgagcaggtgctggactgcaagaattccaagttcaagttccaagtcgcattgctctacattaaaagtcctggcgtctggcaggagctgccgcaaggtggctgatgcaatctccccgaggagccacattaatttttaaaaaggcagctgttttcaaagcaaaacgtttaataattttttttggaactggtcctgaacaatggaggaggtcaaaccttcttttccacagcatgatggtatatataggcttttacaaacatttactaaataagcaaaaaatttttgggacct

SEQ ID NO: 11740 - DNA, 706 bp, Homo sapiens
  source 1..706: mol_type = other DNA
agctggaactactgccttaaaatccgagctccccttctgtcgcttttaagagctcacaacactaaaatttcacatgaaagggtcgttctatagactggaatctatgaataacatagtcatgagttggccaggcaggcccaggtccagttttgggcctggcgctgggctgatttcacttccttttttttttaaaaaaaaaaaaaaaaacaggtactagagggtctctctcgagggctgaaattctttctagccttggatattgttatttctcttactataattttactattagtacttacgctattctattattttcttaattttccacttaattaggataacaaaccgaggccgggctcccatcctcctcaagcacacgaggggggcctggcccagcagggagcttcgcctggtttctgagggaattcccggcgggcctttccaaaacatgcccggctaacttcaggggccaagaattgaacctcaagccggtggcgctgcctcgctggcgttcccagcgcgcagccaaccggatgccagccggcggcattaccactgccagcatggggcgcccgcggacctccgactgaggcagctgccgggagccggaagtgtcccgggcgccgggactgcgagggggccgggagttccccaagaccggaagtgtcccgaggccgggagcccgcgggaccccggagcgcgcggg

SEQ ID NO: 11741 - DNA, 523 bp, Homo sapiens
  source 1..523: mol_type = other DNA
ggggccaagaccctggcctcccaaaattattttttatttttaaaactttggaaaaaatattttcaatcctcgttggttgaatccgtgaatgcggaacccgagtgtataatcttcctgaatttaaaaaatgtacacacatacatacctaatttttttttcacaagaaaccagctatgaaatttgcctatcctacacgcgtgttgtggcttcacgggctccagcttcctccgtgtaggaggagggcaggggaccgggagctctgcgatgagggcgccttgtttgacgtgggtggcagccgccactttcagtaattcagacaaagccgccgccggcgccgccaggacctcccctcgccactcctcgggaggggtaagggtgactgcgggctggggctggctcaggggcggggcctcgggcggggagccggccgaggggcggggcctcaggctggtcgcccagtgcgtgcgggctggtaggcctgtcgcggcgtgacgtgctcggcgcccgcgtccggccccgcccc

SEQ ID NO: 11742 - DNA, 366 bp, Homo sapiens
  source 1..366: mol_type = other DNA
tcattgagtatttgctgtatgagtgggtgaagaatacatgcaataagcaaagtagtttgtaaacttgcacacagctgtgctggctggacaatctgcacagaacaggcgcctgtttcaccccgccccctttagatatccctggtgggcggggcagagaataaacattccgggctccccgaaaaactgtttagcctcgccccagtcttggggtacgtgaggtgggcgatcccctccgccctctgagagaggacttcaactcccggcgtgcccctgggaggttaccctccgaggacttcaactcccagggtgctgcgggagcggccaccgcaacctcccactccccgcccctcctggccggatcagcgt

SEQ ID NO: 11743 - DNA, 418 bp, Homo sapiens
  source 1..418: mol_type = other DNA
ataaatagttataatcatatcattttcccaatagaatggtttgcagggattaaatgagataatggctataaaatttttcttaatacatagctgtaaatagcaatgattatttacattttagtttgaaaatcagcaaactaaaatttaacagctgaagaaagagttcagctactttgggtgctcggtagaatgtctggaatctgtttcaaattctaattttgtatccgtttgaaaattttataattaaaaattatgatttgtttcgctctacgcaactatgttgacagaatatatttggtaaactgaaatgtcatttaatttacggcttttataatgtcataaatgggcgtcattttaataactactctgagttatttgaatgggaataatcccaatgaaaattctcccggggcctcca

SEQ ID NO: 11744 - DNA, 457 bp, Homo sapiens
  source 1..457: mol_type = other DNA
tcttgtacagtttaaaccaccaacctctcaactgggcctgcatgaaagcccgatgggtgtccttctgacccacactcagatcatgctaaggatgtcattttgttccctaaaacccatctttggggaggcagatttgagatctgttctcccgtctcggcgtgcggcacacggcagcatgggccccatacggtaccagcatgcggagctttgagagctacgctgggcccaagtagaggatgctgggacccccttctaggttagagagccccctgggcctcggcccagggaggcgggatgctcaaggatgcccagccaggctcgggacttgctcttcgcaagtcctgtcgcgcgctcgctgccccgccggttcaggcggtgaggccaacgcgctccgccagggggaacctgggcgctgcgggggcgtggcgtgacccggaagtcgacgaggggttccgcc

SEQ ID NO: 11745 - DNA, 283 bp, Homo sapiens
  source 1..283: mol_type = other DNA
ccaagaaccaccgttctgagaaaagaagctaacaacttcttccaatctgtaaacaggagaaattccagagttcaactgcagctaagaccttgtcccccaaagaaggtcttcggtttcctttttggagaggcaaacgatcttttgaggcaaattctccagaagtaattacgatgatggttaagcttagcaggctgcctaggttctgcggaatcagcaggcccccgctgtgaccaatcaagagcggccgcggaccagcaagttttgtcctttgataaaaaggaat

SEQ ID NO: 11746 - DNA, 473 bp, Homo sapiens
  source 1..473: mol_type = other DNA
gttggatgacataatctttaagtgtccttcaagctttagcattccctatcatttcagagaagacactcccattttgcttgggaaaatcaaagtggcttggccccaggtctaggcacagcccagaaatgggagcatcaccaatgtgagttgtggggcttggccccaggtctaggcacagcccagaaatgggagcatcaccaatgtgagttgggggtccccgtgggctcctgcagaacctgggcagaccagacacaggctctaggcgccaatgtcctagtctagctccagggccaggactcagcccaggcaccacaagattttgctgtcctgaaggcaacttcaaccagccctggtgtctgccaggcaggctcccgagagcgggtctgtttgttaaagaaaatccggtccaacacatggaactcaagtacagaaattatatttcccgtgagtcactccagatgtgctcaaaaaca

SEQ ID NO: 11747 - DNA, 568 bp, Homo sapiens
  source 1..568: mol_type = other DNA
gaaaacaatcacaaagtagtggtttaaatactttgttgtattctgtcttaatgcagcctattaagagttgggttaaaaatcagtaatcagtactttattacatcactgaactaaaatatggagacatcctcattgaaaatgataatgctatttaaaggcttgaatttattcatggtatggaaaccatgttaattatgaagcgattgcttgagaagaccaagatggttcacagtttctttttttaactaggttatttataatgtatttctgaaccacttggcagacaaattcacaacacttaatgttcatattttgagtaaaggaagctaaaaccatgtttgctttctggtactacatgcaaaaggttaagtaagttttgttctccactgaagtaatacttaacatctcagaaaaaattttgcatgttctgtagttttgtattaaatcagtcatttcatatgcactatatcaagtacaaacaggtagtttacctgtttatagtagtgtactaatataggcttatcgttcaaattctacgcatagctcacctttctaaacccagttaagc

SEQ ID NO: 11748 - DNA, 452 bp, Homo sapiens
  source 1..452: mol_type = other DNA
agttaatgtgtttagtgggttacaaataatagattatatatatgagttttatatatagtaatagttatatatgtatatatattatacgtatatttctagctccaataagagcttttattgttaaaaaacgcaaattgtactagacagtttggtttgctccactttacggcatcaaactgaatgcctggacgtcatttgctggtcaggaagatgagttaattttttttttcctgccacacacttaagttttttgctccagggaacattatacatagtgttaacacactcaatttacattgtagtttcgtttttagcccagtcagactggatgacggaacactcttcctatacatttttagaagctgagcaagattatgttttttaaaaagtaaagtttttcccacagcctgtacattgcgcatgcgcactagtggcgttcgcgccgcggaccc

SEQ ID NO: 11749 - DNA, 321 bp, Homo sapiens
  source 1..321: mol_type = other DNA
ttctgaatatagatatagatacagatatagatatagatatattctgtagtctactgcccattagctgaagaaaacatggtcactggctcatatttaaagtaagagaaaaaaattacttctccttcggatacaaatctgtgaatagttcagcacaattatatatttacaaagcatattagtctaacattttcccacctggaaaaactggagaatagggagcgcgcgcgggcacatccaggctgcgggttggccagagcctggaaatcgcagatttcaccaggaattctacttccccaagcactttggtgaagaaataccagg

SEQ ID NO: 11750 - DNA, 647 bp, Homo sapiens
  source 1..647: mol_type = other DNA
tgagatatatatatatattttctggatatatatatattttctggatatatatatattctggacatatatatattctggatatatatatcctggacatatatatatatattctggatatatatatcctggacatatatatatatatatattctggatatatatatatatattctggatatatatatcctggacatatatatatatatatatatatatatatatatattctggatatatatatcctggacatatatatatatatatattctggatatatatatattctggatatatatatatattctggatatatatatatatattctggatatatatatatatattctggatatatatatctatatattctggatatatatatcctggacatatatatatatattctagatatatatattctggatatacacatattctgaatatagatatagatacagatatagatatagatatattctgtagtctactgcccattagctgaagaaaacatggtcactggctcatatttaaagtaagagaaaaaaattacttctccttcggatacaaatctgtgaatagttcagcacaattatatatttacaaagcatattagtctaacattttcccacctggaaaaactggagaat

SEQ ID NO: 11751 - DNA, 297 bp, Homo sapiens
  source 1..297: mol_type = other DNA
gaatttgtataatacatcttaatccttttacacatacaagttttacaaacctcagagtttgagctactttgacgaatctctttgtgacaattgagaaaaagtactttgtacattttttccattctgaatatcattaaaggattaaaatgtaacctaaaatgccatcaattgtccatttaaaatatcctatttggcaaagtggcttaaatgttgtgtttcgtctctgctaaaaacaaaacaaggtaccactccgcagggagagactgcccctggcctgtcagggaattgagtcaaagg

SEQ ID NO: 11752 - DNA, 350 bp, Homo sapiens
  source 1..350: mol_type = other DNA
aaatgccatggcagtgtcaagaaccctcagttccgggagctgccacttccactggctttgcaactgagatccaagaactgatgttttacagcataatcactgatgtatacaattttagtatatacccatctgaataaagggtgatatttgtaattgagtagaaatcatctcatgcttactttatcagccctatagagtcaatcaagccagcattgttcacctaactggtagctagctgtatgttacatttgtatatgttaacataaagctgaagaacagaaagaaaatggatagctctttgttcaatggaaaaatgccaaaaaaaaatgctaatgtgcgtttctccacac

SEQ ID NO: 11753 - DNA, 405 bp, Homo sapiens
  source 1..405: mol_type = other DNA
tcacctaagggtgcagtgagccacaccattaaaaagaaaaaaaaaagaatatacttttgacatctttccctgtgagactataataaatctactttattgtatctaatgataggatagtatcccataatatggatataagtttatctatcgtaatgttgctaaaacatttgttggttcaaagtagatgtgccaatcaagaatttgcccacttataagtaactacacacatcttgtgtgcacatgcaccgacatacatattatcacctgaaagtgagcactaaattaattctaaaattcatttgaggatttggcaccatgaagttgcatagccacatagtcagtatttccttgcctggaatgaatcgaattttgatctaagctttaaagatcatagcttcgtgactt

SEQ ID NO: 11754 - DNA, 360 bp, Homo sapiens
  source 1..360: mol_type = other DNA
tagcaatttccactttctgaatttaaatgtttcaattctcaatttcctagagctgcactaatataaatgtatgtgcatgaggaatatttgtatttttgtataatatgtaatccattaaaaaaattccgagagattcaaatgaactaaagtactcgaaaatgtcaacaactctcgcgccccctgtcggcgcgctggtaaatttctgaggattctcaggtcagctgtaggcgacagcagacagcgggcgttcctcggtgacgtcacagacactccccggctacatccaaggcgtgggcggagacttcccgcggcctctgcctttatatccaattggccgcagctgggtcctggagcagagcc

SEQ ID NO: 11755 - DNA, 377 bp, Homo sapiens
  source 1..377: mol_type = other DNA
tctagtccagtttaactggtgataagcttaacttgtgatacccaggaagtcctagaaaatgtctagtctcccctgaccaataaatttccattatagtttaagagaatttaagatagatgtgtgtattagttcattctcacactgctaataaaggggaggcctcacccatgacattggggattgtgggagccaaaagcatcctaactgatagaggccagacagatttgtttctttttgttttttaatttttgtgaagaagtaagcataaactctcaataggttacgttttagtcaaagcttaggatttccaggacaacctgcaggttgagaaataggtgtgttaatctataggccctaggacacctttctaaaaagac

SEQ ID NO: 11756 - DNA, 490 bp, Homo sapiens
  source 1..490: mol_type = other DNA
aagtttgaattatttgtttatttttgcttaatgatgctatatttatgcaataaaaacatttgtcaatctgtattaattagtcacttaaaaagcaaatcactgactttaaaaattaatttcacctttttcattggggaaaccctttaaaaatttccaactactcattcattctagagatgagtaaacacagtattttaaaaaattatttcaaatcagttttccaagcagttacttaattaacggcattgagtagtggcgtccggagggggcggggctgggcaagcacctcccacttcccaacctcccgccgcggccgacggagcctcgcgggctccaacaggtcccgccccctcgccaggcgcggccgctattgggcggcgcgctccacaccgaagcctcaggctgggcgtattccacgagcgcctcggcggttggcgaagcggacggggtgcagcctccccggtgcgaggaacggtctccgctgacagat

SEQ ID NO: 11757 - DNA, 428 bp, Homo sapiens
  source 1..428: mol_type = other DNA
aaaagctgcgccattttttgagtgaaaaagtttgaattatttgtttatttttgcttaatgatgctatatttatgcaataaaaacatttgtcaatctgtattaattagtcacttaaaaagcaaatcactgactttaaaaattaatttcacctttttcattggggaaaccctttaaaaatttccaactactcattcattctagagatgagtaaacacagtattttaaaaaattatttcaaatcagttttccaagcagttacttaattaacggcattgagtagtggcgtccggagggggcggggctgggcaagcacctcccacttcccaacctcccgccgcggccgacggagcctcgcgggctccaacaggtcccgccccctcgccaggcgcggccgctattgggcggcgcgctccacaccgaagcctcag

SEQ ID NO: 11758 - DNA, 148 bp, Homo sapiens
  source 1..148: mol_type = other DNA
aagaaacgctttgtgtgttgcttaaatcagaaacagtggagtcatgtcatgtattaaagcgcgcgcccgatggtgctcgagggttaggcgcgcgcgcccgataaagggtcccgccttaggcacgcgcccaatgggtcagaggcgtgcc

SEQ ID NO: 11759 - DNA, 230 bp, Homo sapiens
  source 1..230: mol_type = other DNA
agtctccctcaagctggaatgcaggggtcttgaaccctgacttcaagtggctgggactacagggtgcatcagcagatgtggcctccactgttgaaacccaccctcaaacacggttctggggttgaatgagcccaaatattgagcatccatgctacacctgcagatgtttctcaataaggacaatatttgcgctcaggggagaagggcacagcttgcccctcccttccttc

SEQ ID NO: 11760 - DNA, 241 bp, Homo sapiens
  source 1..241: mol_type = other DNA
ttgacaagcactatgattgaagctggacctgggttcaggctcagcggctcaagagtgcacgtcttgaacctcaacacgtgagttgcagaacccggcctggcagggcaaggcaggggatgtagatcacccgaaatggggagataacccagcatttccagtgccggtgggagacagtgaatggcagccctcctggcagtcaggaaggccaagagaggtctgccttagctgagatctgatctcc

SEQ ID NO: 11761 - DNA, 717 bp, Homo sapiens
  source 1..717: mol_type = other DNA
ggcgtggacgtgcctggcacacagtaggtacttgacagatgtcaacgcctggccttagccgcctgctcaaggcctgctaagtgcagggtcccgcgggcctcccaggccctgagcgcagggtcgcttcccgaagacccgcagaggccgcaccttcttaaggcaggaaggcgggggagagctgcgtgcgctctgctcgcccctgccttgcacgctgagctctagcgcaggagcccgcctccgcggccccgaggctgtcctgagagcgcggcgccccacacacctgctgcccgcaaggagtcggcgggagaggaggagcgagggaggcgagaggacccctcccccggcttgccggcctaccctgatccgggcgccccggggaacgcgcggcgggacccggggttgggtgcgggtcggggcggcaccgcccggcccaggccccccgagcccctcgcgctccctccggaaggcgggtcctgggggagggctgggccgcgccgcctcgccgcccttgccgcctctgccgcgccgagccccgcgcacgctgccccggccgccccgcaggcaggcaggcaggcaggcaggcaggcgtccggccggccgggagggggtgctcgccgtcccgcgcccgggcccgcgcgttgccgggcagcggctccgaggctccgaagggggcggagcggcaaggcgggcgtgcggctggcgcccctgtcctcggtt

SEQ ID NO: 11762 - DNA, 197 bp, Homo sapiens
  source 1..197: mol_type = other DNA
gctctaaagaaatttttaaaaaaatacaaacacttacctttgtgtgttttattacactggtcggacttgcctgagaccagcagtgaaccgaggtggagccactgcactccagcctaattgctgacaaccattttaaaccctgggacacaagtcaaagtgtttaagaatgggccaagtgtaaacattcattaattcaa

SEQ ID NO: 11763 - DNA, 488 bp, Homo sapiens
  source 1..488: mol_type = other DNA
aatccacatttgcaatgtaaaatttcctcatagctacattaggaaagtagaagcaacacatgaagttgtcataacattttatttatccaaatatatccaaaatattatgtttaacatgtgattcatataaagttagtgagatattttacattctttttctcaccccgcggggtggcttcatgaggtgggaggatcgcttgagcccaggagttccaggctgcagcgaactacaggcagccacatgtggctagtggccacctcccgcgaagccctcaaggccaggcttcgccctgaacggtgcctgggcggagcagacgctccatcaacgctgtccccgcctgagtccacgtccaggggatccgcaggcgccgtaccctgcttccacgcgccggggccgcccctcgcccggcctcccgcaggcccacccctcgccaggcccaggcccatccccgggctgttcgcgacgtgactgggaggagcctgcccgc

SEQ ID NO: 11764 - DNA, 481 bp, Homo sapiens
  source 1..481: mol_type = other DNA
tttcacttaaaaacaatctttatggaagtacgtccccacggtggaaaagttcttgtccaatcaagaccatgtcaagaagtggtttgtccaacacatcggggcctggggtaccacgatctggggggaacttcctcaagttcagggtgaggataataatatgagcgcacggctcgcaggaagcgctcgctagggtctgctctttccgggaatgggtggggtgcgcactcctcaacatcggctggcttggtcgcggagcccggctggagaacctcaccctcgccgagcctagaaccgagagggggccaccccaggcggtcaccagccggccggctgtaaagagatctagcctcttgacctgagagccgagagtggatcgctgggctgggctaacggcgacggagagcgcgccctcgctgactccgggcgcgcccagcagtagcaccgcccgcgcccgcccctggacacttgtaatttccgcgga

SEQ ID NO: 11765 - DNA, 427 bp, Homo sapiens
  source 1..427: mol_type = other DNA
gcacaccaccatgcccgggttgtttttattattattattattattattattattattattattattattattgaagagagcctaaagcgctgggattacgggctgagccacagcacccagcccattggggataagggaagtttcattaagatttctttctacatcttctgtagctcaatgttttcacttaaaaacaatctttatgggaagtacgtccccacggtggaaaagttcttgtccaatcaagaccatgtcaagaagtggtttgtccaacacatcggggcctggggtaccacgatctggggggaacttcctcaagttcagggtgaggataataatatgagcgcacggctcgcaggaagcgctcgctagggtctgctctttccgggaatgggtggggtgcgcactcctcaacatcggctggctt

SEQ ID NO: 11766 - DNA, 441 bp, Homo sapiens
  source 1..441: mol_type = other DNA
ttttttattctttattcagactaaatgacgttttacaatagaatattaaaattacagtgtaatcaatagtagtgaattgaatcttctcatctagaaaatgctgtaattacgtacagcactcctgtttttggtgcatcagggagcactgatcaccattctttgctgtcagtgttggttattttaggctgacattagttaactaacaagatgttagttcttcaactctaacattccacgatttcgtgaatttaaagacatagataaattaagtcatccaatcgacaaatatttattacagttctctattaaagaaaatttctttcccagaaaacttgcatttgaaaaacaatgccattccaattcgccttttcctctcctcccaagaggaacctcggctcttccgcggcagaagctgcaaccaagaagccgcgggcgctggtt

SEQ ID NO: 11767 - DNA, 464 bp, Homo sapiens
  source 1..464: mol_type = other DNA
tgtttttaaagttttctccacttaaaagcatacggctaagacagaaaaaatagtttctgttaaacagaatgttgttgcggcctcctgagtcgctgggctcaggatttcaccatgttggccaggctggtctcgaactcctgaccccaggtgttataaaatctccttatggtaggaaatgaaatttactcttgatttctcatcagaaccatttgtcattaagaatagaaaggaatagtagcagtgatccttaaatttttcttagcaggtgatatatttagaatatactttattatttcagaagtttttttcttacaccaaattatcagaactaatttttatttcagatagtaaccttttctaaatttattttacaaacatccttattgtggatgaatttctttgacatttatagagttaaagacaacaggatatagcggaaacttttttgttttttaatctagtat

SEQ ID NO: 11768 - DNA, 462 bp, Homo sapiens
  source 1..462: mol_type = other DNA
cgcggcaggcgccatctaacggccgctggagcaaagctcctcctgtctcgaagatccggccaatttgcccagcgcgctgtgctccgcgacggcgcatgcccgcttttgcgcaggcgcggggactacggcgcaggcgcggagactattgcgcaggcaagcgcgtacgcagaagcgtgcgcgcgcccgttcaacgtccggagcatacgtcacccctcacgtgggcgctaggtgtggtaagccccagtggcctaatggataaggcattggcctcctaagccaccttttttcccctttctaaacaaagcgaaatatgccaactttactttttttttttttaaagaatctgcacacacctttgtctgagccgcaggtcccctgggattgaattttgatatcccttttataaatcatttaaaaatgtcttctgagactcaatgagtttccccaaacccttgttctggg

SEQ ID NO: 11769 - DNA, 338 bp, Homo sapiens
  source 1..338: mol_type = other DNA
ctttataagtgatttgttcgttatacaattaggaacagaaccaaaaaatgaactgctaatttttaaaattaattcctaatcaatgtacaattcaaaggacacggcacatgtttcttttctcctgcctcagcctccggagtagctgggattggtattacaggcgtgcgcccgcggcaggcgccatctaacggccgctggagcaaagctcctcctgtctcgaagatccggccaatttgcccagcgcgctgtgctccgcgacggcgcatgcccgcttttgcgcaggcgcggggactacggcgcaggcgcggagactattgcgcaggcaagcgcgtacgcag

SEQ ID NO: 11770 - DNA, 454 bp, Homo sapiens
  source 1..454: mol_type = other DNA
tccggccaatttgcccagcgcgctgtgctccgcgacggcgcatgcccgcttttgcgcaggcgcggggactacggcgcaggcgcggagactattgcgcaggcaagcgcgtacgcagaagcgtgcgcgcgcccgttcaacgtccggagcatacgtcacccctcacgtgggcgctaggtgtggtaagccccagtggcctaatggataaggcattggcctcctaagccaccttttttcccctttctaaacaaagcgaaatatgccaactttactttttttttttttaaagaatctgcacacacctttgtctgagccgcaggtcccctgggattgaattttgatatcccttttataaatcatttaaaaatgtcttctgagactcaatgagtttccccaaacccttgttctgggttagaggcaacggacaagtgagcggttccactgctcgtcagtcgat

SEQ ID NO: 11771 - DNA, 449 bp, Homo sapiens
  source 1..449: mol_type = other DNA
taatttatgtcctttcaaagtatctagaaagtgcctgtctttaaacatttggacctatgtcttacttaaggaattttcagcctcccgagtagctggggaggcgcccgccatcacgcccgctcaggcaatccacctcccttggcctcccaaagtgcggggtttaaatattttactaaaacagtttttagaaaggggtagaactgaagccaaggccccagtcacgggccgggcttcagaatccaggcttccctgcggccagcgccgctggctccctgctccccgagatcgcctccccagtagctgagaatacgctgagtcccagccgaggagccttaaagccccacgcagcggaaggaacgcggccccggcggcggcgagacaggcctgctcccggccgggaaaggcgcacgagaaccaggacgcgtccacgccactcggggcgggcgttc

SEQ ID NO: 11772 - DNA, 540 bp, Homo sapiens
  source 1..540: mol_type = other DNA
aatattttactaaaacagtttttagaaaggggtagaactgaagccaaggccccagtcacgggccgggcttcagaatccaggcttccctgcggccagcgccgctggctccctgctccccgagatcgcctccccagtagctgagaatacgctgagtcccagccgaggagccttaaagccccacgcagcggaaggaacgcggccccggcggcggcgagacaggcctgctcccggccgggaaaggcgcacgagaaccaggacgcgtccacgccactcggggcgggcgttcgccccgagcacgcccacctcagacgccaaggaggctgaccgcagtccggtcgacgatgggcatggccgcgggcagcgcagccttagccgccagccctacagccgggagcgggaggagcgcgcgtgcacgcgcccagagccgttagggtggaactccactcgggcggggcgggcggagtgatacaccccgcgggaaacgactgagcgcgaggagcgtgcgcgctcccgtcgtggcgacggtggcggcgagcggcg

SEQ ID NO: 11773 - DNA, 568 bp, Homo sapiens
  source 1..568: mol_type = other DNA
tcccagccgaggagccttaaagccccacgcagcggaaggaacgcggccccggcggcggcgagacaggcctgctcccggccgggaaaggcgcacgagaaccaggacgcgtccacgccactcggggcgggcgttcgccccgagcacgcccacctcagacgccaaggaggctgaccgcagtccggtcgacgatgggcatggccgcgggcagcgcagccttagccgccagccctacagccgggagcgggaggagcgcgcgtgcacgcgcccagagccgttagggtggaactccactcgggcggggcgggcggagtgatacaccccgcgggaaacgactgagcgcgaggagcgtgcgcgctcccgtcgtggcgacggtggcggcgagcggcggaaccgacgaggggggctgtcgtcttccacgtacacgtcgtcgtgaggagcgcagtccggactcttcccgcaacccctccggctccctttccgcacgcctcgaggcggcggcggccaccgagacagcagcaagggcccggtctgcgccccccgcccgtccgcccgctacgccgccgccatg

SEQ ID NO: 11774 - DNA, 517 bp, Homo sapiens
  source 1..517: mol_type = other DNA
aaagttaacattaacttaaaatgccactggagaaacttttaactgttatcatttctcacgtttagataagaatggttattgatagctaacagaataactaatctgtgtaataaaattaagttatttaagacgtgctttacatgatccttttaatccttgatggataccatattgcaaagctaaatttaaatatatatatttctgtgtgtgtagtcagcagaaacatggatttcttaaaatccactttgtgtattttatttatgatcgaactcatatttacgagtccacgaagtaaaaaatatactactttcaaggaaaaataattgagtggagttttttttagatatcaaaattaattctatatatgcaaaataatcagaacattcttttttttcttaccatttaatgagtttatatatatcattttatgattcaggacttttaataattaggattgttcttttttagcatcaacttcaagttacccagggataggggaacaaaccatttaatggga

SEQ ID NO: 11775 - DNA, 655 bp, Homo sapiens
  source 1..655: mol_type = other DNA
ttgtttttgtttcaactttaaaattttatcattttaaaattgcttaatataattagggtacagatttaaaatgaaatttttttcttaaatggtaggaagcaaaaagcttctaattaaatagcattgacattctgatatgagtttatcatagcaccattctaacatgatcaccaaagtcttgatgaaacatactttttaaagaaataattttttaaaaccccacttggctcaaagacattgtccagagctccagtggggttatacttgttaagtcagtatttaaaaaaatgaaacaccctgattttgttcacttttgtttttatataaaagaatctttacagtcaacatgtacttctagatgctgtatattgctggcagagtttattctatacaaaatgaacaatctggccccttgttttattaactttcaaaataacttttattatagtagctaaactgaatatacgagcttctagaaaacctattgttgaaagctatcattttaactataaattactgttgttaaaattttatataccctggttgcaaattagaatgttttaaaaatatctttaaccacgttaaaacaatttgaacaaaatcttaccccatctaaaaatgatagtgtttagttgaatttaagttaagctcttta

SEQ ID NO: 11776 - DNA, 514 bp, Homo sapiens
  source 1..514: mol_type = other DNA
acctactgagtcagaaattctggatatgggcaggtgattctgatacacattaaaagtttgagaaaccctcttctagatcagtgtttcccaaatgtttgtcacacgacagagtctctgtctcccaccgcctctcgagttcaggcgattaccctcgagtggctgagatgacaggcatgcactgtcatgcctggccaggctggtctttacaggcgtgaaccaccatgcctggcctttatgtcaactcactttctaaaaattttaagttaattttaaaatgaaagtttataccaccataaaaataaatacagaaaacaaaatggtgtattatgtaactagactcttgtcagtgctaaaaattagaagttgttaaatttattaaacaagtactgttgcaaaatgggaactttttttcttgacttaattgtgattaataatttccttacatttaaaggaaattactgttccagggagtattcatgtgaaaggaaagctgtttgaactatatatataccta

SEQ ID NO: 11777 - DNA, 581 bp, Homo sapiens
  source 1..581: mol_type = other DNA
catctaaaaatgatagtgtttagttgaatttaagttaagctctttagtatatgcatatgaaggggtaaagttttaatcttttttgttatttacatgtgaaaatacagaaactaagtgattgaatcacatcctacacaaagtttttcatgtgaaatacagaggtatttatatctcttttggcaccaatagttggttttcattcatcgataatatatcagtttaaggctaaaataaaacacctacatttcttagggcttatcattctatatagaaagaggaaacatcctaatgagttttttcttttgtttttccaaagagattctaagcaaaaaaattttaactaacatctatattttgttattggaggtgttatatgaagacagaatgaatttaaatatacccagtttggcagtatgaaactttggacgcattaaagttaacgtttcattaggcaacagcagcaaaagggagacaagattattttttatgtttttcaattactgtaaataaaaatatatcaatgcttagtgtcaagaacattgtataccagtataaactctcttagtgggtctgcaagttgc

SEQ ID NO: 11778 - DNA, 568 bp, Homo sapiens
  source 1..568: mol_type = other DNA
ttatcattctatatagaaagaggaaacatcctaatgagttttttcttttgtttttccaaagagattctaagcaaaaaaattttaactaacatctatattttgttattggaggtgttatatgaagacagaatgaatttaaatatacccagtttggcagtatgaaactttggacgcattaaagttaacgtttcattaggcaacagcagcaaaagggagacaagattattttttatgtttttcaattactgtaaataaaaatatatcaatgcttagtgtcaagaacattgtataccagtataaactctcttagtgggtctgcaagttgctgcaatatgaaggagttggactcgataatctttaaagtccatgaagtactctatttaacagaatgcattgctttctcatttgactatttgaattatgtatgcagtacacttactgcaactgcatgttgtctaaaatagtttttctataggatgtatataaaaactaatccctcttgagctgatttataatgtgtgtatatagccacacataaaaagctactttcttgtctaaccttgaatgt

SEQ ID NO: 11779 - DNA, 247 bp, Homo sapiens
  source 1..247: mol_type = other DNA
catttgccagaaatgactgaaatgaagaaagatttctgacttgccttttcagaagcaatgtttcatgcaacaggaaacacctttgactttttccaggaggaaacctaagtttattttaaagtataatactacaaagcaagaaatcgacagataataaatataataaactctaaactctttatttatttatttattttttccgattctcctgcctcagcctccggtgtagctggaatcacaggcgcgt

SEQ ID NO: 11780 - DNA, 709 bp, Homo sapiens
  source 1..709: mol_type = other DNA
atattttcccccaaaaaagtttcatgaaagatcttaacagttgcctagatacatataaaaatggatagatttttagatattttgtctcagatatgaggttggtaaataacacctaattggaatttccaagtagaaggatagattcagtaagagtatttatttccctgatacatgcttattataagtgggattaaattagtaaatcacctctttactagtttatatggagtcttgtccccagacaagactatatcaaagtcaacagtcttgttttgttgtgggtttttaaaaattttttattttttaaaattgagacaggtcaggctaggctggtctcaccatgcctggccaccagaggactccatctttatttgaaaaataggatgttcttcaaagcacattgacatctcaacaatttgatgtatatattcttttagtttggtttaaaattaacttgattgtgatatagaagctagcttttttcagattctgaaaagcttttccatatccatttagacaaaattggtgccatttttttcttctatttgtctatgaaattttgtaatttggaagcccctacataaaaaagcatctgtatgacttaatatgtattctgacaagaactgtggttgttgaagcattttttaaaaaacttttttttgttttaatattatgtcgagaatggatcttggagaatgtctgaaagtcc

SEQ ID NO: 11781 - DNA, 512 bp, Homo sapiens
  source 1..512: mol_type = other DNA
ctgaaaaaagataagttttcctgatgtgcgagactcttgtctcaaaaaaaaaaattcaaatgttcggaaatacttactgttagcattttgttattttacaaaattgggatcttactgcataacatttgtaatttgctttttatttacaaatgaatcctgaacatttctgtgattttttttgagacagtctcattctgtcacccaggctagaatgcagtggtgcgatcttggctcactgcaaccaggtgcaagtgattctcctgcctcagcctcccgagtagctgggctgtgtcacccagactggcagggctcactgcagcctcagcctctttgggcccaagtgttccttccgccctaaatttggattttaagtagaggcagagtttcgccaagttggccaggctggcctagccaccatggtagcattttaaaaagcaaagtgtgatttttgtatgaagatatttctgaataaaattgactttctgacagtaattgtctttaattaaactcca

SEQ ID NO: 11782 - DNA, 350 bp, Homo sapiens
  source 1..350: mol_type = other DNA
ctgaaaatcagcaaggtgctatgcagggtacatacacaactttgtgaatgtggccaaaattacacagatagtaattgtagcaataagatctgatggattcctgaacttgatattaactcatatttgagcctaggctatttgctgagcagatagctgtccttaaagtagtatgatatttatgaaaggaactgtcatcgtattttacaagccctgacttcattgaggtaaggcaggaaagcattctttaaccacatactgccttagataacaagttttttctcagcagttctgaaatactttgaaatttaaaattcattctcttgaacgtgttcatgagttaaatgaagaaa

SEQ ID NO: 11783 - DNA, 408 bp, Homo sapiens
  source 1..408: mol_type = other DNA
ccagctactgagcgagactcccagcagcctgggcaacatgcccatctccactaaaaaatattaatagaaaaattagctgggtgtgtactgcactccagtctgggcaacagggcaacatagcgagattctgtctctattttaaaataatttgttttcacttaaaaaaaaaaacaaaaaaaaaatggagaaaggtgaaattttacacattttccacaaaatggggaaagattatggaaagataggcctaatgattatttctggcagtacttcaaattgaattattaaacagattttgacagcagttgtactgtattagaaaccagataatataaagtttaggataaagctgtttaagaatggactcagtaaatattctcctcatttattactgtttttaagagagtcgta

SEQ ID NO: 11784 - DNA, 375 bp, Homo sapiens
  source 1..375: mol_type = other DNA
gacagagtcttactctctctccaaggctgcgatctcagctcactgaaacctctgcttcctgggttcaggcgattctcttgcctcagcctgctgagtagctggaggctggtcttgaactcctgacctggggtgatctgtccacctcagttttttaaaatacttttggtaaatttgtctttcagaaaatctctctaagttgtatttattgatataaagttgttcataaagaataattttcataacaaaatagccatgcttttgtggttttttttttttattttttagaaaacacttttggtataagcatagtatattttatttaattgtatgacttttagtgagattagcagcagaaacttcgagtctgtgaagtct

SEQ ID NO: 11785 - DNA, 465 bp, Homo sapiens
  source 1..465: mol_type = other DNA
gagtatctcatttcatttgaagaaacacattgtaagattgaactaggtgttctaatttcactcttttcccagaagggaaaaaagaaatgacagatataaaagaattttttccaagctggtaagttgtgatatgtaggttgagcatcccaaatccaaaaaatgaagagcttcaaaatctgaaacttcttgagtgctggcagcatttattctggatttagggatgctgaaccagtaaattataatatttagcacttcggaaggccaaggtggcgaaacacttatgatccttagcgtttcgattcttgagttaagcaaaccctgcaaggtgtgcgtaggtacacgccttgtatttataaaattaatgtaaacattagaaatcaggaagaatataatgtaacactgcactgttttcttatttatagccacttttctaaaaatacatattttttttttttaggtcccgat

SEQ ID NO: 11786 - DNA, 545 bp, Homo sapiens
  source 1..545: mol_type = other DNA
gacaaagagtaatttgtcctgtcaggtacatatttaatttctagaggatacaaaaatgttcaagatatttaagtgcaattaaattcataacaaatctagataatatagcagtagtggttcaaaagttgctttcacttgaaaaactatttctgataataaatttatacattactgattgctctctgagaattatcaatcagtgtcttgtttttgagacagaataggctggactgcagcgatgtgatcaccaggtcattgcagcagccttgacctttctctcacctcagcttcctgagtagctgggtatgttttatagagacagaccaggattacaggtgtgagcaattattaatgttttattttgaattctagtatgtagttattaacacatttagctgacttggaatataattgacattaagactactgaaaaaaagtttctctttaaagaaaaggctttaataaatgagaaatataagacatcgatctcgctccatgtcacgtgagccacaggtcccgctccagcagccgtagccgcagccgta

SEQ ID NO: 11787 - DNA, 438 bp, Homo sapiens
  source 1..438: mol_type = other DNA
tttaactgaaattcaaattaaactgagtggcctgcattttacagaggccaggcggggcgcggtggctcacgcctgtcgagaccacccagctactcacgaggctgaggcaggagaatcgcttgggccactgcactccagcctaaaaaaaaaaagaagaattgcttatccacgccctgtttcttttcggggagtcctcccaagtaaaccctgctggattgtcaggacaaccaactgggctacatttctctgaggtcccaggatccagacaggggtcaggcggggctccgggttccctgccacaagcctcagctccctcccagtgcctggtggaggccggggctgtgtcccgaagggggtcgggttcggggaggggcgtggcctgacaacttcggcgacgcggctggaccaatccggacggaggagagcgaagctcctctg

SEQ ID NO: 11788 - DNA, 328 bp, Homo sapiens
  source 1..328: mol_type = other DNA
catgttacacagcccctttgtttctaagagagtctgaaaaaaaaatatttacagtctataggttatttacagccggccagaaacctaattcatttggagccctgaaactaataacagattttcttttaagtttttttttttttaatcagcctcttataacagagataaaactattatcaatgatttcatgagacaaacatttacacgctgaaaaatcagtgggtttaaaataaacacatcgaagtgtaaaaacttagttgattctgggttgctttctggctggaagctgacagacagtgtgcgaggcagacctactgcttttctgcct

SEQ ID NO: 11789 - DNA, 751 bp, Homo sapiens
  source 1..751: mol_type = other DNA
tcaccttcatcggcgtccctgccctccccgggcagccgccccgccctggaagcaagaccctgccggcgccgggtcccggtcatcttccgggcgagggagggggtcgcggccccctcgggccccgggtgggggctggggcaggcgccgggggctgcgggcgcggggccgcgggcagaacaaagctgcgggggccgcggagggcggcgggcgcggggtcggcggggccgggcgccccttaccttcgtacacgggggccatcggggccggggtgtccgcggttcaacggggacgggaaagcggcgcgcgagctcggcccccccagcctcagtcgagcctgtgtctccgctctcggcgcagccgaggccgcccgcgcccgcatcaccgcctcccgtggccggcgccgggggagggggccgggcgcgccgccgccgccgccgccgccgctgccgcccgggcccggcgcggggggctcggggctcggggctcggggcggccgggcgggcggagcggccgaggccgaggcgccgagcggccgcggcccccgagcggatccgcggaggggcgggagccgggggcagcgcgcggccagggccggcggggctcagctcagcatggctgggcgcggggcgggggcggggcgcggggccgggtccgcgcgcaatcgagcgccgatggcaagggcagagccgcgccggcggcccgaggggaccgcgctgggaggggctgccgcgcagcgcggggggactgggcg

SEQ ID NO: 11790 - DNA, 693 bp, Homo sapiens
  source 1..693: mol_type = other DNA
gaagccagactccggcaggaacccagcgaccaccccgggggctgcatttccgcggcgtgcacggcagggcttcggtgcctctgacctcgtcggagcacggcgcgcgcccggctgtgagatgggcgagccactttgccagcgtttccctccccgccagcacacgcgcgaaccctcgcacctgggcacacacgcgcgcgcgtgcacacacacacactgggggcccctctgcagaccggctcggctgcgctgggctcggagccgtgcgcccgccgggtccaggccggccctctcacccactacccggggcccgccctgcgcccagtccccccgcgctgcgcggcagcccctcccagcgcggtcccctcgggccgccggcgcggctctgcccttgccatcggcgctcgattgcgcgcggacccggccccgcgccccgcccccgccccgcgcccagccatgctgagctgagccccgccggccctggccgcgcgctgcccccggctcccgcccctccgcggatccgctcgggggccgcggccgctcggcgcctcggcctcggccgctccgcccgcccggccgccccgagccccgagccccgagccccccgcgccgggcccgggcggcagcggcggcggcggcggcggcggcgcgcccggccccctcccccggcgccggccacgggaggcggtgatgcgg

SEQ ID NO: 11791 - DNA, 391 bp, Homo sapiens
  source 1..391: mol_type = other DNA
tttttaagaaagttatacagtgttagagatcattattttacacagatagcttttcaacttttttaaaccccagtacacttgtccagtacctataatcgaggtttatgaaacaatagttgcccttactaagggcaatggactctaatattttctattggattccattgttttaaaagttggaggggatggcagggcatcctatccaagcatccgaaacctggagaggctcccggctggggagagtctggagaagccagactccggcaggaacccagcgaccaccccgggggctgcatttccgcggcgtgcacggcagggcttcggtgcctctgacctcgtcggagcacggcgcgcgcccggctgtgagatgggcgagccactttgccagcgt

SEQ ID NO: 11792 - DNA, 561 bp, Homo sapiens
  source 1..561: mol_type = other DNA
tcacatttctaaaagtgtgtccaaagtttcctgaattttcaattattttttctttaagctatttcattgaatatttctcaatgttgggagaggagggtctccctttcccacttccgcaaatggggcactcacatgcagttgatctggagctaaaattcaccatggaagcctccagatgagctagccatatatgagtcagacccagcaactaatggacttggtgggatggttgtcctcaaagcagccagcattttgatcaggctgcagaatctcttgacatgtatcttcacttaattgtgaatttaaaaaattatagatggatgtagatatagatatagatatagacatagagatagatatagatagacattttggagaagagtctctctttgaagacttcctctcagagtacaagtccgtggttacaaccattttgtttctcagcaaacatggggaagttttcttctctgaggaagttaatataaatgtttattgacagtgcagtcatcaaggaataaagttgctgattcattccctctttatagggagacactctgagaa

SEQ ID NO: 11793 - DNA, 497 bp, Homo sapiens
  source 1..497: mol_type = other DNA
ttttacttctggaagattccgagaggataatagctattgctctgtcgcccaggctggagtgcagtcgcgcaatggctcacggatttgctcttttaaaggacatacccttttatgtttaaatgaaggaactttgatgcaccctttaattaggtgagagctcccccgtctacgaagcccgggcttggcctgggcgacgctgagcggctttaaccggcggcgtccagccggctccgccagcgctgccgccgccctcgaggctccctctgactgaaggcgcgctgagcatcgcggcattaggggctcctggtccctcaaacatcccgcgaccgccacagccacagcccgcgctccgggccgaacgcccgagctcaagagctcccgagcttccgtcgggcggcggcctcacagctgggggccctgaggcggaaggcgcagccgctcagctgcggaccgggggcgtggcgagggcgcaccggcccgggccgccggcgtctcca

SEQ ID NO: 11794 - DNA, 558 bp, Homo sapiens
  source 1..558: mol_type = other DNA
atttcaaaattttgtgaaaatgtgactgctatcaaaacacctgctttaattttgctgcaggtaaaggattaatagctgtttctccatatgagcttctcctagtagtctaatgagtgttgacttttactaggtaacattgcttatggtaaaaatgattcctgattgaactggcacactcatagagatccctagaagctatgcatctgtgcttttacagggcataaggctttaagcagccttaaactaaaactttttacacatagaggtgttttctgaaacacacagttttatttattgtagtagaaccctcaaaaatgtctttaaaccaggatacaaatcccaaagtgtgatcctgatcttctgtgaagaatacaattcttaagtataccatcctggataagatcacaattcagtcttgtccaaatgtgatgttgctaagaaatgtaaaatactttattggtcttacatatcatgacctggttattttattttccagttggttactttcatctaactttgaaattctaatattaatattaaaaatttcttcaaactcat

SEQ ID NO: 11795 - DNA, 382 bp, Homo sapiens
  source 1..382: mol_type = other DNA
tactattaaggtttgacaaaaggtgttgtcaagttctgttatttgatttctggattaagagaagttttttttctttaaaattcgaacaagtgtctgtatcccaggctggtgcagtggagcaatcacagccggtcgccccagtagcagggaccacaggcacatgccactactcccatttaattagacacctaaaatttaggccgttactttttataaaaacaaagaccgaataccgcttttttgaaaaaaaaaaatactggccaggtccgcagcagcagagttctgtggcgccctcctcgccctcctccgcgccggcaggtgaggccgcgtggcgggactacaactcccagcgtgccccgcgacgggagggtcacgtgggcgt

SEQ ID NO: 11796 - DNA, 274 bp, Homo sapiens
  source 1..274: mol_type = other DNA
gagtaactgggacatagagcattgctcaagatcacatctctgataccaggaatgagataacctttattaagtgtttaccatgtaccctcagtgatttctaaggacatcatataatcctcacagcaaggtcttccgactgcttccggaggagacgtcccctccaccaatgagcggcgccgtgggcgggccgcgggcgcgcatgctctgggcccgcagtgcgacgcgtagcaggcggggaccgaacgggtgcctcagtgtccttccccttgtgatc

SEQ ID NO: 11797 - DNA, 418 bp, Homo sapiens
  source 1..418: mol_type = other DNA
ctcctgacctcaggtgatctgcccacctatcacaggcatgagccaccatgcctggccaaaccggctgcagtgagccataattatgcctctgcactccagtctctaaaaaatatgtatatataataaaataaattacttaagatctatatcctcctttagttggtgttatctgcagtgagccatgatcagcctgggtgacagagaccttgtctccaaaaaaaaaaaaaaaattttttttttacatcacccagtacacatgtacatttgcaaaacagtctgttactatgagatacattctgaaattgtttcctaggccggcgaaggctggtgagaaagccggctctgcgccctgccctgtgctggccgccctcacctggcgctttgtaccctgaggcagctccggactcagggcaggtgg

SEQ ID NO: 11798 - DNA, 275 bp, Homo sapiens
  source 1..275: mol_type = other DNA
aacagattcttctgaagtaggtactattatctattactattattattattttgagacggaatttcatgtgagtaactgggacatagagcattgctcaagatcacatctctgataccaggaatgagataacctttattaagtgtttaccatgtaccctcagtgatttctaaggacatcatataatcctcacagcaaggtcttccgactgcttccggaggagacgtcccctccaccaatgagcggcgccgtgggcgggccgcgggcgcgcatgctct

SEQ ID NO: 11799 - DNA, 502 bp, Homo sapiens
  source 1..502: mol_type = other DNA
ccggtcaaagctccagggaacttcctcgaaggcccacggcatttccctgcggacttctgcgcccggtctgggagcccttctgcagcgcgctcggccctgggccctccccggcccattaccccggcccgacggcaagctgcctggggcaagggtggtgcctgactcactgcccgaggtgcccccggccccggcccggtgccgagagtgtgttctagagtaagcggggccgggcacgcggccgccgttccccaggcttggacgtccaggtctaagcctcaggccggaagcacctcgcgaatccgcccgggcctgggtggaatggagcccgcgcgcggcgggcgtcctcccaggaagggttaagccacctctcccccaccccgagaggcgagggggcgagtccggcagaaggtcctgtttaccgcagctccgcgcggggccgggccctgggagaggggttgccgtggcaaccggccgggcgcccgccagctgcggattagctcac

SEQ ID NO: 11800 - DNA, 285 bp, Homo sapiens
  source 1..285: mol_type = other DNA
cctatcaagtgtgttatcatctttgttttaaactataaagtataaactaagttccgccctcccggcccccgcctgcgcccgcgccctgggctggtgcccgccaccccagcgatctcatactggcccctgggcgcacggtgaccctgcggctgcccggcccctgcctccgcccgcgcggccccctcgctcaggtcgcgggcgcccggggcctggcttcgcgtgggtcctggctgccgtctgacagccccttccgcgcggcgcggcgcggcgcggcgggtgtcgggc

SEQ ID NO: 11801 - DNA, 356 bp, Homo sapiens
  source 1..356: mol_type = other DNA
ttttttaggtaaaatcacagtttatccctgcaccttcatagataatggagtcaagcccttgcgctctccgagagtcctgccctgactccagctggtcacgcagcccctcgtggacaaaaagacggcagtctcttcccaagccagtggatcgaatcaagccatttgtggcattatctattgctgcgtacgaacttagcctggcacaatgcctcccagctactcgggcagtgagccgagatggtgtcactgcactccagcctgggtgacagagagaggtttcctgcagccgaaggactcacagctaatctgggtcaggagcggctgccggctcccccactcctggagatgacgtcacg

SEQ ID NO: 11802 - DNA, 324 bp, Homo sapiens
  source 1..324: mol_type = other DNA
gtacattttgaaatatttataaaatgccttgaacgatcaaacattgagtaagtgctgcatacaatgcggtgaaatacctctccctgaagaagctcctgggtcaatgggggaaagcgctcctaacccagtagcaaggaaggcttgcagctagggatcctaattaactattcagagcttttggaggcaggtctgtagccattccccccgggtcctccgcacaggcggcggcgctagccttactgcgcaggcgccctcaggaggttcgaagtctacgggggtctccaaccttgtagagtcgccaggaatagggcgttcacgtgcatc

SEQ ID NO: 11803 - DNA, 473 bp, Homo sapiens
  source 1..473: mol_type = other DNA
tgcttggaatattctgttcatgaaaggcacaaagtacataaaatattttgagtgattttcttcaaaataaaaatgattagttttgatgcttcagatgtctaaatgctatgtgccttgtacaggccctacggcatggatttgttggaaaacgaaaaatacacgaaatattttattcctcaacaatgaagaaaaagctttcctcgttttaactggctgaattcttcaatgaattagctcctaaattcattgcagtggaaacgcgcctttacgtcacgcaccggggtgacgtcacgaccgtgacacgcgggtgacgccgttgccgcggcgacttctcgtcgtctccgcccccctcaggctcggctgcgcccggggccgcgggccggtacctgaggtggcccaggcgccctccgcccgcggcgccgcccgggccgctcctccccgcgccccccgcgcccccgcccgacagcggccgc

SEQ ID NO: 11804 - DNA, 380 bp, Homo sapiens
  source 1..380: mol_type = other DNA
ttaaatgtagtcactagacccaactttataaggctgtttactatatcatataaggctgataacatgtcaaaacttaacttgataagattagacgtcaaattctaacttaaaagtaaattgtacattttgaaatatttataaaatgccttgaacgatcaaacattgagtaagtgctgcatacaatgcggtgaaatacctctccctgaagaagctcctgggtcaatgggggaaagcgctcctaacccagtagcaaggaaggcttgcagctagggatcctaattaactattcagagcttttggaggcaggtctgtagccattccccccgggtcctccgcacaggcggcggcgctagccttactgcgcaggcgccctcaggagg

SEQ ID NO: 11805 - DNA, 203 bp, Homo sapiens
  source 1..203: mol_type = other DNA
gcctttgtccccacaccaatctggtgggcgagtacagaatgtaaactcccatcaaatattgttggcagcctcaagccggtgggccctgccacccccaccgtccctgagcatccgagccggttcccgcccccggcccgaactggcccgcgcgcgctcgcagccccgcggcggaacccgagggcggcggcagcggtttcccttga

SEQ ID NO: 11806 - DNA, 465 bp, Homo sapiens
  source 1..465: mol_type = other DNA
gattttaatagctattcctatttttatactagatttacctcaaggattgaggcatgtaaaatttatttttaaatataaaatgggggttcacagaaaacccctaatcctgagggaatatcctcaagttgtatatataccaggaaataaactcataatctccatcctaatcagtttgtaatataaaatgcttagaagcagcttgtaatacatatctgtcacacctccacccgcacacaggtgtatggacgcaaggatgcgttccggccgcacgcgtcccacacacggacgtgcacacgggcgcctccgaataggctcgcggttcccgaagccggctccgcggacgcctgctctggctccgtgggaaaggcgcctccgcggcggggccccgggcagcgccagacccggcgggcggcggcggcgttggcgcggccaggcgaggggggttcccgcagcccgcccgccccg

SEQ ID NO: 11807 - DNA, 295 bp, Homo sapiens
  source 1..295: mol_type = other DNA
gccccatgctgtcaggtttgcagcctggaagcagcaggccacaccacagagccgaggtgtgtacattctgtggtgttcgtacagcaacaaaatcgcctatgcattaatttttactttttaaaatattacattaatatattatttgattgccatggaatgcagtggtgcgttcacggctcaatgcagcaacgacctccggctcaggcgatcccccgacctcagcaatttcatttctttccaaacttgaaaccttctaaacttgaaaccttctaaacttgaaaccttccaaactcgc

SEQ ID NO: 11808 - DNA, 418 bp, Homo sapiens
  source 1..418: mol_type = other DNA
tactcaaggacacctgcgcccattggccatcaaggatacctgcttcttggctgggcaccgtgtccttgactcactacttagccattaaggttcaagcagtttaagtttctcattgtcaccagaaatagataccagacccagccctatctcttctttaaactttaaatgatacaaagtgtagtgaattttacatctcagactaacctgatataaaatctctactgacaagtccgtaaagatcttagctcagtgcctaggattcagtaaatgcttagaggatatcagctattagtgttactggtagtctaatattggtctaagtctttaagtattagaggtactgccttctgaattgtcaccaggcctaatgtcatctctatcaagataactgttctatgaataatgatgactgagtgat

SEQ ID NO: 11809 - DNA, 488 bp, Homo sapiens
  source 1..488: mol_type = other DNA
taaatcatatagttttacacctgaatgctatgcacatattaaataatacattatcaaaatctatattttgacatgaaaagatatatataacatagtgttagcttaatcttgagcagatagattgcaaaacaatatgtacaatatgttcccattgttctttgtaactaaatgtacaaggttataagttttcatagtagggaaaataaaagcaaattttcaaatttaacacgaaattaaaaactccttgacaataggacttgagtattgttgcccactgctgtatccagcagagtgccatgttcatcttaacatttttaacttgacataatttcagacttgcagaaatgttgtaaggaaagtacaaataacttccagctaccttttatccagattcaatgtttgttaaaattttactacatttctcttcccactgtatttcaaggagatttagacactcctggcaggacttgccaccactagggctagag

SEQ ID NO: 11810 - DNA, 370 bp, Homo sapiens
  source 1..370: mol_type = other DNA
ttataaatttcaggcatgtctttatagaagtgtgaaaacagaccaatacagtgatgttaacaaactaagccatggcaggacattgtttatgcctattctttagcaaagtctaagcccatgaatgcgccttttaactagtttcttggcctttgtactagaataagcaaaaagccagggacaccagacaagaaagaagaaaactatttttaaaacatttttaaaacaacttccttccaagagaccagggctcttttaattgtgtctttcagtgtggtcttaaggatgtccttcttagagcaagaccacgattactaattaactaaaaattctggccattcatttgcatttgaaagccattaacattttcttg

SEQ ID NO: 11811 - DNA, 414 bp, Homo sapiens
  source 1..414: mol_type = other DNA
gtgagtatagtacccaataggtagtgttactacctgctggagtgcaacctgggtagctgggattacagccgcctgccaccatgcctggctgtgcagatggggtttcaccacgttggccaggctgccaacgtgctgggcactatttagaataattggtggaaaggatcatttgaattaatgaaaagcacaaagtgatgaactaagagctaatccttctttcacttacttattaaataaatagctatatatttaaaaagaactatggatattggggctacatgtatagatgaggaaacataacaaaccaccttccccttttattaacaaaaggagctttcattctgtgtcacatggagaacaagcgttgtcaactttataaggcaataaattaattgtggcagaagctggctacct

SEQ ID NO: 11812 - DNA, 337 bp, Homo sapiens
  source 1..337: mol_type = other DNA
ttccctaatgacatattatgttaagaattttttcatatgccatttaccattgtatatattctcaaaatatatctctcaatgcaactgtattgctaaataaactttccctctttatctctgtgtgcacagaggaaaggctctgacaagaaagtaagtgtctgtcgtgtaagacacctgactaaaacatttggtaaggatctttgactatttccttatacatgaattatttagcagatatgtgttttgcaaatatttttagaatacacttaagtatcattcccactagtcgacatgaaggaaaaggttaatgtagggctacattatgtccactggagaa

SEQ ID NO: 11813 - DNA, 522 bp, Homo sapiens
  source 1..522: mol_type = other DNA
gcaaactaatgcccttttgggaagtgcttttactcagaagcatgcctctgtgccaacagcaaaaaccttctcttttgttggcaagtaacttaaccaaccaacccaaaaaaaagatctttctctcagctttccataatctctgagacgaagaaaaaacattgaacttttctaggggtagtaataagatttaattcaagactagaacattttagctgcaaatcttcaagaataagacaatattatcccctttctgttttattgttccatgggagaagagcttcaaatataatcagttttcaggtcatcagctcagctcttgtataacaatgcagttgacatgcgtcttctcagatgtctaactcactgagggatactttaagtacatataaatgagttcatctttaaatacttgccattctaccgtgaattgataatatcaaaacaaatatccattcacaccaattatagttgagttaattcctgcctgattcatctcccagagatgcagcctcctcttaaaga

SEQ ID NO: 11814 - DNA, 496 bp, Homo sapiens
  source 1..496: mol_type = other DNA
acattggcaagtgctttcaactgcatgggactcagaagcatgcctctgtgccaagagcaaaaatatgcccttttatggcaagtaagttaattgatcaactcaaaaaacaaacatttctctcagctttccagaacctctgagaggaatgatgaaaaaacattgaacttttcttttctaagtaataagatataattcaagactagaacattgtagctgcaaatcttcaaaataagacaatcttatcctctgttttattgagagaagttccattccacctttgggaattcaatatggttcaaggataaataaacccaggttttttctactgcagagaagaatgcagttgacatgcatcttctcagatgcctgttcatctttaattacctgcaatttgaggagatatatataacctgaattgataatatcaaaataatctgctatagttgagttaattcctgcctgattcatctcccagagatgcagcctcctcttgtca

SEQ ID NO: 11815 - DNA, 307 bp, Homo sapiens
  source 1..307: mol_type = other DNA
attcactttgtactgagccaagcataatctcactgcatcgaaaatagaaaatgatcatctgatcattctggttcagactgtcagccctgagcaggtgggtcagtttgcattcccatccttaagccttggtaggaaggagagaaatccagaatcctatggaatgctgagtctcaagcatctcttcccaataggtggaaagatttgtaaacagaagaaagcccagctctgttatctgaggaaacagctctgctctcagaaggaaagtttccttcgctgggaggagtggtgaccctcacctcacagtcac

SEQ ID NO: 11816 - DNA, 251 bp, Homo sapiens
  source 1..251: mol_type = other DNA
ccaggtttaccatggtccatcatcctggttcaggctgtcagccccaagcaggtgggtcagtttgcctcaccctgagagcagctgaatcctatggaatgctgagtcgaagctgggagaaagccaaatacctacgaaagcccagatgtgtgatccagggcttggcttccccccttgcgggaaagggctaaggcaaatgggaggagtgctgaccctcacctcagagacacctcctctccagatcctcaggaggt

SEQ ID NO: 11817 - DNA, 532 bp, Homo sapiens
  source 1..532: mol_type = other DNA
atccccgtcctcggctagagaaggggttagaggtgggcggagcctccaggcgccagctgagagcaccttgcaccgcccctcctcactgcagggaggttctctccggagcgcgggcgagggaggacttgcccaagccaacccgactgccctgccccttggggagggtagatggagggaggttagcacggcgacgctttcattagttccaagctgagtggtgtgtgcagggctctgccctgccctgaactgccacggtccgccagttgcgcttcgctccgcgggtgtccgacccaagccgagcccgagcccgagcccaggcaggggctttacacccacgcgtgcgatcctcccggccaagacccgcgggaggaggccgcccccttcccggcgcacaggcggggccccgggcgcgccccgcgtctcccccgcgcgccggggcggaggagcgggcgccgcgcactcaccgcctaggccgggagggcgggctcggctccccgggcgggccgggccggcttgggaggggacgcggagg

SEQ ID NO: 11818 - DNA, 291 bp, Homo sapiens
  source 1..291: mol_type = other DNA
tgcaggtttgttacgagtttacctgggaactggggtatatttatactaaaaaattctttgttgtttatctaaaattcaaatttcccatgcacggggcgacagtctgtggagctcctgagcagggggtctgcccatctttgggggtggttagaaaacaaccaccaaaacatttcaggcggggcgctccctcctgggaggggacgtccaagggaggcctcgccagtctttctgaaggcctccctggttgtgactgtgcagctttggctcctcctgctcactcccagcaggagc

SEQ ID NO: 11819 - DNA, 357 bp, Homo sapiens
  source 1..357: mol_type = other DNA
acaacaataaaatgaaaattataataatataaagttatgtgaatgttctcttgtactgtactcacctattgggaaactacttaatatataaaatataatataaaatatataaaatagtgcaacattacttattcctcctggtgtttcattcctggaaagagtcccaaacatggaatgcccctgggggctcctctgacctgcgtccccaggtaccagagcctgctcggcgacgctccaggaagctggccggtcacggtcatgaacacttgtgacacatgctttacagtcagtgaaccaggctctgcctctgtggggctcagctctgcaaagagctcctccccctccaggaaaagcact

SEQ ID NO: 11820 - DNA, 360 bp, Homo sapiens
  source 1..360: mol_type = other DNA
aatgaggttggagatgagcctctaacaaccttttctttcgtctaagagtacagaaaggtgtaataccagctgcaaggcaccctgtctctgtctctgtgtcttttatacacacacacagcatgtgcagagcagcatgaatcctatcatatttaaaagtaaaagttaatcagagcctcagtttcctcatgaatgtaatagatatgagaacactatgatttttggatatgaatgtacattgcaagctgttaagtacccactgtggtcatcttcttgtgcctcgccattggaacgctctagtgagccggaatgaagttcaggcccatggctgtgatgtcacagaacatgtgaagtcagaggtcc

SEQ ID NO: 11821 - DNA, 378 bp, Homo sapiens
  source 1..378: mol_type = other DNA
ataatgtgggctccattctcacagaaggaatcctttccactcttacgcatgagctttggtgccaagaagtctgatttgctatttataggaattgtctctgcaatgtagagcagctcaggtcttctctagctcttctgactgctagggaagtcctgatcatcctagccctccaagaaatgttttgaatagcattgcatcttgaactcactataatttgatcaagcaaagaaacctgccaccacagctgtgttctctgctttcagagaccaggggagcagcagccattttgagaaactcaatgagtgttgattttttcttagaaaaacaaactttgggtcaacgaatgggtgattcacctcatggatctccctataagaa

SEQ ID NO: 11822 - DNA, 408 bp, Homo sapiens
  source 1..408: mol_type = other DNA
cagtaaagccttattcttttgtatgtcacagagctaataattagcagattagggtctcctagctgggtgatcttgactacaaacataaattaaacttaacttgggtcaatttctgataaatgcttacaacataacatatgattatgtgactagggactttccaaaaagttacctaaaaaatgcaattatgtaactgcaaactaagcaaataatgtttcattttgcttctattcatgaattgcttcttacttaaataaactctttaaaattttactgtgcctcatattttttttaatacagaagaaatgagagaaggagcttggggagtgaagactccctccctcttctcccctgagaagctgagataaagggggaggagaagcctgggtgccccccactgataagcag

SEQ ID NO: 11823 - DNA, 410 bp, Homo sapiens
  source 1..410: mol_type = other DNA
ggagtgcagtggcctgactcagccccccgagtaactgggattacaggcacatgccagtggtcttgaactcctgacctcaagtgatccgtcctcagtgcaccgagttgcatttggattccatcaaagagcttgtgacctctggaacaatgtctggtaattgtaatcctaaacttgtggacttttattagttttataaaactggtttagttaagggctattatcatttaaactataaactaaatttctcccttgaccaagttcgtaattttctcactgttaaaatttttgcaaaggcgattgaaggggtccctacccaccccgcccctggctgggggccgtaggctggccctgccccgctgcgccggaggtggacctctaccagggcagctgaggctgcgcgctaaggcggt

SEQ ID NO: 11824 - DNA, 193 bp, Homo sapiens
  source 1..193: mol_type = other DNA
accctctgaaggaacgggactaaaaagaacagctctttgatcttcacaggtgtgcctaccacgtttcaggaaccatgttagtttccaggattcagagatgattaaaactattccatgcccacagcattactttctgtgtgcagtgcactgtgtagagggtggggccagtgggctccacctacccgctccggcc

SEQ ID NO: 11825 - DNA, 374 bp, Homo sapiens
  source 1..374: mol_type = other DNA
cctgtctagggacagctgctggtccaagggctgagcatgggcacgcatgtccccagcctcccgcgtgcgtagcagtgtctgtgcctctcctgcccaggggctagagagcagtctccagtgcaggcagtggagtcagtgaccccaggtgtccatatgtagccccggggtcgactgattcctgagatcccaatattgagcaccaggtttcctggaaggtttcggtcgctggaagctgctaaaaggccggccagggcaccggggtgatttccgcgggaatcgataaccaatcggattcccaaccgcgcggccgccgctagagctctgcgcctgcgcacgcaccgggccggggactgggtggcctggtgtgtgggcgc

SEQ ID NO: 11826 - DNA, 275 bp, Homo sapiens
  source 1..275: mol_type = other DNA
aggaagaaaagtttgtccttggccaaaaaagtatttattgacccctccgggttggcagtgtggctgacacctaacagtctgggaagtgggaacacccagagtgataagatggatcaggggatgcccccaagctgttattagcagcctctggctggccagacagaaccctgggtggccttccgcatcctgaagaagagtgcagatccaatgccactggctcagcagagggaattccctgtggggctgtccctcaggttctcccaagcagatcagat

SEQ ID NO: 11827 - DNA, 177 bp, Homo sapiens
  source 1..177: mol_type = other DNA
attccatgcccacagcattactttctgtgtgcagtgcactgtgtagagggtggggccagtgggctccacctacccgctccggcccatctactttctacagtctgtggagacaggtgagcgcaattcccagccactgggctacctcctggcaggaaatttgcaaactgagtttaacaa

SEQ ID NO: 11828 - DNA, 210 bp, Homo sapiens
  source 1..210: mol_type = other DNA
ttttaaaaactcctatctaagaactgcttgggtcttcaaaagggactattcaagcagcagatggctgcctgaaccatctgaccgtacaggccctttatactcatgaaggagggaggaccctccaaagttggcctgctgtcccctggggctccgcggggtctggagagtgagtttgtttgtaataataatacgaattattctctcagcctg

SEQ ID NO: 11829 - DNA, 412 bp, Homo sapiens
  source 1..412: mol_type = other DNA
ggggagccaggcggcggcggcggcggcggcggcggcggcgacggagctgccgtggggcgagcggagacagccgcggcgctgcagagcggctggggcggcggcgcggctcccggtgctccccccggcgcgcgccccgagtcggtgagggcccggctctgcggcccccggagccatgggctgcatcggctcccggactgtgggtgggtaccgcggccgggcgggggcagggctgggccccccgggccgccctccgaccccctcccccgaaggaccctcggcctccgcgccagccccgagggcgggggcgggatgagcccgggttccacgcccggagggacagggccagggccggggaggggtcgggagcccgcggcccgggagggtggggccggccctgcctcggcggccgggg

SEQ ID NO: 11830 - DNA, 439 bp, Homo sapiens
  source 1..439: mol_type = other DNA
ggggcttgaggtccgagaagatcacgtctcagaaaagttaaactgcaagacgatgtctcctagccagcctcgaaacaacagagcccaaagctgtgcccagatgcggccccaggaggaaaacaagatttggtggccaaaggcccttgggcctggaacctcggggtaggccctgggttcgtgcctcggctcctgaaacccaagccggggttctccaggagagagccccgggagcggggcttgggcgggaggaggggggcggcgacggcggccccagatccccgagggagcgccccggcacggccggagcaggggcggggaggcgcggggcgcagccaatccccgggccgccccctccccggccgcggcgagccgagccggggcgggggagccaggcggcggcggcggcggcggcggcggcggcgacggagctgccgtgggg

SEQ ID NO: 11831 - DNA, 435 bp, Homo sapiens
  source 1..435: mol_type = other DNA
cagggggcaaggcaaccagatctgacaccagtttcagttaaaacatcccaggtgctccttgaagaattacccaggtctggcttctggctgagtcgcaggctgagacgtctggccgtccaagcgcagtctcagaatgcccaagagccccaccgtcgcccggggtctcgaagggccgtaaaagacgagcagcccgcgtccgcgtccgtcctcccgggtctccagtccgcaggcggccgccgcctcggccccgccctcccccgcggacccgaacggtccctctcgcaaccgatctgctggctggggcgctgggacaagccttaagaggccgaagatccccaagaatgctggaggttccggctcacacaccccctccgggcacagagtcagctggggggtgctgggagggagaacgccccgctcctcaccccccatccc

SEQ ID NO: 11832 - DNA, 526 bp, Homo sapiens
  source 1..526: mol_type = other DNA
aagaattacccaggtctggcttctggctgagtcgcaggctgagacgtctggccgtccaagcgcagtctcagaatgcccaagagccccaccgtcgcccggggtctcgaagggccgtaaaagacgagcagcccgcgtccgcgtccgtcctcccgggtctccagtccgcaggcggccgccgcctcggccccgccctcccccgcggacccgaacggtccctctcgcaaccgatctgctggctggggcgctgggacaagccttaagaggccgaagatccccaagaatgctggaggttccggctcacacaccccctccgggcacagagtcagctggggggtgctgggagggagaacgccccgctcctcaccccccatcccgccaccccaggcggactcggggtggccgggtagcgggaggtcgctgggccgggccggaggcgcacaggggctgcgtggctacctcggcggcacccgccccacctccgccggctaagcccggagggggacggtgagtcatcgggcacccgcgg

SEQ ID NO: 11833 - DNA, 561 bp, Homo sapiens
  source 1..561: mol_type = other DNA
gtccaagcgcagtctcagaatgcccaagagccccaccgtcgcccggggtctcgaagggccgtaaaagacgagcagcccgcgtccgcgtccgtcctcccgggtctccagtccgcaggcggccgccgcctcggccccgccctcccccgcggacccgaacggtccctctcgcaaccgatctgctggctggggcgctgggacaagccttaagaggccgaagatccccaagaatgctggaggttccggctcacacaccccctccgggcacagagtcagctggggggtgctgggagggagaacgccccgctcctcaccccccatcccgccaccccaggcggactcggggtggccgggtagcgggaggtcgctgggccgggccggaggcgcacaggggctgcgtggctacctcggcggcacccgccccacctccgccggctaagcccggagggggacggtgagtcatcgggcacccgcggaggcctgtgggacctcggcggagcctccggcctgaggcaggatcagggccccttcctgggggaggtgtccctccccgcccggctggag

SEQ ID NO: 11834 - DNA, 484 bp, Homo sapiens
  source 1..484: mol_type = other DNA
cgggtgccccaatttttgatttggttgtgacccagatccacctggggctccaggactgaacaaagacacaggctgggaactgtgtctggctctgagccggagccggaacctggggcagaggggggtgctgtgcccccggctgcagagatgcagtcaggaggacaccatcctccttccctgggctagagggtcagaggtcagagcacctattccatgcctctatccccccacccccaaggcagaggtgcaggggaggtaagaagaaagggccctcttctcctctccttgggtgcagccgcccctcccaggcctccgtacctgtggtgggggcggtatgggggcctcaggccctccctcctcctccggaggaggcggcggggaagggaagatctcctcctccagaggcgcagggggaaatgattcctcgggggagggggcggcgggaaggcacctcccagagcaccctctgcatcgtcgccatccc

SEQ ID NO: 11835 - DNA, 204 bp, Homo sapiens
  source 1..204: mol_type = other DNA
gagccaagattgcaccactgcactgcagcctgggccacagacttgcgtggtcatcctcccctgctagagggtgaagatatgactaaggttcgtcaattcttaatcccactaggcggcgcccgcagtctcattcgggtcaagacgcaggtgaggccgggactccgcccccggcgctggccccgccccccgcccccgcccggcccg

SEQ ID NO: 11836 - DNA, 563 bp, Homo sapiens
  source 1..563: mol_type = other DNA
atagctttagcttaattcacgtttccctcccagcaagaatgctgggcagccatcatccaccgggctcgaagtgcatggcccgcagctgaccactagggggcagccctccacgcagaggctcgagcgacggaggcgacgcggcggctaccggctctgctgagccccacgcggggcctcccaatgcgacagcaaactggctgcagagaccctgagggagccggtttggggccccatgcaggccaaagcatccctccgggaaggcggggtcgctcacctggtaggcgccccgagagcccgcagcacggcccgaggtggggtccaccgatggaccacgggcgtggctcagggagcggtagccgcgccccgggcccgcctcagggtcggctccgcctcaccccagcctgtgccccgcctccgggacagcccagttacagcctctcctccaggaccggccacagctcagtccccaggacagtcccgcctccgagacggccccgcctccaggacggcccctacctccgagaccgccccgcctccgggaccgccccgccccgcctcgcctc

SEQ ID NO: 11837 - DNA, 490 bp, Homo sapiens
  source 1..490: mol_type = other DNA
cagagaacagtttggtcccaggacaacccttccttaggtacccagcgcaaatctccctggggccctggggaccagcccaggacctggtcaggcataaagccattttagccgctatgtagttttttagttgattaaatttatttttattacaaaataatgcgtgtgactattgaatacaatttctgtgtttatataagtacatatgaacagttttgaagttttttttacacaaaatggaacgttttttactatgttagatgtttattttaaaaataatatataaatatatagatagaggcaatatataagtagatttatataagtagatttaacccatccttggaaatagttgtatattattttacacagagatcatcattatttatgaaacaaatcactgagggcgtctatcccggatctggggcggcatcaagccgggcctctgcggtccgggggcggcggccaagctccgcctccacccgcggcagcc

SEQ ID NO: 11838 - DNA, 285 bp, Homo sapiens
  source 1..285: mol_type = other DNA
gcacagcaaaaacaacagcaactaaaaatggtgggttttgcttgtgtctttcatctagaaatctcttaggcctaggatctgtccattctctggtaatggtgaacattcacatacactgctttaagagctttatctgtattaagtcatttaatcttcataaaaattccatgaagtagagacaattattatccccaatgttacaatggtttgcccataattcccacgtgttatgggagggatctggtttccccaaccgttctcatgataccgatggttttaaaaacg

SEQ ID NO: 11839 - DNA, 510 bp, Homo sapiens
  source 1..510: mol_type = other DNA
aacgccttactgttttattaaacttataaaaacaatgtattggtttaaaaaaaaacaattcagtggttgtgaaggtaagaatcaataggcagcatgtcttaatgtaatgctaaagctgatgcagtggctcaggcctgtgatcccagcggcgggaggagccctggcgttcgagaccagcctagcctctgaggtggaaggatcgcttgagcctgggaggttgaagctgcagtgatggcaccactgcactccagcctgggtggcagaagcagaccctccccctggaggggaggggagggtccattttaatacaacttgcttttttaattaaaaactatagctagaaccgatagttaaaaatagtcctgtattattttatataaacatctctcgctatttatcatgggctggcgcctaggcctgcatccgggatttggcgccacatctgcgggcagggcctctgaggtctaggggagggacggcgccggccaagtcccgcccccgtccgcgtcg

SEQ ID NO: 11840 - DNA, 169 bp, Homo sapiens
  source 1..169: mol_type = other DNA
atcacctgaggtcaggagtttccagaccagcctggccaatcccagctactcgggaggctgaggcaggagaatctcttgatcgcgccattgcactccagcctggggttccagagtcaggctcttcggaggcgtccgaggacaccgtggggcccggctggctccctctgtc

SEQ ID NO: 11841 - DNA, 369 bp, Homo sapiens
  source 1..369: mol_type = other DNA
atcacctgaggtcaggagtttccagaccagcctggccaatcccagctactcgggaggctgaggcaggagaatctcttgatcgcgccattgcactccagcctggggttccagagtcaggctcttcggaggcgtccgaggacaccgtggggcccggctggctccctctgtcgggtcaccccgcctgcgcccgacctgcgcccgcgcaccgcgccctcggggctccctgggacagcccgcggcctggcccgtgcgcccgggctcccctctccgccggcccggcacttcccagctctgacgcgggagggctcgcgcgcggaggggccctgcccctcctccgggaaggtcccgatccctccctcccgtcgggcg

SEQ ID NO: 11842 - DNA, 330 bp, Homo sapiens
  source 1..330: mol_type = other DNA
atcacctgaggtcaggagtttccagaccagcctggccaatcccagctactcgggaggctgaggcaggagaatctcttgatcgcgccattgcactccagcctggggttccagagtcaggctcttcggaggcgtccgaggacaccgtggggcccggctggctccctctgtcgggtcaccccgcctgcgcccgacctgcgcccgcgcaccgcgccctcggggctccctgggacagcccgcggcctggcccgtgcgcccgggctcccctccccgccggcccggcacttcccagctctgacgcgggagggctcgcgcgcggaggggccctgcccc

SEQ ID NO: 11843 - DNA, 277 bp, Homo sapiens
  source 1..277: mol_type = other DNA
gtcatgccaaaacaagacctgcttgtcaagactggaccctggactccggagctccagggacccagcaggggtctcagaacaccctgaggccccagtggcccagggccatctgcacctggagaaggcgtccagctggccccacaggcgggactcagggaggccaccaggggacagccaagggctggagccggcagggcctgcgcagaccttccatcttgcctgaggctgctcacatgtgtgccgagagccccgaagtgccctccaagctccttgggaa

SEQ ID NO: 11844 - DNA, 430 bp, Homo sapiens
  source 1..430: mol_type = other DNA
gtgttgaagaagagaatctctttctaaagaaaatatttaaattgatgcatattagttgtacatgtttatgtggtacatgtgatatttgatatatgcctacatcatgatccaactgttttgaaatatatattattgttaactgtagttacactactgtgctattgaatactaaaacttattcttagatcagcattcctagctcttgtctggcagcctgcctgtctgtgagcacataaacaagttttttttttcttcaatgtttacttttcttctaaaatttaaagacttctacaaccagtttcaagggaaattatccttgtagtgtatacagtatgtatttctgattatccatgcagtggaagtgattaattaatatagataatggcaaacttttacattcaggtaacttattcgtaatactcttttggca

SEQ ID NO: 11845 - DNA, 383 bp, Homo sapiens
  source 1..383: mol_type = other DNA
catatttaaacatggacttttgaaaaaaagtcaatttaacctcttattgcaacagtgacgctctgcagctgcacttaaagtttcttccaacaaaaacattctgtttccggaaagctcttaacggagtgttccctaaagaaagctttttttttgactggagtgcactgggtgggctcactctcggcctcccgagtagctgggcctacaggcgcgcgggccaggctggctgggattacaggcgtgagtcaccattcgccacttagtttgaagcaaatggcctccttgcagcagtactacagcccggacgcagagcacagggcgcggctcccacttgcctccggctcccggaagcgggcggggccacctcgcgtcccgggggctat

SEQ ID NO: 11846 - DNA, 334 bp, Homo sapiens
  source 1..334: mol_type = other DNA
ttctttgttcaagacgccaagaaccttcataggataaacacatggcaaccacttgtctattacatgttaggttcattaaggtcatatttaaacatggacttttgaaattaaaagtcaatttaacctcttattgcaacagtgacgctctgcagctgcacttaaagtttcttccaacaaaaacattctgtttccggaaagctcttaacggagtgttccctaaagaaagctttttttttgactggagtgcactgggtgggctcactctcggcctcccgagtagctgggcctacaggcgcgcgggccaggctggctgggattacaggcgtgagtcacc

SEQ ID NO: 11847 - DNA, 490 bp, Homo sapiens
  source 1..490: mol_type = other DNA
gacctgcctgtcggacgcctgactgtggttcccggggggccggagctccaggagcctgagggtgttctccttcctgcagccgggtagggggcagcccacctcccgcccagggagaggcgcgcgcctccttgctccgcccccgccccagctgatggaccccggccggtcggcagaagggaagagaagggagggcttccctccgcctcgctcgccgcccgggctcacaggagctggcggcggcggcggcggcggcggcgtctcctgctctccgcggctgttgctgctgctcgcgctccgccgcccgggagatgcttcctcgcgcggcgcagcgctgaggccgtgcgtgcgccccggctgcgctgcgcgctccccacatacactgtgagctgactcacgctgcccggcggcggagggagcgctcgcccgcagtggcaacagctgcaagaaggagagggcggggtaggtgtccgttccctcccctcttccccct

SEQ ID NO: 11848 - DNA, 230 bp, Homo sapiens
  source 1..230: mol_type = other DNA
tattttgctaaaggcttcagctgctactgcctgtcttccctttctttgagaagcaacataaagataaaaagaaaaatacttgattttgtagcatgccagaatattaagatgctcctgaaaaaaatcagaaaacattatattttttcccagattgctaatcccgttattaatgccatccacaaaaaaactttcttccagacccactcttgtgctgtgtgtataaaccccgg

SEQ ID NO: 11849 - DNA, 638 bp, Homo sapiens
  source 1..638: mol_type = other DNA
aagccttctaagtcttgatatgtccttacaaagacaaatttgccaaacaggagttactgaaagtctgaaggggaaagcctagttaggttttatcttagaagtgatttttaaaacgaaacacgcagataagctcgagctttctggagcccggaagtccgcgccgattcggagggccacctctgactttctgatctggggtgcaacccccgaggggcaggggactgggaccccctcttccccgacccaagcagctcagccccgctcgcgaggtccgaagtggcgggaacgggtcctccgcggcggtcccaaggcgagggaggcgaatccggcgcgccgggtcggggatgtctcgggtgccgggggcaggggccgcaggctcgcaggtagaagcttccccacgcgagcgggggcctcggccgcggaaggggcgcccccggggccgccggcagcggcgagcgggcgggagggagctttccgggcccctcccgcgcctcgggctggcggggcgatggcgacgacggtttcccggctcccccgccccggacgccgatggcggtgcgttccggccctcccccaacagcttctcccccgcggtcgccggagccggtgaggccgagagggcggaggaggaggcgggc

SEQ ID NO: 11850 - DNA, 588 bp, Homo sapiens
  source 1..588: mol_type = other DNA
ttcaaataattcagtgtttcttgatttacactagaaataactatttaaaacctttacgttttgatgtgacgtacataggtattggtttgatacaatattgaatacctaagttactttatttatgtgtccaagatgctgaagcattatatattgtatttgtcattatcttcatatacttggaaataatagccactacattgttaagcatttactctgtgttaagtattttctaatacattatcttatttaaactctgcatatccatttgaggaaagtaattggcctccattttgcagacgcacatgtacctatctagtagatgtggcactgagcttcaaactcaggtctctctgaattcagagtacattttgaatcttgatattcctccttaaaaagggagtgcctattaagtcataggtaacccgtgagaatatatatttttgataacttccgaaggcaaaggaaggcaacatagtgcaaaatatcataatgattttgaactaaaattctaagcgtatttttgtacacagaccatatggtctctgagtgggccctgcagactgagtttttctgtcagtgtgtctcacc

SEQ ID NO: 11851 - DNA, 691 bp, Homo sapiens
  source 1..691: mol_type = other DNA
gatcaccagaagtcgggagttcgagaccagcctgaccaagacccgtctctagctactcgggaggctgaagaatcgccattgcgggtccggcggcagcgcgcgggccgggcgagcgtctcccggcaaacgcggcgccacagctgagccgacctccggggcccgcgccctcccctccccgggcaccactaggagcggccagcccgggcctcggctccgcgcgcggggaaacgagcgcggcggttaaaaccgttaccacccccgagttttgaactggttcaaaccctcccccgcccgggaactctgcggcgccggttcccgccaagagccgccggcgcttcgtcccgcccttcggccgtccccgcctcccgtccgcggcgggctccgggcccccgcgatgtctcccggtccccgcgtgcctgcacaccgccttcctgagaggcgccgtgtgggcggcggcgcttccacacggccagtggcgtcccttacagcgaaccccgccgccgcccgcgcgcgcacgcgctgccagtgcccgcccgcccacgagccctgagcgcactctgcgtggggctggctcggcgcctccgagcccggcgggccctgtgattggacgggcgcccgcctcgcgtcccgccaatcggggcggcgcttgattgggctgggggggccgcgtttggcgctcggtccggtcgcg

SEQ ID NO: 11852 - DNA, 502 bp, Homo sapiens
  source 1..502: mol_type = other DNA
cattcaacaaaaaaattaagtatttttaattgctaaggtccgagaaaatattcctgaacttgagtttctatttttttttaaaaaaacacattacaggcttcttttctgacaaagagggaaatatgtaaaccactagattgcctatctggtatttccttttgcagaaaatcactccgagatgcaaccttggagagaggcttccccagattctagtctggattccggagagaaatgaaacttttatttgctcgagcagaaaaagaaatagagccccggcgggttgcgaggaccgccctgctcgccactgctccccaccgctccggtaccgacacgtggccaagttcggccgcaggatgctgagccgagccccgccccgctcggcaccgattgccaatagcgccccgaggcgtagccgccgtgcccggccgtgcgctcccggcaaaccgagtggcagccgctgattggtggttgtggcgcagccaatcagaagtaggtttaaacg

SEQ ID NO: 11853 - DNA, 577 bp, Homo sapiens
  source 1..577: mol_type = other DNA
aagagggaaatatgtaaaccactagattgcctatctggtatttccttttgcagaaaatcactccgagatgcaaccttggagagaggcttccccagattctagtctggattccggagagaaatgaaacttttatttgctcgagcagaaaaagaaatagagccccggcgggttgcgaggaccgccctgctcgccactgctccccaccgctccggtaccgacacgtggccaagttcggccgcaggatgctgagccgagccccgccccgctcggcaccgattgccaatagcgccccgaggcgtagccgccgtgcccggccgtgcgctcccggcaaaccgagtggcagccgctgattggtggttgtggcgcagccaatcagaagtaggtttaaacgcgcagccgagggccgcgcgcaggagtagggagggcctagggcggcggagccgactcgtcgcggccgaggcgcgcgcggtccgtgccggcgtcagtctgggattggccggcccgcgacttcctccgccccctgccaatcgccggggacgacttccgtggccggctcccccgcgtcgctaaggagcga

SEQ ID NO: 11854 - DNA, 621 bp, Homo sapiens
  source 1..621: mol_type = other DNA
cactccagcctggcgacaaagcaagactctgtctcggaaagtatacatacatatatgtatgtgtgtgtatatgtgtatgtatgcgtgtatatatatatatatattttcacatatatagaaaagtaaccttgattataaggtttattaaaaaccgaatacaatatttaatacattcaaaggtaattaaaacaaaattattcctttcgtgtaaattttcttctcaggcattttgaaggttaatacttcaacgctgctgggaagttaatcttactaaaagaagcttataaccaataggcttccttgaaagtttttcaaatcaactaaaagctactctttcgttcaaaccgtcaactaaaggttacttttatatgcgtttttattgatgtaaacgttgtctactactgttattagtgcaaaagggtcttttctaggtaagatcgtaaaaataaaatgtgtaaaactttttgattaaacacaatgaaaacaaaaccaaatgctctctcttaagagagtttgtaagaattatgttaatcaaccaaggtttttctgcatttcacttttacaaatgcattgtgggtagcgcctagctaaaaacccggcgcgtggttcgcagccacgcgg

SEQ ID NO: 11855 - DNA, 605 bp, Homo sapiens
  source 1..605: mol_type = other DNA
tcctgccggggcccggggtgcccgaccgcagccttgggccaccctgagtccctgcaggcggccctgaggccggggtggcttccgcatggggtctctgcccaaggccgggaaggagcgtggccgcccggggagcccggagggctctagacccacggcgaccggacctggtgggcggaccccgcctccgcgtccccggcgggacaagcatggggcccccacggcctccgcgcccccggcgggacggatgccccgggccaccgcgggcagcgcgcgccccccacccactttccggcctcgctggattcccgggaccccctcacagacgaagcctgtctcgggggcggctttgggaggaaccgcaccggaggttcccctctccccagatcccgggaatccgagggtccctcaaagaccggcgtgctgcggcctgctctgagggcgcccgggcccctgggtccctcctctgaggaccgacgctcaggcagcgccgcttcttcctcccgcaggaggcgctgtaggactgagcggcagccgcggccgggcgccgggtcccagcatgcaccgcgcccggccggcgctgcgtttgggggccacccgggctgtgc

SEQ ID NO: 11856 - DNA, 553 bp, Homo sapiens
  source 1..553: mol_type = other DNA
actgtataacagttgtaaaaataaaaaacgttaaacagtaaggtgcatgtacatttcacgattctgtggcaaacacagatgcgtatatgctcctcagtcctgccggggcccggggtgcccgaccgcagccttgggccaccctgagtccctgcaggcggccctgaggccggggtggcttccgcatggggtctctgcccaaggccgggaaggagcgtggccgcccggggagcccggagggctctagacccacggcgaccggacctggtgggcggaccccgcctccgcgtccccggcgggacaagcatggggcccccacggcctccgcgcccccggcgggacggatgccccgggccaccgcgggcagcgcgcgccccccacccactttccggcctcgctggattcccgggaccccctcacagacgaagcctgtctcgggggcggctttgggaggaaccgcaccggaggttcccctctccccagatcccgggaatccgagggtccctcaaagaccggcgtgctgcggcctgctctgagggcgcccgggcccctgggt

SEQ ID NO: 11857 - DNA, 478 bp, Homo sapiens
  source 1..478: mol_type = other DNA
ctgtcacagtctcccgccgggggctaggggtgcccggcccgcatccctgggcgaccctgagtccccgcaggcggccccgaggccggggtggcttccgcatggggtctctgcccgaggcctttctggagggagtgtggacgctcggggagcccagaagggcgctgcacccacggggaccggacgtggtgggcggacccctcctccgcgtccccgacgggacatgcccggggcccacacggcctccgcgcccccggcgggacggacaccccgggccaccgcgcgccccccgctggattcccgggaccccgggagtccaagggtccctcaaagaccggcgtgctgcggcccgcacggagggtgcccgggcccctcctctgaggaccgactccctctggcggcgccgctcctcccgcccgcagggggcgctatggggcggagcggcttccgcttccgagcgccgagtcccagcatgcaccgc

SEQ ID NO: 11858 - DNA, 378 bp, Homo sapiens
  source 1..378: mol_type = other DNA
tgcacctgtcacagtctcccgccgggggctaggggtgcccggcccgcatccctgggcgaccctgagtccccgcaggcggccccgaggccggggtggcttccgcatggggtctctgcccgaggcctttctggagggagtgtggacgctcggggagcccagaagggcgctgcacccacggggaccggacgtggtgggcggacccctcctccgcgtccccgacgggacatgcccggggcccacacggcctccgcgcccccggcgggacggacaccccgggccaccgcgcgccccccgctggattcccgggaccccgggagtccaagggtccctcaaagaccggcgtgctgcggcccgcacggagggtgcccgggcccctcc

SEQ ID NO: 11859 - DNA, 524 bp, Homo sapiens
  source 1..524: mol_type = other DNA
aggttcagagccccgacactgaaggcaggacagcgttgttgatctgagcctacaacaggccgagaaacagatcttaacttttatttatgtattaaacagacggggtctggctgtgtttccgagctgggccggttccccctccctggggaacctggtggtccccgctcccgagaggtcaccacacagagagctcccgggctcaagcgctgctcccgcctcagccttccgagtggccggggccacagacgcgcgcggccaagcccggccagaccagcttttcccggagctcagtccgtgggccactgccaacccccaggcccaggccccggccgccccactccctggacgcggacccggcccttcttaccgaagccggctcggccatggcggttccgcacgaaccggccctgcctggcacggcacagccctgctggcccccaaaggcagagccggccgggcgcggtgcatgctgggactcggcgctcggaagcggaagccgctccgccccatagcgccccctgcgg

SEQ ID NO: 11860 - DNA, 811 bp, Homo sapiens
  source 1..811: mol_type = other DNA
ctccccagcccaaccccgctgcgcgtctggcgggcaggcgtggggctgacacgcagcaggcaccccctcgagggccccgggtctcatagctgcctgcgagtgcccctcagacctgcggcccagcctggtgtccccgggtgggcggtttcacacccacccgctaagtcccctcacgcgaggctgcagccgccaagcacgggcgacaggcgacgtggccggcgggacccgagaacggcgcctatgcctggcagctccctgcccctcggggtctgggtctcgggggctcacaacactcgcgcgcggccgcccttaccggggccggggccgcctcagccatggccctgcgctgtctagcccgggcctcggaagtcgccgccgctgccgccgctgccaccgcgcccggctccaagcaggcccggccgccgggtcctctccacaggcggcgccgacccggccctgccttccccgcacggacgggactcacgcggccgtcggggctcgggacgcgcaggaacgcggcggaggcgcggtgcagcaggcggcggatcaagctggggtcgcgaggccgactccgccgcactccacccgcagcggcccctcagctggcgctttgtgggcagcgagtgcaccgggaaccgcgcgggcctagacgcgccgcaggctcgcgctgcccagccaccgcggccagcgcgccccctgccggcccctgcggccagcgccccccgcgtcgcctccgcccctcccccccagctcttgggcttcggtgtggggagggtcgatacgcaggcgccgtctgcaggcaacagcttct

SEQ ID NO: 11861 - DNA, 351 bp, Homo sapiens
  source 1..351: mol_type = other DNA
cgcttcggaggttgaagcgattctcctgcctcagcctcccgagtagctaggtgtttgaagaggccactgttaaaatgcactgcacagaaagagctcagccctctcagtgcgtctgaagacagaattactcctgcaaaattttcacggcctttaaagtcggccatcccagattgagggggcctgacccctgggcgaggccgccgcctctcagttttggggcggtggcgaccccagtccgggagtggccccggtaggtccccgcaggcgggcaggagctccgaggccattggctggcgcgcgggctgccaaggggcggggagcgccgccgagctgtccggccccggagagggg

SEQ ID NO: 11862 - DNA, 351 bp, Homo sapiens
  source 1..351: mol_type = other DNA
tgcagccacttgcactccagcctggaagggttgtaatcctagcattcagaccagcctggccatgcctgtaatcccagggttgcagtgagccgagatcccgccactgcactccagccggagtgagactccgtctctagaaggagaccttaaaatattaacaggctttccgcaaatgatccttcagcagaagctgttgcctgcagacggcgcctgcgtatcgaccctccccacaccgaagcccaagagctgggggggaggggcggaggcgacgcggggggcgctggccgcaggggccggcagggggcgcgctggccgcggtggctgggcagcgcgagcctgcggcgcgtctag

SEQ ID NO: 11863 - DNA, 401 bp, Homo sapiens
  source 1..401: mol_type = other DNA
ttaaaaaaaaaaagtttcgttctcagaggaaacactttatcctgtgaagtggaagttcattgcttgtctccagagagacatacatgtagcatgaggactgctttccaaggcacatgatcagagggctggcctgggcctgaccccacgctccacactgttgatatggaaactgttcccagtttctaaaaacaggtgaacttttggaataaaatcacttgccttttgttcttttccccaacaacattacatgttctttcctcagcaaaaagtctgagttgtacacatttttgaattcaaagacagcaggatcccgtggctttgccctggtgcccgcactctggccgggagtgccaagcagcgttctccctcccgccgcacgggggcacaatgggaatcttgtg

SEQ ID NO: 11864 - DNA, 407 bp, Homo sapiens
  source 1..407: mol_type = other DNA
taggtattcaattaatacatgtttaagtggacctttctcatggttacaaagagcattcattcatactgtgactgagagcagggtctgatcagcccgcgtccctggaacccgggctgcactgagctggtcacatgaactccgggctgtcggagccaatcaagccgcctccagaccccagcacgtcgcctgggctgcgcgctccgactgcgcctccgcccgcgcgcctcccggcctcgcccgagggtgcctgggcaggcgaggaccccgtcctggagggtgggaggccccggcggttcggcccgggctccacgacgggctggcccgggctcagggcgtgtccgtcgccgccgggcggctcgctcgacactgagcctccgacgagcctcggagtgtaaacggcctgagag

SEQ ID NO: 11865 - DNA, 246 bp, Homo sapiens
  source 1..246: mol_type = other DNA
tgcattgtttacgaatgcacacatgttagttaatgcataatggagtgcagtggggcgatctcggctcactgcaacctctgcccgggttcaagagattctcctgcctcagcctcccaagtagctgggactacagggcctaggtattcaattaatacatgtttaagtggacctttctcatggttacaaagagcattcattcatactgtgactgagagcagggtctgatcagcccgcgtccctggaacc

SEQ ID NO: 11866 - DNA, 756 bp, Homo sapiens
  source 1..756: mol_type = other DNA
aacatttaaatttttatttttctctccttgtttaaaaatactatccttgtcatggaaaaataactattaaaggaatagacctttaatagaactatgatatatatgcttccaaacttttcaaaactgtaattatacatgtacgcagtatatgacgctacatatgtcctatattgttttaaaatgttatttttaaaacaaagacaggatcgtcctggacaggctttttctcttaatcaccgaaatcattttaaatgatggtccattaaaaaaatttactgtaataaacccattacagaatattccatttcaaacacaggtgggcatgagttacatgacccaggacctcgggcagcagaagtgcccgtgggaaggggagccgggcatcccagggcgagggggccgccctggccgcggtcacccgggggacgccctgcccggaagcccgtgctcgcccgcgggcgcggccaggcgggtcccatgagggggaccctttcaaccgagtcctcgggctgggccgcggggccagcgcagtgactccccccgcgctcggcagtccggccggggtcgcggggtcgcggggtcgcggggtcggcccggggtcgctaggtcctcccgtcgggccccgcgggcggggctgggcggggcggggcggggccgcgggcaggcgggcgcagcgcctgccgttcgcctctcaggctgcaggtggggctgtgcggccgcgctgcctccaggaagcctcacgggccttcgtctgcc

SEQ ID NO: 11867 - DNA, 405 bp, Homo sapiens
  source 1..405: mol_type = other DNA
cagagccacagaggtttggaggcaaaggctgcagcatctcactgcccatcagcctctgggcctccgggcctcaggcaggcagtcacgggaggggctgccccttgccaggggtgtagatgcagcctggccagagggtggcacattacagacaggtctactcctgacctcaggtgatccacccacctgggccacacccagcctgggacagtttttagaatcactgacttgggtgggtagtaaggtcctgtcttttttaattaattaattaaaataactgccctgagcaattttctttaataatttgttctcacaaataaacagtttaacattcatttctcaacaggaaggactgcacagttaatttttgccataattttaaattcaagcctattggccactttaaag

SEQ ID NO: 11868 - DNA, 615 bp, Homo sapiens
  source 1..615: mol_type = other DNA
ggcagagcgctgtctgggccgcaaggtctggacggggcttccaaactcagagcagagtctcctctgcgtggcacagcaggcttagccgcgcctcgcccgcacccccggagcgctctcgcagcgcccgcccagaccaggccttaggcagaggagagtgggccgcgcttccttcccgccaggacgggggcctggcagctgctctgtcccacccacgccctttccccgaccgcggcctctgggaaagatgccccaccatcagcccctggcacatgggacggtgataagcggcgcgtacccgcgggcttgcacgcccacagccgccccggctggtctcggcgcgcaacctctacccgcagctgggggcggggacgaggggagggggcggggacgaggcccgagccaggtccgccccgccctgtctccgccccccgcttccgagccggcgccgcggcgccttctgggaagtgtagtccgcgtctgcgccggccggccgggccgccgaagccgggggctccgggcggaaacggcaccacccaccaggtgcgaggcgctcggggcgggctcaacgaggccgggggcgggcccgggcgcgcccacccccgcccctccccctcg

SEQ ID NO: 11869 - DNA, 347 bp, Homo sapiens
  source 1..347: mol_type = other DNA
tcccgtaaaggtctccgggggctgagggctgagggctgagggctgccctccacatctaactccaggtggtgtccgggccagcaggccccacctggcccggccttctcccaggggacctggcttaaagtcctctcccttcgaaggacccgttctcgcaagcacaggggcccacggctcccgcggctggtttcgaatcgggtcctcgggactccaggcgagggaatgggggcggggccggagtttcccagaccgaccccccgggccgtcctcccgcgggagcgcggcgctgcacacccggctggcaccggcgacttagagacggcagcgcacgactcgctggctccccc

SEQ ID NO: 11870 - DNA, 385 bp, Homo sapiens
  source 1..385: mol_type = other DNA
cagctctggattcaaaccggggctgatcaggcagcatttcccgtaaaggtctccgggggctgagggctgagggctgagggctgccctccacatctaactccaggtggtgtccgggccagcaggccccacctggcccggccttctcccaggggacctggcttaaagtcctctcccttcgaaggacccgttctcgcaagcacaggggcccacggctcccgcggctggtttcgaatcgggtcctcgggactccaggcgagggaatgggggcggggccggagtttcccagaccgaccccccgggccgtcctcccgcgggagcgcggcgctgcacacccggctggcaccggcgacttagagacggcagcgcacgactcgctggctccccc

SEQ ID NO: 11871 - DNA, 328 bp, Homo sapiens
  source 1..328: mol_type = other DNA
cagaggatttttttttttccagaacaaaattcaaaaagtccgtcttttttgagctatgagtctcactctgtcccccaggctggagtgcaggggctaacggggcaccggattacaggtgtgagttctcaacaatgtacacactctggatgagaaaaataaccattgtttacaatcattctcataatgggcatttggctactttgatcacagggctcttagaactgcgctgtccattatacctacagtttggtcccacgcccacctccaacttacatgaatgttggaaggatgtggttcttgatttcagaaaacagccaggagacattcc

SEQ ID NO: 11872 - DNA, 445 bp, Homo sapiens
  source 1..445: mol_type = other DNA
agggagccagtatgggccctgtagagggtgcctgtctggcaggctggagtctgtggacccacctggcaggtgtcggctggagcagctgcggcaggcctgggagctgccatcccaccagctttgtccccagggccgggcgcagcactcctccaggcttcctgctgaggcattagctgagcctgcctgtagctggcactgccacatggcaaagcagtggccttcaggactggctttggcaccctggttctctgcctgaaaccacagatctgagctagtaccctcagtgcagtgggcgcccccccagcctgggcaacaagcgggttgaggtctgcacccaccaagcaggtggaaaccccagtcccaccctgcacatacaaagtgggtagaaggagcaggcttcgggcctctccctgtccggcctgtcctttcctgcctggcagacagc

SEQ ID NO: 11873 - DNA, 620 bp, Homo sapiens
  source 1..620: mol_type = other DNA
gatctgtaaaagggatctctacagaagataggaggctccgtggtctcttccagcccagatggatgtccgcgaggacgccagccctccgcctcccgccgggtccctgaacgccggcccggccggttcccccaaacgtctcagcgccgctggggcctttctggctgcgccgcctccgaccccaggccccggtccgcgcccgccgctcgctagtcctgggagtgaggagaacgcgtgctgaggacccggccagagggacagcggggaccgccctcccgctgcgtctctgagaggccgttcctcccgcgtccgacccccgcggggccgtcaggttcggggcggcccaggctgcgggtccgcagggcgcttcgggccgagccggcgcggcgcgtgaagggcaggggacgccccgaaagaccgctggggtgggaccccaagctccaggggtctttggtgcgggcgcggggctgacgcggaccctataacccatcgccgaaaccgggcggccgcgcccctacctgctcagccaatcagcgagtgggctcctaggcaggtcctgagtgacagcgcggcgggctggatcaggagatgcgcgtgcgcggcccggcccggctgatcgcttc

SEQ ID NO: 11874 - DNA, 582 bp, Homo sapiens
  source 1..582: mol_type = other DNA
attagatacatgtgttcaattttctatctttatccagaaatatggttttatgatagtcattattcacttttaaatcaataccaggtgataattttaccattgttatgaataaaaatgtttgtgtagcttcattcattgatgctttgatcatatgcttctatatttaaaaaaccagattattctcttactagtctcatctccaatttagatcttgttataaataatagtttgagaataatacatttgtctcctaaaggaataattataacatcaatctcagaacccataaggatgtggcctgaataacatcgattttgattcaagaaccaggagaacatcattatattgtaaatgttcctttaaatggaaatacatagattttaattcttcaaagacagtgaaatgttttttataaaagcagtagtttaaaaaagttaaggctttatttttcttaaataaatttgcagtaagttgaatatatggctttcattctaaggatgcctcatgatcacctccagctatcacctctgtgttccaggaaggaggagggtcatccctgtccacaaggaagtctgggaaatg

SEQ ID NO: 11875 - DNA, 465 bp, Homo sapiens
  source 1..465: mol_type = other DNA
aatgggagggacctctggtggtcctcactgctcattatgcactaattataatgcattagcatgggagcctcagttccgggaactgcccacccctttctcactatgaataattcaacccttgtttagcatataatcaagaaataaccaaaaaactgcacgtgcggacgaggtccgggtcgcactcgggcggtcagcctggcacgcacagcgccggcgtgcagggggccttgggtgccaccgagtccgggaggaaatctaggccgccatccgtccggagactggagggcttggaggtcctttctctaagcctcgctgcccacgcctgcgcactcaggcaccgcaggtaggaggaacgtaccaactgcgaggcggggggtgcgcgcgaagacccccgcaggctgcgcttccggaagtaacccctggcgcatcccggaatccagagcgcccactacggcctttggccag

SEQ ID NO: 11876 - DNA, 543 bp, Homo sapiens
  source 1..543: mol_type = other DNA
gctggcttggcttagcctgggctgggaacagaaggaaagcggccactcttctacttctcttgtgcctgcaagagaagcctctgctctcaactccagcactgcagggggacagagtgtctactccacccccaccaggcaggggattttaagcacctgctgggccaacatctgtgagaagattaagccattgcatgttttggactacttataaagtctaagcaagatgttttaaataataatcatgcatcattaggtttcatactgtgcaaaaaaaatgacacaaagtgagatcttttctggaagcttagtcatggcatccagagcccgtctctgagcacggccgtgatcctgctccaccgcctcatgagattgttagtgttaaacgagttaattaatacctccggaagattctggcctctcctcggcgcgagggcaccgctggcccagcaggtggccccccggggccggcacgggccccgacagccgcccccttccctgaacctcggcggcccagtccccgcttacctgaggggtggagccggc

SEQ ID NO: 11877 - DNA, 427 bp, Homo sapiens
  source 1..427: mol_type = other DNA
ctctcatttttcctgacagagaaagtaggatcagccagcggctggctgagtgatctggcttagcctgggctgggaacagaaggaaagcggccactcttctacttctcttgtgcctgcaagagaagcctctgctctcaactccagcactgcagggggacagagtgtctactccacccccaccaggcaggggattttaagcacctgctgggccaacatctgtgagaagattaagccattgcatgttttggactacttataaagtctaagcaagatgttttaaataataatcatgcatcattaggtttcatactgtgcaaaaaaaatgacacaaagtgagatcttttctggaagcttagtcatggcatccagagcccgtctctgagcacggccgtgatcctgctccaccgcctcatgagattgttagtgt

SEQ ID NO: 11878 - DNA, 332 bp, Homo sapiens
  source 1..332: mol_type = other DNA
gagtttctgtgagatcctctacttcaggtgatccctgctgtgggaaccagtgcaaagtctcagagcttctcatctcctccctaaaggagagaccttccttctcctcagggacgctggggaatggtcccccgtaggacccaagacagggcagccctgcctgggtaggagaagaggcccgggccggccgaggctgcggaatgctcaggcccgagccagagggaggtgggaccgagggctgcgcgcctgggcgagccgcctgcagccgcggccagggtcagggagggagggcgcgggagggcatcccgccccagaggccggtcccactggggagg

SEQ ID NO: 11879 - DNA, 574 bp, Homo sapiens
  source 1..574: mol_type = other DNA
aaacattaaaataaaataattagctggatgtggtgagtcccagctactcagaggccgaggtgggaggattgcttgagctcaggaagtcctggcttcagtgagccatgactccagctctggtgacagagtgaaaccaacaaacatgacaagtctttaatacctgtactcaactccccaacttttaaaatgggcaaatagaaaagtatgagaaataaccatttcaaactaaattttttttttaaaaaagtctgtgttgtcaagtataggaaaatgggcatttctcagggaaaactaatacgttttcctggaagataatttagaaaacatttaaaaaatatattccttttatacagccataaataatcatgtttaaaagaatatctaataaaatttcgcaaggcattattccaattatgccagacatgccatttaaatgtaattgtggtaaaactgagttttatatttcctatttatgcaatagatttaaaaagtatttttacgactaattatacaattcaaaaattgcctgtgttgaaaagcatgaaagtacatgaaatgggtgagtcatgggcac

SEQ ID NO: 11880 - DNA, 730 bp, Homo sapiens
  source 1..730: mol_type = other DNA
ttaaatgtaattgtggtaaaactgagttttatatttcctatttatgcaatagatttaaaaagtatttttacgactaattatacaattcaaaaattgcctgtgttgaaaagcatgaaagtacatgaaatgggtgagtcatgggcacaggctcgcacctgccaccgcagacgccacacaggctgctgagccatgccccacgtgcgccaacggccacctcggccgtcgccccacgcttggcccgcagccagacttctgctctttcttaatttctagaaaagagtgaagagaggcctctttggaacaaacttccaggtgcgccaccgccgtcccgggaccgccgcggccgcaagcgtccgcactgcggccggggtgcgcggcctgagaaaggcccgggcaacgacgctccgggggcttgccggagccctctttgaagtctcccgacgggctccccggtgaccataggccagccacgcggtcgcccggggacgcgcgtgctccgcagggacagctccggccagtcccagagaaacccgggctggtggtcgccatggcaacggagtccgaccctccgaggcctgccgccctggcgcggcagtggcttgagtgacccggcccgctcttggcgggggcgcccgcgccccggccccggcagtccctccccgcccccaggccgcggccgcgggagccggcgactgaccctcggcagctcctgtagtcacgtggcgctggg

SEQ ID NO: 11881 - DNA, 587 bp, Homo sapiens
  source 1..587: mol_type = other DNA
aaacagggagctctttgtccagcttctcagagttgctgtgcagctcggatgctgtctgacgagggggattctagtatcagagtcttgaaatgttatctaaaaacccaagattgaaatcagctcctgtccggggccagcagagagaaccgatgctggaacgtcgttgcaggggccccctggccatgggcctggcccagccccgactcctttctgggccctcccaggagtcaccccagaccctggggaaggagtcccgcgggctgaggcaacaaggcacgtcagtggcccagtctggtgcccaagccccaggcagggcccatcgctgtgcccactgtcgaaggcacttccctggctgggtggctctgtggcttcacacccgccggtgccaggcccggctgcccttgccctgccctgtgcaccgccaggtccatgctgctgccaccccagacctgggctttgcctgccacctctgtgggcagagcttccgaggctgggtggccctggttctgcatctgcgggcccattcagctgcaaagcggcccatcgcttgtcccaaatgcgagagacgcttctggcgacgaaagcag

SEQ ID NO: 11882 - DNA, 627 bp, Homo sapiens
  source 1..627: mol_type = other DNA
gaggagtgcggccgccgctccgaggggtcggcccaggccgcccccggcccggggagcccccagctgccagccggcccccaggagtccgcggccgagcccaccccggcggtacctctgaaaccggcccaggagccgccgccaggggccccgccagagcacccgcaggactacagctgcgacgactgcggcaggagcttccggctggagcgcttcctgcgggcccaccagcggcagcacaccggggagcggcccttcacctgcgccgagtgcgggaagaacttcggcaagaagacgcacctggtggcgcactcgcgcgtgcactccggcgagcggcccttcgcctgcgaggagtgcggccgccgcttctcccagggcagccatctggcggcgcatcggcgcgaccacgcccccgatcggcccttcgtgtgactgcggcaaggccttccgccacctacctggcggcgcaccggcgcatccacaccggcgagaagccctggtgtcgcaccggcgcatccacacgggcgagcggccctacgcctgtcccgactggagccacatccgggacggcgccttctgctgtgcgacgacgaggagagactcctggcccaccagaagaagcacgatgtc

SEQ ID NO: 11883 - DNA, 309 bp, Homo sapiens
  source 1..309: mol_type = other DNA
gagccacatccgggacggcgccttctgctgtgcgacgacgaggagagactcctggcccaccagaagaagcacgatgtctgggccctgctagcgagagaggtcaaccccggtggccagggaacccacttccaagcgcagggacgccggcctccagctggtgtgccctctggctagaggagccaccagtggagtaagttacttaaagcagcaagaggtgaagcgaagccactcttacctctcccccaaggtcccagcgctgagagcctcccctggctgtcagcagcactgtgtaggctcttgccagagctc

SEQ ID NO: 11884 - DNA, 589 bp, Homo sapiens
  source 1..589: mol_type = other DNA
cagtctggaccggggtggcaactggggagatgattccgctccatctctacaaaatatttaaaaagttagcaggtccctcgtagtgaaccctaaaagttatcacaccccacggtggggctatcgcggcttgagggcagccacagcctcagccggggtttctgtccgggccctgatgggtccccagcagggagaaacagcgtccggcgcgctgtggcgctcggcgaacgtgcgctgagttcagggggtcgcacgcggagtccaggcctggcaggggtgccaggacgccgccggccatctggggcccgacctcccaaggtctcctccccgcggccggcggctagcgcgctcacggcgcccgggccttgcgcgcccgccgggggcgaggtcagccctcccccctcggctattggctccagagaacaaaggagccgccccgcgggctgctccgatagggccgggcgggtcatctgagcggcgcagccaatggagtggctgggcggccccggggatggccaggcccgccagccaatcaggcacccgtgcccgccccgcctgccccgggaatggccagggccgggagcccggtgcc

SEQ ID NO: 11885 - DNA, 251 bp, Homo sapiens
  source 1..251: mol_type = other DNA
cctcgagccctggtatggcccgagacagagagctgctctgggaggtcccggacagtggaaggcctgctactacctggagacccagggtggcgagggagggaggagcccccagcacccatcagagccccacggttctgtaagaaaccatggtaggcatgcgtaccaaaatctcttgcttttatctgagcctgcaatccctgagtaactacggaagctctcagcctgcatgtagccggcaggtgcagcccgtt

SEQ ID NO: 11886 - DNA, 237 bp, Homo sapiens
  source 1..237: mol_type = other DNA
tctgtatcacacagtatgcattctttaggtgcacggcccaagtgtaacacaaagggaaggcgacacctcttgaagtgctcccccgccatggcttctgccttggagcaggagccccgacagtatagacggtgctgcagtgacccaggtctccctgaccactatctcctcggcctcagggtggagaaggcagagcagccggtgcctcggggatcctgaggcctgggcacccgagtgatt

SEQ ID NO: 11887 - DNA, 384 bp, Homo sapiens
  source 1..384: mol_type = other DNA
gaattaaggattcaagggcaaagcttgatcctgctggggaaccctggcaggtacgtctcacatggagcaagaacacaggggtgttctttccatctggccttggtggcagcatctcccaggggcactgtgtccctggtgctaacctcaggcagctggaggatggccaggtggggggtggctccagccaccgtgttgggtgtctcgtggaccaggctatagacagatcttttcttctgtgcagacaccttcctgtgatctcaggaaatgagacaccaggaggtgtctgctgtacaaaatcctatttgctcaaggaacctttcttaatcatttttctgattctaaaaagtcgatgacaaaacttcgatagaaacaaggaagaagtgt

SEQ ID NO: 11888 - DNA, 404 bp, Homo sapiens
  source 1..404: mol_type = other DNA
ccagtccctcgaggccctagcctctgcatcctgtgaagagggccctgctgtgcagagcgcagagggtcccgcactcacagtctcaggagggcagacactgtgggactccactcacatgagaagacgtaatcccagctactcgggatgagccgagatcacaccattgcactccagccagagcaagctgcaggatgaaaagtcctgcagatctggtgaatgtactttctatggtactattaatgttacatcatttttaccctagtaaacattttttaagaagtcttcctccgtgtttgacattctttcacaaaagggatttcattttgtgaaatatttgaaagcatcgaagtctagcatttcacgttttgcaagctggggaaaagcattcattccgccacttaagg

SEQ ID NO: 11889 - DNA, 437 bp, Homo sapiens
  source 1..437: mol_type = other DNA
aagacgtaatcccagctactcgggatgagccgagatcacaccattgcactccagccagagcaagctgcaggatgaaaagtcctgcagatctggtgaatgtactttctatggtactattaatgttacatcatttttaccctagtaaacattttttaagaagtcttcctccgtgtttgacattctttcacaaaagggatttcattttgtgaaatatttgaaagcatcgaagtctagcatttcacgttttgcaagctggggaaaagcattcattccgccacttaagggcacacagaggcccggagctggctttgctcagagcttgtagcggcgccacaatctcgtcctctcaggaacaggaactggcttgacgcccttctgaagctcagcctggcaccggccccggcgccccagcccctggccaagccagtctgcagctg

SEQ ID NO: 11890 - DNA, 286 bp, Homo sapiens
  source 1..286: mol_type = other DNA
cggccagcgactccctacaggctgccagtggtgcggacctgggcgggtgccggagcccgggcgagcgctctaggcccactcctggcgtggggcgctggaggggattgtctgtctctgcctgagactggggtaggagtcatgcatattttcaaacttggaagaattatacttgaggccttcctgaaagactataataaaaaatgagctttggaatggccgtatttctgtttctttaaagacaaacatttttgtgtgtgtggctccacccagccgaggttttggtggc

SEQ ID NO: 11891 - DNA, 308 bp, Homo sapiens
  source 1..308: mol_type = other DNA
ctcaaagaaatgtatgtctttctcttacagttctctttagaattattagcaattttataattactaaagtgctatgtaattctaaataagtaatggtaaattgagaccccttttacaatgccccattacaatactctcaaagtttccattttagtggtagtgaaagtcatttactctcttttgcttcaggttcagtatggtagccaccaggcataccaatggagtagctatttaactttaaataaattgaaacaaaataaaatttaaaattcagacaggtgggcaggtcccttgcacaagtaaatctg

SEQ ID NO: 11892 - DNA, 421 bp, Homo sapiens
  source 1..421: mol_type = other DNA
cacttttgaaaaggtgaaaattatcactatttgataaacctaaatacacttttacactgttggtgcgtaaactagttcaacaggcatcttgaacactccagagtattactatagacatttcctagacaatttctccccacagggaggttctctgaaattacaagttatgtaaaaatgttttgatggttaatgatccttacaatcagactcagcctatcagaggctcccagtggcatctgctttagaacccgcatctagacaaacttctaactgttgggacatatcccagctgggcattcatgccttaaaacactcttttttcacttttgagaagatactgattaactttccatttaaactgtttattttgcataatggcatgaaagagaatttcaaagaggaagaagaccgactggagtct

SEQ ID NO: 11893 - DNA, 477 bp, Homo sapiens
  source 1..477: mol_type = other DNA
tccagctcgcgatgaggttgcagtgaactgagatcacaccactgcactccagcctgggtgacaggatgacattctgtctcaaaaaaaaaaaattaattgtgtcagggtatttacagaataatttaagtagaacattaaaagatatatatatgtacacacacacatactatgtaacaattttaataaatacaccatgattaagaaaattagaactattatagtagattgagtggaatttttttagggaatcttaacattttaaaatcatgtggtaacaatatcatcacctaggtcctagaaaacatgtttttagtgcagatcttctagaagctgtaacaattgtaattaccaatgattcatgccttagaaggagacaatgactgtttgccccaatactgaggcagacacaaatccctggctcaggataaaattccgaggctgcaaagtgcaacagcagactcttctgactcaggaagg

SEQ ID NO: 11894 - DNA, 322 bp, Homo sapiens
  source 1..322: mol_type = other DNA
tctgggagaatgacaggctccctgtttcagcaatgatgaatggaaacagtggaatccagtagggtaagactcgggttaagttaggtgaggtcctatagctggttaatgacctaaccagatatgcagcctgatgctcttgagagaagagcctcctaataaggctaaattggaaagccctcctctctcagagaatgataattaatggacagagagaactatatggggaaatgtccctataggagcatggcaagatatttgacatcatgaggccctgctggacatggggctgagcttcctgatttctgaagtctgagtgatttcc

SEQ ID NO: 11895 - DNA, 314 bp, Homo sapiens
  source 1..314: mol_type = other DNA
gacaggctccctgtttcagcaatgatgaatggaaacagtggaatccagtagggtaagactcgggttaagttaggtgaggtcctatagctggttaatgacctaaccagatatgcagcctgatgctcttgagagaagagcctcctaataaggctaaattggaaagccctcctctctcagagaatgataattaatggacagagagaactatatggggaaatgtccctataggagcatggcaagatatttgacatcatgaggccctgctggacatggggctgagcttcctgatttctgaagtctgagtgatttcctcc

SEQ ID NO: 11896 - DNA, 563 bp, Homo sapiens
  source 1..563: mol_type = other DNA
gagaatatttcagagtccatcgaaattttcaaatatgaaataaatatgtctcggcaagaagattccagttcccaaggggaagttggttaaacttaagtaagattataacacttgcaggagtccacgcggaggctcatccgggaacagcatcctgggccagagacggttcttctccaggctgggggccacgtctgtgaccagggcctgcaccacgggcagccgcaggtgggacaagtgccacgtggaagtcggtgtcatcctggctgtgaggagagaggtcactgctacctgctctcggcccccggaccccacgcgctgctcctggtgacccagttgggtcggttcaccgcccaggacgtcctaaagaaggaggacctggccgggggctccctgcacgaccgggccttgcgcgagctggtggccgagtgcgggggccgggtctgtgcctttgataaccgggccaccggccgggagcaggaagcccaggtggagcagctgctggggatggtcgagggcttggtgctggagcacaagggcgcccattactccaagctggcgcaggt

SEQ ID NO: 11897 - DNA, 379 bp, Homo sapiens
  source 1..379: mol_type = other DNA
ctgccggatccagatcacggttcaatggacattcaataataaaattgttttctttcttgtttaaaattgttttcccatcaagtcttagacaattgttaccatatgaatggcaatcaggtttatgtccactgccttaaatggcaatcaggtttatgtccactgctctagccttaaatggcaatcccacagggtgggctccgcccagagtcaaaccctgcaagggcttgttctggtcctctttggaccagagtgcctttctgatcctggttagcagaaactttccgggtgctgagggcagcagctgctgcccagaactttcttcttccaaatactgcttgcttgaaacagtcaaaaacacactgtcccagggcagcactgc

SEQ ID NO: 11898 - DNA, 372 bp, Homo sapiens
  source 1..372: mol_type = other DNA
tgtttaaaattgttttcccatcaagtcttagacaattgttaccatatgaatggcaatcaggtttatgtccactgccttaaatggcaatcaggtttatgtccactgctctagccttaaatggcaatcccacagggtgggctccgcccagagtcaaaccctgcaagggcttgttctggtcctctttggaccagagtgcctttctgatcctggttagcagaaactttccgggtgctgagggcagcagctgctgcccagaactttcttcttccaaatactgcttgcttgaaacagtcaaaaacacactgtcccagggcagcactgcggtgtccgcagaggtgtgggggagagtcatggagctttcagccccagcac

SEQ ID NO: 11899 - DNA, 522 bp, Homo sapiens
  source 1..522: mol_type = other DNA
tttggaaaagtctctttttccacctgtggaaagcaaaaggagccatttcctgatgctagatttaatgctcagtttccttgcattttaatagaaattttaagatcagttttgatcacatcaggatgaaataactttgaaaattataaatgtattcacagaggcttattacaattatgatgttcataatcaatatcattaccactgtcatcttgaatctaaaatgttcttctctgggcgctgtcttaatacattctgataatataaaaatagatttcttgacctaaagaagagaagttattaaaaattgaagtttataaattaccaaaatagcaaataaaccatgaaaactgtttttaatttaatgataatcagtaaaatgtaagtttaagccaattaagacatccttatttatgcccataaggatgacaggaaattaaaagtgtaatattactaagtgttaactcaactccctgggagtcatatttggcaataaccagtcacgtggaaaatgtacatccccaa

SEQ ID NO: 11900 - DNA, 679 bp, Homo sapiens
  source 1..679: mol_type = other DNA
gagcctccagggccctggcgtctgggtcaagcagcgcccctccacagtccgcaggctctgggacaggaccctggctgcctgtggagctcctgtgccagcagctgcgccccggctgcgctccggataccccgacgggttcacgccgcccctgccccgtgaaggaccgcgctgcggtgcggaggtaggtcaaaagccggggccgcacctggcttcctctgcagtcccctggagtgtcatccctgggtgggggtccctcctacgctcctccaactgtgcggaggcagctcggggtgcgtgcggaaggaggcccgggggccgccgggagtggggtgccgcctcacctgcgctcctcgggacctgcgagcgggcggcgggagggcggggtggggctgaacttcagcccctcgggttcatgacaggctgcagggcctgggagctgggagggtccgcgggcggacggccctgggaaagcccgtggggtcgttctcgcctccagccccgcccggccagggccggcgtgcaagtgtgcgcgagtgggagcgcagggggcgcgcgggggctcggtcttctcccgcccggtccgctcctccgggcggaaccccctttgccgggcccccgggccgcagctggtttcgggaaaccgcgcagcctgggcggggccgcagcccccacccgtgca

SEQ ID NO: 11901 - DNA, 655 bp, Homo sapiens
  source 1..655: mol_type = other DNA
ttcacccacctggcctccttggggttagaaagacggcccaggcctcgccctgagggcacctcgggttccagctacctccgggcccccagagagtcggatctgaaccaggccggcaccacggagattcccctgcgggccgcccgacgcctggtaggtggtgggctcttcccggcccagctcttcccgtgccccggggctggggaaagcgtccggcagccccgccgctccctggccccgtcccaggagccaccccaccgtagggctccagccagggtccaggcgtgcaggcggcagaaggtggacgggacgcgccagccccaggcctctcctcccgctctttttctggggagaaacacctgctacgtgagtcctcctggaaaccaggttggaggaagaaagggggcatggccctggggactcctcgtgacagagggtcctgcggcaagagggtctcccgggccgcggaggccctgcctcacctgcagtcctccgggagcccgcggccgagcagagcggacacagatgcacgggtgggggctgcggccccgcccaggctgcgcggtttcccgaaaccagctgcggcccgggggcccggcaaagggggttccgcccggaggagcggaccgggcgggagaagaccgagcccccgcgcgcc

SEQ ID NO: 11902 - DNA, 733 bp, Homo sapiens
  source 1..733: mol_type = other DNA
agagtcggatctgaaccaggccggcaccacggagattcccctgcgggccgcccgacgcctggtaggtggtgggctcttcccggcccagctcttcccgtgccccggggctggggaaagcgtccggcagccccgccgctccctggccccgtcccaggagccaccccaccgtagggctccagccagggtccaggcgtgcaggcggcagaaggtggacgggacgcgccagccccaggcctctcctcccgctctttttctggggagaaacacctgctacgtgagtcctcctggaaaccaggttggaggaagaaagggggcatggccctggggactcctcgtgacagagggtcctgcggcaagagggtctcccgggccgcggaggccctgcctcacctgcagtcctccgggagcccgcggccgagcagagcggacacagatgcacgggtgggggctgcggccccgcccaggctgcgcggtttcccgaaaccagctgcggcccgggggcccggcaaagggggttccgcccggaggagcggaccgggcgggagaagaccgagcccccgcgcgccccctgcgctcccactcgcgcacacttgcacgccggccctggccgggcggggctggaggcgagaacgaccccacgggctttcccagggccgtccgcccgcggaccctcccagctcccaggccctgcagcctgtcatgaacccgaggggctgaagttcagccccacccc

SEQ ID NO: 11903 - DNA, 337 bp, Homo sapiens
  source 1..337: mol_type = other DNA
agatcccggctccgccggcccatcctgagtttggcccagaggaaaggatggactcagggctccactgattgctgcggctggaggtggggagttcctcccgccgcccgacgaggcaggcccccacgaggccaccagcagccggctgctgcccctggcctgggtggcccggggccgcagcgcagagcagcaggtccggtggatgtgcacatcgatgtgggtgtgctgtggggcctcccattgtcagggacacagtctatgactcaaagtcacccagctgtcctggtcacagggccgcacccctggcccctcacgaggggaggcgactacagagcctgcg

SEQ ID NO: 11904 - DNA, 266 bp, Homo sapiens
  source 1..266: mol_type = other DNA
tccccatctcaatgcaagtatctggagatgagcaggtccttagatccttagttgacattaactgttgaagtccgactgccagcattctgtggcgccatgttggaggaagctgcctgtctcaccacagcccctgtccagatggcagctcccgaggttcctcctagagatcccggctccgccggcccatcctgagtttggcccagaggaaaggatggactcagggctccactgattgctgcggctggaggtggggagttcctcccgcc

SEQ ID NO: 11905 - DNA, 297 bp, Homo sapiens
  source 1..297: mol_type = other DNA
catggaaggccttctggaattgcaagcaagcttcaagttgactaagtgtgttcaccttccttcatctagctgccagtgcacactgaaatggcttgcattggggggatgatgaccccttggcactcctgagccaggttagcactgtccgcccactgcaagggtctcaaagatcgtaggctaggaaatggcccctttgctggaacagactcaggacaagtgtgctgcacagccagcggcccctcctaggccagctcaggcctcaccttgtccctccctgcagggcggggtctgattgac

SEQ ID NO: 11906 - DNA, 293 bp, Homo sapiens
  source 1..293: mol_type = other DNA
tcagctttcctttaagaattgagggttattctgtgagcttccactaaagaagagaggataacaggtttgctggcctgtttaaatattagctctgactgaattattccaggggtgcagctgctcctactggtagctaatggccatagaacaccaggggcgtcttaaagccccttctgtgatccagccttgtattgttacaatacgaattagaacaattccctagttcttcaacaaatcagtgctgcttttcttgccaatattgaaccaccagagggcctcaggcgactcaggag

SEQ ID NO: 11907 - DNA, 386 bp, Homo sapiens
  source 1..386: mol_type = other DNA
tgaggggctcaggtccctgaatcctgggccagagaagacccctcagccttgggggcattagtcctcctggcagcaagaggaccacagcagctgcctgggttggctcatgtaagggagctgccctgctacctcggcgggctcctggccctctgggtccctgccaggtctccagcccactggccttgactccagagccctgctcctgtgcccgctgcatgtggtgtgttcctgccagtcactagcagtctctctgactctggctggctcagcactggacccaggcccggctgctggcggagggggaggggctcaggctgcgggagcgccgctgcaggagcctgggcgggctgcgggggagggggccgctggctgggcaccggcggggc

SEQ ID NO: 11908 - DNA, 530 bp, Homo sapiens
  source 1..530: mol_type = other DNA
agccgcagctggagcgagccagctggccggggggaggggcctgcggctaggccagggctttccgaggggctgggccgtggccgccgccgcagggccccgagcccgccgattgggcgtgcaaggctggccccgggctgccgggggagggcgggccgctcgcacccggggatcccctggttggaacctcgcgctccctctctgtgcagctcctatgcagagccccacagagggctctctctctctccgtgtgtgtgggggcgtgcccccggggtcttcgagggtccaggcgttgccccggtcacccacagtaggcactgagcgcgtgctgtgtataccaagccacccgccgtttccctctaatctggggtgggggtggaatcccttcccccatcccggccgccggcgcgcgagtcccaggggctccttggcagagcgaggggctggcgcactcggcgcggctcagccaatgggacgggcgcgcggcgggcgcgcggcaggcgggagggggccgggaggcgggggccggagcc

SEQ ID NO: 11909 - DNA, 261 bp, Homo sapiens
  source 1..261: mol_type = other DNA
cacagcttccagtccccaggcggctgcacagaaagagctgtccccggggccttggggacagggtgacagccaccgcccagcgggggatgttacgcccacagacgccccggggctcagttactgtctaagtgttagaaataaattttcggtgccacaaaagaaataatgttcccagcaaggcaattttacttctatagaagggtgcatctctagggttggaccacacgactcaggtcagagcaggtgaccagtggtgactca

SEQ ID NO: 11910 - DNA, 395 bp, Homo sapiens
  source 1..395: mol_type = other DNA
ccagcatgcactctggcctgaagtgcctggagagtgctggtgtaccccacctgcattctgggaactggctgcccgggggaaggcagcttcctgctgcatgaccctagaggtccctgtggtcacggaaaggcacacaggggtgaggccgaaggcccttccgtctggtgccacaccccatgctgcagccccagggctctgctggacacctgggctcccacttatccccaggcgtccggccccccacccttcaggccagcgggcgtggagctgaggctttagagcctcccagccgggcttgttcctgtcccattgtgtatgggataggggcggggcgagggccagcactggagagccccctcccactgccccccctccctcttcctaaggaaaaggcc

SEQ ID NO: 11911 - DNA, 368 bp, Homo sapiens
  source 1..368: mol_type = other DNA
ctatactccagtctgggtgacagagtgagactgcctcaaaaagaaaaaaaattattttgtttgttttttagattttcccgggcctcccaaagtcctgggattacgggtgtaagccaacatgcctggcccctttggtcacaaaacatttctctgttgatcaaaatagttaacatcttcgccctgctacaatcctttaataggatgtttttggggggggatctagctcactgtaacctatactgttccagtgttctttcattcattcaaggtctgaagatggagataataggaatcttctcatctcaggccctgagggagtgatcagacaggtgactgagagctgggacgcctgaggcctgcctaggctg

SEQ ID NO: 11912 - DNA, 401 bp, Homo sapiens
  source 1..401: mol_type = other DNA
gataaaagaaaggcttcctatctctactgagatattgtgatgtttatgtgtatgcacatcaaaagcacagcattttgccatacccgataatgatcatccgtaaactgaagcccacaggtgtggaggggcaacccaccccttcacgtgacagatgtcccagcagtgacgtgttttgaaaaaactcccagtcgattttttctacacgcccttgagacgacgggacatctagagatcctggagccttggcccgaggtcctttggacgtcacccgcccacaggagcacctggcaaaagccaggcccacttcctgctcggctccgcccagagcagggggcgggcggataggcgcagcttgaagtgagattgatgtgcaatcaccgccaaggcgcgagggggttgtc

SEQ ID NO: 11913 - DNA, 472 bp, Homo sapiens
  source 1..472: mol_type = other DNA
tcacataatggatgtaggttttccaggtcctggatatagcagcgtaagatgggaaatcacagaatacccatgggtacccgtggtacccgggagggtggcaggtggggcacccatgttctacctggggtggcaggtgagctcctcagaggccggaggtactttgactccctagcttggccaagagcagctccagcgactgaccctcgcggccagtgtacaggggttgcaactgggagcctagggggccccaaggcatctccaggcccagcactaatggctcagcctggggccctagggacctctcctaatcctctgcagcagcgccggctcagcaccgccggctcagcaccgctccgcagcccctgcctgccacggtcagctatggtctgctgcggagtccccagcccagtgccccagtggagccaccgcctgttcctcgggaaggaacagtgggacctgaccggccagatca

SEQ ID NO: 11914 - DNA, 439 bp, Homo sapiens
  source 1..439: mol_type = other DNA
ggaaatcacagaatacccatgggtacccgtggtacccgggagggtggcaggtggggcacccatgttctacctggggtggcaggtgagctcctcagaggccggaggtactttgactccctagcttggccaagagcagctccagcgactgaccctcgcggccagtgtacaggggttgcaactgggagcctagggggccccaaggcatctccaggcccagcactaatggctcagcctggggccctagggacctctcctaatcctctgcagcagcgccggctcagcaccgccggctcagcaccgctccgcagcccctgcctgccacggtcagctatggtctgctgcggagtccccagcccagtgccccagtggagccaccgcctgttcctcgggaaggaacagtgggacctgaccggccagatcacctcctccaatcctgccg

SEQ ID NO: 11915 - DNA, 345 bp, Homo sapiens
  source 1..345: mol_type = other DNA
tcattcattcaacacatacttactgaatgcttcactgtgcccaagaccaaatgccttggtccaggttccaggggagccgatctgatccacctgcccattaggctgtatggtccaggaagctttactttggtcccgggctgtcccaaggctttttaaaggcccttctccatgtccccttcccattcccttcagaatggggagctgaaccgtccgctgttactcagctgaggtgatgggattgggggagggagtccctcagctccaaccccagcctccccagtcctctaagtgggaggtccctttcggggggggtctcctccaggtggtcacactgtggtaccgccc

SEQ ID NO: 11916 - DNA, 445 bp, Homo sapiens
  source 1..445: mol_type = other DNA
ctcaagaatgcaatcatgagaattagagaatctataatcagctccttttaaccaacctgcctgccacaccctggctgactccagtgggccctgttccggagactggggtctgagggggacccccagggctccacccagtttgttcagcggctagagtcgggtgggctccgagacggtctttggcgtgcacagctgttctcccagccctgcggtcagctgttccctgtgaggtcatcatgtcagcgctgggccgccagtgcccgggatctaggccgccacccggagcggcccttttcaaggcacactgggaaccacggcgccgcggcggggcgcccggtgaagtccaagcctccgcctggagtggagacctagtcgttttaggactacaagccccagaaggccctgcgcgggcagacggggcggggctggaggctcaggtgccgcc

SEQ ID NO: 11917 - DNA, 360 bp, Homo sapiens
  source 1..360: mol_type = other DNA
gtgaggatgcggcactcttccctaagccaggaacctccccgaggctccaggggctcgtgcacggagtgctgagctagggggccagggctgcagccgctgctgagatcggagcctgtaggcattgctgacggtaagggagccagggcgatctgcagaggagctcttgcaggaacatctcgagatcatcgcggcggccgcggggacccctgcgggccctcggttttaagactctggccccggcgttgcagaggaggcggcacctgagcctccagccccgccccgtctgcccgcgcagggccttctggggcttgtagtcctaaaacgactaggtctccactccaggcggaggcttggacttca

SEQ ID NO: 11918 - DNA, 561 bp, Homo sapiens
  source 1..561: mol_type = other DNA
actgggtggagccctgggggtccccctcagaccccagtctccggaacagggcccactggagtcagccagggtgtggcaggcaggttggttaaaaggagctgattatagattctctaattctcatgattgcattcttgaggctaaacacgtgttaattaactcgtttctatctgaatgcttttgcatacacaagggaaaagaagcaaaaagtgtattccttatctggaagactttgtgatttggagagcctcttacctcctcagggtaccgggcggccagcctccagccgtccctcaggggctttcttggaggcacgaagagaatctcaaccccgatacggggatccctagcgtgagaagggctcctttacactcagaggtgccgtaatggagccaagggacggcatcctcggggctcccgagccccgagtggagaagcttggggcagagggacggcgggggcggcccctggtgccgggctgtgcctggaagcgcgcccccgccccggcccccgctcccgcctccccacccgcgaaggcgggaccgcgcacggtgcgccggg

SEQ ID NO: 11919 - DNA, 442 bp, Homo sapiens
  source 1..442: mol_type = other DNA
cggagagttggacctgactcccggggtcggtttgtccgagaggcggcactgcctgaaacccagggccttggtcaagggtcggggctggtcccgggaatgtgcccctacccggattatcggcaccgatgctggagtgggcgcctgcaggtgctctgggcggactctccccacaccagacacccacaccacccgccctggctgaaggcctgctgagggggaggggttgccaagaatgtgttgccaggctccccatcctgggtgaaagtcaggcacccccagtccccagcaacacactgggagcatgggttgtgcagggattgggctctccctacagtcacagtcaggagggtggcagcactgccactcagattttcctggctccaggctctagaggggcgggatccagactgcccctcagaggcagaacctcaaggttgcggtg

SEQ ID NO: 11920 - DNA, 492 bp, Homo sapiens
  source 1..492: mol_type = other DNA
ggccactctgaggcccttcatactccaggaggatccccagcagcgcagcctgcgcgtggtggctcctgccctcccagggctctcgatggtgatcaggcctctcggccatgagcagcgcccctcggcgccccgccaagggcgcagattctttccggtgagtgtggcccccacgccagcccaaccttccctccctgggcagccttgggtgctccggccaagggtcctcgcccatccctaccccctaggtagcttagcctcagcggttgaggaactttgagaaccctgggtctctcacccagcaacccgtctcagacccggctggccttagcgggtcaagtctgcacgcgggccagggttctgggcggagctcgcctgccacgactggccacgccccctgcccacgcctttggattttcctaaggagtcttaatgagctccgctattggtcacactggcccagaggggcacgtgactgggaaggggcacaggctg

SEQ ID NO: 11921 - DNA, 738 bp, Homo sapiens
  source 1..738: mol_type = other DNA
ccccctgcccgccggggtccgagcccggcccctccgggctggaaatcggcagcctgctgctgcccctgctgctcctgctgttgctgctgctctggtactgccagatccagtaccggcccttgaccgccactctgggcctggccgggcccgtagtgcctccgcgggcgcttggcagcgtcgccggcccctccggaccttgctccccgcgccgcggcgggagctgctgcctgcccaggcccgcctctccggcctgcctccccgccgccctggagcccagccctgcgccgcagaggactcccgggactggcggaggccccgccctgcgaccgccggggctcggggccacctcccggggctgctgaccctcagcccgcactgggagtgggctcctcggggtcgggcatctgctgtcgctgcctcggccccgggcagagccgggccgccccgggggcccgtcttagtgttctgccggaggacccagccgcctccaatccctgacagctccttgggctgagttggggaggagttccccggaacgcgggcggggagtcctcgccccttgggagagaagggcacggactgcgcctggggtctggccctccgccttggcgccggcctccgtggccccgccctcggcgccgggcgcgcacttcccgcgggcggggctcgcggctccctggctcgcagtgcctgccgggagccacgtctccgaagaccgatagctgcttcgggattggc

SEQ ID NO: 11922 - DNA, 580 bp, Homo sapiens
  source 1..580: mol_type = other DNA
cagccctgaggatgggtatccctagccagcctggtggggcagcccatggatattggggggctgaagaattaattttggtggccaaagtgccttctggcgtccactctgacatccagctgacgttggcaggggagggggcggacgctgctgccgcccaaacctctagggggtagcacaccccttcgcgatctgcaggcgcagagaaccgcgggtggagccccacacgtgggtccgcagggcggagggcggggacagcgcggcgccggactacaagttccacaatgccccgggccgcggcggcggggaaggaggggtgcttcaggtgcctgcgacctccgcgcctcccgcccggaagtgcccgaggggccgcgatggagctgggggagccgggcggtgagtccccgcgccgtgaccgcgcccaccccgccgcccagggccccggtcgggccgggatcgccgtgccctcctgcggcttcggggggcgggaaggtgggtcaggcagcccggcgcgggtggggtttaggtgaaccgtaacgcggggggcgggggtgggggcacagaggctctacccccacctctt

SEQ ID NO: 11923 - DNA, 430 bp, Homo sapiens
  source 1..430: mol_type = other DNA
tttaaagactggcctgtaaatactgtgtgacatgtaccttagtttttacactttttaataaaacatctaatttcttccttatgattgacttacgaggcagccctgaggatgggtatccctagccagcctggtggggcagcccatggatattggggggctgaagaattaattttggtggccaaagtgccttctggcgtccactctgacatccagctgacgttggcaggggagggggcggacgctgctgccgcccaaacctctagggggtagcacaccccttcgcgatctgcaggcgcagagaaccgcgggtggagccccacacgtgggtccgcagggcggagggcggggacagcgcggcgccggactacaagttccacaatgccccgggccgcggcggcggggaaggaggggtgcttcaggtgcctgcgac

SEQ ID NO: 11924 - DNA, 607 bp, Homo sapiens
  source 1..607: mol_type = other DNA
taggggagaaaggcatatactatttcatccctccctcctgctgcagccagggtggtctctagggcgcactaggagcagctgggcctgggcggactcctcggccaatcagcctcggtcagcagcaccctcaggcgcagggcactgtttgggcattgcccaccccgcccagacgcgggcgcgggaggagaccagggcagctgtcccctccgcgagggtggccctcgaggccggggcgccagggctggagcgcgcggctcgggggtggaggctgcagagccagcgagcgagcgaggggcgggggcgcccgggccggcgcgcaggaggggcgggggcggcggggaggggggctcgggctgcgtgtgccggagccggcgggggcggcggtgcgtgcgcatgacgcggggggagggcctgggccgcgcgctcccggtcccgttgtaggctgctccgaggcagcgggatcacggcgctgggaagcgctcggcagcggcggccacagcgtgcgcggcggcgcctcctggcctcggcctccggcccccggcccccggctccatgcgctagccccgcgccgccagcccagtagtcccggccccgccagccccgcgct

SEQ ID NO: 11925 - DNA, 520 bp, Homo sapiens
  source 1..520: mol_type = other DNA
ctgggtgtccaggcagcccacaccatcatcccgacaggaggtgagacccagtgagcagcaggggcctggagaggtccgggcctcagaagtgagtcactcacccagaactgcagcggaggttatctttccagtccagacagatgagtatcttctggattttataatctccaaagaagacagcctcagtcatcaacagaaaccgactgtagcagccagcaacgaagctcgcgtgctgcagacgaggacacgcgcgcagacccggcatggctgcctctgacgagaatgagaaatggcccgcttttctccaaaatggggcccagtgtgtggcctcacctacctgccggatcctaggaggcgccctgcgagggctcccaggggctgccccagcaggccggctcccccgcgccgcgccgccgttcccgggcgttccaggccagacttgccgcctctctctccgggctgggctgactcccggcctctccaggtctgggcttgccggccgcgaggtggaggagttgag

SEQ ID NO: 11926 - DNA, 453 bp, Homo sapiens
  source 1..453: mol_type = other DNA
ctaaatgatggggggagtccaagcacaaagtggccccccatctccggggccctgacttgaaagcagggtgagtcccgggcccaggacaggctggaggaagcctgcacacaggcacctccctcaggtggggaatgtataaatacactgctgtaggatggtaaatacccactgccgctgttgctgaagtccagcaaaaagaatcagaggcttccttttaaactgtttgacaagtgtttattatcagacactgtcctaagggctgggactattctaggctttagaaggttcttaatgtgcttggtggccaccctgtcagcctggcccagcacttggctgttcctgagggcctgagcctcagcgcttagctccccccctagagctgctttggcttagaatcctgcgagccttccctctcctcccacagcagggagagacctaggagtagtgactgct

SEQ ID NO: 11927 - DNA, 239 bp, Homo sapiens
  source 1..239: mol_type = other DNA
gctcatggcctcctgtctgtcaacatttttacgtttggtcatggcagtgccaagctggcccggcaggcccagagaaaggagccaacttgataaatgccctcttttatgtggcaagatccctccacctgtcattatggtgcaaaatcagctcatgggagttgctccttgtgctgaccacacctgctagcccacgtgctctgggggattttcaggtgtggcagctggggtgcctcatccaa

SEQ ID NO: 11928 - DNA, 744 bp, Homo sapiens
  source 1..744: mol_type = other DNA
agccgcagaaccgggcgggcccagcgcgccccctgtcggccccgcctcgcctccctcagccccgcgctctcgctggagggggcggtggccgtgctgtcccgcccgtcgcgccggagcttgctctggggaccgccacaacgtccgctccacgggcaggggaggggtgtgagggcggcggcccggagcagaggggtgctgaggtccggccccgccgcctgtccctgctgacgctcggccccgccgccccatcggagcctgggccacctcccgcttgccctcctagccggagcccgggccaggtgggctgagtttggagggaaggggaccggcccagcagctgccgccgccttctcgtcggccgcacaatctccattaataatagttggttgggccgcggggggcgggtgggggtcccgggccggccggccgggccgctgggaacgggctctgcggagggagcgggagccgggcgcggcggcggcgggcggagtccggagggcgacacccccagcccgcctgctcgcccgccccctccctccttatgagagagagggagcgcggcgccggagccacactgcgccgagcccgcgccccgccgccacctcggcccgggagccagggagcgagccctgcgtgtccgcgcggggcgcccgagccgcggggcgcacggaggcgcccagagaggagcgccccggggcggccgcagctccgaacaagatgcagcgggccggaggcggtagcgcc

SEQ ID NO: 11929 - DNA, 270 bp, Homo sapiens
  source 1..270: mol_type = other DNA
gaaccagaagtgtttcggatcttggaatattttgtaccacatgattagttacagcaggtgctggagggggagttcactgtaccaagcgtctgctgctctcccgctctctgattgggaagcgtgaagtgcggcataggggtgggcgtcctcccagaaaggcccccaggagcctcatggccatacactgtccacagcggagtgtgagaagctcatggagctctacgagcgcctggaggagctggatgccgacgagggcctcgcggatcttgc

SEQ ID NO: 11930 - DNA, 409 bp, Homo sapiens
  source 1..409: mol_type = other DNA
ttctgctgcacaggagcttaaaccatccagcccaaaatgtcatgtagcggccgaggttccgcaccttctaaaagtttaacaatgaaaaattaaggtttaatgaaaccaaggcgctttctttcgtgaaggaattccgttggcaacatctttgcagctccacaacagctcaatggattttcgagaggtggggtaaagcctgaaggctcagccggtttatccaacgagcaatctgggatttgcagtttccagcgcccgaagtgcgcccgctagcagagagctcttggacctccccgagcctcgcgcatcctgatggcgtcacgcggccccgcgaggtctgtgcaaggaggcagcgcggcgcgccgagaaccacccgaggccgtgattggctggtgagccggccgcacgcgga

SEQ ID NO: 11931 - DNA, 214 bp, Homo sapiens
  source 1..214: mol_type = other DNA
ttttcttgtgtgataccatcttgcaatgtgcaagacatgggagggtgccattctggttggggaaccactgtgtgggaaaaccttttcgttccctgagagcagggaacttagcatccttagatgaacgtacgtgcctggcaaacaacaaacatttcttcgggggcggccggttggggccaggcagcccggatcccagccgaggaggtgcgcgcgc

SEQ ID NO: 11932 - DNA, 392 bp, Homo sapiens
  source 1..392: mol_type = other DNA
gaacgaggtctgtgccccagtctcccagccgcgacctccgaccccgcctcgcagaacgacccgagctggtctcccgagcccccttctcagcagcccggtgagcgaagactcgcgtcgggtcttcgttagcgcaggggctgtgggcccccggcaggggtcctgtcggaagctggccgcgcttatttggcccctggggccctggtaaaaccaggcaccgaactgtctcctcagcagctggggctccatcggccatgagagtagaaagaggctctggccccttcccttgtgcccaccgggcctgccgcagtggctcagcagccccttcagtagcccgcctgaggaccgatgccagaggcaggcattcttccggaaaggcccactgaggcaggctc

SEQ ID NO: 11933 - DNA, 600 bp, Homo sapiens
  source 1..600: mol_type = other DNA
caagcccagcttgcctaggccatgtcctgccacacacgcaggcgcgcgcgcacggaggctgtcgtggagggaggcacacatacagggcgtctgtctgcacgcacataagctgccaaagggcgcggacacacacggcgtgtgagacagtggacgcagggccacgccgccgcccgggcacacccaccgccgccggccccgggcaggcgcgaggcctcgcgggccgggctcccccggttcctgccaggaactgactgttccctgcctggcgcggccggcgaatggcgagagccggtggccggcgaccccccgccgcctcccctggcgtcccctccccgcgccgcctcccgcgggcctcggcggcttcgggctgcagcactgctgcccagcgcccgcggccgggctggtcggcgcgcctcgccgcttatctgcgctgtttggacagcgggcttggaaaggcaggcggccccgtccccgccgagtcaacaggcagaccccgggccgccggactatttctgtcttgtgcaggaatgcggcagccgcggcggcggcggcggcggcgggcgggcggcggcggcgtgggccgtgggccgtcagggcagc

SEQ ID NO: 11934 - DNA, 427 bp, Homo sapiens
  source 1..427: mol_type = other DNA
gacctgggtaggcccaggactccctgccaagacccctctctttggggtcttgaggccggcccaatatacccaccaagcccagcttgcctaggccatgtcctgccacacacgcaggcgcgcgcgcacggaggctgtcgtggagggaggcacacatacagggcgtctgtctgcacgcacataagctgccaaagggcgcggacacacacggcgtgtgagacagtggacgcagggccacgccgccgcccgggcacacccaccgccgccggccccgggcaggcgcgaggcctcgcgggccgggctcccccggttcctgccaggaactgactgttccctgcctggcgcggccggcgaatggcgagagccggtggccggcgaccccccgccgcctcccctggcgtcccctccccgcgccgcctcccgcgggcct

SEQ ID NO: 11935 - DNA, 537 bp, Homo sapiens
  source 1..537: mol_type = other DNA
tgccttgggcctgcccataacagagacaggagaaggacctgaccttgacctcagcctcagaccatgggtccgcctcctactgggggcctacgaggcccacctggccccaaatgcttggcaggctccctgcccgctggctgcttagggaggtgctcccacttcccccaggcttcactctgcaggtaggctggggtccccctctgtgctgggcactgtgggcccatgagatggccagagctgggcttgtctgggaataggcttctccaagctgccaaatttaagtatcctgaggcttgatggacccaaagcctcccagggtatgatctgactgaatctggtgtgcctgtgtgtgcgcgcccacgtgcatgcgcgtgtgtggctctgcggccacacaggatgctgactgcgtgtgtgactcgtgggcgtgcagatgcaagcacaggccgggtctggccagggcccgccgagggcctccgagctggcgagcacaccgacggctggatggggcgacgcttccctgcgcctcccccgctccgg

SEQ ID NO: 11936 - DNA, 548 bp, Homo sapiens
  source 1..548: mol_type = other DNA
atatccctttgtcagaagtcaaaattaccacaaatttagattaaagatctattggtttttattgattcatgaatcaggatggcatcttctctgaaaatttagacacaggtggtgtgtcccaagacccacagtggatgcctgttacatacacacacatatatatatactatatatatacacacacttcatttttcctatacatacgtacatacctacgataaagtttaatttattaacagtaagagattaacagcaataactgataataaaaaccttggaagtaggcagagctccctaggccttgtggtccctagtgaaattcccgggaagcagcctaatttcaccccagggaagcccctggtgggcttgatgcgggttgggacggtcccgacccttcccccagcctctttcaaggattctggagaaacaaagccaggactgagcctggggtggcgttggacaccaactcccaggtcccccgcctccgcttagctccgccccgtcgcggctccgccccgcggtaaccccgcccacaaccctctttccaa

SEQ ID NO: 11937 - DNA, 566 bp, Homo sapiens
  source 1..566: mol_type = other DNA
agactctgtttcaaataaaataattgcaccaattctggattcgaatcccagaattaaatgacttaatatatgttaagctttagttggtgctggctataagtaagcactatgagaattcgaatttattataattctaagcagcctgtagtcccgactactcggacggcaataataattctaattctaaatcctcccgcggccgccctggggcgtgtggtgattgtgcccacgaggggtcaggcttcagcaatttacccgaacctcgctgagggtgggagacccggggactgtcttctggggcgcagacgtcccgcctgcagccccctccctgacgccggctggaaacggggcgcagccagggggcccgggctggcggggcgacccctgcagaggcccaggcccagctcacttgcagacggcagacgggctcactcgcagacgggctccctcggaagggcagggactcagcctaaacccccttccttgctgcctgccggcggccacgacgccagggcacaagctgggtccccagcagggggcgaggctcctggaaccgccccgcaccc

SEQ ID NO: 11938 - DNA, 594 bp, Homo sapiens
  source 1..594: mol_type = other DNA
gggcgaagggccatgcccggcctctgcaggtccccactgccaaacagcctgggcagaataggggcgggttccccggcgcggcggagtctctgctaactcgctccagcagccaccacgccgggcctgcctgcaggctggtccctcaacggcacctgcgttcccggccgggtgcacccctgggaaggctgtgcccacaccacggtctccgcccgtccacaccgcggcccgaggcgttcctggcacccggctcgggcctgcccgccgcaccagccgccccggtgctggcggagaaccggcttcccgccccggcgctgttccaggaggtgcgccgagctccgcgcgaagcgaagcggttttaatgaaattcctaacaattttcaaaaaaccccgagggaggagccagcccacccgcccaggccacgcgcctcgcgcccttcacgggctcagcgggcgcgaacccgccaaccgcttagcgtttcgccaccggttggaagtttgaagccttcaaacctagccggcgcccaacagcgcggtagctcccgggcgggcagccccgcccccccctccccgacacgtcatcgcgcggctgtgccc

SEQ ID NO: 11939 - DNA, 536 bp, Homo sapiens
  source 1..536: mol_type = other DNA
tgtgcccacaccacggtctccgcccgtccacaccgcggcccgaggcgttcctggcacccggctcgggcctgcccgccgcaccagccgccccggtgctggcggagaaccggcttcccgccccggcgctgttccaggaggtgcgccgagctccgcgcgaagcgaagcggttttaatgaaattcctaacaattttcaaaaaaccccgagggaggagccagcccacccgcccaggccacgcgcctcgcgcccttcacgggctcagcgggcgcgaacccgccaaccgcttagcgtttcgccaccggttggaagtttgaagccttcaaacctagccggcgcccaacagcgcggtagctcccgggcgggcagccccgcccccccctccccgacacgtcatcgcgcggctgtgccccgtcccctttttttgcctttaaagtaaaacgtcgccccgacgcaccccccgcgtatttcggggggcggaggcggcgggccacggcgcgaagaggggcggtgctgacgccggcggaggggcgccgccgc

SEQ ID NO: 11940 - DNA, 697 bp, Homo sapiens
  source 1..697: mol_type = other DNA
ttgcaagagcgctagggccaagctcctttcagcccttggagctttcgcggcgcccgtgcactctgcagggatgggccgtggggccagggacctcagtcccctctcggcctgtcctgcccttccaggaggctagcggctgctggccgcgcagcctgccaacctgagttggccatagtagagtctcagatacccagctcctgagcggccagggccagattcagggtgtgtacgtttttggcagcggctccccaaccgagaagacactcggactggcgccccggggcgttctgcagcctccagcccctctccccctccccgcgccgcggagcccacacctgcgcaggtggagcctgccgagcgcggccgccggtgctgggaaggtgagcggcgccggggggcggagtgggggcgggccgcgggcctctcccaatggcggcacggcggggaggacgcgggccacggccggaggggggcgccccgggcccaggcgctgccgccctcgagctcccgggtcccttcccacgcttcctcccgggcgggccgtaccaaggcgcgggggggagcggcgcgtcccactcgcggaggggcacgcgggccgcggccgcgccacctgcggcggcggcggcggcctcgggcgggtgggggcagcgctcccgctccgcccccggcccccgctgcccgcgtcccctgccaggcc

SEQ ID NO: 11941 - DNA, 569 bp, Homo sapiens
  source 1..569: mol_type = other DNA
ggaaaacagtctttcttgcaagagcgctagggccaagctcctttcagcccttggagctttcgcggcgcccgtgcactctgcagggatgggccgtggggccagggacctcagtcccctctcggcctgtcctgcccttccaggaggctagcggctgctggccgcgcagcctgccaacctgagttggccatagtagagtctcagatacccagctcctgagcggccagggccagattcagggtgtgtacgtttttggcagcggctccccaaccgagaagacactcggactggcgccccggggcgttctgcagcctccagcccctctccccctccccgcgccgcggagcccacacctgcgcaggtggagcctgccgagcgcggccgccggtgctgggaaggtgagcggcgccggggggcggagtgggggcgggccgcgggcctctcccaatggcggcacggcggggaggacgcgggccacggccggaggggggcgccccgggcccaggcgctgccgccctcgagctcccgggtcccttcccacgcttcctcccgggcgggccgtaccaaggcgc

SEQ ID NO: 11942 - DNA, 216 bp, Homo sapiens
  source 1..216: mol_type = other DNA
ccacgtgtggcttgcataggaaaagcaagctcacaggaattgcccagccctgggagggcagtccctccaggatcagaccatgatttcactgccagagccttttggagtgtgctccaaggacaggaatccccagggagttcagatttctgaagctggccagaggacctggagcccagagctgtccactgctgcatcatcggcctgtgtggtaaggag

SEQ ID NO: 11943 - DNA, 751 bp, Homo sapiens
  source 1..751: mol_type = other DNA
ggagccgaggtcgcgccatcctggggcgcatctgggggtgggggacacaccagccccctcccccaacccctctagggccctcggcagcaggcggtactggatgcccacccggggctctaaaggacctgggccgcaccgggaaccctcgcccgggtcccgcggcgtggggacacgcgggtgagggtgggggtggctagaccctgctcgcacccagcgccacgcaccgctctctgggcgggttcgagtgcgcgcgccgggcggggcgggacccgggggctgcggtgtttcgagaagcacgtgctacttcgcgcgcagcgcccccggagactgtgggcttcctcgctgcctggtctacggcagggcgggcgggatggatccgaaaccagctcgcagcgagtcccaagcggctgcggccgccgcaggggtctgggcgcggcgacgagggcggcgtggggcgacggggagcgggacggtggcgctgcacgccgcgcacttcctgttcaacatccccgagcttgcgtcggtgccaggcccggcccctcactgtccccttgcggtcccctggggccgcggcgcggcggggggcgaggagcgggcgccctgcccttcttggcccgctggactccgggcgccccctccggcgcgcagggccgcgagcgccgccgccagaacttctgccagcggccgcccgtagcctaattgcgcagaggcgccgccctccctctcgcccagaaaggaggacggacccagc

SEQ ID NO: 11944 - DNA, 443 bp, Homo sapiens
  source 1..443: mol_type = other DNA
gaggttgcgagaggttcccacccaccccccagagcttgtctggtttcaggcaaaacagagtcaggcgttcagaagaaatttcacaagcatttggctgaacttgtgtactgacatctaaatgttgagaattaaaaggcaatcaaataaccctttggctcatctttaaggcttgttctttttcttaagtttatttcaaaaatgctaaaaattaggtcgggccgatcacgaggtccggagatggtagtcccagctactccggaggctgagattgcagagattgcaccactgcactccataaaaataaataaataaataaataaataaataaataaataaataaataaataaatataaaaagctaaaaactagcctcacgctgaggggtaaggaactcctggattccacctgctggttggagcttacaggcaggggccctgagtact

SEQ ID NO: 11945 - DNA, 158 bp, Homo sapiens
  source 1..158: mol_type = other DNA
aacctctgcatatgaatatgtatcatctattgaagatacgacgcttccagaaatctcagtctgacagtgggtctgggtctcacatagccctttgcattcccctagttaggagcaaagtttttttcccctggagcaaatgactttgtggcagagaaaac

SEQ ID NO: 11946 - DNA, 401 bp, Homo sapiens
  source 1..401: mol_type = other DNA
gtggcacgcacctgtaatcccagctactttactccagcctgggtgacagagtgagactctgtcttctacatttagggaatataattacttgaactctttatttgaaaataacttagatttagagtgcacccagagtagtcaagaggttctgcagcctcagcctcccaagtagctgggtgtagacacaaggtttcgttgcttatttttaataatagatttttaagatccttggattaaaaaaagaatcttgcagttgttattttccttgtgaaaattataacctgatgagaaaaattaaacatgggcaaatgaatcagtcagctatttcactgccgttggttctctgagcattaacccacaggcctgaggttttcattgttgaaccctttttaaaaactcag

SEQ ID NO: 11947 - DNA, 493 bp, Homo sapiens
  source 1..493: mol_type = other DNA
gactctgtctcaatttaaaaaataataataataaattttagagatttccgaactgaaaggactttccctttaggaactttccatggtgaaaaatgtttcctttttcaatgccctagttataataaggaaatagttctttaagatatgctttttagttttatgtcgtaagttgcctgtaatgttgcctgtaatcctgtctagaaggaagtacaatataaaatagtccaacaatttatacatttacttaatctttatagatgaggcctcaataggtatgaagacctatcttcaaactcttcctgaaaaagtccagtagtattgttcttatctctgaacaactgttaaatcttaagcctttagagctcagatatgattataggattcttagcaaaatcttacttgcatatgaatactgtaaatacttttaacattttgtatgtacagtttaattgaagacttttctttttttcaacttaactctaaatttaacata

SEQ ID NO: 11948 - DNA, 817 bp, Homo sapiens
  source 1..817: mol_type = other DNA
cggcgagaaccagcgaagcccgggctgccctcgccgtgcgggcgcacatttgctcctcgcgccgggctgcgccgggcgaccgcggccgcctcggcgtgtgtccgcggctccctcccgccctcgcccgatcccggatctctgggtccacagcttggctacctcccgagccggagccggagccggagccggagtcgcggctgggcccggccgccgcgtcacagggggagggaacccgggcggtgaggtcagcggcggcggcgcgtccgcgggcggcgggagcggcgcatgcgcggagcgaggcccgtgagtggcagcggcggcgcgcggggggcgggcgcgtcgtggtgcgggtcgccccgggggatccccggcgcgggcctcgcgcgacggccacggtcgcgcggcgtgtgtgtggggtccaagcacacccgcctcccctgctccgggagagcgtgtgaggagcgagccgcggcccggcgcccagcgccgccactggagcagctgtcaaaacttcgccgccgccgccgcccgggcctgacgggcctgacgcgcgggggaggggcggccggccgggggcgcgaccccctcgccgcccccgccgggccccgcggccggccctccccgcgccgggcccctttctcctcctgccgcgggcggctcgggggaggggccgcgggcggagaccccgggggccggcgcccctcacgccgcccgcccgcccggctgccccgcccgcccgcacccgccggccccgcccgccccgcaccgcccgccccgcccgccgccccccgcccggcccctgcgcgcggaggtgcgc

SEQ ID NO: 11949 - DNA, 587 bp, Homo sapiens
  source 1..587: mol_type = other DNA
taaatgatagtttattttttcactctcataaactaatcgatagtgaatggaaaatccagaatcccatatttgtaactgtccttcttgagaaagtgcatttcactgaacgttaaaatcaagtggtcttatgaaccttttctggattaaaaaaaatgacgttataataaggaaactaactggcgttggattcgaacgaagttgactccattccttttcctccccgtagtgtgggcgctacgaggaaagacctcggcgagaaccagcgaagcccgggctgccctcgccgtgcgggcgcacatttgctcctcgcgccgggctgcgccgggcgaccgcggccgcctcggcgtgtgtccgcggctccctcccgccctcgcccgatcccggatctctgggtccacagcttggctacctcccgagccggagccggagccggagccggagtcgcggctgggcccggccgccgcgtcacagggggagggaacccgggcggtgaggtcagcggcggcggcgcgtccgcgggcggcgggagcggcgcatgcgcggagcgaggcccgtgagtggcagcggcggcgcgcggggggcgggcg

SEQ ID NO: 11950 - DNA, 513 bp, Homo sapiens
  source 1..513: mol_type = other DNA
agagttgggttttctgtgacttggaaccaaaaccattccaatttacaaaatgagcaactttaatattacccatgagaaatacttcaaggtgggtgaaaagtatatctttgcatgaaactttttcattccagaaaacattttgtcatcttgataataatggccaatgctactatatccaaagtctcgctctgaggtgtgatggcgcgatctcggctcgataaatccacaggctcggtatattttaaaaattcttttaaatacagtatacttttctctttttttccttgtgcaatacaattatttttaatggttaaacaaattaatacataagaccagctttacctaatataatgccaccccggagcgatctccaaggggacgcgggagagcgccgcgggggacgcggaagtctgactgggggcggggcggggaggcccgcacaccctattgcgcatgctcccgcctccccggccgcggcctggcgcagtgcgcacgcgcgcgggtgggcgggtt

SEQ ID NO: 11951 - DNA, 414 bp, Homo sapiens
  source 1..414: mol_type = other DNA
actcagtctaaggccattcattccttaaggctggccaagcatttgttttgcagatttttcttcttagaaaaatttaggccgtgttaggtataataattccaactaattttttttgttgtttcaggctggagtgcaatggcgcgattcaagcgattctcctgcctcagcctccggagcagctgggtggccaggctggtctggaactcctgaccttgtgatccaggttactcagtcattcaacaaacactgtgctaagcacctgctgctcatcaatagtgattactcaagccctatcctagaagatttgatagtccagatacataaatataaaaatataaacactttgctttaagggttagacaacttccctcgcaaggtgactggactgccagattggccgaccggggagtgacg

SEQ ID NO: 11952 - DNA, 366 bp, Homo sapiens
  source 1..366: mol_type = other DNA
ttacttttaaatggacaatgtaaggtctctctgtcgcccaggctggagtgcagtggtgccatctcggctcccgagtagctaggtaaattagtctaacttcttccttcaatttatacaggctaaaaccaagattttgggatggtgaaatagaaaccaaattatgtggtttgattcccattcagaatattcaaactcaactatatctgcctggataaaatttaacattttgtcaaataatatggctgagtcttcatgaagcagctgcatggcaccgaccgggcctccgcgcgcagcgcctgcccaattgacagagcgctcgcatccctcagctgtagctcgtgcagcctgtgctaacgagcccgggtg

SEQ ID NO: 11953 - DNA, 509 bp, Homo sapiens
  source 1..509: mol_type = other DNA
attagtctaacttcttccttcaatttatacaggctaaaaccaagattttgggatggtgaaatagaaaccaaattatgtggtttgattcccattcagaatattcaaactcaactatatctgcctggataaaatttaacattttgtcaaataatatggctgagtcttcatgaagcagctgcatggcaccgaccgggcctccgcgcgcagcgcctgcccaattgacagagcgctcgcatccctcagctgtagctcgtgcagcctgtgctaacgagcccgggtgacctcccgaccatcccgggaagatttggcggctgagctgtaggcaagagtgggcgccagtccctccttaacccctgctgggtgggtggggtgccggagtccgcactgatgaccgctccagcctgagcttttccgccctggagcgagcgcgcacccgtgggctccttgcagcggtggctctgcctggtggcgcgagggcgtgagtgcgcgcgactccctggctttcgcgg

SEQ ID NO: 11954 - DNA, 347 bp, Homo sapiens
  source 1..347: mol_type = other DNA
actctaaaacctaacggtgcctttcctcacaccatgtgatgcactgagaaggcgccatctgtgaaccagaaatcagattctcatgagaaataaattcctgttgtttataacccacgcattttacactatccacattactttaaaagtgacttttaatcattagtttacacttgtaaccaattgctcgtgcacatgtcctaatgtttttgaatatacatatattaatacataatgtatcattcgtgtttgcatgtgataacttacatgtaattacagttgcaatttcttttttacaaacggagatttttttgtgaatgtaaataatggaaaagcacagcctgatgtgt

SEQ ID NO: 11955 - DNA, 451 bp, Homo sapiens
  source 1..451: mol_type = other DNA
cacagcctgatgtgtaccaacctctgcgcgcgctcctgggagcgcgcatctgtgtgtggtgacgggaacccaggtcgcggtcactggtcaacccgccccccggccagtgctgggggtcttcggggtcagatcccgcaggccaggtgtgcggcggggagagcggcccctgccacccgcgctggtagccgggcgctgccaaggtcctctgcgccctggaattgccgcggcggcggatgcagaggccacgccgctccctcgccagacttgcgggcgacgggcacagccgcgtctggctcttcccggcctttaacacccggctgcggacggcggctccatccgcggcaatcatggaagccgagcgtgcgtgcgccgcgcgcgcacccagtccagcgcggagtgggcgtctaggtgtctggggaggggctgccctcgttacccaaaaccttgatcc

SEQ ID NO: 11956 - DNA, 524 bp, Homo sapiens
  source 1..524: mol_type = other DNA
ccgagcctccgcctgcgttcgagtcgcggtcacagccgggctctctgcggggcgcatcgcccgcgaggggcgcctgggcctctgggcgtcctctgccgccccgcgacctttcctgccctcctccggagagaggcgaagggaaggctgtggagggagggcggcctcttcaccagcgtcgtccgaccaccccgcgccccaccccaggtcctcggggtgtctctggtgttgcgcaagaggagctgggggcgcggggagcccggcgccgcagcgcgtgcgtggctggggcgccccggggccggctgcaccttcagtcgccccctggccggcctgccgctcgcgtgctgcggggcactcgcagcactaccttcggtggggccgcagcaccctgagctcccgggactcccccgggctgccaacccctgccacccaggtgccagtcccgggcgcggggaggaggccggttgccaaattctggggcctaggcatttccagagccccggcttcgcgagccgccggggaggggg

SEQ ID NO: 11957 - DNA, 600 bp, Homo sapiens
  source 1..600: mol_type = other DNA
ccgggcctggcggagcccgctggtgcgggtgtccacacaggggcgctggagcgcgccttcctgcggctgggcaggaggcaagcccgagagcgcgcggcgagtggagccatgtcgccctccctcgctctcggcgggcagccgagcctccgcctgcgttcgagtcgcggtcacagccgggctctctgcggggcgcatcgcccgcgaggggcgcctgggcctctgggcgtcctctgccgccccgcgacctttcctgccctcctccggagagaggcgaagggaaggctgtggagggagggcggcctcttcaccagcgtcgtccgaccaccccgcgccccaccccaggtcctcggggtgtctctggtgttgcgcaagaggagctgggggcgcggggagcccggcgccgcagcgcgtgcgtggctggggcgccccggggccggctgcaccttcagtcgccccctggccggcctgccgctcgcgtgctgcggggcactcgcagcactaccttcggtggggccgcagcaccctgagctcccgggactcccccgggctgccaacccctgccacccaggtgccagtcccgggcgcggggaggaggccggt

SEQ ID NO: 11958 - DNA, 487 bp, Homo sapiens
  source 1..487: mol_type = other DNA
gtgccaggcctctgggcactgagttctgagctgcttaactgactgctccggtgcagggagccaggcaggggcagtggtacctgggtcaggacacgacagcagcctctggcctcaggcagggagtgctggacagtccgtccttgagctcaggacacagtggggagccctcatgtttctgtaaggtcataaacacgattttcttagagaaatgtagattctttgattctaacgatggaacataagttttctgaattttgaggaaaacaaagtgggcgtctggcgcgccctgcgtgggggccgcaggttcagacacccgggcgcggcgcggggccctgatggatgcggtgaccgaggctgtggctgcgggcgcggcgtctccgcggcagtcgctgcctccgcggccccctccccagccccccagccccagccccagcccggctgagcgggcggccggagcatgcgccgtgggcgccgggccgggaggcgg

SEQ ID NO: 11959 - DNA, 468 bp, Homo sapiens
  source 1..468: mol_type = other DNA
ctcattttatatacttaaaaacaaagcttattaacaccttttaaaatttcaacttcttttatattgctatatcatgtttatgaggtgcttaatagaagcttctggttaaattacctctttcttttagctcttataataactcccaatttttccttctcaggaagcaaatttagtagggacctctcctcctttaaggaaaacaacccttaaagaactcttgcaggaagagtaggcctccagtccacccctagagggacgtgtgggggtggaagttcattggtcaacttgttcaacgtggccagcaccgtggacagcgccaaccctcctgctcccgggcggggcgaggtggcagcaccgcggacagcaccacatgtggtggcgcacactgggagccgccaggcgcggggagcgcagcagcaccgcggacagccccaaagccgcgcgctctgagccaggaggcggggagag

SEQ ID NO: 11960 - DNA, 739 bp, Homo sapiens
  source 1..739: mol_type = other DNA
cttctttttttgaccttctggcttaaagccacaaccccaggctgaggatgccacatcaacggcgtttcctcgccacgctgcaggcgtgaaagcctgcagggtccccgggccaagcgcggctactgagagcacagcgtcctccctcagcccctgctcatctgcacggagcaaagccgcagctgtaggctctgagcgggcacgggcccgccctcagacggcgacccgaggcgcgcctctctaggcgtgagcaccattgcgctgagcaggggcctccccgccgccagagcccgcgcccctccagggaggcccgcgcgatcgagacccgccgcctcccggccaggcgcgggacaccaggcgaggggagccaggagccgggaggggcggcgccgggcccgcaaccccaccctgtcctgcctaggaccgtcccaggccccagctccgcggccgcccactcgcagccggccagtcccgctcgggcccgcgtgccccgcagccgccacgcgccccgcagtccgtgccgaggctcccgcccgagtgcgcgcgggccggcggtggcgtgtgcgcacgtcatatgggccgccggcctcccattggttgcggccgcctcaccagaccgcgtgcggacgggctcgcgggcggggcggggcaagctcaggccacgcccctgggcggtgcgcgcgggcggtgggtaggccgggcaggctcacgtgatgcgggccccgcggcccgccatataaac

SEQ ID NO: 11961 - DNA, 376 bp, Homo sapiens
  source 1..376: mol_type = other DNA
ccggctcctctgagaaggggccgctgctttcagggcagggtcctgtcagagtgcacactcatctcaatgatgtccccctggccagaagggcccagggacctcacacctttgcagggggagggtttgccctccaggctttgagtgccagggcctgagctctgtggctcatacctgtggtccacaagggacgggaccaaagcatggggacctggcccgctgaccaggtgggctgaggctgctgggcacctggaagtgggcccaggtgcagcaccagcctctacagggctgggtgggggcagggaccagctgtgtggtgcaggtggctcactgggaaggggcccaggtgcagcaccacagggagggcggtgcggcccga

SEQ ID NO: 11962 - DNA, 532 bp, Homo sapiens
  source 1..532: mol_type = other DNA
gagcctctttgagtctgtgtatcacatagaatgtcctcatttgcagagaatgtttttgaagaaagaattaaaagttacctctgttatagtcttgtaaccaatctctacctacttgaagttggtataagaattgcatttgtcattgtctgaacgtgctagaatgtacttccatacacagacggtacagcctgctgcacacctaggctatatggtacagcctgttgctccctggccacaagcctgtgcagcatgttactgtgctgacagtaagcagaaatgacaatccctaaattagatatcactcagttttagcttcttattgtagataatttgtgataaaatcattacgtttgttttggaaataaattttcctttacacaaatcatttgtggtgtatagctttgaatcagctttgttgttttctgttttcagtttgccccatttaaaaaaaaaaaagcgttgagaattgaagtcctgtatgctcttcccacatgttcagaaaagtgcagttttccactgtagtttggatata

SEQ ID NO: 11963 - DNA, 543 bp, Homo sapiens
  source 1..543: mol_type = other DNA
cgatcccccgcggctagggtttcagtgcgcgaggggctgggctggagccgccgggctctgctgctccacgcgcgggagcgcaggcaccgcaggagctaacagcagcgccgggctcgctgtagtgtccccggcggcgggggcgcggagatgggggcgcccgcgcaggggccggggcgcatcgcgggctccgccggcctgccctgggacgcgcccccatccccagtccgccgcctgcctggcctctaggcctccgcgtcccagccggagcccccagcccgggggcctccccccgacccccgtccgccctgccgggggacgcagggcccagcggccccgcgcccggccactctcgccgccgcgcgcacaggcacgaaacgaaaacaaatacttttttccttgggcagtggctattcccgttcccaacacaacccctcccctaccttccttctcccgattccaggagttaagggtgggggaggcaggggagccccaggccggcgggaggtttggggagcctgctcggccggcagttccggagctgcc

SEQ ID NO: 11964 - DNA, 471 bp, Homo sapiens
  source 1..471: mol_type = other DNA
tgctggggtgcagcccccagagagctctacaaaaaaaaaaatgtattaattgaagcacaataaaagagcagtatttttacatttttctaaggcacttaaagcatttcaaataccagtgctttaagttatggtcactatagctcagtcctctttcttcaaaatgcagggagagccagcctgagctgggcagctgtgcccctcaaatgtaactgtcctttaaaaacttaagttggttttaactgaagcacccgggagtaactgctgttaccacaagatttttttttttttaactcgaatccttcaggtgaaaataagtcttcttcagggttaacatcagaagacaaatatagtgctaaaggcagcctctctcacaagctccatttaaaatcagactcttttcggccggcagcctgccattccagcccctgtctgggtggggagcggtggagagtcccccgcagccgcggcggg

SEQ ID NO: 11965 - DNA, 463 bp, Homo sapiens
  source 1..463: mol_type = other DNA
cagggcccctgaccccttgggctgcagcccctaggactggtggctcctgtgcctgaagactgctggcctgctgagcccccacacaaggccgttgtgtgagcacagcttcgccctgctggggtgcagcccccagagagctctacaaaaaaaaaaatgtattaattgaagcacaataaaagagcagtatttttacatttttctaaggcacttaaagcatttcaaataccagtgctttaagttatggtcactatagctcagtcctctttcttcaaaatgcagggagagccagcctgagctgggcagctgtgcccctcaaatgtaactgtcctttaaaaacttaagttggttttaactgaagcacccgggagtaactgctgttaccacaagatttttttttttttaactcgaatccttcaggtgaaaataagtcttcttcagggttaacatcagaagacaaatatag

SEQ ID NO: 11966 - DNA, 484 bp, Homo sapiens
  source 1..484: mol_type = other DNA
ggcggggaagagttctagctcgcgacagcccccgctgggaacgccgatgtgtcacacacgcggctcagtaaggccagcgggccacgcagggctcacccgggcctgggagtcacggacgacgccaggcagtcggcgcctgcgcttccgcgagccaagacgcctgagcggcgcggggggatcgggggatcccccagaaaacgggcggtgcgctcgagaccctggaaccggggcccaggcccaggtgggcgggcggctgaggagcgtggctgcgcccacaaagccgccgggggctgcggactacagcgaagccggcgcggggctcggccctcactacacgaggcctgggcgcctgcacgcccccgtgcttcagccccgcccgctgcgcgagcctcgacgggaacgcacctgcgtctagacgctgacgccgtgcgcggggcgggggccggcgagcatgcgcagctgcgcaatgcgcaagcccgcgtgc

SEQ ID NO: 11967 - DNA, 573 bp, Homo sapiens
  source 1..573: mol_type = other DNA
tccagcctgggcgacaagagtaactaaatgacatttgaaagcaatttgtagattttcacacttcctaagaattctcaaagaatttaaatgactaataaatcctaaggtaaaattataaacattcccttaaattcaaattttataacaaaaagaaagataatattgatatatttggcggtgaaaaatacatatattacgtgctgtttagggtcagagaagctgggtttccgcccaaagcccggcgagcaagagtttccgcgggagactccctgcttccctcgccaggtcccctgaggccgagtgcggtactgagtgctgagtaaggggtgccgagtgccaagcactgagtaactgtgcggccgggccaggtgggcagaggtcgcagcgccctcgccgcgttccccgtcgcgcctaactggggtagcccctgagagcgtgggcggagccccgccccgcgacctcaaggccccgccccctcagcgcctcccggcccagcagctcggaagaccgcgaggcgcgcttttctgacgcatcggcgcctttcgtcgcccccgccccgcccccgactgcgcg

SEQ ID NO: 11968 - DNA, 740 bp, Homo sapiens
  source 1..740: mol_type = other DNA
ctgctaggcgaggctgctcctgcgcctccggccagacgcaaactgcgcggcctctgcgttcgcttcccggttcaagttacccagtaaagaggaacctcaaacgctctgccctcggggcccagcgtccaaacccagcctgggcagggccggctcctcaggggtcctcggccgcctgggggccacaggcgtctcctccagagcctgcttctcaggagaacgctggctctggggccagtcctaacccacgagcctatttccaaaaaggtcgcattcctgggtcctgggcggacacgaacctggggcccgcgcatcccagcgtcgtcgccgccgccaacctccggcaccgcgccgacccgcgcggagtctccgctctgtcgcccaggctggagtgcaatggcgccatttcggctcactgcaaagcgattccgagtagctgggattacaggcgcgtgcccccacgctcagctaatttttgtaggggggtgggcctcctgacttcaggtgatccacccgacaggcgcgcccggccggatttcccttttaaatgtgaaggcacccgcgagcctgacgtccacgcggcgcccacccgcgggcgcgcctgccccgggcgccacctgcccggctgcccccgcacccggctccgcgcagctctgcacgctgtcgccctccggccagcagggggcgccgcccgcccgccccgcgcagccgcctcttccccggaagtcccgcctcggccggaa

SEQ ID NO: 11969 - DNA, 801 bp, Homo sapiens
  source 1..801: mol_type = other DNA
ctttccccgctcctgcccggggactggccgggggtcgcagcggcagggcttccgaaggatgccgggccccacgggggccgaggtgtgtgggccttgactcccgcaagcccatgggcatccctcggcagcgaggaagagccttgtcaccgaggacccgctccactgagcaggcacgtgggcgacgtctgcaagccgacttgggttctgcaggccagagcgcccagatctaccgtctccggggctcccagagaggcggcagagctttggccacgggacaaaaccctcccctgctgcgccctggaggcccgagagcagggagggcttgggaaacaccacggtcttcagtgcgctgccgtcgcctcgcagagcggccaggtctgcgcagcgtgggcgctcaggagcgtggaaccaccgcgctccgcaaggcagacgtggacccactccagcggctccgccaaccaagtccggaggggcccacgtgtctcgggagcgggtcttgggccgccgcggggctctccaggggcccgggggttgccagtgcccgccgtccggctccgcacccaggggagggcgggcagaggccccaggttgagcctcggagtatccactccccgttggtgtccccgcccgccagcgccgcgcaacagcccgggctgcttaggacctcgcggcgcgggggcggggcggcgggcggccgggacggtgacaggtgcgcccctcggccaatggcggagcccgcggccctccccgggcccccgctgcgcgcgccaatcggaagccgcgctgagcttcaagtgcgcg

SEQ ID NO: 11970 - DNA, 845 bp, Homo sapiens
  source 1..845: mol_type = other DNA
gccctgctggcggtggaccccccacgagccgcctctgcgcagagcgcgccgctggccttggtcacgtcgctcgccgccgccgcatctggcaccggaggtggcggcggcggcggcggggcgagcggcgggactagcggcagctgcagccccgcgtcctcggagccgccggctgcgcccgccgaccgcctgcgcgccgagagcccgtcgccgccgcgcctgctggccgcgcactgcgcgctgctgcccaagccgggcttcctgggcgcgggcggcggcggcggcggcacgggcggcgggcacggggggccccaccaccacgcgcatccgggcgcagcggccgctgccgccgccgccgccgccgccgccgccgctgggggcctggcgctggggctgcaccctgggggcgcgcagggcggcgcgggcctcccggcgcaggcggcgctctacggccacccggtctacggctactccgcggcggcggcggcggctgcgctggcgggccagcacccggcgctctcctactcgtacccgcaggtgcaaggcgcgcaccccgcgcaccccgccgaccccatcaagctgggcgccggcaccttccagctggaccagtggctgcgcgcgtccaccgcgggcatgatcctgcctaaccctgcggcccccgtggatgcgcgtggcgggagggcctcgcgcatcctccaccggcaccgcctgcccctctctgcgcttggctcccagcgagcgggggaagagctgcgaagccgcctcggctctgcccggggcctgcgaggactcgcccggacccccaggcaaaatggccatgcgcaggccttgccttctcttcctcttcc

SEQ ID NO: 11971 - DNA, 741 bp, Homo sapiens
  source 1..741: mol_type = other DNA
tgaaatcatcatgttcttgtatacaaccaaaaatcaatttttagaaattggtttcaatcgtgtatgatatatatgtatatgcacatgtatatgagatattatgtatacgtatgtgtggatataagacacatgtttatgtataggtggtccccaacttaaaatggctcaacttacaattttgacttgtagcattaaatacattttcaacttacaatattttcatcttacgatgggtttatcaggcaaatatttttgcatacacaggtatgtgtacatgatacatatttatatgtattgatgctgtatctatagatgcatatgtgtgctatgtatggcaaatctgcgcatggtacatggtaaatatttaccgtctgtgcgtgtcatagacataaacagacgggctgggcctagctgctcctttcccgcctcactcgagtctggcaccagattggccgctcccagcccgctccgggtgccggcccctgcaccccaccctgcaccccgcccactccgccgcgtgcccagcccgcccaggctccagcgcgccttgcggggccgcgcacgctagcggaaccgccgggaagagcgccgtgccgtcaatggcggaggcgcgcacgtctgcagggccgcgcacgtctgcagggccgcgcacgtctgcagggccgcgcacgtctgcagggccgcgcacgtctgcagggccgcgcacgtctgcagggccgcgcacgtctgcagggccgcgca

SEQ ID NO: 11972 - DNA, 510 bp, Homo sapiens
  source 1..510: mol_type = other DNA
ggagtgggtctgagactcccaccatctacacgcatgtggtgttggtctccagggttagaaccagaaccgcgttttcagaaaaactatttaacctaaaagaagtctccacgcgctcccgttcgccggggaacttagggtatccgggcttccctaaattgacaagcgggggccggcgccttcgcccgccttcgctggccgtctccgcccgcgcccgcgcccgcgccccagcccgctgtgcggagatgccacccagctccaccgcaggaccgcggagcgagaggcggcagacgcgctccgggggccgccggtacgtctgggctccccggtaccgtagacccggccccgagctccgccctcgcccccagtctcctgggctcttcggggcggcggaagagccgagaaccttcgcgaaggtggggcgggcgcccccgaggttgggcccgcggtatgggcagtggaaactgcgcatgcgcggcgtcagggtcgggcggaagttgacgccgccgtgcc

SEQ ID NO: 11973 - DNA, 837 bp, Homo sapiens
  source 1..837: mol_type = other DNA
gctgtggagaagcgcaggctccctcccacccgggaagtggcactgtctcctgaggaggacacgcgacatcccccaggaccccgggcgggacggcggcgaggagaccaggcccgcaacaggcctcaccctgctctgccccagagcccgcctggccccagcccacgccctgggccctccgggagctttcctgggaccgagcctgggcgccgcccgcgctgcaggggaggtcgactgggtccacctccgcgcgccccgatgcgcaagtggcccgttacgtttaaattaaagaaacgtaattcgacgcgcgcggggccccgcgggtagaggccgcctgcccaggtccccagcagagtaggcgggccttcccgtccgggccaagggcgcggcttaggcccccgccgtccccagggacagtgcgacccccagcaccgggccgggcggggagcggcggcaggcggggcggggcggggggcggacggggcgttccgagcggggaggggcgcgagccggggccggggagtccagggccgggcgtggggctccgggccgcggcgcctgcgagtgccgggcgggcggggggcgtggccggggcgagcggggctggccgggggcgtggcctgagggcggacgcgcgtccgggggcggggccctgccgccgggggcggggccggggcggggccgggcgctgtccggtgctgaagctcggcccggcgtcgccgcaagagcgcgagaggcgcggcgggaggagccggcggcgcgcgcctccctgggcccggactcggccgcctcccgccgcctcccgcgcggccatggactgagcgccgccggccaggccgc

SEQ ID NO: 11974 - DNA, 753 bp, Homo sapiens
  source 1..753: mol_type = other DNA
gagggctcaggcctctcgggcccaggtggggtcgccaggacagggacccggcagggctgtggagaagcgcaggctccctcccacccgggaagtggcactgtctcctgaggaggacacgcgacatcccccaggaccccgggcgggacggcggcgaggagaccaggcccgcaacaggcctcaccctgctctgccccagagcccgcctggccccagcccacgccctgggccctccgggagctttcctgggaccgagcctgggcgccgcccgcgctgcaggggaggtcgactgggtccacctccgcgcgccccgatgcgcaagtggcccgttacgtttaaattaaagaaacgtaattcgacgcgcgcggggccccgcgggtagaggccgcctgcccaggtccccagcagagtaggcgggccttcccgtccgggccaagggcgcggcttaggcccccgccgtccccagggacagtgcgacccccagcaccgggccgggcggggagcggcggcaggcggggcggggcggggggcggacggggcgttccgagcggggaggggcgcgagccggggccggggagtccagggccgggcgtggggctccgggccgcggcgcctgcgagtgccgggcgggcggggggcgtggccggggcgagcggggctggccgggggcgtggcctgagggcggacgcgcgtccgggggcggggccctgccgccgggggcggggccggggcggggccgggcgctgtccggtgctg

SEQ ID NO: 11975 - DNA, 495 bp, Homo sapiens
  source 1..495: mol_type = other DNA
attttctaaccctgtattgcatctatgtttattcactgacattctagagcatgcaggtgctattaattaatgatttgatatttattatcagtatgctggagtgtaatggtacaatcacagctcactgcagccccattcaactggttataattaatcactgtcactgttcaaatttggctatagggagtccctttaatcatcaaagagtacgtgaggtcatctcagataagagccacagtattattattgccattgttatttaagtgggtgaaattttaaaaactctgggagaatccctgtgcttcttcccttttattgaatactgcaaccaaactcttgaacttgtaatgaagttaacacttaacttttcttttgatgacattatgaaaaggatatgattaattttttgtatttgaaatgtgacacttgctatttatgttacagaaagaggcctctgatcctttcagcctaaatgaattactagatgaattatca

SEQ ID NO: 11976 - DNA, 601 bp, Homo sapiens
  source 1..601: mol_type = other DNA
cttgagctcggtggtaaagagcaccgttttctaagaatttgctttcaacaaaaattgggaacgccgattgatacatcagtatgtgattttggcatttaagtccaaagaattgaatgactgcctccgagggtccctgggcagctgacctgccgggggcctcacctgctggaggagcaactgcaggagaagcacctgttaggggccgcacctggccggaggggctcctgcgggggaagcacctgcccagggtgcacctaccgtgtgcaggctgcggaccacccggacaggtgccccctcggcagggagggcggtcacgggggccggccaggtcggggtggggtcctcccggggatccagacacggccctgttcctggaccgcgcactccctccgcggaggccccaggacgcgcacgagcgcgcagtggacgtcggcgcgcggaccgggcatgggttccccagctgtggcgccccgcgtgcgcgttccgtagtgcccggtagggcactgggcttagctgctcgaggccgcgccctaagaggccggggcgggccgggcgtgtgggcgaggcccgaggctcgcggcgccccagctctcgcgagagc

SEQ ID NO: 11977 - DNA, 389 bp, Homo sapiens
  source 1..389: mol_type = other DNA
ctaaacaaaatacaaataataataataataataataataataataataataataattagccacactgtactccagtatgtctcaaaaaaaaaaaaaagatattatatttttatcaaagatatttttgccaagttttataccctttgaaacttagttttctataaaccttttctaatttaccacattgtaagattttaagaaatgatctcatgcctcattcattcatttattcagaaaatattttcttcaagcatctaaacccctatagaagacattcccagtgcaggtccctgtttcaagccagggacagcttcctgggccagagaaagagaacttacttgatgcctttcagccaatcaagtagtgcttttggcctgcccatgggccaa

SEQ ID NO: 11978 - DNA, 547 bp, Homo sapiens
  source 1..547: mol_type = other DNA
caggtgtctcatgactggaaacagggacttttctcctctaagagaaaatttatattaagcctaatggaagaatcattaaaatcctttctactcttcgtgtctatagtccataaatataaataataccatgactcttgttattgctgcaactattatacttgcaaaaaaactgaaacaatctttcaattgcgtcttctcccggtagaagaaaaagttaacttctcccccaccagctgtcattacgttttttaaaaaacagagagaagcggagcatttccaggccggcagggctttgggaatgcgcacgagaatcgcgctgggcgctctgagagcagaaccggccgctcaggcccctaaggagaccccgcgggcggcaccaggaggaagcgcgcgctccgggcagggccgcggccgaagagggggcgccaagcccggtacctgccgctggcgctcggggtctgcaggccgggggagccgcgcgggacggcgaggggaggcttcacgagggcagacgcgccccggacccggagcctgggcgggcggggaa

SEQ ID NO: 11979 - DNA, 752 bp, Homo sapiens
  source 1..752: mol_type = other DNA
ttctcccggtagaagaaaaagttaacttctcccccaccagctgtcattacgttttttaaaaaacagagagaagcggagcatttccaggccggcagggctttgggaatgcgcacgagaatcgcgctgggcgctctgagagcagaaccggccgctcaggcccctaaggagaccccgcgggcggcaccaggaggaagcgcgcgctccgggcagggccgcggccgaagagggggcgccaagcccggtacctgccgctggcgctcggggtctgcaggccgggggagccgcgcgggacggcgaggggaggcttcacgagggcagacgcgccccggacccggagcctgggcgggcggggaagggcgggagcggcgagcagcgggcggcggccccaggcggacaggttcgcagggagtgggccggaggccggggcggggctggggtctgcactcgccctagcgggcaggtcgccagcaggctgggagtcggggccgggaggtcgcaggaaccggcccgggggccggggctggggtctgcactcgcccaggcggaagggaagcgcctgcctggaccggcgggagccggggcagggctggggtctgcactcacccaggcggcaggtcgcggggaggggagtgggcaggggtctgcactcacccaggcgggcaggtcgcaggcgcgcacccccaggcgcacgacgcgctcctcgtcttccagcagcgccagcgcgcggcacaggcgcagggccttgaggccgc

SEQ ID NO: 11980 - DNA, 543 bp, Homo sapiens
  source 1..543: mol_type = other DNA
gtgtttttgagttaactgaaaagtgacctttaaacagctattcatagttggccacaaaacaccttcggcgaacccctcagggaggacttttgggattaaaggcatcttcgtttgtgtttaaaaccctgacaagcagggtgggaggaggactcccgccagcggcgcccgtccgacctccggcgggcggcgccctctcacccgcaccccggctgcgctcagcggccgcgcacccccacgtttgccagcagctcccagaggcggtcagcctttgcggcaacttcccgggcctcggcgagcgcagccacgcacccggaagccgcctcggggcgcgacgccgagccaaaaccgcccgcgggctccgaggccacaggcaagtggggagggtgccccgtggggctcgaggggacgcaggcacgcccagcccacgcaccgccagccgagacacaacgctcgcgtgatgacgtcgtgcgcctgcccggcccactcccggcccacggcccgccccgcgcgatgacgtcccggtgacgtgccagccccaggccc

SEQ ID NO: 11981 - DNA, 503 bp, Homo sapiens
  source 1..503: mol_type = other DNA
aagcaagatgctgtgggttaagttacacctcttttactgcctcagtcataattttgaaaaggcggtttcaggctttcagccctaacttcccgttgtataaaaacattgtttttatcaaaagacgacatatgggaatataatttgttaagtgcaaagccttattcaaatgtaaagctcttttcggcgtgatctccgctcactccgagtagctgggactacaggcacaggggtgagccaccgcgctcggcctcaaacgtcagtccggtcccgtgggaacccggggcgggttggggcgagtcaagagcccctgcaccccaagtcgttggggagaccaacgaccgctcggtcctctgctgctcctgcctggcggttgctaggagccggggaagcgcaggcgcattgggaggggccgcgggcacgccgagcagcgaccactcggccttcccctgctcctgcctgccaggtgctagccgggatggagaggccgcagggcacgctgggca

SEQ ID NO: 11982 - DNA, 178 bp, Homo sapiens
  source 1..178: mol_type = other DNA
cgccgactagtgccgggcaccgaccatttttcaggaatatatctgacataacatttataaagcttggtatccatgggagaagggctccagaaatcgtctctatattacttaaaatccctaatgcaatataaatgagatgcaaatagtaaggaaaaagtctgtacatgtttactacaga

SEQ ID NO: 11983 - DNA, 419 bp, Homo sapiens
  source 1..419: mol_type = other DNA
gaacgccgagctctccttggtcacgcgggcgccttgggaggccgcgcagtcccgcgtggggcgcggcggggcggccccagtggcaccgcgtgagtccccgcccagcgttccccacccgccgccgcgtttgcggggagagaatgacccccgttttgcaaacgaggctgggacggcgcgcccaccccggggccgcaaaggcatccgccccttccgagcgcacacctggcccggtcgccccgcgccggcagttctctctactcggagccgggcgcgcactgagcaccccgcttcccagcccctccgcccacagatcggggaggcgcggccgggaggggggcgggggacgggcgtgcattgagcgcgctccagctgccgggacggagggggcggcccccgcgctcgggcgctcggctacagct

SEQ ID NO: 11984 - DNA, 589 bp, Homo sapiens
  source 1..589: mol_type = other DNA
acctgttcttggggtctaggacaagacccattttataataagagaaagttttcttcaaaaatgtgacatgatttgaggtcaaacattaatatcaagtaaaaaccagaagtgtgccttttttggaaataatcaaaaggaaataaaaatgagttattaacttacagttttcaccaattaagatataaatgaagctaacgaaatccggaaatacaatttcactgtttttaatgttcattaaaaaaaaatccttatcaaaccaattaagtctttactacttaaaagcaaaatttatatgtacgagataaaattcagaaataaataaatatacatgtatacgtatacaaatatatttcaaattaaaaaatacttttagatagtggtatgtattacatttagaaattaataacgaagtaaattatccgcgcggaacagctgccggcgcggtgtccagggcggcaccccgcccggtcccggcccctccagccctgggcccgacccctactacgcctctgcctcgacgcgaacgcggagcccgagcgcgcgtcacgccgtgtggggcccggagtgcgggctcgcgagggtccccacc

SEQ ID NO: 11985 - DNA, 672 bp, Homo sapiens
  source 1..672: mol_type = other DNA
aagagaaagttttcttcaaaaatgtgacatgatttgaggtcaaacattaatatcaagtaaaaaccagaagtgtgccttttttggaaataatcaaaaggaaataaaaatgagttattaacttacagttttcaccaattaagatataaatgaagctaacgaaatccggaaatacaatttcactgtttttaatgttcattaaaaaaaaatccttatcaaaccaattaagtctttactacttaaaagcaaaatttatatgtacgagataaaattcagaaataaataaatatacatgtatacgtatacaaatatatttcaaattaaaaaatacttttagatagtggtatgtattacatttagaaattaataacgaagtaaattatccgcgcggaacagctgccggcgcggtgtccagggcggcaccccgcccggtcccggcccctccagccctgggcccgacccctactacgcctctgcctcgacgcgaacgcggagcccgagcgcgcgtcacgccgtgtggggcccggagtgcgggctcgcgagggtccccacccgactctcgctcccgccagcacctacggactcgcgtccccgccgcgcgccgactcgggagcagcaccgcccccggcacaggagcctcacgcgcctcttacctaacaggaagttgggtggaag

SEQ ID NO: 11986 - DNA, 683 bp, Homo sapiens
  source 1..683: mol_type = other DNA
aataaaaatgagttattaacttacagttttcaccaattaagatataaatgaagctaacgaaatccggaaatacaatttcactgtttttaatgttcattaaaaaaaaatccttatcaaaccaattaagtctttactacttaaaagcaaaatttatatgtacgagataaaattcagaaataaataaatatacatgtatacgtatacaaatatatttcaaattaaaaaatacttttagatagtggtatgtattacatttagaaattaataacgaagtaaattatccgcgcggaacagctgccggcgcggtgtccagggcggcaccccgcccggtcccggcccctccagccctgggcccgacccctactacgcctctgcctcgacgcgaacgcggagcccgagcgcgcgtcacgccgtgtggggcccggagtgcgggctcgcgagggtccccacccgactctcgctcccgccagcacctacggactcgcgtccccgccgcgcgccgactcgggagcagcaccgcccccggcacaggagcctcacgcgcctcttacctaacaggaagttgggtggaagcggcggagacactggcagggccagaaacgcgcgcagcgggggcgggaggtcggtaagctccccgcccctgcccgagaccccgccccggcccggccccgcccgtacgggcc

SEQ ID NO: 11987 - DNA, 551 bp, Homo sapiens
  source 1..551: mol_type = other DNA
ttgatacatttatataatagaatgcaatattgcctacttcattgccttcacattatttaaaagcatgtggtcaagaaacactattataataagcacttcagaaataacttctaaaattacttttccaaaatatgaatccatactttgtaatgtgcaccacatgtaaggaaaagactaatactcatatttgcttgctaaactgaggcacgggggctgcggctcctggacccacctggttttttcctaattggaaaaaaaccttctagaaagattcgacaagattcgaaactgtttataagcagtcatcccgggcttggcgcccagcgggtggaaatacggccgcagggtggaaatgcggcggcggggctgcccaggctcctgtgggacccgcgcggcgcgggcacgcacattctcagggacgcgcgtcctcaggccacgagaacacctgaaggccccggccagcgtcctcccgtgaagacccggaccggcgtcgtcacccgccgcgcaggcctcccagcgatcgcagggatctcaggcactgaccgcgcccg

SEQ ID NO: 11988 - DNA, 364 bp, Homo sapiens
  source 1..364: mol_type = other DNA
aattgtgagcgtcatgaagttaatcacgaagaagtcataatttttataccttgtatgtcttatcccagatccaggggctacaaaacaaaatctaggacagtcttcaagtactgtgtatactctcaccttttaaaggtcaacattcagatgtaaaccacaaatctgattgaatcactttgaactacttagagttgctgaacatgaatacattcaaagagagaatacttgtttggaataatattccctaagtaaaaccacgtttacttttaattaatgagcagacatttaaatgttaagaactttaatctttaaaattaataaatgttctaagtgaaaagaaacttttatgaattatatatacttt

SEQ ID NO: 11989 - DNA, 636 bp, Homo sapiens
  source 1..636: mol_type = other DNA
tattataataagcacttcagaaataacttctaaaattacttttccaaaatatgaatccatactttgtaatgtgcaccacatgtaaggaaaagactaatactcatatttgcttgctaaactgaggcacgggggctgcggctcctggacccacctggttttttcctaattggaaaaaaaccttctagaaagattcgacaagattcgaaactgtttataagcagtcatcccgggcttggcgcccagcgggtggaaatacggccgcagggtggaaatgcggcggcggggctgcccaggctcctgtgggacccgcgcggcgcgggcacgcacattctcagggacgcgcgtcctcaggccacgagaacacctgaaggccccggccagcgtcctcccgtgaagacccggaccggcgtcgtcacccgccgcgcaggcctcccagcgatcgcagggatctcaggcactgaccgcgcccgcccacgcctccacgcccggcactctggacgcgcgcggacggaggggcagtgcctactacgcaggcgcacgctgcgggcgacaggaccaggcagcaacattgccacgcggatccgcgccggccaatcagcatggccaggggcggggcttccctgaggcgcgccggga

SEQ ID NO: 11990 - DNA, 479 bp, Homo sapiens
  source 1..479: mol_type = other DNA
gcggcccggcacccccgccccccaccgccgtcagtccgggccgagcccgcggcgccccaggccccagcggccccaccgcccaccagggctgggcgaggcttcctcccggcgcccccactatcccgcgacctcgggcgccggaggggatgagtcccggatgcccggcgcccaggccccgagggatgccctgaagcgctggggtacaggcgccgctccgcggactgtgccccctccaccttcccctcagccttgccgcggcctgagcgccagcggcgcgcatgcgcactgcgctcccggccgttgccttggtgacccgagcggacgtggccacgccctccggccagggtctgggaaagctcgccggggcggtggcggggaccgggattcggagccccgtcgatcctgaggaggggagggggcgggcctagttctgggggtgccccgcccccgcctagccccgcccggcccactgggcccgc

SEQ ID NO: 11991 - DNA, 278 bp, Homo sapiens
  source 1..278: mol_type = other DNA
taccggaatcacttgaacctgggaggcagaggttgcagtgagccgagattgttccactgcactccagcctgtgcagacaccatatattatgattgtaaatagtgtaaactctttttctactaaaactacaagatcctgatggaaaatttatttagcctaatatgtttgttactgaaaattgttatatttgaatttttttaacagatcaggatcctcatgaatcccaataatgttcttatagaactgttcggcttggcagcaaaggctgctggtgtcag

SEQ ID NO: 11992 - DNA, 711 bp, Homo sapiens
  source 1..711: mol_type = other DNA
ccggggtgacgtgggggccgctgccctgaccactccctgtgtcccacaggtgcctgggggccagggacaccgccctggccatgccctgtgtccagcaggtgcctgggggttggggtcaccgccctggccactcatgtgtccagcaggtgtctggggaccggctggccattccctggcctgggggccagggacaccgccctgcaggtgcctgggggccggggacaccgccctgcccactccttgtatccagcaggtgcctaggggctaggggtcaccgccctggccactccctatatcctccaggtgcctgggggctggggtcacagccagggccactatccgtgtctcgcaggtgcccggggaccggggacaccgccctagccactccctgtatcctgcaggtgccttggggccgggggcactgccctggccattccctgtgtccggcgggtgcctgggggcgaagcggggactggggatccgcaggtgcacccgtggggttgggggtgggcgcctctcctctggggtagagcagtcgccgccagcgctctcacagcgtcctcaggccctccctccgcgcatgctccacagcggggctcccagaggcgggtctggagcctcgcgacacgcctacagactcgatatcagccaatctacggccgtgatgtagttgactgaccgcccgtggcggcattcctgctgttgtgggcg

SEQ ID NO: 11993 - DNA, 738 bp, Homo sapiens
  source 1..738: mol_type = other DNA
gcagaaatccatttctgcgtttatgcccagggtcggtgaccgcccagggatccccataccatagctcccgcgttccgatcccggaagggaaaacccatgatcctggcgagggtccgtccacacgtggccagggtggctgatcttcccggctgctgtggttgtcaacaccgcaaacccaggcggcgggccccctccgagggcgctccttgcgtccggacccaggttctcggggcgccccccggtgggtccccgcgaagccgccgccgcacacctggcgggggaggttctgcctccagcacccaagcggcggccgcacctcgcagtgagaccctcgcaagcgcccgcgcctccctcgccccgcgtcccctctgccccgcgagcccccctgggcgccgagccgactcgaacccgagcgcgagtcccgcgcacaaacgcgccggcgcgtctctggctgaccctgcccgggggcgacgggtgtgaccgggtcccccgctaactttcgggcgcggtgagcgtcgcctgcgcgcgccgcggtggaggccgctgctttcccgccgggagcccggcacagtccccgggtgacccgcgcgccccgcgcaacagttggagccgggctgcccgcgcgctccccaagccgggcccttccccagatgcagccgcgcgccggccgccccccagtgcgccggtgcctccctgggcgccgagtgcgcaggcgccggccgtgaagaccgaccgtgc

SEQ ID NO: 11994 - DNA, 506 bp, Homo sapiens
  source 1..506: mol_type = other DNA
ctgcgggcacccgtgcctggcccagcggcacctctccctgcggaggcctctcctgcgggcacccgtgcctggcccagcggcaccgctccctgcggaggcctcccctgcgcgcaccctgcggaggtccctgcggaggcctctcctgcgggccagcggtacctctccctgcggaggcctcccctgcgcggtacctctccctgcggaggcctcccctgcgcggtacctctccctgcggaggcctcccctgcgcggtacctctccctgcggaggcctcccctgcgcccctgcggaggacctctccctgcggaggcctctcctgcgggcagccgtgcctggcccagcggcatctcttactcaggattaatgtcagaagttgagtttttgttggtgaccagggccaggtcagatgatttcctgagcagtgcggattcttctctctcagtgaggaatagctttctgattgtgataggtgctgtacccaccactgggcagaccttgctggccac

SEQ ID NO: 11995 - DNA, 380 bp, Homo sapiens
  source 1..380: mol_type = other DNA
agtcaagcgggattcctctggggaaggaggcacagctgcccccagggtgatcaagtaccagatgctatttttaaaacttcttaagctgtacgacaaaactgaaatctatgtgaaatacaactatgcttttcccccaaattgtctactagatgctaaatcttggtcattaaccacagtggatcacctgaggtcaggagtttgaaaggcgcctgtagtcccagctactcgggaggctgaggcaggagaatcgcgcgccattgcactccagcctagcgccctctcgagtgcccaggccagacatggacactgattaatgaagtccacggtgggggtcacaccccagcacttcaatgaggagcgctactcgcccgcgcccagga

SEQ ID NO: 11996 - DNA, 336 bp, Homo sapiens
  source 1..336: mol_type = other DNA
agctgctcacctggtgccctggggtcaaacaggccatctctgcctgcccagaaagttctttcttcaaaagagaggagccttgctgcaaagctccagaaccccttccgtgacagtgctgctgccgagccaatgagatctgctggggctgccagatctgctggcattccatgaaatcaagacgttcgtcattccatgaacttctccctttcccagcaagtgaaaaagaagtgaacagatgggttagtctaactaacagagaggttagtctatgtcatgcattaagtctgcccagagggctgggggttggacgcaccacaacctggcccagccgggtgg

SEQ ID NO: 11997 - DNA, 777 bp, Homo sapiens
  source 1..777: mol_type = other DNA
gcctccctgacaggcatgctctgtatcgatcgcatgctatcggttctttcaaggaacgtgtattgatcatcaattaagtggtgagtactcctctagatgtcggtcaagacttgaaggtccggggcttgggccctgtgtcctcaccgagccccggggaggctccggctccgtccacacccggagcgcgactcagccgcggccggggctcttctggagaacggcgcggtcaggctctgccgcagctttcaggtcccctcggccccgtccgggtgcagcgcaaccaggctgcccgcggagccccaccgcccccatgccgccgcccgccatggttcagcccggccccgcccctcccgccggccgtggttcagcgcgtccaccccgccgccccacagcgcccgccgcgccgcgccccgccccccgccgcgccccgccccccgccgcgccccgccccccgccgcgccccgccccccgccgcgccccgccccccgccgcgccccgccccccgccgcgccccgccccccgccgcgccccgccccccgccgcgccccgccccccgccgcgccccgccccccgccgcgccccgccccccgccgcgccccgccccccgccgcgccccgccccccgcgccgcgccccgccccccgccgcgcccctcccgcgcccgccgccccgcccctcccgcgcccgccgccgtcgtagcgcctaggcggggcctctcgtagcgacgcccccaggggggcagaacgcgtgcgcacgcgcgtgcgaacgcgcgtgcgcg

SEQ ID NO: 11998 - DNA, 787 bp, Homo sapiens
  source 1..787: mol_type = other DNA
tgctctgtatcgatcgcatgctatcggttctttcaaggaacgtgtattgatcatcaattaagtggtgagtactcctctagatgtcggtcaagacttgaaggtccggggcttgggccctgtgtcctcaccgagccccggggaggctccggctccgtccacacccggagcgcgactcagccgcggccggggctcttctggagaacggcgcggtcaggctctgccgcagctttcaggtcccctcggccccgtccgggtgcagcgcaaccaggctgcccgcggagccccaccgcccccatgccgccgcccgccatggttcagcccggccccgcccctcccgccggccgtggttcagcgcgtccaccccgccgccccacagcgcccgccgcgccgcgccccgccccccgccgcgccccgccccccgccgcgccccgccccccgccgcgccccgccccccgccgcgccccgccccccgccgcgccccgccccccgccgcgccccgccccccgccgcgccccgccccccgccgcgccccgccccccgccgcgccccgccccccgccgcgccccgccccccgccgcgccccgccccccgccgcgccccgccccccgcgccgcgccccgccccccgccgcgcccctcccgcgcccgccgccccgcccctcccgcgcccgccgccgtcgtagcgcctaggcggggcctctcgtagcgacgcccccaggggggcagaacgcgtgcgcacgcgcgtgcgaacgcgcgtgcgcgggcggtgtttgaggccggccagtcgt

SEQ ID NO: 11999 - DNA, 481 bp, Homo sapiens
  source 1..481: mol_type = other DNA
atttgacaaaataaggtaaggatttaattgactgagttacctacaggcacccaatctactgtagggtggacctggacccctcagagatgctcgactgcagggtcctggggtccctagagtggtcctgcagcagcccctggcaatgagctgcctactgttttatacccaggtagaagttacacagcaatttagcaatgttgttaacagacatacagaattgtgtgtgtgtgtgtgtgtgttttgatataaacgtgcaattaaaattcaaagtttattttttatcacaagcacctttgaaatgtacgagaatcatgtgtgacttacgttccttatgttttatgagcctggctttggctcccaggctggagtccagtggtgtgcacgccaggctggtctttctgggattacgggcgtgagccacttcacccggcccggagcggtgtacattttacgattttaatcttaaacacatccagcaaat

SEQ ID NO: 12000 - DNA, 942 bp, Homo sapiens
  source 1..942: mol_type = other DNA
gccccccgccgcgccccgccccccgccgcgccccgccccccgccgcgccccgccccccgccgcgccccgccccccgccgcgccccgccccccgccgcgccccgccccccgccgcgccccgccccccgccgcgccccgccccccgccgcgccccgccccccgccgcgccccgccccccgccgcgccccgccccccgcgccgcgccccgccccccgccgcgcccctcccgcgcccgccgccccgcccctcccgcgcccgccgccgtcgtagcgcctaggcggggcctctcgtagcgacgcccccaggggggcagaacgcgtgcgcacgcgcgtgcgaacgcgcgtgcgcgggcggtgtttgaggccggccagtcgtgactgggcggcaatgaggtcagtgactgccgggagtcctgcaggggcggggcggcgccaagcgcagggagcccggctgagtggcagcccaggtgagcgctcagggagcccgggtgagggccgggaacccagggcagcccaggtgagcgcgcggggtgcccgggttaggggccgggaacccaggtgagggcagcccaggtgagcgcgcgtggagcccaggcgagggggctgggaagcccgggtgaggggaccggggatcccaggtgaggggccgggaactcagctgagggggaacccagatgggcgcgcgggagcccacgtgagggggagcccgggtgaggggccggggtggctcctggcgtccgcggtcccagccctgccttccggtgggcgtgcggcaccccgggccgtgcggttcccggacagcagcttgtgggggactttcgagccccgcagcccggggtcctgcctgcgcgggttgggcgtggggggctcctcaccgcgacgctgactccttgagcggcggggacaggcggaggcggaggcggcgccgtcgcccctgacctcgc

SEQ ID NO: 12001 - DNA, 817 bp, Homo sapiens
  source 1..817: mol_type = other DNA
ctagatctgcgaacacacttgttaaatgtgctgaccaggtaaaagataacatcctttagttattttggttaatttttttttctttaatagtaattataacgataatctgtttcctttttaaaagtataagacaaataaatgaggggccattccctggaaaggtcccgggaaaaacgagcgcttcctggcaagaagcaagcttaaacgcccaagccttggctggtccagggcagctggcgcggaagacccggaacgccctgtgggcagggccagctgcgggacgggggctcaagggcgggtcgggtggggtcccgacgccccctcctcggctgggcgcaccccgggtgtccgcagggaggggcgatgttctgggggggggagcgtctgcccgacgccccctccctcaggtgagctcagcccgtgggggtccgcactgggagagggttagggtctgcccggcgcaccctccccaaggggcgcagctctgagccgggagcaggctctgcgggggggcggggagggcactcggtctgcccagcgacccctcccgaagtgagcgcggcccggggtccgcggggcaggagatgatccgggggcgggagcctctgccgcgcgccccctcccacgcgtgcgcagcctgggccgggcgttgggcagcgggagggggcgcgggcggccacgtggcctcgaaggaatgcgcgggcgcgagggcagggcgctgccgagaaaccggcaggctctgcggccaatgggcgcccggaacggtctgggcccgccaatgacagcatggtgggtggagcaggccgtccgggcggga

SEQ ID NO: 12002 - DNA, 811 bp, Homo sapiens
  source 1..811: mol_type = other DNA
tttaatagtaattataacgataatctgtttcctttttaaaagtataagacaaataaatgaggggccattccctggaaaggtcccgggaaaaacgagcgcttcctggcaagaagcaagcttaaacgcccaagccttggctggtccagggcagctggcgcggaagacccggaacgccctgtgggcagggccagctgcgggacgggggctcaagggcgggtcgggtggggtcccgacgccccctcctcggctgggcgcaccccgggtgtccgcagggaggggcgatgttctgggggggggagcgtctgcccgacgccccctccctcaggtgagctcagcccgtgggggtccgcactgggagagggttagggtctgcccggcgcaccctccccaaggggcgcagctctgagccgggagcaggctctgcgggggggcggggagggcactcggtctgcccagcgacccctcccgaagtgagcgcggcccggggtccgcggggcaggagatgatccgggggcgggagcctctgccgcgcgccccctcccacgcgtgcgcagcctgggccgggcgttgggcagcgggagggggcgcgggcggccacgtggcctcgaaggaatgcgcgggcgcgagggcagggcgctgccgagaaaccggcaggctctgcggccaatgggcgcccggaacggtctgggcccgccaatgacagcatggtgggtggagcaggccgtccgggcgggaggggctgggcgcatccctgtagccggcgggcgcgcgatccgggacggacggggtcgcgggggacgcgggggacgcg

SEQ ID NO: 12003 - DNA, 102 bp, Homo sapiens
  source 1..102: mol_type = other DNA
ggctcccttcccgcagctgcctgtggaaacccttcctcctgacgtccacccagggggtcctgtggccccgctctgctggtgcctgtcgaaggggcagctgca

SEQ ID NO: 12004 - DNA, 551 bp, Homo sapiens
  source 1..551: mol_type = other DNA
gaacttagtcagtgtctctggctaacatagatcgatcgatctatctatctatctatctatctatctatctatctatctatctatcggttttggtttttctttttagaaaatgaaatgaaatatgataccaagacaggccccatccgcccctgagacaggaggtgctggagccagtgaagcccctgcacccacaggtgagtttccaggagggtccccaggtgagtccccaggtgggtccccaggtgagtccccaggtgggtccccatgtgagtcaccaggtgagttcccaggtgagtccccaggtgagtccccaggtgggtccccaggtgagtcccctggggggttcccaggtgagtccgcagatcaccggcatcagggtcacctgtgcacggcccaattggaacttcattgaaaggacttaatttaagactctacctttgtattttgcaaagaaaaagtattgctatttcccaataagaatgacctcatcattgtatcactagattaaaagaaatattcagaactgaccagagggactgctcaggtcaggc

SEQ ID NO: 12005 - DNA, 516 bp, Homo sapiens
  source 1..516: mol_type = other DNA
gtggtcagaacatggtcctcccaggttcaccacagtgaccgcttctctagaggtcatttatctggaaataagactgctgtagcccagtcctgggccaggaccctggggtattccagcagtgccacagcacctgaggccttgttagttaaagaggggacacgtgtttcacatttgtggcaagcagtctgtttccacagtggatcgtaactccttgctgactcaggcatcacaggccagggccttcagtgacactgacaatgtcttattctttaagaaataaagatgtttcttctgacccctcctgttgagagccatcacaggctgtacttgatgcctgcagggcccgccctgagctgccggatttcagtgtgctgatgggatctaaagattaagataccaaaggttgaatctccttaggtgttcacttctaaaaagctaacttctgagagttgtacttttaaactttcatcctctgtaatttctgtgtttatacattggaagtaaggcattttccac

SEQ ID NO: 12006 - DNA, 472 bp, Homo sapiens
  source 1..472: mol_type = other DNA
tagaaattccacggcaggcgtggggatcacaaggtgagaccagcctggagcctgggtgacagagtgagactacatgttgacttccaatgagtatattttcttagcctaggtcattgaatattagtgttaagttattaaaattgataataatctgcttcttaggattttaaattgaggatagatggcccttaccttcatattgtgacgtgatttttaaagtatagaaatgtgactttgtagaaatgaaagttacgcttttgctttaaaattttttgaaaactgaattaaatgtgttgaaaagaaaaagcaattgtttaagaatttttttttatttttttaagtgtgttgattctcacatgaaaatcgaagctaagggttggaagccgtgattcagatcggaagttgcacccatcaaatgggtagtcattgagtgcttcaacgtggaagcgcagagagcctggggcacccccgg

SEQ ID NO: 12007 - DNA, 521 bp, Homo sapiens
  source 1..521: mol_type = other DNA
accccctccaatccctgatgggcaaggcgggggcagtcctcctgggactgatcccagagagcctgaactccaggcagcccctgaggccatgtgtggggtgacgagggcccaggcccaggcacccgtgggacccctcagagcaggccgctgggatgcactttcggagctgcggggctgcagctgagcctggaagctccagaaccaagttgcttggagaagcgagggtcaggctgcaggcaggcagtggggccccatgccatagcttggggcctggggggatggatcctgtgcctcccctcgccagccggacacaagctcagtggcccctcggcaggcgcaccatgcctgtgtctttggaatggccattttctgggctcacaaaggagccagagcctgctactgttgcagccactgaatggcgctccagctggacgccacgtggaccctctcgatttcacagggtcagctggaggcccaccaggaggaaggcatggtgatctcccacatggccgtgtccggcg

SEQ ID NO: 12008 - DNA, 418 bp, Homo sapiens
  source 1..418: mol_type = other DNA
gctaaacagagaaacactggtggtggaatgatgtgacagtccagacccaccctgaaaccacaccaccctgtaactgcagtgaggtggggtcttcccaccggtcttccctgtaaccgccgtgaggcggggtcttggaatctgggcttcagatccttggctgtaaagcaaatgagccaagagacctctcctcacttgtaaaggggtctctctgctccagaaccacaggccgctgtgtatgtcgggggctcacgagctcacgtgctacacggcccagttcatccaggggcttgattcatggctgaagcggccacccaggagacccaaccagacatctggcctgttctgttcaactcctgtgccacatcctgcccctggcggatttggtggtggcacgacaggcctgtggggtttccagcac

SEQ ID NO: 12009 - DNA, 662 bp, Homo sapiens
  source 1..662: mol_type = other DNA
acttggggaaaggacacgtgcccctgtccatatgtcatggcaggtgtttctgatacgatcgtgactttaaaatttgaatcacatcacctgaaaactgaaagtcctaattttaatcaaattatagagttaaattgttctgaaccccagaacgtttttgtaatgaaaagttaatatttctaatcaagacttaggaaaatttgggatatttccatagggtaagtaagaaggtattttatgcagaatggaaaaatgactattttattactttgaaaagtacagtaggagtattagaactgaaatagtgctgaggaaaacacaactttctattttagaaaatcatttttaaagcctttttcacattaagtaaaaacccagaggaatataatccagatattttcatcgtagcttattattcatgtatgcaagttacttacaggctttgggttaagccctaaattttgcctattttaaaagacagctgttgaactgtttcccttttcaggaagatcctgtcaaattcatcgtcctggccacggctctgcacgagaagcctggctcctggccccgagcctcaggacgaagaccagactggttcatctctgagccagggtgaccctgacgcagccatctggttgggagattcgctggatcgatgactcaga

SEQ ID NO: 12010 - DNA, 731 bp, Homo sapiens
  source 1..731: mol_type = other DNA
aagaaggtattttatgcagaatggaaaaatgactattttattactttgaaaagtacagtaggagtattagaactgaaatagtgctgaggaaaacacaactttctattttagaaaatcatttttaaagcctttttcacattaagtaaaaacccagaggaatataatccagatattttcatcgtagcttattattcatgtatgcaagttacttacaggctttgggttaagccctaaattttgcctattttaaaagacagctgttgaactgtttcccttttcaggaagatcctgtcaaattcatcgtcctggccacggctctgcacgagaagcctggctcctggccccgagcctcaggacgaagaccagactggttcatctctgagccagggtgaccctgacgcagccatctggttgggagattcgctggatcgatgactcagatgagcttgtctcacggctccagctctctagagcacagatcagaggacagatctccccgggccaagaaagccaaggccagctcggcgctggtggtctgtggagggcagggccaccgccgggtgcacaggaaggcccggcagccccaccaggaagagctggcgccgaccgtcatggtctggcagatccctctgctgaatatataagcaggacggccgccttctgctgtcagaattggtgacttctcagctaatcctacagcctgagtggttaagctgtgtctacactggttg

SEQ ID NO: 12011 - DNA, 295 bp, Homo sapiens
  source 1..295: mol_type = other DNA
tttccctattcgaatctttaaaatttaggcaatcccacctcatcccaactactcgggagtctgaggagtgtagtacgctgagatcacaccattccatgctataatgcatgtttgctatcgatagtcaatagtggacactgtttctgagggtaaggttcacctaattttgtacaatatgcacagaattttttaatgaaccagtgagtgttgtttcaaagccaacacatatattctaattatttcttcatgccaagaagctggaagtactttatagcaattggctccattcctgaca

SEQ ID NO: 12012 - DNA, 400 bp, Homo sapiens
  source 1..400: mol_type = other DNA
tttcttaaggcaattctcttatcatattttctctacttgtcacaacaaacttacaggaaagttgtgggagcatagcccccgtgggctgagcagctggccgaagtcctcagccccgggtcctcagatgggggcatccccttgaggccccgcctcttggccaggctgcagcccaggaccgtgcccgacttgccgactaggcacttttgggtaggcagttcttgctaaaatgccgacctcaactcgggtgtccaggcctgctcattattaaagactcattcaggagttgcaatttgtgagaattcacgcgtgggaagtcagtgccctgccctctctttaaaagtgcagtttgggactcagaaaggacacgttccagttagaagcttttcctcctgaggtcagg

SEQ ID NO: 12013 - DNA, 635 bp, Homo sapiens
  source 1..635: mol_type = other DNA
tgtaattcaagtactgacagcaggtacaaaaaggttttaaacattaatttgcacaaagccattaaaaatattagaacccagcctgggagcagctggaactctcggcgctcctggtcgccgccctgaacccgtctgcaccgcagggcccgagtgggaggaactttaaaaaattctggaatctgttgagaatttggcaataagtttttaaccactgtttgcgcccgcggacacctgtccccgcctcctcgcaggaagcggcccccgcgcgtgggcgcgggctcgggctcgggctcgagtggcgacgtgggccgcggtcctggagggggagaagcgcccggcgggcaggcgcggggcagggaagccccggggaacccacagcccctccgcagacccagccagggggcgcgcgcccgaaaacgccccgtgtgcacgcgcccgcccccctccccgcgccccgcgcgcgcccctcgcagcctggagccggagcgctggctccgcgcggcctggagaggcggagaggcctgtccaccgccccctctgccgcccacgccccgctgcgggtcggaggagcagctcccgctcgcaggtgctcggagaggccgggccgcggctcccacaggtgccgggaagcggcc

SEQ ID NO: 12014 - DNA, 588 bp, Homo sapiens
  source 1..588: mol_type = other DNA
ttattgactttgacatttttaactgtacaaacaatttccttcattaagtggaagtcaatgttttgtacttcaaacatttttgcaaattaaaaccctcccctgcactggaggagaggctcgcgtttcatcctggtgtcatgattcctaaacgtgtcaggagcattcagctggcgcctgggttcggccgtggccctaccggtgacccgggcaagtcatatttccctggggacggtctgtggtacagcgtggcgcaagctgggggactgttagctgccacctcactcagccccctgttttacagcagagcaggtggaggcccctgagctgaaggtcagcaggtccccactggagtctcagcctcccaatgcgcctgagccccagagctgctacatgtctgagatagttccttaaaaaggaaaacagctttctatgtggggagctgatcggcccaggtcctgtcattttcttttccaaatctgaagatcagaaatccagaatgctctaaattctgaaactttgtgagcgctggttcaaaggaaatgcttacatgagcatctcaagtatccaatttctggatttgagttgctc

SEQ ID NO: 12015 - DNA, 541 bp, Homo sapiens
  source 1..541: mol_type = other DNA
gctcccgaatctggttgcttccggggccgcgggccggcagagcagctggagggccaagcctttgagcttgggttcaccccgcggtgacctgagtcctgcctcagggagtctgagatctcggggtcaccctgtgggggtctgaagcctcggggtccccgcgtggggtctgaggtatcagagtcccctccgttgggtctgaggtctcggggtcccccatccccgggatcggaggtccggctccccggagcaggcagggcggtgcgtctggccctgaaacgtggcgcgccagccccaggtggtgtcgggctaggggggcgccgaaagtccgcacaaagccgtccgctggggtcccgccgcgtccgcgagggaatgacttcctgatcctcagctcaggtgagcccagatgaggcggtcctccttactcccccagaggcgcggcgaggcggaatcgggccccctccccgggggctcagctcccgaaacgcggattcagcggagcgcggtgacggcggcgcgctcaccccgcgcatgcccagtgccc

SEQ ID NO: 12016 - DNA, 659 bp, Homo sapiens
  source 1..659: mol_type = other DNA
cccagctgctcaggagcctgaggcaagagaatcacttgccaacattgccccactgcactctagcctggtcgacagagcgagtcaaaaaaaaaaaaaaaaaaaaaaagtttgtattcctctttctacacaggcacttaaattctaatttctctattgtaatgtaatgaacttaatcagtacagtgtatttttagagtgaatatccaagtggagtttttttaaagaataaagctcagaaactgatgtttctaacgtgacttaataacagatctttctatccaactgttcggaaatgaataacttggctagtggttcaagaatcaactaaaatcaatgaatctatttttccctctgaaaaggcacacgtttacaggagccaaacttcttcctctttatttgtaataacaaaaataaaccgaagtcctgacctatttgtaatatttttattcctaaaggaaaaaacaggaactttcattgtacttcaacattaaagttattacctcagatattttgccagcttagcacaaagatcaactgctctctctaggaaaaggaaggctaagccaggagggcggagcagcccactacacatgtctggctgctcttatcaacttatcatataaggaaagctctgtaaaagctgacacagccctcccagca

SEQ ID NO: 12017 - DNA, 641 bp, Homo sapiens
  source 1..641: mol_type = other DNA
aaggtcatgataatcccagctgctcaggagcctgaggcaagagaatcacttgccaacattgccccactgcactctagcctggtcgacagagcgagtcaaaaaaaaaaaaaaaaaaaaaaagtttgtattcctctttctacacaggcacttaaattctaatttctctattgtaatgtaatgaacttaatcagtacagtgtatttttagagtgaatatccaagtggagtttttttaaagaataaagctcagaaactgatgtttctaacgtgacttaataacagatctttctatccaactgttcggaaatgaataacttggctagtggttcaagaatcaactaaaatcaatgaatctatttttccctctgaaaaggcacacgtttacaggagccaaacttcttcctctttatttgtaataacaaaaataaaccgaagtcctgacctatttgtaatatttttattcctaaaggaaaaaacaggaactttcattgtacttcaacattaaagttattacctcagatattttgccagcttagcacaaagatcaactgctctctctaggaaaaggaaggctaagccaggagggcggagcagcccactacacatgtctggctgctcttatcaacttatcatataaggaaa

SEQ ID NO: 12018 - DNA, 445 bp, Homo sapiens
  source 1..445: mol_type = other DNA
atatatttcggcattcttttaaagtacaactatccttgaaaagggttacatattaaaccatttttcctgtggatctgctttaacaacagttttagtgaaggctacaaaagtatgctttttatggattacacatgtgcacactactttaattactacagatttaaacatgtaattatcatcattactgtgatctgcgcactcagagcggaggctgaggaggcggcgtccccttgcagctgccccgcgacctgggccgagctgcctacaacctgggcccaggtgcctccaggggcttgtgagcagcaggtgcgcgttccaggcagctccagcgacccctgaccgcgcgcacgtccggcccgagggttcccgcgtccgcagccggcccagctggggagcatgcgcagtggccggagccgggttgcccgcgccccagcaggtagctgta

SEQ ID NO: 12019 - DNA, 532 bp, Homo sapiens
  source 1..532: mol_type = other DNA
aaacatgtaattatcatcattactgtgatctgcgcactcagagcggaggctgaggaggcggcgtccccttgcagctgccccgcgacctgggccgagctgcctacaacctgggcccaggtgcctccaggggcttgtgagcagcaggtgcgcgttccaggcagctccagcgacccctgaccgcgcgcacgtccggcccgagggttcccgcgtccgcagccggcccagctggggagcatgcgcagtggccggagccgggttgcccgcgccccagcaggtagctgtagccgcggagccccctgccccggcagggggatgtgggtgtgagcatccctgagccatcgatccgggagggccgcgggttcccttgctttgccgccgggagcggcgcacgcagccccgcactcgcctacccggccccgggcggcggcgcggcccatgcggctgggggcggaggctgggagcgggtggcgggcgcggcggcccgggcccgggcggtgattggccgcctgctggccgcgactgaggcccggga

SEQ ID NO: 12020 - DNA, 384 bp, Homo sapiens
  source 1..384: mol_type = other DNA
tccccgatgtggatcaacttggcccaccctcagcagataaaagtctgtcttaccgtttttaaaacgtcagaatgttttcagatacgtgtgtgtatatatctccatatctgtaaatatatataaatatagatatagatatctccgaagagaaggttttccaatgtgcactttttcttcttgcatagaccacgataccgggtaacctgtgttttctggcacacggccccagaggcggtggccagtttagccacctcccgaggaacctggcgtggcggttacagggttgggggcagcgcagaacccgcttctgcccttatcaggagcccggacctgagctggacacccgcagtcgggccccgggccggaaacctccccgacgcgggg

SEQ ID NO: 12021 - DNA, 424 bp, Homo sapiens
  source 1..424: mol_type = other DNA
gccatgtggccctggaaactgagcctcaagctgggtagcgtctgctgaattacaatgaaaatcagtaataaataaaatgtttcttaaatctttagaatcaaggaaaacctgagggatacttggagagtcgctaacagcaccccaatctgcagggtgggcccaggctggcccagaccctcaccctccaagggccacactgggggctcactttctgaggagtgccctttggaaacgtcccaggaactacaaccagctctccttctgcaagggaagagggtgaagtttgagtttgtcttgcaggaagacaatgagccgagcggccccctgctcagagcttccctgtggctctcctccatgtgatccagaaggagggactcctgccgtgactgctgactgctcagggcaaatgacaccaggggttagc

SEQ ID NO: 12022 - DNA, 484 bp, Homo sapiens
  source 1..484: mol_type = other DNA
gtagagttctatatgttttgagctacaaagtattcaaattaaagcacaaaccaatgtttaatttttaagtggagatttcctggagcagagctgcagggctggggcaaggatgtgggcaattcaacattttctaaaattaaaaataaaataaaatttcagatgtttctcaaagtggagagaaatacctagtacatattttagttgatacattcagatcacatgggtttcttgaaataaatcttttggctttagttttactaataggctgataaggtcattatcgaggtctagcgggatccagctctggcctcaaggtctagacctccagagagtggccagataagaggcatttgattcctgaaattattcattgaaagcactgttcttttcttttttgaatattaacaagtaaatattccagcagatgagtaacactgttcttatcatcactatctggagggcaagggtagctcttctgctcccc

SEQ ID NO: 12023 - DNA, 294 bp, Homo sapiens
  source 1..294: mol_type = other DNA
atggtggagagtggtacattttaaaatgtgcactagtctccctgggaccatcttcctaactctgggtgtagggagactcgttcacaacacaaggtgatgcaagctaacactgacagacattaggtgtcacgcaatcatttgatgatttaggcttgaactatctaaggccaagcaaaaaggttcccctctagggaagggcctggggccaccatgaggaatccatagttgattgctgcctgggcctggccagggctgaccaaagcttgttaacagttatttaaagtacccaataga

SEQ ID NO: 12024 - DNA, 328 bp, Homo sapiens
  source 1..328: mol_type = other DNA
gcagcacacacccagactgcagcctgaagagttgtcagggatacacctgttctcgtgtaccagtgcccagaaagcaccactcaagcttttgctgaatgcttctctgaaggcccacaaggcctgagaggctggggtggccatctggaaaggccttggcccagatgatcctagacaattgtttaagcttaaactgttcattggccaagcaaacactcacctgggtgttctccaacatcccagctcagccacctcgggacactgctttagaaaatccatagttggttgctgcctgggcctggccagggctgaccaaggtatttaaataggg

SEQ ID NO: 12025 - DNA, 312 bp, Homo sapiens
  source 1..312: mol_type = other DNA
gcacacacccagactgcagcctgaagagttgtcagggatacacctgttctcgtgtaccagtgcccagaaagcaccactcaagcttttgctgaatgcttctctgaaggcccacaaggcctgagaggctggggtggccatctggaaaggccttggcccagatgatcctagacaattgtttaagcttaaactgttcattggccaagcaaacactgggtgttctccaacatcccagggacatgctttagaaactataatccatagttggttgctgcctgggcctggccagggctgaccaaggtatttaaatagggg

SEQ ID NO: 12026 - DNA, 204 bp, Homo sapiens
  source 1..204: mol_type = other DNA
cagactcccacttcccttcttgggtggccatctggaaaggccactctagacaattgtttaaccttaaactgttcattggccaagcaaacactcacctgggtgttctccaacatcccagctcagccaaagggcgtatactatgataatccatagttggttgctgcctgggcctggccagggctgaccaaggtatttaaatagggg

SEQ ID NO: 12027 - DNA, 466 bp, Homo sapiens
  source 1..466: mol_type = other DNA
aaattgtaataattttataatattttatcagtacaaaaaataagtgatggcatatacaaaccctgggatagtataaggctattaaaattataatagcattccatgtattttgatatacaaagtgtaactgttagaaatgagagctcatgacttctaccttttgaatgttgttccttgtgcatgatttacaattttctaaaactaaaaaaaaaatctcactacacattttatgtgatgcattcagatcacaccaactccttgaactaaatccgaatttttattttaatctgataaacttggcctgataaggtcattgacctctcgagatctcaaaagcctcgaggttagtaatatcctgaattaatttgatccccaaacttcttgaatgaaagcgctgttgtttttcttttttgaatatataaaagtaaatactcaagcaaggatagtaatacccttatcatcatta

SEQ ID NO: 12028 - DNA, 405 bp, Homo sapiens
  source 1..405: mol_type = other DNA
agggagaccacgtggaggccttgcagccccactcggtgcttctgactggctcccaaagcctgtggagctgacattccctgagtgacggggtaggccacctcctggcccaggcctgggtgaactcctcccattctccttctcagaggaaggaagtgggcatccatctgcctcatctctctcccgtggggaagatggggagtttcaggggaactttcacataaatttcaccatgtgaggatggggcccaccatgctcccggtgctgccagaggccctgagcccctcccagggtccctgggtttgagccagcccattcacacactgggttttgtggctgaattctaacctctgtaatgagcattgcacccaataccctacctggtgaccagggaccaggacctttata

SEQ ID NO: 12029 - DNA, 355 bp, Homo sapiens
  source 1..355: mol_type = other DNA
aaaattaaacaccttctttactcataaatttggtagaggattgcttgagcccaggagttcacatctggattttattttctacagaaaatttaaaatttagcagggggctgaagtgggaggacctcttgagcctgacagctcaagctgttgtgagctgtaataagaatgagacatgtttcactaggtggtcagagatattgaatatgtccagggctgggagggtcttagactctcccagcattttaaaatccatagggagctctgccttaccattggtgatgcatcagaaaacatgtcataatgtcatcactgtaatatgacaagaattgcagctgtggctggaacctttataaag

SEQ ID NO: 12030 - DNA, 388 bp, Homo sapiens
  source 1..388: mol_type = other DNA
catgcaaatgagacatatgagataagcactatcttttccagacatcactgatgttacattggatgctatgtgaatacattcttcactttagttaagtccagagcagactgtctgggttacatgcatacctgagctaatgcagccaagtaagaacctctgcttggaactagaggagaaaacccagactcaaacacagattttttttttcttttttaaaagaattgaattggacccagtgagatagtttgtaaaaccaggtcctaccttcttatgcatgattttttaacactaaaataaaaacgctcagccaacagatagaatcgacatggcagtttatttatgtccctgttctctgatagtgagaatgagaagtcatcctggagcagga

SEQ ID NO: 12031 - DNA, 486 bp, Homo sapiens
  source 1..486: mol_type = other DNA
aaatgagcacacttttttttaatacaaaacaaaattttattcttttttttctttttcttttggtacatgtgcacaatgtgcaggtttgttacatatgtacacatgtgccatgtggccccggtgcaagagcacactttttaaaaatttttaccatcatgccatatgcccacataaatgagcatacatttacatgaatagctacatgaacgacaaattgatggataggcggtccatttatcaaagacttttatgtgtcacacacacacctgtctaaattagtcatcatgacaattggggctagttaaatattttctatagacttgttctctacacgtaagtctgagataaaatttgctgacaggcaagggagtcataattacctctatgagtctcagtaactctagtgatttatgcctacgattttcctaggaacgattctaagcctcaaaattactgttatggtgggaattcaagggccctggaggt

SEQ ID NO: 12032 - DNA, 514 bp, Homo sapiens
  source 1..514: mol_type = other DNA
atgtaaaatgggagtaattatacaatatctcaatgcttcagttaagagctgaggaatggaatctgaattccagattcagtctttgtaaacttggcaaagggcttgacctaagcatatatttgttaaaaaatgtgaatcttgctgtatgctgcacgccctgtaccatggcactgttgtctgggccaatattcatgtccttaatgaatttaaaatatgcagtaattaccctccttttctccctgtgatacttgtagagaataaaaatgaaagctagaaaagtgagagtccacatttattgagttcttacatggtaccaggcctcaagaacacttttgcattataatcatactagattcttattttctcccagaaaacagaagctggaatgaaaggggtcactatcttcaaaggctttctggatgccaagggttattatccatgatatcatccctttatcctgggaaatggagcatttgattcactcatctccccattacttttaaataaaaatgag

SEQ ID NO: 12033 - DNA, 614 bp, Homo sapiens
  source 1..614: mol_type = other DNA
gatatacagaaatgctttccaattattctcattatttattctttgatacaaacacaatctagaatgatgttgctttatctccacatatttgaaaatatcctaaatagcttattttatagattgccaatttaatctgaagtatttaaatgtgcttaaacacatcaatatttgttttatggcctagcatatggttcatttttatgaatgtatcatatgtacttgaaaaaaatgtgtattttgcagttcatgcatgacttctatcagtgctgagagagtggtgtaaaaattttctactatgaatatagaagtgtctatttctccctttaattaaatcaaataatataaaaacatgttaatggtttttatgtattttcaatggattaaccctgcacacgtactcctgaatttaaaattaaaggtttttgtgtgtttgttttaattattattttaagaataggttttatgtaaaatcatgtactatatatcttatagaagaatattccaggcagaaaggcagggttctctgcgtttgtctcccacaaatgtggtgaaaatagtatgttcccaatgggcagtagaacatattttaatcaatgccccttgataaaagagct

SEQ ID NO: 12034 - DNA, 511 bp, Homo sapiens
  source 1..511: mol_type = other DNA
atgtaaaatgggagtaattatacaatatctcaatgcttcagttaagagctgaggaatggaatctgaattccagattcagtctttgtaaacttggcaaagggcttgacctaagcatatatttgttaaaaaatgtgaatcttgctgtatgctgcacgcacctgtaccatggcacttctgggccaatattcatgtccttaatgaatttaaaatatgcagtaattaccctccttttctccctgtgatacttgtagagaataaaaatgaaagctagaaaagtgagagtccacatttattgagttcttacatggtaccaggcctcaagaacacttttgcattataatcatactagattcttattttctcccagaaaacagaagctggaatgaaaggggtcactatcttcaaaggctttctggatgccaagggttattatccatgatatcatccctttatcctgggaaatggagcatttgattcactcatctccccattacttttaaataaaaatgag

SEQ ID NO: 12035 - DNA, 659 bp, Homo sapiens
  source 1..659: mol_type = other DNA
aaattcgatatacagaaatgctttccaattattctcattatttattctttgatacaaacacaatctagaatgatgttgctttatctccacatatttgaaaatatcctaaatagcttattttatagattgccaatttaatctgaagtatttaaatgtgcttaaacacatcaatatttgttttatggcctagcatatggttcatttttatgaatgtatcatatgtacttgaaaaaaatgtgtattttgcagttcatgcatgacttctatcagtgctgagagagtggtgtaaaaattttctactatgaatatagaagtgtctatttctccctttaattaaatcaaataatataaaaacatgttaatggtttttatgtattttcaatggattaaccctgcacacgtactcctgaatttaaaattaaaggtttttgtgtgtttgttttaattattattttaagaataggttttatgtaaaatcatgtactatatatcttatagaagaatattccaggcagaaaggcagggttctctgcgtttgtctcccacaaatgtggtttagttaaaatctgatccatcagcccacacattaatcagtatggaaaatagtatgttcccaagggcagtagaacatattttaatcaatgccccttgataaaaga

SEQ ID NO: 12036 - DNA, 439 bp, Homo sapiens
  source 1..439: mol_type = other DNA
tgttttctgggagaaaataagaatctagtatgattataatgcaaaagtgttcttgaggcctggtaccatgtaagaactcaataaatgtggactctcacttttctagctttcatttttattctctacaagtatcacagggagaaaaggagggtaattactgcatattttaaattcattaaggacatgaatattggcccagaagtgccatggtacaggtgcgtgcagcatacagcaagattcacattttttaacaaatatatgcttaggtcaagccctttgccaagtttacaaagactgaatctggaattcagattccattcctcagctcttaactgaagcattgagatattgtataattactcccattttacataaccaaactactggactccagatttttttcaaaactttccagaatcagaaagtgcagcagagcatg

SEQ ID NO: 12037 - DNA, 545 bp, Homo sapiens
  source 1..545: mol_type = other DNA
gcgcttactaaccaaatgagcacacttttttttaatacaaaacaaaattttattctttttttctttttctttttggtacatgtgcacaatgtgcaggtttgttacatatgtacacatgtgccatgtggccccggtaaccatcattctcatcaaactatctcaagagaacactttttaaaaatttttaccatcatgccatatgcccacataaatgagcatacatttacatgaatagctacatgaacgacaaattgatggataggcggtccatttatcaaagacttttatgtgtcacacacacacctgtctaaattaatcatcatgaccccatgtctttaattggggctagttaaatattttctatagacttgttctctacacgtaagtctgagataaaatttgctgacaggcaagggagtcataattacctctatgagtctcagtaactccagtgatttagcactgcctacgattttcctaggaacgattctaagcctcaaaattactgttatggtgggaatctcaagggccctgccctcatgagg

SEQ ID NO: 12038 - DNA, 388 bp, Homo sapiens; identical to SEQ ID NO: 12030
  source 1..388: mol_type = other DNA

SEQ ID NO: 12039 - DNA, 357 bp, Homo sapiens
  source 1..357: mol_type = other DNA
aaaattaaacaccttctttactcataaatttggtagaggattgcttgagcccaggagttcacatctggattttattttctacagaaaatttaaaatttagctcagggggctgaagtgggaggacctcttgagcctgacagctcaagctgttgtgagctgtaataagaatgagacatgtttcactaggtggtcagagatattgaatatgtccagggctgggagggtcttagactctcccagcattttaaaatccatagggagctctgccttaccattggtgatgcatcagaaaacatgtcataatgtcatcactgtaatatgacaagaattgcagctgtggctggaacctttataaag

SEQ ID NO: 12040 - DNA, 386 bp, Homo sapiens
  source 1..386: mol_type = other DNA
gagaccacgtggaggccttgcagcccgactggctcccaaagcctgtggagctgacattccctgagtgacggggtaggccacctcctggcccaggcctgggtgaactcctcccattctccttctcagaggaaggaagtgggcatccatctgcctcatctctctcccgtggggaagatggggagtttcaggggaactttcacataaatttcaccatgtgaggatggggcccaccatgctcccggtgctgccagaggccctgagcccctccagggtccctgggtttgagccagccattcacacactgggttttgtggctgaattctaacctctgtaatgagcattgcacccaataccctacctggtgaccagggaccaggacctttata

SEQ ID NO: 12041 - DNA, 576 bp, Homo sapiens
  source 1..576: mol_type = other DNA
gagcgcagctcgaagtcccgggccagtgcctcgtccaccaccttggccaagcggctccctccgcgtcgtgcttctcctgcagggcgatctggcggtgaatgtccagacattccgcacaggtctgcgtgggtgcccacgatgcacaccaccgcgtggggcactctcgccccataggtggccaagttgaccaccagcacgtaaccgcaggccccgggaggcatcggccgtccagctggtcacctctagggggaggtgacggtgggtagcacttctccttgtccccttcctcggtgaggcagtggcgcagcaaagtcccttatgccccatcaggagcagcttgagccggggctgcaccgccggctgggaatgagggatccccttcatgcagacctcgtaggggggctggtcagtgggttgtctttgatcttccacaaacccacccgggagagctggccaaagtggtcgggcagcaccgcgatctggttcccctgcagcacgagctcctccaggccggtcagctccacgatggagtccggcagctggttgcgactaaggtagagctcctccagaccagcc

SEQ ID NO: 12042 - DNA, 603 bp, Homo sapiens
  source 1..603: mol_type = other DNA
aatattcatgaaaattcctggaaaagtgtggagatttttcgggacccatttttacttcaaatatgggtgtcccgtcgggtccagccggtcttagccagcttggtacacaccctggttttcagggtcttatcagcccatatccagatgttcaacacgaaatagggcctcaggaaatatttaccaaatgaatgaatggtttccactacggcgtgggcgggcgaacccaccaggggggccccggagccccacatccgccgctgggacgacctccccgcccagcatggtccggggcgcggacccggccccgcgccaggcgcccccggccccgcacccggcgccctccgcagctcccgcccccggggcggtgccgggaaaacgcggcgcctccgccggtcacgtgggggccgctccggcgggcggcgctgccgcttcccaatcgcgccctcccagcgccggggacgcggcgcccgcgctcccgcccgagcccggggaaacggagacaaggaggcgccgccgccccctccccgcggctgcgccccagccctgcgcccgcagcatgcccgccgccgggccgagcgccgccctcccccaggagctcgagga

SEQ ID NO: 12043 - DNA, 455 bp, Homo sapiens
  source 1..455: mol_type = other DNA
tgtccaggctcttgacacatccagctttaaccaaggggtgaaatattcatgaaaattcctggaaaagtgtggagatttttcgggacccatttttacttcaaatatgggtgtcccgtcgggtccagccggtcttagccagcttggtacacaccctggttttcagggtcttatcagcccatatccagatgttcaacacgaaatagggcctcaggaaatatttaccaaatgaatgaatggtttccactacggcgtgggcgggcgaacccaccaggggggccccggagccccacatccgccgctgggacgacctccccgcccagcatggtccggggcgcggacccggccccgcgccaggcgcccccggccccgcacccggcgccctccgcagctcccgcccccggggcggtgccgggaaaacgcggcgcctccgccggtcacgtgggggccgctccggc

SEQ ID NO: 12044 - DNA, 421 bp, Homo sapiens
  source 1..421: mol_type = other DNA
gtatatacttaaaaattttttttaatctggaatgcagtgccatgatcatagctcactgcagccttgacttcccaggctcaagcgaccctcctgcctcagtgtcccaagtagctgggatcctggcctgcatatacttttaaaatattaatctttccagctactagggaggctgaggcaggagaatcgcttgagcctggtccacctcaaaaaaaaaaaaaatttttttttgatatttccagaaaactggaaccacataagaatacatttttgtattttacatacctgcaaaattcatctcctcgattttaatctaaaatccatgtagcaaactgtcctttactaaaatgactttgctctgaatcaaaaccaaccctcacttgggaaggaagtgatcctttaaaaaccaggtcctggatttggg

SEQ ID NO: 12045 - DNA, 258 bp, Homo sapiens
  source 1..258: mol_type = other DNA
ctcaatgataattttgcaatggcagtttcacatgttaaagattcaaggtactccccaggagatcctaggtttccatatgatttcctcaggtaaaacagtccacagctgtccgttgtgaaaatgtgaattgttttattattttttatggtcgaaaacacaggaaacactgacgggaacacacgtgccggtgctaccctccagtgacccgcgctagctcgactgcggcgctggcgttccgcgcacgccggctcactgcgc

SEQ ID NO: 12046 - DNA, 629 bp, Homo sapiens
  source 1..629: mol_type = other DNA
cggggggcttcacgtggcagggggcctgggatggaccccggggtcccgagagggggcagcgcggccgcggggagctcgagtcccgggtgactggtgaccgcgcagctctcgtgcacggacggacttcgccgcccgcggggggcgcgaacccgagcccgggcccagctcctgccgtcacggcagctgtccctgttcccccagggcgtatgctgccgcgggctggcgcgtctgccctcgtccccaagtctcgagtcgtgcgacttgcactggcacaccggggctggaacactctaggtagctggccccagggagctgttgcttgcgtggagagggcgatccagggaccgcagctgggaagcgcctcccgggcccacgtgctccaccgcgctgctgggcccggctgcgaccgtgacccgggagctgcggctgcggcggctgatggcttcgaaactagcacaagttcccagccccgggtcccgagaggtctggagacttctccaaaggccaccgagggcgacgggacctagcacgatccccgtcccgggctggcggaggccaggcggccgcgcgggggtgctggctccggccggggttgcccctttgccggccccgcccgggtgcgataacgg

SEQ ID NO: 12047 - DNA, 614 bp, Homo sapiens
  source 1..614: mol_type = other DNA
ggcttgcattcctagtaaaattgaagctgagcctgtatcccttacagtagaaactcccaaatgccatattcaacataatgagttttcagaaagctaaatatatccaatgggaaagactggccatcgttgttattgctattaaagtgtactttaaaaaataaaaataaaaggatagtaatagaagacagcagggtttattttcatgtctttcttttaaaaagttggcaatcctatatcaatttctaatttttttctaaaactctactggtcattaaaattagaaaactggtagagtggctagttcagatcaagttacatgtaaactgaagtgcataatatgcatcggaatttcttctgaagtctgtgccacgggtgtcagacttttgcaaagacgggacgccctcctgtaggaagttgccccctggcgcccgtcctccggcccgcagccggatcactccgggcgcgctgccgatcacgtggcgaagcggtgctccccagcgccgtggctgcgcgcccattggtcggcggctggagtcccgggcgcgcccattggctgcggggggcgttcacgtggcagggggcctgggatggaccccggggtcccgagagggggc

SEQ ID NO: 12048 - DNA, 198 bp, Homo sapiens
  source 1..198: mol_type = other DNA
cgatcttgaactcccgggctcaagtggcccgccggcctcggccgccagaattcaaaagaaaggaatatattcataattagttacacttagggtgaaaaaaataggaaaaaaaaatcataattttaataattcacacttattgcactattgttatttcaattttacagagaaaaacaggcaataatttaaaaaattatt

SEQ ID NO: 12049 - DNA, 482 bp, Homo sapiens
  source 1..482: mol_type = other DNA
aacacaaaatattgtctttgacagaatgactattttttcagagcctagaaggagtttaggtatcattttgtccaggggaaatacaaattacaaaatcaaagctagagcctttttagtgttgtatgcctggcccattttggcagaacatgtgttaagccttgagaatgtcacaggaacaaatgtcatctcctatgatttgcacctacactgccttaatggtgttggccgctgcaaaatgggcttaaatatgtttgtaaatacataacttaatattgaattcatctttgagaactgtgcttagttttcaccccttctgatggccgtcatgacaatgtctccaataaaaactgacagtctagctggctgcaaggcaggtaaaatcaaaccgcatccccaagggctcggcgtgttttttcgtacttcgtacgacaggagcgcacttgttctctgtccgagaacttcgtcccgagagaacctcagga

SEQ ID NO: 12050 - DNA, 497 bp, Homo sapiens
  source 1..497: mol_type = other DNA
attttgcttcaaaaggtgtttatgttaaaaataaaagcaaacagtacttatttatgcttattatattgtattaacatgaattaagtaaacaagtgaaaaatatgaaaagatacttgctgttattaaattgaccttaggttttatcaaaagaacatctgtagtaaaattttgaataggtacagtttgtattagagcctccttaaaaataaagttgcagatcaatcaaaactatattcattctccataggataaagcatgacttataaaaagaaatacagtatgtggtgcttattaaagttacatacatctcttctcacaggagaaatttgatttattgcatatgtcgcatatggacatttctagggaacagattccttattgctgagcagtggtactccattattgctccgggaacatgttagtaataattatgtattaattgatccgcaaaggacatcttttggacttggcacagctcagtcaaatcagaaagaaaa

SEQ ID NO: 12051 - DNA, 548 bp, Homo sapiens
  source 1..548: mol_type = other DNA
gtactccattattgctccgggaacatgttagtaataattatgtattaattgatccgcaaaggacatcttttggacttggcacagctcagtcaaatcagaaagaaaatacagaaaaactcagaactttttggttttcaaacttagaaggctttttaagtctcttgggctatttgaaagtgttggtacatacaatgacgtttagtcaccaataaaagcctttttcaaaacgaagcttccaatgcatttgggaaatactatatttgattttttgcatgtatgattataccgcaaatttctaattagagggaatattaattttctacaaaataaagtttgttcatcaatacaaacctgctttcaaatcaaatcagaaagacatccttcggaatgtgttcagaacgtaagtttttagattttattttattttatttttagacatttatagacattaacttttcaaggagcctttctaagattttataaaagttgttttatccatgtgtttaagaaaacgttttcttaaagcaacagcttttatttctgctgct

SEQ ID NO: 12052 - DNA, 430 bp, Homo sapiens
  source 1..430: mol_type = other DNA
tgactgagtcactgacatccctccatccgaggctggtcatttcatcttgaatgcacaggggcccatcaggagacttggggccacgccatgctgggcacgaggggaagccagaacaacctgacctgtgcggccacacctgaggccctgggtcagagtcctgagcagagaactaagcgggcagctgtaccccacagggtgctggtgctggcagaggcctccaggcgtccccgggccccaccccattccggtccaggctggcacagagaagcctcaaaaaatgtttgggggtgacaagtgtgcccaccaggcagtttcccgcatactcgacatggaagacaatgattgtgaggcagaagctgggtggtgcccacaaagcagccagaaaagaagtcttcgtggctacagtctgagtggggctctggatctgagc

SEQ ID NO: 12053 - DNA, 425 bp, Homo sapiens
  source 1..425: mol_type = other DNA
tgatcactgggactgacctgctgtgtctgtcagccagaagtcatttgtggaactgatcagttcaatgcgcttccacctagttaatttccagggaggaaactgccaggctggaggtcacagtttgtcccctgcctccaggcgagagttgtgcaacctaaaaccaaaatgatccattttgtctgaaactttcttccgggagatggaaaacagtctggtgttcctgcccagtaccacggtgggcggggcgctcccccaatcctgcaggcctgtcatggcccacccagctgctggtgctcagagggctcccctgcaagcccccaggacagtcttgacaagtgtacccctctggggagagtggccagggtggcaggtcttggaccatcttggagctcaggaggctgggctcctgcccaagggactggggc

SEQ ID NO: 12054 - DNA, 424 bp, Homo sapiens
  source 1..424: mol_type = other DNA
ttgacgcagtcacgtgcctcttccaagacaaccccctggggaaatggggtgacctggggagccaggggtcctgggcagctgcccaccaaccctggcgagtagctttcctcactgggactctgggcagtgaggcagaggaaggaaggacttgcctcccaggcaaccggtgggtgccagtgacttccacgaacccctcccaatcgccgccttcaggggcttgggcactgcacttggggacgcccgggcagtccccgacctgtcggcagggcatgtgtgcatgcgtgtgcgcgcgcatgcatgtgtgtgtgcacgtgtgtgtacatgtgtgtgccctcacttccggttcctgtccctgagcaggtgcaggtgaccaggcccagcgcatcgcgccacccccagggttccggaaactctgagtcagtct

SEQ ID NO: 12055 - DNA, 818 bp, Homo sapiens
  source 1..818: mol_type = other DNA
acgacggcctcgccctcctgagagccaggggcggcgggggcgtcgaggggtcggtggctgcacagaacccgaggcgggatgcggcccccagccccggctccggccggcctctgtggcggcccaagttgactggggctgcggtggccgaagcccggtcatctcacacccaggcgggctcggcgaaacctggttgggggtggagtctggcccgggcaggcaggggctggagcgggcctccagcgcctgccttgcgtctctgcggcacctgcgggtccagggcagggggcgggaggcggcccggggcagccgggcgcagatccccgggcgggccctggcggcggaggggcgggccgggggcaggcgcggggaggaggccctccctcactccctccctccgtcctcctcccggcaggtcggagcggggacccggcggcggcccgggacgcagggaggggacccgcgccgacaccgagggaggggccgcgccgccttggagagtcattggaggacgcggccgcccgaagctgataaatcaggggccgggtcgcggctgcgggccaagttggacgccccgacccgtgcgagggccaggtccgcgcctgccccgccaggcgaagcgaggcgacccgcgtgcggccatggcttcgctgctgggagcctacccttggcccgagggtctcgagtgcccggccctggacgccgagctgtcggatggacaatcgccgccggccgtcccccggcccccgggggacaagggctccgagagccgtatccggcggcccatgaacgccaacccggacctgcacaacgccgagctc

SEQ ID NO: 12056 - DNA, 631 bp, Homo sapiens
  source 1..631: mol_type = other DNA
gccgagagatggccgtgagctcccagcctgcagtccccaggctgcacgtgggcccggcgcgcacggtcggtctacagccaggccactcagaacgacggcctcgccctcctgagagccaggggcggcgggggcgtcgaggggtcggtggctgcacagaacccgaggcgggatgcggcccccagccccggctccggccggcctctgtggcggcccaagttgactggggctgcggtggccgaagcccggtcatctcacacccaggcgggctcggcgaaacctggttgggggtggagtctggcccgggcaggcaggggctggagcgggcctccagcgcctgccttgcgtctctgcggcacctgcgggtccagggcagggggcgggaggcggcccggggcagccgggcgcagatccccgggcgggccctggcggcggaggggcgggccgggggcaggcgcggggaggaggccctccctcactccctccctccgtcctcctcccggcaggtcggagcggggacccggcggcggcccgggacgcagggaggggacccgcgccgacaccgagggaggggccgcgccgccttggagagtcattggaggacgcggccgcccgaagctgataaatcaggggc

SEQ ID NO: 12057 - DNA, 389 bp, Homo sapiens
  source 1..389: mol_type = other DNA
cttgaaaaacaattgaacacgttttttgcaagggagctacagtatgttgaccacagttaataagaacacactgtgtactcgaaatttgctaatagattagattctcatcactcccaaaggtaactgtgagaagttttgctatgtatatgtaggtcaaaacatcacaaaaaaaaggatgctcgtccagggtcccctcagttacactgtagttacatggtcatgcctgctcatcccgtgagggaaggcgctgggcaggaagccggtactgggcttgtccctttcacgcgtatacataatattcctgttaggaccagttcctgttttgccagggagaggaattgttcagggaaaaaccccgctttgctgtctgagtcagcgcacagatgggg

SEQ ID NO: 12058 - DNA, 461 bp, Homo sapiens
  source 1..461: mol_type = other DNA
agtttactggagagtcactcacccaaaaacatgtctttaccatacttaaaagtgttatagctaagagcttatttggagacagggatacttgaattaaattttgcaaacatctatggagaacctttgccttgttgaaggcatcccattatttaaagaggtaacattttccccacaactattttgtgtggggtcccacaaaaaaaccgatagatagcagacctatcttctgatatctatctactatctatctatcatctatctatcatccatttgtttatctatctcagaaattacaatgccacctagggcttcctgatggagaccctacaggtaatccacgtgagcatgctccgcggcagacacgcccaggcgtgctccgccccctcgccgccgcgtgctcgaggagcgagtcgcgcgctactgacgtcaccagcacgcgccccgtccgctgcagtccgccg

SEQ ID NO: 12059 - DNA, 478 bp, Homo sapiens
  source 1..478: mol_type = other DNA
atattaaaaaaaaagttggtagaatatatttccatagggcagaaaatatattcaaggtcacaatatgcaaccaggctgatttccaattgaattttgcctgaagcttttttaaggtaatgatggaaactttattacaaaaggtcagtaacttgattgtgaaaatctgacttatgtaatttttaaagaccctcaaaataagtaactacacaatgaggtcatcccatctcccggaagtgtcccgcccctccaccagcagccgggagggtgttagggggcggcctcactcgggccagccggattctgaaacgccggggaaggggagccctggcggggagaaccccccggtcccccgcccagcagctgaggcacaggagggcggccatcttggccgggagggtgcgattggggggctcgcccggaagtgacgccaactacccggaagcggagggggttccctggcccactcccccctcccccc

SEQ ID NO: 12060 - DNA, 402 bp, Homo sapiens
  source 1..402: mol_type = other DNA
tctataaagtggtttattttaagaagggtacattttaagaaggactttctcttctatttcctacttttgaataaaaatgtcagaataattatttgaataaatttttgcggtggtgaccaacgcacccatgcgctgggtttcaactgaagtccaggctctgctgcagattaacggggtggccgccagcaagtcaagtgacttgctcttctgtgcactgcatgtacttggcgctctcggagagcctgtggactgtgtccctccctgacccctggaggattccgtaaggtgccccacgctctgaagagcttctggaggggggaaggcaagacagggacctcctccctcttagacaagctttttttctcgtaggaacacacatcttgagttgttgtgggctccagc

SEQ ID NO: 12061 - DNA, 599 bp, Homo sapiens
  source 1..599: mol_type = other DNA
ggtgaccaacgcacccatgcgctgggtttcaactgaagtccaggctctgctgcagattaacggggtggccgccagcaagtcaagtgacttgctcttctgtgcactgcatgtacttggcgctctcggagagcctgtggactgtgtccctccctgacccctggaggattccgtaaggtgccccacgctctgaagagcttctggaggggggaaggcaagacagggacctcctccctcttagacaagctttttttctcgtaggaacacacatcttgagttgttgtgggctccagcagcgagtagccacttccgctaggagtccctagcggccagggcgtggaagcggactgccctccgcttgccaacgcgggacccggagcccaacggcagcggcggtccttgggcctgtggagaggggttctctgtggccgagtcctaggcctggtgaaccgcgcggtgcgggagaggcgcttgggcctcgtccagccccagcccctgtctccccgcggccggtgccggcggctgtaggcctcgccgcgcccacccagcctggggcgggcccagcctcaccgcccggcccgccccgccccacgggccagccc

SEQ ID NO: 12062 - DNA, 53 bp, Homo sapiens
  source 1..53: mol_type = other DNA
gaggcttccaggaaggggggctgtctggagaaaaccccaggagcgctgtcctg

SEQ ID NO: 12063 - DNA, 584 bp, Homo sapiens
  source 1..584: mol_type = other DNA
ctgaagtccaggctctgctgcagattaacggggtggccgccagcaagtcaagtgacttgctcttctgtgcactgcatgtacttggcgctctcggagagcctgtggactgtgtccctccctgacccctggaggattccgtaaggtgccccacgctctgaagagcttctggaggggggaaggcaagacagggacctcctccctcttagacaagctttttttctcgtaggaacacacatcttgagttgttgtgggctccagcagcgagtagccacttccgctaggagtccctagcggccagggcgtggaagcggactgccctccgcttgccaacgcgggacccggagcccaacggcagcggcggtccttgggcctgtggagaggggttctctgtggccgagtcctaggcctggtgaaccgcgcggtgcgggagaggcgcttgggcctcgtccagccccagcccctgtctccccgcggccggtgccggcggctgtaggcctcgccgcgcccacccagcctggggcgggcccagcctcaccgcccggcccgccccgccccacgggccagccccgcgccgggtgtttccg

SEQ ID NO: 12064 - DNA, 582 bp, Homo sapiens
  source 1..582: mol_type = other DNA
tctcgggcccctgcaggggctaagaccccacagaaggcccccgcgcacctgcctggagcctgcgccagtcaggccatgtaggcggcgcctgcgcgcacgcccagggctattttgaaagcttccagccccgggcatctagggtgctccagctggcctgggcccctcgtcagaagctgggactggtcctgaagacctgcggtccgggcagctcgggctgctgtcctgcctgtgcctgccgatgccgcgcccctggcgggacagacagtggggcaaacgctcgcgtctttgcacctcagtttcctcatctggcagccagagatgccgtggcccacggtaggcgctcgcgggcagtcgtggccgcggggggtgggtgaggccctgggcgtggggtccccctgcgccctccgtggcgcagtcacgttgccacaattgggggaactccactcgcgggggctgcccgggccggtgaaccgacagggcgctaggacccggggcgcgctcggacccggggcgagaacgcgaggccgggatcgcggtgaaaggctcgcggcggagagctcggccgtcgccaggcaaccgccc

SEQ ID NO: 12065 - DNA, 277 bp, Homo sapiens
  source 1..277: mol_type = other DNA
tttagactctgagatcctagaagccgcgcagctgcagacactctaaagtatttgcaattgccaacagatcgtttttcctcttggaaaacttctaagaaaatccagtgggggcaccacggtgggcagccccaggctggtctggcccttcctgcaaccactggactgcccagtctgctggatcaaggccttgtccaggggactcccatgggctcctcactccaggacacttggctgctgggcagagtgcaatggcgtcatcccacagagccatttgtct

SEQ ID NO: 12066 - DNA, 414 bp, Homo sapiens
  source 1..414: mol_type = other DNA
ccctggggcccaggtgcaaacacctgggctcccagaggcttgtggggcaagtcatagaattttcccaagttgtcaggcctggctcctggctcagggcggaaggctgtgggagcaagcctgggggactcatatttgctaccagcactgggtgctagggaggttggtgagtccacgcccagcttcccctgtggcctgggggcaccctctgtctatagaaaggatgcgtcaaagtttgtcaaagtttggaaagaagatggaatcttctacaactccattttagctcctctgtccttctgtcattgacggtggccacatcacatcagcagtttcattcctaaggttggagaggattgagaatgcacgctcattcattcatccatttgtgtagaaacatcattgattacgtacccactg

SEQ ID NO: 12067 - DNA, 417 bp, Homo sapiens
  source 1..417: mol_type = other DNA
actgagcaggcccagggttctggacattttccaggtatttgcagtttattatgtgctaaatactgtaatagatactttttatgcatgaatccatttattctcacaaaaccccttggggaagtgaaacagattagtgtcttaaaaccccagaactctgcgttgctgcgaggaaatggggtagaagctacgacttcctcttataagccaatatcaagacactagtggaaaggaaccagctgaccagtggctcactgtgtctggctggaccagcaagactctgacgtcatcacagaagccttcttggtcccattggtcctttgactgctgtgtacaggatgccacccacatagccaagcaaatttccattgaagaggctctgagatatgctgatagtatcctgtgagctagctattatta

SEQ ID NO: 12068 - DNA, 311 bp, Homo sapiens
  source 1..311: mol_type = other DNA
cctgtgttcccagccctgcaatgctggatcttggaattctgaggtctcttcctattctaagaagccatggatttctttaatttaggttaataatatagcatctgcctgcttgaccctattgtaaggagctcagaaatgctgttatagcagtacttggaaaaaattgtctaggaggagctgcgctgctgttactattatcccatcaagactagagtctgagagtccttctgagtgaccttccagaagcatctcctgacttttttaaaaaaaagaggcttgctgaattaatgaaccacttctcttatctatct

SEQ ID NO: 12069 - DNA, 559 bp, Homo sapiens
  source 1..559: mol_type = other DNA
tcaagcggcattaccttttatgttaaagtttatataaattatttcattttaagattcttttattaattggatttttacataaagttaaataatactttttatttcacctgtaatcccagctactcagaggagaattgctgagatctcagcagtgagctgagactgccgctgcactcagagtgaaaaaaattaaaaattaaatgatacttttaattttatttactattttatttgaataaataaaaggatcctttaaaaagtattaacgaaaatagggtcaaaagtcatagcccattttctttaacacattagcatggaaaggaatcagctctctggcacctgccagcacactggggggaggtcaagataggcatcttgtagatgaagagcatggcgtcctggtaaacgtttaacaacactttccaggaaacaaatgtattgtatacatacataagtttatagtaacatgtactgatataaaggatgcgtagcacttaatttacaaataataacaaaatatgcaatagtctctgtcctaaataccgcagaggtgattgag

SEQ ID NO: 12070 - DNA, 535 bp, Homo sapiens
  source 1..535: mol_type = other DNA
cgccggctgtcgcggtaatagggccctgtgattgctctattagacctgtctgagggactctccggctcgcagccccgctgcgctggggcctccaggctctgaccagccccctctgggctcccgaccatctccctgggattttggttctcctgaacctccaaggaatccggggctgggaggatccccactacccctgcagccgggcaccccgggtgacccagtgccccacacaagatcgagagttgagcccaagaggtcaccttcttctctactggccccgcccctcgcccgccgctgcgggatgaggaccacaggaagggggggacccaatcgacctccggctgggttgcgggtgattccccgctccctccgcggagaccccagagcctggactttgcctgctgggggagctttccgcacagtcccgcagcctgcgcccagcggaggtgtagccggggccgcgcacccccgccccgcccttgcacgtgactcccacaggccagtcagcgccctagggccgagttgctgggccggg

SEQ ID NO: 12071 - DNA, 397 bp, Homo sapiens
  source 1..397: mol_type = other DNA
cttcctggaaagtagaaaacatatgtatctttaaacagcctattgttttatctcttttattctatgaaataaaaaatttaatacacaaatactttaagcaaaatttgcttatagtaaaaattcaagtaataaaattcaaataataacatttcacgagtcttgaacacaggctcggaggccaagaaggcttgccattgtgggaacacccaggctgtcccctccttgagacaagcggctcacctgaactccgagatcgcgccactgcactccagcctgggtgacacagggcctgcgcgcagccaccccctccaggccggagtccacgcccacttgggggaggagccccgcagcctccacctacaggggcgtcccctaaggggacggaggccgcatgggc

SEQ ID NO: 12072 - DNA, 561 bp, Homo sapiens
  source 1..561: mol_type = other DNA
agaggcggcagcatgctggcagccctgcagcccttcggcctcggcgcccattctggccgcgcttgaggagcccttcagcccaccgctgcaccgtgggagcccttctctgggctggcctagtccggagccggctccctactggcgggaaccagggctgcgcgcggcgcttgcgggccagcgcaagttccgggtgggcgtgggctcggcgggccgcacttggagcgggcggccggccccgccggccagggcagtgaggggcttagcacctgggccagcagccgcagctgcctccccgcggggcagggctcgggacctgcagcccgccatgcctgagcctcccccgcgccgccgccgtgggctcctgcgcggcccaagcctccccgacgtcccgtcgaccgcccggcacgggagtggcaggcagctccacctgcggccctgcgcgggatccactgggtgaagccagctgggctgtgtctagctcagagtttgtaaatacaccaatggacactctgtatctatctctgtaaaacagaccaatcggctttctgtaaaatggaccaa

SEQ ID NO: 12073 - DNA, 464 bp, Homo sapiens
  source 1..464: mol_type = other DNA
agtttggccaggatggtctcgatctcttgacctcgtgatccacccgcgattacaccctaggatgagagaagtttccacattcctgttacaggctctctaaggcttcgctggatctcaagtaaactagagagggggcagctgaagctccaggaggctgggctgtgctcgggtgtgttacagtaaagacgcccagcttggcgcgcggctgcagagctcacccggctggcaggagccaccgaggccggacacgtgggcgacttattgaccaagtggggaggaagcagccccgcactgctctcccgactgcggaccaccgttgggctcctcccagccggggtgtgagcggccctggccaatcagcgcccgtcagcccaccccacgaggccgcagctagccccgctggcggccgaggccggttgaagtgggcggagcggcgggcggggcgtcgccgtactaggcctgcc

SEQ ID NO: 12074 - DNA, 394 bp, Homo sapiens
  source 1..394: mol_type = other DNA
gctgggattggagggtgagtcttgagccaacccctgcatctcctcggagcaggtctccgggtaaacaaaccttctaaaggctgttctgtggggtccacagcctcgccacccccagcctctgcagcggcttacccccgccaactcggcaggcagggatcccaggcgcgggttctggcggaggcggtcccgcgaggcagcgtttcgccacccagggcccgcagggctccaagcccttcttccccagcccgcgcgctcaggcccccgcccgcccccggcggtggccccggaccccgagcggaagggggcggggggtgtgccaccgtgcgcgggcggcgggagggcccgggcggggctgcgcggtggtggggcggggccgggagggtacttagggccg

SEQ ID NO: 12075 - DNA, 334 bp, Homo sapiens
  source 1..334: mol_type = other DNA
atcctgggccccagctggaggccgttgcacaggctgttccctctgcctgagaggcctctctcagctgttgcttcctttggaacagccgctgctgctgtccgacaatcccacccagcgctgagccccactgggtgaaggcaatgcaggtggttgtggccgatgtccaccaggaggtgcagggcctggccagagcgggcctggccacaggcaggggacagcgactgcttgggcctgggcaggtgagagccgggcaggccagtacccggcgtgtccgcggtgcgcgcaagcggccggcagagggcgtcagagagccaggagcggcccgcggaggagc

SEQ ID NO: 12076 - DNA, 409 bp, Homo sapiens
  source 1..409: mol_type = other DNA
cgatcccagggaccctcggccccgcctcccgggccccaaacctggactcggccccgcacgaagctccggatcctgggccccgcccctggccccgcgtcggaagaccatgggctcgctcctgggcctgccccgccccaagcccagctaggtctcggcccctgagcccagctcccagggcccgcctcctgagcgcagcccagcccggactcggccccgcctcccgggcactgggcccctccccaagtgggcccgctggccatgtctctgggcctggccttagccccgccctaagacctgtctcctgggctctgctccaggacgccaccaacctggacgcttccgaagcccagcttccaggatcgccctatcctggccctgccccaggaaccgccaacctgcaggaccagga

SEQ ID NO: 12077 - DNA, 706 bp, Homo sapiens
  source 1..706: mol_type = other DNA
agctattgataaattttattaaattttatttagaggcattaaggtctttatgcccatcttacaatgaatactttatgcttttaaagatctcaaagatagctttaaaataagagtcaagttaatgtcatttgttgctatattataaattaatgtcttgcttggacatcagtttctgtgtacctgtagtaattgattgcagtaatatcagtgaacctctgaaattctgaatgccataggataattttctcaggagtattttaaattaaatatattttgaattgggccaatactgtttttgctaatggcaggaattaaaattcgatctcttaaaagctgacgggaattccatatgtaatagttacacgtatggctatttttataaatgaagatttagaaagtagggtaaaaatataagatttactataaaaaggcaaatctaaacatctaagaaatatgtctttaaaatctttatagactaccctttgttaaaaaaaaagttttcttaggagtgattattcatattataaaagtatttacagtattctggaaaacagtttcctccactaaaatgatcaacacgttattaaccctggaatcactaagtcatttcttaatctggtatgatcatattttgtagattatgtaataatcttttaaaaataatcatatccttataaaatatttatttcagaacccagtgacttga

SEQ ID NO: 12078 - DNA, 233 bp, Homo sapiens
  source 1..233: mol_type = other DNA
ataacttaggtctacaaatagatataatttaccatattttgtcatcaatgctaaaatatatgccattatactatttaatttatattatgtccattaacatgacatgacaagtccctatatgatattttaggaaaaaaataagtaatttgccttttctggcacagaaacgaagtctgaatagagtaagatcataaactcacgttccaactctggattcatgagggaagcaaaat

SEQ ID NO: 12079 - DNA, 393 bp, Homo sapiens
  source 1..393: mol_type = other DNA
aagtaaattttcatggaatccagttctggattttttaaaggctcttaatgcaactatatttaatcagaatcatctgagagcttgtaaaagttgcagattctcatcatcaaagattggggcagttccaggagctgcattcggactgtggcccaagggccagtttgagaaacacgggctgtgacccccagcacgtgccgggacttcccggggccaatagttggcgacttttcggcgcttcccgctgggaacgtggagggagggcggcctgaggctgcggccacgggccggagaacagcccgtcgctaaggcctgcgacccagacagcggggaggaggcggtgccgcccgctctggccccgcccctcggggggtgggcccagcgggagggcccggc

SEQ ID NO: 12080 - DNA, 291 bp, Homo sapiens
  source 1..291: mol_type = other DNA
aagtaaattttcatggaatccagttctggattttttaaaggctcttaatgcaactatatttaatcagaatcatctgagagcttgtaaaagttgcagattctcatcatcaaagattggggcagttccaggagctgcattcggactgtggcccaagggccagtttgagaaacacgggctgtgacccccagcacgtgccgggacttcccggggccaatagttggcgacttttcggcgcttcccgctgggaacgtggagggagggcggcctgaggctgcggccacgggccggaga

SEQ ID NO: 12081 - DNA, 379 bp, Homo sapiens
  source 1..379: mol_type = other DNA
atctattattaattgatgcactaattaaagccatacttgcagctggttttaatcaaaaccatgccatgctagagaaaagctgcagcatttccaattttaagtcatgttcaaaaaaggttttgccatttagaagaattatggtattaaggctaaattcatcttgctctcttaaaagatcttttgaaatgagcatatacaggatagagagaaaactacgttttctttctttctttctttcttttttcataagcagtgtgggatagaaaaagctctaggactttatgactctacagctaatcacctcaagagctttgacaaaactcacttgagttctgtgtaaacagaggcaggaaatactttccaggcaatctgggcctgg

SEQ ID NO: 12082 - DNA, 383 bp, Homo sapiens
  source 1..383: mol_type = other DNA
atgacattagttgactcgtgtgaagtgtttagaggaaaaatatccttctggaaaatgtatgttttagacagataatcaaacaaaactaactgatttgtaatacagagatgagatatacgagtttatatgtggctcccaaaatagtgagaagcatgaggtagggaagttaagcctttttccgattttcatcccaatcggggaaaaaattaaaagcttcaaagcaattaaagatcagtcttgttttcatgtaatccttgtttcaaaatattcttcataccataaacctcagtgaaatatatggcaattccttccatgaggcatgaatacacccacagctgattgtaaacacaagtctggaattgcattctgaattcattactgag

SEQ ID NO: 12083 - DNA, 537 bp, Homo sapiens
  source 1..537: mol_type = other DNA
gcaaaaaaaaatgatgtgttacacttcttatatttcccaattttgtaattacagtgctgaccgtgtagtaagaactcaataaacagtacttgctaatttgttaattgattgatgagactcagccactatcaagaattaaacttcattaagaaagatttcattaggctcataagacttttgtgactttcaatgttcctaactaccagaaaaggatattttattgcctgtctggggaacgcaaagtaaactttcatatgggatgtgtgctcacatgtcaactacaagttcttatataagacaaaaagggtgccttaaattatgtgctattttggtccataaaatatttaaagaaaaaatttatttcagatatgagagtagtattttatgaaataatatcaaaatgaaaacattcattaagtattgatggaacatccacaatgtacaagcaaaatgtttggggctggacaaggtacaaaccatgtagaattgtaatttccagtttgggcagatttccccttgcctcaggatagtgagtgc

SEQ ID NO: 12084 - DNA, 275 bp, Homo sapiens
  source 1..275: mol_type = other DNA
gacagagtctcattctggctggagtgcagtggagtgatctcggctcactgcaagtagaggaactgcaaggcctgacctcaggtgagcgctatggttcttaaaatattcatagaatagaaattgaagtaagtctattcgtttttatattaaaagttccatgaatgagtcattgaatgtctaaagtgctggactacccagtaattgggttcagtggtccgggaaaggcaagctccgggcgggagcgcacgccgcgcccccgaagcctggctccctcg

SEQ ID NO: 12085 - DNA, 212 bp, Homo sapiens
  source 1..212: mol_type = other DNA
ctgacctcagttgagtcagactttaatgacggcctgagtaagaggattcttctgggaaggcatctctagatgggcatggtggcatgcaccgaacccaggaggtcaaggttgcagtgatgtgatcacacggctgcactccagcctgcctctaggtttgcaccatattagaattctaacttaagagtcatcagccttctagattatatttaaag

SEQ ID NO: 12086 - DNA, 294 bp, Homo sapiens
  source 1..294: mol_type = other DNA
agaaaaaaactcgaatctctaaacatggagtcttttttttttttttgtgcagtgggcaattcttcagcctcagcctcccgagtagctggggctgttctagagctcctgacctcaagtgatccagccatttactcaacattatagtaaatgtatgttttagaaggcatagattacttataaaaacgcctgtaatcccagcactttgacagttgcagtgagcggagatcacaccactgcactccaccctctgacaaatttagattttgcaaactcttcagatgctgaaatactatg

SEQ ID NO: 12087 - DNA, 604 bp, Homo sapiens
  source 1..604: mol_type = other DNA
aatattttagggactcctggcaaaacaaaaagatgacacaatacgcttctcatttattttatatttatacaaacagcgcttccctgaaaaatcagggtatcgttcaagattttatctttattcacagaagttttaaaatttttaacttttatatgcacaagacagttctgatttgttgaattatgctaatgcttctaaaatatgacttgagccaaatgccatttgtgtcgtatatgtgaagatacaattgcaaatcgttcacgaccttgagtcaagaccttgagtttcctgaggtgtcccagacgggcgctgagcccagctcggagacccaccccgcccgtagcagcggcgcgggccccagagagccccgcactcggccgcgcctcagttacgctgactcggctgtgcccgccgcggccaggtgtcgccgggctggcttcggggccggggagcagccgggatccgccgcctcttccatgatcttcccgggccgaaccacgggaccgctacgctgaaggtggcgtcgcgggtccccggggccgcgcgagtgtaggggtcgctctcggccggccgcgaagctcgcggcaccgacttctcgcgagat

SEQ ID NO: 12088 - DNA, 470 bp, Homo sapiens
  source 1..470: mol_type = other DNA
tattcatggaaaacattaaggaatccagagaagttttatttttacattaatatacagaatatccacagatcaagtgattcactgggacataatatgtctctcttttcaattatttaaagtcccacagaaacttgactgacattttctatgcatttttgaagagaaatggaagctaaatttctttgactgaattcatgtaaatcagtattttttttttacttctacacatgaataagaagtaatttcattcactgtggttgctgttgtaaatacacatattcactaatgttaagaaaaattgtgcctattatgtatagtagtgatgcacataatttacacacactcattgattgaaatgtttccctgcagatgaaggaaaagcaaaggaggcatttgtttattttccatttcgtgaatcataaaatcagcaccaggggacagtgggaacggcccctgtcacaattaaaggg

SEQ ID NO: 12089 - DNA, 394 bp, Homo sapiens
  source 1..394: mol_type = other DNA
atattcattttctattcacggcaaaatatagagatgcaaatcatttctttccagcctatttggatttactgtaaatcttattttacactaattagaagttcatgaccttagcacacaattaaaaatacatatgtgtattatgtatatatatatatggcaattttggttatattatctgagtaaaggtaaacatgttccttacctaaccttgattatgtaaagaaaaaatgataaaagaaaggagcaatgcttgtacattttattagtgttttaaaattagtgagttaaactgtcaaagctttgatccttttagaggcgatttatctgcacctcctcgaagttgctgcaagggccccttttggtcacttccgaagtcaaacacccgcttatatac

SEQ ID NO: 12090 - DNA, 581 bp, Homo sapiens
  source 1..581: mol_type = other DNA
ctaaatttctttgactgaattcatgtaaatcagtattttttttttacttctacacatgaataagaagtaatttcattcactgtggttgctgttgtaaatacacatattcactaatgttaagaaaaattgtgcctattatgtatagtagtgatgcacataatttacacacactcattgattgaaatgtttccctgcagatgaaggaaaagcaaaggaggcatttgtttattttccatttcgtgaatcataaaatcagcaccaggggacagtgggaacggcccctgtcacaattaaagggaggctccttgcggcccccgcgggctcccagggacccgcaagttgaagcgcgagggttccacgcgggctgcggggacgcgggcctcggtgctgcagactttctcagggcgcctgggtcgcggcaggcgcggagtcccgagcgcagcagctgctccgccggcctcgcctccgacccccgccctgcgccaagcgcggaagcgctcgcgacctaactgccccgggtgccgggcgcctagggaggggccgccaccgcccgctccgccccgggggcctgcgcccagcag

SEQ ID NO: 12091 - DNA, 466 bp, Homo sapiens
  source 1..466: mol_type = other DNA
ggagattactcttcacaattgtattttaacaattcagggtggttaggacaagcccgccctcccacccggagggactcgatcaggcgctgcttctgctgctggaggctggtgaggccaccgggggacccagccgcggaggaggaggcgctcttggtcaggggagccagctcatcctcctcgggtccacgggccggaggccctggaaggctctggcctgcttctcccagtggctcggcccggcggttctccagcgacagaggagcggggtgggacgtccgtggcccaagcgctggggaccctccccgagttctgggcttgcggcccggaacaggaggtcccaccttcacggcccagacgcccaaaccggccagccagggagcctggccgcccagcgctccaccacccgcgccgccgtcacttgcgtgccccgcccccgggggcgctctccgccccctctgcgtgtcgc

SEQ ID NO: 12092 - DNA, 379 bp, Homo sapiens
  source 1..379: mol_type = other DNA
aaaagagggtcttatgactgtcttctaaactctgaagagtcacaaatgtaacttccaattctccaaaaagaccctgtagtctaacattgttttctggagaaagcatctccgtactgcagtttcccagatactctcttccctggccagctggcgccatcctcctcgccatagagacagcactcggcggcggtggcggtggcggtggcggtagcggcggcggcagcgggtgccccatagacacctctcgcccagcgaagggaaaggcgagcaggagctgcgccgcaccgtgctgcgccgtcgcttttcgcacgtcctgacgggggcgcgcgacacgcagagggggcggagagcgcccccgggggcggggcacgcaagtgac

SEQ ID NO: 12093 - DNA, 520 bp, Homo sapiens
  source 1..520: mol_type = other DNA
ggaattttaaaaataaattcaacaccgtattaattatttgctggaaattgaacagaactatgtagaattctataaaatttcacttatggtggagcattgtactcttgcaagaaaaaaaaaatggagggcgttcttcctctctttggcttttcccaagttactgttaataccatcaataggtatctctatctctcagttcagttggagctaaataaagaggactgtgccaggggaaaagtgtcgcctgcaacagtgaagtccgcaccccgagcgctatgccggccgcgcctgggatcccaggacgccctagaaccagggacggtgtggagcagcctgtactccccaaaacaaggccctctttgtgtctcggctccgccggctgcccctgttaagagagagcgagcagccctcgccccggcaaccccaggcagaggcgcgtcgcggcggcggcgcaggtgggcgcaggcgcggaggtgggctctctagggccgcgcgggagccccgggtccgcacgccgcgc

SEQ ID NO: 12094 - DNA, 243 bp, Homo sapiens
  source 1..243: mol_type = other DNA
aatcattgcaatttagaagaagatgaatttgaaagacgacttgtcatttatatggactacacatttttgaaaggcgagtggtaatctcagctactccggaggctgaggcaggagaatcgcttgacagagaaacaaatagctagtgctctgactctggttaaaataactagtaagaatccattccttttattcagctacaaaagtcccttaaaattccccgcaatttcataaacccttaagagt

SEQ ID NO: 12095 - DNA, 537 bp, Homo sapiens
  source 1..537: mol_type = other DNA
agcctgtaattctcagcctggtggctcaagcctgctgcagtgagccacgattgtgtcactgccctccagcctgggcgacagagtgagaccctgtctctacactgacacacacttattgttcaattcagtgcgtgttttaaaattaacaggctttcacattgtgacttaatcttatcagagactcctaaaggagacacattatttatcaacgtttagtttgcatttgacaaagctatcattgctattattatattttattattattttcttatttccaaaatctttgtagaatggaaaagagcacgaactcttccccggcccgcgcccaccggcctagcccggggctagcgcccgcccacgtgtgctcggctccaggcaaaccccgctgagcagcggccgcacaccgcccaccccggggattggtcagcgcggccggggcccggcgggaggcgggctcggggtcgcgttccgggagcgcggaggaggcggtgccgcccggccccgcgccccgcccccgccccgggtggctacacagag

SEQ ID NO: 12096 - DNA, 719 bp, Homo sapiens
  source 1..719: mol_type = other DNA
cacattatttatcaacgtttagtttgcatttgacaaagctatcattgctattattatattttattattattttcttatttccaaaatctttgtagaatggaaaagagcacgaactcttccccggcccgcgcccaccggcctagcccggggctagcgcccgcccacgtgtgctcggctccaggcaaaccccgctgagcagcggccgcacaccgcccaccccggggattggtcagcgcggccggggcccggcgggaggcgggctcggggtcgcgttccgggagcgcggaggaggcggtgccgcccggccccgcgccccgcccccgccccgggtggctacacagaggggcgcccacgtgcccagccctccttctgcagcgcggccggcgggcgctcctcttcgcgggaccagcgaggcggcggccgctgctccagcgtcccccagccgcgggcccccgacgcgctgcagccggcagcccaccgccgccttcttggcgcgaccccagccccagtaagtgctaggtctccagccccgccgagaggccgcgggcgaggggcagcccggacgctggggccggcgggcgagggcgccctggggccggcggggaactagagggtcgagggctcccggggacgagtccagctgcgcgcagctgccctgaggccgcgctccagcgagtcttcgtcagggagtcggggccgtgggctggggctgaagccgt

SEQ ID NO: 12097 - DNA, 646 bp, Homo sapiens
  source 1..646: mol_type = other DNA
atagaatttctaaaagaactgcttcctgctagttttaatagcacttaatagtgttatttatggtaacaacttattttctaggaaatcttggaaacaggcataggacatttttaaaacattgttttgtttataacatttttaaaaatgttaagagctcattataaccatgttttaacatacttttaaaagaccactataagagaccacatgatgttctataaatgcaattactcatgcaataaatgtagtctttagaatatgcctatctgatggactctgatattacatctgatagagaaaccgtattaatcttttactgttgattatttgtgtcagcatgtgggaattaaagttgaactttaaccttttgacaatctgtcattaatatattagaatagaaattttcttaaatattgtagttgagaacatttattgcctgaagtctttaaaaaaaaaacttttccaaaataccaggtttaaatgtagtttacatgtaaaatatctagagaaaaaatgctcatgttatcattgtgaatataaggagtgaaaaatgttaaaatcaggacacagtttactttcaggaaatcctaatttttttctaattatgaaagaaacattaggcacttgaagtagttaatttccccta

SEQ ID NO: 12098 - DNA, 346 bp, Homo sapiens
  source 1..346: mol_type = other DNA
aaatgctgcaagaggccagcaaaatctttcatgactgctttcaaggaggctgaaaggaaagaattttaccttttcacacgcaaatgctaatatatgtgttttaatggaagctttctaatatggcttcattgacgtctacattttgtagtacgaaaaacacaagagaaattgaagtttacttactgtcaccttaacagtacatgaattgaacattcttcccaatgtattttataactgaaaattcattcaagagatcaaaaatcaaattgaaagtttaatggtctgtggcagatattccaatagagctcttataacattttatacctgtctgtgggacagagactag

SEQ ID NO: 12099 - DNA, 403 bp, Homo sapiens
  source 1..403: mol_type = other DNA
cctgtagtcccagctactgggagatcgcgccactgcactccagcctacagagcgagactcctgactaagccttcagaaatgcagttttaagagtttgtgaatgtgtaaaaaaaaaaggaataaaagcattttttgaatcagaattcttgaacctcatagtgtgagttatctaagacaaactgactatactgtgctattgactgagtaagtcagttttccactccaatgcccatttaaattgtaaccatattaatgtaaacaaaataccattaattgtttaatctttattggtgtaaacactatcttcttataagtcacttgataatttttgactgtttgtataaaaatgttctaattgctgcaaaaaggctcttaaagatattttaaatacaaacctcatgtg

SEQ ID NO: 12100 - DNA, 687 bp, Homo sapiens
  source 1..687: mol_type = other DNA
agaaattaatagctggaaagctacttaatacacacttgctagtaaacttgctagaagcgccccgcggtgcgaggcccctcggcctgcaggtggccagaggcaagcaggagtcagatcccccacctaccgcggcccggcctgggccctagcgctgggtgcggcggagccccgggctcctgcggggacgagcgtggtcccgggacgcgcggtgcagccaggtgcgccggcggcagtggcagccgctgagcgccgcgtcgcacgtggcaacaggtgcagcgctgtcccgggctggcgccggggggcgtggggcgcgtccgcacttagtccgggagcgcgcggagcgagcgggagcgcccgagcggagtccagcgccccgaggtacggcctcgcacgtcattcaggttccccgagggccgtcccctgggacggcggctggccttggtctcccgcagcgagccgctggagtggagccttcggaaggagccgccccgggttgggccctccccgccctgctccaccccctggcggccccggaggcggggaggcggggaggccggggctccgggtcccgcctggtagccgccgcaggcgtggggtggtgccgcgccgcgcgcccccaggtgcagacgccgcccccgagacctccggggcgggttctcggcgaccccgccagtggtgcaaagggcg

SEQ ID NO: 12101 - DNA, 569 bp, Homo sapiens
  source 1..569: mol_type = other DNA
gtaaatcaacaggattacctttcccttaataatcttcaaaatgtccacgtgaaggacaggaagatgtttgaaaacaaaactttggtattttactttacacattagaaaatcttctagaggattttaaaacaaatacttttgtttttcttagagagcaaataaactgaccatttcaccttggcaattattaacctgccttgttttttataactaggaaaaatttggcttatctccatattttagttgagatgacatattaattcatatttttgtgggtaaaatgttattacccttaatacaaagcaaagtttcagctggacttcgtttttacttaatcttcaatggaacattattgaagttacagtacaaaaattctctgaatgaacataataataagttgtaaaatatatatatctttataaagatatattattggatctttcacaaaaaggaaaaaagaaaaatatcagagtattgggatttgtccttgatgtttgtttctggattgaagccagaatcaacattgtccctatttctaatcaaataatggagaaataattacaaggatg

SEQ ID NO: 12102 - DNA, 506 bp, Homo sapiens
  source 1..506: mol_type = other DNA
tcactaaaatatgagctcttcaagggcagggactattttgtttttgttgttgaaacccagaatgcaattcttctttttacctttattttgcttaaaaagttattccataattataaactgcgtaaaactagactgacaggtgttttacctttccagtcaggaatttattaatcttaatagagctgtaagatagttcagagaaaatttactgaaattaagtttggattaaaatcatctggctcttttaaggaaaagggacattaaccaaaagtggcgttaactatcaacaatatttatgattctctcactcagtagatacataatgacgtttaacttccgtgtaaatccacctcttcgtgaccgaatgtggggtgaggaaggggcaaaaaagcgatcccggtcttggctccttcttccggcacgggccggagctgacaccggcctagggccccacgctccgcgatcagcgccggaagcgcacgggtggccggcaggcgtttagaacg

SEQ ID NO: 12103 - DNA, 595 bp, Homo sapiens
  source 1..595: mol_type = other DNA
ttgaaacccagaatgcaattcttcttacctttattttgcttaaaaagttattccataattataaactgcgtaaaactagactgacaggtgttttacctttccagtcaggaatttattaatcttaatagagctgtaagatagttcagagaaaatttactgaaattaagtttggattaaaatcatctggctcttttaaggaaaagggacattaaccaaaagtggcgttaactatcaacaatatttatgattctctcactcagtagatacataatgacgtttaacttccgtgtaaatccacctcttcgtgaccgaatgtggggtgaggaaggggcaaaaaagcgatcccggtcttggctccttcttccggcacgggccggagctgacaccggcctagggccccacgctccgcgatcagcgccggaagcgcacgggtggccggcaggcgtttagaacgcgaggctcttttcggcttaaagagccagaagcgacaccacaggcgggtcacatgactattgcggctcccgcccgggcgagttctcgcccccgcgcggccgttgccgaggagacggcgcatgtcccgccgcgcgttgccccc

SEQ ID NO: 12104 - DNA, 347 bp, Homo sapiens
  source 1..347: mol_type = other DNA
gaagtgcaacccagagggcaggatttcctgctggactttgaaatccaacccggtcacctacctgttgagctctgctccgcgggtcccaccggggatttggcagctttgctgtgaaagcccaagtgggtaaccggtaccgaggacgcctgggtacgcgggacaggctgcacccgcctgctagaggcgccccatcgaggcgccacgggtgaagctcccggccccacctacggggcggggctccggctcggtccgacgcggtgggggagggggatggatcacgccacgcgccaaaggcgatcgcgactctcctcccaggtcgcgggtcacgcggcggagggggcgtggcc

SEQ ID NO: 12105 - DNA, 342 bp, Homo sapiens
  source 1..342: mol_type = other DNA
ttcaacatttaacacgtatattcaatattacacattttttttccggagtgaaatgaacatgccaggcacattccctttaaagccggagacatccgcagtaaatattttttgaattaataaagaatatttctaccataggagctcaaatgtgctttaagcatgtgatatgtttcaaaagtcaaacttcatccttagggagaacactgtcatcttctcctcctttaaaaaaaaaaaataggaaaattttctaaagaaataatacaaatggataaaactgcaatttgttgtcctttctctcacatgcaaaaagaaaagaaaaaatagaagtgcaacccagagggc

SEQ ID NO: 12106 - DNA, 411 bp, Homo sapiens
  source 1..411: mol_type = other DNA
atcactattataaaaaagaattaatagccattatggaaaattatatggagtttcctaaaaaagcacacacaactaaaaatagaactagtatttgatccactaatcccactgctgggtattaaaatcaaagttcattggagcactgttcacaaaatacaaatagcaaattctcacttatttgtataatttaaaacaatcaacatcaaataaacagagtcaattagacagaaggaatacatttttacaatttttcagttttttggcccaggctggagtacagtgggctcaagtgatcctcccaccccagcctccggagcagctgggactatgggtaaatacagtgttagatttaagtaccttagttgatgtgtaaacaagttgtaacctaacctaggagtttacctttgtaac

SEQ ID NO: 12107 - DNA, 321 bp, Homo sapiens
  source 1..321: mol_type = other DNA
gccaagagaaagccttcgcatctcaagaaatgataaatgtttgaagtgatagatgtgctaattatcatgatttgatcattacacaatgtatgtatgtatacattgtaccctgtaaacatgtatattgggtcaataaagaaacaaaaattatgttgtattgacatgacacattgcccagtgccttcagaatttttaaacttggtgtgattaaacatgggacatcttcctcccacccttttttatggtaagatatgaataagggcatttcccaggggcccctggggtaaccctaatgtgactctggggagagcacttcccctg

SEQ ID NO: 12108 - DNA, 487 bp, Homo sapiens
  source 1..487: mol_type = other DNA
catatgtggaatctaaaagtaatttagctcatagaagttaagagtagaattctcatgacaaagagatgataaatgtttgaggtgacagttgatgtctgcatgttcagaacatcacacactaccaaataaatatatacaattgttatgtgtcaaaaaacattatatacaatgtttatattttatattaatattaatgtaaataaaaatttacacaaatcttttcattaaatatggtgtggataattatattatctgatgataccggagaaataaaaatttacattaatgttaatgtcaaaatatgatacatgtgacacttataccacatgcatagagttatttcagacacattgtgtgagtatgactcacacatgggaagtctggcaatcagataatataattatccacaccatttttaacaaaaagatttgcgtaagagactctggtgtcagggtgatacggaattccagtgagatcacttcccttg

SEQ ID NO: 12109 - DNA, 286 bp, Homo sapiens
  source 1..286: mol_type = other DNA
gtccctgggatgccagatagtgagacatcgcaatctgagttatgctcaaaactcacttcatatgttaggagctaaactgtgtatagctttattgctctcactctgtgccatattgaaagtagagaggtaacagaacatctaaggtcataagaaacatttaattcttcagaatggcaacataatttgaattgctgtcggaaaattattgatcattgagttacttcacaaatatcacaagagaaatagtgttgctttttggaatgttaatttgcctggccaattgcac

SEQ ID NO: 12110 - DNA, 436 bp, Homo sapiens
  source 1..436: mol_type = other DNA
ttacaaagtcttgataagattctaattgttcatggaacaccattattggaattcttgaaataaagtttagaaaaaaacatttcaggaagttttgccagataaaatataagatgcctagttaaacttgaatttcagaaaaacgatgaataatatttttgtataagtatgttttttgatgtgaaattcaaattttattgggtaccctatttttatttggaaaatctgccaatcttagtatgattcaaaatgatctggtccttcacatttaagtgactggtagggatttatttatttgcaaccttactaggctgtaaagtaatgctcagcagactagagctgcaatgtcttgtgtattcaagaaaacaaaagtgtgtgggctcactgtttcttactggctgctgtttttattagaactgcagaaacattacatgctcac

SEQ ID NO: 12111 - DNA, 512 bp, Homo sapiens
  source 1..512: mol_type = other DNA
gatcttggacaagtcacactttcatctataaaatgttaatcatagtagccatcccacagggctgctggtagaaatagatgaattaatacaataaaactgtagcacataagtaaatactttttattacttatcagaaacgttctccaaattaaactgaacacatttttcatgcactcagtaaatgtatatggaatgaataaaagcaatggtttgtattgtcaccagaagattggaatcttcatgttatttttaatatttgtattaatagccattatcactattaagtatcaataatattacaatatcttactcatctaaacctattagtttttacatttggtgcttttatactgagactgtgttgaaagacattgtatacatacaaggtactgtaagtgatataaaagtttatggcttcatatttaaaaatggatgttaaatattaatttaatatcaagaattaaacccttttaaattcccatgtgtcattcttgcatcagagaaaatgccag

SEQ ID NO: 12112 - DNA, 740 bp, Homo sapiens
  source 1..740: mol_type = other DNA
ctgtcacttgaaaaagactgttctttgcctgtagccggccacacaggttccgcctccaggtggtccctctaccaggggagggcgccgttccagcccttgcctctgcggcaccctctccccgcgcacgcactgtcggtgggggcagtcccgaggccaggctgcggggcgcctggggggactcgcctcagggggaaatggccctttcagggctcgacgggtccccgggactaaacgctccggccgcggatcggtgccgggggagcccggtcagagaggccgggaccccgagggacgcctaggtgcgtgtcccgaagcccgcgtacctccagccccggcgagacggcgcccaactcgcggctccagtcggttcctgagaggaaacaccagggaagcacctctcacttttctcagggtgggagctcgcgggctggaggctgggcccagggcgggcgcgcggctgcgggaggcagcggacggtccgggccgctcgagggctgcactgcgagggtctggatcgcctccagcctcccccggaggccccgcccctgccctggagaccccgcccccgcctcggaggcccagccacctcccccctccccgaggcgtcggccccgcccgccctccgcccccggggcccgccaccgccggcccgcctgcgccgccttcgctttgacgttactgggggccgggcgggcggctgccgcgggctcgcagcctcgccagcctccgccagggtgcgc

SEQ ID NO: 12113 - DNA, 446 bp, Homo sapiens
  source 1..446: mol_type = other DNA
aaccagtgtctcacaggtcagcacagaatttaggattaaattatgaaatgaatagtgttttcatttcaaggtcaggagttctccgggctgaggcagcaggaggttgcattgagctgaaatcacaccactattgagaagggttgtcttgactgtcatgttgtttgcttcctcaggctgtcggtggaaccatggggctgagtcacgtctgcccacagctgctgctgttcgcatccctgggcactgaggcctgaaactccaccctggcagggaccagcccgacccccctggaggaaatggccgggcagtttcagcagcagcagatgaaaacttcccgccccgtctccagcggcaaccccagggggcctggaggagggacacagtttcccaagtcccaggacaggcctcttggcaggctgggacctcaggcgcacacagggctcagctgc

SEQ ID NO: 12114 - DNA, 459 bp, Homo sapiens
  source 1..459: mol_type = other DNA
tttgatcatttacttaatgtcaacaaaagaaaaaaaaaatgaacaagtggggcctgcgcaccctcctagatctgcagatttaccccggactaccgcagctcggggacagcgcgcgggccaggcggcccgagatgcgcaggccacgcagcctcgccgacgagtggccctggagagcctccaggcgcccgggtggggccgcgattgcgccccgccagtcaccccggcatgtgggcgcggcggggcggcgcgggcgggacggctacaagagctgttttgcgtccgggccggagtatttgctcagcccgcctgcgttccccgacggcttctggcggccaagtggatgtggcgggtgatcgagccaccctgcccaggggcgcccagcactggtaggtgctggggggcgcaggggccagagcgggcgggcggaagcctcacccccgcctccaccccttcgcggcg

SEQ ID NO: 12115 - DNA, 545 bp, Homo sapiens
  source 1..545: mol_type = other DNA
tgtgtgtgtgtgtgtgtgtgtgtatacacacagtaatagcaaattgtatgtttgtatatatgaatatatttgtgtatgtatgtatatatatatataaaaatagcaaatacatatatagatggatatttgctgttattcgaataataaagatgccttcgttaattgaagacaacattattgacatgaaattaactggaagggcttagtccctttccatccattgatattcctaaaaggaagggacgggtcactccctgcaaggcgcaatctccaggcaggggcagggcaggtctgggggcttcacgccccccagggagcgggtcacccggtgggactcgcgcccgccctgggacgcgcccaccgttctccctggggagcgggaggctccaggcgcggctggggcgctgtgggcagatgcgctcggtcctcaccagcggcgttgtgcggcgaacctggggaaaaaaggaaattttttattttttaacatttcatttcatgaaaccgtttttttgcactttccctcctgaccccaacctggaaacccc

SEQ ID NO: 12116 - DNA, 452 bp, Homo sapiens
  source 1..452: mol_type = other DNA
tggggccaagagctggccctaacccacagtgaactggggtgagagtggtaaacctctatatgtgtgtgtgtgtgtgtgtgtgtatacacacagtaatagcaaattgtatgtttgtatatatgaatatatttgtgtatgtatgtatatatatatataaaaatagcaaatacatatatagatggatatttgctgttattcgaataataaagatgccttcgttaattgaagacaacattattgacatgaaattaactggaagggcttagtccctttccatccattgatattcctaaaaggaagggacgggtcactccctgcaaggcgcaatctccaggcaggggcagggcaggtctgggggcttcacgccccccagggagcgggtcacccggtgggactcgcgcccgccctgggacgcgcccaccgttctccctggggagcgggaggctccaggc

SEQ ID NO: 12117 - DNA, 358 bp, Homo sapiens
  source 1..358: mol_type = other DNA
aggtagttatttttaatatcagttacgaaagggacctatttttaaaagaacttgacaccttaccaaactcttagtaattctaatggtttttaaattgtcagaacccatttttagagtggtttctcatgaccaagatcctgataaaatgccataattttacacatcgtggaatgaccaagtgtgaactctgtagcacagattgaaccatagcacagatcaaatgatctgacatttcatgtgatcgcatgtgttcagggtgaacgctgctgactgcagtgtcctggccctgattgcagaacaggatagtgttatctgtgctggctgggatccgcagccttgctcaggctgtgcattggtg

SEQ ID NO: 12118 - DNA, 229 bp, Homo sapiens
  source 1..229: mol_type = other DNA
tacccttgactgtgaaggttctaacctttacagggagtatcttggccaatacctccattatgcagcattccaggtgggaagcaaaacttgcttcagggatgcttcctgcaggtaagcaggacttcaagactgtgcctatagcctcaggactgcctaccctgtgcccaatctcccagatggagacttgcctcaggagtcataggactggagccctggcgcatctgcaggt

SEQ ID NO: 12119 - DNA, 347 bp, Homo sapiens
  source 1..347: mol_type = other DNA
tttaaaaatataatttacacactatataattctcccattgaaagtgcataattctgttgcttttagtatatttacagagttgtgcagcatcagcataatgtaatctaggacactttaaatggaatcatacaatatgtgtatcataactctgaacataaaatattatccttgcattccttgatgagtttgaggattgagaataaaccagattgtacaagcacaagctgggacgcaatgtgtgtccctctatccatcaaatgtaatttaacagctaaactttccctcctttagacagggggcccccgggtagagatagccaataggtgatgaggtttatttgcatattt

SEQ ID NO: 12120 - DNA, 439 bp, Homo sapiens
  source 1..439: mol_type = other DNA
gctgagcatggtggcatgcacctgtaatcccagctactcaggacatgccactgtgacatagcgagactctgtctcaaaaataaaaaaaataaaattaaaaaactattttctttttttttagcgttaaatcgaaagttccctagttaattccaccaatggtttaatgtcagaataatatagatcattagagcctctcaagatccatccagtcatccatgcaagaaatatttattggatgctaccatgtatcaggcactgagtgcataaagcctttacagaggccacagatgttgggtttttatggcttgagaacaacatacattgtttctttccaggaagctaattggggtacatggagccactttgactaagtactggttccatcttggcttccaatttgtattcctgccttcctgcctttgacgcagggagctaaggg

SEQ ID NO: 12121 - DNA, 412 bp, Homo sapiens
  source 1..412: mol_type = other DNA
taattttacacgtgccaactttggacattagttaaacttaaaaattataatcttctgcgcctgtaatcccaacattttgggatgccaagacggcgggaatactggagacaagccaatatatgtttgtcgaatggatacatgcgaaatgatgccacatgtgttaataatcactgaaacatgttttccattgctctgtttttcaaagccgaaagcccattcgaaatggatatcagctgacgttcgcgcgccccagcacgctggtcagctcctcttgctcgcaagcaggtctggccccagcggcgcgaagtcacgaggctgggggcggccggcggcgaagggggcggggcgaggccggggcgccgcagcgcgcataggcggagcctcgggccgcgggccgccttggtatatctgc

SEQ ID NO: 12122 - DNA, 312 bp, Homo sapiens
  source 1..312: mol_type = other DNA
agccaggctgcttcccatgtgggtctcacacagccaacctctgcctcagggactcaagtgcagtggcacaattgtggctcactgcagccttgtgcacctcccagagtgctgggattacaggtgtgaaccatcatgcctccttttaaaatgcccccgcagcactggtacccgcagcactggtacccgcagcactggtaccactttgtaaccctaagttccaggaatgcagggactgtgactgttttagtcaatgtttgttgaattatcagacaatactgcccagatctggaagtcggaatcagcactgtgctg

SEQ ID NO: 12123 - DNA, 222 bp, Homo sapiens
  source 1..222: mol_type = other DNA
agcacttgggtgctagtccagtccttgaacaaaacacacgagacgggacccgggaccccgcgcaggccgcgggcgcgaaggagccgcgaggtcgcgagcagccccagctgtcagcccgccgagcggcacagaccaggctgccggcagctcgctgccaatcagcggcgccggctctggccccgccccgggccggccccgccccgccccgccccgccccgcccc

SEQ ID NO: 12124 - DNA, 458 bp, Homo sapiens
  source 1..458: mol_type = other DNA
ggttcgagcccgagccgtagccggattgagccgagggagccggcggctgggctctcctctcggcccgcgatccccggcgccgccgccgccgccaccgccaccgccaccgccttcgccttgtcgccgccgccgctgcagagcatcgtagctccgccgcgctcccgcgccccgcgccccgcgccgccagccgcctgggagcccgagcgccgagcccggggcggaggagaggggcgctggcgcgagagcccgggcgaggaagatttttttgaatcttgtcttcgcgaaagaagcgactccagtctctcgtcctcacctccccaggcccctcctgggaagcgcaggggaattggactcacgccttcccggacgattagggagggctgaccccgccgatacacagatacgcgtatatttgggggggcgtcgagaggcagcagcccatcgcccgcctctcaccc

SEQ ID NO: 12125 - DNA, 682 bp, Homo sapiens
  source 1..682: mol_type = other DNA
ctccgaggaggtggtcagggcgccctggcccagcaggcttcttcccgagccggggggaggggagaccggggcgggcgggaggcaagcgcgccgcgggcgtgagggcaaagttcccgaggtccgcgcggagagcacacgtgtatgtgcgcgcggggctaggccggggccggcgttgggttcgggggcgcgcggggccggcgccgaaggggataattcctttccctggcacctcggcctcggctcctgggcgcagggacgccttagcccacggagggtggagcccccctcagacccgggccaccggctggggtttttctaacgccctgccccccgagcccccggatggctcgggccccacggactccgcgccctccccaggcttcccagacccagcggcgcagggggcgggggcaggggcaggtccccaggttcgagcccgagccgtagccggattgagccgagggagccggcggctgggctctcctctcggcccgcgatccccggcgccgccgccgccgccaccgccaccgccaccgccttcgccttgtcgccgccgccgctgcagagcatcgtagctccgccgcgctcccgcgccccgcgccccgcgccgccagccgcctgggagcccgagcgccgagcccggggcggaggagaggggcgctggcgcgagagcccgggcgag

SEQ ID NO: 12126 - DNA, 230 bp, Homo sapiens
  source 1..230: mol_type = other DNA
ttcatacctgccctgcctttgtcaaaggatggcgtgagctttgcgagctacgaagcactttcggtaactctgaaccattttcaaaatgtatatgaaagtgattgctattgaaacttaagataatttgcagatgaaacctaagcatctttctaatgctcaggaattcagtcccttctccagaggggatgatcatcttttgcgtacacagtgggccagcactagaatagtat

SEQ ID NO: 12127 - DNA, 363 bp, Homo sapiens
  source 1..363: mol_type = other DNA
gtttatataagcacctgttatgggattaaccccaagagtgttggtctacagattgcttctctaaaccatctggctttaagttaaacttctctgagcagctcacagcatgcatggatctggattccatttagggggttgattaaagatcaggagccctgttcatacctgccctgcctttgtcaaaggatggcgtgagctttgcgagctacgaagcactttcggtaactctgaaccattttcaaaatgtatatgaaagtgattgctattgaaacttaagataatttgcagatgaaacctaagcatctttctaatgctcaggaattcagtcccttctccagaggggatgatcatcttttgcgtaca

SEQ ID NO: 12128 - DNA, 608 bp, Homo sapiens
  source 1..608: mol_type = other DNA
taggcgccttgccagggacagagctggggatagggagcctagggggccctggcaggcccccaagcctctcctgggttgtcctggccaattcacaggcgtggcaatgagcccctgtcccaggggtgtgcgggagatccctggttatctgaggtgtctccagggtatatccgctgaaacccctgagcctgggaccagctgctggtcacgtgcttggccctgtagcgtcgctagcgccccctgccgcggcgcctcgccccgctgcggctctccgcgggagatctcaccgttctggagacagggctcgctcgctctcacggtagggccaggagggcttccaactgcagcttcctgccggctgcaggcctcccttcctaagctgagctgaggcttcctctccatgggctggggagggggcgccaggaggcctcggcgggtccgcaattggccgggacagcttcaggtcctgggccggccccacccagaccgacgccaagggcagctgtggagtggggcgcggcaatgcgccccttaacagccctccagtctgccgcgaggcggcttctttgcgaccctgcccaggcttcttagcccgggcttggacagccgcc

SEQ ID NO: 12129 - DNA, 311 bp, Homo sapiens
  source 1..311: mol_type = other DNA
cccaccctgggggcgctgagaactccagggagcccagagctgaggcctgagctctgcttgctggagggaacagcatggagctctctgttcaccggtctccaggacctcggattcagaacagaagagcatggacttttccattctggctaatgtgcctcagtgctggtaggcacttcatcccaggcagctgctcagggacatgactccgagctgctcctagctcagagaggctctagggacaacatcttgaagtctgctatgtgctgatcccacccctgccccctggagggaggcggctccttttaaggctg

SEQ ID NO: 12130 - DNA, 358 bp, Homo sapiens
  source 1..358: mol_type = other DNA
tgcagggtcatcaccaccattcggtggttatttccatgaatgtttatcaaggacgactggggttgctctgggtgcaggggtcccggggcggcgacagacctcggcccccatccagccaactcccactccagcgcccgcctgccggagcgagcgcgggcgtctccgggccgctgacgttgcccgcgcctttacgccgtcccagcggtgctgcgcattctccaaccacggcccgggccgccggggcctgcgcagctgagcggcgctacgccacgagcgcagcgcgacgagtccccagcgcgcaggcgcagcggcgacggcgtcggcggcggcggcggcagcggctccggccgaggtgcgc

SEQ ID NO: 12131 - DNA, 573 bp, Homo sapiens
  source 1..573: mol_type = other DNA
cagaggggagatcagaccgctcagccgaggctccggggaagcgccgcggggttcctggaagagcctctcgggcctctgtggcctcagagcgtctgggccacactgtctgggaagaggtaggtggcagggtctccgcctctcctcccctctgtgggcactctgggccacagcgcttgctggcgagccaggcgggggagcccactgtgggccctgttcagtgggaggatgggccggcccctgggaccagctgggcctgatctaatgctgatctggggtgttctcatcccaaggatgagctctgcctggcctacctagctgagcaggccagcaatggaagggatgcaggggagcattccctctctgaaaccactccacatgctctgggggttggagagcctgcccccagccagtggctggccaggctggggtggggctgaaggctgtggcagggcgcagctgcaagcccaagcccagtactccccctgtgcccgccgctggggtgcttgaaggggccagggctgagcagacatgcagcccccacagggttctggggctccccggcagacacaccca

SEQ ID NO: 12132 - DNA, 392 bp, Homo sapiens
  source 1..392: mol_type = other DNA
ccatgttggccaggctggtctcaaaaaagtaaaaagcaacacgtgaagttaattttaacaatatacgttatttaaatatgtaatcaatataagccatgggggtgtgcttggcacggcacatcttggtgttcaggagctcatcagcccatgtgccttcaggaggaattgtaatttctcttcgatcccagctactcaggaggccctggcgggagggtcgcttgaggcgcgcgcctgtggacccagctactctggaggccggccaagcgagacgggcccaccgctggcggttcccagcccgactgggcgcccccagccggggttagccagcgccacgcagccgggccgggaaggggcggagcggccgggccccgcccccctcgtcgcgccggggc

SEQ ID NO: 12133 - DNA, 600 bp, Homo sapiens
  source 1..600: mol_type = other DNA
ggagccagacggcctgcttcgcagaggagaggagcaggcgctcgccacaaccacccccaccctgctctccacgcgccaggtcctgcacgctgggtgggacaaggatggaggagcagggccccacccccgccctcccagggcgcaccatctgcagcagagagggcctgatgagggtgggccggctgacggcagccttctctcagccccgttatgtgccatgtgacattccggcaatgccagtggttccagggggcggccccgggcctccgtgacgtcaccggattgtcgcgtcaccgtcgcctaccccggcggcgcaacgcgccctgcaggaaagatgacgtcaccgtcggagctcctgcagaccagtgcgcgctcggggagttggcgagcgggtggcggctgggagacgtcccgagcgcacgggactgacaggcggcagaagccgggcggggtccgctgggctccggacccgtgcccccccagttccagggcggccccgggcggccccgccccctcggtgaatgccgcgggccggccaatccgggcaggccgcggcgccgcgcagcctatcagcggccagagctcgcgtgcgcttccgcg

SEQ ID NO: 12134 - DNA, 670 bp, Homo sapiens
  source 1..670: mol_type = other DNA
gaaccacccccgcagcggagccgggatgcttcctcgggtggagggtggggagccactcccatgggcgcctctccagcccctggcctggaagcaccaggaaccctggggatggggcagaccctcacagcccggggtctggagccggtgtcggagctcatctgggcccatgacctctccagggacagacccaagcccaggccctcccagaggtcctaggacgcaaccgccagtggggcgtgccatgtgccacaggcccggcaggcacagcccggttggcgtgggccagagcgcccatcactgaccgccctagcaccctggggggcaccccgcccaaccgtggcctggtccggcccctcccgccctttgctccagttcccgggcttggcacctatagtgggggtgccgcccgcctgccaggctccggggccgggcccacgggagggtggggcggctgggaagctggcacgctgccccgggggagcctctctcggcaggcgcccgggtgccgcgggggggagggggaacaaagggctcattctccccgtgcgcagccggtggcatcgccggggcgttggcggaagcccccggggcccgggagggggcaggcccaggcgcggccgccgaatcacgggctcctgtttcccgcagggtgctggaggaggaaaccggc

SEQ ID NO: 12135 - DNA, 332 bp, Homo sapiens
  source 1..332: mol_type = other DNA
accagctgcctgggccccaccctcctgactcctgctgatggttggccgggacttgataaataaatacataaaggggctcccttgaaatgggacagcccagtcctagcctaggtctaagggacgagtccagaggactggtcagaacccgaaagaggagtatctcctccaggagcctggaagaaggagccccctggggcagctctgtacccgcaggggcaccattgcacctctgaggagtgcagtgtctgggatctgggctgcccccggcttccaggtcaaggagggtggggttgggagactggccagagcctcgccctgctgggcctggcgga

SEQ ID NO: 12136 - DNA, 372 bp, Homo sapiens
  source 1..372: mol_type = other DNA
catggccctctgcagggccactcagcctgcagctgctgatctctcgggtgataccaggaaagttacttttcaccactgagcatcctatttcctacatggttaaaagaagtttgcaaagaggaatttcaaacttctgctgaagcggtcagcctgccccggagtcagggattggtggggcaaaaagtccctcaggtctggacccactggtgtgagacccggacttgctggcgctcagagctgatttacccggttccgattgggaaggtggctccactgtgggccccacgcgcgagtcccgcggcacatcgcccctttaaggggccggcctctcccgccccctccggggctacactgcgcctgcgtggcaagccg

SEQ ID NO: 12137 - DNA, 371 bp, Homo sapiens
  source 1..371: mol_type = other DNA
aaaattagagagaaagtgtcatttctttacagttttggaaatcttttaaatttggagcttcatagaagtgaaaagggcaaatcatgtcttaacaatattaggaaaattgtttttacctcagagacttcctgaaaggttctcaaggacccccgggctcccagggctacacttggaagagccgtgcatcacctgcctcaaacgatttcccagctttaacaggctgtggttgagcgtgagaaatttctgttcagcggcgaagcgcacttcacaggacgcagtgcatgtgcccgtgcagagacaggtgagcaccggcgcgcacagtcgtatggcgagaccgcccggtagcccaggccccgcgccgccccgcgcgc

SEQ ID NO: 12138 - DNA, 283 bp, Homo sapiens
  source 1..283: mol_type = other DNA
ttcgggagcccaccagtgaccagagccagccctgttcagggctgtccgggcagaagaaagcagtgtcagacctggaatctgccatcagcctgcaattgtttccgagtctacaggtgctgcctccagaaccctcttcctggaacctgacgagggcaagtttgctttgctcttgctggggccaagaggactcatgtgccagggccaagggcccttgggggctctcacaggggtcaaagccaagggcttggctggcacacagggggcttgcggacacatataagac

SEQ ID NO: 12139 - DNA, 542 bp, Homo sapiens
  source 1..542: mol_type = other DNA
cagctgagtggaatgctctctgcaggccaggcagaggggcgagatgcaggctcagcaccctccggaggggacccggccttcctgggcatggccgtgagcacccgacgcctccggtgagcaggtgtgatcccagggcccctgatcagcagcggaggagcgctcgggccacctgcccgggctgtggaggagcgctcgcgctgaccaggcgctggggcgtcgggaggggaagctcacagaccggtacttcccacgcaaagggtcttttgcagcttttgcagacgggcaagaagctgcttctgcccaggcgcccaggggcccgggaactcccagcctgattgaaaagcaaagggtctgcttctgtcttcctgcagggcgcagtcctgccctggcgggggccggccaagaagggaagggcctggtttgccattcgccctctgtcccagggcgctggggcactgggtccacctcggcgggggagaggggctcgcagggagccatccacgggctttcggcgccctccagcggcgtctccggaggaggga

SEQ ID NO: 12140 - DNA, 625 bp, Homo sapiens
  source 1..625: mol_type = other DNA
gcaaagggtcttttgcagcttttgcagacgggcaagaagctgcttctgcccaggcgcccaggggcccgggaactcccagcctgattgaaaagcaaagggtctgcttctgtcttcctgcagggcgcagtcctgccctggcgggggccggccaagaagggaagggcctggtttgccattcgccctctgtcccagggcgctggggcactgggtccacctcggcgggggagaggggctcgcagggagccatccacgggctttcggcgccctccagcggcgtctccggaggagggaaccgacccgaggcgggggcgcggggcaggggcggcgcgaggacctgacagcgtgtcccgcggcggggcgggggctcggccgcgcgcccgcgggggaggccgccgctagagggcacttcaggagggacagccctcccggcaccccggggcccgagctccagccccggcctcgcggcccgcggcccgcggcccgggcggcccgagccccctccccgggcgcgcggctctccgccttccccgccccggctggcgcgcggcccggcccggccgagcactgtcccggccccgaggggggcagagctcgggcgaaaacccgccctccagcgagctcattt

SEQ ID NO: 12141 - DNA, 263 bp, Homo sapiens
  source 1..263: mol_type = other DNA
ccagctgacagcctcctgctgccgtgagagcagaattacattctctcccctgtgctcagagagtggggtgggctgaggacactcagagcttggtgtgttctcactgtcaagctgccagagggttcttgccagacccacagggatccctgagctgcaggtctgccatctcctttgctttggggcccaagccctaccagcccggcgagcagggaccaagcctgcttattatcacctgacgctgcgcagccgctgatccaggcaga

SEQ ID NO: 12142 - DNA, 639 bp, Homo sapiens
  source 1..639: mol_type = other DNA
ggcgcccaggggcccgggaactcccagcctgattgaaaagcaaagggtctgcttctgtcttcctgcagggcgcagtcctgccctggcgggggccggccaagaagggaagggcctggtttgccattcgccctctgtcccagggcgctggggcactgggtccacctcggcgggggagaggggctcgcagggagccatccacgggctttcggcgccctccagcggcgtctccggaggagggaaccgacccgaggcgggggcgcggggcaggggcggcgcgaggacctgacagcgtgtcccgcggcggggcgggggctcggccgcgcgcccgcgggggaggccgccgctagagggcacttcaggagggacagccctcccggcaccccggggcccgagctccagccccggcctcgcggcccgcggcccgcggcccgggcggcccgagccccctccccgggcgcgcggctctccgccttccccgccccggctggcgcgcggcccggcccggccgagcactgtcccggccccgaggggggcagagctcgggcgaaaacccgccctccagcgagctcatttgagccgcggaccggagcgagggcgggagcggtcgcggtcgcgatcgagcaagcaagcgggcgagag

SEQ ID NO: 12143 - DNA, 266 bp, Homo sapiens
  source 1..266: mol_type = other DNA
tctgacatgtgactggcacttctgatgtgccaggcccagggctgggcgatttacctaattatttcattccatgaccagctgacagcctcctgctgccgtgagagcagaattacattctctcccctgtgctcagagagtggggtgggctgaggacactcagagcttggtgtgttctcactgtcaagctgccagagggttcttgccagacccacagggatccctgagctgcaggtctgccatctcctttgctttggggcccaagccct

SEQ ID NO: 12144 - DNA, 508 bp, Homo sapiens
  source 1..508: mol_type = other DNA
gcggtgtgttgatcgcaccactgcactcccgaagactactagatacattacaaaatttttaatagtagtactctacgtggcattctggtagaaattccccataatattgtcattaaatgacaccttttatgttaaatcacaaacgctggagtcaacaaaagttctttaaattcctccagcagtagagcaaacttggtagcgcacacgagggccaccgccttcgtgatcaggagggggcgaggtcgctgtgaccactccaaggtcaccatggagaacccgcagacagggctcggtgtggcccaggactccccgactcctgcgccgcgccgcgcccctcgccccatcccgagcagctaccccgaagctcccaggggctccgccgaggcgaatcctggtggccgacaaaacccgggaccctgatcttggcgcctccacgccaccgcccggaggccaagacccccttttcccgactccgggaagaaccgggccgccccgcgccaagatggcg

SEQ ID NO: 12145 - DNA, 542 bp, Homo sapiens
  source 1..542: mol_type = other DNA
taaatgacaccttttatgttaaatcacaaacgctggagtcaacaaaagttctttaaattcctccagcagtagagcaaacttggtagcgcacacgagggccaccgccttcgtgatcaggagggggcgaggtcgctgtgaccactccaaggtcaccatggagaacccgcagacagggctcggtgtggcccaggactccccgactcctgcgccgcgccgcgcccctcgccccatcccgagcagctaccccgaagctcccaggggctccgccgaggcgaatcctggtggccgacaaaacccgggaccctgatcttggcgcctccacgccaccgcccggaggccaagacccccttttcccgactccgggaagaaccgggccgccccgcgccaagatggcggcgcccaggccctgccacgcagacttccgcccggcgcggagaccgaaggctggcggctggttggagccgcggcccgggtgcgtccctgtctgagggcgtgtcgcgagccaaaggctctcacctgggtggtcccgggagtctcgccac

SEQ ID NO: 12146 - DNA, 376 bp, Homo sapiens
  source 1..376: mol_type = other DNA
gactatgcctggaaaaaataaggttaacccttctctagtcctcatgcagagcccttggatgtctctatagcatccgccaaagccttcagaagctttacctcaaccacactgtaaaacctgggtgtgggatcattctgtagttgctgaagtaaccactgataatttaatctgcttcctatcaatatattttacatacgttatgtcattatgttgtacaatgtataacgaaagtgatgtgcagaaatcatatgaattaggtgtttgcaggaatggctgttgaaagggagtcaggcgcccctgcacagggaacctgctggaggacgagcctctcttgcagatgggccaattgtggccaatgggctcatccccggaggcc

SEQ ID NO: 12147 - DNA, 471 bp, Homo sapiens
  source 1..471: mol_type = other DNA
tcacgggggtcctccccgcaagacctgcagagagtgggatggcccttcctccgagccccccaaggcccaggtggcagcgggattgtcctgatgtcctgcagaacagattttctcaagaaatcgactacgggactgtcccacagaggaagagtctccatttctcccaactttgggttatataatatggtttattgttcttttggctggtggaaatatgcagaagaaacaccatctaagggcgcgtccccttctgaagtacctttggcggtgagagcttcccgcgcccagggagcaggcaggaggagcctgcgggtcctcgggagtccgggcgccgaccacagccagggccgcgaggcgcaggagggcgcaggctggccaggtccccagcctgccggccccacgtggcagccccggggcgagcggggcgggccgggggcgggtccggccgctgacgcgccgggtatatagccg

SEQ ID NO: 12148 - DNA, 409 bp, Homo sapiens
  source 1..409: mol_type = other DNA
aggacagataaaggttagtttttaacctcgagatgaacagattgtggccgaggaggtccggcccgggggtcccaggagcagagatctcccttctcttcgatgtggaaagtgaggagggagcagagccttgctcagaggatggaccttctgtttgtttcacactccttctcggcgaggcggtcccaggaggcggcgcggagccgctgcgaggccgcagggccgggtcgcaagatggccgggccggcctcccgcgcgggtcgcgcgggccacgcgggcgggtttcgccggaggagccgagagcagcgcgtgcgccgagctctactgcctcgcgggaaggcgggtggggagggcggcgctcggggcgggaggcccggccgggtccgctaggacagcggggccgctgggagag

SEQ ID NO: 12149 - DNA, 432 bp, Homo sapiens
  source 1..432: mol_type = other DNA
ttgttcaaaataggaacagagaaacccttatttgttttgtcaatagactattattgaatgtcattaagtttttaaaaatttaaaaacacatgttcatcaggagtctctccagcctcagaatgagtctattttatgtaaatatggtagctgatctccaaaattttcaactgtaccatatctataaagtttaaccttttaagaattttcactgggtgtggtggcacatgcgtgtaatcccagctttgcgccactgcagtccgcagtccggcctgggcgacagagcgagttcatcctgaccaatctgggtgaccaatcaattaaattggtttaggaagatgaaaattatttcctaagccataaagacttgttgaggtaccattctagaatccccaatatttattctagttgttatagtaacagtggaacccaagt

SEQ ID NO: 12150 - DNA, 440 bp, Homo sapiens
  source 1..440: mol_type = other DNA
tttagcattgatcactcccagctcgtagctaaagttgatcagtaacgtttggggcttggggatccctgagccaactcaagggccaagccggaagggccggggctctggggacccagctcagagcagcctttaggggcgcggcacgcccgggggggccgctcccttgggctggtgtacgcgcgcgtgtttgtttgcacacgaccggccgcgcgccgccgcaggcacaccctctcccccagcgcggaggggcggcggggccttcccctggtccgctccgccactctgggctgcgaggcctctgagtggcccgtgtcgggccgcccgacccctccccgacgccagccctgcggtaggggccgggatggcagctgggaaaccagagagggctccccggggaccctcggcggcccctcccggcgccgcctccccgccggccaggc

SEQ ID NO: 12151 - DNA, 582 bp, Homo sapiens
  source 1..582: mol_type = other DNA
agccggaagggccggggctctggggacccagctcagagcagcctttaggggcgcggcacgcccgggggggccgctcccttgggctggtgtacgcgcgcgtgtttgtttgcacacgaccggccgcgcgccgccgcaggcacaccctctcccccagcgcggaggggcggcggggccttcccctggtccgctccgccactctgggctgcgaggcctctgagtggcccgtgtcgggccgcccgacccctccccgacgccagccctgcggtaggggccgggatggcagctgggaaaccagagagggctccccggggaccctcggcggcccctcccggcgccgcctccccgccggccaggcctcctcggcagggggccaccagtgtccccgcgcgcgccccgacggacggagagcactcgcacgtccctcctctccggcccagccccggcccgcagtccagatccggcccgccccgccgcgcgactctcacggtccggcctccggcgcgcgccccttcggcctccctcttcctgcgccggcgcccggcccggcccggcccgtcctgacccggtcacgagggccgcgac

SEQ ID NO: 12152 - DNA, 583 bp, Homo sapiens
  source 1..583: mol_type = other DNA
ggagctggacccttgagaagctccgagggcctgattcggcgatcaggaagcgcgtaggcactcccggggcgtgctgggcaggtgagaggccgtggcggggatgccctcttggcaccctgggccacacctcctggcaggagcccggcccgtgcgctgaggcctgcccttacgccggcccggtgcgctggccagcctctccccgcccccaggtgctgctggagagagagctggccgagctgagcgccgagctggtgagcccgactgccgtccccggtaccagcccccagggttcacccgcggggcacgccggcgaccgcagggtcggggcgagccgggagcctcggcggctgggctgggcggaggacgggcagccgaggtccggcctccagcggcgcgcaccggcctcgggccctcctgggcgctggcgggctcgtgaccccgaggataagcggactccacgtcagcccgacgaccgggcgcccgccccgtccggcccccgggccccagcctcggggacccccgccccttcccctagttcccgccccgctcccgggatcggccgcgcgggcgcctctaggacccc

SEQ ID NO: 12153 - DNA, 380 bp, Homo sapiens
  source 1..380: mol_type = other DNA
ccacagagaggctatgagcaggacatgtccccttctgtgccacagaggcgtgccctgccctttgtggtgggttttgtgaattcacaacccacccatcagaaagtcactctccattcccaggcaagcacggtgcctggcactcagtattcactgaatgaatgttatttgaggcagggactcatccccattttccacatggggaaacccggtgagacgcagctgtgcacttggggctaggtctgtgtgcccccggggctgtgcctcaaggggctccgtcaggccaggcggtcatgccgggaggccccgacacacacccaggacggtctgtgtcacacctgaggcaggcgaggcacagctgcgcccacaggtgtgatcccctg

SEQ ID NO: 12154 - DNA, 389 bp, Homo sapiens
  source 1..389: mol_type = other DNA
atccccattttccacatggggaaacccggtgagacgcagctgtgcacttggggctaggtctgtgtgcccccggggctgtgcctcaaggggctccgtcaggccaggcggtcatgccgggaggccccgacacacacccaggacggtctgtgtcacacctgaggcaggcgaggcacagctgcgcccacaggtgtgatcccctgcagcctgaggcggctctatggcctccccgagctggcaccggggtcccctaccagcccaggggtgggggtgcccagtgaacccctagccaggagggcccctgcgggtcccccttgcgggcattccaggcagagaagttctgcgctgccgagaagcccgcatctgcgccagcctcccagcctggagtgggt

SEQ ID NO: 12155 - DNA, 619 bp, Homo sapiens
  source 1..619: mol_type = other DNA
gtcacacctgaggcaggcgaggcacagctgcgcccacaggtgtgatcccctgcagcctgaggcggctctatggcctccccgagctggcaccggggtcccctaccagcccaggggtgggggtgcccagtgaacccctagccaggagggcccctgcgggtcccccttgcgggcattccaggcagagaagttctgcgctgccgagaagcccgcatctgcgccagcctcccagcctggagtgggtggaggagccaggcggacccaggcagcccaccctgcccaggacctggggatgcggggcgggagagcgcggccggcgtgggagagctttatggggctgccccctcgatcgtctgcgaagtggggcgcggggcagtccctggaccggctctgctgtgctccgggcagtcgggggcttgcgggcgctccggggaggatgcgggcaccaccggctggacggtcgcagcctgcagggggccctggggacagcctgcctcatccccccggcgggctcgggccaggtggcagcgcctgggctcgccgcgcggaggcggcggcttctcgggctaggggcggcggcaggggcggccccgggatcacatgggcggaggcaggtccggga

SEQ ID NO: 12156 - DNA, 525 bp, Homo sapiens
  source 1..525: mol_type = other DNA
cccgcggcgcccgcagcgcggagtccactgaccggctctgggaatctcggggcggccgcgagccggcctcggggactggggtgggggcctaggcctgggccccgccttgcgtccccagggcagccccaggatgggtgctgggcagggtggtgcccagcctggcaccgcggcttcctgcctggattggctcctggctccagagctagaggctcaggaaattctgcaagggcacttccttgcccagcggaggggctgtggatgggaggcctgtcaccccggctgtctgtcgggccagcttgacagatgaaccctggcctccttgccctggcagccggcccctgggggaggtggggagcccggtcttgcccgtgtgatccacttacccagagtggagagactgagggggtgctggcatcccctccacttgccagccccccagcaagccccctgcctggcagcctgggcagccccctcctgggagtcgctccctgggctgtcgctgagggagggagttagccacttcct

SEQ ID NO: 12157 - DNA, 590 bp, Homo sapiens
  source 1..590: mol_type = other DNA
ttcatccatgactttgaattttaaaatggaaggaaatggtgcccctggccctgggcatcggcccacctgctggtgcgggctccgggagctcagctgagtcccattgggtggcctcccctggagacaggcactgctgcctgagtgtggcccagggagggctcggctccccaaagctccacggggcaggcccagacctcccagcagagtagggacaggctggttagcccagactcccgcctctgaggagaggaaccagctctccttgggaagagggcctctgccctggccggccctgactcccaggggagcgtgcttcctctctgctggttccgtgggatcggagccaggccccagtgtgcaatgtctttgcacacagataggaccctggcagtctctgcgccctggctccgagggaaggggcagggggcccgctggtcggcgagggctgggagcccccgacaccttggctccaagggaaggggcaggggtccgctggtcggcgagggccgggggccccctggtgtcgggcctgggaacagccgggctaggccctcctgggtgtgttggcccaaggctctggccctgacctc

SEQ ID NO: 12158 - DNA, 380 bp, Homo sapiens
  source 1..380: mol_type = other DNA
gctcacgcctgtaatcccagcactctgggaagccaaggagggtgagaccgtcctggcgctggtattgctgtgagctgagatcacaccattgtattccaggtcctgatgctacagtggggaccaggccccctgggcatggtggcctccttgagcgctgtgcgcatccaggagggccggtaccgccaccccggctgctacacctatgcccgccagctcgggcctgagcccgccatgccctcagcctgcctcactgctgggccagggtcatgcctatagcatgcctcgctgggtgggccaaggtctgggacctgtcttggactgtgggagactcaccctcaccttgccaggcctctcccctgcaggactggcattgcagtgtg

SEQ ID NO: 12159 - DNA, 276 bp, Homo sapiens
  source 1..276: mol_type = other DNA
tgctggggactcctgaagaactttcaaagccagtgcgaggataaagtgagattaaaatggccagtctcctggcaagatttttcttagatttcatatttgagaattaggttgagtcagaccaggaatgtctcttagaaatggtcactgataggcatcctagtctcgactgccagagggaggcgagcccggaaccaatgacgcgcatccgatccgggaaggcgcacttccgctccccagttgccgcgggatggcaagccggcgtggcggcagcttccg

SEQ ID NO: 12160 - DNA, 504 bp, Homo sapiens
  source 1..504: mol_type = other DNA
gaggataaagtgagattaaaatggccagtctcctggcaagatttttcttagatttcatatttgagaattaggttgagtcagaccaggaatgtctcttagaaatggtcactgataggcatcctagtctcgactgccagagggaggcgagcccggaaccaatgacgcgcatccgatccgggaaggcgcacttccgctccccagttgccgcgggatggcaagccggcgtggcggcagcttccgaccagtggtcgcgcttccggagaggcgcttccggtggcggcggcagcagcggctgtggtgggctgccctggcccgcaggtgggttggggggccccctgccgcccctctgccccttcgcccctccgcccctccgctggccgaggggctgcgagggccgggcggcgaagatgcgtggggcgcggaaggggccgagcccctctttggactgcaagtcccgtctccctggcaacggcctcggccttgggggcgggcgggaggaggaga

SEQ ID NO: 12161 - DNA, 410 bp, Homo sapiens
  source 1..410: mol_type = other DNA
ctggaagccttcctctccctccaggaaagtagctctgggaaggaacaagagcagggcagatacttctctgagatagctgtatcctagacactaatattagtgcaactagtattagttaaatgaaggaatagaacgaatggggcaatttacatcatttgagtcctgtacgtcttattgtgttgaataactctaggaattgtttaacaggtgtacaaactgtaaaagataggaaagagcattcagagaatgtaagttttccactttctactgtctctggtgtgtgtctaagcgcttggccagagccagagagtcgccggcaagggaaactccgcggcgagcacgcagcagcagaagggttaacgcgccgggctccgcctcccaaccgcctcttccgggcagagaggcgggct

SEQ ID NO: 12162 - DNA, 266 bp, Homo sapiens
  source 1..266: mol_type = other DNA
ctggggtgctccgaatctcctcgccactgcgctcagcctagagtcagcgccgggtcaggggccctggaccggtagcaggggcgcaacgcacgccttccgggttccccagcagtggatttcgccagatgttttcaactctctttctaactgctggggtgttggagaccacttgcaaacaaccccacgagccgcgagcggtgcgggcgccgcacgttggctgcggcccgcttcctgagctacgtcactggtggtggtagcagcggcgg

SEQ ID NO: 12163 - DNA, 606 bp, Homo sapiens
  source 1..606: mol_type = other DNA
gtttccacagtggcctcccagcatccagagagagctcagagcagaagccaggagtcctgagttgctggcacgtctctcccacccccgcctctgagaagcagagcatgcacctggtggcaggactgttccccaagggaatgcaggcgacagtccccggctccccttcctcccagtgcactgctggggcaggccacccctccttctccagatacgattattttgggagagtgctgagtgcagcacagctgcaaggtgcacccagacgcacgagccccttcggagctggcctcggtctggggtgcacctacccccaccccctgcagcagacacaaggtcactgtgtccaaccacctccaccttggggaagctcacaggctgtggagcagagccggtctgaggggcacagcccaactcctagccctgagcctggggtcaccagcttcccagggcttgcgccaaggagcaggctggcctttggccagctgaccatccctgggccaacagcagggagctgcaccgaggagcttatataagcagcctgctctctgccctggcagccaggacaagagctgtgtcctgccaggggaggggcctctgccaggaacg

SEQ ID NO: 12164 - DNA, 155 bp, Homo sapiens
  source 1..155: mol_type = other DNA
cactgcagctgcagcctcacataatggccagtctagattttacactagggctggccagccccggatgtccggccactgtgaggcaggtgagcagaagtaggaggtagccagaattaattacttccctgccctgagggccaggggctgggccaggc

SEQ ID NO: 12165 - DNA, 412 bp, Homo sapiens
  source 1..412: mol_type = other DNA
cttgtagtcccagctactcgcaagattgcaccactgcactccagctatagatgttataccttagaatctctctattttacagaggggtctttcagagattagcagctgtaacgtggtacaggtacccaccccacaactcaccatggagggctccgactgcccctgccgtcgcctccccgtgggcaagtggtgggggcctgggcttggatgtctcagaggttctcccccgcctcccgaaggaaaggggaaaaccccgtgggcgtccggagagcctttgcgcctcgccaggtggagggaccggcgccacccagacccgcgagccgagaccctccccgcggcgtcgctgcgggaggggcggaagagcgcgggatctgcggggcgtccaatccccttctcccgaacgctttccacc

SEQ ID NO: 12166 - DNA, 241 bp, Homo sapiens
  source 1..241: mol_type = other DNA
cataatggccagtctagattttacactagggctggccagccccggatgtccggccactgtgaggcaggtgagcagaagtaggaggtagccagaattaattacttccctgccctgagggccaggggctgggccaggcatctctgtgctctgcacagccctggacggggaacaaagcctctggcccagggtttatctctgggctttgcacagccctgaccagcaggccggccccctggtcaca

SEQ ID NO: 12167 - DNA, 435 bp, Homo sapiens
  source 1..435: mol_type = other DNA
tatagatgttataccttagaatctctctattttacagaggggtctttcagagattagcagctgtaacgtggtacaggtacccaccccacaactcaccatggagggctccgactgcccctgccgtcgcctccccgtgggcaagtggtgggggcctgggcttggatgtctcagaggttctcccccgcctcccgaaggaaaggggaaaaccccgtgggcgtccggagagcctttgcgcctcgccaggtggagggaccggcgccacccagacccgcgagccgagaccctccccgcggcgtcgctgcgggaggggcggaagagcgcgggatctgcggggcgtccaatccccttctcccgaacgctttccaccaactgcgcgcggcagtgggcggggcccgtcacggttttttccctatcctttttttgtgaatgaaaaaa

SEQ ID NO: 12168 - DNA, 257 bp, Homo sapiens
  source 1..257: mol_type = other DNA
agggtccgaggcttcattcttgaaggcagtgatgaaaatacataacaatgtgatgtatcatgttttatttcctagactagtgacaaatgcttgaaccagttgcagtgagccgggatcacaccacccgggaggcgttttcggtgcctgtcctggcgcggacaggacccagaaacacccggggcgcagccgccagggcgaaggttagttccggtcccttcccctcccctccccagttgcacacctgcccggaggcagtg

SEQ ID NO: 12169 - DNA, 217 bp, Homo sapiens
  source 1..217: mol_type = other DNA
ctgccagagccagcagtggtaacactgtggaagctgctgtaacactcaccttgaaggtctgcagcttcactcttgaagaggtctgcagcttcacagggtccgaggcttcattcttgaaggcagtgatgaaaatacataacaatgtgatgtatcatgttttatttcctagactagtgacaaatgcttgaaccagttgcagtgagccgggatcacacca

SEQ ID NO: 12170 - DNA, 545 bp, Homo sapiens
  source 1..545: mol_type = other DNA
tatgggatttgctttatccccaagccaaacagcagacagccacttaagacagtgtgtcactcgtggatgttgtaatatcaaacaatacaaggaagcacgttatacagaaaatgctcatatgtttatgaattttgaccaaaataaatatgaaatcttatattaaaagaggtgtgtttttttgacaggaggccaggctgtgttcctgctaggactccttcctctgccttcaggcttggcctgctgggagtccccggagtttaaagtgctaggttcctggggactggaccgtctggggacagggacaccagtgctggcctggcttacccacagcctgcagctgggggagtcccgtggacacccttgccctggagagcccgctctccctctcgtccaccttccccagagcggcggtgggggtgctctggggcttccccctgccctgcccatgttggagccctgggctgggctgggctgagcagcagggaggctgagcagcctgtagagggcagcacacgcgcggcttcccagccagccgccctggagga

SEQ ID NO: 12171 - DNA, 359 bp, Homo sapiens
  source 1..359: mol_type = other DNA
aaagactttcctgcaggccgacctggcacagtgcctggggcctggcaggtgcccagggcactccattgatgagcagaaaaaaaaatctttgtttctatagtgctatccgagaggtcaggagccaccccaacttactgcctagggtcacaggctggcactctccacacagcagcagtgtgcttaactccatggggcctcaatactagagcccagtggctagggatgcccccggggttcctctcccctccttggtgccaggcacccgctactgagggataccaagcccctgccgcttggcagcagcaaggctggagacatcagtggcatcagtgcactggtcagtgtccttagggagcagg

SEQ ID NO: 12172 - DNA, 444 bp, Homo sapiens
  source 1..444: mol_type = other DNA
caccccaacttactgcctagggtcacaggctggcactctccacacagcagcagtgtgcttaactccatggggcctcaatactagagcccagtggctagggatgcccccggggttcctctcccctccttggtgccaggcacccgctactgagggataccaagcccctgccgcttggcagcagcaaggctggagacatcagtggcatcagtgcactggtcagtgtccttagggagcaggctcaggatgggcctccagtgcctcctctggagctcactacctacagcagcgcagtgggcagcgcctcagctccttccccttctgctgcctacagcccgcaggccctgggtcaccgctgccggaaagagccagttcctggcacccaccaccaaaacccaggccttcctggaggtgctaggggaggttcccccgcgggtataaattcag

SEQ ID NO: 12173 - DNA, 419 bp, Homo sapiens
  source 1..419: mol_type = other DNA
aggagccgactcatccttactgcttagggtcacaagctgccctcacagcggcagtgtgttcacctccttggtgccaggcacccgctactgagggataccaagcccctgccgcttggcagcagcaaggctggagacatcagtggcatcagtgcactggtcagtgtgaagtcctgaggccaggaagtagttgagcaggctcaggatgggcctccagtgcctcctctggagccagcagcgcagcgggcagcgcctcagctccttccccttctgctgcctccgcaggccctgggtcaccgctgccggaaagagccagttcctgtccgtccatgcacccacccacacaacctgggccctcctggaggtgctgggggagacccagcctgagtgcctggaagttttttccggggtataaaagcgga

SEQ ID NO: 12174 - DNA, 523 bp, Homo sapiens
  source 1..523: mol_type = other DNA
gggcctcaatactagagcccagtggctagggatgcccccggggttcctctcccctccttggtgccaggcacccgctactgagggataccaagcccctgccgcttggcagcagcaaggctggagacatcagtggcatcagtgcactggtcagtgtccttagggagcaggctcaggatgggcctccagtgcctcctctggagctcactacctacagcagcgcagtgggcagcgcctcagctccttccccttctgctgcctacagcccgcaggccctgggtcaccgctgccggaaagagccagttcctggcacccaccaccaaaacccaggccttcctggaggtgctaggggaggttcccccgcgggtataaattcagaggcgctgcgctccgattctggcagtgcagctgtggagcgcttcctaccgttagggaactctggggacagagcgccccggccgcctgatggccgaggcagggtgcgacccaggacccaggacggcgtcgggaaccataccatggcccg

SEQ ID NO: 12175 - DNA, 274 bp, Homo sapiens
  source 1..274: mol_type = other DNA
gcaaccgcgcccggccctggctcacatttctgaccctaggtcattgtctgggccctggaaggtgctcagggtatggtcaggagccgactcatccttactgcttagggtcacaagctgccctcacagcggcagtgtgttcacctccttggtgccaggcacccgctactgagggataccaagcccctgccgcttggcagcagcaaggctggagacatcagtggcatcagtgcactggtcagtgtgaagtcctgaggccaggaagtagttgagcagg

SEQ ID NO: 12176 - DNA, 317 bp, Homo sapiens
  source 1..317: mol_type = other DNA
ggctacccacgccccatgcccgtgcagcgctgggtgcagaggaaccgctggaaggacctgtcccccgtgtttaaggactttcaagactcttaacaggttaggaaaatcttgcctttgaggtgacatttcactggcatgatcacgagatgccactgcactccagcctggtcccacggaggaggccgtaaaagcctcttagaggccagaccccgcagtggcctctgtgccatccgtccaccgagcgcctgctgggtgccaggaactgggtgaatgcagcggcatccacgcggcggccgtggttgtgccctgaactccga

SEQ ID NO: 12177 - DNA, 637 bp, Homo sapiens
  source 1..637: mol_type = other DNA
ggcgctccccttcacgcttccgaaacttcccgatacatcgtgaggtgtgggcaggaggggacgcgccaggcagcagccaacggggtggagtccccgggcccagcctcctgcgggagggggctctgctgcctccaggcccgggtcgctcctgcctggccccggggaccccgtctccgacgacgggctcctcctgcccggacatgccccgccacaagtgacccgggccaggcacccccgccgcgtctgccaggcgcgcttttccccaggcaggaccgcggtggggactcacctgcagcaggaccccgacgacgacaagtgtggacccggagccgagggctggcttcccgcgccggcctgggtcctggggcgcgccctgcccgggcccgggcactgggtccgtgctgtcccatggaggtagggagcgctcctcggcccccgcctcgtggttcaatcctccccgcggaagagcgctgggtgtggccgcggctgcctctgtcccactcgctgcgctcccgggattcggagtcactgccaggaacgcacctagatgtactctagctggtggtggcgccatcctgccaggtcaatccaagaagcagcgtgcttggctatgacaaggcattcggagttcagggca

SEQ ID NO: 12178 - DNA, 272 bp, Homo sapiens
  source 1..272: mol_type = other DNA
cctgacctcaggtgatccgcccgcccaaggtcgccctgggagttcttcgcaggcagcgtggcttacccacgccccatgcccgtgcagcgctgggtgcagaggaaccgctggaaggacctgtcccccgtgtttaaggactttcaagactcttaacaggttaggaaaatcttgcctttgaggtgacatttcactggcatgatcacgagatgccactgcactccagcctggtcccacggaggaggccgtaaaagcctcttagaggccagaccccg

SEQ ID NO: 12179 - DNA, 604 bp, Homo sapiens
  source 1..604: mol_type = other DNA
atctgaaagtctaagataaagaaaaaaggtttttatgaatctgtaagatgtacttcttctatcagcatgcctaatacatctatgtatttatatgttatgtatacaatgttgcactcctgaaaatatatcaaagagctctaattaattgtcttaaaaaataaaagcatttacatcaaatactttattagaaaaaggaaagactagtcaaatgctttttcaagttatgtgacttaagtaaaatctttaataaataagctatctttaaaattattggtaaagtaatattagaaatgtcttaggaattgccagcatacatttttatttgcgtttattaatcaagcaatttcatacttaaccctgccaaatactattaggtgtcaaaatttggcacaggctatagtaaccattaataaataagacattgatactggtttaatgaaaatagctacatcttgatttagtaaaattaccataactttcttgtggcagtctaggcagggactgttatactttgtttcaaagttaaactataagtaaacttgcatgggaagagaatgtttaattttgtgaaaaaccaaactgtcgttaccagaacttaggtaca

SEQ ID NO: 12180 - DNA, 427 bp, Homo sapiens
  source 1..427: mol_type = other DNA
ttttgtttctatcttataaaagagatggcacagaactggtacaacttttttcttaaatatttggtagaacttatcaaatgaaaccatctgtggatgttgttaattattgattcaattaattagatataaacatattcaagtggtcgtccatttcgtctaggttatcaaatttgtggacatacagttattcatagtattcctttagtaatgtcttatttcatttctgatgctagaggttaatcaatttcattgaccttttcaaaaaatcagctttaggttttgttgataatctttaaggaacattgatataaatttccctctatacagagattcacggatccatccgggtggtccgggcaccactggcgcctttctcggcacaaagaccgtgctcctggctgacggagcgcagcgcaacgcatgcgcc

SEQ ID NO: 12181 - DNA, 386 bp, Homo sapiens
  source 1..386: mol_type = other DNA
aaacctaggtcttaagtgcccttaggtcagtgctcaaccctggtctcctagattataatcatccatcccacaggctgtctgatggcaagaatacaagctgctgagctgcaaatcaccgtgatatcacgccttgtcagtgccactgtggtgtgaattagaccctgccctgggtagcttacagtgctattaggttggaagtaattgcggttttttacttattagcaaaaccacaattactttgcaccaacctaatagtagctgaacaaaagtgtttgttgaacttaattgatcttacaagactgtcctatctttgggtggcaggtgcgccccctccttacctcccccaggccgcgcggtggcgctgcgtctctgcagcggcccgggtc

SEQ ID NO: 12182 - DNA, 411 bp, Homo sapiens
  source 1..411: mol_type = other DNA
gccaatggatttaaatatccatgaaggagccgcctttcaggtgacagtctacttctgcacaggggatgcttaaggagccctctctgtgcagagggctctcacccggagcctcagagccaggcacaggaggtccttctgcacaatggccaaacacagggcttgttcggagaagaggcttggccaaggcgttttccccctacaggaaaagggatcccgaggaaaggcccccttcccggcatctcaggctccggaaacccgggcgcgaggagcctgggaagggctgccccgcaggccttggcctcccccgcggagctccctctggccctgggagtggccgccaaaagaggccggaggccgggcctgctgcggcggccgccttcggggaagggggtgccatcctcctctagttaa

SEQ ID NO: 12183 - DNA, 377 bp, Homo sapiens
  source 1..377: mol_type = other DNA
gaccagcctggctgagccaagattgtgctactgcactccagtctaggcagagcaagactctgtctaaaatatatatatattttattctcaatttttcgggatggaacccaggcctctgagtctcagttctctttaagggagtgttgcattttaaagctttatttagaaaaacttaggaaaaccaagtttacctcaagtggtttccttttttcgcaacctgttcagccttgacagaaagctgcttacagaaaataattcctgcatatttattttattctaaacatagcttcagattgtttttcattctaagttgtccttaaaagtcactttttaaacctcaccatctaaagtaagactttctgttcataggtgattca

SEQ ID NO: 12184 - DNA, 552 bp, Homo sapiens
  source 1..552: mol_type = other DNA
ttttaaaaatcttttaacacagtgcattcacctgtatacaaggtggaagaaaggatggaacccgggattcccaaggtctcttccggctgtgtcttcaaagcagtttattgctaagccaggcttagccttgaggtcatgggttggggagggctggggcagtctgcctcccccaacatctggctctacctctcacgaatcaggtggatctcaagagagactccgtttccccatctgtgaaacagggagaatagcgctattttccataaccgttaggagcgctaaggaaagatccgtgcacagcacactggcgtggccgcgcgggtccacggaacagcccagcgctcggagcgctcaacgcgcccctcggcgtgcgcgctcccgccgccagcgggcgcgctccgggcgcaggcggtgacgtgttgccggcgggggccgggcgggggtgcggctccaggaaaggagcgcggcctccaggaagccggctggccgtgatgctgcccactggtggtcccccgctcccggggtccccggccggccaagcaggtgaggttg

SEQ ID NO: 12185 - DNA, 455 bp, Homo sapiens
  source 1..455: mol_type = other DNA
ctgaatccagaactgccagtttttttaaaaatcttttaaacacagtgcattcacctgtatacaaggtggaagaaaggatggaacccgggattcccaaggtctcttccggctgtgtcttcaaagcagtttattgctaagccaggcttagccttgaggtcatgggttggggagggctggggcagtctgcctcccccaacatctggctctacctctcacgaatcaggtggatctcaagagagactccgtttccccatctgtgaaacagggagaatagcgctattttccataaccgttaggagcgctaaggaaagatccgtgcacagcacactggcgtggccgcgcgggtccacggaacagcccagcgctcggagcgctcaacgcgcccctcggcgtgcgcgctcccgccgccagcgggcgcgctccgggcgcaggcggtgacgtgttgccggcggggg

SEQ ID NO: 12186 - DNA, 508 bp, Homo sapiens
  source 1..508: mol_type = other DNA
ttttccccagactggagcaaaacaatattaaaacagcctgctttaagaactaggtgaccacagtcttaagacaggcaaaggctgtaagattttactctcagccagttcacactcctaactgtgagatcaggcctctacagaccttatgggcctatcaaacccaaagaaaatttcctggaggtgcctactcagaggggctccctctgatggtttgaattcaggccttaggaatgccaaagctcactgagcgattctgtttgcaaacccacccgccacggggacggattttccccgagacactgtcaccctctgggcccgtccggttgcttggaaatgtgcacgggacggtgacgtcacacagggaggcgggtccccactgtcccgcacaccaatggcgcggcggccgccggcctcttggttcccggcgattggtgtctctggccgctgcgctccaccccagcccgccatggcgtcaggcgccgcggccccggggaggtggctcccactt

SEQ ID NO: 12187 - DNA, 503 bp, Homo sapiens
  source 1..503: mol_type = other DNA
ggcatcactgcactccagcctaaagacaaggaaagaaaatacttccatcatctctgttcacggtaccgtccagtccagtcacagtaccggttggaccaatctggctaacccattgtttagccaatgggttacatgttaacagttggtaatctgcaaaaagagtatgctgatgttcttttgaactacttttttaaatgcagtttttgcaacgccttccatccgtctggaaacttttcaaaaggatggtgcaacgggaaaaggctttggcaaaggtgttttctgagtttgcaccatctctcccagagagagagagcacccagaactctcacggtaccgcgcggctgcagtgactgcgccccgctttggggtgcgctcctggcctggctcagggctcgcagatcggcggggtcacctggggctcagggcggccaatccgcggcgcggcccgtcccgcggccaatgggagggcggcgcggcccgctcccctgggctataagcgagcc

SEQ ID NO: 12188 - DNA, 293 bp, Homo sapiens
  source 1..293: mol_type = other DNA
cttttgcaaacggtttgcaagacctgagcgcttagggacccccaggaggctccgcgggctcttccgcacccgcggatgtggcgaagccgcggggcagctccgctcgcgctccaggggctcagcagcatcccgaaggcggatcggcacctgcaggccccgcagacagacccaagctctgggacagacgcccagcgtcccagacagcgccttcctctgggccatgctggtaggcccgggtccagggccgggtgacgagaccgtagccccccattggttctcgcagaaaccacgtg

SEQ ID NO: 12189 - DNA, 230 bp, Homo sapiens
  source 1..230: mol_type = other DNA
acttgcatgaggctttctacattctgctaggcaaggaatgatctgcagccttcatgccataggattctcctctgagatcaaaagaattatatatttccacgggtttaaattataactttgctttaagcagttttaatatgcattacactgcatctctatcggcagggacctgtgctcttccaaggggaacctgtgatagaaacagctgctacggaatggagccctacttt

SEQ ID NO: 12190 - DNA, 247 bp, Homo sapiens
  source 1..247: mol_type = other DNA
agaaacagctgctacggaatggagccctactttgaagaagagggtacgtgccagatttcaggcaatcaggctaggcttatgcaatgaaataccctcagcagagcgtttagttgcatgcaatttattaaacaaaggagctccactgcctaaggctattggattacactggcagtttattgccatcaggcattctgctccgcctcatgggttgcagaagcactgatcaccagcaccagatctctgagaa

SEQ ID NO: 12191 - DNA, 447 bp, Homo sapiens
  source 1..447: mol_type = other DNA
acagattattaattttcaggcattctgtgcaggtgtgcacatgtgtacctggggtaacgtgactgaaaagatgaagtcaaagttgatttgattattgaagaatcacattattttagaatgtcagagtccaactttggcgtttaaggcttcagctctgagctgtcatatctcagattccccctcaagggctcaaatgtgtgagtgagaaccaggatgtccacatacaatagacatgtgaacatgtaaaattagagtaaaactgctgtaagcaggttaagttctcatctaaatttcaaaaagcaacttggagagatttctataggatttttctttagttcaatcaatacagagttatctcttaattggcagcaggtacttttaatttgctggaaaatatttctaagaagtcaaaaagaccagttgagggacctgattggtccttgatcc

SEQ ID NO: 12192 - DNA, 406 bp, Homo sapiens
  source 1..406: mol_type = other DNA
tttataaaatcattagatcttatgagacttattcactataatgtaaaacttaataagcagctcagttgatattagttattttattggttataagtatgatttttagaggatctaaaaattattgtgcttatattgtcagacattcttatttcaggatagttcaaacttcctgaagaatgctatatagtaattaggttgaattagaaattgctttacataaccacattatgtatgtgggggaaaaataacattcttaataacttttttcctacaactgtatatatataaaaatatatttaaacatatatttatatatcatatccgtaatgtaaataaatgtctagcatgtttttcagtaatataatgtactacgcagccaggacttcctcagagacaagaatgaacc

SEQ ID NO: 12193 - DNA, 743 bp, Homo sapiens
  source 1..743: mol_type = other DNA
ttgggaaaactatacataatgatttaatttggccctaactttctgaaaagcactgagtcaatgtttatcaataatctcaagttgatttaccctttttagctaaataatttctagacatttatcctgaagtcaccagaaattcatatgtagaaaatatgatattctaaaatcactaaaattatgtcttaatattcaatgtcatgagaatgcttatgtcatagtgccatggaaaaaaaaataagtttcttaaaccctttgcccaataaggttagctttccttttctgcataagaagatgaaaataaattgtaaaaacgttaacagaagttatttcttcattggcagtcaacttttttctcataataaacttgtgatattataatcatgaaaatctaccatatttgtcagagaaacattgttattgtataacctcgaacatacttcatatgttgtattcaaggttatttaaatttcttgtacatttcttatacatgcacatttctttacaattttacatgcatgtgcatatgtgtgtgtgcaaatgcatatgaattttataagaatcttgaggcagttaaaattatcagcatcccctgttgactcattaggagactgaatcactgtgacagtatctcaaaatatgtacagaatactgatatatgtcctaaatatgtggatttatttctataaggatactgaacaacaatcgtaatggtccagtttggtgagtatgtagatatgagc

SEQ ID NO: 12194 - DNA, 532 bp, Homo sapiens
  source 1..532: mol_type = other DNA
aaatggtacccccgttttaagccaagggacttttcccaatttgtaaatatcagtgtcaatttccccacctgcaaagtggggattataattctgtttttcaaccacaatggatgaatattaatgtcagatggatttttcctcttatgtttccttgtagaaaaagtccaattgaataaaaggattctattggccatgaattgtcgaggccctttgcacatctgtctatattatatttatttatttattacatacatttctgtagtttggatattttaattttaatatgtgatttatgccatataaattttcaatatttctcatttaacaaatgttccttttagtttttatatggcatactctgcatagaaagaatttaaccatcttcaaccaaagcatatataaatatttttcaacatttttttcctaagatttgaagttttcagatatctggaatcaaatttatattagacatgacgtaggagttgtctttaattagaacatgatgttcaacctccaggttttagcctcaagc

SEQ ID NO: 12195 - DNA, 326 bp, Homo sapiens
  source 1..326: mol_type = other DNA
ggccaggctgggtgacaagccccccgggtggctgcacctcccactcgccgacctgggcgctgtccttggtgctgccggcgccatagcgagcacaagcgccttccttctgcccctgcggaagctgcggttcccgaagccttcaggcagaccgttcgcaccaagggtgcgaaggcccagggcgtccaggttcccatgcggcctgggcccacgtggagcgggcgctgaatcaccgttcagccgccccccccgcagtccccgcctcctcggccgccgcctccacggggcggggccctggcccgggaccagcgccgcggctataaatgggc

SEQ ID NO: 12196 - DNA, 345 bp, Homo sapiens
  source 1..345: mol_type = other DNA
aggatccaggcagcttgaagctcccggctgcggagcgcgcggctgcctcagcaagtcagtcctcagttaagaaatgtgaaaaattaactgctgtaaaggtttaaaaatgctaaaccaatacctgcagtagtgccgcagtttcacgagtgtgtgtgtgtgtgtgtgtgtgtgtgcgcgcgcgcgcgcgcactcgcgcgcacattccctatgtagcagctcatctagcctatttatttgtgacgaccgccgcagctcctcgggccgtagcttggctgcagcagcgcgctgcccccactggccggcgtgccgtgatcgatcgcaggctgcgtcaggagcctcccggcg

SEQ ID NO: 12197 - DNA, 433 bp, Homo sapiens
  source 1..433: mol_type = other DNA
ccaggctggtctggaactcgtgacctcaggtgatccaccccttttatattcctaaaacgcatgaaaaggatataatttctctctagaggaatcttcttcgaaggtgaacgtaattatccaagtctctccaggaattccaagaggggagctccagagagggcgccacctggagcccaaggcggttcaaatgcgcagcccctttgggacggagaaaagacggggatgcgccttggccctttctccagggtccccggagtttggggatacagccccgggagattcagtctgccctgagtccggcttctcccgctcgcggcgcgggttcaagctagggggtgaaggcactgctcattcattcaacaaatatttattgcgcgcccgcttagtgccaggcaccggaggtgccccgacgctccccaagtgtccggcgcgc

SEQ ID NO: 12198 - DNA, 621 bp, Homo sapiens
  source 1..621: mol_type = other DNA
aaccatgtattcaaataaatgtaattaagagtaatggttgtgtgtgtattttacatgcttgtcctgtgtaaataacacgggggtggaacatctataaaatttagataatgatacccactttgcatggctattgtaatgaatgctcttatacatttgctatttattaaataactataatttatttgcatatttaactcaataagcatctactgaaatgagttgattttgatgctttagaaggctttcaaggtatcaaacacacaactgtctgatttaggatcctacatagtgtcacttacttgtaaatcagatttttaaaattggaagcaactgaagttatgtatgcatttgacttcacttaatctaagacatctattaagggaatccaatctagctggattttaatctctttgaattgtgtcctcagctataaaagttttagctgaggttttaatggctgcacttaagtaaatctaacagatataccagtccaattacatacaccattaaagggctttatgtgaggatttttaaaaattaccattaaaaaaaaaaaagcatagtccatttgcagtataatttaccagcaggaaagatttcaatgtcctggaaaaattccct

SEQ ID NO: 12199 - DNA, 636 bp, Homo sapiens
  source 1..636: mol_type = other DNA
gaggggagctccagagagggcgccacctggagcccaaggcggttcaaatgcgcagcccctttgggacggagaaaagacggggatgcgccttggccctttctccagggtccccggagtttggggatacagccccgggagattcagtctgccctgagtccggcttctcccgctcgcggcgcgggttcaagctagggggtgaaggcactgctcattcattcaacaaatatttattgcgcgcccgcttagtgccaggcaccggaggtgccccgacgctccccaagtgtccggcgcgcgccgtgggagcgcagcccgcatccctcgcccaccggccgcccggcctgggcgtgcccggctcctccagcgcagccctctgtcgggagccggacccccgggacccagcctccggggtatcagccgggtggggagggcggcgccagcgtcaaagtcccgccggcccaggaagccgctccagggaagcgcgcgaggcggagccgcagtcggcccccgcccggcagagcgcagagagcggcgcgggcgggagaggccgggcgcccgcggctcggaggcggccccggcgggcggagggtgcggccggcgggagggactggggcggcgccaggaggggcgcgcactgct

SEQ ID NO: 12200 - DNA, 227 bp, Homo sapiens
  source 1..227: mol_type = other DNA
acactccgagcgctcccaggcctctccctcggcactggagtggcttcctgggctcggagagggaccaccgcgagctgcagtcaacccgaggaagagtctcgcggagtaacgctgttcgaaaaggactggtgcttgggtccctttcagcggcgctacgctggaagccgccgtccggctccaggagcctctctgattggtaggttagccagagcccgcccgatactggg

SEQ ID NO: 12201 - DNA, 384 bp, Homo sapiens
  source 1..384: mol_type = other DNA
gtggcaggcgagcgtcgcgtcggccgctccttccagaccccggctcctctgtccggaagggctctcctggcaaagcacccgcagccgggagccgctcttcgaacccggagcccgaggtcccgagcctgcgctgatcctggcctgcgctctgcccggcacactccgagcgctcccaggcctctccctcggcactggagtggcttcctgggctcggagagggaccaccgcgagctgcagtcaacccgaggaagagtctcgcggagtaacgctgttcgaaaaggactggtgcttgggtccctttcagcggcgctacgctggaagccgccgtccggctccaggagcctctctgattggtaggttagccagagcccgcccgatactggg

SEQ ID NO: 12202 - DNA, 250 bp, Homo sapiens
  source 1..250: mol_type = other DNA
agggtcgggaggaggccgcggggaccctgtgctgtccccgagcgcccccagcccgcgcacgcgccagccggttccgcaccgtccagggtcacccgcctcatcgcgctgcccccgctgggtcctgagtgagcccccagtatcgggcgggctctggctaacctaccaatcagagaggctcctggagccggacggcggcttccagcgtagcgccgctgaaagggacccaagcaccagtccttttcgaacagcg

SEQ ID NO: 12203 - DNA, 260 bp, Homo sapiens
  source 1..260: mol_type = other DNA
catcgcgctgcccccgctgggtcctgagtgagccccagtatcgggcgggctctggctaacctaccaatcagagaggctcctggagccggacggcggcttccagcgtagcgccgctgaaagggacccaagcaccagtccttttcgaacagcgttactccgcgagactcttcctcgggttgactgcagctcgcggtggtccctctccgagcccaggaagccactccagtgccgagggagaggcctgggagcgctcggagtgt

SEQ ID NO: 12204 - DNA, 490 bp, Homo sapiens
  source 1..490: mol_type = other DNA
ccggaggacccgcgggaatactccccggccgctcgcgcactcacacgggtgcgactgccgctcgcgcccgcccgcccgcgggtgttaactccaggagacctgggcacatgtggccaccccgggaacgaacgtgcctcccggcactacatctagaggcaggatccagggaggcttcccgcagccaggccgaacccctagtcagtgcagggtgtgggggccccccaatcctgcgcaagcacacggggttcgtgctaggactcgtcccggagtcccggcaacgcagagcgtggcgcgcgccgccggaggacgtcggcccggcttgccaggcgccggccaatcccgcgcgtcaaatgaggctccttatcgggccgcagctccgcctcccgcagccagggccgtagtaacccattcatggggcccgcgcgcggctgcagccgggctccgtggcgctcgcagccaccgcctcgagattaggcagccatcaatttcc

SEQ ID NO: 12205 - DNA, 580 bp, Homo sapiens
  source 1..580: mol_type = other DNA
gtttaataggcaccgcgagcagccccgcgcagttaaaaaaccgtcggtcggtgaggctgctgccaccgcctgccggccaccagcccgcggccagcaccgcggcgaccgcgcgcggtgggcgaagtttccacgactcccccgtccctccccgcccactaccgggggcttcgggaacggagaggtggggagggaaccggaggacccgcgggaatactccccggccgctcgcgcactcacacgggtgcgactgccgctcgcgcccgcccgcccgcgggtgttaactccaggagacctgggcacatgtggccaccccgggaacgaacgtgcctcccggcactacatctagaggcaggatccagggaggcttcccgcagccaggccgaacccctagtcagtgcagggtgtgggggccccccaatcctgcgcaagcacacggggttcgtgctaggactcgtcccggagtcccggcaacgcagagcgtggcgcgcgccgccggaggacgtcggcccggcttgccaggcgccggccaatcccgcgcgtcaaatgaggctccttatcgggccgcagctccgcctcccgc

SEQ ID NO: 12206 - DNA, 436 bp, Homo sapiens
  source 1..436: mol_type = other DNA
gagaaactcaggtttctcttagaaatcactcttagtgtccgcagtgcctaggactcccgccttggatcctggggcccacgtgagcctgtcacccaggctggagtgcagtggtgcgatctcggctcactgcggccaggctggtctcgtgcccggcccaggtattcctagaagacataggaccccctaagcccgccccagagccccggcgctagtgctcgaggctgggacactgctaggtgcacacagccgcggcctggcgcaggcggtgcgggccatggcgagacgctggcgcggcgcaggccctgccggccgggacacggagggcggggcacaggcgcagcaggaagggggcgtggccaagagccgcccggccgctcccccgcccctccccccgccccagcccggcggctccgccccctaggtgacgtcactggcc

SEQ ID NO: 12207 - DNA, 283 bp, Homo sapiens
  source 1..283: mol_type = other DNA
aatttcagatggattagagctctaaatgtaaagttaaaaagttataagggaattatagattagtaatcttggtgtgccagaaatcgattagtcgagtttgtaatcgacattttaaaaattctgtaacaattaaatttttgtgtccccaaagttcgttcccggcgcgcgcgtcagcctgactcgagcgtctccacgtccggggcccgcaggggagcgcccctgccccgtccggtcgctttcatcacgtggcctgggcgggccctgacgtcaggggcaggggagg

SEQ ID NO: 12208 - DNA, 689 bp, Homo sapiens
  source 1..689: mol_type = other DNA
gcccagcccgagcctcgccgcaccctgcgcggagaaggggcgggtagggcggaaggcgggcgcgccgggctcaggggcgagggaggggcgatccccgcgccccgtcctccgtctccacccccaacccccacaccgacctggtcgttgatgttctgcagggctgaggccctagatggctctccgccggcgcgccggccctgccgcgagtacggcggctgcgggtccgggcccaagtgggcgacgtcccgctgctgagccaccacctgccccgagccccggcccaccgacagcgagtcgaagtcgatggtcttgttctccgaggacccttccaccgggcagaacatgccacagaatttctgccggggcttggggctgccggagcccaggtttttaaaaaaagcagggacgggtcctcgccgtccgtagctgctgccgcggctgccgttcgccgcccaccgcaaggtgcacagaaaggaaggagggctggcgagccggcgacccaccctcccggtcccttgcccacgccccccgcggctacagcgcgagctcggggaagcgggagggcgtccgctgcggctgcgggagccgaaaggctgccagttcccggcagcgctgggaggagggaggcgcgggcggggcgcggcgccggggagagagagaggggagggcggcaccgcccctagccccgc

SEQ ID NO: 12209 - DNA, 519 bp, Homo sapiens
  source 1..519: mol_type = other DNA
tttttttttttttttttttggtggaggaagcagaataaaccaaatgcgcccttcttggcgcagtggcgcagacacggtccatggcgccttgcgcaatagagtcggtctgcaccccgtctttaagtcgtggccctgggctggaattgcgggaaccttctcgtttcagtctctgctccctgcagcctgccaaggcgagtggacaaactgaagctggggtgtccagcgtcttggctgccccacccagggtaacggggcgggacccctatccacagtgcgccctcgcccccggcccacctccgccatgcggcggggcagaggcgcctgggccaggcaggtgggggcactggggctgggggctgcgtcctccggtcctcactccgcgtgccctgccacccaggcgcggagagcggtcagcgggccctccgctccgcatctccggagcgcggggctaggggcggtgccgccctcccctctctctctccccggcgccgcgccccgcccgcgcctccctcctcccag

SEQ ID NO: 12210 - DNA, 610 bp, Homo sapiens
  source 1..610: mol_type = other DNA
ggtggggcacccagccgcagctgcaatcggaagccgcccgggagggtttcagaaggagacgcgggcagcctttgtgggcgcacggccgcccaccgcccagcccgagcctcgccgcaccctgcgcggagaaggggcgggtagggcggaaggcgggcgcgccgggctcaggggcgagggaggggcgatccccgcgccccgtcctccgtctccacccccaacccccacaccgacctggtcgttgatgttctgcagggctgaggccctagatggctctccgccggcgcgccggccctgccgcgagtacggcggctgcgggtccgggcccaagtgggcgacgtcccgctgctgagccaccacctgccccgagccccggcccaccgacagcgagtcgaagtcgatggtcttgttctccgaggacccttccaccgggcagaacatgccacagaatttctgccggggcttggggctgccggagcccaggtttttaaaaaaagcagggacgggtcctcgccgtccgtagctgctgccgcggctgccgttcgccgcccaccgcaaggtgcacagaaaggaaggagggctggcgagccggcgacccaccctcccggtccct

SEQ ID NO: 12211 - DNA, 745 bp, Homo sapiens
  source 1..745: mol_type = other DNA
cgcagatcgcgccacatcggcctcggcgggctgcggctgccgcagcccggatgcctccttcccggctcggagttggaccccggcccgcgcccattccccgcccccaggagccgggcccggacgctcccgggaagcagccgccctctccggggccgggcgtggccgggccctccccgccgggttcccgcccgccgccgttccagtcctcagccgcgccagggcgggggccaggcgagttcagcgccagcaacggcgggggaggagggcccgggagccctcccgggctgcgcggcgccggccggcggtgcagtcgcgcgctcgccgccagcgaagccattggctcggcgcagtcaccccacgcggggctgccgcggcggcctccgcggattggcgcgcaggcgggcagggaccggggcgcgcgcaggcgagtgcgtgcggccccgaagccccgccgtctcggggtgccgcccctccccccggccgcgacgaccacccctccattgtccccgcgtggcccaggccgcgcctggggccgccgccaaacccggtccccaccgccccggcccgaagaaagcgcgcgaaaggcgcgctcccagcgcgggcgctcgcgccgcctgccgcccccggccgttcactgccgcatttcgcgctctcgcgccgcgccccgcgtctctctcgaagcggatggcttttgcctgagaggaaagggagtggctggcggcgcatgcgccacggtggccgactt

SEQ ID NO: 12212 - DNA, 393 bp, Homo sapiens
  source 1..393: mol_type = other DNA
ggcctgccctgcccgctggcatgccggcttgcagtgactgtcacttgcaaagctccctctgcagagggacgtcctccccaccccgtcccccgccagtcccgctacggctggcagctggagcccctcgggtggccaacagtgaggcgggacctggctctcaagccagcttggctggtggacagaccggtgcgctctgcacacccgagtgcgaattccaccggcgtgagctccctggccctgaggtccctggccgccccctccaggtgactgcgaggattttaatttcgtggtacctgcgctcgaaatccagacttcgagcgctggagcctgggggcgcgagatgagctccgaagtcgcctccaccgctgccgggcgaagcagcttctggaccgc

SEQ ID NO: 12213 - DNA, 252 bp, Homo sapiens
  source 1..252: mol_type = other DNA
atcatatgttctcactcataagtgggagctaagctcccaaaaacttactgaaaattttaaaaaatccaccatatttgggaatctacctgtggctccctctggaaggcccaggaggagtgcagggccctcaaatcctggggtttttgcagtccccgctaaaggacctaaagatcctgcctctggttctccagctccacaggcagcagagaaagcagccctgctaggagactgtccaattgccaagcacaaaca

SEQ ID NO: 12214 - DNA, 351 bp, Homo sapiens
  source 1..351: mol_type = other DNA
ggggactcgggcagctcctcctctcagcaggtgatgaaataaattcaatgtttcacattctgggtaatttttaaaagtagagttccagaccagcctggccaacatggtaatctcagctactcgggaggctgaggcaccagaatcgggttgcagtgagctaagagcacgccaccatggacatgttcagaaaacttttgtttcaactgatacatatgttctgggtcacaagggaaaatgcattgcttaacgttttggaaaatgctgagttaggctaacccttattatgtatagtcactagaactctagatatggagatgctgtgggctgcacccacatccgtgccgcttggac

SEQ ID NO: 12215 - DNA, 543 bp, Homo sapiens
  source 1..543: mol_type = other DNA
gacacatgtgaattgtctctacctggcaagaattgcatgaactctagttatctcagctaaactttgcagaagtcctcaatttcactgttttaatgggcacttgcccattaaaacagtggttgtcatgagcactaacagagctattacagccattgtactcatgagtaaatggactttgaaacatgatgacctgttcagtttctccttaccgcggcgggccagaagaagactcatccgcgggcctgaggttcccggggattggtaagggaggctccttttcccatacacggaagccctactacgccgcctgggagacccttccgtgctaccccggccagggacccgcccggacctgaggaggcgggaactgcgggcagaaggcccaccccgctctcccaagatttcccgcgcacaccggaagtgggtggggctcctccgagcgccccctccctccccgattggccagcgccgctgtctctcagcgttccaggggaagggactgggcgattcccagcactcgggtcgcgggcgttggcagccggg

SEQ ID NO: 12216 - DNA, 525 bp, Homo sapiens
  source 1..525: mol_type = other DNA
tgacacatgtgaattgtctctacctggcaagaattgcatgaactctagttatctcagctaaactttgcagaagtcctcaatttcactgttttaatgggcacttgcccattaaaacagtggttgtcatgagcactaacagagctattacagccattgtactcatgagtaaatggactttgaaacatgatgacctgttcagtttctccttaccgcggcgggccagaagaagactcatccgcgggcctgaggttcccggggattggtaagggaggctccttttcccatacacggaagccctactacgccgcctgggagacccttccgtgctaccccggccagggacccgcccggacctgaggaggcgggaactgcgggcagaaggcccaccccgctctcccaagatttcccgcgcacaccggaagtgggtggggctcctccgagcgccccctccctccccgattggccagcgccgctgtctctcagcgttccaggggaagggactgggcgattcccagcactcgggtc

SEQ ID NO: 12217 - DNA, 508 bp, Homo sapiens
  source 1..508: mol_type = other DNA
agacaagaattctgtcttccagggctattcaatgcagaaacatccttgaaaatgacacatgtgaattgtctctacctggcaagaattgcatgaactctagttatctcagctaaactttgcagaagtcctcaatttcactgttttaatgggcacttgcccattaaaacagtggttgtcatgagcactaacagagctattacagccattgtactcatgagtaaatggactttgaaacatgatgacctgttcagtttctccttaccgcggcgggccagaagaagactcatccgcgggcctgaggttcccggggattggtaagggaggctccttttcccatacacggaagccctactacgccgcctgggagacccttccgtgctaccccggccagggacccgcccggacctgaggaggcgggaactgcgggcagaaggcccaccccgctctcccaagatttcccgcgcacaccggaagtgggtggggctcctccgagcgccccctccctccc

SEQ ID NO: 12218 - DNA, 756 bp, Homo sapiens
  source 1..756: mol_type = other DNA
gccacacccggctggcacaaggggtgcatggcctgggcccttcgggaacatcatgtacacgggcccctgggccgaccttgtcctgcatgctgggagcgagacgcgggcacactgggctctggcaggcgcgggagccgcagagccaagggattccgggttccagacccggctcggccttcaccggctgcacgcggtgcccctggtgtcgggggtcggcctggcaggagcagcacagcagctccttgtcctcgaggcagaagaggctgagctgtccgcggtgcaggcggcagacacgcgagaagcggtagctggtccagcgcgcgccctcggcctcctcgcgcagcagcttctccaccaggttgttgagggtgtggttgacgcgcggtctttgcacactgggcaggtgggcgacacctgcacctcccagcagcggctcacgcacccgcggcagaagttgtggccgcagcgcagagtgactgcgtcgcgcggcgcagagcaactcctccttgaaggagcgggaaggcccgggggacacgtcgggactccgctccatggcacgagcagccggctcgggcgcccggaacttttgctccggcccctcccacccgcccggctgccaacgcccgcgacccgagtgctgggaatcgcccagtcccttcccctggaacgctgagagacagcggcgctggccaatcggggagggagggggcgctcggaggagccccacccacttccggtgtgcgcgggaaatcttgg

SEQ ID NO: 12219 - DNA, 389 bp, Homo sapiens
  source 1..389: mol_type = other DNA
ccattctcagaaagtacgaatcagattccaatcgatgaggatgatgctgcgtacactccaccctcctcctactcaggagcaagtctggagttttcctagggatagcatatcaccggcctgaggaaagaggggaccagcctctgggcggggcccctggaaggggctgtccagacagctcagggacctggtctgttcagggacctggaccggttctgccaaaatccctagtggtataacatctcccactgcggggggtcttgggagaaccagcctgagaagttggcacacaccttttggcctccaaaaggctgcaggtggataacatgcagagatcgccccccaggtctgcccggcgctcagggacacaccccaccctttaaggaagtggg

SEQ ID NO: 12220 - DNA, 360 bp, Homo sapiens
  source 1..360: mol_type = other DNA
tacacacaatcacgtggaaactgaggcataggaagctgaagaggcctgtccaggattatgcagctgttcaagagcagagctagaaattcagcctcagcagtctgtggccgggtcatgtccagggcctttgcttttaacaaaagcagccacaccgggtggccgcgcaagtgagctggcagtttactgacttagaaggtaaatacattccaaggttcggattcacatacagtgacccaggacccagaacctgtgggtgcactcaggggccccaggcagtgatcctggagcccaggggtccagagagcgactggacagagctgcatctgtccccaccggacataggctggagagtcacaggcc

SEQ ID NO: 12221 - DNA, 239 bp, Homo sapiens
  source 1..239: mol_type = other DNA
ctttgggctgcccatccccattcaattggcagagcccgacctggccagctgtggattctactgtgagaaggtagaactcaaaacagtatagaaaggatgttgtgtatctctgaagcagaacttcatcactgccagacaggctggtccactaaaatggatctgatttgacgctcgttcatttgattgaaaaaaagacaaaacttcaagtggtttgtaggtttagaaaactgccagaggta

SEQ ID NO: 12222 - DNA, 348 bp, Homo sapiens
  source 1..348: mol_type = other DNA
ttggcaactgctccaggcaggagcctggaagaggttaccgagctcccagttacagtgaggtatctgacaacccctagcttggacacattcaagagtaaattctccactgttggagacctcactcactctgtttggtctccaccaaagagtttttaattcatggagctgcactacaacagttttagtttttctaggaacaatgtacaaaaggaaaataatagcctacatttagttctcgaagtattctgggctggcacacgatagctggaacatcatattttattctagaaacacatttgccttggcaaagaatgtagaagtcactggatgtgctgacacacacacaca

SEQ ID NO: 12223 - DNA, 431 bp, Homo sapiens
  source 1..431: mol_type = other DNA
gacacattcaagagtaaattctccactgttggagacctcactcactctgtttggtctccaccaaagagtttttaattcatggagctgcactacaacagttttagtttttctaggaacaatgtacaaaaggaaaataatagcctacatttagttctcgaagtattctgggctggcacacgatagctggaacatcatattttattctagaaacacatttgccttggcaaagaatgtagaagtcactggatgtgctgacacacacacacaacacacagagtctgtgcagtccgtccaggaaggcccgggcctgggtttgcctcttcaagcagctactgcaggggcggattctagcctggggtctttcccggccagagtccagccttaacccgggcagagggcggaggccagggcaggggcggggcagagccggg

SEQ ID NO: 12224 - DNA, 409 bp, Homo sapiens
  source 1..409: mol_type = other DNA
ggcagctcactttcttccccaagaagtagctgcacctccgatttgcccctccttgccagggggaggggtggctgcgacaggagattctccctgctctcagcagaaggaactccagcagttctgatttaactatgacacagccatgaagcccaccctgcttggttgggttccaaaaacccggagaggcctaggcctggcgggtcagtccaggactatttaaatgggtcaaacagacagccgggctaaccgcgtgagaggggctcccagatggggttcaggctcttccctactggaagcgccgagcggccgcacctcagggtctctcctggagccagatgatgcgccccccggcgcccccagcccggtgctgcaccggcccccatttgcagccagccccaaagggggacgg

SEQ ID NO: 12225 - DNA, 238 bp, Homo sapiens
  source 1..238: mol_type = other DNA
tgaaagaggccggcagctcggtaaatgtttgttcaatcaatgaaaaatgacacgtgagaatcctgagtggcgcttatgaccagtctgatggccaggtgcaggggtggaccacctgaggtcgggagttccagcaacatttttagtctctactaaaaatacaaaaaaaaaccaggcccaattctctcatgtagaaagaagaggcttggaagccagggtgctcacagggtggccaaccttc

SEQ ID NO: 12226 - DNA, 364 bp, Homo sapiens
  source 1..364: mol_type = other DNA
tgatggccaggtgcaggggtggaccacctgaggtcgggagttccagcaacatttttagtctctactaaaaatacaaaaaaaaaccaggcccaattctctcatgtagaaagaagaggcttggaagccagggtgctcacagggtggccaaccttccggacgtcctttcccggacgtcgggtccccacccctgccccagccagctctcccggtgagcccccccattgcggccgcagcgcgggcagggaggacgccgcgggagcccgggttcgaggctgggctgtggggctgcgggggcgcacgggcgaggtaggcggggcgcggggcccccgcggcggcacaaagaggccggccgcggcagttttgc

SEQ ID NO: 12227 - DNA, 351 bp, Homo sapiens
  source 1..351: mol_type = other DNA
tgatgctttggtcagcaagacctggtagccatcataacagcgtggtgcaactcactttttctacgagtacagcaacgtgctgtacaagtttgtaccctaggagcaacggtatactgtacagcctacatttgtggtaggctataccacaggtttaagtatactctaccgtgttgctacaagtattccctatatatgtatacctatgatggagtaagagattattgacaataactaataataaaatagaacgattataacaacgtactgtaataaaagtttcttcttgtgatgatgtgaccacggagcatttcctgggaacgaagggcaccctttccttatctgtcaaagata

SEQ ID NO: 12228 - DNA, 345 bp, Homo sapiens
  source 1..345: mol_type = other DNA
tcaatttcatagaatgaagtcagtgacagtgatgtaagagtgtgcattctcattgatgtatagaaactacaagcatcagtgatacatgtaggtagctacctgtggcagaagctaatgcctctccagacctagtaatttaaagggactcacattcctcagataaaagtgctttctcaagagaaataatttcggaggacctctgaggtttggcaggccttcgatttaaggagtatcaatttatcttcatttcgctgctgaggaaagtgaagcacagacaggttaactaacgtgcccatggcgcccacggccggcgttatgacgcgccccgacgtccgccggaagtgc

SEQ ID NO: 12229 - DNA, 466 bp, Homo sapiens
  source 1..466: mol_type = other DNA
cttgatcaaaggccttgcaactggattgcaattgaggacctgcgccatcctcgggggatgcctcagggcacatcttcctggggagaagccctgatcaatggattccagtcccggcggtaccccctgccctgagctctgggcccctggtctgccccacggcccatcccctcctggggagcagatgttcctaaataatcgttgaataaattaaagaatgttgaattgaatgtggcaattacatgagttagcaacatttctaaatatcttttttttccctcgctaaagatggtgtttcaaggcctcataaacctataataaaattgacgtcataatcacgacagccttcagcacaggcaactgtggcctgcgggcaccgggagtcctgggagagggaggaggaacggcgaatcggcggggcgtgtccttcacgccgccccgtagctcggggccgaagctggcgcagcgc

SEQ ID NO: 12230 - DNA, 536 bp, Homo sapiens
  source 1..536: mol_type = other DNA
ctcttacatcactgtcactgacttcattctatgaaattgagggcgtcacttaacgaaatttatttacatgcttgctttgacagcatgtatactaaaattggaatgatacaactttaacataggatgacatacaaatttgtgaaaattaaatttgaaaaaataaacataaaactctaaacttatttgaataccaggagctggtgacacaaagatagtaacaatagctaacaataaccgttttaggaactttctggttttccaaagtaagaatttagctctggatattaatgccttacagacaggtgttaagttttatattttaatttgaaaaataaatagaaacctaaagttactaataataagtgcatcgagaatctgagaggcctttacaggctggagaggccattttacaaaaatttctcggagtcctgccaccagggtgggcggggcaagggctggtgctccaccaatcaccgagccagcccctgggcgctgagccgtggccaatcggaacgcagcggcttcctcctagcctg

SEQ ID NO: 12231 - DNA, 420 bp, Homo sapiens
  source 1..420: mol_type = other DNA
cagcctccaggctgctctgccaacatatagtttggagctgttaagcaatatctattgggttctaggacttgaatacggcttgatcaaaggcgccttgcaactggattgcaattgaggacctgcgccatcctcgggggatgcctcagggcacatcttcctggggagaagccctgatcaatggattccagtcccggcggtaccccctgccctgagctctgggcccctggtctgccccacggcccatcccctcctggggagcagatgttcctaaataatcgttgaataaattaaagaatgttgaattgaatgtggcaattacatgagttagcaacatttctaaatatcttttttttccctcgctaaagatggtgtttcaaggcctcataaacctataataaaattgacgtcataatcacgaca

SEQ ID NO: 12232 - DNA, 559 bp, Homo sapiens
  source 1..559: mol_type = other DNA
gcagctgcagtgacacagctgagtcttggcaaacactggagtcttgaggctgaacttttcaccaacaaacaggaatgcattcatgaatgttaaacttgccacgcttggacaaaatctgaatttagcagctcccttcacatatggttagattgcctttaaagagatttgggtggctcctcccacctcctgggaccacaggtgtgagtcaatatgctcgttaatgagccagaaacgctgattctgtggaaccccctggggcattttcctgactacccccagtgtggccaatccgtgtccactgaggatacatgaagtaaatgccaattctgtgctataaataaatttacaagactggttttcttgcgtggctcataagccaggtcgtcttccaaaaagtattttgagcaggacctttagactggggtgttggagtcccaaggccaaggccgaccgcgctgctctgggcccagcgggcgttcccacacggggctgtaatgccacgattggccgcaggaggggggccgtattccagaccccattgcagaagcctccgcaactg

SEQ ID NO: 12233 - DNA, 612 bp, Homo sapiens
  source 1..612: mol_type = other DNA
aagagtcaaactctgtaaaatacttgaagagatttattctgaggcaagctccaaaattggggctttgcctgggagggttcttggctttgcccaggaaaagcaacttgcattgaagcagcagtgcacagctgcagcagagggactgctccttgccgagcagggctactcacaggcagtgcccagaagagcagctcagaggccccacttttaactgtattcaaattaaggggcaattttccaggtcatcaggtcattgccatggaaaggggagggtaatgttgatccagcatggtctgtgacagagccccaggggatcctgagaacatgtgtccaaggtggttacattttagggagttataagacattactacatgtaagatgtcatggaggaaaagttaaatattaaatctgaattcaattgaacctggacacaaacaatagtcaccaagtcctggaacaagttttgtccagcgctgtttcagagaaatctctatttcaatctattcctatacattagttattgaaaaacaatagacaatagcaaaaacaagttgacctttttgtgttccttgaagggcccttgtgactgggcctcatgccaaacaacttgtt

SEQ ID NO: 12234 - DNA, 210 bp, Homo sapiens
  source 1..210: mol_type = other DNA
taggaacagatcgtctaggctggacaacagagcaagagatccatgttgaagggtggtcttgagccagacttaacatggttaccgatcatatgtgccattcatctaagaccaaggtgaccacctggtatgggagggttcctccgtggtccatccctgagacccggggcaggatcgcagcctaggggcctcacgggccgcctgctaccctgt

SEQ ID NO: 12235 - DNA, 398 bp, Homo sapiens
  source 1..398: mol_type = other DNA
caacccccggcggctgtagacagggaagcttccagagcttctgagcctccagggccctcggtataaaagctctctgttgtgacaccagacactgatatgggatttctacatccaggtcaaacagaatctcctttttctactcacaaccatcctgggcagtattagacgaatttcagacacttccatctgagcctcgagtctcagcattctccattgcaccatgctgtgaatgcctcctgacctggcccagggcaggtgcagccaccacattaggtcagggcttggcttagctcagccctgggctcctccgagtcggtaggagcttggcatgagctcggagactccagctcacagagcctctggaagcacagaacagccaggaaggcttgcaggttctg

SEQ ID NO: 12236 - DNA, 440 bp, Homo sapiens
  source 1..440: mol_type = other DNA
cggctggagtgttctccctgaggccttctgcaccaggaccacgcccaggtccggagccggtcgctaagcttcacctgcgatgaaatctcatctgatcgtcacttctccaccccgggcccagagtggtgccaggtgagatggtctccagtggcgtggactccgaccccacccagatgaagtcaccagggttagtccccagagaggagcctgcaccagctcagagcctctggcccctggtcctggtgacttgatcgagcaccgggaccagtggtgcacggcctgccggtggaagaaggcctgccagcgctttctggactggttcctggccctgccggcagccactgacaagaggccataacacttaaagcaattttctcccattgtgcgaacattttattttttaaaaaaaagaaacaaaaatatttttccccctaaaatag

SEQ ID NO: 12237 - DNA, 457 bp, Homo sapiens
  source 1..457: mol_type = other DNA
gcggtgtcacactgtaaatcagattgccagtgatgccactgaggcagtgtgaggcggctccgtctaagtcccctgcaggagagcctcagagggggccaggtccagtggctcccctgtcctctctctcggctggagtgttctccctgaggccttctgcaccaggaccacgcccaggtccggagccggtcgctaagcttcacctgcgatgaaatctcatctgatcgtcacttctccaccccgggcccagagtggtgccaggtgagatggtctccagtggcgtggactccgaccccacccagatgaagtcaccagggttagtccccagagaggagcctgcaccagctcagagcctctggcccctggtcctggtgacttgatcgagcaccgggaccagtggtgcacggcctgccggtggaagaaggcctgccagcgctttctggactggttcctggccctg

SEQ ID NO: 12238 - DNA, 412 bp, Homo sapiens
  source 1..412: mol_type = other DNA
ggattgtgggcagactctgaacacttcgcctgctctctctctccggtgagtgtgcgggcagcacgcctcgtatggccgagggctctcccacacatcccagggctggaggccatcccttgggcacggggcacgtggccacaggtcggtgatctggccatagcccctcgcggaggtgagcaagcaggtttcttgccaagaaaatcaccaggcgaggctggggtcagttgccccatcagctcggccactgggcggtgtcacactgtaaatcagattgccagtgatgccactgaggcagtgtgaggcggctccgtctaagtcccctgcaggagagcctcagagggggccaggtccagtggctcccctgtcctctctctcggctggagtgttctccctgaggccttctgcaccagga

SEQ ID NO: 12239 - DNA, 666 bp, Homo sapiens
  source 1..666: mol_type = other DNA
aaggaattactacctttggagtcattaaattcgcttgaatagaaatattgatgcccacacatatatagacacggggccccctcactaccgttgtggcgctggtcttatctctgaaaaacacagaacaacacaatcttgtaaggattgaaggctaacagttaactttctcccatttaatgggaaggcgctttccagcctcctcccactagcgcgggcatgggcgcttggggcggctggggctgcgccgcctgggtcccccaggccccagccgagctcccgtccgcggcgccccagctgtctggctcccttcccgccctgggtcgagcccggcccctctcggaggagcctgtcccagaggcaggcctttggctcggtgcgaaaagccaagcctcaagtttggctccgggctgcagctgccgactcggtcaggttcaagtgcgcatgtgcgcgaggagtcgctcgggcacttattgagcgccgactgtctacgggcggccgggggtgtgtagcccaggcgcgctgggggcgtgcggcgggcgggtgtgtcccgagtgtcgccgctgggcgccggctggcaggggctggcgtgctgctccgctcccttcccgggcgggaatccgggccgggttgtggccgcggccgcgtacgtgagcgcgggaggagggc

SEQ ID NO: 12240 - DNA, 543 bp, Homo sapiens
  source 1..543: mol_type = other DNA
taatacttatttgctatgagctagacacacttatctatgttattccatcgtcaggactgcaagccggtttgtgaaaaattcaaacattatgtccaacacagattttaaaaccttttttgggggaaaggaattactacctttggagtcattaaattcgcttgaatagaaatattgatgcccacacatatatagacacggggccccctcactaccgttgtggcgctggtcttatctctgaaaaacacagaacaacacaatcttgtaaggattgaaggctaacagttaactttctcccatttaatgggaaggcgctttccagcctcctcccactagcgcgggcatgggcgcttggggcggctggggctgcgccgcctgggtcccccaggccccagccgagctcccgtccgcggcgccccagctgtctggctcccttcccgccctgggtcgagcccggcccctctcggaggagcctgtcccagaggcaggcctttggctcggtgcgaaaagccaagcctcaagtttggctccgggctgcagctgccg

SEQ ID NO: 12241 - DNA, 361 bp, Homo sapiens
  source 1..361: mol_type = other DNA
gactccagtcacgcactaagctgatctgagtctgtactctaggcgtctgccgtaaaccgtggagccaggctcagttgcggtgccttcctcacgtaacttggtaaaccaaagtgcacgtgtcctttgactctacagtctttccctggaactaatatatgaatgtgcgagagaaaaatttgttttctgctatgtcatagctgggagctgccagcagccatgttcccaatgtttaaacccagggtcgtgctgtgccagttatactcctgagtttcccagttaaggaagctaacaagttcattttttttgcttaagctagcatgaggcctgactaataagtttggcacggtggtatttatttaaa

SEQ ID NO: 12242 - DNA, 237 bp, Homo sapiens
  source 1..237: mol_type = other DNA
gcattcttatttattttgagaaaaaaagatagtaaggaaagtctctttttgctgttgttattgaccaaaggacctctgttccggtcaataaatttaatgaattggacgggattctaagagttcctaaatttagtcagtcagcctgaattctataatccaataaattgaaatttgcattgaagcaactcttaaaacctggcacagtggagcctgcatttcgcagctccggagtgacca

SEQ ID NO: 12243 - DNA, 506 bp, Homo sapiens
  source 1..506: mol_type = other DNA
caccactgtaaacatttttaagtgtacaattctaatagtccattcacatctatgtgctaccaggccctgttgtaaaacgctgcatggctttaggtaaatcatagattatctttaagaattctttcagctctaaagcagcttatgtagaacctaaggtcttggccaagaggctcgcgtggagctctgcagcaggccagagctcctgcggggatctgcctcttgagcaccccaaatccccaggtccggaggtcggcacctctggttctcagaccaggtgtaggtggtcctgcaatcacacctccgcgctgtgtcatcaggggacggagtgcattgcgatgcatctcagatgagcgcctccgaggcgcgccgggccaggcccgcaagcccaggatccggcagggagctttcggccgagcgtactcagtgcgcctgccccgtgcgtgcgcgcgcgctcgtgagctcgctctccgggccgcgcgccccggtgctcgcgaaagctcgctgtc

SEQ ID NO: 12244 - DNA, 566 bp, Homo sapiens
  source 1..566: mol_type = other DNA
tgcaaacttgctggagcactgggcctgggctccatggggtgcgcagggccaggagccagctctacccggcttctccaggtcctgtggggttccctggcgaggaaaccctggagtaaaaatacgttaagacaaatttgatcgtagctcatactgcagttacaggttttaaaagctggtttctaagcaggtgaccaggtagggtgcttgctcccacccccactgtggaaaacgtgcacttctagattaacctgttgtttttgcaaagccccaggattttcctaagtcaaagggcttcaaaactgcaggcagttgccgcgcacggcgcccgtccttggaggccttttctctgagaatggagttttagattctttcccggggccggcgcccctgcggaagcggcggtggctcgggagtcagacccggttcccacgccgccgggagcatcctccccgccatctgcggtcgggtcttctcgacagggcccggcggcctttgcaggacgcgagttggggggctccgaaggcggccggcgcgcccccccgcgcctcccacaatccccggcgccc

SEQ ID NO: 12245 - DNA, 666 bp, Homo sapiens
  source 1..666: mol_type = other DNA
gcagggccaggagccagctctacccggcttctccaggtcctgtggggttccctggcgaggaaaccctggagtaaaaatacgttaagacaaatttgatcgtagctcatactgcagttacaggttttaaaagctggtttctaagcaggtgaccaggtagggtgcttgctcccacccccactgtggaaaacgtgcacttctagattaacctgttgtttttgcaaagccccaggattttcctaagtcaaagggcttcaaaactgcaggcagttgccgcgcacggcgcccgtccttggaggccttttctctgagaatggagttttagattctttcccggggccggcgcccctgcggaagcggcggtggctcgggagtcagacccggttcccacgccgccgggagcatcctccccgccatctgcggtcgggtcttctcgacagggcccggcggcctttgcaggacgcgagttggggggctccgaaggcggccggcgcgcccccccgcgcctcccacaatccccggcgcccggccccgcgcccctgacccgggtgtcaccgcggagctgcgggaggcctcggcggtcttcggacgcggtcgggaaagtggcgagcgcgcgcccgcgtccgcgcccccgctcgcgaacgccggcttcggccatttccggcgcgg

SEQ ID NO: 12246 - DNA, 368 bp, Homo sapiens
  source 1..368: mol_type = other DNA
gcagtcgacgcctttccaggaccccgcgtctgggtcacccactcggaagtccaaaaaaattgttttaagtgaccctccccaacgtcccagtacgaagggctgagcttccgcgtggggcgcccgtcgggagaggagaagggggaggggaggcccctatctcccagtctcccctgactgtctttgtctggctgacaaccgccatattgatatcaacagcccctctcccacctgctgccgccgggcgtccctgggacacttccggcaagccccgtgcccatccgccttccctttgggaggagggaaaggggagtcggagccgcatcccaccatgggccccaggcccgtaaggaagacatgatatcatgctg

SEQ ID NO: 12247 - DNA, 367 bp, Homo sapiens
  source 1..367: mol_type = other DNA
gcccgcccctcagcccaggcccagagcgagcgaggactcgcgctgtgggggcagtcgacgcctttccaggacccccgcgtctgggtcacccactcggaagtccaaaaaaattgttttaagtgaccctccccaacgtcccagtacgaagggctgagcttccgcgtggggcgcccgtcgggagaggagaagggggaggggaggcccctatctcccagtctcccctgactgtctttgtctggctgacaaccgccatattgatatcaacagcccctctcccacctgctgccgccgggcgtccctgggacacttccggcaagccccgtgcccatccgccttccctttgggaggagggaaaggggagtcggag

SEQ ID NO: 12248 - DNA, 269 bp, Homo sapiens
  source 1..269: mol_type = other DNA
tgtctgcttaaatctagccagtctcaacaacaggattgttaacagcctatgcgaaggactgtgacagtcaacaagaggtccaaaaggttatagcatcacctttgccctctgacggtggttcaatagcagtcactgcagcatgatatcatgtcttccttacgggcctggggcccatggtgggatgcggctccgactcccctttccctcctcccaaagggaaggcggatgggcacggggcttgccggaagtgtcccagggacgcccggcgg

SEQ ID NO: 12249 - DNA, 460 bp, Homo sapiens
  source 1..460: mol_type = other DNA
tcagcatcctaaaatgctgggattccaggtgtgagcccctgcacctggccacaaatctgatttttatgtgttggccaacactgttgggccaaacagaacatgtttgcgtgctggctctggcacccaggccacctgttagaatgtctgccagggctggcctcattcattaattcatgcaattaatgttttaaaggctaggttacacatatgttaatcttatttaaaaatgtacctattttactaggtattagtatcatatccacttttcatattagtggcaacttgtcgtgaaggacgagctgtgtaatttacaaaagccgtcattggcccccgccttcgctgcggccccgcccacgacgcatacagcggggagcgcccggagctcgcgccggccccgcccccagcccggtccccacccccggctccgcccccggccccctcccgccgggtcaaccccgaa

SEQ ID NO: 12250 - DNA, 421 bp, Homo sapiens
  source 1..421: mol_type = other DNA
cgggttctccgcccgtttattgacattaacggtcctagcctcgagccgggaacagtttccaagtaccacggggcccttgccagtttcactgaagcacacactgtgtagcaagctcagcttggaaggtggccaatccccgtcccgggctagatccaggctctgggagcgggaggcccgggcggaaccggtcctctagcgccctggcgaaactctcggcggcgagaccgagtccctggagggacctggcgcccgccacacctgcagggcagggtgggtccgcggccctcgggctagggagcgggcagggcgcgtggggtccgggcgccccccgccgcgctgcgcctccgcctcccgccgccgcattccgcgcattcttccgcgcgggtagggtctgcgcttccgagcccggtaggcagttcag

SEQ ID NO: 12251 - DNA, 564 bp, Homo sapiens
  source 1..564: mol_type = other DNA
gctgggtgggcagcagcgctccggtcccctcctgtcacgcgggttggcgccgcccgcctagcggcggggtgcagcggcggcacaggtgccggtgtcgggctggaggcgcggcgcaggctgggcccgcgggtagacggcgaaaggcgccgcgcgctccattcacaaagtccgggcgctgcccgccgctggcggcgggtcggaggccgcctccctcttcctctcggcctggcgagcacccggcgccacgtcgagttcccgtgaccgggagccagcggccgcgctccattcaagctccggggagggcgggggacagcgcggggggcgggggacggcgcggggcccggaatggaacggggcggggcctggcggggtagtacctagcgccccctcccccgggagcgcggaggagcattaattgcgctgagcgccggaggagcgtaggcagggcagcgctggcgccagtggcgacaggagccgcgcgagcgcctccccctccgctctgcgcgccgcccggctgggcgcccgaggccgctccgactgctagaggctctcccgcgggagccc

SEQ ID NO: 12252 - DNA, 535 bp, Homo sapiens
  source 1..535: mol_type = other DNA
aaccttgtttttcccccgaccagggttaaataaacatcttttaggacaggagcgcagcctgctctccttcttggggaagctataaaactgatttaatggctttagatgaaagcgccccgctgggtgggcagcagcgctccggtcccctctctgtcacgcgggttggcgccgcccgcctagcggcggggtgcagcggcggcacaggtgccggtgtcgggctggaggcgcggcgcaggctgggcccgcgggtagacggcgaaaggcgccgcgcgctccattcacaaagtccgggcgctgcccgccgctggcggcgggtcggaggccgcctccctcttcctctcggcctggcgagcacccggcgccacgtcgagttcccgtgaccgggagccagcggccgcgctccattcaagctccggggagggcgggggacagcgcggggggcgggggacggcgcggggcccggaatggaacggggcggggcctggcggggtagtacctagcgccccctcccccgggagcgcggaggagcattaat

SEQ ID NO: 12253 - DNA, 466 bp, Homo sapiens
  source 1..466: mol_type = other DNA
gcatgtaagaataggctattatagaaataaacctgttgcttaaattcgacaatgtgctttccatgccatctttacttcgcaaagcaaaaatgatgttgttttcatttttttttttttttacagaattccaaagtaacagcaatttattacatggaaaaagtcaaaatctgtatctaagtatatagacatatacgtattaattgcacggaatattactgatcccatgaaaattctttagacaattttaatactgtactgacataaaagaaaaaaaaaccgagaaaattattttttaaattcttctctacgtaatcccagcactgaggtcgagaccagcctggcagtgagccgagatcacgtcattgcagtgcggccgggttctgctaacagacctgcgaggtctgcagccctgtccgctaagggtgactcagagactgccagtggcaggcaacggccggcgatagca

SEQ ID NO: 12254 - DNA, 438 bp, Homo sapiens
  source 1..438: mol_type = other DNA
aacagtgcctggtgcgtattaggtattcaacatatattcattgaatgaatgaatgaatgaatgaatgaatgaatgaatgaagagaactgttttctctcgcaaggaaccatgtaaaggttctgagccttgaaaccagacaatgttaccaagcgctatgctaagtgctgaacacatagagctgaataaagcacaattattgaggttttaataatacataatttgactacgctgcgcgctgccctcgccccgcccgcgggcgcggcggcgacaggccctcggccccgcccacaccgcggcgccacgcggccccgcccacaccgcctcgccccgccccaagccgcgctgtgctccaggggcgggggcccacggcggccactcactgagccccacgggccgcagcggcagtgacgtagggttggcgcacggatccgttgcggc

SEQ ID NO: 12255 - DNA, 366 bp, Homo sapiens
  source 1..366: mol_type = other DNA
cgagcgcgttcccaggagctgctggttctgtcccgctctctcagctaagagcgagtcaatcaagggtatcaagctgtaatcccagcgcttgagccctggagatcgaggctgcagtagccgtgcccgcgaccccttcccaacgcacgcgggaggttgcgggatcagggacaggggcttcagcagggagcccccagaccggccctgacaggaattcaagacctggcgcctgctcattcccccagtcggggcggcggcggcaagcctcggccggcggcgatctgcacacccgcggagaagagaggcagggggtcgaccccacagcccagcccggcgcgtcccccgcgcccccgcgcgagcccgagtcgc

SEQ ID NO: 12256 - DNA, 303 bp, Homo sapiens
  source 1..303: mol_type = other DNA
ctcaaaatcttttaaacaaatatttactgggtatatagtatgtattcagcagttaatcaacaaaacaaagtctttcccttgtagagctcatgccctcctccctatagccccagcttctcaggaggctgaggttgtgccactgcactccagcctgggtgacagagccaaaaagaacctgcttccctgtccacagagttgtctgtccacagttgggaaatgagatttttcattaacttagtgaagaaaatcttccaaaagcaatgtttttacaaaatgtgttttggtttccatagatcagaaagc

SEQ ID NO: 12257 - DNA, 378 bp, Homo sapiens
  source 1..378: mol_type = other DNA
cgagcgcgttcccaggagctgctggttctgtcccgctctctcagctaagagcgagtcaatcaagggtatcaagctgtaatcccagcgcttgagccctggagatcgaggctgcagtagccgtgcccgcgaccccttcccaacgcacgcgggaggttgcgggatcagggacaggggcttcagcagggagcccccagaccggccctgacaggaattcaagacctggcgcctgctcattcccccagtcggggcggcggcggcaagcctcggccggcggcgatctgcacacccgcggagaagagaggcagggggtcgaccccacagcccagcccggcgcgtcccccgcgcccccgcgcgagcccgagtcgccggcggaagtgc

SEQ ID NO: 12258 - DNA, 143 bp, Homo sapiens
  source 1..143: mol_type = other DNA
caggtgtgaaaacctataggtgtaattacgcctacgcgagcggagtgcggtggcatcctcacagctcgctgcagctagcccagtcaatggctgtccgcgggcggccccgcaccgctcagtcctgtgcgcccagacgcgacgca

SEQ ID NO: 12259 - DNA, 392 bp, Homo sapiens
  source 1..392: mol_type = other DNA
tatatggagttccacatttatacctttgtagcagtcaaatctaagagtttaacacggtggctccacgttgtaatcccatcagtttgagctcgagctcagcctgagcaacaaagtgagaccctcatttttctaaaaaaaaaaaaaagtattggaaacgctttctaaggccctggaaaaatagaagttttcttaataataatgttagcttccatgtattgtaaacctaaacgaagcaagaataaatgctgggtgctgtatatagctctatcaacctataatctaaggaatattcactttgccaacaaatatttattgagtgataccccttagcccgtttaaatagccgtgggattaaaaagataaatagggcaggatttttttttttcttccag

SEQ ID NO: 12260 - DNA, 537 bp, Homo sapiens
  source 1..537: mol_type = other DNA
taaggaatattcactttgccaacaaatatttattgagtgataccccttagcccgtttaaatagccgtgggattaaaaagataaatagggcaggatttttttttttcttccagcccagaacagtctggagcggggaaggctccgggcgcgtcgcaggacccgcgctggagatgggtttgaagccctgtcctgaaaaagccggcccggagtgggctgaagcagcagaggaagaatcccaggtcccggtccaggccccggcggggcagggtccccgaagtcccggggcgcgcagacgccggggcccccgggggccaagggaacggcgggacccgacctccctgccctcggcctcccgggccctcgccctccgaccagccgctgagtcgggggctggggtcgccgcttccgcccgcggcccgctgcccctccccggcgcgcgccatccggccgccggcccctcctcccgcggggggctccgtcccgcgccccgtccctccgggctgcagccggcagcccacgtccagggagggcggaggct

SEQ ID NO: 12261 - DNA, 530 bp, Homo sapiens
  source 1..530: mol_type = other DNA
agcggggaaggctccgggcgcgtcgcaggacccgcgctggagatgggtttgaagccctgtcctgaaaaagccggcccggagtgggctgaagcagcagaggaagaatcccaggtcccggtccaggccccggcggggcagggtccccgaagtcccggggcgcgcagacgccggggcccccgggggccaagggaacggcgggacccgacctccctgccctcggcctcccgggccctcgccctccgaccagccgctgagtcgggggctggggtcgccgcttccgcccgcggcccgctgcccctccccggcgcgcgccatccggccgccggcccctcctcccgcggggggctccgtcccgcgccccgtccctccgggctgcagccggcagcccacgtccagggagggcggaggctgcttccatccccgactcagcggctctcgggtcccagcgtcccagccgcggcccgcgctcctccgcctgggacgcgcctcccggggcccgattgtctcggtgccccgctcccggcccgcgc

SEQ ID NO: 12262 - DNA, 389 bp, Homo sapiens
  source 1..389: mol_type = other DNA
ggctgtgctccacatcagagcaagtcatttattaattagatcccagctactccggaggctggagatcgcgccactgccctcccccagcttttaataaagtgtctataaagaaagctgccttcatggaggccccaggacgccagagcgggatagttccgctcccgcggcaccagaggcggggcacgcaatgacgcatgcgctcgcttggctgccctggcgccgcggtggctgccgggactgagctcctagcacccgatcgggaagtggcgggcggagtcccgggtccagtcgccgcctcagctaccgccgctgccgccgccgccgccgccaccgccagtggtgagaccccgacctggcgggtcagcgctgggcgtgcgtgcgggcaggcg

SEQ ID NO: 12263 - DNA, 265 bp, Homo sapiens
  source 1..265: mol_type = other DNA
acagccacagaatggctgagcactggctgtactgccgaaattatttggctgtgctccacatcagagcaagtcatttattaattagatcccagctactccggaggctggagatcgcgccactgccctcccccagcttttaataaagtgtctataaagaaagctgccttcatggaggccccaggacgccagagcgggatagttccgctcccgcggcaccagaggcggggcacgcaatgacgcatgcgctcgcttggctgccctggcg

SEQ ID NO: 12264 - DNA, 567 bp, Homo sapiens
  source 1..567: mol_type = other DNA
gcagcgagctgagatggcgccactgctctccagcctggaaaaaaaaaaataataatataataataatgataataataataaagattctaggttccatttagggttataaaatagaactaaagatgctgaaaactaatatagcttgttccataaatattgtattaaaaagctaatatcttcattaagtagattaatttcagattttggaatatttgcatatatataatgagatattttgcagatgcgacgaaacagaattcatttgttttacatacaccttatacacatagttggtaggtaactttatacgatattttaaatgtgtcacatgaggtcaggtgtggggcatcatggtgctccaacattttggattttggattttgaatttctggattagggatgctcaacctgtaatagaatgtataggattctcataagccaatcattttgaactatctagatagtggaacaatttagctatgttaaaacagacagtaagataaacactgattttaaaatattcatcgactttttgaatataaggaagattccaaattagattataac

SEQ ID NO: 12265 - DNA, 552 bp, Homo sapiens
  source 1..552: mol_type = other DNA
gataacaccaatagttttggtcaggggttaataatattattattatcttagccaccagggccaggtggctcccttttctcctgtcttataaactagggaaaaggggaggacctcataccataatcctagcattttgtatttctaaaaaaattaaataaataaataaataaattagctgggcgctgtggcgggcacctgtagttcccagctaccgggctgcagtgagcagagatcgcatcactgcacccctgcctgggggagagtgagacccagccgtgccactggcaactccccagggggccagctcgggacgcggcaggcgccgctcgggatccaggggccggggtgagaacggaggcggagaaacccctcaggctccgccaccggggcggggaactgggaggcggccccgcctctgggcatcctcctgggtcttgcctagcggcgggcgcatgcttagtcaccgtgaggctgcgcttgcccggggcccgcgcccccctaccccggggaccgcccccgggccgcccgccccacttggcgcgccacttccgc

SEQ ID NO: 12266 - DNA, 464 bp, Homo sapiens
  source 1..464: mol_type = other DNA
aaaaagttttacagtgctttctcatacaatgtctggaatttacagataacaccaatagttttggtcaggggttaataatattattattatcttagccaccagggccaggtggctcccttttctcctgtcttataaactagggaaaaggggaggacctcataccataatcctagcattttgtatttctaaaaaaattaaataaataaataaataaattagctgggcgctgtggcgggcacctgtagttcccagctaccgggctgcagtgagcagagatcgcatcactgcacccctgcctgggggagagtgagacccagccgtgccactggcaactccccagggggccagctcgggacgcggcaggcgccgctcgggatccaggggccggggtgagaacggaggcggagaaacccctcaggctccgccaccggggcggggaactgggaggcggccccgcctctggg

SEQ ID NO: 12267 - DNA, 198 bp, Homo sapiens
  source 1..198: mol_type = other DNA
ggctgggctggtctgctggccaggaaagataatttccaagtacgaaatgttgacggcaatgaggtcatgggaaggccggggggcccaggctgcctcgaaggggcagcccctgccctgctaccctccagggagccaccgctctagagcccagggccggcccgcggcaagaagagttccacttccttcccggaaaacgcg

SEQ ID NO: 12268 - DNA, 586 bp, Homo sapiens
  source 1..586: mol_type = other DNA
gcctggaatgtcccttcagggaactcaagatttctgttctgtctctcaataaatatttgttgaatgaacaaatcattaagattatcctacagaacaatcatttcacttttctaatgtcgaaaggggctggaaataattaatttactccatcaatattgatccctgtccagagcgctgcaaagtggaaaagagggaccctggcctcctcggaccgtttctccgccagccacgcgagggtcctagggcgccgtgtcccggcggcgccgcctgctcgccttttcccggcggaaatgcccgagcgagaggcgggcctgaagcggcagcgggcggccttcgtccggcgagagctaggccgaggacccgcgccgcgctccccggcacctcaccgcgtccttcaccgactcccgcggcgcgcggccgggcggggaagggcgggcgggggtctcctccaggctgcgcgctcggagccgcctgctgggcttgggcggggcgcggggcccgcggccgccctacccggctcagtcctccccctgtgggacctggcgacggcggcggagggagaggggagcggcgcccgggccggggc

SEQ ID NO: 12269 - DNA, 417 bp, Homo sapiens
  source 1..417: mol_type = other DNA
ttttctgactttgtgaattcttccaggctcctcaggaagaaattaagggacatatgtcgtctttagtttctatacttatcaggttgctcattgacttattgaggaagttaggtgcctggaatgtcccttcagggaactcaagattttcctgttctgtctctcaataaatatttgttgaatgaacaaatcattaagattatcctacagaacaatcatttcacttttctaatgtcgaaaggggctggaaataattaatttactccatcaatattgatccctgtccagagcgctgcaaagtggaaaagagggaccctggcctcctcggaccgtttctccgccagccacgcgagggtcctagggcgccgtgtcccggcggcgccgcctgctcgccttttcccggcggaaatgcccgagcga

SEQ ID NO: 12270 - DNA, 531 bp, Homo sapiens
  source 1..531: mol_type = other DNA
ctctaactccttttgaattaaattagaaagccatgacaaaacgcactccgtgtacacggagtaggcactgaacacacagtttgcaggagtccgttcctgcgcgggccccacctacggcttccacgtgcagggcctctggctccgcccccggcgcagtgcgcaagcgccgctgctttccgagctgcctgctcactgtgcgcacctcgctggcttcccgattaaatttatttttaaaaataataaattttttaaaaatgttaattatcattgattcatctggggccaaaggtgggcctccgagggccagggcaggctgagccccacggagctggccctgcgttgtttgcagctgaggagaaactcgctgctctgaggcagcgagaggagagagcgccacaacttggtggtggcctccgcctcgccctggctccctggaggaggcagcgcggagcagccgcgttgcgcagggcgcgtggggatcttcggcgtggggatatccgcgggggcggggagggggcgggagccccgccg

SEQ ID NO: 12271 - DNA, 344 bp, Homo sapiens
  source 1..344: mol_type = other DNA
tccccaaggcaactgggaaatgagtcctgggcagctgaagtaaacactttaaattataattttgtgcccctaagaattatattaccctcttcaatagggagtagtatttttcatgtagtggctcaatttctgccataataaaggccgtccgagagacgcctttcccagctgctccagaggggaaaggaaaagggagaaagtctgtttttccagaatctcagcccaggggcctgctccgcgggcctatccaacaggtcttcttcagccggatgactgtggagcgccaccacaagcagggcctgcaacccaggcatgccgagtacaagccggcgcctccccggcgc

SEQ ID NO: 12272 - DNA, 483 bp, Homo sapiens
  source 1..483: mol_type = other DNA
gaacaaaaagatctttgtagcttatcatctgtttttatgttttatataaaaatctaaagcttctatgacatactttcaagaaactgagatattatgaagttagagtactttaaaattcttcagttctcacagttgaataacaactttaactgttttatgaggtcactgaatatatttttcactataaaagaacatgagagaaaatatttaccttgaaatgctaaaaatgtgttccctttctgtggaatggcatttgttgaaagttcaggtggcacaataccaggtggaggttaaatacctacatagaaaacccattagttgacaaagtgccataaactttgtacaaaatggcctcgttcagcaaatattttattcaaactatgccatctgaagtgcacactgtgtgtgcgcgctgcaaggagagagagcgtagacgcccggggtccggcgcctgggcatcctgcgccggctacaggtcactga

SEQ ID NO: 12273 - DNA, 643 bp, Homo sapiens
  source 1..643: mol_type = other DNA
tcggcctgaccgccccgccgccgcccgcgacccccacgccgggcccggctcccccggcgccgcagcgcggggctccagccactgccggccggttggcggccgccgctccggctctgcccgcgctccccgcatccctccgccgcccccggggccgctcccgcacgccgccgccgcccgtcccgcgctccgcggccccaggtctccagccggcgggaccgccgccgccgatgcccttcacgaccaccgccgccgccaccgccagctctcggcccctctgctgcagccgccgcagccgccgccccccgcctcctcccccgccgccgccgctcgcactgccccccgccggagcagccgggcaggggcatcgcccgcggcgcccaccgcagccgcccctcctgcggccgctgcgggggccgccgcctgacttcggacaccggccccgcacccgccaggaggggagggaaggggaggcggggagagcgacggcggggggcgggcggtggaccccgcctcccccggcacagcctgctgaggggaagagggggtctccgctcttccccggcgctgcccagccgaggtgctcagcggcagcgagggcctccacgcatgcgcaccgcggcgcgctgggcggggctggatgggc

SEQ ID NO: 12274 - DNA, 475 bp, Homo sapiens
  source 1..475: mol_type = other DNA
cacaataccaggtggaggttaaatacctacatagaaaacccattagttgacaaagtgccataaactttgtacaaaatggcctcgttcagcaaatattttattcaaactatgccatctgaagtgcacactgtgtgtgcgcgctgcaaggagagagagcgtagacgcccggggtccggcgcctgggcatcctgcgccggctacaggtcactgaagcgtcacctctcactccccagtaagcctccgcagcccactcggactgcagcctgtttgccgcccgtcctcccattgcagcactcggggcgacagacggggacggggacgcccaggaggacccactcgcgggtcccgctccgctccggcagcagcatggggagctggcgaggcgcaggacgctgtcgccgccgcggccacccagcgcgcagccccagcagccgcgcggagcagctcctccacctccgtcctcctccggtgacag

SEQ ID NO: 12275 - DNA, 420 bp, Homo sapiens
  source 1..420: mol_type = other DNA
catctgaagtgcacactgtgtgtgcgcgctgcaaggagagagagcgtagacgcccggggtccggcgcctgggcatcctgcgccggctacaggtcactgaagcgtcacctctcactccccagtaagcctccgcagcccactcggactgcagcctgtttgccgcccgtcctcccattgcagcactcggggcgacagacggggacggggacgcccaggaggacccactcgcgggtcccgctccgctccggcagcagcatggggagctggcgaggcgcaggacgctgtcgccgccgcggccacccagcgcgcagccccagcagccgcgcggagcagctcctccacctccgtcctcctccggtgacagcagccccgacagcagggctcgggcgcggcggcggcgcggggggtggggggacctgtc

SEQ ID NO: 12276 - DNA, 518 bp, Homo sapiens
  source 1..518: mol_type = other DNA
tcagcggctgcagtaattttaattattctgttttatcagttcctctgaaaattaagttgtagtaaccccttagaagaggccaggttattttttaaggaaaaggttggaaggaagtacttaagtgagttacccagggttcctgaccacggagactctgcttggggcacaggtgtgggagtcgcaaacttttctctgcgcctccgcgtggaatgggacggagcagccctcccaggcgctgcctggctgcggaggggagcgggcagcgagagcctcgggtctccgcctgggttcccgggtctccggggcgctggcctcggtctccgcgcagcgtccagcgacccctgtcgggggttcccggcagccgcgccgccaccccccgcccggccagcgcgggaggaaaaggggctgcgcccgggagcgccgagcccaggctcctcccggtggcgtgtccgcgcctcggggtggggtgcgaaggaggcgcctgcctccaacctgcgggcgggaggtgggtggctgcg

SEQ ID NO: 12277 - DNA, 620 bp, Homo sapiens
  source 1..620: mol_type = other DNA
gttggaaggaagtacttaagtgagttacccagggttcctgaccacggagactctgcttggggcacaggtgtgggagtcgcaaacttttctctgcgcctccgcgtggaatgggacggagcagccctcccaggcgctgcctggctgcggaggggagcgggcagcgagagcctcgggtctccgcctgggttcccgggtctccggggcgctggcctcggtctccgcgcagcgtccagcgacccctgtcgggggttcccggcagccgcgccgccaccccccgcccggccagcgcgggaggaaaaggggctgcgcccgggagcgccgagcccaggctcctcccggtggcgtgtccgcgcctcggggtggggtgcgaaggaggcgcctgcctccaacctgcgggcgggaggtgggtggctgcggagttccccgaaacttgttggaactccgggctcgcgcggaggccaggagctgagcggcggcggctgccggactgagcaggacggtgataacctctccccgatcgggttgcgagggcgccgggcagaggccaggacgcgagccgccagcggtgggacccatcgacgacttcccggggcgacaggagcagccccgagagccagggc

SEQ ID NO: 12278 - DNA, 262 bp, Homo sapiens
  source 1..262: mol_type = other DNA
tattccttctaattggataaaataggctggggatactgattttactcagaccagcctgcagctctagggcagggcggggaagggagtgaccgcccctcctggctgcataacacaacaggatgctgttgctattgtcactactgcctctcctgccgccgctgctgctgccgccgccgccaccgccgctggtccggctactggtttacttaattaatcagccggcagcgggcagcttaaagaattattacgatatactttgatt

SEQ ID NO: 12279 - DNA, 733 bp, Homo sapiens
  source 1..733: mol_type = other DNA
tacttaagtgagttacccagggttcctgaccacggagactctgcttggggcacaggtgtgggagtcgcaaacttttctctgcgcctccgcgtggaatgggacggagcagccctcccaggcgctgcctggctgcggaggggagcgggcagcgagagcctcgggtctccgcctgggttcccgggtctccggggcgctggcctcggtctccgcgcagcgtccagcgacccctgtcgggggttcccggcagccgcgccgccaccccccgcccggccagcgcgggaggaaaaggggctgcgcccgggagcgccgagcccaggctcctcccggtggcgtgtccgcgcctcggggtggggtgcgaaggaggcgcctgcctccaacctgcgggcgggaggtgggtggctgcggagttccccgaaacttgttggaactccgggctcgcgcggaggccaggagctgagcggcggcggctgccggactgagcaggacggtgataacctctccccgatcgggttgcgagggcgccgggcagaggccaggacgcgagccgccagcggtgggacccatcgacgacttcccggggcgacaggagcagccccgagagccagggcgagcgcccgttccaggtggccggaccgcccgccgcgtccgcgccgcgctccctgcaggcaacgggagacgcccccgcgcagcgcgagcgcctcagcgcggccgctcgctctccccctcgaggcgc

SEQ ID NO: 12280 - DNA, 421 bp, Homo sapiens
  source 1..421: mol_type = other DNA
tcccagtctggatgatgggaagtcatcctggtctctttcataaagacacagtacatttgtaaatttatatagactataaaggcacgaaattcacatatcttttcttgaataaatgactttgacctttttttttaaatttattttatttattttggagtgcagtaactgcagcccagtaggtgggacacactctgctaatccgccttacgcctctccttggagaagcggagagtttcccctgtcttaaagaagagggcccccgcagccttcccgagaactttccatagggccgtggcctcaggcatcagcagggggcggcccggtgttcttagaacccgggtcccaagagcttgtgaaccccggatccaggctggctccgccggaacgcgccccgagctcgcccgcgcggccgcctcttccg

SEQ ID NO: 12281 - DNA, 332 bp, Homo sapiens
  source 1..332: mol_type = other DNA
aaacacggaattcaagatgggccaggctggagggccacagcatgataagtagctgggattacaggcacctgctaccacgtggccaggctggtctggaactcgcccgcctaggccgcccaaagtgctgaggtacaggcgagagccaccgcgcccggcccggccgacagtctttcttctataatacgatacaaactagtaaagattttctttttcccctggcggaaaagagctgttgcaatgaggaagacacaggtgttttattattggaatgctctttcggaattcaagttctgagtttctaaagtcaggacccggtgccgcacccaacgtgg

SEQ ID NO: 12282 - DNA, 738 bp, Homo sapiens
  source 1..738: mol_type = other DNA
aagtagctgggattacaggcacctgctaccacgtggccaggctggtctggaactcgcccgcctaggccgcccaaagtgctgaggtacaggcgagagccaccgcgcccggcccggccgacagtctttcttctataatacgatacaaactagtaaagattttctttttcccctggcggaaaagagctgttgcaatgaggaagacacaggtgttttattattggaatgctctttcggaattcaagttctgagtttctaaagtcaggacccggtgccgcacccaacgtgggcgtggggggcagggccggggcctggctgcgagctggggccgggggactcggaggagcggggacccagccccgccgcgccgcctgcagctttccccagcctcctcccagcagaggggaggcccgacagggaggggtcccatcctcatgaaggcgctagggaagcacgcccgacccccgcggtccccgcgctccaggattcggcagactgcgcgcgtcctgcctcccgcggatcgcactgggtcccaacagggttcccagctccaggctgcgcccatgaacaagcccagcattgcggacgggcgcgcgcagacgccagcgtggtgaagacgcgggggcgcgcgcgcggcgacgagactgccaggggacgcttcgcaacaccgagagtctcagcgtttctcgagataggtgaggctgcgcgttccggaactggtttcccggaaggagcatgtct

SEQ ID NO: 12283 - DNA, 352 bp, Homo sapiens
  source 1..352: mol_type = other DNA
cattagcgctttatacaaaaattagctgggcctatcacactccagcctcatgaactacaaaaggatcatcttatagttgacattaaggagtgccaagtatgtgccactaatttacacatagggtgactaccgtatatacattcttcacgtataaaatcctggatattttcaaagtcccactgagattctgtgattattcttttgtttctaccttagcaaaggaaaacagaaacacaattagcgagcggattattatatatgcaaatttattctctatagttacgaccatacgtcgtgaaataagatttgcggcagtactggcggaagctagccttgcgttttgcggcagcaa

SEQ ID NO: 12284 - DNA, 310 bp, Homo sapiens
  source 1..310: mol_type = other DNA
ccatggctcatgccaatcccagcaatctgggagcgggtacctgtgtcccagttccttgggcccagaagttggaggctgcagtaagctattattgcaccgctgcactccagctgagtgacagagcaagactcagccttgatagaggcagactctgcctccaaatacataagtacagatcttcctttgccttggtgtccctgggcaaaaggcaggcccactccggggcatcgctcgagtttccccaggcctgggaagactatgggaggcgcgcgaagatcctcccggcttccagggaagggaggctgggcct

SEQ ID NO: 12285 - DNA, 464 bp, Homo sapiens
  source 1..464: mol_type = other DNA
tcccagctacttgtgcgccactgcactccagcctgggcgagtgaagttcactattggcttcctgaatgaaggaaatccatggtgccttcagccaggctgcattgtttgaacaagctcagctctgccagtgctgtgtgaccagggcagagtacctagcctctctgtgccgtaattatgtctccctcatagacttgtgggagtataaaatgccttaagctaaatgaagatgacacggtttcttgagaccgaggcatgtacaagccagtgcacagaatcgtgtctatttgttgcagctctgagaacacacgcatgcattccaggcggtgctgctggggctcggcggggccgtgtcggctcgtggggggttggctggggagcccacgctgcctggcgactcgggccaccgaatgtgagaccgagtccctttatgtcaccagcgcacacgctgatttgactgcttcgac

SEQ ID NO: 12286 - DNA, 352 bp, Homo sapiens
  source 1..352: mol_type = other DNA
actggggaaggtagcacagtccctgccttcacctgaggtcaggttcaagaccagcctggtcaacatgtcccagctacttgtgcgccactgcactccagcctgggcgagtgaagttcactattggcttcctgaatgaaggaaatccatggtgccttcagccaggctgcattgtttgaacaagctcagctctgccagtgctgtgtgaccagggcagagtacctagcctctctgtgccgtaattatgtctccctcatagacttgtgggagtataaaatgccttaagctaaatgaagatgacacggtttcttgagaccgaggcatgtacaagccagtgcacagaatcgtgtctatt

SEQ ID NO: 12287 - DNA, 485 bp, Homo sapiens
  source 1..485: mol_type = other DNA
tataactactactaatcaaaatatatattcaaaacaacttaaataggcaattccttgggctcagatttggggattccggagtgttcagattatacaagccttaatgcacccatgattcttctttatttatatgaatgaagttagcatagttgcagcaatggagtaactccattatgcaaccgagatgcccacatatctgtgcggcgttcgccccaagaggccagccggctccgctcagctccccgcggcgtggccgcatccccgccgcccgactcccagcccgcttcctctctccgcgagcgggggggggagctgcaggcggggcccgaagcgccccgggggcacgtggagcggcctctggctcacctgcgcctcccgggccccagcccagcgccgccgcgtcaccgcccctcccgcggccccgccccagcccggctcattggctgccgctcggaggggaggggaaggggcggtcattagcgatg

SEQ ID NO: 12288 - DNA, 510 bp, Homo sapiens
  source 1..510: mol_type = other DNA
acatatttgtattttctttgtgctagaaacattcaaatttttctcttctagctatttttaaatgtacaatagattatcataagctatagtcacttcactgatctatagaacattagatgttatttcttctatcaaaccaaatatttatatatctatcatctcacagagttaatcatcttttgtgtgcgtgtaacaagagcccttaaaatctactcttttagcaaaaatcctgaatacaaataattttattaattatgttctttgttcttattcattctgcatatctgctcctttgtataaaggataaacaaaaactttaaagtacttctagttgatttgaaattatttgactgcattaactgaactgataaccagctgatcattgtttcttcaaggcatagagaaagtcgtaacaatccgatctagaattatgatttttttgactattttcacaacccatgagctggcaccgggggattggcagacccttgttcctgactgcgtcatcaa

SEQ ID NO: 12289 - DNA, 606 bp, Homo sapiens
  source 1..606: mol_type = other DNA
tggggaaagcaagtgctttttcccccggagagagagagatccccctccagggacacccgcctcgcccgtgatctcggtcgtgaggaacttcaccgcagggcgcaggcacagcgcgcacagcctggggtcccgcgcttggtcgccgaccatgtcacgccgcgtcccgagaacagtgggtgcctccgaggctcgggcgcttccaagtgaagagccggagcagctctggagaaggacccgggctcccgaggcgaggcctgcccccaggcggcctctgggagaggcttgaactccagcgtcccagagcccgcgccgtgcgaggacacacacggcgggcggggttacagcccccgccagcatcaccccccacccacccagtggtgagaagggaggcgcagagctcagggtcccggagaagtcccgtcccaggcgggggaccccagggcgaggaaggccccgggagcggccgagaccgaggcagcggcggcgcgcggcgcggcccctttaaggctctccccgcccaccgatggagccggcctcagcccgccgctctccccgccccggggtcccggcgagagctgcgattgggcgggcgcggcgatccctttg

SEQ ID NO: 12290 - DNA, 301 bp, Homo sapiens
  source 1..301: mol_type = other DNA
aggaaacacaaaggaaactttccttggcttttatcattaaaattagaataataattccttgttaatatactttgctaatctgtacattgaaaagactgtttcatttcagctgtgctataggaaagcaaacagttgaccctgtctttactaaaaaactcagcagttcgccctgggtctcagtactccggggcatgcgcgtcctgccgctcgctctcggggagcaccaagtcgcgggcgatccctggcggccagctacggccattgaccgctgggagcgcgaggggcggggcgcagagcgagc

SEQ ID NO: 12291 - DNA, 346 bp, Homo sapiens
  source 1..346: mol_type = other DNA
attaaaattagaataataattccttgttaatatactttgctaatctgtacattgaaaagactgtttcatttcagctgtgctataggaaagcaaacagttgaccctgtctttactaaaaaactcagcagttcgccctgggtctcagtactccggggcatgcgcgtcctgccgctcgctctcggggagcaccaagtcgcgggcgatccctggcggccagctacggccattgaccgctgggagcgcgaggggcggggcgcagagcgagccggacgagtacggagcgcctgcagggacagcctggtacgcggcccccgccccttcgtgcgcgcgctgggcctagctgccg

SEQ ID NO: 12292 - DNA, 458 bp, Homo sapiens
  source 1..458: mol_type = other DNA
cccagctactggggaggcgtgagcccagatcgggccaccgcactccagcctggagagcgagactgtctcaataataataatagtaataatcatgctgcctgtgtcccctgatgagacagcactggccgcaggtggctcagaaacacatacgattttcaaaagaattaaaatatcgcatttagtttttctattgattgcatgttgaaatcttactttggatatattggattaaataaagtatatcattaaaatttttaagcttatgtgcctatgagaaacttccaaattacaaaaagaagaaagaagagtttcctttcgtatcgcttggtccccgcgcccagaaagccgggcctcacaaaagtggtgacctccccaagatggccgccgcctgggggcgggcctccacgctgcacgggagacgactcaatgatgagcaatgattggtgagccacgggctg

SEQ ID NO: 12293 - DNA, 412 bp, Homo sapiens
  source 1..412: mol_type = other DNA
catctataaactgggggcagagccgagtctggaataggggtctccagactcactgcgcagcccagtctagcctctagccttgtcatgcaccccccgctgagcgaggtcaccgcagcggaggagggtctgctgcctccttgtctcggctgccatcctcctgcggctgcctccaccggagctggaaggagagtgagagccgacttccagactgaagcccgcgggtccaggagggccccagcagcctggagacgcaagtcctggcccggggcgcggggggcgggcgcggggacgcagggtcctcgaaccagctggcccgcccccactcggcagagggtctaggcctggccgcgtgtcggtcggcgctagggccccgcggaaggcccgggcgggcggggaccggcggcgggagcgg

SEQ ID NO: 12294 - DNA, 657 bp, Homo sapiens
  source 1..657: mol_type = other DNA
cccagtctagcctctagccttgtcatgcaccccccgctgagcgaggtcaccgcagcggaggagggtctgctgcctccttgtctcggctgccatcctcctgcggctgcctccaccggagctggaaggagagtgagagccgacttccagactgaagcccgcgggtccaggagggccccagcagcctggagacgcaagtcctggcccggggcgcggggggcgggcgcggggacgcagggtcctcgaaccagctggcccgcccccactcggcagagggtctaggcctggccgcgtgtcggtcggcgctagggccccgcggaaggcccgggcgggcggggaccggcggcgggagcggcgcggcgcggagctgcctccatccatggcacggagcggcggcggcggcggcagcaggagcccggcgcgatccgctaggtcccagcccagcgcccagcgagcaggcgacgcggaggggccgggcctccagtgtcccgagggccgggcgctgagactccggccgcgcagctgggagctgcccgcgctgcgctgacagccgcgccgacgtcctccccgccggggcgctcgcaggacatgcccccggggcgcggcggcggggaccccggggctcgcctccgcccagggcccccctccacgccctcggga

SEQ ID NO: 12295 - DNA, 358 bp, Homo sapiens
  source 1..358: mol_type = other DNA
gtctcgctctgccacccaggctggagtgcagtggcgcgatcttggctcactgcgctcctctcagcctcctgagtagctgggatgctcaggtgatccaccgcccagatagctcaaggttttttaaaaaacatctgaatctgcgtcaacttcctcattttacagttgagaaaaacaggaggaagcagctctggaaagcagaacacagtttccttaaaaaatatactttcttctatggccaattcacgtttctacccgagcccgcggaggcacagaccggaagtggcgcgcagcctcccagcggagggaaccgcctatgcctccgtcgcgctggccggaagacgggggtgcaaccctttga

SEQ ID NO: 12296 - DNA, 454 bp, Homo sapiens
  source 1..454: mol_type = other DNA
taggacactccgcagctgccttcctccagagcaaggctttccagcgggagatctcggctcactgcacctcgacctcctggtcagagatccaagtagcggggaccacaggcgcttgccaccactcctatctaattattccaggctggtctcgaactcctgggctcaggagatccaccatgagccaggtggccaagaactgtaatgcattattattattattttttaccctggaaatgaggtctgacttccaagtcagtgttggcagctggggacacgtgatcccctgcctgcctggccgcgccagccccgcctccggcgcccgggtgcccggagctgcccgcgctgctgaggccggcggggcggggcggggcggggcggggcgcggcgcagcaggtggagcaggcggctcgggcaggggcgtggccttggccatgaggggcgtggcctggcgtgg

SEQ ID NO: 12297 - DNA, 319 bp, Homo sapiens
  source 1..319: mol_type = other DNA
caatatgcagactgactctatagaggctggctctacaaatggccgagttgccaattatattctaataataggattctttattaaaacaactgtggaagaaaacagtgtttgctttttattccttttggcactttgcaaaatggaaatcaatgcctcgacttgcttctgcaggagaagccctttaatttgtataaatgtgtgaagtacaagtgtaattttgttagatgcatacattttagggtatccataaccccaacaatgtacatgaggttctgttgccctggcaacccgttgtccagcgcctctgcactggggctgc

SEQ ID NO: 12298 - DNA, 471 bp, Homo sapiens
  source 1..471: mol_type = other DNA
attgcagtgagcagacatcacatcattgcactccagcctccagcctgggtgacagaggaaatatggtaaatttcctcagtacctgaaaatattattacttaatttaaaataccttaggggaggccaccctaaagggtggggatgggagcgctctcctctctccttcccctgccttgctgtgggaacttctgggaaaggaggtgcagggctccaggaagccagtgcccagggagtgctatgctgagtccaggagcctggccacggcaggggtggacagatggtggcagaggaaccacggtgtcccttcctccagatttagctaaaggaaacgtggacagaggcccctccagactataggcagctgccccttagcgtcgctactcctcccccaagagcggtggcaccgagggagttggggtgggggagcgctctggctgggacagctagagaagatggcccaggctggggaag

SEQ ID NO: 12299 - DNA, 273 bp, Homo sapiens
  source 1..273: mol_type = other DNA
catccatttttaatatgtctttatagcagaaagattttaagagaaggggctatctagaaaatctaagatggagaaattgaaattcttcagcatcccaggggcgatcgagaccatgcctgcagtcccagctacttggattgcagtgagcagacatcacatcattgcactccagcctccagcctgggtgacagaggaaatatggtaaatttcctcagtacctgaaaatattattacttaatttaaaataccttaggggaggccaccctaaagggt

SEQ ID NO: 12300 - DNA, 394 bp, Homo sapiens
  source 1..394: mol_type = other DNA
aagatctctgacaaagtccaagcactttggcataatttgaaaaacaatttcctttttaaaaaattattatatatttttttagagatagggtctctgtcacaaagggcagtggtgtgatcacagctcactggagcctcaaacccctgggctcaagcatcctccagcctctgggattcatccatccatccatccatccatccatccatccatccatccaaggagtactcaggtggacccccacccccatcaaggtcaagaaattgaagcggggcggggggcccccattttctcatctgaggaatacaccaggcctgatgtcctaatgcagaaaccgggccttcctgcagtgggccgggtcagctcggatctccgcgcggtcctgagtcgccgcccc

SEQ ID NO: 12301 - DNA, 392 bp, Homo sapiens
  source 1..392: mol_type = other DNA
ctgggattcatccatccatccatccatccatccatccatccatccatccaaggagtactcaggtggacccccacccccatcaaggtcaagaaattgaagcggggcggggggcccccattttctcatctgaggaatacaccaggcctgatgtcctaatgcagaaaccgggccttcctgcagtgggccgggtcagctcggatctccgcgcggtcctgagtcgccgccccccatatccgtccctgccagcgtggcggggagggaccccggacggaggggcagtcgctgcggggcggcgccagcgcccgtgcggaagagcccgtgagcagggatcccacgtggaagcagcgtcctggagctgggctgctcctggggcggggcggcacggggcgagg

SEQ ID NO: 12302 - DNA, 385 bp, Homo sapiens
  source 1..385: mol_type = other DNA
agaaccaattgggaaatcaatatctacgtaacacatcacagtaaattagacattttaggatataggataaacactggtcctgaaaacgttcctggccgcaacactctcagaggtttgcattctcgagtttggagaccgagtgccccggcacaccccggggcttcgctttccgcctctcacagtaggaagcggcgagccgcttctagtgcccacgccgctcctcggctgcccggcccctcttaaaatcatttggaaacgggctccaaggggccagccagtacgccgcgtcagtccctgactcgaaagtcagcctgccaggcccgcggccaccgccggcgcgggaggccggcccacctctgcccgcgcgcctggcctcaggcaggcg

SEQ ID NO: 12303 - DNA, 356 bp, Homo sapiens
  source 1..356: mol_type = other DNA
tggccctgccactggccagctgacctttggacttcagggtcctcacccagaagaagagagccatatggtacaccctggctcactctcgcgagacggtggttctcaaagtgtagtgtgtagtccacacaacacgtatttatttatttatttatttaatttatttatttatgacggagatggagtgcagtggcacgatcttggcttactagtgattctcatgcctcagcctcccgagtagctgggactacaagccacgcctgccagatcagctgagcctggagtttctgacaaggtagaaatctgcactttaaagtcttgaaaacgtgaggcaatcgcgaccccttccttgccttcag

SEQ ID NO: 12304 - DNA, 500 bp, Homo sapiens
  source 1..500: mol_type = other DNA
gcgctttccgcctctcacagtaggaagcggcgagccgcttctagtgcccacgccgctcctcggctgcccggcccctcttaaaatcatttggaaacgggctccaaggggccagccagtacgccgcgtcagtccctgactcgaaagtcagcctgccaggcccgcggccaccgccggcgcgggaggccggcccacctctgcccgcgcgcctggcctcaggcaggcgagagtattctcgcgacggccgtgatggcggcggcaggagcaggacctggccaggaagcgggtgccgggcctggcccaggagcggtcgcaaatgcaacatgaagccggtggcagcgggagcagccgctcctcctggagaggggatctctgctgctccgacccgcccgaggaagacgcgggagggaggcccgcccctcgcgaatcccgcggctcctggagccctgccgcccgccccctgcgaacccaggccccgccgccaatggctcgccctgcctctg

SEQ ID NO: 12305 - DNA, 340 bp, Homo sapiens
  source 1..340: mol_type = other DNA
gtgaggaagggtgtgggcgtggcccaggccctcctcttctctcttctataaattaaataaattgacagttgaatataccatggccctgccactggccagctgacctttggacttcagggtcctcacccagaagaagagagccatatggtacaccctggctcactctcgcgagacggtggttctcaaagtgtagtgtgtagtccacacaacacgtatttatttatttatttatttaatttatttatttatgacggagatggagtgcagtggcacgatcttggcttactagtgattctcatgcctcagcctcccgagtagctgggactacaagccacgcctg

SEQ ID NO: 12306 - DNA, 485 bp, Homo sapiens
  source 1..485: mol_type = other DNA
aggagccgggggagctggcaccccacctgcccagctaggtagagggcctaggcacaggctggcgacgggggagaggccctgcctggaaacaatgccttcaggcaggtttcctgagtctaaagctcaccaccccgtctctatttttaaaaattaaaaaaaaaaaaagttttaataatactgacagtaagggtgaccaggatggtctaggaaggggccgggtacctctaggcagcctctgctcacaggattccccgactgcatcaccggggtggaaatcgggggccaggggggtgactcccctgttccaggcctggctctgagcagatcctgtccctttcaccctgtctggtgttggggagacagcgagagtgcatggggccccggcactgctcctctgtgaggtggtggcaggacacagaactccctcccacagggagcagggcctgggccaggggcagttccagtgatctggcttaaaagcagcc

SEQ ID NO: 12307 - DNA, 607 bp, Homo sapiens
  source 1..607: mol_type = other DNA
tggagcagtaagagatctgcagcctgctgctaagcttagtaagcaggatctttcttttttaaatggtaataaacatattttttgggttcctccggctcgaccaggctctggccaggcgcctcccgagggatagtgccaggtggtctccgccgggccgcccccgcgcacccgccaggaaatgggaggctgggggtggaggtgggtgtaccggcacatctccacccccaggcccgtagtagcggccgtaggacggaccgtcactggggccgtagcccgagcgcctcagggccgacatgggatccgctgccctgaagcgcttcccgccccgctccccacggccgacccatcgcgcaggcgcccgcgggcgattgcgaatggagagcaggaagggggtcggacgacgccagccaatcccaggcccgggcccgccccttctgctgccgaaccccgaaagctgagggacggaggtcagtgactctggggtctcgggaacccggagacgaaggaagacaccgtgttccttaagagggagtatactcctcttacctacttaacaggaacagggaaagggccggtacggctgccccgcctcttcctgggggcccac

SEQ ID NO: 12308 - DNA, 487 bp, Homo sapiens
  source 1..487: mol_type = other DNA
cagaacaactgcagacggttcttttcgcttttgtatcttagtaaaagcaaaagtaaattgtcttaaaaaaaaaaaaaaggttgcaagtgatttggtctttccagaaaagtcaataccatgggcaggagtggacgggggagaagccccccccctccccgggcttctgcgatccacggaagctgtaccgcagctgtggaggacatcgacgcggaacgcccggattgagctcagaacccggccccgcccgggaaagcttcttcggaagaggcgcccgcccgggaggaagggtctaaccccgggctccaccgggaggagataaactactcactgtcaatgtcctcgatgaggctggcggtgccaggcatgttcattttgaactgaaataatgctgcacctaccgcagtcgccgcctcggtgggaccaagcccggaatcccgaccgagaccttctgccccggctttcagccgccgggggctgccggaagctc

SEQ ID NO: 12309 - DNA, 547 bp, Homo sapiens
  source 1..547: mol_type = other DNA
aatgccattttaccttgcagttaggggcaaacacctcgcaaaggttccttcccctcgggagggtccctgagcggcatcgggggctgcagccacttcccttccccgggagagccggcctgccagccacgcaggatggtggagcagtaagagatctgcagcctgctgctaagcttagtaagcaggatctttcttttttaaatggtaataaacatattttttgggttcctccggctcgaccaggctctggccaggcgcctcccgagggatagtgccaggtggtctccgccgggccgcccccgcgcacccgccaggaaatgggaggctgggggtggaggtgggtgtaccggcacatctccacccccaggcccgtagtagcggccgtaggacggaccgtcactggggccgtagcccgagcgcctcagggccgacatgggatccgctgccctgaagcgcttcccgccccgctccccacggccgacccatcgcgcaggcgcccgcgggcgattgcgaatggagagcaggaagggggtcggacgacgccagccaa

SEQ ID NO: 12310 - DNA, 644 bp, Homo sapiens
  source 1..644: mol_type = other DNA
ggcaggagtggacgggggagaagccccccccctccccgggcttctgcgatccacggaagctgtaccgcagctgtggaggacatcgacgcggaacgcccggattgagctcagaacccggccccgcccgggaaagcttcttcggaagaggcgcccgcccgggaggaagggtctaaccccgggctccaccgggaggagataaactactcactgtcaatgtcctcgatgaggctggcggtgccaggcatgttcattttgaactgaaataatgctgcacctaccgcagtcgccgcctcggtgggaccaagcccggaatcccgaccgagaccttctgccccggctttcagccgccgggggctgccggaagctcgtgggcccccaggaagaggcggggcagccgtaccggccctttccctgttcctgttaagtaggtaagaggagtatactccctcttaaggaacacggtgtcttccttcgtctccgggttcccgagaccccagagtcactgacctccgtccctcagctttcggggttcggcagcagaaggggcgggcccgggcctgggattggctggcgtcgtccgacccccttcctgctctccattcgcaatcgcccgcgggcgcctgcgcgatgggtcggccgtgggg

SEQ ID NO: 12311 - DNA, 537 bp, Homo sapiens
  source 1..537: mol_type = other DNA
tcaatattcactaaagtcaatctcttttgagtttctagctcttgacactaagggattagtgttaattttccagggcattactgtataatgacttgatgttgccacatagacttcaagatatataatattttgaggattttggtaaagcttggttaacctgtatatagatagcttattgttgactagttataacatataatttttgtacattatatttactattttacaaatactttggaattccaattggaaaggtttttaatgacattccacttgacttcaataaatctttgccaataattttttgctacaacaaatccagccaacctcaggtagtgtagcttcctgcagaatcctcggcgctggctccctgctgaacgcaccagagggcagctccgctggctttgcgtaccctttgccagacgatgccctcggcacagccgccaggccgtcttcctggggagccgccggagcgcgggcaactgggagagggggcggtgcccagttcccggcccggccctccccgcggaggtggcc

SEQ ID NO: 12312 - DNA, 583 bp, Homo sapiens
  source 1..583: mol_type = other DNA
acggagagttgcctcccggttacgtccctcgatgcgaaggtctggccgcgagcagccgcggcctccggcacgtgacggtcacggagccgtcgcggtcccccgcggctggggggcacccggggatgcggcgggcgctgacgtcgtcctcccggttaccccctccgggccgcagcagagcaggaagaggcgcgcggggccggcgcctgccggggaggtcgaggcgctccctcggcgagccggcgccgccggccgggtctcctactgcttgcaaccgggggagggggaccatccgacagctcagccggggctgagagggagacgacgccaaggcggtcttgcatcgcccccctgacagccgtaggacgggagacggccgaggggtcgcctggactgccccgccctcgcgcggtgacccaccggggaccgtgcgagggtcgcttcagctgccgcgggcgttcctggcccgcgactcgccgcttcctccggagccccagcgtcccgaaccagggactgcatttcccggcaggcgccgcggcccgcggccaatgaggggctgaggatttggcggcggcggcgccccgag

SEQ ID NO: 12313 - DNA, 629 bp, Homo sapiens
  source 1..629: mol_type = other DNA
cctgacagccgtaggacgggagacggccgaggggtcgcctggactgccccgccctcgcgcggtgacccaccggggaccgtgcgagggtcgcttcagctgccgcgggcgttcctggcccgcgactcgccgcttcctccggagccccagcgtcccgaaccagggactgcatttcccggcaggcgccgcggcccgcggccaatgaggggctgaggatttggcggcggcggcgccccgagagtcggggtgggggggctttgtgcgcggcggcggcgggagaggcggcggcggcggccagcacggaggcggaggccgagggggctgtgcacaggtcgccgcggagaggcgtgcgaattccgagccgagcgccgaggaccgtgctacccaggccgggctgccagccgcaggctcctctctggcagcagcggcggcgcggcgacccccgtccctcggcctcccgcagcacgcccggcccggcccggccgtggccctcctcagtgccggccgccatggcagaggcgtccggcgcggggaaaatctagcccggggagcggcctagctcggttccgcctcctcctcgcgcggccccagcggctgcccgcaccccagccccggcctccgtctcctgtgat

SEQ ID NO: 12314 - DNA, 617 bp, Homo sapiens
  source 1..617: mol_type = other DNA
aaagcagtctgcattttttactgacgttttaaaaatgtggtcagctcacatgtcaggagacgtattccttccttgtagagccactaagaaaaaaaaaatttttttttgaggtggaatctggagtgcagtggcgcgatctcgactcactgcaacccctgcctcccgggttcaagcgattctcctgcctcagcctccagagtagccggaactacaggctcccaaagtgctgggatcacaggccagcctaaataaaaaaaatttttaactctttcttctggagccagataaaaggaatgagaatatttctagatgtttcattttcccaagatggctcagttggccatcctagggcagtgtctgtcatttcacagctactataacatacattttatatgctgagatttctatacaaattattaatcacaaacaacacttgttaagggaattgagcaaatatttttagtagaatacagatttccatatgaagtctggagaggaagggagaggaatgcgctccttccgattcccgcccctctggcagttccggatttacatcaaagtgatgtcattcatgactccgaaatggttaccatggcgactatcagacatattaagct

SEQ ID NO: 12315 - DNA, 572 bp, Homo sapiens
  source 1..572: mol_type = other DNA
tcccaaagtgctgggatcacaggccagcctaaataaaaaaaatttttaactctttcttctggagccagataaaaggaatgagaatatttctagatgtttcattttcccaagatggctcagttggccatcctagggcagtgtctgtcatttcacagctactataacatacattttatatgctgagatttctatacaaattattaatcacaaacaacacttgttaagggaattgagcaaatatttttagtagaatacagatttccatatgaagtctggagaggaagggagaggaatgcgctccttccgattcccgcccctctggcagttccggatttacatcaaagtgatgtcattcatgactccgaaatggttaccatggcgactatcagacatattaagctgtcaggaaagagcctgtttaatccagtcttcaatcacgggtttcctcgggcgttagccactgcctgcggagagaagtcacttcggcgatgtaaacgcgactttgcggcttctgctgctaaggtgaaggacgcccgccctccccagaacttgagagttggcgatgtcgtcac

SEQ ID NO: 12316 - DNA, 316 bp, Homo sapiens
  source 1..316: mol_type = other DNA
gctgtagtgcagtgctgcgatctcggctcactgcctcagcctcctgagtagctgggatttgctggggagccatcagcatgctcaaacctcctgcaattgtagcacactttgtaaaactgtttcccacaaaagggcaatactactttgaagtttataccttggaaaacctcatgatggtattaacctctctttttgagacagaatctcgctctgtcacccaggttggagtgcagtggtgcaatctcagctcactgcagtttcgccatggccaggctggtctcaaccacacccagccaggacctattaattcattgtt

SEQ ID NO: 12317 - DNA, 352 bp, Homo sapiens
  source 1..352: mol_type = other DNA
gaggaatccttcagaccaaggagccttggaaaaaataaaggctgctcgacgttccctaggacccgtgtccatctggattagggagtgggctgtgattaatttccaaaccaaccaccaggctggagacttctggaagccaacagcatcgctgtagaatttacagggtaccaccttataataaaaccggcttgtatttactaagtgttaactatgcgattatcccccatttacagatgggaaaacagaggcgagaagggcagagcgccggacagctcggcccgctccccgtcctttggggccgcggctggggacgcccagcaggcagctgcaggcgggtgggagtgagagagcg

SEQ ID NO: 12318 - DNA, 824 bp, Homo sapiens
  source 1..824: mol_type = other DNA
gcgggtgggagtgagagagcgagccctcgcgccccgccggcgcatagcgctcggagcgctcttgcggccacaggcgcggcgtcctcggcggcgggcggcagctagcgggagccgggacgccggtgcagccgcagcgcgcggaggaacccgggtgtgccgggagctgggcggccacgtccggacgggaccgagacccctcggcggcgacctcgccttccccggccgcgagcgcgccgctgcttgaaaagccgcggaacccaaggacttttctccggtccgagctcggggcgccccgcagggcgcacggtacccgtgctgcagtcgggcacgccgcggcgccggggcctccgcagggcgatggagcccggtctgcaaggaaagtgaggcgccgccgctgcgttctggaggaggggggcacaaggtctggagaccccgggtggcggacgggagccctccccccgccccgcctccggggcaccagctccggctccattgttcccgcccgggctggaggcgccgagcaccgagcgccgccgggagtcgagcgccggccgcggagctcttgcgaccccgccaggacccgaacagagcccgggggcggcgggccggagccggggacgcgggcacacgcccgctcgcacaagccacggcggactctcccgaggcggaacctccacgccgagcgaggtaagagccgcggcgcccccggatctggggcgggcttggcgtcccgagcggcccccggcgccggagcctcccggctgcgcgctttgcccgccgcagcccagccggggccggcgcctccctccgctcgccgcccgcca

SEQ ID NO: 12319 - DNA, 792 bp, Homo sapiens
  source 1..792: mol_type = other DNA
ggcgagaagggcagagcgccggacagctcggcccgctccccgtcctttggggccgcggctggggacgcccagcaggcagctgcaggcgggtgggagtgagagagcgagccctcgcgccccgccggcgcatagcgctcggagcgctcttgcggccacaggcgcggcgtcctcggcggcgggcggcagctagcgggagccgggacgccggtgcagccgcagcgcgcggaggaacccgggtgtgccgggagctgggcggccacgtccggacgggaccgagacccctcggcggcgacctcgccttccccggccgcgagcgcgccgctgcttgaaaagccgcggaacccaaggacttttctccggtccgagctcggggcgccccgcagggcgcacggtacccgtgctgcagtcgggcacgccgcggcgccggggcctccgcagggcgatggagcccggtctgcaaggaaagtgaggcgccgccgctgcgttctggaggaggggggcacaaggtctggagaccccgggtggcggacgggagccctccccccgccccgcctccggggcaccagctccggctccattgttcccgcccgggctggaggcgccgagcaccgagcgccgccgggagtcgagcgccggccgcggagctcttgcgaccccgccaggacccgaacagagcccgggggcggcgggccggagccggggacgcgggcacacgcccgctcgcacaagccacggcggactctcccgaggcggaacctccacgccgagcgaggtaagagccgcggcgccccc

SEQ ID NO: 12320 - DNA, 462 bp, Homo sapiens
  source 1..462: mol_type = other DNA
aagtgctgggattacaggcagctattgttattattactattattatcattagagacaggatctcactctgtgcgggctcaagtatttgggactacagacacaagcgacagggtctcaatgcccaggctggtctcaacgctattattactattttttaattagaaggaaaaaaaaaaaaacaaaaaacagagggatgtgggtgtgtatgtttcttacaaaagttggcaaaacagctctcttttttaaactgaactttgtaataggagaaatactctcacaaggacaggatgtttctgagccaagttgaagcaaaagaaactttttccagcatgtcaggaagaggcgcccctcggaaaggagccggagacccagctgacttcgcacttgagctggaaattcaagctgaaagttacaaaacatttccctggaaccaagtgcttggttgggagaccatgccctccc

SEQ ID NO: 12321 - DNA, 445 bp, Homo sapiens
  source 1..445: mol_type = other DNA
ctgttttatggatacttgttccaagttactcagctagttgcagcgcagtccaggcgcatgccctttgcagggccgcctgggtcccctgaccccctgctgcttctctgaacagcagctcccggggcctcgcggcttcccttccagccccggacccagcgggcggagagggcgacgtccgcggatcgcggagtcccgggggcgcccgcaggcctagcgccctccacctgctgccccgtgccacctaggagtttccttgccgggcgaggaggcgccgctgcccgggctccccgcagccccgcacgccccaggggctccgcatctccaggcggcagcacccgcggggccctgcaatccgcggagaagttggcggcatctgaagccacctccttccccgctttcccagcggcggggaccctacggccgggcgccccaccccgccctcccc

SEQ ID NO: 12322 - DNA, 600 bp, Homo sapiens
  source 1..600: mol_type = other DNA
gggaaatggagaacatcagctatttcccaaagatgtcgccaggcctcttggcttgttactgaagcagcgaaataagtcgcctggaatccttggccaagagttcaagaccagcctgggacatatcgagacgcctgtctgtattttaaataaataaatatggaggcggaagcctccccgagtgcggaggggggctttgccaagggattttcaaatcccgggaatgccagggatggaatcccccacgctgccagggttagaggggaaaacaacagtccacagcggccgcgaaggtttgtatttgtggcaagatgaaaatgtttaaaaaaattttaaaaaggacgtgccccggctcagaaaacggtcctcctctgccccggacgccggcggacctgtggggtatgaccgaatctccccgcgcagccggcaagccccggccctcagtcgggccgcgaccagcgtgacgccgcggtagggggatccggcgggcgcgcggccgtcttcaaagccccggcgccgccgccgcccccgcgcgcgcgcgcgagtagtacggtccgagggggcggcttctggggcgcggctccggcggcagctgatgcgcgc

SEQ ID NO: 12323 - DNA, 421 bp, Homo sapiens
  source 1..421: mol_type = other DNA
tacttttgaaatcttcaaaagacttgcttactcaatgtcagctgatggttggtaaaaattggagttatacatctatttctgagttgaatactcagctcaagaaagtagttttaattcttagtctacttgaagcaaattttttttcttttatatttctgaatataaatatactcttatatgggctaaaaagactttggaaattgtttataaactttcaaaatgtcggaagtggacaggtttggcaaacgtttggcaaaaacatactgtttaaagcagtgatgtttcagctgtgaaatgcactcgcttgcatggaaactgtttctcattttatgtgatctcctaattggtatgtagcaaaaattttctaaaactgttttgtggcttgttttgtaataaaaccatgtgaaatactgaaatatgg

SEQ ID NO: 12324 - DNA, 494 bp, Homo sapiens
  source 1..494: mol_type = other DNA
tggagttatacatctatttctgagttgaatactcagctcaagaaagtagttttaattcttagtctacttgaagcaaattttttttcttttatatttctgaatataaatatactcttatatgggctaaaaagactttggaaattgtttataaactttcaaaatgtcggaagtggacaggtttggcaaacgtttggcaaaaacatactgtttaaagcagtgatgtttcagctgtgaaatgcactcgcttgcatggaaactgtttctcattttatgtgatctcctaattggtatgtagcaaaaattttctaaaactgttttgtggcttgttttgtaataaaaccatgtgaaatactgaaatatggcctgctccgggtagggctagagaccttcccctcattgcctgggggagaacctggctccggggcgccgacgggggcgccaggctctgccccttaaagtttgggggccggcggaggcggcgccgtggccgggag

SEQ ID NO: 12325 - DNA, 641 bp, Homo sapiens
  source 1..641: mol_type = other DNA
gccccagagcgggtttcggggcgtctgggggacccggggtcgcgcgaggcggcgaggctgggaacggctcccacccgggccaagaagggcttggggcgccaaaccccgcgcctcgggtgcgaccccggtccgcacacacctggagcggccgcgccccccgaccccgggtccgatccccaggccgggccccgttcactccgagcgccccgtccctaggaagcagccgtcccaaccgacccggggcgcggacacccacctggccgcgccgcaccgaggactgggcccaccagctgccggggccccaagtctggccgggaagcgcgcgcgcccgacgagcacgcgcgcccgacgagcacgcgcgcggcactgacgcaactgagccctcggtccgagctcgctcccgaccagtccccggcgcgagaataggatttctaaaccggcggtggcaaccagcactagtcggcccgccagtcatatccgccccgccccgtcggctgccgggcacgcccacctaggggggtcgacggatccgattgaagcagagggcggagtagccccgcccgtctgctcgacctggcggaggtgcgcggagcgtcgagctgcgcgtccgctacgcgggcggggctacgcggaaaggcctg

SEQ ID NO: 12326 - DNA, 441 bp, Homo sapiens
  source 1..441: mol_type = other DNA
aagcctctgtcactgacacacaagagttttctctgcacgggctgtgagaaacctgtcccagctcgcagcacccccggggccctccggctgggcggcgccagcggatgtgagctcagcgaactgcgtggtcaggcctttccgcgtagccccgcccgcgtagcggacgcgcagctcgacgctccgcgcacctccgccaggtcgagcagacgggcggggctactccgccctctgcttcaatcggatccgtcgacccccctaggtgggcgtgcccggcagccgacggggcggggcggatatgactggcgggccgactagtgctggttgccaccgccggtttagaaatcctattctcgcgccggggactggtcgggagcgagctcggaccgagggctcagttgcgtcagtgccgcgcgcgtgctcgtcgggcgcgcgtgctcgtcg

SEQ ID NO: 12327 - DNA, 449 bp, Homo sapiens
  source 1..449: mol_type = other DNA
tcagaaaaattactatgctgaggctagaattttctactggaatgtaattactgtaattgtgggcaagaatctctaaatctttcactacatgaaataagtatttattgcactgagaagtttctgaacaatagaactcttcaaaaatatgaagagctggcatttcatattgaaaagcggctcacttttgttcacacatctggctaaatagttttgaaaaaatattagaaacaggtttggcaaatatgaatatatatttaggtgtgtatatagattttaattcagaaagtattacacatgaataagtgtgtcagttccgcgatctcgacagagggcgctgggtggtcagtggctccagcaaccacgcggctggggtgcgccgggagcctcggggcgcacgctgcgggcccttcgtgttccggacgctaaacaccgagagcaccccgtctccg

SEQ ID NO: 12328 - DNA, 384 bp, Homo sapiens
  source 1..384: mol_type = other DNA
aattaatccattcttttttgaaatcagaaaaattactatgctgaggctagaattttctactggaatgtaattactgtaattgtgggcaagaatctctaaatctttcactacatgaaataagtatttattgcactgagaagtttctgaacaatagaactcttcaaaaatatgaagagctggcatttcatattgaaaagcggctcacttttgttcacacatctggctaaatagttttgaaaaaatattagaaacaggtttggcaaatatgaatatatatttaggtgtgtatatagattttaattcagaaagtattacacatgaataagtgtgtcagttccgcgatctcgacagagggcgctgggtggtcagtggctccagcaacca

SEQ ID NO: 12329 - DNA, 419 bp, Homo sapiens
  source 1..419: mol_type = other DNA
atcatcaaaactgaaaacttttgcatattgatgggagaaaataccatatttagatataaaatgtatattatttatatatacataagggatctagaatccagaatatataaatatttgcaaagtaaaactacagttagatatcacttcacatctacttgaatggctatattaaagaagaatactgtcaagattggaatcctcatatattgctgtatggtttccactgtgcaagtatattctcataagaattgaaagccaaatacatgtaaaatacaatgaatctttctgagtttctcttcaaaaggtttagcctgttaacctagttactgtaaacagtaactgtgtgcatgaacttataagtagccaatcgggttatctcagattgtgtggtctgaccccagcccatggggaaggacaca

SEQ ID NO: 12330 - DNA, 400 bp, Homo sapiens
  source 1..400: mol_type = other DNA
aagaaaaagctttgtcaaaaacttatgcttcttaaaaacttaatcaatgaaaaataaccacatattttctaatgctcaatattttatttgtagtgttgttttctatatagatatgatacctcatgaatcatgtagtcataagaaacacagtcattgtttcctattcaaggaacattttcctgtaaaatgacaggttgaaggctatcacaatttaatttatttcaagtactaataagctgatgacaaaacagcgatgtcatcatctagaggaaccaaatgcagtcttaatttgtactttgagaaaaacattttcaaggtattttatccttttctccaacttttgacatattacaaagtacccaaatatgccagactgggcaatcttcctaaaagttactta

SEQ ID NO: 12331 - DNA, 434 bp, Homo sapiens
  source 1..434: mol_type = other DNA
ggcatgtagaagaatgtttatagctaaatattatttttaatagctggaacaataaacaaacaaaatagtaaaatggaaacacaagtggtgttatatttaatgaatttgtaatatacaccaatgaggataaaacagaactattgctttgtatgaaccttacaatgttcaaaaacagacaaaacgaatctttggttgttccacttgaatattaattgacctgtgaacttatgatttattggagtgcaggcaaccgttcaagcgattctcctgcctcagcttcccgagtagctgggatttcaggcactttcaccatgttgcggaaactggtctacgtgtttatatatattcaattgaaattttacttaagaagtgtttataaatcttcgtccagtggatgtcctgcaagagagggctcttccaggctgcgtggccgg

SEQ ID NO: 12332 - DNA, 541 bp, Homo sapiens
  source 1..541: mol_type = other DNA
tttaatttatttcaagtactaataagctgatgacaaaacagcgatgtcatcatctagaggaaccaaatgcagtcttaatttgtactttgagaaaaacattttcaaggtattttatccttttctccaacttttgacatattacaaagtacccaaatatgccagactgggcaatcttcctaaaagttacttaaaaaataaggaagtggagagttactatgtttctaatttttgaaacatgacactaatattttcaaagaactgttgagagtttaggactgcagccttcattttcattcaaagatttaaaagtttccataaagtaaaatgtttctggcttcctatatggcagtaagaaaatgatgtgcttaatgattacaaatttcatatggaatacgaactttcagtttgtacatattttgtggttttattggttttcatattacaaacaaagaaactagaaaatgaaaagtggaagtaatttctcactgcccctgtgataaactgtggtcactggctgtggcagcaactattataagatgct

SEQ ID NO: 12333 - DNA, 439 bp, Homo sapiens
  source 1..439: mol_type = other DNA
gccccatgagctcctgctgggtctctgatccagccagctcgttagaatgaaggacttgattcatatttataaacaaggtcctagcatgggtagaaggaaaccaaaattgcttctacagatgctttggagaagtcatttaaaaaatgtgttttagcacctgaggtctggagttcgagagtaatcccagctactccggaggctgaggcaggagaattgcttgaacctcgggggtcttaaaaactaaatgtattttataatatccttaccttcttcttgcagaaattcaaagtggaattaaggaggaagagtgcaggcaggcactgtgcaaggctgggtggactgcagcctgcaatcggctttgtttctgactgtgaaatccggaattctgtcagagccacaaattatttctcctttcagcaattgaaaagaaagaaagata

SEQ ID NO: 12334 - DNA, 284 bp, Homo sapiens
  source 1..284: mol_type = other DNA
gtgaacaaggaagaatcattcactctagaatgctcggctttcttaaactccagagttttatggattttaagaatagctcttctgagactcttagagtctgtctcatgccggcagacacaataaagccagaaaattgttgctatgggctctgttttaaaatgctagagcaagaatctgattgcttgatagctccatctctctcaatgaaacatggaattatttcctttgatggcttagataatagtaggagccaaagccaatgcagtcctgcccgggactggaga

SEQ ID NO: 12335 - DNA, 319 bp, Homo sapiens
  source 1..319: mol_type = other DNA
gggtttttctatttaaatatatattatatatttaaaaaagtgtccctaataccgttgctagcatgccccagtgttgagggccaccatgggcggccccacctggagaggtgctgctcacaggccttccagggagcccagccaggcccactgggcccagctactcgggaggctgaggcaggaagtcttcataatttcatgggtttgtaaaccgaacccgctcgcgagggaggcgattggctcccgcgccggtgacggacgtggtaacgagtgcggctcgccccgccgggagctgattggctgcgcggggcggctccgaggg

SEQ ID NO: 12336 - DNA, 390 bp, Homo sapiens
  source 1..390: mol_type = other DNA
atcaaatccactgctttaaatgtgtggattgtatgccatttatatctcgaaaaagctgtttttaaaatacagtaagagaatttttcatatttaaaaggcaggatatttaaactatattaaatatataaaagacagtggtactagtgggcaacgagggcggaaccacttgtccccttggtcaccggggcaggggcgcccaacgctggggcccaggcttgggtggcataacccacacgaagtgtcacacccccgcgcgctcgcgccggccgcagccccacagctcgccccggccgtccggaaacaatccccgcgcgggcggaaggcggggtcggccctggccccgcccacatcatttcgcgcagcttcggcagggtcccagacctgaggtag

SEQ ID NO: 12337 - DNA, 587 bp, Homo sapiens
  source 1..587: mol_type = other DNA
gccaccgcgcccggccccaaagcagtgattctcaaacctcagctgtgtcagggtcaccgggagggcctgggtctctgagaacctgcattttcacggattcccaggcgatgcttctgctggtctcacagttctttttttttttttttttaattaaaaaataactgggcgtggctgtggtcccagctactccggaggctgaggtgggaggatcgctgagctgtggtggtgccactgcactccagcctgggcaccggcccaggaggctgcagcggcctgctttcaacagcatacttctgggtgggaccccccggggcggacaccgccgctccccttggccgcggtggcgggcgccccctcccgacgctcttgggtagtgcaacccggaccgcacagcggagcggccggcccccaggtgggcggggccaacccggaccagcctcccgccgcctcaagtccttgggttgctgggactgcaggccgccgcgaagacagtccccgcccgccgggtgggcgggcccaaggagaccgccccgctcttccccccgggccttgtggtcagcgtcgcccttgcgcgatgacgtcgtgcc

SEQ ID NO: 12338 - DNA, 485 bp, Homo sapiens
  source 1..485: mol_type = other DNA
gagattttgaggtctaagaatgtggactttaaagatttcattatcagattatgcatttactaaaggcaaactgtcttttaagataatatatatttggaaagttgcatctgccaggcagggcgaaagtctcctggagcaccctgcttgacgagcaaaccaggccctgagctgagtcctctaacgggcagaggagatttagtgactctagcctcgggaggtcctaacgcagggaagcgctccgctttctgagagggacgcgccagcggagggacagccagggcccggcctctcctgctcctgccccgccccgcccccggcagtgccccctagtccgccagagggcgactccgcgggtcgcccaacccgcgaccggtccacgcggcacccgcctctccctaggcccccgccctgccggcccgcgcgcgcccgacgggagcgtgcggggcggtgggcgcagggtcacgttgggcggcgcagacaaaggc

SEQ ID NO: 12339 - DNA, 414 bp, Homo sapiens
  source 1..414: mol_type = other DNA
tgccattatcattcatagtgttatgctgcattgccactcagagaggaacaactgaaattttttccagccgcagctgctgcggctacatttgtgaatcagctctgtaaatacaaaagagcctttaaggggctgacaggaattacagaccggcttccaggtggccccaccacctgtgctgggcccctgctgggctcaacagaccgctaagtacccagggtattagctggtctcatccctaccatgccggggaagtagctgctttctcggactgtattattttctgaaagtaagaaactttccctgggcagaactctttctagttcccatggggatgggcaggatagaggccgagcccccacttccaggtctctgggcgggtgtcactcacacagtgactttcacttggacaggcac

SEQ ID NO: 12340 - DNA, 574 bp, Homo sapiens
  source 1..574: mol_type = other DNA
ctgttggacgggcggacgttgcaaaaggcggcttcctaggccaggcctgcaggagcttggcctgggatggtccagcctggctggtgggcagccccgaccttctggcagctgcgggaccgcctgggcgcccccctgcccgcgccatccctcacctcggttcccaggaacgcccagcctgcaaatcggccactaagcagggggcagcgcgcttcgggaggctccccggccttggagagctccagcctccccggggggcggaggggccggccagaaggactcctgcgccccacacccgcagcgccgacagggcgtgcgccctggctcagcgctccccgactgctcccaacccaggggcacccagggccgaactctgggctctgaactcagctctccccggctgctctcgaccccggggcaaccaggggtccgcgccggccgaggcctggggagcggggcctcctggggttgggggtgcggtccccaggcgggcgccacccctccgcccgcccgtgccgggagcgcccggcccgacagcaagcgcctctggggccgataaggccctcgggggcctggc

SEQ ID NO: 12341 - DNA, 368 bp, Homo sapiens
  source 1..368: mol_type = other DNA
aggcaggccatgaagaaccgcctgctcatctcagtcccaggccttgtccaagtcacacgacccaggtctgtggagtctcccaccaccctctcccccgtcggggtgccaggggtgaggacgggaagccgcctcctctccgccccccaggccccgccctcgggctccggacgtggctgccggatttccgtgccacactgaaggcggtggcatggggtgcaccagctcctcctctcccgggtcgccgtctgacttaaacgcgtgagacgggagaggaggaacccccgctccccagcctcgtgaccccgccggccggctcttccctgcgcccgcggccgccccccacccgcgctgccgggcctccgcctccc

SEQ ID NO: 12342 - DNA, 490 bp, Homo sapiens
  source 1..490: mol_type = other DNA
cccccgcaccacctcagcaaagggcttgtgtgtggaggagctgccacccacgctcacctctcatcggcgaggtcgccactgtcaccagcgcccactgctgggtccaaggctggcgacgcctcaccgcatctggtggggcgcacgccttcgtggatcaggaggtctccaaagcggtggagagacccgcccagcccctcactccccggctgggaactgagattgtggagggtgggcgccctgccgcggcccagtggggctgggggcttccagagtcggggtccagggctcggtgtccgagactccaccgccagccccgcttatcaaccgcgaggcgctgtcagcaactcgtgccgcaaacacgcgagcgcggcgaccgccccagccctttgtgactggatgagtggggccgatctcgagcggctccttgggcggagcggtagccaggccgcgggccggccaatcagcgggcgagcggctgcctcagcgcgcg

SEQ ID NO: 12343 - DNA, 862 bp, Homo sapiens
  source 1..862: mol_type = other DNA
tgggtgggcggcagctcccgagccggggaccccggctggctcctgtgcggcgtgacggggtggttggctgagccctaggccccctccgcctgccgcaggctgggctggcgctgcggacccaagtgcagctcttccccgcggggcacgggcgcaggcggcgtccccagggaggcgtgcgcgggagcgccggggatgggacttccttttctgtcccaagaggactcaaaggaaaacaattccgttttcatctataattcggaaatatgcaaatgaaccagcgtgcggcgcggggaaccggctcttccccagggagccccggaggcgcgcgccccacgccgagggcgcccggggaggaaccgcaccccgggctcgggagtagcgcgtccgggccctcagcggccaccgcccgggggctccccaagcccggtccttgccctctgccgcccgccctctaggccgagcctccgctcccgcgatgtcgccgcgctcgccgccgccaggcgcgctggtccgccgggtcgcccgggcgcggggcgcgccgcccgccgcagcctcccctcttcccccggcttggccctgcggcccgcagcggggtccggggtagagcggccgctttgttcccgccgcccgacggcgcggggctctgcaaaggcggaagctcggcgctcgccatgaccccgtgcggacgcccagtgcgcccagcctcgccgcgccggccgggcccccgggccttcccgcgctgagcgcccgaatccgccccttccgcggccgctcaccgcccgccgccgccgcagtacgagcgcccccgcccccccgcttcgccgccgccgccgccgcaggagagggagggaggcggagggag

SEQ ID NO: 12344 - DNA, 355 bp, Homo sapiens
  source 1..355: mol_type = other DNA
cctcacgtgacctgcagatcagtcatctgaaaacagcaagggaaatggcttgtctatttccaggggcattttacaagccccaaggccctgtgtatattccctgggcccactcccggaaagtccccggaggccacctactgcccccatgggggcacctcctaccgcaggtgagcccaaggctggtcctgccttctctgagagataaacacttcttgtcatcacagggtcctgaaagtcccttttaagcctgggacactaggactctaaaggaagatgattcttaaggtacatcacggctgtgaataatcagcctggccaggcgggaccccaccccctgcctggaaacttaaaggag

SEQ ID NO: 12345 - DNA, 389 bp, Homo sapiens
  source 1..389: mol_type = other DNA
aggtctggtctcagccagacatgaaccagtgatgtgccagggccctgacatgcgtggcttctctctgatcctcacgtgacctgcagatcagtcatctgaaaacagcaagggaaatggcttgtctatttccaggggcattttacaagccccaaggccctgtgtatattccctgggcccactcccggaaagtccccggaggccacctactgcccccatgggggcacctcctaccgcaggtgagcccaaggctggtcctgccttctctgagagataaacacttcttgtcatcacagggtcctgaaagtcccttttaagcctgggacactaggactctaaaggaagatgattcttaaggtacatcacggctgtgaataatcagcctggccagg

SEQ ID NO: 12346 - DNA, 422 bp, Homo sapiens
  source 1..422: mol_type = other DNA
caggtatggcggcctgcactgagctgtgatcacaccactgcactccagcagagcgagataataataataatgatgatgatgatgcagtattttccaatttacattgccctggtacagagatttagaacagagccctgcactgtgtaagcactctatagtttggtagtttttttctgcttgaataaaatatagcaacacacaccctcaggctgagcgcctggctgtcacctctgaggagtcagcccccccagacaggggagcgcccgcagtagggcggtagggccgggtccaccacacgccacccccgccccgggggagtcgcccggtcgagggtcccgggacaggcgcagcactcgcagcatccggacctggtctgcctcgcgccgggagcggcctctttaagagcggccgcggccaacgtg

SEQ ID NO: 12347 - DNA, 414 bp, Homo sapiens
  source 1..414: mol_type = other DNA
taatgatatttattggaaaataatgggaatttttaaatattaatagttcagctgtagggtgagatcactgattttacagcaactacgtatcattttgtaataaattttaatttttcgatgcacaaagcaattgcctggaattgcaaaataaactattgctgatgtgacatttccatttctagggggattaaaaataaaatatcttttgacacctaacacgtgtgccgggctccggcagcgccctgccatgcattgggtagctattacagtgcacatttttgtgcaggtgagaaaacagatttaatatcttaggtcaaaactccaggtcttcccataggaaggcccctgggctgtcattgcacgtgccccgccccgcccaggacgcgtgacgtcacaacaagcgccgtgcgcccc

SEQ ID NO: 12348 - DNA, 472 bp, Homo sapiens
  source 1..472: mol_type = other DNA
gaagagaaaaaatgattttttgatccagatctagattgttctacccttaaagtatttaagacagtgataagcacatgtctaaattaccaagttttaaaaaattcgtattaggaaaattggaaatacatgaaatttcatcaagtgagttttacataatgcaacacaaattaaatatgttgaattgtgtaaaatgcgctatcattgttcccaccattgaaaaatgggattttcataaattacattattttcctaataaccctaacttcaaacagttcaattttcatttaaaggaaagtaatttcccaaatggcatttagtcagaacaggtgctgttacgttcacaactatgattcatcctttctttgagcacaattagctgtgaaaacagataaagattatcagagtttgcctttgaggagaagccgcatggccctgcctctttgaactattgatcaaacagatttgaatagtt

SEQ ID NO: 12349 - DNA, 525 bp, Homo sapiens
  source 1..525: mol_type = other DNA
aacatcctcaacggtccactgatcatttcagcctgaatcaattattatcatggtggttccaagacgatgataagacgagatgacctaagagtgacactcttgaagtctggtcagtctgaaatgagggcgtgggctcaggcctgtgatcccagcactctggcagcctggaaacatagccctcctactcaggaggcttaggcaggaggacggcttgagcccaggaggtcgaggctccagtgagccaactccggcctgcggcatgcctcaaacctggggtccggcaccctgcggcctgcggctcgcgcattctcgcgagaatgagtcccctcaagggcacaggtgcggtccccagcctcttgggcccccaccacaccgagccctcctgcgcacgcgcgctgcggagccggacagtcgtctccgcgccttgctccgaagcgcgcgaccgtggcgcgacacgccggcgcacaggcgctctcggggaggggcggcgcgcaggcgcggctgggggtgcgaggctgcgcaggc

SEQ ID NO: 12350 - DNA, 348 bp, Homo sapiens
  source 1..348: mol_type = other DNA
ccattgcaatgtacacgtttcacatttgtgaaatcaaactcacgtattcaaatttttttagattaagttacataaagctttagagtcaaactaaatgttatagaattatatgtatgattatgtatatacaatatatataaatacatataaataccgtaaattaagctagtatgttattgcgtaaagtaatggtcttaccctattaattgtaacagatgaaacaaagaatagaaaacttgttaagaagtgttcaatgtaaatgtgacttataattaccagtcagctctgcaaggtggcaccaatgctagcatcctggccatatccagttttgcgcctggtgggacaatg

SEQ ID NO: 12351 - DNA, 663 bp, Homo sapiens
  source 1..663: mol_type = other DNA
aaaaaatgggatttgtattctgaagccaggtgctgggcagtccacagagtcactgacttgtccaaagccacacaggcctgggcgtggaggcgcggggctgttatacacacgactcccaaacctgaactcttccagtcttggccccgatcctgcgagacctgctccttccggaactctcccaggaagcagcccgggtcccagggcggcgaggctctagggacgtttccgccgcccgcaggctgcgcgtgattcagcctcaaccctcccgccgagcccccgccgccccggcagatgggccgccgcaactggcccgtgtgcgcttccggaagcgggcgactcgcagctccacgcgacgccgaggggctccgcgccgggaccgggcgggtgctcggagtttcggggaccgcacgggaccgagggcaggcgggcggccaccccccttacccccgcgtccggggcggggcgggcggcgcggggcggggccgggtgacgcggccccgccggggaccgggagaagcggggacgcggggccactcacgctgccggctccggaggcggcacgcggccagcgctgctccgctccggggctctttaccccggagtcggggccgggcgcgcgggaaacggttaccgagcggacctccggccggtgatgaaacgagg

SEQ ID NO: 12352 - DNA, 470 bp, Homo sapiens
  source 1..470: mol_type = other DNA
acttataattaccagtcagctctgcaaggtggcaccaatgctagcatcctggccatatccagttttgcgcctggtgggacaatgtacactcccccgccgagtcccaccccaagcgcgcacagcggagcaggaggcgcccggcactcgcaggtaatgcccggtccctgccacttccggccgcgcgcgacggccaggtccacgtgggccagcaggcgcgggggacgcaacccgccgccgccgcgagccccgccggcgccgaccagccctggcccccacccgcgggagcccgggagtcgggccgggggctcgcgggaggcggcgcgcgcagcccgggcgggggtcgcggcgcggtaggggaaaggagcccggctccactcacgcgcccgggggcggcactggggccgccgctgcgtctctccggccctcgtttcatcaccggccggaggtccgctcggtaaccgtttcccgcg

SEQ ID NO: 12353 - DNA, 500 bp, Homo sapiens
  source 1..500: mol_type = other DNA
tgcctcagcccaagtagttgggaatacaggcaagtgccactgcccaggctggtctcaaaactcctgagctcaggcaatccgcccgcctttttctagggactaggtcactgtatcataagctttaaaagtcacgtctaggtgattctaaaattgaccacagaactttgttactttgatacaaattcacattggaaccacttagaaaaaatgggatttgtattctgaagccaggtgctgggcagtccacagagtcactgacttgtccaaagccacacaggcctgggcgtggaggcgcggggctgttatacacacgactcccaaacctgaactcttccagtcttggccccgatcctgcgagacctgctccttccggaactctcccaggaagcagcccgggtcccagggcggcgaggctctagggacgtttccgccgcccgcaggctgcgcgtgattcagcctcaaccctcccgccgagcccccgccgccccggcagatgggcc

SEQ ID NO: 12354 - DNA, 479 bp, Homo sapiens
  source 1..479: mol_type = other DNA
attaagtctcaagtaaacaagagtatataaacttgccaatatattacaaaactacttttttttttttttttacaaaaacagggtctcactctgtcacccaggctggagggcagtggtgcgatctcggctcactgcagcctcgacgtcccagaatcgagggattctgcctcagcccaagtagttgggaatacaggcaagtgccactgcccaggctggtctcaaaactcctgagctcaggcaatccgcccgcctttttctagggactaggtcactgtatcataagctttaaaagtcacgtctaggtgattctaaaattgaccacagaactttgttactttgatacaaattcacattggaaccacttagaaaaaatgggatttgtattctgaagccaggtgctgggcagtccacagagtcactgacttgtccaaagccacacaggcctgggcgtggaggcgcggggctgttatacacacgac

SEQ ID NO: 12355 - DNA, 626 bp, Homo sapiens
  source 1..626: mol_type = other DNA
ttttctagggactaggtcactgtatcataagctttaaaagtcacgtctaggtgattctaaaattgaccacagaactttgttactttgatacaaattcacattggaaccacttagaaaaaatgggatttgtattctgaagccaggtgctgggcagtccacagagtcactgacttgtccaaagccacacaggcctgggcgtggaggcgcggggctgttatacacacgactcccaaacctgaactcttccagtcttggccccgatcctgcgagacctgctccttccggaactctcccaggaagcagcccgggtcccagggcggcgaggctctagggacgtttccgccgcccgcaggctgcgcgtgattcagcctcaaccctcccgccgagcccccgccgccccggcagatgggccgccgcaactggcccgtgtgcgcttccggaagcgggcgactcgcagctccacgcgacgccgaggggctccgcgccgggaccgggcgggtgctcggagtttcggggaccgcacgggaccgagggcaggcgggcggccaccccccttacccccgcgtccggggcggggcgggcggcgcggggcggggccgggtgacgcggccccgccggggaccggg

SEQ ID NO: 12356 - DNA, 272 bp, Homo sapiens
  source 1..272: mol_type = other DNA
tttgatgtatcatgcatttacaacacagcactgaactagatgaaatctgatcaacaagtctcatacactgtcccctgcagtgaccagaaggtgggcctggtggcacactttgggaggccaaggcgggcggatctcctgaggtcaggagttcaagaatcccagctactcaggaggctgaggcagtgagccgagattgcaccattgcactccagcctgggttcttaagaacttgcaagggagtaacagctgactgcaaatcaatgaagtgcact

SEQ ID NO: 12357 - DNA, 334 bp, Homo sapiens
  source 1..334: mol_type = other DNA
agggtctcactctgccacccaggctggagtgcagtgatgacatctgagctcactgcctcgagctcctgaccggagtgctgtggtgtgatctcagctcactgcagctttgatctaccgggctcaagtgatctggggggattaatgcatgatccaccatgctttgcaataagaatatttaaataaatgtgaaaatatctagtcatggatcatcactgaactcaaaaacaaatttctgttctctagaaatgaggattcatattttagaaagttttctaacaaggaaacttgttgggacctagcatgagcttctgtagttggagctcagtgaattccc

SEQ ID NO: 12358 - DNA, 346 bp, Homo sapiens
  source 1..346: mol_type = other DNA
gatacctaacttcccgggaatgcagcccgaggtgtgaaaattgctgcccaacccatggggaggtcgagatgggaggatcccttgagctcgagttcccgcctctatttatttaaaaaattacatatatatatatatatatacatacacacacacatatatacatacacacatatatacatacatatacatacatatatataaaacgcttcattttattatttaaagaaatgggcgggaacagcccggggctggaggatgccccaggaatccggcctcccgccgcccttcctgcctgccggaagctcagggctaatagttagcttcccaggaaacgttacctctgcac

SEQ ID NO: 12359 - DNA, 874 bp, Homo sapiens
  source 1..874: mol_type = other DNA
cacaggtcctttcagttcccgggccggagccgggcccgtcctccgcgaacgcggcaacaaaggcgaggagcggcggcgggtcctggacgcggggcagtcaggctcggccacccccagagcgcagcgcagccccagctgcgagcagccgcacggatcccagagtcgcccgccgcgttcccagcccagccccggccggggtccgcccggaacagcgacgcctcaggcccggcaagtctctctcggaccctgggccgagcctcctcgccccgcccgccccaggccccggatgtgacggcaccgtcgcccgcagcgctcgccccacgggccgcgcgtggagggtcccggtaggtggcggggggagggggtcttcccgccggcccgcggcccccacgtaccgctgaacatcttccccgccgcggccaggcagcgcctaccgcctggccagacaccgccgccgctctgtcgggggatccgggggcccgcgcagctgactcggcctcaggcccgcctgctcctcggatccggccgccgactctcgcccagcgctggcagcggctccgcactcgggaccgcgcgccagccgcgcgcgacttcggacacgcccgccgccccgcgtccccgcccccggccgccgctcctccccagcgccgccgccctggctggagccgaggccgaggagccactgcgcacgctcgcgccccggccgacccgcgccgccgcgccgccgccgccgccgccgccgccgccgctgccgccgggcgcgcccccgccaccagttcgctgcgtgtcgaggcgagcacgcgctccgccctggaggctgcggcgacgggtcctcctccgccgtccggtcgcgccctcgcggaagctcggcagt

SEQ ID NO: 12360 - DNA, 828 bp, Homo sapiens
  source 1..828: mol_type = other DNA
acgcctctgacaggcgtccgcccctcggccagcggcggggtccccgggcgcctccacaggtcctttcagttcccgggccggagccgggcccgtcctccgcgaacgcggcaacaaaggcgaggagcggcggcgggtcctggacgcggggcagtcaggctcggccacccccagagcgcagcgcagccccagctgcgagcagccgcacggatcccagagtcgcccgccgcgttcccagcccagccccggccggggtccgcccggaacagcgacgcctcaggcccggcaagtctctctcggaccctgggccgagcctcctcgccccgcccgccccaggccccggatgtgacggcaccgtcgcccgcagcgctcgccccacgggccgcgcgtggagggtcccggtaggtggcggggggagggggtcttcccgccggcccgcggcccccacgtaccgctgaacatcttccccgccgcggccaggcagcgcctaccgcctggccagacaccgccgccgctctgtcgggggatccgggggcccgcgcagctgactcggcctcaggcccgcctgctcctcggatccggccgccgactctcgcccagcgctggcagcggctccgcactcgggaccgcgcgccagccgcgcgcgacttcggacacgcccgccgccccgcgtccccgcccccggccgccgctcctccccagcgccgccgccctggctggagccgaggccgaggagccactgcgcacgctcgcgccccggccgacccgcgccgccgcgccgccgccgccgccgccgccgccgccgctgccgccgggcgcgcccccgccacc

SEQ ID NO: 12361 - DNA, 824 bp, Homo sapiens
  source 1..824: mol_type = other DNA
ttaaacgtctgcccgacgcctctgacaggcgtccgcccctcgcgccagcggcggggtccccgggcgcctccacaggtcctttcagttcccgggccggagccgggcccgtcctccgcgaacgcggcaacaaaggcgaggagcggcggcgggtcctggacgcggggcagtcaggctcggccacccccagagcgcagcgcagccccagctgcgagcagccgcacggatcccagagtcgcccgccgcgttcccagcccagccccggccggggtccgcccggaacagcgacgcctcaggcccggcaagtctctctcggaccctgggccgagcctcctcgccccgcccgccccaggccccggatgtgacggcaccgtcgcccgcagcgctcgccccacgggccgcgcgtggagggtcccggtaggtggcggggggagggggtcttcccgccggcccgcggcccccacgtaccgctgaacatcttccccgccgcggccaggcagcgcctaccgcctggccagacaccgccgccgctctgtcgggggatccgggggcccgcgcagctgactcggcctcaggcccgcctgctcctcggatccggccgccgactctcgcccagcgctggcagcggctccgcactcgggaccgcgcgccagccgcgcgcgacttcggacacgcccgccgccccgcgtccccgcccccggccgccgctcctccccagcgccgccgccctggctggagccgaggccgaggagccactgcgcacgctcgcgccccggccgacccgcgccgccgcgccgccgccgccgccgccgccgccgccgctgccg

SEQ ID NO: 12362 - DNA, 801 bp, Homo sapiens
  source 1..801: mol_type = other DNA
atatctgttaaaaatttatcggcagccatccgcctcgccattgctgagaaacgcaggcccggggtcggccggtgtccttacggattggcgagcgggcgcacacccctcctgcattaaggagagttctcagggtcacgctccgagcgaccctagagggagcggcggtgtcctcgccgccgccaaacccacctagagccgctctccgcgtcggcccctccaccgtcgccggcgactccggacagccgcggggcgattctggggcttccagaggggcccggggggaaggaggcggcgactcccgccgccccgcagagcctcggcggccagagctaccccaagaaggccagaccccgccgtccgcggctccgcgggccccgatagggtgggcgtggccgccgcgcgccggacgtacctctccaccgcgaaggaactacctcgccagttcccggcgacagaggaaatttggagtgcgggtgcgggcgcacgcgcactgccgagcttccgcgagggcgcgaccggacggcggaggaggacccgtcgccgcagcctccagggcggagcgcgtgctcgcctcgacacgcagcgaactggtggcgggggcgcgcccggcggcagcggcggcggcggcggcggcggcggcggcgcggcggcgcgggtcggccggggcgcgagcgtgcgcagtggctcctcggcctcggctccagccagggcggcggcgctggggaggagcggcggccgggggcggggacgcggggcggcgggcgtgtccgaagtcgcgcgcggctggcgcgcggtcccgag

SEQ ID NO: 12363 - DNA, 659 bp, Homo sapiens
  source 1..659: mol_type = other DNA
ccaaactataaaaacctcagactatttttattaatttttttaacaaccaacgtatctctcacattcgtgttttacctttaaaagtaatacaaatgctgtagtaatttaataggctcccgaaggcagcgcggggtccgcccgggctctgcgcatccctccccctccccggccgcgccgcggcgagaacgactggaacccgggcgtcggttcccctgccgcgtcctgaagacccggcttcaggaaggcgcggcagtttacttcaaagtatgaggaatctaaaaccgtttaagaattcaaaatcagaatcccacaaggcttcctttaaacgtctgcccgacgcctctgacaggcgtccgcccctcgcgccagcggcggggtccccgggcgcctccacaggtcctttcagttcccgggccggagccgggcccgtcctccgcgaacgcggcaacaaaggcgaggagcggcggcgggtcctggacgcggggcagtcaggctcggccacccccagagcgcagcgcagccccagctgcgagcagccgcacggatcccagagtcgcccgccgcgttcccagcccagccccggccggggtccgcccggaacagcgacgcctcaggcccggcaagtctctctcggaccctgggccgagcctcctcgcccc

SEQ ID NO: 12364 - DNA, 335 bp, Homo sapiens
  source 1..335: mol_type = other DNA
aaactctggaaaatatttgaagagatttattctgattaatggcctgtgacacagcccttaagagatcctgagaacatgtgcccagggtgcataagacatcaatcaaatacatgtaagattctgattagcaattggttaagttgttatcaatagtcagacttaaggtcggccttgatgttatggcctgaacaagtttttcaggttaactttggaaagccctttttattttttggtttacaccattatatccgatcatatataaatacaaacaaaaacttcaccaaatattactttctttttctaatactggagtgcagtggtgatttctgctcact

SEQ ID NO: 12365 - DNA, 611 bp, Homo sapiens
  source 1..611: mol_type = other DNA
agaacattagttatttttaatgtgccaaaaatttgtacatgttcaattaaaaatgttgtataatagtgtaatacttttctttgtatgaaaatgtcctcttcttcaaaggtatagtttgtaatgaattagattttctgccaataattgatatacaatttatattctttattgttaagaatgtctttgtttaaagggaattaatcttttttttcaattgttttccaagtacagttcaaataacttgcatatttactatacaaaatggttgacaagtgttctttttgcaaagacttgaatacattggcagaggtgctaatcacatcttccctaaggcacctggaagaattatttgaggaaaaaatgagttttcacattgttttataggaaattaaatttgtccaaagatttggagactatttttaaaacataaatacataaaatttcattatttcctgctatcttgtttgctggcgttattttgggataaattacaaaagaaaaaaaattagacactgcattaatttcttgttcttttggaatatcttagtaactgaggatcattttctaacaatgtacatctaaaagagttatctttcatatatgtacaagtt

SEQ ID NO: 12366 - DNA, 322 bp, Homo sapiens
  source 1..322: mol_type = other DNA
tcagacttaaggtcggccttgatgttatggcctgaacaagtttttcaggttaactttggaaagccctttttattttttggtttacaccattatatccgatcatatataaatacaaacaaaaacttcaccaaatattactttctttttctaatactggagtgcagtggtgatttctgctcactccgccgcggcctccgagcggctgggatcaggcgttaatcaccgcgccctccgtccaaagaaggaatcgccctctccctgctggggccagcgcaaactcgcggcggacgcagccagcacccgcagccagagggggaaggga

SEQ ID NO: 12367 - DNA, 393 bp, Homo sapiens
  source 1..393: mol_type = other DNA
atggcctgaacaagtttttcaggttaactttggaaagccctttttattttttggtttacaccattatatccgatcatatataaatacaaacaaaaacttcaccaaatattactttctttttctaatactggagtgcagtggtgatttctgctcactccgccgcggcctccgagcggctgggatcaggcgttaatcaccgcgccctccgtccaaagaaggaatcgccctctccctgctggggccagcgcaaactcgcggcggacgcagccagcacccgcagccagagggggaagggaggggcggggcctccgccaccacctcagctgcggaccgaggcgagatggcggccaggctgcgcaagggggcgagcccgggcagccggcgcaacccccg

SEQ ID NO: 12368 - DNA, 391 bp, Homo sapiens
  source 1..391: mol_type = other DNA
actggagtgcagtggtgatttctgctcactccgccgcggcctccgagcggctgggatcaggcgttaatcaccgcgccctccgtccaaagaaggaatcgccctctccctgctggggccagcgcaaactcgcggcggacgcagccagcacccgcagccagagggggaagggaggggcggggcctccgccaccacctcagctgcggaccgaggcgagatggcggccaggctgcgcaagggggcgagcccgggcagccggcgcaacccccgccccagccgcaccctggcggccgaggctggggaagccgtggcgtcccccatggacgacgggtgtacaggtaacgcccccgcggcggccgcggctcgggacactccctggaggcccagcggcccc

SEQ ID NO: 12369 - DNA, 589 bp, Homo sapiens
  source 1..589: mol_type = other DNA
tgttttaagtgcttatctcatttaatcctccaaatacccttctaaggttggtaggtattttataaatggtgaaactgaggccccaataagtaactttctgaaggtcactacgacttaggcagttgtcagattccagagttattaatcctcttgagtaaattaatagtacttatttttatcttaaaatgtcaattcctagtatttttactcaaacgttttaaaaatgctgactgactcaaagaatcttactagaccaatgagttagattgatttctaagttaaaaatactgagaccatcctggccaacatggccatccccagctactcgggaagccgagatgacaccactgcactccagaaaaaaagtactgtctacttgctgcaaaaacttatttttctacttataaaactttaaatttgaaaactgttgattagctttttatttgttttaattttactttaatagtttaatgtgtaaaacatattggcaaaaatgaagaataaccatgattacattatgagccctgtaagttattaatatcaatgtaactgtaattattgtcattttaaaaacactagagtccctttt

SEQ ID NO: 12370 - DNA, 189 bp, Homo sapiens
  source 1..189: mol_type = other DNA
aataattttaacttaagaatcagaaatttacttttcttggcccatcactatttttactaaaagtgcttcttaaattgttaaattatacagagtacctatgtataattgctgcaatggcctataattgttaaattatacagattacctgccaaaaatttgtcttttccggagagttcttttgaagtcact

SEQ ID NO: 12371 - DNA, 464 bp, Homo sapiens
  source 1..464: mol_type = other DNA
tagctgaactaaggaaaagtcccgcaacattttcatgtgtgcctttgtatttttattacatatatggatgtccctaaacaacatacattattgttttgctttatatattaaaaaggcattctgcaatttgcatttcttgttgacaaggttttgcaatacaagcacctctgctataggtaggtggcctctccctggaagaaggctcctggcctgcaggggcctctcttccggctgtttttcctcccgaagacaaacagggcgcagagcctcggctggccagctccctcaaggcagggcctagcatggcccggcccagcccctaggttcccccgcccgcggctcccgggcgcctccgcctcccgcggtgactcaggcggcggtgacggcagcggagggggcgatgacgggcgcgcgggcgtccgcggcggagcagcgcagggcggggcgcagcgggcaggcaaggg

SEQ ID NO: 12372 - DNA, 273 bp, Homo sapiens
  source 1..273: mol_type = other DNA
gtgctaagacagcaaggcccggcggaggtggtgttccaactgttgacagtaatggcactagcaataatgtccttcccaggcaaagatggtttttatgcctctgaaacagaagccggcttctgctgggccggctatggtcgacgccgcaccgtctcaggcccacttctcctgcgggagcggcggccccagcggagcccctgtgcgccacggcgagtgatgtgatgaccgacatggcgtctgggctctgaacacagactttactccttccccccg

SEQ ID NO: 12373 - DNA, 476 bp, Homo sapiens
  source 1..476: mol_type = other DNA
atgcctctgaaacagaagccggcttctgctgggccggctatggtcgacgccgcaccgtctcaggcccacttctcctgcgggagcggcggccccagcggagcccctgtgcgccacggcgagtgatgtgatgaccgacatggcgtctgggctctgaacacagactttactccttccccccgaaggtcagttgttgcctgacaacacagacggcggcccccgctccaggcaccagcccagcagctcccccgaactccccaggagctcgcgggcgagcagctccgcggaacccccagccccggggaaggaagctcgactctccgcggggcactccttccgggctccgggcccgactaggccatccgggaggccctggagcgccggggccggagaagccctgccccccgccgaagccccgccctgcgcccgagcgcccgccaatggcagggcgcggtgcggcgcgccgaggtgggacggcg

SEQ ID NO: 12374 - DNA, 621 bp, Homo sapiens
  source 1..621: mol_type = other DNA
aaggacaagctcgggccgggcccgcctcccggcttccctgccctgctccgcagcgcggacgttcccgtcggctccgcgccacgccctccccgccggcgcgcggttaccgtggaaaggcggccgcttgccgacgacgctcgcggactccgagtccacctggcgagtagcgctcccaaaccgcgagacccagagttcccgccggcggcaaggtcgtctccgcccctggcggggcctcaccaatcacagcggcgctcgtacgtggctccgcctccgggaggcgccactgcgcatcggcagggggggacagtgccgcttctttcagcgcccgtgcgccccccttggtccagatggtctgaccccctgcgcggcagcgttttcgcgggaaaactgggtcctacagcaccagctctcggggtgtaataaggacattacagatgcatttctcacttaaagattttttttattaaaaaaaattaaggacggtgggactgcaggctcgaggaacaaactggcgcgcttactggccaggccttcccgcaggggtccccgggaaagttcctgccgccgcgccccgcagccccgcctccgcgcgtaggggcatttccgggtccgggccgagcg

SEQ ID NO: 12375 - DNA, 615 bp, Homo sapiens
  source 1..615: mol_type = other DNA
cccacccagcaccgcggggctgctgctcaggacctgcggccgcggatcagttgatgaccggccagggcagcaccgcagcggtccgcagcggacaaggtctcctgcagccgcagcagggagcaacgcacaccggctccggagcccgccatgccgccgagtcccgctcccgcgcgtgcgcccgctcggcccggacccggaaatgcccctacgcgcggaggcggggctgcggggcgcggcggcaggaactttcccggggacccctgcgggaaggcctggccagtaagcgcgccagtttgttcctcgagcctgcagtcccaccgtccttaattttttttaataaaaaaaatctttaagtgagaaatgcatctgtaatgtccttattacaccccgagagctggtgctgtaggacccagttttcccgcgaaaacgctgccgcgcagggggtcagaccatctggaccaaggggggcgcacgggcgctgaaagaagcggcactgtccccccctgccgatgcgcagtggcgcctcccggaggcggagccacgtacgagcgccgctgtgattggtgaggccccgccaggggcggagacgaccttgccgccggcgggaactctggg

SEQ ID NO: 12376 - DNA, 407 bp, Homo sapiens
  source 1..407: mol_type = other DNA
cacagacaacctccatcttttggaagtgagatgagggtcccataagatgtaacactgtactggaaacctgctgtgcaggggtgcagcccagaagcaatgggttgtaccatacagcctggcgtgcagtaggcgtgcaccgtgatgtgcacacagtgacggaacgcgtcccgtcaggtgacagactgcctcctgttatgacggccaagatgtccaagatcttgggccttctgaggcgtgacttcagattttaatccctcaaggcggccagctgggaccctgccggcggcaccgcgcaccgagaacccagcgcgagcagtcgctgagccgatgggcggggcccagctgtagctttggctacgtcgcgggcagcctgggagccaatccgcggcgggctgagccgttgcctt

SEQ ID NO: 12377 - DNA, 319 bp, Homo sapiens
  source 1..319: mol_type = other DNA
aacctacaagggatgtgaaaaatcttttttttttttttttctggagtgcagcgatttctgctcactgcagcctcctcacgtgaactcttttgaatcgtctggagtgcagtggcgcaatcgcggctcattgcccccctgacctcgggtgatccgatcgcctcggcccattttgagagcgggattcacaagggaaagcagcgaggccccgcgacccctcggcccacgtgcgcgctgtccctcgggtcgccccgcgcccgccgggggcggagtccgctgtgacgcgtgcagggcggcgcgctcccggaagtgacgcgcgacg

SEQ ID NO: 12378 - DNA, 648 bp, Homo sapiens
  source 1..648: mol_type = other DNA
tttaatggctttatactgatgaaaatagcacctagaaataaaaataattgtctctaaagacccatacaaccctttttcccataaaaaaaaaagataagatctcttgtcaaagggctacaaagcatttctttcaagccacgcggccgcgctgcccctggcttcgcggaagccctgagtagcgcagcgccctcgccgcacgcaaggctgcagtcccgctccaggccagagtcccaggagagcgtcctccgcgctcacaggcgcctttcctttttcaaaagccaagaggtaattatttggtctttgtgcaaacaccagaggctggcctggtgtggtgcagggcggcccttccttctcctggcggacactgtgtccccgcgcgctggcgctgcaccacatctggaagccaggcgggcagggcagagaccccggctcctgcgcccctcctagctcccagagagcgtggatcgcgggcggggctcaccgagcgaggttacctctcttgaaaatacttaaacactttttttttgaaccagaataatttagtctgacaacagattcttcctctgttcacagctgtcccagagggaggagctgaaatctgaacctctcagctgtgattggatctttcttgcaaaagagaggaaaaaa

SEQ ID NO: 12379 - DNA, 512 bp, Homo sapiens
  source 1..512: mol_type = other DNA
tggagaaatcgaatatgtattcatattttattttctctgtttgacatttaaattagtgactgttggaagaaataagatctcattccaagattaagaagttatgcaaagagcacctgttagaaacaagagtaggtttgttctttccttattcttttagcaaaagatagggataaaatgctttaaaatatgcttgaaattttatatttaaaataaaccacctgaaagtatttttagattgaagaccatacacaaaataaaggtgtttttttagactgggttcttaaaactttaatcaatctatattcataataatatccttcaatttcttttttagcattatacaggaaactggtagatatttaatggctttatactgatgaaaatagcacctagaaataaaaataattgtctctaaagacccatacaaccctttttcccataaaaaaaaaagataagatctcttgtcaaagggctacaaagcatttctttcaagccacgcggccgcgctgccc

SEQ ID NO: 12380 - DNA, 423 bp, Homo sapiens
  source 1..423: mol_type = other DNA
catgtcttctagtcatgtatttgaaatgaagcttaaatgacttcctttaataaaatgtgtaaccatgttgccccaagctactgcctttgggagaactgcagtcattttcaaactggaccctatgcacactaccactcctcatgtcagtcagctcctggcctgtagtggcctctagggcatggaggccaaggctgctactgttgggcagggcctccccacgtcacagctgcagtgctcaggtggagacccctgggaatgggtcaccagacgccacactgtggacgagagcgtggatcctggcagaaaacagccccttttcagaagagggtgtgaagaaggctgcatccctataccgaaatgataggagctgggaggggccgcagcagcccctccccagacgccagcgactctccggccaggcag

SEQ ID NO: 12381 - DNA, 435 bp, Homo sapiens
  source 1..435: mol_type = other DNA
gtggcttacgcctgtaagagatcgagacccagctactagaaatttgttactaaaatcagaataaaatttagcttttgtatcagtaaatgatattgatacaatgtcataaatatcctcttcccactttcaggaagacttcaatgtttcctagagtgcctcactgaaactgtgggcaggtatgttcagtcccaggcaggctgccacacgtgcccagcgtgggagacacttgtgtatcgcctccctctctgtagtcaccagcggttgtgatattaaagaggctgagtccaaaagcattgggccaagtccttccctgctgactgcagccaaacttggcaggctgctgcgttcggagggcctttgcaggctggggcagacgtgcagagagtgcttgcttgctgcctctggctggctgtgtgcccacctcactccgagtca

SEQ ID NO: 12382 - DNA, 594 bp, Homo sapiens
  source 1..594: mol_type = other DNA
tcatcttgatttccataactggttatacaacttgatgagaaaaaatataaagtggattttgcttcttgaagaaaagacatcaaactatcataatcatactgggactgtcagttcagtgctcaggaagaaaagaatctgttcttctaggtctgaataatcaagtgcatatgtttttaattagcaacatccgtatgtcctgataaaataatttaaacaatcaattaaatcaaccttagaaaagcttctttgctgacattagcataaccctcacacggggggtttgttttaatcatctaaaaaattttctgaaacacacacgacaggtattgtttctgcagaaaaaagaagcacgtgttttttgtctaaggaaaagggaaacttcatttaccataaccttaagcacccaaacacggttttagagagaatcacaacctttaatagatcctctgttaaaaaagactgttagagaaaggggcttcgttccacggcgaccgtttcctgcgtgtgcagctccacacagcgaccgcggcctgcaatgtgcggagcacagcgcggccccttccagccggagctcgcgagccgcggtggcggctg

SEQ ID NO: 12383 - DNA, 460 bp, Homo sapiens
  source 1..460: mol_type = other DNA
cacagcctgctggggcctgttgcagggtctccatcaaccgttgctgcatgaatgattgcagatatctttcatgcaaacctaggaaagctttcaaaataaatctgagggtctcctatgaagaaaagtacaaatctttgttgaaggaaacagaacgcaatcagttttggtccttgatcaatgatctacatgagaatattttcacattgcaggtttgatgcaatcctaatacaacctgagaggctctgggaatgttactgtcacattcatcaggcattatcctcaggagattatcagtgaggagtcaaaccacagtagtcactttcctgagtgaaaaatcatttccaaggtgtttgacacaaagagtgcgctgcgggaggtaaagctggggccacacccccacccctgacaaatggatgcccaattgtggactacagtatctgtagtgcctgaaacaatccat

SEQ ID NO: 12384 - DNA, 509 bp, Homo sapiens
  source 1..509: mol_type = other DNA
aaaacaacgtaaattgggctttgctctggctttacaaaggcagagattgtcgagccctgcccccactgcaggagcctaggctgtgggcgactcgctagcactgccctgggcctccaagctgcctgctcgctgagctcagcgctgacactcacaggagctgcgttcgccggatcctctgagaggctctgcaacgatcccgatccaaagcgttttaaaaggtagccctgtcttttaaaattttaacaataacttaatttaggaatttcaaattgggtttctcaaaatttgaataatcaagatttattcttttcatcttatgtaattaaagatccacgagctttccaaagaagctctggattttccacggtacaaatctatatatatgtgcgcgcccctgtgcgaaagtcaggggaggctcaaacgttgtcaccaaataagtatgagactgttaatttggagagcgcttaggggctcccgtccccttacttcagcaccagaggggatggaca

SEQ ID NO: 12385 - DNA, 416 bp, Homo sapiens
  source 1..416: mol_type = other DNA
ggatgaacttattttcctcttaagattttttctattacttttatggatttaaaacatttttgtttgaaaatgttagtctttaaagataaagccaaaaatctgtttaaaaagaatgaccaaaaagtagatgttttcatatttattaagttttcagactatacatacttaggtttgtccatcagtgagttcatggttttaagcatataaatttaaacgttaaaagaagaaatcagaacccgtttgagtcttacagaaacaatttttattaaagagcatagtttggaattgttaccagataaaaaagaagaaaagctgttctgcattgtttcaatacatttggaagtaattttggaaaagtttgtttgcattatgctgcctaaaacacggtgttttagaaagaggcttttgcattgaaa

SEQ ID NO: 12386 - DNA, 463 bp, Homo sapiens
  source 1..463: mol_type = other DNA
tgtaggccaggctggtctgtgctgggatgacaggcgtgagccactcacccggtctggaaatgggctttggggtggttaaccaagcccagggaaacttgcgtggcccagcatcttccgtccgctgcaggaggagcacacgcccccggcccgggtcgcggccacgccgggcgtccgggagctgaggctggagggcgcctggcaggcagggcggggcccaggcggcgggagtgcttagctctgtggagagaccgtgtccttcatgcaaaggggactgtgcggcgaggcaccgaccccagcgccggtgcgaggagaggtggaggccatgctctcgcgtgatctcccctggcggggccagatgggggcgtctcccccgcggggagctgcccctgtgcccgtggttctctgcgcatgcccggaccccggcggctccggagtccgggaggctctggctgctccagtcgcg

SEQ ID NO: 12387 - DNA, 383 bp, Homo sapiens
  source 1..383: mol_type = other DNA
cgagttgctgggatgtaggccaggctggtctgtgctgggatgacaggcgtgagccactcacccggtctggaaatgggctttggggtggttaaccaagcccagggaaacttgcgtggcccagcatcttccgtccgctgcaggaggagcacacgcccccggcccgggtcgcggccacgccgggcgtccgggagctgaggctggagggcgcctggcaggcagggcggggcccaggcggcgggagtgcttagctctgtggagagaccgtgtccttcatgcaaaggggactgtgcggcgaggcaccgaccccagcgccggtgcgaggagaggtggaggccatgctctcgcgtgatctcccctggcggggccagatgggggcgtctccc

SEQ ID NO: 12388 - DNA, 371 bp, Homo sapiens
  source 1..371: mol_type = other DNA
ttaaatgaagataagaataataaacttcatattaacataaaggaaatattaatctacgggcaaatgaatatcttaagatcatttttaatgttttttgcccatggttcaataagagtatttataaaacatgtaaacatgcaagacaaagggcccttggagcccacggagcctcgctctgtggcccaggctggagtgcagatgcagtggtgcaatcttggctcactgctcctgagtaggcaagccaccatgcctggcctcctggtttctttagagacttcaggatttcacaaacaagggttcagaggatcctgagctgtcatgaacatgctctctgctggaggctgtctccatgaagcctgcgtaactcaaag

SEQ ID NO: 12389 - DNA, 437 bp, Homo sapiens
  source 1..437: mol_type = other DNA
cacctgcgctcagcaggtgcagtccatcttaggcagattctgggacagactctgctgcatggtagccttgaagctctcattccacaggccttgaggacgtgggacaggaggccaaggaggtcccttcacgacctctatccgtgatctggctgagggatccactctgatttccaggtggtttaaataacctacctcactgcaggggcatcatgcacgttcaggatgaagggggtggaagatcccccccaccggcctgcgcggtccacgcggcgtggacaacagacccttgtgggccactgtggaggccgtgccactcggcgccagccccacggccatcaccggaccgctggagatgtgactgggctcgggacatgtgagaaatgagttctgaattttctttgtgcggttggtaaataacacagagcaaagttagcaag

SEQ ID NO: 12390 - DNA, 637 bp, Homo sapiens
  source 1..637: mol_type = other DNA
atcaatttggattgtgccaataatctttatttacattgtcaaatttattggcagaaataagcctgaagcttttacttaacaaaagaactgtctaaagatttttttctatcactttgttattcacttaattatacaacaacattggtgttttacaagatgaaagagaaattcctatattaatcaaagtgtggtacaggtaaacctagtttgagaagtattgaacccaattctaatacttagacatgtatttgcttttccataatagtaacttctaaaaaaagattatagttcatttggatcccaaatatttaaagtcagtaatatatgtgtggaatttgcttttctagttatagctacataactaaaggtaatggactccggcagcccctgcagaaggtcctactaggctgcagccatccattgaatcatgacagtttctgatgaatttgctcgataagatgacaggctgtagtctttacagtaattaagaaagtcataaagaaacaagttcaatttttcacaaaaagttattacttaatttctgattcagtcttacacagagaactgaatgcaaatccctttcatataataggtaaatctgtatacattagctgaagtcacgtggcttcaaagttta

SEQ ID NO: 12391 - DNA, 763 bp, Homo sapiens
  source 1..763: mol_type = other DNA
gagataattagtagtcaattgattagcgagcaatttcaacatttttcaatatacttaacagtttgatcagtttcattttttaagttgttaacactaaaactctttataagagttccctaatttgaagaaaaatccagccggctgctttttggcgatttcaaccggccactccccccagggaggccaggggagctgggcgcgtgtccccggtgcccagccccagacctcttccgcccgccgctcccccacgcggaagagaacgcggtgctgcgcctaggagagcaggtcgggcctccagacctggggcaggggcggctggcgtgacggcgtggccagtgttcctgagcgagcaggggctcggcagcagagcgcaccccgcacctttgagcccaaggcgcggagatctccgctcccgtccggacctaggcgccgcgggttctactgaccccgccagccaggggaagccgtgacggaccccgaggctcggggggtccagggagaaccgccggggcgacgcggcagttaccctactgggtcctcccggggacggcgaccagagagcgagcccggggtccggatccgaggcaggcgttgcgcagggagccctgagacccgctgagtccgaggctggtgcccgcccggcccagcgcggacttccgagggtcccgcgcgctgggacacgccctcatcctgggggacgaccccgtggccccaggcaccgcctcccgttcccgccccgcgccccgcagcgcttaggcttcgg

SEQ ID NO: 12392 - DNA, 387 bp, Homo sapiens
  source 1..387: mol_type = other DNA
ttttattttccaattaaaattaatttttgaactttctaatgttttcttatttcacttcagtagagctgtgagaaagcgacactgctgtgtttgcttaggaaataccagattcctatgcgtatgataggcatgttggacatgccaagcctagataaactactgtgacccacaagatttctttagagataattagtagtcaattgattagcgagcaatttcaacatttttcaatatacttaacagtttgatcagtttcattttttaagttgttaacactaaaactctttataagagttccctaatttgaagaaaaatccagccggctgctttttggcgatttcaaccggccactccccccagggaggccaggggagctgggcgcgtgtc

SEQ ID NO: 12393 - DNA, 512 bp, Homo sapiens
  source 1..512: mol_type = other DNA
cgccacggatagatttgggatgggtgtgcacgcatgactctttaaagtgtggtcataccttgaagtagtgtagacttggctgccaaaagagtcacgttactcaagtctgctgcaaacatttaaagtgtacctatttgatttatacataagtttgaagagacttaagtagacttaattgtgtgtttaatcaagaatgttattacattgtgatagacgataaaaagagggtccttccacttctgatcagataagaccattgctaggaatgtgaaaatatgttcgctttttattgttgtaacagaatatggccctaatgaagatattttctcaataacattcctgtcatgtcttttaatgtttgtgcaaaacctggataaagttttatgtcagggatgctttaggcacataatgcttaatattgacatagttcatatttttaaagtaattttatttagtctattttgaactttttatggtaatcaagatatgattatttatgtacctaatccttt

SEQ ID NO: 12394 - DNA, 443 bp, Homo sapiens
  source 1..443: mol_type = other DNA
ctggggaaattgaggtgcctaaacccccagtctcccccaggagtaccctgtggagaaggggaacttccccactcccttgaagagaatgtctctcattggagcaccaatactatcagcaattcaggtaatacccgtaaggtgccaaggaaatattctatttatgtgtcttttaagtcattttatgaactggtcttattctaactgatgggccattctaataagcgtagttccgaactatgcaggcatacttgcactaaaggaaggctgcatggccggggaccaggcggtgtgccgctcgggcagtggccgggcgagcctgcggggctggactccgggcgggcggggcggggcagggacctgccggcctggggcgggcgcaccagacgagctctccgcccgcaggcccccagcgcccagccgcgtcccggctgcgtcccgccggt

SEQ ID NO: 12395 - DNA, 568 bp, Homo sapiens
  source 1..568: mol_type = other DNA
tacaaacacaactcagaattcctgatgactttagagaagttcactcataccagatattcctggatataacaggaatttgagaactattatgtaattattctacgtgtaacatctgctcatcagattttaatattcaagcctcgtggcttcaagtatttgtaaagctgaaaacgtggttgtggcgtttggtgccgccccaccgctgcgtgcagtcccggcggtccggatatgcgggggcctgggccaggcgctggtacgttatcctgttacagaccttggcctagtccgcaggttgcccctggagaggcgacggggacaccagaccctcgattggctccgctcctccgcgacaggctgaggggaacaagctctctttcgcctggggacgatccagtgaccggcggccccagcggagtctcccagggtcaggccaggacagccaacctgccggccggagagccggaggcggggccgcccccttcccggcaggctgccgacttccggacctgcgtagacgcctctctgcgcctccaggcgcgcccctcccccggcaggccgtttcccggca

SEQ ID NO: 12396 - DNA, 558 bp, Homo sapiens
  source 1..558: mol_type = other DNA
aggaaaacatgctatcatatatattactttaaggcctgtaaatgtgaattttagataaacaacgaataactttttagtataaaagtaaatactgcaatggaatttattatttgctaaatgcccgagttttctatttaaaatcagaataagaacgcctgcttctagctgttaaatccaaatggaaattaatttgaaagcgcgaaatcaaacttttcaaaagtgcttccgggcggaggtcctcggcctcccctaggcgaggcactaggtctgggggcggcgggtcttagcgtgcccgccacgctcgccgcctcccacctgccctggctggctggggcccgacccttgcgtcgctccggggcccaagttacggactcggcagcagtcacgtgcctccgatcacgtgaccggcgcctctgggacctcagacctctggacctgacaggagacgcctacttggctctgacgcggcgccccagcccggctgtgtccccggcgccccggaccaccctccctgccggcggaaggccgccctcgcgttgtttggtctcaggctgcaga

SEQ ID NO: 12397 - DNA, 461 bp, Homo sapiens
  source 1..461: mol_type = other DNA
cagctggtctcgaactccagacctcaggtgatccactgaatttttaaggaaaacatgctatcatatatattactttaaggcctgtaaatgtgaattttagataaacaacgaataactttttagtataaaagtaaatactgcaatggaatttattatttgctaaatgcccgagttttctatttaaaatcagaataagaacgcctgcttctagctgttaaatccaaatggaaattaatttgaaagcgcgaaatcaaacttttcaaaagtgcttccgggcggaggtcctcggcctcccctaggcgaggcactaggtctgggggcggcgggtcttagcgtgcccgccacgctcgccgcctcccacctgccctggctggctggggcccgacccttgcgtcgctccggggcccaagttacggactcggcagcagtcacgtgcctccgatcacgtgaccggcgcctct

SEQ ID NO: 12398 - DNA, 544 bp, Homo sapiens
  source 1..544: mol_type = other DNA
ttataattttatatgaattttagaatcaactatcaactcctgcaaaagaaaggagctgacatatgatagccattgtgttgaatctgtaaagcaattttacaaaaggaaacttttccaacagaagctattgggcattagttgagccactctgtttaataatcttatatttataaagcagtttataaatatgaagtatagtgttagaagccaattcttggcttactcattgggtacctagtcatctcataagaaaatcaatttaacttactccacatgatgtatgtaaaaagaataataattcttgagtttaagatgttactagctacaaagatgactgctattaagatgaccttttaagaaaaactgcctgtcaattgcatagcccaagattgtcaagtactattggatttttgccaaacaatctatttaatttattttgatttaggattacattttaattaagaatacatttctgcctttagaaagatctgtggataagctgctgatccacaaagcaggtaatccttattagtataacttttgg

SEQ ID NO: 12399 - DNA, 570 bp, Homo sapiens
  source 1..570: mol_type = other DNA
cactcccctgccctctcggcaggcaagggaggaaatgacgtgccctccgggctccagggaactaaccccgcggccccaccgggtcccactcccgaagggacgctgcgggctacggggacacgcggtgctgcgagtccggagagctgggcggctgggttccccctcccgctgcccctcctttccccggactccggagtccctggagaaggggacgcggagggtggagtcaggggttagttcccccccttatcccccgctcggttgctgggtggggcctccgcgctctggctagctgggagggggcgagggccgctttccagggcgctcagagaggcgccccgggccggggagaggtagggggctgccctccagagacgcgcagtccacagacgcgaagctctggggactagtctcgctcggccccgcgcgccgaggggaggcgatgacacagagggcttcgcggacgccctctacgcgcgccggggctgcggccggggtggaggtcgcgccccgcgtggggcctcgggggtacccctagcacccgcggcggtggagtgcgccgccgctgga

SEQ ID NO: 12400 - DNA, 294 bp, Homo sapiens
  source 1..294: mol_type = other DNA
cgagtggctgggatcacacgcgcccggccgattttttttaaaaaaaggaacgcttagccgtggagatcgcgccactgtactccagccaaggacacgggtagcagtctcctattgggcctccgcgagttctaaaactccgggatgtcccgaaacccgccccgtgagggggcggggccacgcctgcccactagcccgacgcccgcctggcgggaacatgggctcgcccctcaccagcgatctgcagtcagttggtagcgcctgcacgtcgcgcgcggtctgcctggggaggaggag

SEQ ID NO: 12401 - DNA, 198 bp, Homo sapiens
  source 1..198: mol_type = other DNA
caggctagaatgcaatggcagtctccgagtggctgggatcacacgcgcccggccgattttttttaaaaaaaggaacgcttagccgtggagatcgcgccactgtactccagccaaggacacgggtagcagtctcctattgggcctccgcgagttctaaaactccgggatgtcccgaaacccgccccgtgagggggcggg

SEQ ID NO: 12402 - DNA, 377 bp, Homo sapiens
  source 1..377: mol_type = other DNA
ttattgtaaatacaaaattgcatgcaggattgtgtaaagacaatatgaatggatgtgcaatcacgatggataagatagggctataaatgccctcatcctgtttctatggattgtttgtaaccagcttttgctacaactgttactgctgattaatatcttgctaatcatagtattagaaattactgatgcacacactatattgtaaattcttatctctgtatactgtacttctacatacaaatgtactatacttctacatacaaatgttatgttaaagaattatttcatcaccagaagtccgcctggcattgcgggctgctggccagatcccacaataccctgttcttatgacagtgagttctcatttgatctgacag

SEQ ID NO: 12403 - DNA, 455 bp, Homo sapiens
  source 1..455: mol_type = other DNA
gctgggagtgttacagctcttaaaggtccctttccacagtgtggaaggggacccagggctgccactgccagctaggggatggggcccaagtcctgcggattggtccactttacagaacactgattagcccgttttacagggtactgattggtgcattttacaaacctctagctagttggtacattttacaatcctcttgtaagacagatctggtgacaaatgttaccctttccaactaaagtttaaagaaggtaagttgtactgcaaaagctccatcacttccaccaaggagcacctggggtggggctcattcttttcactacagccagcactgagcatgcgcaggctgcgtggtgtggcgaaagcgcagccaggtccgcgctgccgccgcagccaatcggagggagggagccgcccggagcgggcgaggggcagggcagggcggaccctggacg

SEQ ID NO: 12404 - DNA, 526 bp, Homo sapiens
  source 1..526: mol_type = other DNA
acagtgtggaaggggacccagggctgccactgccagctaggggatggggcccaagtcctgcggattggtccactttacagaacactgattagcccgttttacagggtactgattggtgcattttacaaacctctagctagttggtacattttacaatcctcttgtaagacagatctggtgacaaatgttaccctttccaactaaagtttaaagaaggtaagttgtactgcaaaagctccatcacttccaccaaggagcacctggggtggggctcattcttttcactacagccagcactgagcatgcgcaggctgcgtggtgtggcgaaagcgcagccaggtccgcgctgccgccgcagccaatcggagggagggagccgcccggagcgggcgaggggcagggcagggcggaccctggacgcgcgggcgcgcgcggaaggtagcgcggggccgcgttggcgcgcacgcgcctgagcgtgcgcccggtggggccggccgggactcgccgctcgcacgcccttgggccg

SEQ ID NO: 12405 - DNA, 529 bp, Homo sapiens
  source 1..529: mol_type = other DNA
tatttgtgattactagttagagctagcagaaaaagaaagaaaaagaaaggaacagtcttttctatatttaagtcacttgagagaaaaaagaagagctggtatttttcgagtaataatgttcgtattttgtgatgcagatactcaattttacattctaaaaatactacttttatagtaggaagcaccgcttgttgcaagaagttggtcgtaactgtaaaatgtagtaacaccatttacctctagaatggtaaatcgagtaaggcttatttaatacagcgtctggcatacaccaggcattcagtatggcgccagtcattaacaataggtggttactaactgtcacactttgagtcttattcaaagatttgctttactctgggttctgcattgacctcagagaagacagactcaaaaaagatcctttatttaacgcagtgtttttagtgcattcccacgcctctgcccgactcccgggcttgcgcgcgcggctgcagcgcgacaggggcggggccacggccacaaagcagcc

SEQ ID NO: 12406 - DNA, 359 bp, Homo sapiens
  source 1..359: mol_type = other DNA
aaagctggaacctggtcccaggtgccatctggggactttatgtgtgacaaagcataaaatcatagcatttcatcgtaaattgtgtacgttcacagtcatttcagaattacatcaatgaggtaatataaataaaacaaaaggcctagatctttatttttaaatgattaccaggagcaagtactgacttagaaacttatcagaatgagaaaatgtcaaacaatttcatttttagcctgcacaataacaactttctcctgttaacataaataaatgagggttaaaatgcttgtgtactggtgaagtactttttctggaggataaccatggattaaattaattggctgtactcaatcctactg

SEQ ID NO: 12407 - DNA, 692 bp, Homo sapiens
  source 1..692: mol_type = other DNA
aaaactttttttttttccagatcgaaacacaagtttaatagtcattcagatttcattccagtctaaagaaacttatagaaatctaattatctgccagctttaaactgactgtaagaaccacagttactttgcagctaaaacagatgctgtctttacattttagaaatcagtattaaggctcacctgttactgaacacatacgagaaacagttttgttatgcgtatcttatatacatcatgtatacattttcgtactttcacatgatgtgtataataagatacacataaaaactggttggcttgtcatgagtaaatgctttattctttagagtgaaggaatattggatacagaacgtcgttccatatttaatcttgctttagaaaattaggatttatcttgggggaaaaattgtatttttaaatttattatcaacggtgtctttcgcatttgagaaaacacattctttaaagagaacatctaaacgaccttgggcaagtacgtcgattccaaggacggcttttcgagtctccctaaccccggtgggagaggacgcggcgccagagcccagctccggctagttttcccgggggcactgggacgtgggactcggaccacggcctgggcgtgggcctaacgacgcgggaccggcccgccctcgccgctccattggccacatctgtgcagaaaaggc

SEQ ID NO: 12408 - DNA, 679 bp, Homo sapiens
  source 1..679: mol_type = other DNA
cgccctcagctgccggcgcggcaccaggctccgcgctccgagccccgtatggcaaggccgggcacgcccactgccgctgctggcctccgagcccgggcgcccgccagagccgcgctcccagcccttctccaggtgctggcggctccgaccgctctccgccgtcctccgcgagggctgcacgcagggacccctcctctcagcgcggcgttccgaaatcccgggagtgggggccttcgactcctcaggcccccttggccgctcctcccggcccttgggacccgccagggcagtcccccatcctcctccctcgcccctcccgagccagggtgggagcgacggcagctggggatgaggtcatcctctccctcggagtcagctggtggaggagaggaaggtccgaggagcgccgcggcggccgctgctgctcctgctgctggcggcggcggcggctcgggcggcagcagcgaagccgggacggcgaggagcgcgggcggcgggcaggggcgcgcgcggggcgccgcgagcagcttggctccgcgcaggcagccaggcggcgctcctgccggccccaggcgcgccgctagcccggcccagcgcccagcccggcgggcggcgggcggcggcggacggcaggcgagccgacgcggggagccgcaccgcctgggagggaagccggggc

SEQ ID NO: 12409 - DNA, 393 bp, Homo sapiens
  source 1..393: mol_type = other DNA
tgcacatctatactggtatatctgtaaccgtgcagacatttgaaaatgaatatttccactaactagtaaatgtggccaaaatactattgaaaataccattcaaaatgcatgaattttagctcagtttttatatagttctgaagaagtaccaatactattttggcatttgaacttttttcttattagataattagtaacttgaaggcaaaaggaaaggtgtaatatacatcatttcgtttagtcctcctagtagttactattaatcacaggtgatcaaaggtgaccaggattccaagcctgatcggtctggaggctcgacctgggtcccggaaccagcgaagccactgggcaagcctagaggcctctacagaggctagagacgcctcgccccgg

SEQ ID NO: 12410 - DNA, 591 bp, Homo sapiens
  source 1..591: mol_type = other DNA
tttaatataaaggaaacaattcctagaattcaagtctcttggcggtattattcctgcatactagctatttttcatgtggggcaatttttacctgattcaaagatttccccaaaataaagatatcacaaaaactgatgtaaatatggttaagtcttttatctcaactagtttgaagttttaattatgtgcatttgggcttaagtagatttttaggtttaaaaaaagacgttaaccaattaaactttcactttatgacatcatatctactagagatttcatttttttttaaatgtcccctcgatttacaaatatgagatgacatatagcacctacgacattttttcataccactccgtcatgtctgagggttttgttacatcacacaatacctacatttctggctgtgctagaacatgaagagattctcttttctacttactagcaaaggcctgacgtacgcagcccgggtcgcgcctgccgggcctccgctcgtggcccgcggccgctcgcgccgggaactagcccggacgctgccgccggaagtggctccgaggggccacgggaaggggcgggaccacgggcggtgtcacc

SEQ ID NO: 12411 - DNA, 603 bp, Homo sapiens
  source 1..603: mol_type = other DNA
aacttttttcttattagataattagtaacttgaaggcaaaaggaaaggtgtaatatacatcatttcgtttagtcctcctagtagttactattaatcacaggtgatcaaaggtgaccaggattccaagcctgatcggtctggaggctcgacctgggtcccggaaccagcgaagccactgggcaagcctagaggcctctacagaggctagagacgcctcgccccgggaggatctccacacccggccactctggcgctggggcgcaacactgaggccggcgggaagccgagcctgcccgcgaagagactggggattccgaggcggctcctgggagaccggacgcgcgcggcctccgccgctcccagtcccgccagacccgatgccgggctggagaagcgcgggggccgacgcacctcggataggcgggggcaggggcaggggcagctctcctttaccctagagcggcgacagaagctcttcgggatttgcacggcggattcctccgaagcaacccgtgtgagccaagcggcggctgcagcccgggccgcgatgggggtgacaccgcccgtggtcccgccccttcccgtggcccctcggagccactt

SEQ ID NO: 12412 - DNA, 621 bp, Homo sapiens
  source 1..621: mol_type = other DNA
aaggaaaggtgtaatatacatcatttcgtttagtcctcctagtagttactattaatcacaggtgatcaaaggtgaccaggattccaagcctgatcggtctggaggctcgacctgggtcccggaaccagcgaagccactgggcaagcctagaggcctctacagaggctagagacgcctcgccccgggaggatctccacacccggccactctggcgctggggcgcaacactgaggccggcgggaagccgagcctgcccgcgaagagactggggattccgaggcggctcctgggagaccggacgcgcgcggcctccgccgctcccagtcccgccagacccgatgccgggctggagaagcgcgggggccgacgcacctcggataggcgggggcaggggcaggggcagctctcctttaccctagagcggcgacagaagctcttcgggatttgcacggcggattcctccgaagcaacccgtgtgagccaagcggcggctgcagcccgggccgcgatgggggtgacaccgcccgtggtcccgccccttcccgtggcccctcggagccacttccggcggcagcgtccgggctagttcccggcgcgagcggccgcgggccacgagcggag

SEQ ID NO: 12413 - DNA, 340 bp, Homo sapiens
  source 1..340: mol_type = other DNA
cttcagaacattgttcacggtgcccgagcctaatcttacatcttctcggcaccagctgctacgtgcaagcactgccctacatgctgggacgcataacgccagcattcctgcatgcgggcagtgcgggccctttaaggaacttactttgtaatgattattaagaactcagcgaccccttcctaataataccttggggatgggtcctgcgaagcccaggctcctctggagatccttcccctacaggagaaggctggcccgggctgctccactccccggagctgcagactgagtcgccaggtttctgtgccttcaaagccctgggaagtagctgggacctctc

SEQ ID NO: 12414 - DNA, 345 bp, Homo sapiens
  source 1..345: mol_type = other DNA
gaccaggtggccctctcggcgcaggcggggaccccaccctgcgggacttcggctcctccgtgcggacagggggcgcccgcagccgtgcctttcctagggcccgggatatttcctgttccggggcgtgtgggacccggatgcaacacccctttctaggaagacgcggtcccatggtgaggcggcagtcggcggcgggcggcgcaacgcagggctcgggcgccggggggaccccggtttcgagttcgcgggaagcttccggaagctgcctttctccagaactaataataggcttttagtttgcaagaactaaagtgacaagttacttaaaaaagtaaagcgtggctt

SEQ ID NO: 12415 - DNA, 577 bp, Homo sapiens
  source 1..577: mol_type = other DNA
ggggtcagagctctgtccctcctgagcaaataactctttcggctcagagcttcaggtggaaagtaatatgagatgattttactcttctttctgtgtaggtgagctcaccctgcgctctctcccactgctcagctcagttgcttatgtgattatgaacagatgttcagtattaagaagaccctgggggatcttatccaatgactgtggctagccaggttccaggccgggcctcaggatagctgcgcagcctggcattttcgcctcactttccagaaggacgagaagccaagttttccagaaattgtagatacttctgctggactgggaagccaggagctgaaatatcacaacaggacgtttcaggctatgtacgagaagcatttctgccaatgctcatgtcagctaagctcagagaagttacctcaaccagactcgaccaggtggccctctcggcgcaggcggggaccccaccctgcgggacttcggctcctccgtgcggacagggggcgcccgcagccgtgcctttcctagggcccgggatatttcctgttccggggcgtgtgggacccggatgcaa

SEQ ID NO: 12416 - DNA, 633 bp, Homo sapiens
  source 1..633: mol_type = other DNA
ggcgaacccgaggcctcgccgccttccgcggtgtagcccgtcagcatctgatcctggacggcgcgcacaggtgaacacaccggcagaggtcatcttcctcgcccccggagcgaacagaccggtccgcgctgcggcgaagcctggcgggagcgcctccgcgccgcagaagtgcattcgggccccgctacggcccaagggtccccgcttttctgcggccgcttcggaggtagggcgggggaaccactcacctccggccttcccaacttgctgcccccgctccccggcggcagcccgcccaatcggcgcgcgccgccgccagactgacagccgcgcggggccctgggccgcaggggcggtcgggcctcgccccgcccccgcctggcgaaaggagggccgaggcgggaggagtgggcggggcggtgagcgcgaccccgccccctcttcccccgccccacggccctcggcttgacgggcggcgtcgcggcccaatgggcgggccaactcccgccagcggcggctccgagtggccagctctcgggcggagcgcgcgcggggggcgggcgcagcggcgggcgggaggcagcggtgggcgcgacgtcggcggcggcggcggcggcggcggcggcagctgca

SEQ ID NO: 12417 - DNA, 530 bp, Homo sapiens
  source 1..530: mol_type = other DNA
aacttttcaaactttccagaccgaataaaggttagaagcgacttcgggagtccagcaggggctgagagtagcacaaacttttcctcctcctgccgccgcccccggagaactcaccgcggggccggaatatatgcgctgcccctgcagcccaacttgcagctgccgccgccgccgccgccgccgccgccgacgtcgcgcccaccgctgcctcccgcccgccgctgcgcccgccccccgcgcgcgctccgcccgagagctggccactcggagccgccgctggcgggagttggcccgcccattgggccgcgacgccgcccgtcaagccgagggccgtggggcgggggaagagggggcggggtcgcgctcaccgccccgcccactcctcccgcctcggccctcctttcgccaggcgggggcggggcgaggcccgaccgcccctgcggcccagggccccgcgcggctgtcagtctggcggcggcgcgcgccgattgggcgggctgccgccggggagcgggggcagcaagttggga

SEQ ID NO: 12418 - DNA, 188 bp, Homo sapiens
  source 1..188: mol_type = other DNA
ctgtcccagatatgggctggctaaggtattaactcttttattgatttattaatgaatgtccccgcactgcagagggtacagcctaggccttcttaaatctgcaggtccagaaaacgtcgcgcactggggctacggccggccccacccctggcgctgccgcggcagtcccgcccttggacttgggcggc

SEQ ID NO: 12419 - DNA, 164 bp, Homo sapiens
  source 1..164: mol_type = other DNA
ggaaggcccttaagcacctggggtgcatgtcccagagccccacacagcagtgtcgctgtgtggtgacggctgaaaagacagtcgagggaagaacaaatccagacctgtcccagatatgggctggctaaggtattaactcttttattgatttattaatgaatgtc

SEQ ID NO: 12420 - DNA, 518 bp, Homo sapiens
  source 1..518: mol_type = other DNA
gtgccctcggccccctcccggtggagaagaggttccaagccccggcgtcccgggtagggtgtccctcaggacagcgctctcaaggcagtaggggctgaaaagcgcgcagtcccggaacctgagggtttaaaggtgaaaattctgtcctgagattttaagattcccagaaactttcaatcgttcagttcctgtaaccattaattgagcgcctaaactgctgtgcttggtgcccacggggacccgcgagggggcccagggaggaggcgggaaaggggcaggttcaccggcccgctgggtctccagatagtgactttatgcggagaatcacctggccgtgtggggagccaccgagcgccccctgtggcccccacccgagctcggcggggggagcggcgcgcgggtgctgggggaccgacccctcccgcgaaggcgtcggcgcggggctggcgtagggcctgcgtcagctgcagcccgccggcgattggggcgcgcgcgcctccttcggtttggggcttggc

SEQ ID NO: 12421 - DNA, 283 bp, Homo sapiens
  source 1..283: mol_type = other DNA
ttcagacacttccacgtgcagccttcctgtgctttgctcaggatgacaatgtacccttagtgttttggatgatgaaagcacaactgtttttttgtttttattttatttttaattggcaaataaaagttgtatcatggtgactatagttaatgtactatgtatttcaaaacatctaaaagaaaagattttaagtgttctcactacaaagcaatgataaatatttgagatgctgaactttttaatacttacattcttaagtttttcaaggcttgggctgagctgc

SEQ ID NO: 12422 - DNA, 578 bp, Homo sapiens
  source 1..578: mol_type = other DNA
acttaaaaccaatgctgttttgctatgaacagtaaaacaggctacattttaagttgatttatatagatattttaacatttaagaacaatactatacatcttaatattcacttttaagattaaagataaactcatgaatacttataaagtattcactatcattctagctaagatcggtgttatagtagaaggtagttatttctgtcaaaatacttcgtccggataacctctattttaagcccttggaaatgagagaagcctggtttgctttctttcattatgaaaaacccggatcaaggcccagttccccgtcctgccgggaagagcgcggagctaaaaaagcttgcaaatcaatcttttaaaatggtttattgtgttttctcattcctcaataatctgagagtgatgagaagacactgttactgtgggtttattacagccagccatagtcgtacaatgggatatttaatttaaacacccacaaggcactcagcacagcacactgtcctgtgcggattgctgcctcctgtcccgccccgccccgccccaaggggaggtgcccagctctccccgcccctc

SEQ ID NO: 12423 - DNA, 468 bp, Homo sapiens
  source 1..468: mol_type = other DNA
ggcgacagagcgaggctccgtcggctggagtgcagtggcgcgatctcggctcactgattcaagcgattctgtagctcagctaatttttgtgtatatatatatatatatatgtgtatatatatgtatatatatgtgtatatatatatgtgtgtgtatatatgtgtatatatatatgtgtgtgtatatatatatatatatatatatatatatatatttttttttttagtagggccaggatggtctcgaccaatccttgataggaaagatcagagaatctgtgcaatttttcatcagatgaaaaatccagaggatgttttctgctgccctctagggcggcctacagtgccgtttccctgcggagaaactccctttcaccggaagcgggggcgcgggttcgggtagcggggacgcgcacgcaccttgcgcgtcttcgcccctcctgcggttgccaggcaaccggccccggaa

SEQ ID NO: 12424 - DNA, 737 bp, Homo sapiens
  source 1..737: mol_type = other DNA
acatccattggaatagaatctccattagattaggaaatctgcctatcttataaaactggaatacttttgaagagttcttggcacgtaataaatactcaactaatatttttgtgtacacagaaataaagtttggaagaacaattgttactagtgttataaattattaatagatgttcactttccaccaagatatgttttagttagtcttaacttacttgaaatgaaatttattactttaataattagaaacattgataaacattttagtcacaagaatgatagataaaattttgatgcttccaataagttatatttatctagaggatgcacttatgtagaatactctcttgaggatgttaggtgagtaacatgttactatatgtagtaaaatatctatgattttataaaagcactgaaacatgaagcagcagaaatgtttttccttaattcttctttaaaagttaacaagaccaaattataagcttgatgaataactcattcttatctttctttaaatgattatagtttatgtatttattagctatgcccatcttaaacaggtttatttgttcttaactcttaatattagctgttgtccccaggtccgaatgttaagtcaacatatatttgagagaccttcaacttatacttttttttttctaatagaatgaacaaatggctaattgtttgctttgtcaaccaaagttaatggatctggatactatgtatataaaaag

SEQ ID NO: 12425 - DNA, 484 bp, Homo sapiens
  source 1..484: mol_type = other DNA
aaataaccttactgagagcaaagttttcatagttttgccatatattaaattattctggcactaatttagctagaaataaactgcttgtaaatgctattttgtcaaggactctacagtattccgtggtaactatgattactcttgggtaaactctttatagactgatgtgaagaccaaataagactaagaaatgatcgttatgtttttttactgggaatagcttaggcggacagagtaaacaggggctcccgagacctctttgagagctgcgatgcacacagtagtgagtgggtggcacggggcccgcgggcactgggcagcgggcagcggacagcgggcggcatgaaccgccccactttgccggatacctggggggacgggatcacccgacccggcgccgtgcgactgcgcgggctgaaggcgggggcggtgccatgacgcgcctcgggggcggtcctcgggcgcgcaccgctctcttacactc

SEQ ID NO: 12426 - DNA, 560 bp, Homo sapiens
  source 1..560: mol_type = other DNA
gttgaacatatctggaaatatactaaaaatcgctgaatggtatactgtttggtatgtgagttatatcccaataaagctgttatataaaaaaaaatgagactgtgttaaagattctttgcttggccaaacttcagttaggcttctgaacacttccttgtaaatgcagtgttaggaagtaacactgccacggcttttttttttcacaatggaggacacaaaacgttgttattcaagtctttgtggccaacagattggtgcagcatccctttttatgcgtaaaatatttaaaacgcaggccgctggcctcctctgaggcggcctgagtttggggcgcctcgtgtcaccgcgcgcccctcctccgggcctgagtcacggtgccgccggagtccccacgcgaggatgctgcggtgagcgcggccgggacgccgcgtcgggctctcggccgcccagcggcgccgcaggggaagccaggccggcagccgcgcgctccccagccggccaccgccctccccggctcctccggacctcctcggcaggcggcggcggggcctgcctgtgcg

SEQ ID NO: 12427 - DNA, 462 bp, Homo sapiens
  source 1..462: mol_type = other DNA
acacaaaaggccacatattgtatggctccatttatatgaaatacccatagatacatgtgatgaaaatgttctcaaattgtggtgattgttgaacatatctggaaatatactaaaaatcgctgaatggtatactgtttggtatgtgagttatatcccaataaagctgttatataaaaaaaaatgagactgtgttaaagattctttgcttggccaaacttcagttaggcttctgaacacttccttgtaaatgcagtgttaggaagtaacactgccacggcttttttttttcacaatggaggacacaaaacgttgttattcaagtctttgtggccaacagattggtgcagcatccctttttatgcgtaaaatatttaaaacgcaggccgctggcctcctctgaggcggcctgagtttggggcgcctcgtgtcaccgcgcgcccctcctccgggcctgagtcacgg

SEQ ID NO: 12428 - DNA, 401 bp, Homo sapiens
  source 1..401: mol_type = other DNA
catcaactgatgaatggatacacaaaaggccacatattgtatggctccatttatatgaaatacccatagatacatgtgatgaaaatgttctcaaattgtggtgattgttgaacatatctggaaatatactaaaaatcgctgaatggtatactgtttggtatgtgagttatatcccaataaagctgttatataaaaaaaaatgagactgtgttaaagattctttgcttggccaaacttcagttaggcttctgaacacttccttgtaaatgcagtgttaggaagtaacactgccacggcttttttttttcacaatggaggacacaaaacgttgttattcaagtctttgtggccaacagattggtgcagcatccctttttatgcgtaaaatatttaaaacgcag

SEQ ID NO: 12429 - DNA, 536 bp, Homo sapiens
  source 1..536: mol_type = other DNA
tgagtccccaaggcagcctcagcggcacgaatctcggaggggtgcgggctgcaggcggcagagggaagccaggggcggcttttccaggccgtccaccccgtccttcgatcggctcgagtccctcggacagttgcccactcacagcgtgcaaaggggtcgcactccctgtgggttctccgccctcagaagcggcgctgcgcaggaaagtcacctccactacgggccgggagtccgggggcggggctgcggggcggggtgcgccacagcgccccctagctgcgcgctccccacggtgccctgaggccgctggtggctctgtgtgtgcgacgcgctggtcccgaggagcgcggcacgggcacagcggaggcctcccagggtcccaccgcttctgtcccagcccggcctctggttccgaacagcagccattgggccttgacgagcccgcgtccggccgcgctccctaccccgcccggcccgggacgctcgcccccctagcccgagcgcgtgtgccgggctgcgaggggcgcgggaaagtt

SEQ ID NO: 12430 - DNA, 550 bp, Homo sapiens
  source 1..550: mol_type = other DNA
cttcgatcggctcgagtccctcggacagttgcccactcacagcgtgcaaaggggtcgcactccctgtgggttctccgccctcagaagcggcgctgcgcaggaaagtcacctccactacgggccgggagtccgggggcggggctgcggggcggggtgcgccacagcgccccctagctgcgcgctccccacggtgccctgaggccgctggtggctctgtgtgtgcgacgcgctggtcccgaggagcgcggcacgggcacagcggaggcctcccagggtcccaccgcttctgtcccagcccggcctctggttccgaacagcagccattgggccttgacgagcccgcgtccggccgcgctccctaccccgcccggcccgggacgctcgcccccctagcccgagcgcgtgtgccgggctgcgaggggcgcgggaaagttacctgcccggcggcggcggcagcggcggcggcgggaccaagaggcggcggtggagcaggctgcgcgctcggcgccgacgggtgcgcgccgcggcttgggggagacttcttaaacaa

SEQ ID NO: 12431 - DNA, 541 bp, Homo sapiens
  source 1..541: mol_type = other DNA
attgtacttaaggtcctaactcgagtttattgtgcacatatatcttctaaaaatgtggagcttttaaaattatgcaatgtgtgcacttcattatttacacgagagcctgcagcaagataacaaccattttcttttcttaaacgtttttaggaattaatagaactttcttggaaaaatttccaaactcgtttccactgaacggacgatttaaaaagtaaatactcagaagatactaagaagattccgctggagagtctctttttatgtatttcctggagtacgggggctaggccaggcacacaggggtcccgagtgaccttgggagacttgcgggctcgggcggccaagcaggagtcgccgcagcgaggaagcgccaggaggcggcgggggcgaccccgggggaagggcgggcggggatgcgccgacttgggactagtcgccccgaggcgcattctaactgtcggctcccctggccccaacggccagagagagaagggggcggatcctcgcgtaccagacacgccccggtcgggtataaaat

SEQ ID NO: 12432 - DNA, 555 bp, Homo sapiens
  source 1..555: mol_type = other DNA
taaatgttttcccactatttgttacacataaaaattatatacaattcatatattacatatggtgcatgttatatacacacacataaacagatcatctcggttttgcttaacctaagtcaggctcagaaccaggacaagtgcccagtctggagtgccgtggttcaatctcggctcactacaaccagactccgagtagctgggattacacctgacctcaggtgagagcaacgtagtactccactgtgcgtttccaatttataacttgccccgtgcccccaccgcagggctgaaggcgacggaaccgagcctttgtacccccgccccgttccctggcgtctcccggccgccgggctcgcccgctcaaccggagccgggccccgccctgctggaagacagggcggaccgggcaaggcaggcgcggggcggggcggggcggggctccggctggcggggcgcggccagcgtgcagggctgggccagcgtgcggggctcctcccctttcctccggcggcgccggcggccgcagaacttccgggtcggcgcggaggcggggcg

SEQ ID NO: 12433 - DNA, 704 bp, Homo sapiens
  source 1..704: mol_type = other DNA
tgtttgtagatctatttcctaaaataaaaattagtaaaaaaaagttttttttcttcaggtttaacattcattttgtaccgggagagtaaaatttttggtatggtaacaaattcgacaaaatcaatgccatctagttaaactttttgattaagtagtggatcctctggaatggaacatgtcccttccgaataatttcatgtgggaaaataatttcaagttgaagactgcagagactgccagtcacccccggccgccgccggccgcgcagcgtcggaaacccttcgcggcagccaggagggtcgcagccctcccggagccccgcttcctgccccggggcggcgcacccggctccgggaaggtgccgcgcgggagacgtggcagcagcccctccagtccgcgcccgggcgcagcggccgagcgctccgtgcagccgggcaaggaagactccgcggcagcagcgcaccggccggcggggagacccgcctgaagcgccggcgcccgccaggggacgggaagtggcgcccggcccgcccttgcggcccgcggcccgcggcccagcagctccgcgccgcccccgaattcttgcataaattatgccaggcgcgcctgacgtcaggtggcggcgcgcgggcgcgggcgcgggcgcggcgcggcccggagggagctggcggcgggcgcgcgcggccccgcggcttcgggtgcgc

SEQ ID NO: 12434 - DNA, 457 bp, Homo sapiens
  source 1..457: mol_type = other DNA
tgcctcctgtggccatagtcaagaggcttttgatacaccaaaggtatttaaaaatactaattggggtaggtcccaaaaaacggagtaaatttggttaatttccccttttttgtttttatctcattgatttctagaatggaagtaaacatcttaacatcttggtctccaatagtctatagcaaaagaagtctatttgaccctgttttcttgtaaatcattggaaagtgacaggcttcacaccaaaatgttctagtggtctgaggcaaacaagatcatgacaaatctcaagcccaccacattcatgaagttctggcaactttcctcaggttaaattattccttaaattatttacttgggaccttgaagggttaagtccagggcctttgtcagaatggtggtgcctctgctagtggagctacctctccctgcctactaagaattctggctgcagaaaagg

SEQ ID NO: 12435 - DNA, 611 bp, Homo sapiens
  source 1..611: mol_type = other DNA
aaaattaatgcttttttattttttgacaatttctatgatcgtaaatgaaatttatacacataaatctttgcatatctgaatatatccctagcataaggatctaaatgccatgtatatttatgacactggatatacattgtgaaatagatttttaaaaatgttatgctttctcactattattccaacaatataagacatgcatatttaaaacttcagcccaaactgccatattaaactgcatattttcatttactggcgaggttgatattaaaaaaatgtgtttattatgcatccccatttctaacatctactctgcaattttttaaagtggtaatttgtatttactttcttagaaaacctttcctatcctgagatcggtaaaatatttctgttcttctagttatatttttaaattttatgtttttgataaaaacatctatgtgtaatttattttggtgaaaagactttgatttgagtcttttcaaatagttcattttcttaataccatttgttagtaaaataattcccataggtttgtgatactttcttacctgtcaaatttaaatattctagtcccagatgttaacaaaattacaaataattattggtac

SEQ ID NO: 12436 - DNA, 494 bp, Homo sapiens
  source 1..494: mol_type = other DNA
tattatttattctttttatttattaatattgatatatgtattatattcctttttatgggaaatttgaatatttttctgttaatatcaaatcatttttgtttatttttggctgtaagaagaatatttacaaaagaatataaggtatattaagcatatcaaatgcgataaatgttggtggacagcagtttacaaagctgtttcctgcaaggaaaggatgtgtgttaacagagtttttaagattctgcagaaattgatgagtaacttggatggaatatacatattatactaaatctttaaaaaaattcaggagtttatttcctgcactacttcaaagttagtgttgcatctaaacaatcttttctgttttcagaaatatttttttttgaaatgatctatcattgtacataatcccaaattattggagaaataattgtgagaataagtgttcagtaaaatgttttcttcttatgatatcttacatttatttctaaaca

SEQ ID NO: 12437 - DNA, 520 bp, Homo sapiens
  source 1..520: mol_type = other DNA
cagcatagccccatgctagaagctggggcacctgccctggaggtcacagcatcggacattctcaattgtctttcaaatgattatggctaagccatctaaaggtaaaaaatgggatcacagagcttccaggatgttagccttagagcagcatcttccacgggtgccggtatggccacctaccctcttcattgaagagatgaagttaattgcacatgtgtaattagataggaagaaaaattttatttcctatctccattgatttttatccatacattaatttgtgcatgaatacacactaacaaatccaaagcatacgtgcatggatgctttcctgctatgtgtgggctgactgggggttcccagacaacctgcagatgtggagacatgtgcttacattaaaagaagaaaataaataacaatcttcctgttttgcttaatttatggaatttgagaattatacatctatttgcaatagtgatatttttctattaccatttttttttcaacaatggtttcctag

SEQ ID NO: 12438 - DNA, 403 bp, Homo sapiens
  source 1..403: mol_type = other DNA
atattggcaatatattcttgccgtaagccactggaaattactagtagtattcaaagcttttaaatttttaatttgcttgtgaagctttaaatttgagtgaaaaatttagtcttataaacaacttagctagatactatttgtgctaaattaatttagtatactaatcagaactctaatgaattctgtgaactgctaatgttagatcagtgaataaatgaaaaaaaaaatcagaatgtggttgtgtaatctttagtaagaattctagagcattgattaatttcttaagccaaatcaaacgcttaagctcaagaaaacaaaactggcagcacagtttgttccatttcattgcctaagtggtgattagcagcatttagcctctaaaaataactggtgagttctctcc

SEQ ID NO: 12439 - DNA, 563 bp, Homo sapiens
  source 1..563: mol_type = other DNA
cactcccaggggcaattgacagaaatgtatcaaatcactaagcatttcttgctgtgttagcacacaacaagtccttgtcaccacgtaagaaaatgaactttttgtgtcacatttgcattttcattccttaactaagagtatctgaaaatattcctgcttcagcaatggtttaagcattgaactagtcctaatatcaccattccagaaatgtcttagtattaatagaaatagggatctcttttgcactccttcctttccttgtatacggagcggcgcactccgcccacgggcggcccacgtgtccacctccgcgccctgtcccatccctatggagcggggtctgccaacgctcgcgagagccctctcggcttccacgtttgccacgttccaaaggaccgagacaggcagctgcgtagcgcccgaacagcccgcaggggcggggagcgcggcagggtaccgccgcctcgtaagggcccttgcgattgggtcccaggcgccgtcactcagccttccgggggcggggcgaggccgggaaggggcgtggccgtcgggcggcgagccgc

SEQ ID NO: 12440 - DNA, 611 bp, Homo sapiens
  source 1..611: mol_type = other DNA
aatttaaacctcttgtgaaaaagactgtccaatttacgttttcatggcccttatagatggaaactttcactgagtacaagctatatatccatgtggcgctgaccgcggttgaacgccgtttgcaggcgtggcctgggcgtgcccgcttcaacgcccggagttggcccccgtgtggacattcacattcaggggcacaggctgtccgtacagcgaacgttgtcccattcccggagatagggccccgaccttcaagggggcggtgcggcgcgcaggcgccttctagccagcctccccgctgcctggtgccggggacacccaacctcccctctcgaggacctgggttggccagcccagctttgaaggacgcggagaccacccggtacccgccccaggcgtttccagagtctccgcttaggcggcccgtgggggtcggggtcgcggtcgcggtcgcggaccggggacagagcaatggggcgggcgcgcagcgccggctgcactcccagagcctcccaccgccgccccacggccgcctagcgcgcgccgggactgcacgctgcggagcaccgcccacccgagtctcacgcgagtgcgctgccgcgaggtgtccctgc

SEQ ID NO: 12441 - DNA, 564 bp, Homo sapiens
  source 1..564: mol_type = other DNA
gaaacaggctgttttacacagtctaatggatgtgacatattatcttgcatttttctgatgatttcttcgcatattttagaaatactttatattttataactatattttccaagtttgtgctttaactttaattttcttatatagtcaatttttaattaacatttttatttttaatgttttatgaaactcttccaacagcctaagttaggaagatatatttatatattttcttatcaaagtataatattttgctttcgtatttacatatgcaaacgccgggtaaaaaatttttcctatgtggatagtcaattattctggcaccacaagttcatatttacaaggctacttgtctatttaattgttaaaccagactattcactgcatttactcttcttgcaacatgctaaaattgttaatttaaacctcttgtgaaaaagactgtccaatttacgttttcatggcccttatagatggaaactttcactgagtacaagctatatatccatgtggcgctgaccgcggttgaacgccgtttgcaggcgtggcctgggcgtgcccgcttca

SEQ ID NO: 12442 - DNA, 388 bp, Homo sapiens
  source 1..388: mol_type = other DNA
ttggaggcctgtaatcccaaaactttgggaggcccagggaggctgctgtgagccttgatcagactgctgcactccagcctgggcgacagtgagaccctgtctctaaataagtaaataataaattaataaaaaatataaatatataaatattggtggagaagttttcccgaatcgcattatggaatgcgtgttttagaatgcatgctgtcactggccattaaaggctcggctcctttcaatcatcccaactaactttgtaaacaggtgctcgccgcgggtccggcgtgcgaggccggagaccgccctgccaggctggagagtggttgtgcgacgggcagcggccgcagaggcggggccgagggtggcgcggggcgcgcgcttttcccgg

SEQ ID NO: 12443 - DNA, 590 bp, Homo sapiens
  source 1..590: mol_type = other DNA
atggtttttgaagtacagaaagtatttggtcatttaaattatttccttccatggactctgtatcactgagacaaggaatctttgcctttattgtagatatttcaatgaaaatgtcaacacgttgcaaattggcatactttgggtttgccaatatgtgataaagaactttttcaatggaaactttccctcttttcagggcgaaaagacgctctgcaactatacttaagtatcctaggcaactttatgaattgggcggcgaagtctgactggacttaagtttgagtaccacaactctaacctgccacagctgcacgggcaggcttgtggggacccagcaactccgtccagagagcggctgagtcagccagccgtccccacggctttgggcagccgccgaaggctcctgctaggcccggctggctcaccgggaagttccctgcctccgtcccgtcagcctccaggagggcgccgccggccgccgtgacttcaggacgccactctgccagggccctgcagcctcggagcgggcgctccctccatgacgcatgcgcccaccggccgtgagcgcgggtccggtctccggtgacgtg

SEQ ID NO: 12444 - DNA, 525 bp, Homo sapiens
  source 1..525: mol_type = other DNA
gaaaatgtcaacacgttgcaaattggcatactttgggtttgccaatatgtgataaagaactttttcaatggaaactttccctcttttcagggcgaaaagacgctctgcaactatacttaagtatcctaggcaactttatgaattgggcggcgaagtctgactggacttaagtttgagtaccacaactctaacctgccacagctgcacgggcaggcttgtggggacccagcaactccgtccagagagcggctgagtcagccagccgtccccacggctttgggcagccgccgaaggctcctgctaggcccggctggctcaccgggaagttccctgcctccgtcccgtcagcctccaggagggcgccgccggccgccgtgacttcaggacgccactctgccagggccctgcagcctcggagcgggcgctccctccatgacgcatgcgcccaccggccgtgagcgcgggtccggtctccggtgacgtggcggaaaagacgggcctcttcctccgactcccgagcgcgag

SEQ ID NO: 12445 - DNA, 351 bp, Homo sapiens
  source 1..351: mol_type = other DNA
accagagattggttttgaagctgctgtacccattttatcgtaaacatttatcaagtgagcaaccaagttcagttacttaatctgagtctcattatgtcttctataaaatacacattaaaaatagaaactcagaaaaaggtattttaaaagtttctccctgcgcgaaacgggttcgaggtcgcgcactccgccggtttctgccgccagcccaaccccgctgggtcgtacctaagagatcgccggtgtcagagcgcagcgggctcgctcctcccgcagggcccccacctccaggccttcagggctggttcttgggattcctgcccgggaggatcaagagctgccgggtcggaa

SEQ ID NO: 12446 - DNA, 212 bp, Homo sapiens
  source 1..212: mol_type = other DNA
acatacttctagggccaggtgccaagggacccatccctgtatcatagcactgagtcttaacccatgcctctttgaagacattttccttttaataaataagtaggaaacaacatatagactttggaaaggctggcgaaagccagcgtctcaggaagtattcacattatggaggcgcccaggctcccacctcgattccattataatatgctaac

SEQ ID NO: 12447 - DNA, 564 bp, Homo sapiens
  source 1..564: mol_type = other DNA
ttgatgctgaaagctttgaccgtttagtgagaaatgtgacaaaatgaacacttcaagagctctttatcttttctcgctttcgaaaaatcgaaagtcaacaaacacctctccgcccctcgggctcgggatggccccggggccgcatctgccaggcgagcgctggagcctggccccaccgagggactggcgtagccaggaggacggtgctcgcgcggcccgctgacgtcactgccgcagcggtctgaccccgcggtcagggctgaggacggcgactgtcggcaggccggaacgccgcctctagcgcgggacgagcacaccccatagcctaggcgcgccgctcggggggatgccccgaaacggtggggcctcgtgcgcacgcgccttggctggcgaggagccgccctcggccgcttgccagtctccctgggcgctgcggcggcgcggggcgctgggcctgcggcgcggcgtcgtgacgtcacggtggcggcagccgtggttggcgcaaggtccgcggctgcagtgtgaattacgccgggctcgcgccggcggcggagtgaagtcagg

SEQ ID NO: 12448 - DNA, 441 bp, Homo sapiens
  source 1..441: mol_type = other DNA
tgcttggtttttaaattcaagaagtataggagatattagcattgaatacaatctgggatatttattgttatgagagaatccagaatctgtttattggggttattgactgcaatggatacattattctcaagagtaggtttgtatttaaagaaattaaaaaaaaaataaaatctataaaacaagtatataaatccttactttgataaactacatagaagatattttaaaatatgaatttgagaagattgtgataataaattccttacaagaaaaaactgtactttgcgtctttcaagctgctagggagaaaatttatgagaagcgaataaaatattaggtattgcctttattagaattgcaagagttgctaaagaaatactcaatttcccagccggaatcaaatttcaatatagtgatgagacttcactgattggatggact

SEQ ID NO: 12449 - DNA, 305 bp, Homo sapiens
  source 1..305: mol_type = other DNA
gctaacgcacattactacactgcataagttagctagaaatgtaataatcatattttcacgacaattatttgaaatccagagtgtcctagagtattcaaatctttagaatgtatgggctccacatgttaggttaacaaaagcttacgactcgcagcctcattcagaatgtgggtgccctctcagagctccgcgcgtgcgcacaccgactgtgactctcagcagccggcttgcggagcggttgccgcgtcctctgcgagcctgaggaaacagctgattgatcagcctggctcaggtggctgattggc

SEQ ID NO: 12450 - DNA, 446 bp, Homo sapiens
  source 1..446: mol_type = other DNA
gcatatagtagatgctcaatacatctactagaagttgtgggagtaattcagctgtactacttacatcatcttttaatagtagaaaaaaaggtctacttttgctcatttaccggatttgatctcatcatcagtggaagttatgcagtgctttcaaaggccttccaccttgtcagtggctagtcatatgcattagaaacaattagttgatgctgaaagctttgaccgtttagtgagaaatgtgacaaaatgaacacttcaagagctctttatcttttctcgctttcgaaaaatcgaaagtcaacaaacacctctccgcccctcgggctcgggatggccccggggccgcatctgccaggcgagcgctggagcctggccccaccgagggactggcgtagccaggaggacggtgctcgcgcggcccgctgacgtcactgccgcagcggtct

SEQ ID NO: 12451 - DNA, 344 bp, Homo sapiens
  source 1..344: mol_type = other DNA
ccaggggctcccacagtgcagcggcaggctggagcaagcgaaggccccagaattgtgagaaaataaatttatcttctctataaattacccagtctcaggtattttgttatagcagcataaatagactatcttaggccattcttgcattgctttaaataaatacctgagactgggtaatttatatggaaaagagatttaattaccttacagttctacctgaggccaggggatggtgctaacccaaatatataaattacaggctgagacaaacactctctagtatggtttggctatggggatggtttcccccacgtgatagtgaataagtctcatgagatctgatg

SEQ ID NO: 12452 - DNA, 232 bp, Homo sapiens
  source 1..232: mol_type = other DNA
gaattgaggttttggaacatctacctagatttcagaagatgtatggaaatgctcatggagaacctctgcttgtggggtcagagcccccacacagagtccctactggggcactgcctagtggagctgtgagaaaagggccactgtcccccggaggctgacctggatgtgcatggagtcaaactagctatggtttagctctgtgtccccacccataagtctcatgagatcttat

SEQ ID NO: 12453 - DNA, 340 bp, Homo sapiens
  source 1..340: mol_type = other DNA
gctggagtgcagtggtgcaatctcaactcattgcagcttcgatataggtctcactatatagctgcttatcatcaaatctcaatgaaaacattagttgctcagaagtcaccttacttgttaatctagggctgggaccagagccagctactcctggcacctgtgttgctggggaaacatgatcttcactgagactctgttcgcctcagtttcctcatctgcaaaaaaagatgagaactgggggaatgtccttcccaacctcccaccatgggcaggagaggaagtgttgtccaagagggcctcagctggaccatccagcccaggtttgaccttgacaactggg

SEQ ID NO: 12454 - DNA, 268 bp, Homo sapiens
  source 1..268: mol_type = other DNA
gagcaggcggcaaaaacactgtctagttctaaacatggagtcctcatcgtgacaacataagcagtcctcatggcacaacttgcaggaaggcacgcaggctggcctggggccacacaggagtgtgggtgtagggaaatactttttacattggcacggctcatattatgtgtttacagagaatcatgggtcagatcagacccttgctctgctcccgagctgtgaaccagatcacaggagcagatttcagcctaggactctgagaatactc

SEQ ID NO: 12455 - DNA, 540 bp, Homo sapiens
  source 1..540: mol_type = other DNA
taatttaattcacaccagggatatgttaacaaaatgtgtttattgcccaaggtttttaaaatgaagaaagccgaaatttatcacatataaacagacttggatttcttttttatttttgatctgatttaaacatttttaaatacaatatgtattggttaaactgttgcttcacaaaatcctgcagatatggaagtaggactccatttatacttcagttgtcaatggcactggtaactacagattattgttgcaaactattatataatttaagaatttaaataatcagtaaaagactatcaaattttctttgtgttttttactagagttgttttataatgtaacttttttctcaaataattagatcatccactggtttttttatttatgcatgtatttatttatttattaggtggatacctttgaatttagcttttaaattggaatttttcaaagacgaaatacttaacattaagaaagtctttttgatgattgcctttgtgaagccaggataacaattttcgagacatgttttgttcatag

SEQ ID NO: 12456 - DNA, 500 bp, Homo sapiens
  source 1..500: mol_type = other DNA
cagatatggaagtaggactccatttatacttcagttgtcaatggcactggtaactacagattattgttgcaaactattatataatttaagaatttaaataatcagtaaaagactatcaaattttctttgtgttttttactagagttgttttataatgtaacttttttctcaaataattagatcatccactggtttttttatttatgcatgtatttatttatttattaggtggatacctttgaatttagcttttaaattggaatttttcaaagacgaaatacttaacattaagaaagtctttttgatgattgcctttgtgaagccaggataacaattttcgagacatgttttgttcatagggctggctctgtgccttcctggagaagccatcgccaagttctcagtgagtgctcacagagggcagcatgcacatttgcatttgttgttgacaactggtctaaatggggtttgtcaagaatgttgacggcaccgtcacgtga

SEQ ID NO: 12457 - DNA, 445 bp, Homo sapiens
  source 1..445: mol_type = other DNA
gtagaataagtaaagcttgtttaactcatgcctctctttaatttgggaatagaaaagggagtccacaattaatttagagtttctgagataacctaaaatctctaaaaaacttgaactgcattttgagagattcataactcctttatgtgcttgctcttgggaggaaaaagcagatagacgtttaaaagctggatgttcctgcaaaagatggtgggactgtctctagcaaagggatatttccagatagcatccaggtccaccccctccaactggctgcatttcatagtaagaggtttcacacttgggaaatctcattcaagaatttttgtcaatggacaagtcataagaagcccttccattttagggctcgttgacgtcaccaagaggcgataaatatctatgtgagattcagtggtttttgaagagggtcgacactataaaatcc

SEQ ID NO: 12458 - DNA, 594 bp, Homo sapiens
  source 1..594: mol_type = other DNA
tcacggtgcacaaggagctggagctgcagtttgacctgggcaacctgctggcgtcggaccggaaccccccgaccgggctgcggtgcgccggacccacgccggaggccgagctacaggccctggcgcgggacaaactgctcatcaaccagctgtggcagctgcccacggagcgcgtggaagaggcgatagtggcgcggctgccggagcccaccacacgcctgccgcgagagaagcctctgccccgaccgcggccacttacacgctggcagcagttcgcgccgaggtgagtggccagtggcggcggcgctggggctaccagcgcgcccgggacgagtgcccggcaatgccgaccccttggaggaccaaccggctgcgtaacctggcccgcgcgcacaagatgcagctgcccagcgcggccggctgctgggccgcgccatgcaagtggccaaggtctccaccgcctctgtggggcgctttcaggagcgcctccccaaggagaaggtgccccggggctccggcaagaaaaggaagccccttttcggggcgagaaaaagaaccagttggagctgcttcgtgtcatgaacagcagaagcc

SEQ ID NO: 12459 - DNA, 475 bp, Homo sapiens
  source 1..475: mol_type = other DNA
tggcttgctgcacctatcaacccatagaacttgatcgcagtaaattcatttctgtaaaacttaatatctcccataaaggattcagatttcataataacagattactaaaaatgcaaatgtttagttgttactgtctgataaagttgaccactgggacatggcagatatggcacagccaagccctccctcatggcaagttttaactattgatgtaagagttttaactattgattttgctttcatcaaaagcaaagccattcacacagtatttaacaaaaaccctcgggctctgctaggttcttgtttactgttaaaacagtttaaaggatcacttaaaatactcttagaagggaaagtaacattttaaaggattaacagtggaaaaagaatatccctgttcctcttcgagcagttgggtgaccccgcgaagcgggtgggcaggcgcggccgaggggcgggaggcgggcagcctccg

SEQ ID NO: 12460 - DNA, 313 bp, Homo sapiens
  source 1..313: mol_type = other DNA
ctcactgtcatggaagaggatctccttttgaacaatacaagagaaagtggaccactgtgaaatcagttcccttcctctcctgagggcagacatgattatgtgcattattttttaatttttattatatatatatatatatatattttttttttttttttaacagagcttaattactctataatatttattagaatctaaaattaaaagttttatagctatagaggacaaaaattttcctccctgttcacactctaagatgttgctgtgggaaaagacgttgaacagtcagcaaattccaagccttgaaattaca

SEQ ID NO: 12461 - DNA, 715 bp, Homo sapiens
  source 1..715: mol_type = other DNA
gctgtaaatctgatgcatcatttcagcgtgcctgggaactggaggcctctgtctctggacccctagtctcgaggcatcctaaagggatcattgtacatgtatcacatatacgatatcatatatacagatgatatatatgatatcatataaacacatgatatatatgatatatatacacatgatatatatgatatatacacatgatatatatgatattatatacacatgatatatatgatatatggaacagtatataacctgtgacctctatatgtagcataataggatttataagataataaatatataggataaatgtattaggatatatagggtaatacaaatatatatagggtaatacaaatatatacatatgctatatatacatatatcatatatacaaatatatatgatatatatacatacacaaatatatatgatatatatatatacacatacatatatacatatgatatacatacatatataataaatatgatatacgggacagtatataatctgtaacctgtatatgtagcataatagggtttatataatatattaggatatatagggtaatacaaatataactttctataatttgcccttgtcatgtaatggcatttttgtttaaaatagaaacttcaaaaaaaaaagccccttcatttctgaaatgagaaagggaattgctggtaccaaaattcacgtttccttc

SEQ ID NO: 12462 - DNA, 577 bp, Homo sapiens
  source 1..577: mol_type = other DNA
atgatattatatacacatgatatatatgatatatggaacagtatataacctgtgacctctatatgtagcataataggatttataagataataaatatataggataaatgtattaggatatatagggtaatacaaatatatatagggtaatacaaatatatacatatgctatatatacatatatcatatatacaaatatatatgatatatatacatacacaaatatatatgatatatatatatacacatacatatatacatatgatatacatacatatataataaatatgatatacgggacagtatataatctgtaacctgtatatgtagcataatagggtttatataatatattaggatatatagggtaatacaaatataactttctataatttgcccttgtcatgtaatggcatttttgtttaaaatagaaacttcaaaaaaaaaagccccttcatttctgaaatgagaaagggaattgctggtaccaaaattcacgtttccttcggggattgaagcctccaggctcaatcgtttgcaataataggattcatttaacgagatgagctcatagcacc

SEQ ID NO: 12463 - DNA, 463 bp, Homo sapiens
  source 1..463: mol_type = other DNA
gtggttcccccctccctggtctctccagagggaagaaggtcaacgttatttcctgtagagcgattatctccggtttttgaggaaaacaggtgataaaaatagctcacatttttgcttaaaaaataacggccgcgcaaatttatggttagatttgtctcaagtctgaagaccgcgcatcctaactagtgaggcggaagacacctaaggagccaggagctgtcgccgaggcgaggctgcggagacgttcccttggtgggccgcgggaccacccaccccgccacccgcttccggacccgctccggcgccgcttccggacccactcctcggcgagcgcaggaactcgctctcccagcaggccccgcgcggtgcgcctctcggcgcgttccgggtcctatgacagctcggctcgcatgcgccacgcgtgcggcccccacagccaatgaggttcagggccgcgtgcgca

SEQ ID NO: 12464 - DNA, 230 bp, Homo sapiens
  source 1..230: mol_type = other DNA
aaaaagaagacaggttgagatctgaatgtctatccactcctaagaaggttattttttaagatcaaatgatatcgtgttatgccatattaagaacttaacacatgaatttgtatatgcacaatttgcactaatcaactgttttccgcctaaggaggaagtgcagctagattctggactcaagacagagcggaagctgcgcctgcgcacactcaatgagggcgtgtatgtct

SEQ ID NO: 12465 - DNA, 432 bp, Homo sapiens
  source 1..432: mol_type = other DNA
cgtaaccccgagcagcgcgttccgcagcaggttgtgtagcactacgtccgggtcggtcacctcctcaacccccagcagctgttgctgctcgtgccgctggccgcactcggtacactcgatccgggcagctcccggaaaggattctccgggaagcagccgccgacgccaaggacgacggagtctgtggagcctcagggggaggaggtggcggcggcaacggaggcggcggcggcggcggctgagacatagctcctggctctcgtgtctcgctccgcgtcccagacccgactcggtccagtccaggcccagggctcttcctcctcctaagcgaaggcggaagcgccggacacacagacatacacgccctcattgagtgtgcgcaggcgcagcttccgctctgtcttgagtccagaatctagctgcacttcctcc

SEQ ID NO: 12466 - DNA, 524 bp, Homo sapiens
  source 1..524: mol_type = other DNA
cagtaaaacatataaaggaccacccaatgtattgttttattcatttctgaaaactactgtttagaaagttctgtaggattactgaagtacaaaaagtatttggattcacaatccactttttaaagagaggccacattgtggttattgacattaaaaatgaatgtcctaatctttgaatatcattttaaaacatgaggaaatgtcttctgaatttagtttgttcatagatttgtggcaaattctctggaatcatatgatctaaagtacaaatcattgtcgatatgcacaatcttcaagtgatatctgataagacctaaattacagtagtgttgtcagcttctctatctgttaaaagagataaacagatctaaaacgcataattcgaaaggaaatttctctgcacacagggtgaaagttctcgactgtttataaacacaagtaaatgaatcacagttgttctcaattatttggatatttcacgggcccacccggggggtcctgatccctgcacacaccaggtcatc

SEQ ID NO: 12467 - DNA, 626 bp, Homo sapiens
  source 1..626: mol_type = other DNA
tcaagtgatatctgataagacctaaattacagtagtgttgtcagcttctctatctgttaaaagagataaacagatctaaaacgcataattcgaaaggaaatttctctgcacacagggtgaaagttctcgactgtttataaacacaagtaaatgaatcacagttgttctcaattatttggatatttcacgggcccacccggggggtcctgatccctgcacacaccaggtcatctctgttgggccccggcgctctggcccgcgccggtcttgggccccagggtagcggccactgcgggcggagccagagtctgtgactccagacaggacccactgtgtcctcttgaactttgcacagcgcgtgacgggggcagacggtgcaccgtggcccggcctttcgcgggggtcctcggggaagagagaggagcgcgggtttcctcggaggcctgagcgggacgcagcctgcagcccctccccgcacgggctgcccccggcccgccgctcgcgccgctctgctgggatccggcgccttccccggctgtcctcggcctcccgcgcgctccgcgggaggagccgccagcggccgtgacgcgtcaaggaggaaacgccggcgcccggcggccctgccg

SEQ ID NO: 12468 - DNA, 363 bp, Homo sapiens
  source 1..363: mol_type = other DNA
ggcattattttctgaaatttttgtaataaaggttaccgaacattatttttattttagaaacagaggtccaggctggcctggaactcctgggctcaaagcccatggagtagctgggactgtaggaacattaatagttaaaacaagtcgtttcgaggattctggttttccgttaggccgactccccgagactagtaaaggaattgcttcgtttctttgcacgcctggagccctgattatgcccgcttatttacttaattaaggccctggggctgcaccccaccggcagctccttcgggggtgtggccgaagagctccgagggcggggctgaccgagcagggcggggcctgccgcagggggcgggg

SEQ ID NO: 12469 - DNA, 377 bp, Homo sapiens
  source 1..377: mol_type = other DNA
attaaattactcattttgcaaacatttatggagtaactattaatgaacaaggcactttgctaggtcctggaaatggctaagtagctaacatgtaatattgtattaagtgctatgctgcactaattccaaactgagtctttaaatcttaaaagaattattattatttttattattaagaacagggtatataaggatggagtacaggctgtattctgaatcagatattgttccgggtcggcctagtgaccaccgtcagtgcccatcagcgcccggccgccgcctcacaggggaaggacccaccggggagggagcagcctgcgatgtcgcgagatttctcgtgagcggcgcttggacagcgcgtctggtcgcccagcaac

SEQ ID NO: 12470 - DNA, 538 bp, Homo sapiens
  source 1..538: mol_type = other DNA
tcacaaatggacaaatactgtttgattctatttacatgaggtacctggagtagtcgaattcaaggatgagtgtaactacactttaggatggttaaaattgtatattttatgtatattttaccacaatttaaaaagaacaagaaatattctggacatttcatataaacaaaattacacaacatatggccttttgtgttagcatgtatttatggccaaaaccattccattgtatggcttacaccacagttggggctactatgaataatactatgaacatcaattctcttgggtgtatttataaatacctaagagtggaattactcatagggtaagtccttcgagggaatactggaatgtcttctaaagtgactagacattttgcattcccgttttgaattttttaaacataacatcaacaaaaaccaaacgtagacctattttttctctgcttcgctgggagggagcaagcggctagttcccctgctgacccgagggcgcgggcggtcccggcaggccccgcgacgcagccaacggccgg

SEQ ID NO: 12471 - DNA, 477 bp, Homo sapiens
  source 1..477: mol_type = other DNA
gcctcccgagtagctgggaagaaaagcttttaaaatgttatttttataaatattgtcataagtactaattctgaaagttccacaaaaacaatagcaaaattagctaatattactaagcctttcccaaaaactttatatgcattacttcatttaactttcacagtaaagaagaaaacctggaggcatacctcaggccttcaactaatatgccatagttccagaacctggacttaggtctgtattaataacaaataattagatttaagaaaattccaagtaatcttgaaattactgaatttggaagcagatttgcaaatgtaatttgactgattttacagtggaattctttgcaaatgaaatattctttgtagaaaattagtttacattaaaatatacagatttttaaatggtagacttgtgttttgcagtgacacaatctggtcaggtctttgatttgtctgaaaagttagagcagtc

SEQ ID NO: 12472 - DNA, 283 bp, Homo sapiens
  source 1..283: mol_type = other DNA
cgcgcctggcctgtcatgctatcttttcaggaaataaaagaaaaaaaacaaggacgcagactgctccctgtgtctttaataaaaaaattaaacattgtattaactagtactggacattttcagatcagtaatggcacattatatatacgtagatgttaacttttattaagggctacctttaatatggcggaggccgagcctgcgcctggaatatgttctatttcacacatataattttccgagacaaagcaacaagaagattcgtctctcgctattactgtaa

SEQ ID NO: 12473 - DNA, 291 bp, Homo sapiens
  source 1..291: mol_type = other DNA
aaaagaaaatagctcatagctatttttgagaccttggatttctgaaaacagctccccagttttatgacaatacggatgttcagaagtgacaacttaaatcaccgcttgttgttctccccccccagcggagggcttaggctctatcccggacgccgccatcgccgaggaagcggagaagttgtcgtctctacaaccaagacgcttacagtaatagcgagagacgaatcttcttgttgctttgtctcggaaaattatatgtgtgaaatagaacatattccaggcgcaggctcg

SEQ ID NO: 12474 - DNA, 363 bp, Homo sapiens
  source 1..363: mol_type = other DNA
caatgcagataaaaaacgaacttacaatcgttgtaataatcagttaagacaaagactttccgttgaagaaaatttcctttaaaaccatcttacaaagaaatttagggtaaaatagtacattaatacctacccttagttccactctcctgggaaactagaggtctcttttctagtctcctgggctaggagtaatgccctgagaggtatgccagaccaagtccccggccagcgtactggcggcagcgggcagctatgcggcctccaggacagcagggggcgatgtcttgccgcgcggccgcctgcagtgggggcggggccgtacccggcggttggcgaagggcgagcggagggctgggcctgagg

SEQ ID NO: 12475 - DNA, 644 bp, Homo sapiens
  source 1..644: mol_type = other DNA
gcagttccgtgcactccaggagtcctgttcactcggcaggagcaggggtgccgagtggggggatctctggtcccgcagctcggccgccaccaagagcccgaagtgctgggcgcggtgccaccagaggcccgccacgccccacgccgccctgcaggcgaacgctggaggccccgccgggccgccgtagcgctgcggctcgggccgctcctcccgcgccgccctccgcccccagcctcccggcgccgcggcagctctgggcagggagcgccgccgccgccgccgccgccgccgcttcctcgtctgcagccgttcggccgctgccctcccaacatggcggccggggcaggtcggcggtgatgggggccagttcgcggccgcggcgggtgctaatccccacagtagccagggtagcccttctctcgcggtgcctctgagagccgccgccacctcgtccctcagttcccggcagacagccgcccgggccgggctccctcaccgccaccagggccggagggacgagtgagaggggcggccgggacgcgacccccgggccgggagaagcggaggcccgacgggcgcggccctcgaggtacggcttcttgggggcggcgaggacctcgacgcccttcgccgacaccgcggct

SEQ ID NO: 12476 - DNA, 542 bp, Homo sapiens
  source 1..542: mol_type = other DNA
atcaccatatataatgtttgcaaatatttttatggtattctttttctgctcagaaggaaactgtagaaattaaatactgcagaaatttgagttctacactcagactaaagcaaacacatggtcacgtgtgttaatctgtttgtacttaaagcattctaaactgagtcaatacagagagagaaaaaagtgaaacatttttgaacccttatcaataggttttggcttacttttgcagttccgtgcactccaggagtcctgttcactcggcaggagcaggggtgccgagtggggggatctctggtcccgcagctcggccgccaccaagagcccgaagtgctgggcgcggtgccaccagaggcccgccacgccccacgccgccctgcaggcgaacgctggaggccccgccgggccgccgtagcgctgcggctcgggccgctcctcccgcgccgccctccgcccccagcctcccggcgccgcggcagctctgggcagggagcgccgccgccgccgccgccgccgccgcttcctcgtctgcagccgtt

SEQ ID NO: 12477 - DNA, 206 bp, Homo sapiens
  source 1..206: mol_type = other DNA
agatccccaggtgacttctatgcatgtggagctctgagaagcctgctccacctagacctctgaaacagcagcaggtctgggtgctgctgatgcagaatgagtaagtcaggagcagtgaactgaagccagctgttcagatcaaaaaaacattaagcttggaataatccatgtctgcttgtttattctaggggagcctgattaaagat

SEQ ID NO: 12478 - DNA, 404 bp, Homo sapiens
  source 1..404: mol_type = other DNA
cagtttatttaaatgccattagttttagactgaagttgatctgtggaaaatatatgtgtataataccaattcaaaaaaatatataaattgttttgtttgttaaatgtattggaaatatttaaggcttagtttccaagtgagaaaaggcaataaactttaactttaaaatcaagaatgttctgtgtgtctatcttcaaaaatctaagattatttctgacaccgtcttaaatcacagctactatcttgatgttgaaaaaagaactaatgctaattgactttccaagctcagactggaaagcaaacctgttttgtgcctgaatgaaacaaaaaatcaatgtgtttcttttcaaagattttaaagtggaggcttaggagtaaccctcgagcgtgcgcgcgcgcgcgtg

SEQ ID NO: 12479 - DNA, 387 bp, Homo sapiens
  source 1..387: mol_type = other DNA
gaaaaggcaataaactttaactttaaaatcaagaatgttctgtgtgtctatcttcaaaaatctaagattatttctgacaccgtcttaaatcacagctactatcttgatgttgaaaaaagaactaatgctaattgactttccaagctcagactggaaagcaaacctgttttgtgcctgaatgaaacaaaaaatcaatgtgtttcttttcaaagattttaaagtggaggcttaggagtaaccctcgagcgtgcgcgcgcgcgcgtgatggatacaaagcttttgattaagtcactgctgtggctgccgaagccgcttcccctccagccccggccgtgtgaggccagagcagcggggccgggcgcgcagggcctggccggagcccccact

SEQ ID NO: 12480 - DNA, 408 bp, Homo sapiens
  source 1..408: mol_type = other DNA
tactatcttgatgttgaaaaaagaactaatgctaattgactttccaagctcagactggaaagcaaacctgttttgtgcctgaatgaaacaaaaaatcaatgtgtttcttttcaaagattttaaagtggaggcttaggagtaaccctcgagcgtgcgcgcgcgcgcgtgatggatacaaagcttttgattaagtcactgctgtggctgccgaagccgcttcccctccagccccggccgtgtgaggccagagcagcggggccgggcgcgcagggcctggccggagcccccactcccaggagcagagccccgcgccccccgcgccgggatttcagttggcggaggcggcaactttccattctcgccgccgggggccgggcagcagcgggcgcgcgggtcagcgctcagcac

SEQ ID NO: 12481 - DNA, 421 bp, Homo sapiens
  source 1..421: mol_type = other DNA
gaaccgttagttttccttctaacagacaggacccttagctgcaggtcctggggggtgcctcccagttaggctgccagtctgcccgttctcagatctccagctgtgtgctgggacagagggacatttaagtctgcagaagttactgctgtgtctgtgccctgcccccagaggtggagcctacagaggcaggcaggcctcctggagctgtggtgggctccacccggctgctttgtttacctaagcaagcctgggcaatggcgggcgcccctcccccagcctcgctgcagtttgatctcagactgctgtgctagcaatcaactccctccgaccgtcggaaaagcgcagtacgggggaagggcttcccgagtgaggcaatgcctcgccctgcctcggctcacgcacagtgcgtgcacccactgac

SEQ ID NO: 12482 - DNA, 444 bp, Homo sapiens
  source 1..444: mol_type = other DNA
aagtacttactttcattaaacagttcaaattgaaaacatttcaaagcaaaattgttaatgagctgtttgagctatatggacattataagtgcaattaactagccctctggtaccaaagtgcttttacaaagagatgtctgtgaaagcagttaaaaaagccacctttataagtagaaacgaaaatgattttcattgactatttctgaagttcagcctcccctccttgccaagaatgttggaggcagccacaggagtttagatttcaaaatgtagatgtcacatttcaggtcaagatgaaccttttatctcctatggaagggaaaacgtagggtccccatcatctcagggggagcacgaggagaatctcaggttacttgactgggagttctcagacctccaagcaattggattgggcagcccgtcttgacacaccactgtgctgag

SEQ ID NO: 12483 - DNA, 485 bp, Homo sapiens
  source 1..485: mol_type = other DNA
ctgtcaggaagttggtagtgtttaaaatttttatcaaaattccttagatatctgatggaatttttgaaattgtgagatttgtggcaattaattgatttccagatatcttcttaaagtactgtaaaagtacttactttcattaaacagttcaaattgaaaacatttcaaagcaaaattgttaatgagctgtttgagctatatggacattataagtgcaattaactagccctctggtaccaaagtgcttttacaaagagatgtctgtgaaagcagttaaaaaagccacctttataagtagaaacgaaaatgattttcattgactatttctgaagttcagcctcccctccttgccaagaatgttggaggcagccacaggagtttagatttcaaaatgtagatgtcacatttcaggtcaagatgaaccttttatctcctatggaagggaaaacgtagggtccccatcatctcagggggagcacgaggag

SEQ ID NO: 12484 - DNA, 257 bp, Homo sapiens
  source 1..257: mol_type = other DNA
ttcagtgaatactcactgagcacctgctttatgcagggccctgtcctgggccaccagggagaccgtctttagagaatgattcacattattcagaataatcagaactttctcagtggacccaggctcagtggaaagagcgctctagtgtttactaagcacttgtggaacgcctggctttgtgtcgggtgctcagggagccggaaccacatgctgagcccctgcccgccgccgtccaagccggccggctgcagcgcagt

SEQ ID NO: 12485 - DNA, 228 bp, Homo sapiens
  source 1..228: mol_type = other DNA
ccgtctttagagaatgattcacattattcagaataatcagaactttctcagtggacccaggctcagtggaaagagcgctctagtgtttactaagcacttgtggaacgcctggctttgtgtcgggtgctcagggagccggaaccacatgctgagcccctgcccgccgccgtccaagccggccggctgcagcgcagttgatgataataatacgcgggcttatataaccgt

SEQ ID NO: 12486 - DNA, 411 bp, Homo sapiens
  source 1..411: mol_type = other DNA
ttccgccccccgtccttgccccaggctggaggagtggagtgggggtccccaagattaggggcggggtcttaccacgggggcaccgtgtgtgtgtgtgtgtgtgtgtggccgcgcacgcgcacacgctccccaggcccacgctagcggggtgcgctcagcacacctccccgccggcccgcgtgcgcccagccggctccgtgggctcctcgcgcgctctctgacagcgtgccgaaagcagatgggacttagtgcgggcaagcatgttgacctctggtggagcagacagattcaaatacacgtgccaacgcacaccagtgtgcacacacatttctacttcttttttccttttagaaaaattgggacagggaatacattgcctctgagtcagatagcggcagacaatgagggaga

SEQ ID NO: 12487 - DNA, 245 bp, Homo sapiens
  source 1..245: mol_type = other DNA
tagatgagaacaatctttctcctaaagcatgtttgcccgcagtgtggcctcagtcactgccagagccagctctggctactccagtagcaggctgtcagaaatgatttatttatcagccgctgacttttctagagaccggctccctcggggcttcagcgctcttgggcccccgcagccacgcaggtgaagggcagcggggtggcgagggctgggctgggtggctgccctcgcgcctgcgccctcgg

SEQ ID NO: 12488 - DNA, 535 bp, Homo sapiens
  source 1..535: mol_type = other DNA
gggtgaggctgcacctcagtcttcagccccgaaggccgcgcccggggcgggtcgctccccattcagctaagaggaagcagcggccggggggcaggcgaggaacctgtcccggctcacccggcaaaactaagcgttcctttctctccctcaatggccggcgaggagcgaaggaagtgacagctgcggcggcgcgggaggcccatcctcggtcgtcgaaacctcggaagcgtcgggggtgccgggcccaacgctcccacgtgtcactgccggggactcgcgaggcgaagcttcccagcgctcaaggcgctcccgcctcagcgggtcagacgccgccttcgggcaggctgggatctgtaaggggctcgaccccgggacgcgagtccggccttctggactccggttcatatctgggggccccgcctggagcggcaatactgcctgccctagaaggccagcggcgagtggtcggccaatggcggggatctgcgtgggccgggtcatgccccgcggccccgcccgccctcttaagcctggc

SEQ ID NO: 12489 - DNA, 481 bp, Homo sapiens
  source 1..481: mol_type = other DNA
tgtcaatggactttccaatacaaactcagtgtgcagcatttgctttatcccgcaattgccgggtgactgcaatgggagaagcctctccctgttggagcctgacggatgcggggcgcctccggggagcagcgtgctggccgaagggtccggccggacgggcgcgagggtcctctgctggcgaccctggaactcgggggcaccgtccctgccgtctgcagcccccaggccccactgcctcagcggcccagccgccttctcagaggactctgccgacggagatgctgcggaccccgcggccaggggctgctccccggctcgggggcgcgagaggcaagtttccgccccgtccttttcccggtgacaggacttggcggcggccactgccggggaggcagagggagggacggcctggctcccgagccccctcccctgctcgcgagctcgcgctgtctgtctctccgcaagtgcggagacgcggagg

SEQ ID NO: 12490 - DNA, 499 bp, Homo sapiens
  source 1..499: mol_type = other DNA
gaactgggctcacatcctactttaagcttcaattttttgtaggcctatagcatatatacttcacagtaagtgttcaataaacactcttattgtctaccgcaagtgacctttctcattataagattaaaatcagggaatatgttcctctcatagtttgataactgccattaaacaaaagttttttttttcaactaattaccgtataagttggaaaaaaaacttgcttttccaaagcgtaaaacatgttaactttgtcaatggactttccaatacaaactcagtgtgcagcatttgctttatcccgcaattgccgggtgactgcaatgggagaagcctctccctgttggagcctgacggatgcggggcgcctccggggagcagcgtgctggccgaagggtccggccggacgggcgcgagggtcctctgctggcgaccctggaactcgggggcaccgtccctgccgtctgcagcccccaggccccactgcctcagcggccca

SEQ ID NO: 12491 - DNA, 596 bp, Homo sapiens
  source 1..596: mol_type = other DNA
taaatttgactcattgtgaaacaatgaaaaggttgctcatgcacacaagctaaattttaaaacacttttgacccagagcatgtaataaatgctataaatcttcctgccaaaatgtccgtcagttcagagagagtttgcctacataatgccagacatctgtgcaaaagctgaacagcttggtcaaggattttaatgttttgtcgacatggtgccaaacatctgggtattggaaaaatatctagataattgactgactttttacttttcatccagatgtttcagaattaaatactcccttactatataagtacatttatcatgtaaaagtgctaacaatatactcttaatataaaaaataggtttaaatctgcatatacaatgtgatcccagctttgaaaacaaaaattgtatatatgctcatagatgatcattcatctaatattcttcaataaagcatgtattgctttcataaccataaaagcattttaattgtgtgattagatggtatcagttaatttggaaactgaaagagtataatttatggcttggcattgtatacatacaattaactatagctatgaacctactagtaagtt

SEQ ID NO: 12492 - DNA, 458 bp, Homo sapiens
  source 1..458: mol_type = other DNA
ttaatcactatttcccttagattactaaaacatgttgttaatttgaatatatcaaactgatcccttcgtcttcagtctgactttttttttttttaagttagtccaaacttaccaagagtagaaataagcagcagtgcttaactctgaggtaatttttaacttgtagaagtgacaatgtgcaacaggccactgacacatggccaggagggcaggagggcacccggccgcggcctcaggctgctgagcaggcgcaggaagctcgcgcctcccgggcccggcgcgaagcagggaagcgccgctcacattcctgcacgctcgcccggccgcgggccagcggcctccggtccccaggtggcgctgtgggctcgcggaggcggccgcggcaccagggagcgtcgtctccctggtgcgcatgctcgcccccgctgcgggctccccgggcggcccggcggctgcgg

SEQ ID NO: 12493 - DNA, 786 bp, Homo sapiens
  source 1..786: mol_type = other DNA
ggggcctgtggtctccaggccggcactcctcagacccgggggccgggcctcggccttccccggccctcgcggggctgacgctcaccgcggccgaggctggcagtccccccaagtccgcccacccgccccgagccagctcggcagcgcaggggccgcccccgcccgcaggcccctcgccggctgccacgtaacccttcgcgggaaccaggaactgcgccgcgcagcctgcgggagggggcggcggcgggtcaggaagggggcgacgcggcggtccccaccccctgcgggccgcgatgaggcccaccgggactttgcatctccgggccggccgccggggagctgccgccgacgtggggcagggcagggaaggcctgcacctcagggactgggggtctgcacccaccccgggcccgagccccccgcgtcctgggcggagaagccggggctggcatctggagcccgggcccgggctggaggtggcggggcaggcggactcggggcgggctcacctcaaacatgagctgcaggacgaattccgccatggtggggccgccgcccgcgcctgcaggtgctccgcccgcctcccgctggctgctcctcacggccccgctgcagccgctcgctggggctccgcagccgccgggccgcccggggagcccgcagcgggggcgagcatgcgcaccagggagacgacgctccctggtgccgcggccgcctccgcgagcccacagcgccacctggggaccggaggccgctggcccgcggccgggcgagcgtgcaggaatg

SEQ ID NO: 12494 - DNA, 768 bp, Homo sapiens
  source 1..768: mol_type = other DNA
aaataagatttattaaaaaatgcaagaatgctccaatattataagatccctgaaaatcatagtaagtaagttcatctccctagaagaaaagacatttgataaaattcaactcttaaagtatttaagagaactgaaatgactaacttagggaagtttctcctttaccataaatataaaaaccaaccaaatccttaatattaaatattgaaactgtaaagactttaaaaagtctaataatataatagatataaggtataagacatgagatactaatggaagcaattatttttgaaaggccaatgtctgacattaagaactattatgcttttatagtttccaagtatatatttcatatattgcaaacaattactatattatagttgatccaatggcaaggtattaaagagctgttagaaatcatctcttttgtctggttaaacttgctgcaagctgttaatagaagtattcaatgttatatgaaaataattccccagccaactatataaacatgtgtcttatcttatgaatacatagaatgcattaacaaacagaaccccaatctttctttttttaatctacaaaaactcacttgtagacatctgaaaaccagtaactgttttctgtgatataaacacagaaaacaatttgtttttctgtgatataaacacagaaaacaagtagcagggtttcttaaattggggaatcagtaatctcaattctccagtcagctgctgtaatttgcataaaactgttaaaattcacttcaca

SEQ ID NO: 12495 - DNA, 488 bp, Homo sapiens
  source 1..488: mol_type = other DNA
tgtgttactgtgtctgcaaattaaggaagccaggagaatcctgccctctgctgctgagttgaggaaatcgcctcaacataattaatcgcttttgagaaaacagtaaatcgggtttcaaaacagaagtttttttttttttagagagctatctgcagtcccgacggggctgctaggcgcggggctgcccagctagggacaggacgcggcgctctccactgcccgcgcagccgcgatcagtcaaagcccgggctccggggccggctgcgatggggccggtccccactagacccttggacagccgctcgacgcgctgcagtacagcagccattcccgcctcagccgcccgccggcgtgtcgcctatctggatactccagcgcggaagaagccaacaggcccacgtgatgcctcgcaacccgcggctggtccaggtgtcatgtgacaccgcggacgagccggggcggggatccggcactagaggtcacgtgac

SEQ ID NO: 12496 - DNA, 280 bp, Homo sapiens
  source 1..280: mol_type = other DNA
gcagctgcttttcatttgtaacaaaaataaggattagcatagtaggaagtactaagtaaatatgtcttaccactatttattataaaagatgaacaggctggcccggcgtggtagctcacgcctgtttgcagtgagccgagatcgcgccactggacagagcccaccactgcccgcgcagcccgcgcggcgtcacgtgacctctagtgccggatccccgccccggctcgtccgcggtgtcacatgacacctggaccagccgcgggttgcgaggcatcacgtg

SEQ ID NO: 12497 - DNA, 415 bp, Homo sapiens
  source 1..415: mol_type = other DNA
aatcataatttaaaaataataattgatgtcagttcaggttgaatgaaaatgcacatcaaagatttggaattctgagccattttaaacgtttagcgccagcagcctctgctggcagtttgagctgcttctggaagaagggcagtgactgtctagttaagttgttcagtgaagtcctgaactaggatggtgaattgattattaaactttccattttcttcctcggtttaaaagatggaaaatccaccaaaaaagctaactacattttctggtttaccaggattgaattttaaatcagctggtgataacagaagatgaaagatcttcaacacgcaccttttccaagctgcctgggcaaggctgctttggccagtgatgaatcaggctgccttccccccctgacaaggggaggaggagg

SEQ ID NO: 12498 - DNA, 635 bp, Homo sapiens
  source 1..635: mol_type = other DNA
acaacgagtgactagtatcaaaataaacatttgtatttgaatgttggcaataaacgatgccttctttgaatatttgaaatcaacataatggttaagtcttatcaccaaagtcatgtatctgtataaaacatatcttaactgaagctcagctctttaggtgagtgttaagtaagaatttttttttaaaagaataagctgtaaagaaagagttctagataacatgaatcttttccaaaaaccatttaaaaatattaacactgaaacattatctggttcatagccaaggaattgttcacagaagatttgccattctagaaatcatttcggtcatccttcaggctttcattattaaactgataaaagcttgcacgtttgctttttcattttctacttaaagggaaatggccattctgtacgttagttaggaaataaattatgaaaagtagtggattccctaagtttcagggcctgaactccccaaacacgtctcagagaagttattctcacacaaatttttttttttttaaacagcaaggttgagtcagacagagcagtgctcctttcaattgttgcatttaaaccaataagtttgcgttgcaaaaaccgcaaacaaatcgagggatgagattctgctg

SEQ ID NO: 12499 - DNA, 488 bp, Homo sapiens
  source 1..488: mol_type = other DNA
gtcccttggtatctgtaagaagttagaatacatacctttaagatcacttctaaaggtatttgaatcccagatgttttaataagtttcaggctgactgaatattcctttctgaggcctctccgtagaaaacgctgcagggggcgtccgagacaccccgcggggcagtgggcaccaggcccaggctccggctgcagagcggagaggggtgctgggaagagggctcccctctccagcgccagccctggtgtcgctgtgcactcggagccgcgcgaagggcgcccctcgacccggaggcgccaccgctggctcgaatttctggaagccggagccgggttttttgccctaaacaccgaggcagaacccgcagttgtgacacaagtaagtgcagccgcgctgcccggggcccgccagggtcccccgcgcccgctccccaccgtggctcgcggcggccgcgctcccgccccgccccgctcggccgccccgccggc

SEQ ID NO: 12500 - DNA, 315 bp, Homo sapiens
  source 1..315: mol_type = other DNA
gctcttcaatacacaatctattaaatacaatagcaaggattccctacattataatgcaaattgtggtattaaaacaaagaatttcaaaacgcggattttgaatctttcggctcagcttcaagttctgcaaattggagataatatcattaagttacagatgttatttgaaaaggcaccattgtaaccatttttgtaaaccatgaaggtatattatggcttgggtagacaatcatacatcatgaagcagaggtcggattgccactgctaagattagagcccaaatctcggctctgcagagagccttttcaaaaggcg

SEQ ID NO: 12501 - DNA, 337 bp, Homo sapiens
  source 1..337: mol_type = other DNA
gccttagaaaggtttcttctgaacttacggcaacagttcccttgtctttaaccaaagtgtgagggggatcactgttattatccacaggaaatgagacctgatattcacagggacttctcaaactagctattgtcccaaacgtttggaatgagaagttttgttaaaaacgttatttccaaataggattttagttagaaaaaactcctgaaaactaaaatattataactccgtcagtgcgctgctgcagctgcaggacagcgggacgggcgaaggggcgagtccaaggcagacgcggcgccgccgccctctttgcgaaggagctccgctacaaaagtag

SEQ ID NO: 12502 - DNA, 269 bp, Homo sapiens
  source 1..269: mol_type = other DNA
gccttagaaaggtttcttctgaacttacggcaacagttcccttgtctttaaccaaagtgtgagggggatcactgttattatccacaggaaatgagacctgatattcacagggacttctcaaactagctattgtcccaaacgtttggaatgagaagttttgttaaaaacgttatttccaaataggattttagttagaaaaaactcctgaaaactaaaatattataactccgtcagtgcgctgctgcagctgcaggacagcgggacgggcg

SEQ ID NO: 12503 - DNA, 754 bp, Homo sapiens
  source 1..754: mol_type = other DNA
ttcaccctgcggcctcgccaaggggtaacttggcatagttttccagctagggttaaggttgccacggacccggctttaccctcaaacccaggaaagccgggtcacttggggctagggacggcccccgagcgagcggggctgctccaggaaaataatcctgcgccccagttccccggggtcgagcagtcagcccagggtcagggtcctgctgtgggcgggcgggaggacagccctgcgggccgagggaatcccgcgaagccgccggagcgcgtcgcggcggggcctcccggggctttcccggccccgggtgcgcggcagccgcgggggctgcgtccctctagtccagtgcagccgggtggagctgccaggcccggggcagcaggagtggctggcgcgcggaagctgagggaggcaccccgccgaggtgtgggcggtgcctgcccgcgccccagccgcgccctgggcaccagagcgctgtccccggccgagcgcacagctccggcgccgcgaggcagagccccggcgtccccggcggtgcgctgccggctcgcgcagcccagccatcccgccccgccgcccaccttgacagccgggagcgctgaggaggaaagagaaggcggcggccgctccagcccgcgggtgcgcggagcgcgggaggaggcggagcgggaggctggggtggccgcagccctgtgtgcgcgccgggccggctagctgcggggcgggggagcggcgccccagagcgccccgccta

SEQ ID NO: 12504 - DNA, 748 bp, Homo sapiens
  source 1..748: mol_type = other DNA
agggttaaggttgccacggacccggctttaccctcaaacccaggaaagccgggtcacttggggctagggacggcccccgagcgagcggggctgctccaggaaaataatcctgcgccccagttccccggggtcgagcagtcagcccagggtcagggtcctgctgtgggcgggcgggaggacagccctgcgggccgagggaatcccgcgaagccgccggagcgcgtcgcggcggggcctcccggggctttcccggccccgggtgcgcggcagccgcgggggctgcgtccctctagtccagtgcagccgggtggagctgccaggcccggggcagcaggagtggctggcgcgcggaagctgagggaggcaccccgccgaggtgtgggcggtgcctgcccgcgccccagccgcgccctgggcaccagagcgctgtccccggccgagcgcacagctccggcgccgcgaggcagagccccggcgtccccggcggtgcgctgccggctcgcgcagcccagccatcccgccccgccgcccaccttgacagccgggagcgctgaggaggaaagagaaggcggcggccgctccagcccgcgggtgcgcggagcgcgggaggaggcggagcgggaggctggggtggccgcagccctgtgtgcgcgccgggccggctagctgcggggcgggggagcggcgccccagagcgccccgcctagcctcccgcgctccgccctccgcccccgcggccgccgccgcc

SEQ ID NO: 12505 - DNA, 393 bp, Homo sapiens
  source 1..393: mol_type = other DNA
gttcagtgaattttcataaagtgaacccattagaatttctttttgtgctaagtttcaaaattcaaaataagcattcacttgttttctacaaactgcattctatagtcgatctcaaaccttgattgagatacatttccattatagtatactctttctagagcactgatctcaatggactttcaaattcaaggtgattctgatgcatcttaaggttggagaagctgttcgtgatcacgtagtaactgttagatgaaaactagggtttaaaagtgttacgcttgtctaatagtgacaagttctcacattttacaaggaataaggaagataaagctgcctcctcctccgtgtcccgccggcggaagagactctccgcggccacgccccgagccctcg

SEQ ID NO: 12506 - DNA, 591 bp, Homo sapiens
  source 1..591: mol_type = other DNA
aattcctctgtaaatccttatatgagaaagaaagaaagtctatgaaattaatttgatttcttaggttcgcagatgcaaaaaacgttatattcctggtttcacataaaaaccatattagggtaaatgatttaagaacataaaatgaaaattccagcataaatttggtatatatattaaaagttaggcaagcattttattaaagtgaaagttctaaaatatcagtacacagagttttggtttatcagaaaacagagccccgttattttcaaattgcctcctcgtgaagcgaagtggcattttcctggggcagaaccattataatgaaaggatttcccgggcgaaggcggggtggcccgcgcgcccccgccgggctcctggctacgccccggctccgctcccgcgccccggaggtccccgggctggagctggggcgcgagctggcagcgggtggcgcccggaccgtcgattgcgggcccgtcccgggaactgcagcgccctccccacctgggcagggcagccccgccacccgcccgggcctcgacgggcgcgccgccagggctggggaggggcggcgcggagggcgggggccgg

SEQ ID NO: 12507 - DNA, 526 bp, Homo sapiens
  source 1..526: mol_type = other DNA
tcctatctgtttaggtaggattcgatattcaaaactataatggttagtattaataaaaatttcgatgaaaggcaaatgcatttctggtccgttttcacgtgttgcagcttcttcgccttcgtcaaatcttcaatggaacctttgtgaagctcaacaaggcttcgattaacattttctatttgataaattggttatgtagcaacatgaattttagatgttcttcaggtaccccaatctgaagtcagtaaatgaactgtattagaccatgcgataatttccctatgattcttgatttagcttaaaagaaaacgtaagacatggtttcattagcttgaaccttatctttgtaaagccatgcatttactctcacagcctattcaaaaagattttgaataattatttcaaaactttttgcaactttaataatcttaaataaccttaaaatatttaggtaaatacggcatcatctgcatggaggatttgattcatgagatctatacttcaattgtcttctccacgaggtgga

SEQ ID NO: 12508 - DNA, 501 bp, Homo sapiens
  source 1..501: mol_type = other DNA
agagcgctccgggccggctctgagcgggctccacgctccgcgctatataaccccgcgaccgggaagagcccgcgccagcctcggcatcggccctccctccgcccggcctccccgcccccgggcgcaccccgcccccggcccagcccccagcccgccagccgtccgcggagccgagccgggtagccccacggccgtgcgccccctcccgtggggtgtcctggcctccgcctgccgagctcggcagtcagcagagccccggccatcctcctccggccgtccggcgccccgcctgcgatcaggcgctgcggaagacagccctgtgggctctggaaccgtcgccgcggtgcttgcctgcggtcctggtcagccgttgccctcccgccgggcgggcgaagacatgaggctcgtcctgggaacattatgtttgctcttgaattgattaaaaagtctaatcaaatgcatatattttcttcaaacaagttttacccgaaagtttgttga

SEQ ID NO: 12509 - DNA, 663 bp, Homo sapiens
  source 1..663: mol_type = other DNA
agctgctgccgcccgagcgtccccggaaccggcgcgccggctccctctcaccccgggggaggggtgcgcagcggaggcggcacgggccagcgggctgccgcgggagttgtcaactcgaccgcgccgggaaggggagactcgctcggcgcaggcaagcgctgcccaacgccttgcagctgcccccgagggctcgcgttccccggccctgcactctccgcgggtgtcactcgggcactgggctccgcagcgcagcccgcttgcaagtcagagcgctccgggccggctctgagcgggctccacgctccgcgctatataaccccgcgaccgggaagagcccgcgccagcctcggcatcggccctccctccgcccggcctccccgcccccgggcgcaccccgcccccggcccagcccccagcccgccagccgtccgcggagccgagccgggtagccccacggccgtgcgccccctcccgtggggtgtcctggcctccgcctgccgagctcggcagtcagcagagccccggccatcctcctccggccgtccggcgccccgcctgcgatcaggcgctgcggaagacagccctgtgggctctggaaccgtcgccgcggtgcttgcctgcggtcctggtcagccgttgccctcccgccgggcgggcgaagac

SEQ ID NO: 12510 - DNA, 234 bp, Homo sapiens
  source 1..234: mol_type = other DNA
taccgaggagtatctggctctgggagaaggattcttcaacaaactttcgggtaaaacttgtttgaagaaaatatatgcatttgattagactttttaatcaattcaagagcaaacataatgttcccaggacgagcctcatgtcttcgcccgcccggcgggagggcaacggctgaccaggaccgcaggcaagcaccgcggcgacggttccagagcccacagggctgtcttccgcag

SEQ ID NO: 12511 - DNA, 460 bp, Homo sapiens
  source 1..460: mol_type = other DNA
tcaacaaactttcgggtaaaacttgtttgaagaaaatatatgcatttgattagactttttaatcaattcaagagcaaacataatgttcccaggacgagcctcatgtcttcgcccgcccggcgggagggcaacggctgaccaggaccgcaggcaagcaccgcggcgacggttccagagcccacagggctgtcttccgcagcgcctgatcgcaggcggggcgccggacggccggaggaggatggccggggctctgctgactgccgagctcggcaggcggaggccaggacaccccacgggagggggcgcacggccgtggggctacccggctcggctccgcggacggctggcgggctgggggctgggccgggggcggggtgcgcccgggggcggggaggccgggcggagggagggccgatgccgaggctggcgcgggctcttcccggtcgcggggttatatagc

SEQ ID NO: 12512 - DNA, 573 bp, Homo sapiens
  source 1..573: mol_type = other DNA
cataaatattggttcaggaaatttgataatggctgttggtttttaacaaaatttttcatttttagggaaaacatttacctgtacggagaaaattgtattgataatttatcatcaaacttattgatacctgcgtttttaatttaagggtgaaaatgtaccatttgtagcaaatacagatttttgtgctccctgccgaaagataagggtattcattttccaggataccgattttggtttttaaattgtcaagttcttatgcggtaaaattgcatatttacctgtaactacttcttagaggaccctatttcttcattaaaaattgtggattcagggttctcatactaaagactaagagctgtttctcttgggccactgtttccccaaactctgagctctgggctgagatcagttctttgctccagcaagctgatcccatgtggtctacttgtattgggcttgtcacaattacatgactttcccctaagcaaagttatccagtaaattgcctgtaaagctcagtcgttggcaagccttaggaggaagaaattctgccccactgtaacttgcaggcac

SEQ ID NO: 12513 - DNA, 637 bp, Homo sapiens
  source 1..637: mol_type = other DNA
gttcagtttcattgagcttaactgggttgaagttatctagacaaaagtaatccacatcaaaaccaggacgaattaagacgtaatttctgttttcaaatctaggatggtctggccacgccgcgggtcttggcgctgggcgagacggtgaagcaacctcctccccgccccctccccccgtgcgttgcacagcggcggccggagcagacgcgggatggtcgcgcgtcccctgcacagcacgcaggtgtggaaggggctgccccaggcccacccttggcagacgagggggcggggagtcgcgccggggacgaggagactgcggaccgggcgcgctccttgcgcagtcgctcgcccgcgtgcccaagccccccgggaatggccctcgcccaggggcccagctcgccgccgctagccccgcagagcctgcagctgctggggcccggcagccgccagggggcgggagctgcgtcgcgaacaatggccgcgcttggtcgcgggccggcgggagaggtagagccggtgccgggcgcgcgcgccggccgggcgtgctggggcgcgggagcggctgcgcaggcgggggcgcgcggcgcgagcgcgggagggcgcggcgggagcgccgggggcccgaggggtggaagcc

SEQ ID NO: 12514 - DNA, 647 bp, Homo sapiens
  source 1..647: mol_type = other DNA
tttctcagtcagagaaagtaagtttgtgaaaacacactaatagttctatttcgaaatttctttgtcagattatttttggactaaacaagtgttcagtttcattgagcttaactgggttgaagttatctagacaaaagtaatccacatcaaaaccaggacgaattaagacgtaatttctgttttcaaatctaggatggtctggccacgccgcgggtcttggcgctgggcgagacggtgaagcaacctcctccccgccccctccccccgtgcgttgcacagcggcggccggagcagacgcgggatggtcgcgcgtcccctgcacagcacgcaggtgtggaaggggctgccccaggcccacccttggcagacgagggggcggggagtcgcgccggggacgaggagactgcggaccgggcgcgctccttgcgcagtcgctcgcccgcgtgcccaagccccccgggaatggccctcgcccaggggcccagctcgccgccgctagccccgcagagcctgcagctgctggggcccggcagccgccagggggcgggagctgcgtcgcgaacaatggccgcgcttggtcgcgggccggcgggagaggtagagccggtgccgggcgcgcgcgccggccgggcgtgctggggcgcggg

SEQ ID NO: 12515 - DNA, 418 bp, Homo sapiens
  source 1..418: mol_type = other DNA
tgtagctaacattgtaccaggagaggtactacatacccggtcctatttaaagggcttcatatgtattgtcacatttaaatacgaactatctatcacatgtagtctcctcttgatgcacaggactgaaatcaccggcctgggagacatttctcagtcagagaagtgacactagtaagtttgtgaaaacacactaatagttctatttcgaaatttctttgtcagattatttttggactaaacaagtgttcagtttcattgagcttaactgggttgaagttatctagacaaaagtaatccacatcaaaaccaggacgaattaagacgtaatttctgttttcaaatctaggatggtctggccacgccgcgggtcttggcgctgggcgagacggtgaagcaacctcctccccgccccctcccc

SEQ ID NO: 12516 - DNA, 679 bp, Homo sapiens
  source 1..679: mol_type = other DNA
tatgtctgctataagccaccaaattgtggacactgtttatatactgctagttaacaattaccacttttaaaaaattataaccgtttttgttctatcttgactagataaattctcacaatgatctctgtcagttttattagttggcctgtttaaccaagacagaaagtctttgaattactcatagttttaaactgcttttaatatgaaaattgcagctgtaaattatgtattttcatattgagaaatctgtctccatattgctggttctcttaccaaaatgcttttataaagaaatgaccggtgacatttattcaccaaaggaattaatatactgagtcaaagattaacaatgctatactatagagtaataggtcatatatagcctcaattgagttttttatgacaatattttaacatacctctctctctactaatttcggtacatcttatggtttaaagagtagaaaataagatgaaatatcctaaaatatagttttttaggaatcattgaaaactccttgcacttagatttaatttatatgttagttacattattaaaagtcataaggcatttatctgagtcattgctctacagagagcaattaatggcttgtaataataaaaagaatatttctctgtaatgcattgttgaaagacaaccagaaaataggaatatgct

SEQ ID NO: 12517 - DNA, 570 bp, Homo sapiens
  source 1..570: mol_type = other DNA
cattgccggcaatgggcgttgtaacaggaaaagttttcattaactcctgccattcaatgattaatgcatgatagggcctaatataaataaagtgagggatccaacattactttaaaagatcctaaggttaacatgcgtctttaaaggactgtaatgaaagatcattgcatatttattgaattgtttatatctactgtcaagttgttttgacatggaagattttcacagtatgttatccctatggtgaaaataaattaatttgttgtatatagttcctcaatctctgaagtaaaggtataatcaaggctttatttacattaaagattttttccaagtaagttacactctgttaacttcctgctagccatcatgtttgcaatcttgtttcttttgttataagtcaagtttgaatgttacaatacttttattgaaacttttgttaagttttttcttgtaaccctaaaataagaaatacatttttgacagaggcttaatgttttaacaaaagagtgtggacatttttattttaaaatttaggcaaaagtcactatcaaatggttgcttatttgt

SEQ ID NO: 12518 - DNA, 218 bp, Homo sapiens
  source 1..218: mol_type = other DNA
tttattaaagtaagtggactgataaaaaaatcagaggcagttgctttgtttgatgttatgtatagaatacgtaatatcagcattgtagaaatggtactttgatgtagcccaggctggagtgcagtggcatgatcttggctcactgcaacccaagcgattgagtagctgggataggctggtgtgtataggaagtacttttgtagacatggaaggtgcac

SEQ ID NO: 12519 - DNA, 493 bp, Homo sapiens
  source 1..493: mol_type = other DNA
ctttttgttgagtgaaaagatcttttgttgagtgaaaatatattctttttgactcttactggaaagaaaggtcatgtagacctcctttgccttttcttgcatctgcttatcttgcattaaaaaaagaaatctttacatgctagccaaaacaaaatattttcttcattgaatatctttttaaaaaatttccttaatctttagattctccaggaaagccacccatttctctgctgccagaactactattactgccatagatgtatttactggtttataggaaagaatattataatgcatacactccaggaaactccatacattcagctgcctggaagctctagtgttgaaatagtttgacaatagattgtgaattataggacaggctattcaaattttgagcaatatgtatatagaatatataaaaaagctcacacttgtaatcttctcaagctacgatgtggtgagctgtgatcacaccactgtactctcaaaa

SEQ ID NO: 12520 - DNA, 409 bp, Homo sapiens
  source 1..409: mol_type = other DNA
agatagataaacatataaaactgcattttgtatttatcttagcaaatttctatctgctctgctttcaaaatatatccagaattcaactgattttctgaattcctgatgtaaatacagatgacatcctcatttcttgtagattcccaatagattctttctaaacaaaagtcatgtcatttcattcataatcctactatgacttatagcctaggaggtcttaacctcctttgttcaaatattttttttttaagagagcccttcctgaattcatacctttggctatgtattaattagcttatatgtaacctagtgcctgacatgtaggagagttcagtaaacagataacatataaaatagggatgataaaaacaggttatttcatttcctggatctggtgaattatctttta

SEQ ID NO: 12521 - DNA, 281 bp, Homo sapiens
  source 1..281: mol_type = other DNA
ccagaatagctttttaaaaacgtgacttctgataaatgttggcagaactggtgcattcctaaaataaattatgtatgctcagcttgtgtatataacacgacattggtatatttaaaaaaaaattcatgcctagggtcaattctgataatcaaatttagactgctgcaacaaccgtaactattgttgatatatacaaacttccaaattttaaggaagccttccaggtctgcagaccccgcccccgcgcccgggatgttgagcccccgcggcgtgacgcgagc

SEQ ID NO: 12522 - DNA, 279 bp, Homo sapiens
  source 1..279: mol_type = other DNA
tgttatctattttttgagcacacaaagtgcctcgttgagcaccgagctccggatccaggacagctgagctaacccagaggagttaacattgaattctactggctcttcagcacgcacagcaatgctgcttcataaagagtacgatctcgttagcaaagaaaatgagaggtacggacagggctgcctgctctctcggactcccgagagcctccgggaatctataggggaaaagagtagggcgctacgccctacctccagacggaagtgagcgacacacac

SEQ ID NO: 12523 - DNA, 390 bp, Homo sapiens
  source 1..390: mol_type = other DNA
aagccctgggtagctgggaccacaggcacacacttaccagcggtgtctcaattgtattacattatattctagcccactgtggattcccagtaatagattcagtacctctttaacaagtaatgaatcaatgtgtatatggaaacaggctagaatcattttccgcaaaggaaacagtttttagtgatgtcgtccacgagaaaaaaaaatattaggacagagcggcgggctcccagctcagctggcggataacgcgcgcggccgggaaggcggcaggcgggcggcaggcgggcggcaggcgggcggcaggcgggcggcaggcgggcggcaggcgggcggcaggcgggcggcagattctgcgcacgcgcaggcagcccagctgccagtcaggcg

SEQ ID NO: 12524 - DNA, 367 bp, Homo sapiens
  source 1..367: mol_type = other DNA
agtccatggttaacagcaggtgagcgagcattaccacctgagctccagctcctgtcagaccagcagcagcattagcgagggatctaggttgcgtgctccctataagattctgaggtggaacagtttcaccctgaaacttattttattttatttttcatttaaaaaatttttttgaaatggagtcttgctctgttgcccaggctggagagcagtggtgccatcttggcttagccaggctggtcttgaactcctgacctcaagcactctcatttacagtaagtgtttgaagagtacattctaaatcatttttctctgctctcagaaatcatgtgactgatgactaagttaaatcttttctgcttactga

SEQ ID NO: 12525 - DNA, 478 bp, Homo sapiens
  source 1..478: mol_type = other DNA
gtaagcttttatataagccttttaattcatccctttaatatcctccaactaacccttttcaactaaatatgattatgtttatcaggaaatgcactttgctaaagcataagctattcatgaatatctttctcagcgtattacacaaggaaattcatcaggttttgacacctgtttcaataatgtatacttttcctaataaaagaggaatctttggcaaatattgttaaatattaaaataaggtgatctttgttccataatgctagctgctaacttagcagctataggaacacacctgctaattgtattctttaaaatgtagacttcattacccatttctaaaatatcttctcttttaagaccaatactaacatccgccgggagcggtcagcacggaccgccaacctcacccgctcagggtgttcgctctaactccacgggagtgccctcccgggcggcgctccctcccggtggcagcgc

SEQ ID NO: 12526 - DNA, 494 bp, Homo sapiens
  source 1..494: mol_type = other DNA
ggaaattcatcaggttttgacacctgtttcaataatgtatacttttcctaataaaagaggaatctttggcaaatattgttaaatattaaaataaggtgatctttgttccataatgctagctgctaacttagcagctataggaacacacctgctaattgtattctttaaaatgtagacttcattacccatttctaaaatatcttctcttttaagaccaatactaacatccgccgggagcggtcagcacggaccgccaacctcacccgctcagggtgttcgctctaactccacgggagtgccctcccgggcggcgctccctcccggtggcagcgcagcgctggcgccggccaggtacattcacgccgtggagaacggggtcagatccagccctcgcgccccagtccggtcccagcgccctctctgggaaaggcgggcgcgggcgcgggggtgggaggcgcccccggtttccggacacgtgcgcccggcgtcctccc

SEQ ID NO: 12527 - DNA, 653 bp, Homo sapiens
  source 1..653: mol_type = other DNA
atatttatacatattactgaaagagatttttaaaatcaacttactatatgatgccaaatttttaaagacatacaataataactagactaatataaaattatgattctgactatggttataacagaatgtttagagtgtttaacattttattattaatttttcacaaaaatcttatgagggaaacaataaaattattattcttacttagaaaatggaaaaaagaatttttgtgtttaacaactaggctattttatatcgccattgtttattagctgtttatgacaaaaacagtttttttgcatgactccatatatttttttttcttttacaaagcacagtttaattatcaaaatcaagtacttactgtttatacaagactattctctaatctacagcagttagtcaaatttgtggaattagtccactaatgtcatagtagtcgaccggaacttcctttccaacaaaggagtaatttgcttctcatattttttattttttcttctaaaaaaaaaaacaaacccaaaaaaccaggcttgccaggggctttccagtcgcagaccccgcgtgttcgcagactctgccgccggcgaaactacatttcccagcgggccgcgcgccctccttccggaacccggaaacgccttgcgggggcg

SEQ ID NO: 12528 - DNA, 263 bp, Homo sapiens
  source 1..263: mol_type = other DNA
gagaagttctcctggataatatcctgcagagtgttttttctaaatttttttcaaagttttcaagagtaatttgctggtgaggaactgcgagttttccttctaacagacaggaccctcagctgcaggtctgtgctggggggtgcctcccagttagggaggcagtctgcccgttcttgtccagacagggacatttaagtctgcagaggttactgccctgcccccagaggtggagcctacagaggcaggcaggcctccttgagctg

SEQ ID NO: 12529 - DNA, 325 bp, Homo sapiens
  source 1..325: mol_type = other DNA
tggcagctgctgctgctgtctgcttaaaatttcaactatatgctctaaacctatgagcttctctattcacattttatacaaggcaggtaaaaagcaagtaatttctgacctcactctgtagagaaagaatctattatcctaatatcatatgctataggcctggcatccctctcgaatcatatttgtggccacccagattaactatgttagcttactgtcttaaaaaaatgtactgcttgttactcaactgtctgttttttcatgaacttgtttcttcttttttgtatgggaaccaggaactagaaagcataagacatataaaagc

SEQ ID NO: 12530 - DNA, 499 bp, Homo sapiens
  source 1..499: mol_type = other DNA
tttgagttactaccataatattgtactttatttgatcatatgctagatactctagcatttagaattaaataatgctgttgtgaatttaaaattagtaattttcttaccccagattacaacatgaacaaaggaattaatggtaccctttatatcaaaatgcctcatattttatgaataaagagggggtccattctgagtcacatattgaccccaaattcacccctgggaaaaataaaaggaaaagtatttttccatttcgtcccctaaggacccttaaaggcatttcagcatctcagggggttggggccctccttgcacacatctcccaccaggggccagaccttccgggcttgggtctcgggagcccaaagcacgcccacaaaggccgagcgccctggcttcgctgcgttccggagaagcagggcgggctgcttctcccggatctggcgggcctctgggaggggcgctcaagtcacgtgcccgcgctggggccgcagct

SEQ ID NO: 12531 - DNA, 605 bp, Homo sapiens
  source 1..605: mol_type = other DNA
ataagtagaataatcttcaaaagtgttaaatgttaattgatgttaattttagttatgattattgtactatggttaagtaaggtgtaaaaatttaaggaagctttacgaatatagttaggtctgaaatgatgtcaaaatgaaaaattaaaaaccatataaaatagtgaaatcagattaaatgtgcatcaaaaaattatggcgcatatatcctgtggatatttcactgcatttaaaaagaaaacaaagaaaacgtgttgttgaaatgccaattaattaaaaaatacagttgcaatgtaatgtctatcaccactttttttcaaactatatacgagttcataggaaaaaattctggaataattctaaccaaactattcactactttgtcttgattagaggaaatgtgagaaaaatgaaggtttaaggaacacttgttttttattacctatacttgtatattcgtttaatttcataacaagaataaatttctttaaaaaaacagaaggtttatagaattaaggtaaattttaaaatattatgtgctccacctaactataatctattcacttgttctaaatcaatttactttaattctttttaatattata

SEQ ID NO: 12532 - DNA, 536 bp, Homo sapiens
  source 1..536: mol_type = other DNA
gtcactcacgaatgcctgaccaagaagatcagcgcatctgggacgggtctgagacccacagttttccatcaaatacatatctgggaacggaaaaccattccccctcctcgctcctaggaagccatttaattcccttttctttctggacctcatgagctcaggatgaaatcagcattcagggtcagcacgcccaagacgaggcgtgacccggggcgggggaggggacttcgcccgcgtcgcgtgaaggatgccctggccttgggctgcaggcgcggacccccgggggctccccagggtgtaggaggcggagactgatccgctctagccccgagcggtccagcgcggggcgactcgcccgcatagtggagattccggcatgaggcggcggcagtcaccgcctggctgccccgcggaggcccgggagagccgctgcggtctcgggaggccgggctttgggacttgctggcccgaccgccagtcgccctggggccttgggaacagggaaatgcgcgcgccgaggcggtggcggcctcgct

SEQ ID NO: 12533 - DNA, 528 bp, Homo sapiens
  source 1..528: mol_type = other DNA
gggaacggaaaaccattccccctcctcgctcctaggaagccatttaattcccttttctttctggacctcatgagctcaggatgaaatcagcattcagggtcagcacgcccaagacgaggcgtgacccggggcgggggaggggacttcgcccgcgtcgcgtgaaggatgccctggccttgggctgcaggcgcggacccccgggggctccccagggtgtaggaggcggagactgatccgctctagccccgagcggtccagcgcggggcgactcgcccgcatagtggagattccggcatgaggcggcggcagtcaccgcctggctgccccgcggaggcccgggagagccgctgcggtctcgggaggccgggctttgggacttgctggcccgaccgccagtcgccctggggccttgggaacagggaaatgcgcgcgccgaggcggtggcggcctcgctaaatcgataggactgtgagagagctaatattctcccagcatatggtctaaaatcttcccagcctgggaaaagtg

SEQ ID NO: 12534 - DNA, 637 bp, Homo sapiens
  source 1..637: mol_type = other DNA
gttaagaaatattacttttctgcaatctttaacaaatgtggaaaaggacattctgaatttataatgtaaatgattctttcttggaaaatagaatcaataaacatattttcagaagtaaaatatattgattgagaactattgtctaaatattccccatagatagtagatctgataattttatttcagtttaatgacatcagaattcaaaagaaatgaaacattatacatgtaacaattattgaaatattagcatagctgggcacaggcctataaatagtaaccatagggggctgtcaggatatgtcataactccccacatttcaaattacaaaatttgctttactccaaaataaaggtagctttattgtacatttaagaaaacttgaaattgtaaagtgtttatgtgaaatgttaacttacagacttgatttaccaaatttatagcagtaaagtaagtcccatttttcagaatatgaggtatgtgatttcagctccttaaatgggatacctcacattattattacagtttaaaacctatgagattttcttttctattttttaatgatctcatttattgtctactggaaatcaatttaggattatcacaaggaattgctttcatatgccataaaagaag

SEQ ID NO: 12535 - DNA, 424 bp, Homo sapiens
  source 1..424: mol_type = other DNA
aggtaagaactaagacgttcttaaacccgagaaggggtaggcgagctggctgcccgaattcctaagcatgtgagggcctccgggggcgggaaacctcaggccaggcgcgcgctggcccgctctacggggtctctcgggagcgctttgcagggcggatgactgacgggccagctacctgcctatcctccctgtgcacacaggccccgagggcgggcaggtctcgccccaggcccgacgcagccacctgcccgagggctcggaaccccggaggcgcggaggcgtctcgccgccacccggcggcgcctgccagaggcccttcgcgatgtccgcaagcagagcctgacccggggctgaccggttcgtgacgccaatcaccgcgcgcgggtgtccagcgccgctaaagctgcgtcgctccggaagcctg

SEQ ID NO: 12536 - DNA, 568 bp, Homo sapiens
  source 1..568: mol_type = other DNA
tggaaagcatattcatatgacttcagattatctgaaaaggctattaaaattctcctcacttttccagctaaaaaaaataatatctctgttaagccagattctcttatgtacttcaactaaaacaacatgttaaaccagatgtcttttattaagccagacatttgcaaaattaagccagagagttgcaaatgtaaatcaatgccatacttgtcactatttttttttttgctttggagaatatattttattttcattaaaatatttatataaagtgtaatgggtttattcatagtatttgaggtgaattaatacttatttaatttttttcagtttttctaatttcccatatgttaaatattggtagatttatcttgagcatgtaatagatatctgagaccaaaatgatttcacaaagtcaaagttgagaagttatataattgcattttgtaatagtggaaaaaggggaattttctttctttctttcttacttaaaaggaatcatagtattcagattaaagagaagtcttcagcgcatgctgatgacattgaatgtcactataaaaatcat

SEQ ID NO: 12537 - DNA, 408 bp, Homo sapiens
  source 1..408: mol_type = other DNA
aacagattaacaataacattaatccgaggtttgttatggacaacacattaatactggtaacttgccagtagatacgctatagtcagcaaacagtacagcttgtttacgattgctaaatcaaattttcaaagaaatgtagttctggtaattgtaagcaaaaccgttaaaatggtctgagttagttttgaagttactttgataatttttggcccaagcttgaaagtatgatttctctggaaaaacatgcaagcgtgcgttgcatcgcagattgcaacctgaagcggctcccggctccctggagagtaacccggaggtggcagccaggaggagaccgcaggaacctcgcctccgccgcggccccgcccccacggatccccgcccccgcagttgcggaaccaatgggagctc

SEQ ID NO: 12538 - DNA, 407 bp, Homo sapiens
  source 1..407: mol_type = other DNA
gaaaggttactaaaattatggcattcacctgtggtcagccaacctgttttctgccgtgttaagttaaactttcaggtagccccttcctctgtgccaagggaagaaaacaccatgcttccctctcctgagagatcaagagaaaacacagtatttaaacagaattttccaacagcctgcatatagtgaggacttctcaagcttctgaatccttttccattgaattgtgcaatggcacatgtatgagcactggctcccaggtaggcacagcccagttcttagctcctaggaagcttcagggcttaaagctccactctacttggactgtactatcaggcccccaaaatggggggacatttcaaactgcattctggaatatttaatgcttgagattctgacataattattct

SEQ ID NO: 12539 - DNA, 386 bp, Homo sapiens
  source 1..386: mol_type = other DNA
ctatagcagaatgtgacagtatttagaagtcacagactccaggaaactttctgtgcacagtgtctaagctcagttagctaagtgaaatttggaaagttacttaaggaagtcaaagttttgcatgagatgatatacataaaatgcttagcagataaatgatagtcgttattattatcgctgttgttactggtttacatctgcagaatagctagcccaggaaaaagttaacatttcagtggcatgcatagacgaatagtttgatttattagccaattcagataaatgtgcacgtggaagtcatagttaaatattatcgtcagttaatttggggtttgattttccaaatacaacactgtctcacctgagggcgtgaccctcttttaaaa

SEQ ID NO: 12540 - DNA, 831 bp, Homo sapiens
  source 1..831: mol_type = other DNA
tggctgcatgtgcggcctcccatgtgaccggcccctgggctggtggccactgtggacgcgcccggcgccccctctcccggctccctgcgggttccgcggagccgccggcgcgcagcccggccaggtgcacccggcacggccccactaacagcgcgcgcctccagccgccgggcactggcggccacgcgggcgagatttacggtggcgctaggcggcggcttccgaggccggccggcgcccaggctccgattacaggttcacactgggggcccggccggcggccgcccagcccccgccggcgcgccctcgcgcggcccggctccccgcctgccgcggacgcccagcgccgccgccgccgccgccagcgcggccgccgccgtcgccgtcgccggccgcccggattggctggcggccgcggcgccggcactttcccacggcccgcggcgcgtgcggctcaccggaggcgctgcaggctcggccctggcgcgcggccaggccaatcggggcgcgcggggcggggaggagccgcggccgccggcgggcttgtgtcccggcccggcctcccgcgcctccccgccgcccgccctgagtgcaggctggacagagcccccgcggagccgacgcaccgccgccgggcaggggcgggcgcggagggcgggggcgcggtccgctagagccctcggcctcgctcccgcccctccccggagcggctgccaatcagcggcgcgagaaaccggattggccggggggcggctgttgccctggagttgccgccccgcctctccccactcccccgccctccccagggccctgggaaggggctcagcgtgg

SEQ ID NO: 12541 - DNA, 262 bp, Homo sapiens
  source 1..262: mol_type = other DNA
tgtcccagaatgctggtggatagggctgggtcgcaggcccaacctcaaacctagttgattggcttaagcaaatcagctgccactagcgaccctccacaattgagcaattagacttcaccctgaaggatgatgtgatgctttttcagatccttcattaaatactgagcatcagtttattctgaaaagtatagataatactagtacatattatttgataaattaatacagcagtcccctaccctatacatattgtactatgtat

SEQ ID NO: 12542 - DNA, 458 bp, Homo sapiens
  source 1..458: mol_type = other DNA
aaaattataaaaacgtgaaaggtattgctttccaattgtctttcttgactggccctggcagtcacagatagaatatttgcattaatctgctttaagttaatatttttgtacatgtatacttttttggtaatttaaaaatacagagcacttttcccatcatgggaacctgtttttagacatttttttctgtcatattaatgcagcaaacaatttcacagacttgagataatcttaacagctttttaaaaacctacactggtattttatgtatattgtcttatatattcttcacaacaaacatagatagtaggtattatccacatttcccaaatgaagaaaatgaattcaaatctagggctgtgtatatccaaattttcttttatcatacaatatatagtaaaagacttcctaaaacagtcttacatatgaagcagtttcattccagggaccctgaaggc

SEQ ID NO: 12543 - DNA, 402 bp, Homo sapiens
  source 1..402: mol_type = other DNA
aaaacatttcagaaaaactatttttgtgggggtttggcaaatgtttggtgctagggaccctacagcaaagttcctcttttcaaagtttaaaaagttgggagtagacactaaatattattaaatatttaatattaatatgtggcatattagaaagtgctacatggtactagaccctcatatttgctcgagtgctggcgcctccagagctctgcgtccggggggcggacctctcatagctccgccccgtgacccgcgcgcttgcggaggggaggtcaaaggcactgagagtggatccgaaagtgccagagcctaagacgcgcgcaggcggtttcgcgagcgcgttggagcggcactcggagcttctacagaaggtggagcccctacagaaggtgcgccaacgac

SEQ ID NO: 12544 - DNA, 394 bp, Homo sapiens
  source 1..394: mol_type = other DNA
tgtgatcataaaaattctttctctcgaagtacttgactaactgtggattaatattaaactgctgtaataaacactttttccaaaacttctgaactcctaagttagataataggtatctagaggtgtcaaaacatttcagaaaaactatttttgtgggggtttggcaaatgtttggtgctagggaccctacagcaaagttcctcttttcaaagtttaaaaagttgggagtagacactaaatattattaaatatttaatattaatatgtggcatattagaaagtgctacatggtactagaccctcatatttgctcgagtgctggcgcctccagagctctgcgtccggggggcggacctctcatagctccgccccgtgacccgcgcgcttgcggagg

SEQ ID NO: 12545 - DNA, 624 bp, Homo sapiens
  source 1..624: mol_type = other DNA
gcacatcttgtcaacatgcattgccatgaatattcctttgaccaaatagtttgtgggttaaacaaaatgaaaatatcttcacctgtacatttatgttcctttatttaggaaacaccattataaaaacacttatagtaaatggggacattcactataatgatctaagaagctacagatttgctccagatctggaatgcctcttaactaaaattgttctcttaaatattctgaatcctggtaattaaaagtttgggtgtattttctttacctccaaggaaagaactactagctacaaaaaatattttggaataagcattgttttggtatccaatttattatagttttgtaagtaacaatatgtaatcaaacttctttgtttacttatttttcaccaggttaaaattttaatttctacaaaataacattctgaatcaagcacactgtatgttcagtaggttgaactatgaacactgtcatcaatgttcagttcaaaagcctgaaagtttagatctagaagctaaatgacaatatcaatcacattaggggaaccattgttgtcttcacttaatccatttagcactatttaaaataagcacaccaagttatatgactaatataacttga

SEQ ID NO: 12546 - DNA, 451 bp, Homo sapiens
  source 1..451: mol_type = other DNA
ttgtattcaatatttcttgaatgagtgtagctaaattcactaggtactttaaaataatagaccttacaaagttttctaatctaatattttttacatatataataatcactgagctataaggttgctgatgtattgaattagagttactttatgcagaatcattttgaacttttttttaagtctaaagtaggggaaaagacacaggagagcctgtgagcacatcttgtcaacatgcattgccatgaatattcctttgaccaaatagtttgtgggttaaacaaaatgaaaatatcttcacctgtacatttatgttcctttatttaggaaacaccattataaaaacacttatagtaaatggggacattcactataatgatctaagaagctacagatttgctccagatctggaatgcctcttaactaaaattgttctcttaaatattctgaatcc

SEQ ID NO: 12547 - DNA, 506 bp, Homo sapiens
  source 1..506: mol_type = other DNA
tgcacatgaacaactcagggattttgttcaagtgttgatttcaagatatctgagatcctgcatttctaataagttgatctgtaggtccttgaaccacactttaagtattaaagggttagaaagcttatactgtaactgagaaaaaaacatatatttctttcccatgttgtattcaatatttcttgaatgagtgtagctaaattcactaggtactttaaaataatagaccttacaaagttttctaatctaatattttttacatatataataatcactgagctataaggttgctgatgtattgaattagagttactttatgcagaatcattttgaacttttttttaagtctaaagtaggggaaaagacacaggagagcctgtgagcacatcttgtcaacatgcattgccatgaatattcctttgaccaaatagtttgtgggttaaacaaaatgaaaatatcttcacctgtacatttatgttcctttatttaggaaacaccattataaa

SEQ ID NO: 12548 - DNA, 577 bp, Homo sapiens
  source 1..577: mol_type = other DNA
ttgatactataattaaggaatgtgttttaataaatttaataaacaatgaacacacattattcgcatttcccaaacaatttggatggtagacactcaattaagattgagctaagagcaatcctgttggacagtgtaacataagggttttgaaaaagtattatacaaatgcaaggcagatatattgaaataaatgcttattggcaaaatttcaggccagataggttggagtagtgcttcacaaactataatgtgcacatgaacaactcagggattttgttcaagtgttgatttcaagatatctgagatcctgcatttctaataagttgatctgtaggtccttgaaccacactttaagtattaaagggttagaaagcttatactgtaactgagaaaaaaacatatatttctttcccatgttgtattcaatatttcttgaatgagtgtagctaaattcactaggtactttaaaataatagaccttacaaagttttctaatctaatattttttacatatataataatcactgagctataaggttgctgatgtattgaattagagttactttatgcagaatca

SEQ ID NO: 12549 - DNA, 377 bp, Homo sapiens
  source 1..377: mol_type = other DNA
tagctgcagcagcagctggtctggggcccacactgttctgccatcaccaccgtgggaaggaagaaacccctttccttaacagcattggaaaccctgtttccaaagcgcctttgtgagatatgatcctccttaattaatatggatagatgtgaatgtaacattgaagtaggcaaagccgtttctacataatcatgtagaaattctgccagcatactcttaaaatattagatcagaaattgagaatcttacattataaatacttgtatgtacctgcacatatatggtacagattatatctgttctttataatgttgaagaggaatcaattatattttcaaactagttggattttccccaacttttaaatcatttgaaga

SEQ ID NO: 12550 - DNA, 454 bp, Homo sapiens
  source 1..454: mol_type = other DNA
ggtaactcatttaacacctatatgccttacagctccgggtgaaagcactttagttttcaaagtgctgtaaaaatgcaaggtggtattggaattaattggctcctgaataaaagtaaattatgttggagtaattcttcatggcgccaagagaataaagctcctgggcttttaataatgttgaagcaccactatactaattcaattagcatgcctgctatgaggtaaagtatatttttatgaaatgtaaacaagctgtgtgtttaacacaaatgttttgattttgtttttaaaaaaattatttctattttattttgtaaaacctttgtttcctgtctgaaatctgttcacaaagtgagcactacttgttaaacatcattagcacttgcaagtgatattacctcacctaacctctctagagagttagaggatttttacgccatcaaaatcacttgga

SEQ ID NO: 12551 - DNA, 483 bp, Homo sapiens
  source 1..483: mol_type = other DNA
ttattattattaatgctatgatatagcattatcataatgcagagcaagcttctagcagcagaaaccgaactgctctgtcttctgtattgagagccatctgcagagctggaagacccatctaagttggcagtgggaaaacatacaggaaactattttttcaacagtattaccatgaaccatgtttttttattggtatttagacagggtaagtaaaaatgcctgagcatttttcccatgatagcagataccacactagaataattttaagcattgcatattttacatactttgttgaaagtccatcatgtccgtatttggtagctctctaaagacatgcaaaaatttttagaaagtatgcccataaaatgtatttggataataaaatacaaataatcaagttgacaaaggcatctgaggaatttgatttcatttttgttttgtttggattatgtgagaaaagaacaataggtatgagttctttca

SEQ ID NO: 12552 - DNA, 426 bp, Homo sapiens
  source 1..426: mol_type = other DNA
tagattcctcaagcatatttaagctttccgtcatctcacttctcaaactagattcctgagtgagagagacgaatagttgactgatgggtggctgtccatgggtcagggcccacctctaaccacctagtcaagtctgggcagtcagcatcaaggggttcacatgaaacccttgagagcaggccatgactttgccagacacagggactgagtatatgtatccagtatatatactcatatcaaatatgcaaggagattggattattttgatttagtatacaaatacaagttttgtaggcattagaaatttgagtcctaaacctacatgaactcaacaacattatacattgtttttagagagaaagataaatgattcaaaaaaatgtttaatgactggaattttaacttactgaatgacttttgctatat

SEQ ID NO: 12553 - DNA, 448 bp, Homo sapiens
  source 1..448: mol_type = other DNA
atctgaggggcagctgcctcctggtcactctaccttagtattcttttataagggtatctggatgatatatatatatatagatagatagatatagatatatagatatagatatatatagatagatataatcatctatatcatcatatatatatatgatggcttgaagccaggagtaagatgttttctgcctccactaatggaaagaaacagaataaaatttacttaggacatttagttcattcagtttactgagtttatgaatttgattaccacagcaagctgaaggagctaaaatctttcatctaatttatactgatttacttttgcagcaatttaaagtctcagcaagactaagagaatgctatattttctaaattcatatttttgaatatccagagatatgtgtggatctttagattttgcactttaaaaaatggtttaaatcccc

SEQ ID NO: 12554 - DNA, 361 bp, Homo sapiens
  source 1..361: mol_type = other DNA
agtagaaccagcaggagctgcaattgctgttgcttgagccaaggccacagtctgtgttaaaggaaataaatttggtgacttagttttgttttcttctcctttgagtgcatgtaactaaaagtcagtctgaagtttttgtgacacataaagtaatcatggaaatacagctttatttttataccaagttgtgcttagaaagctgattgctaaaccaggaagcttggctttcagaattttactgtaatccagggtggaagatttttttatttatttattttaaataaattgtagtattaacaccaggtggtgaggataaatcatttattaaatggcacctgggcccagaagccagggcctctaa

SEQ ID NO: 12555 - DNA, 493 bp, Homo sapiens
  source 1..493: mol_type = other DNA
aaaatcatccagcatatattctgtatttaaaaaaaaaaaatcacaagatgaatacagaccatcttggtgcatatgtattttatacactagacacatgctgatgtttttaatgcttaaaatatattaggtttcatactccaatccaaggagagtatatctgagctctttttttttagatttgaaaaccgccttttagattagaagtagaaccagcaggagctgcaattgctgttgcttgagccaaggccacagtctgtgttaaaggaaataaatttggtgacttagttttgttttcttctcctttgagtgcatgtaactaaaagtcagtctgaagtttttgtgacacataaagtaatcatggaaatacagctttatttttataccaagttgtgcttagaaagctgattgctaaaccaggaagcttggctttcagaattttactgtaatccagggtggaagatttttttatttatttattttaaataaattgtag

SEQ ID NO: 12556 - DNA, 673 bp, Homo sapiens
  source 1..673: mol_type = other DNA
gcattctatggaaaagactatataatttttcaagagattctttgcaattttcatttatgacctagttagagaagacatcatagggcattatttaggtaaaagagccactggcatttctaaataacgttcctgtgtttcctactgtaagtactccaaggcctcggaggaaacttttgattttataaataacttgatggtggaaggcaaacgccatcccggttcccaagcaggctccacgcagcctccattcctcccggccgacttccagccggtgcgggagtcggggtgcgcccggccctcctagcgctgcgccgcccgcgccgacgtggcggagcgcacaggtcgaccgggtcaagcgctccaggccgagggcgggcggcgccgccgcgcccgacgcctctgggggtggggacttcgcgggagtcgccggcggaggcgaggaggagctctgcgcggcgcggcgggcgatccgagccgggacgggctgcaggcggggcggcgagcaaggtgagggcgcggacccagcgggcttgggctcctcgggctttggctcggcgcggggctgagcgcggcccggcggctcgagcaggtgccgagcctcctgggccggcgccgcaagttgcatctcccggatccggatctggcatcctggggccctggaaggagcggctct

SEQ ID NO: 12557 - DNA, 626 bp, Homo sapiens
  source 1..626: mol_type = other DNA
atttgcagcctcagatactttgatcaacggacatgacgcctcaacacgcattttccaaagatctctgctgataattctgaccttcggttaatttaattaatttcatttgatttaattcattttagtgttgtcctcagtcccgcactcaaaacagatttttattatatgaaaatcttcctagtcacctaaaaaatccgcattctatggaaaagactatataatttttcaagagattctttgcaattttcatttatgacctagttagagaagacatcatagggcattatttaggtaaaagagccactggcatttctaaataacgttcctgtgtttcctactgtaagtactccaaggcctcggaggaaacttttgattttataaataacttgatggtggaaggcaaacgccatcccggttcccaagcaggctccacgcagcctccattcctcccggccgacttccagccggtgcgggagtcggggtgcgcccggccctcctagcgctgcgccgcccgcgccgacgtggcggagcgcacaggtcgaccgggtcaagcgctccaggccgagggcgggcggcgccgccgcgcccgacgcctctgggggtggggacttcgcgggagtcgccgg

SEQ ID NO: 12558 - DNA, 609 bp, Homo sapiens
  source 1..609: mol_type = other DNA
aactacaagtaattttaaaacatatttgcagcctcagatactttgatcaacggacatgacgcctcaacacgcattttccaaagatctctgctgataattctgaccttcggttaatttaattaatttcatttgatttaattcattttagtgttgtcctcagtcccgcactcaaaacagatttttattatatgaaaatcttcctagtcacctaaaaaatccgcattctatggaaaagactatataatttttcaagagattctttgcaattttcatttatgacctagttagagaagacatcatagggcattatttaggtaaaagagccactggcatttctaaataacgttcctgtgtttcctactgtaagtactccaaggcctcggaggaaacttttgattttataaataacttgatggtggaaggcaaacgccatcccggttcccaagcaggctccacgcagcctccattcctcccggccgacttccagccggtgcgggagtcggggtgcgcccggccctcctagcgctgcgccgcccgcgccgacgtggcggagcgcacaggtcgaccgggtcaagcgctccaggccgagggcgggcggcgccgccgcgc

SEQ ID NO: 12559 - DNA, 375 bp, Homo sapiens
  source 1..375: mol_type = other DNA
aataaagaaatatatataaataaaaattaaaataaatagcaaatatattttcttgaaaatggcaaaattagtcatgttatgtgcttgatcttacttcatattaatttcttaagtaaccaactcaaaccaatcgctcatgaaacagtgtttcgaaaattgatgattcatattaggaattcatcccaaacctcagtccattaaaatgacttgtagcaaatctctacgttcaaagtctaactttgacagacaacctgaagtctactcccctccctccggagggaagaatgggctgcggttaagcgtttgccctggtgtcagggccaactgcttcgaagcgccagactttcggagactgtgaaatccagtccgggtttt

SEQ ID NO: 12560 - DNA, 257 bp, Homo sapiens
  source 1..257: mol_type = other DNA
gatgttaaatgtccaacaataattaactgaaggtgaatactcctccccagccctcctaaggtactaataaagaaatatatataaataaaaattaaaataaatagcaaatatattttcttgaaaatggcaaaattagtcatgttatgtgcttgatcttacttcatattaatttcttaagtaaccaactcaaaccaatcgctcatgaaacagtgtttcgaaaattgatgattcatattaggaattcatcccaaacctca

SEQ ID NO: 12561 - DNA, 481 bp, Homo sapiens
  source 1..481: mol_type = other DNA
cagaattttctattaaacagaaggaacagaaaaactttctgaaatttgcataaagttattttatattgcataagttaacatgttgatggtattcagtgataaattttatgtatatatattatttaaatcattcatttattcaacatatagttatttaccatgtgctattctcaacagctagttattattgaaatggtttgtggccccccaaacataatcatatatacagcctatctgtggtattaaaatttcataatgaaaaaaatattgagaaatactttttcagatactaaaacccctgtcccgatggaggtgattttctcatggaataaacaagataaataagtaaaatatataatgtggatggaacaggctgtgcaaaggccctgtggagacctggcacaccggaggaccagcaatggcccaagtcacaagggttatgtaaaaaccttttgtaatgttcatgagaaaagaagaagta

SEQ ID NO: 12562 - DNA, 422 bp, Homo sapiens
  source 1..422: mol_type = other DNA
tctagcacttagtagctactcaataattgtgaagagtacactttgaaacgtatcatgttctacgcacatgtgtagtgtctgagaagaaacccgctggtgtctcttgaatggcaatgacagtcactaaagttgacagtttagtgcaggagaggcggggccaggcctccaggtgacccctctggcttcctgggcctgcagaggcgccgaaacgtgcaggcgccggcgtccatgaggcgtggggcgcgccgggcgagtccctgcttgcaggaggcgcccgagaggccgtcgcgtaccctctggttagcacctcccgaccccgagaaggcccagggggcgcccggcgggcggggcggggaccgggcgaggcccgcctcccattggccgcatagcgccgcccagcgcgggccgccgttataaagcag

SEQ ID NO: 12563 - DNA, 576 bp, Homo sapiens
  source 1..576: mol_type = other DNA
ctaatgtccccaagctcatttttatcattggtaaaatggatataataatagttcctaactcttggaattagtgatataattaaatgagatcacccgtattaagcacttaaatagtgagttgtcaatataaattagtactctttctatagaaaatcctctttataaaattgtagattcattttaaatgacttaaacacaaatagttatagtatccaggatagttcagactttaagtatttctagctgaaaatctttgttgtgctcaaagaacatgttatagtgctacttcttgtttcatcacatgaatacaatttctgtgctctgctgcaatagattatcataattttcaataagaattcttaattgtgcagactcaggattgagagtgttcattcatgatcacagaattcatgcagtcttttccaaagcatgaagggcctaagccttcttataaatgtaagattgatcaaaaaatttttgaagattcaaatagtaatctcattcattttataaatttttttggagacaaagggagctggccattgaagagccgtctgtaagagtctgaaaagaatc

SEQ ID NO: 12564 - DNA, 640 bp, Homo sapiens
  source 1..640: mol_type = other DNA
gtgtagcgatgcatcactctgattactttagaaaactagtttcacagattggtagcttgtgaccacacaccatttctgatctgaataaattcagaacttataatacagttcagaaattgaatgcagtttctcaatatgaggaaagtattttagaataaggcctatttttcaaaggatctgtggaaatcaatgctatgctcgaaagagtgaggttaaattatcatttcgattaaatctacagtccagattactggtggatgaattgaatgtacttttttattcatataaaacatttgaaatcagaaatctggagtacttttaaatcccattatttattttgtcaggtaattcctgagacaggagtgtcccgaagagcctttgcaattatgtaagaatctccgaggcagttcttatgttcctcaatttcgaagtttatctcaaaataatttcccctctctacactgggataaatatgtagtgcactgagcattatgtcaaaacaggaatgtttaaaatatcctgttagtggtttaaaaataatttgtactctaagtccagtgaatttctattaaaaaatgattggatctcattcccaattggtcattcctaagatcacatgttctgagcatctttaaaagga

SEQ ID NO: 12565 - DNA, 468 bp, Homo sapiens
  source 1..468: mol_type = other DNA
ccaatttgggatcccatgacaattccgacagtttgaagagtattttgtagaatatccctcaattttgtcttcatatatctgagattacatgaagattaaaaagtgaaatgccttctcattgcaaaacttgatcctgtggttaatgtgatatttaccagtttctcatatttgagcatgcatcagaataaatttctaaaaagttctttgactactggtctagaacatttgtctgcctgggaataattttagaaatatatattcccaggctttggagttggcatttttacaaatgcaagtcgctactctgcaataatctgattaaagcgtaattggccgagagcctgggggcaagtgctcaggcagcaggtggggtcccaacagctccagctgtaagagaacccagcagggtctgaatcataggccttcaggctgcctgggtttgatttgtctgaatcacatgattgctca

SEQ ID NO: 12566 - DNA, 389 bp, Homo sapiens
  source 1..389: mol_type = other DNA
aacataagtcagtgtttccgcacatttttatttaagtagatggttaaaataaatacctgagtcccagctagtgggccgggatcgcaccactgcactccaggaaattatcaaaatgtgattcctacagtcattcaaactttgtaaaagaagaatgaacactaaataaatcctttttattttattagcagaaagaagcaaaataagtaaagctgaatttttttaaaaaaatctttgggcattcaaattatgatgctttaaaaacgttatcacttgattgttttaggaatgaagatatcaatccagacaatttgagaatcataatattttgcatttcattacatttgtaaagtataaatggtccctgtaaaaccaatgctgagcatatgttg

SEQ ID NO: 12567 - DNA, 437 bp, Homo sapiens
  source 1..437: mol_type = other DNA
tctgaaccccaaaactttgaactcagtgtgtttcactctctgctcttgctgtgtgacctgaggacaaatcacttaactactctgagcctcagtttcctcatctgtctgacaaagctaatcatacctttttcaagaaactgttaaaactttaaggaaatggtgaaacccgtctgtaatcccagctactcaggaggctgaggcatgagaatcgcttagccgagatcgcgccattgcacttcagcttgaagcttaagtcctcaataaatagtatgtaagtaaattatcaagaattttaatctagtataggtttaccagctttaggttagcacctaaaagctttgtcaaaatagtactatagaatgctccagcgcgggtcaggacccggcccggcctggcagaggctcgcagggcgcagctcggggcggggcccagcaaag

SEQ ID NO: 12568 - DNA, 414 bp, Homo sapiens
  source 1..414: mol_type = other DNA
cctgcctcagcctcccgagtagctgggactgcaggtgccagctttatggctggctttataaaaaaggggtcctgatttctgggacctgatttgggaagtcagaggaaaatttttccttctaaggctgcttctgagtctgaaccccaaaactttgaactcagtgtgtttcactctctgctcttgctgtgtgacctgaggacaaatcacttaactactctgagcctcagtttcctcatctgtctgacaaagctaatcatacctttttcaagaaactgttaaaactttaaggaaatggtgaaacccgtctgtaatcccagctactcaggaggctgaggcatgagaatcgcttagccgagatcgcgccattgcacttcagcttgaagcttaagtcctcaataaatagtatgtaagtaa

SEQ ID NO: 12569 - DNA, 375 bp, Homo sapiens
  source 1..375: mol_type = other DNA
aatcccattggactttttttttccccctaccagaatttaaaaaaaaaaaaaaaaaagataaagaaatattaactttttaaaaagcctgatgactgttttgcactacatagagggatggctcaggaattgaataacccatactaacttttaaaaaaataaatgtcaatggtccaattttggctcactctgggcccggctaatttgaactcctgacctcaggtgatccgacaggcgtgagccaccgcgcccggctgcaggtgaggcgagaggccttccgctccgagaagaacactcacagaacagtggcctttcctggcgaatgcaggcccgcccccacctgtagactgtcaggcgccgcgcgcgctcattgccccg

SEQ ID NO: 12570 - DNA, 422 bp, Homo sapiens
  source 1..422: mol_type = other DNA
tttttttctcttaaacagtggctggctaacaatcaaaaataggttttggtaatgttgggtaacgttgctcaaatataaaacacagataattccacttctttgtagtgtgcttgacacagttgcagcagtattgcatcatctataagcattacaatactaaattatttgccagcagatctaataggcatgaacaaaagaatgtttctcttctccaggatattctcctttttgttacttaagtatctatgtaatagcatttgacataaggatcattcagaaaacttcggattcctagttatagagttggaaaagagatggccaccatctttcacccacgcccagtagcagcagctgctccgagcttggcagacaaatatcctggaagcctttgtgtctgttcctgggaccgtccctagtgtgga

SEQ ID NO: 12571 - DNA, 419 bp, Homo sapiens
  source 1..419: mol_type = other DNA
ctttgtagtgtgcttgacacagttgcagcagtattgcatcatctataagcattacaatactaaattatttgccagcagatctaataggcatgaacaaaagaatgtttctcttctccaggatattctcctttttgttacttaagtatctatgtaatagcatttgacataaggatcattcagaaaacttcggattcctagttatagagttggaaaagagatggccaccatctttcacccacgcccagtagcagcagctgctccgagcttggcagacaaatatcctggaagcctttgtgtctgttcctgggaccgtccctagtgtggacagagggccgggtggcgccggccagccgacgtcccagcggtggcctccccgcccagccgctgtgcagcggggcggggccgaactggcagccagg

SEQ ID NO: 12572 - DNA, 376 bp, Homo sapiens
  source 1..376: mol_type = other DNA
ccaggaacaccaagaatcattactgactcaaagtctcttgtgtgtgccaaaagtcagtgataggaaatttaataattaattcctctacctttttaaagctttccaccgaatatccttttctgaagatttacgtgcaagttaaaatgtgtaatttaatatacaaacatacagcagaaaacttcatggttagtgttgatcaagacaaataatattttaatgcaatatttttaaaattcaaaattaatattaaaaaatccacgatgaacaaatcatcacattataaaaaataattttaaataaagatgtgctgcacataatgaaaaaaatcaataccaatcttgtctttatttaaaattttgatattttggccacctgg

SEQ ID NO: 12573 - DNA, 289 bp, Homo sapiens
  source 1..289: mol_type = other DNA
tcaaattgctcaccggatagtaaactacagaatttcaggggttctctgccaatgagaacttctgaattatgtagaacggatctcataacctgttagaatcagcgcaagatttctcagaagttcagaaactaaagatagtgcagagaatgtcgatttcctgccacaaggcgcccagccgatcaactccagtcgctcctccggtgggcgggcgcccatgccgtgacatcacttccggcagagggatcttgggcccgggcagagactggctgaggcggggagcaggcttctc

SEQ ID NO: 12574 - DNA, 327 bp, Homo sapiens
  source 1..327: mol_type = other DNA
aagccttagaaatcgtggaatgatttttcaaccacattatctgattctaatgatgaacagacctgtagaccggtctgaatcttgggatcaaattgctcaccggatagtaaactacagaatttcaggggttctctgccaatgagaacttctgaattatgtagaacggatctcataacctgttagaatcagcgcaagatttctcagaagttcagaaactaaagatagtgcagagaatgtcgatttcctgccacaaggcgcccagccgatcaactccagtcgctcctccggtgggcgggcgcccatgccgtgacatcacttccggcagag

SEQ ID NO: 12575 - DNA, 361 bp, Homo sapiens
  source 1..361: mol_type = other DNA
agtgcttgctccctccaggcgagcactccatgggatagacccttggagcaaacccgggacggggtttcctaaataagtttcaaactgcaagcattccccttggacagtggctttgcccgtgacaacgcccccagcatcgcgctgagccaggttccctgagaaccgcaactttgaggtgagcagcaagttgtgcacctcctctcaaggcgctggatcagcacccctgagctgcccccacagcacacactcccaatgcgaggcggcggcggcagcaacagaggcagcagcagcaatcgcggcagcagcggcagaggcggcggcagctgcgcgcctcgggcccaaccccgctcggctccccccg

SEQ ID NO: 12576 - DNA, 381 bp, Homo sapiens
  source 1..381: mol_type = other DNA
gtttttaattgtttaaaaacatgaaaaagttcaaaggcatgagctcaaatgttagagttaagtagggtcttccagaactctctatctgagataaaactcactgtttatggtaacactgattcctatttgagctaaaattaatttaaaactgctttgccaaaaaatttggtctacaccctgtgttaggttacgacaggtctcaattttgtcaaaaataatttggatccagctacttttagtaggcttgactagttctgaggtaaaagctatttgatcttcacttacatttatgtatatacgtttagatgtgtttatgtatatatacatgtattatattgtatgttgggttacaaataaatgaatactcataaattaagtcat

SEQ ID NO: 12577 - DNA, 628 bp, Homo sapiens
  source 1..628: mol_type = other DNA
tgcaaatggtgcaaaccactgagcaaagacattaattttatattttttgtgccctttttggaagccggtgaaaacaaattcgttttttttccctcctgtattgataacatgaaacggtgattgggatcatttttaagcaaaatacttttttcctcctttaaattaactatgacttttgcacatttgacttttttaaaaaaccgagataattttatgatagatatcctgatatctatatctatattgtccccgtaaatcaattttcaaatgatggcagtggaaggtttttctggaaaaaaaaaaatgaagtgcggtttggtttccttgcagctgagcagctcacgcgcgcgcgcatctccgggcagtgtccgagcccgaggcctcccacggtgagctgcgcccaggtcgtctcccggcggggcgggtggcgtctgcgctgcgggccgcgccggccgggcactaggcggccggcgggccctgtaagttctccgagggccacttgcacagcaggaggggcgagggccgtgtacgtggcgctggccgtcgggcgggctagaggggaccctcagagcacccgggagatggagagaccgcatattccggaggggctggctccaggccacgcgag

SEQ ID NO: 12578 - DNA, 608 bp, Homo sapiens
  source 1..608: mol_type = other DNA
ttttttaaatactctctgatttcaatttcagctttcactttttattaaatcctaaatagaaatccattgaagttcatatttgccaaaaagttatcccaaaatatggtcattgactaagaaatattaaatttatcttgatacttattgttcttcaggagcaagatggccacttttactaaatttgaaataatgcaattgtcagaaattggtaacatcttcataggataggcttctatattagtggtatttgccaagagaatcactcattattttaaaaacagaatgatatacttaacatgtaaatttgctaacagatttaacaccaattgaataccaacttagtttcagaagttatttgaaaacataatagaaaatcctgtatctagttatctgtttcctgcattttcgaagtccataaatgtggaaaatcaagaggcatatggagttaaagacatgtttacccatttttagatttttacatcctatttacatttttgagatgaatggtgataataaagatattaacaaccaccaaaacaaccaacacttatttagtatttagcatgtccattgagctccagaagatgagactatctaagtatgaaact

SEQ ID NO: 12579 - DNA, 331 bp, Homo sapiens
  source 1..331: mol_type = other DNA
ctgagactccaaaattttgaatatttggtcactttatggtgtctttttaaaacatcttttttatttttgtctatatgagttatttcaaaaggaaatagtccacttcaaatggactactgcaccattttccaggaacaagaataggcttcatctttttcttcctcatacagggaagtgactgacatacagtaaggatcccacaaattgttcaatgaatcaacaggaggaagcagttttactttacagcacaccgtcaaggcgggaaagttcccggctgtcggttggagggtgggtcctcgccccgccccgccccctcgggccgcccttccgc

SEQ ID NO: 12580 - DNA, 373 bp, Homo sapiens
  source 1..373: mol_type = other DNA
ggcgtaagccaccgcgcctggttcaattcaaagtgttgagtgtgacaacaagtcatttaaaatttagtctggattctcaagagtttgtaatataatgaggaaaaaatcccaacgactttcttttacaatgtcatttgccatcaattggaatatatattccaaatacaatataatttggttcaaataagatattaagaactttggtcaagaactttggtcaaaggtccaagtcattgaaatatttgcaaacgatgctaaacgtttgtagccagataaaagtcttttcctcgggtcagctcgcgaacgccagggaggcgagtgtgaaacacacgctgtttctaggcaacggcgggcggcggcgtcacttcctgcc

SEQ ID NO: 12581 - DNA, 437 bp, Homo sapiens
  source 1..437: mol_type = other DNA
aaagtgttgagtgtgacaacaagtcatttaaaatttagtctggattctcaagagtttgtaatataatgaggaaaaaatcccaacgactttcttttacaatgtcatttgccatcaattggaatatatattccaaatacaatataatttggttcaaataagatattaagaactttggtcaagaactttggtcaaaggtccaagtcattgaaatatttgcaaacgatgctaaacgtttgtagccagataaaagtcttttcctcgggtcagctcgcgaacgccagggaggcgagtgtgaaacacacgctgtttctaggcaacggcgggcggcggcgtcacttcctgccgcctcattcacgcttccccgggcttggggagggggcggaggcccggcgtgacaagcggcccagactcccgtgggcgccgcacacctgttgttt

SEQ ID NO: 12582 - DNA, 439 bp, Homo sapiens
  source 1..439: mol_type = other DNA
tcatttgccatcaattggaatatatattccaaatacaatataatttggttcaaataagatattaagaactttggtcaagaactttggtcaaaggtccaagtcattgaaatatttgcaaacgatgctaaacgtttgtagccagataaaagtcttttcctcgggtcagctcgcgaacgccagggaggcgagtgtgaaacacacgctgtttctaggcaacggcgggcggcggcgtcacttcctgccgcctcattcacgcttccccgggcttggggagggggcggaggcccggcgtgacaagcggcccagactcccgtgggcgccgcacacctgttgtttgcagcagccagcgacccgcactaccgctctcggcgggcggggaagcggccgcagcggagccgacccggcaggtggccgcgggcggggccggcgagcgaaagtg

SEQ ID NO: 12583 - DNA, 413 bp, Homo sapiens
  source 1..413: mol_type = other DNA
cttaaaaactcttagtctgtaagagagtgtggagctgccagtctcaggtttatttaaaataaacctgtccctgttgactaaggcacatgtgaaaacttacctttaatagggttattctcttggaagaattgagtcaattttcttaaagcagaaaaacctagacgacgtaaaaattctctttttgaaacaaggaagctgcagtgagaaaaacatttctaactcgcagtgcattacctggaaaccacccagaggtgcacagcgcctcctcctgggagagtggcagagtcagccgggagtccgcggcggagcgctgacctccggtgcggcggtcttcactgtgcagggggagtatgggcgggacttccgcctatggacggggctccgttcggtgggcggagctacggctcgtgagc

SEQ ID NO: 12584 - DNA, 541 bp, Homo sapiens
  source 1..541: mol_type = other DNA
aacccattgggtggttacaaactgtgtaccccaaccaaaatttctttaacaattttggtctaccattcatgtaaccactattattgggtgtcaagaactgatacttacttagaacgttaagagcattattcatcttgaataccaaatcatccgagttactgaaaattggttaaagtggttcatgtacccaatttttatttttcactttgaacccaacattacagatgtcctgaaaacccttcttgcggggtaggagggattttgggaccaaatctcaacaactggttttggtttcctcactcaccaagccacagcccaggaccgggagctggtcctctctaacagcgaccccgcccgctttagctgagcgacccggggcaggttacatagtgtctctaacttaaccacgtgtttctcgaggaaatgctgacttcccacgataagcccttaataagtagttatttttcagtggtggtgattaccatcgtcaccagcctggcagttccaggctctggtgactcattcacttcctggaagtcct

SEQ ID NO: 12585 - DNA, 720 bp, Homo sapiens
  source 1..720: mol_type = other DNA
aactggccagagtctggcacatcctaagcttaacttgcacttaagatgccattcaacatctctcaattacaaatgctaattcttactatatagcatttgtatgtatgtggtgaaataaaataataagaaactggtttataaattatatagagctattaaaaaataagacctttattcttgtagacctatttgatgtataaaataaatattgtgttatatttaactttaatattaataaaatcttctccatttatgaattccaatattgctccaaaatggactttattcttaccctgtatatctataaaatgtatcattataaataacatatattacaaatgattagtaatttaattatctgattttaaattaacattaagatactagttcagatcgtaaacacacaaattattttcctgataaattacttttgcatatattgcttaggtaactaacaaaggtagagttggaaatcttgagtgtacaaagtatttttcatttagaaaatctaaagaattacatattataatattaagccatatcttctactattggctttataaaatctaggatctgataattctcttttacaatataagaaaattaagcaattcttgtagaattttttacaacaccttttttttagatatgtgtacttcctgataagcagagatgatgaaataatggcctattaaaagcaagtaagtttctataaaaacg

SEQ ID NO: 12586 - DNA, 426 bp, Homo sapiens
  source 1..426: mol_type = other DNA
atgactcattacttcagaatattcttgatttttcatgatcccagtctccagctccgcgtgaacctgggatccagacatctcctggatatctggcgctctctgagatccagccctcggttttgggaaatgccgcctggtgcgattccagaaagggccatctctttaaggataacgggttgcctgcaaaggggggcaggcaaaaacgagttctttccagcctctgtaaccggatcgctagagcgccagcctgcgcttgaagcaacttttaagtgaggctccaccccatccccaagaatgcatggaggaaggagagaggacgaggtgagggccgcctgcatttctgcacgtcggcgccggactcccgggagagcgcagggaggggcgtgggtgccccttcgcccacctccgcccccgtcctaataaggc

SEQ ID NO: 12587 - DNA, 426 bp, Homo sapiens
  source 1..426: mol_type = other DNA
gatgtgccacatttgtacctatatgctgcgatggccacaaggaccattgctttagcgtccaaaactctagtatatcatatttctaagttacagcaaatattagtcctgctagctttggcaaaaatgttttttgacagtaaatttgtccttgattatatattaactagtcaaagaggtgtttgtaacattattagagcttcttgttgtaggtgggttaacaccaccaatcaagaggtctgtagcctggttacgagtcttgtcataataaaatgttttctatgctgtttagtgcattaggccctattctgtagaagtctcctctactattcataattgagtaagatataaaggaatcagtgactaaatatatttcatatatggtatttttattgatgagcagctgattatgcaaattattcaaaatta

SEQ ID NO: 12588 - DNA, 588 bp, Homo sapiens
  source 1..588: mol_type = other DNA
ctagaatcttagaacaagtaagtctaaacatgaatcatatttgtttggatgaaattgactgaaataaatagtaaagagtgattttgagatacatattgcaaaaatgtccactaataacttatccttgtatttatctgtatattttcaaaggtaagtaatgtgatggccgacacaatcacattaaaaacccccggatttttctgtggcaaaaagcacagtgtctcatacttttagatgcccaggaaaatgtttccttttaaaataagaacaaaaaagaaaaaaattaggtgttggttaaagaaaatgtttaaatatataatattaagatatttatctttatgtcagtgttgttcctattaaactattttgaatgattcctaggtatatttttcttggccagccagggaacgtctcatgtctttggaagaaattatctttctcttactggattcttctgagaaaagtgatttgttaaaagttttggttatttcaaatcaatatcacgttaattttttaaagaggaagcgcttcatgtaaggctctgtcctccaggctcgcccgagcgtgggctgcgggcaggggactgca

SEQ ID NO: 12589 - DNA, 675 bp, Homo sapiens
  source 1..675: mol_type = other DNA
ggaaaatgtttccttttaaaataagaacaaaaaagaaaaaaattaggtgttggttaaagaaaatgtttaaatatataatattaagatatttatctttatgtcagtgttgttcctattaaactattttgaatgattcctaggtatatttttcttggccagccagggaacgtctcatgtctttggaagaaattatctttctcttactggattcttctgagaaaagtgatttgttaaaagttttggttatttcaaatcaatatcacgttaattttttaaagaggaagcgcttcatgtaaggctctgtcctccaggctcgcccgagcgtgggctgcgggcaggggactgcacggccgtgcagcagagggcgcgtgcctctcagcactcatgctgcgcgccagccccaggccggggacaccagagactgagcccttcgcgctggagaccccggcgcgggtggggcgggagggctccggggccggggacgaaaggcgccgggggtccgggtcccgagcagtccccgccgccgccagactccgcagccgggagggggatggggtgcgcgtagaggctccgcggcccgggttggacggaggagcccaggagccaccgcagccgccgcacgcccagagctccgagcttcgctgccagcccaggacaccggggccctgccgtggg

SEQ ID NO: 12590 - DNA, 729 bp, Homo sapiens
  source 1..729: mol_type = other DNA
ttggccagccagggaacgtctcatgtctttggaagaaattatctttctcttactggattcttctgagaaaagtgatttgttaaaagttttggttatttcaaatcaatatcacgttaattttttaaagaggaagcgcttcatgtaaggctctgtcctccaggctcgcccgagcgtgggctgcgggcaggggactgcacggccgtgcagcagagggcgcgtgcctctcagcactcatgctgcgcgccagccccaggccggggacaccagagactgagcccttcgcgctggagaccccggcgcgggtggggcgggagggctccggggccggggacgaaaggcgccgggggtccgggtcccgagcagtccccgccgccgccagactccgcagccgggagggggatggggtgcgcgtagaggctccgcggcccgggttggacggaggagcccaggagccaccgcagccgccgcacgcccagagctccgagcttcgctgccagcccaggacaccggggccctgccgtgggccgaggggagccgggcggcgggagaggagccccggagccccggagccccggagccccgccgggcgccagccgagagggcgttttccccgcccccggagactcgcccgcccggcccgccccgccccgagcgcggggagttcacctccgccccccctcccccgggccgcccccgagcacgaagttggcgggagcctataaaagctgg

SEQ ID NO: 12591 - DNA, 422 bp, Homo sapiens
  source 1..422: mol_type = other DNA
tccaattttataatctgtgcctcagtttccacatttgtaatatgggataattagaaatctacctcatagatgtcgctgtaagaattagaatcgatatatgtaaagctcttagatcactgagtgctatataaatattagctattattggaggtctggatctgcccaggcccgggcccatcagggttccccaccatgctcctctgctccgctggctccgaagaaccagatcttcaccctggaaaatgccccgggacagttcggcgagcgccttagccacaggtggtgctgatccccaggtcgggacccgggagggactgtcctcgggtcccgcggccagggctgcgcctcccctccctcgggccctacgcgcctccggcggacgcggggattcctccacagtggcctcgcagctggggcaaggg

SEQ ID NO: 12592 - DNA, 425 bp, Homo sapiens
  source 1..425: mol_type = other DNA
ttctaaatcattattatagaatcatagccttctgaccatttgtcttacaaatgaactgcttcaaattgcctagtcacatttgatttacttatattataataataatgataataataattatcattattattttgagacagagtctcactctgtcctccaggctggagtgcagtcaccacaaagcctggctaatttttgctggccaagctggtctccacctcagtcaggtaagcagcctaaattaaattatttttattaaaaaccctctctttgttcatattgatagtcctcaaagaattttggattagtgtaaattacaatgtaaacattcaggagtttgaagcctcccaatagtaaagctgggaagggtcccatctgtgggagagtaagaattgagcctggatcctcagtgtgctgtgttgaaa

SEQ ID NO: 12593 - DNA, 498 bp, Homo sapiens
  source 1..498: mol_type = other DNA
ctgaaggcttctgcttctctgaagtagaaaccgggtcacctggtaagcaatgttttgcacattggcctttcttctaaaagcaatacacataaaacagtacttttctaaactagttgacttttctgtaaaatgcagacagtagacactactttgtcagattgttgtggacacgtatactcggtcaataagtatctgcgaccaatggctaaatgcaattatttactcttgcaatgtgttggttttgcccccggaccttaagaagtcctgctccgggatcagcctgcccagcgcgagcttagagcagcctcttcccaaatctcagcggcggccccgcgagcggaggcagcatccgagcgccctcgctgcgcatgctcgggggaggcggattccgggtccggcggccgcggcgtagcgcgcggtgccggggccggcggggaggcgcgcgcttagggcgcggcgccggcgacgcggccacgcggcgcgctcccgaggaaggga

SEQ ID NO: 12594 - DNA, 391 bp, Homo sapiens
  source 1..391: mol_type = other DNA
tcaggcagacctgacttctggtattcttcttttgtaaaatgtaaagaataccatccttaatggatttttgtaaggattaattgaaataatgtttatattattgctcgtaattcagtattatgaagttgaaaattcaaacaagtattcatttctcaaagacaagggtctccgacagctctgtctcccaggctagagagccaggcttgacctcgggggctcaagcaatcctgaaatcattaacaccatcattagatgaaatattgtattgaccagtgtttgtcaataactgggatgcttattaaacatgttgattcttgagtatctttgagatctctgatcattttttgcaaatatctcaagagattttatgcacattagtttgagaactgtt

SEQ ID NO: 12595 - DNA, 330 bp, Homo sapiens
  source 1..330: mol_type = other DNA
ttcatttgtaaacctgggataccaactatgtattaattccctatacagtattaaaagtagaaatgcaacctaattttttaaaaccaagaattccactcgagcaagaaattttattttactcgagtaaaataaaatactttgctcgagtaagtaaaacatcttattgaagaagtcgctcagtcgaagagactgagactcatgttgggcaacataattcttccaattatttacttccaattcaatctacttttgaaggcagcagataattaaaatgacaattttttttctggccgcctgaagagagcgctctcacggcctcagtcctggtcc

SEQ ID NO: 12596 - DNA, 565 bp, Homo sapiens
  source 1..565: mol_type = other DNA
aagtgcagatgatcattaagtgcaacctccacaatcctggtgtaggggtgctctgaagcgcgcgccccccgctcaactgggcattggcttcaccacggacgtggtgtgggtaccctatccctctccccgcacaagcccgaccctctccgcccagggaaggagggcggatcccagcctatccccagccccaggtgcgcgagcgccaggcccaggcggggccttgcggcccggagctgagccccgagcccgggctcctccaggaggcgtcggcggtgcctgggtccagccaggccgcgacctagctcgggagcctccccgcgacctgccgatccccagctgcgcgaagcccacggagcacttccagcagcagggcccggcgggacctgccgcacggagcctgcgggctcggatcctccaggccaggacttggtacggtgggctgctgcctcaccggcccaggaactgggagacttggcagcgtccggagcgacgctgggaccgcagggagggggcggggatggggcgggtccagtgcgcgcccgccccgcacagcctgcgcgaggat

SEQ ID NO: 12597 - DNA, 598 bp, Homo sapiens
  source 1..598: mol_type = other DNA
cctgtttccttgggaagaagttctaaattatcgagcaggcagcatggagtagcaagcagtccagcctgcactttgaggttagtttacttacaatttgtgtgacttcagaaaagtaggccaattatttagcttccaaatctcatgttactcaattgcagttttcatttgtaaaatgggtaaatgtccttggtagtgtgcacattaagaatgccctaaataagcatataagcatggttaacagctaagatgtacccaggctggagtgcagaggcacgaacatggcgcactgcagcctgagcccgtgatccttctgcctccaggctggggctggtctccaactcctgggctgtttggattaccagttcagatatggcataaattttctcaaatatttaaattatttaatccttaaggaatttattttggtgcaccaaaccacttaccttaaagtcaactggcctccagaatggcctcgaagcgccagcctactggcaaggagctgacatgcagcccggagtcagctccctgcggatgggctgatcctcgcgcaggctgtgcggggcgggcgcgcactggacccgccccatccccgccccct

SEQ ID NO: 12598 - DNA, 518 bp, Homo sapiens
  source 1..518: mol_type = other DNA
ggggaaggctgggatccgccctccttccctgggcggagagggtcgggcttgtgcggggagagggatagggtacccacaccacgtccgtggtgaagccaatgcccagttgagcggggggcgcgcgcttcagagcacccctacaccaggattgtggaggttgcacttaatgatcatctgcactttctataatggagttatttaaagcacttattaaagtgatgttactctgtttcattctccaggaaactcaggttgaataattcatcaaattacacaactgggtggcattagggtttggaattcaagtccgtatattgcttaatgtaaaagaacattattctttgggataagccagatacctaggtttcaaatctatcctgtttctgcatttgtgaaatagagataaaatgtcacaaggttgctatgagaattaaattagatcctacttgtaaaacatttagcaaagtgcttgacacgtagttagtggtaagctatatatagccacatatatcctgatg

SEQ ID NO: 12599 - DNA, 507 bp, Homo sapiens
  source 1..507: mol_type = other DNA
cttcataaatacttaaaggcttttttctgtattaactgtaataaacgtatcttaaaatacataactatttaatttgaaactgcagaagatatttgactttgtctgggctccgggcaaaggggaaaaaaaagttctctttaacaaatcttagtcttgtatctttgcctcacacaggtttggggtcaaaagtgagaataagcagatttttttttgtttagccatgtggaaatcaaccacatcataagccctctgattttttttaatcatttccatattactttgcataaagttagacagataaagataagaaaacaatgtgttgtgtgatcacatttaaaccattcaaatcaactatgaagctgtgtttaatcctctacttctaaattattcacaagatcattttccaagcagaagtattttgctgcttttaaaaatcctgattaaacagctaattggcttgtctactaaagaaaaggaaaacaaagtacatttctctaccttaaggcg

SEQ ID NO: 12600 - DNA, 346 bp, Homo sapiens
  source 1..346: mol_type = other DNA
tgttttcatgaaactctttcaaggacttggatagaagtttttcctgcctagagtcacagaatatttctgtttaagaagtcatattttaaatgagtgaaagtatcaattagagtagcaacattactttttatggcatatgctaataaactatctttaagtgcattttttaagtataaccaggacatcaaggattggagtcaaacaaaaatctgtttttctaaatccccaattaaatcctttaatttaaaggagaaatgtctgagttttattaagcacaacacaaattgtagtcattattattgttaaataaaaagaagacttcatatagatgggtaaaatttttgca

SEQ ID NO: 12601 - DNA, 557 bp, Homo sapiens
  source 1..557: mol_type = other DNA
ccgagccacccaggggcgctcagtgaccaggcgctcctctgattgaatgccgaccgctctccaggaccagggttgggccgctccccaggccccactagggtccgcagcctgagccccacccagctcatggctggagaggggcgcactcaaagaatggagccgcccaagttcctgggtgcctgcctcaaccagggcccttgtcgcgggcaagaagcgcgctgtgtgtgtgtgtgtgtgcgcgcgcgcgcgcgcgccaagggccccgagagcagcggcggaggcccttcccgcaggagctgggggcggcggcggcggcgggcacgggctggaggcggcggcggcggcggcggctgctgctgctgcggctgcgactaggctctttgagccggaaccgccggtgaacttaggcgccacgttcccggtgactgaccccggaggatggtgaacaggaacctgtcttcgccgctgcctctcgggggctgccgagcgcggggcccctgtctcctccccttgcccggctgtgggtgaacctgcaggctccttacccacccggagga

SEQ ID NO: 12602 - DNA, 399 bp, Homo sapiens
  source 1..399: mol_type = other DNA
ggagtcttcccaaacttggtcagccccggccaccgacccgagccacccaggggcgctcagtgaccaggcgctcctctgattgaatgccgaccgctctccaggaccagggttgggccgctccccaggccccactagggtccgcagcctgagccccacccagctcatggctggagaggggcgcactcaaagaatggagccgcccaagttcctgggtgcctgcctcaaccagggcccttgtcgcgggcaagaagcgcgctgtgtgtgtgtgtgtgtgcgcgcgcgcgcgcgcgccaagggccccgagagcagcggcggaggcccttcccgcaggagctgggggcggcggcggcggcgggcacgggctggaggcggcggcggcggcggcggctgctgctgctg

SEQ ID NO: 12603 - DNA, 661 bp, Homo sapiens
  source 1..661: mol_type = other DNA
attccttattactgaatccctagaattaattaaacatctagtatggagttggtattgtatataacatttgcactcacgtcttacaaaatagtcatctaagtagaaaggtattcaaggcagaaggatggaaaaacgtttgcagtcttttttggttggcatgaaacactgactgcattcctcccagatttataagaaagaaatatttgcatctctgcacatacatacttatggaagtaagaaagtgtggagccctcggccccaaatcgcttcctgcgcaggcgcggagtcggaagggaagcccccagccggacgctgccgctaccggggtttggcaacttccggaagacctgtggcccaaaggagaatgttgggggaggcgggggccggtggtcgctaaccaatccgacacccgccagcaggcccggggatgggaagagaagacaaaaggagctccctttcccacttcccccagccctcggcctccgctgcgcgacccgggcggaggatcccggccgcaggccgaggcgagagccaggcgggagggccgcgagcgggctgcccctctccccgccttgccgtccgccgctgacgtaacctgcgaagtttggggaggggctcgggcggccggagctggtcgctgcgcgcgccggggggagggccg

SEQ ID NO: 12604 - DNA, 407 bp, Homo sapiens
  source 1..407: mol_type = other DNA
gagtgcagtggcctggtctcgatctcctgacctcgggcgcgatctccgattctcctgcatcagtgccaccacgccaacttctgacctcaggatttaggtactttaaaatgctgttatgtatgttaacggaaaagtaactacatgcttcattttcagaaccaacattcaaatgaaaaaacatataatacttaaaagtggttaatatactcttagattgcataagtttgttcagtgacaacattcagtaaaacttaacatttgttttacaaaattatgttgaaagatataaacataaacgtatatttgaagcacaaaaataattacggctttttttgggtagaaaagtagtcactattgagtacttttcttattgcatcacaaacgcccgcaggggcttaaaaagcagc

SEQ ID NO: 12605 - DNA, 482 bp, Homo sapiens
  source 1..482: mol_type = other DNA
ggcgcgatctccgattctcctgcatcagtgccaccacgccaacttctgacctcaggatttaggtactttaaaatgctgttatgtatgttaacggaaaagtaactacatgcttcattttcagaaccaacattcaaatgaaaaaacatataatacttaaaagtggttaatatactcttagattgcataagtttgttcagtgacaacattcagtaaaacttaacatttgttttacaaaattatgttgaaagatataaacataaacgtatatttgaagcacaaaaataattacggctttttttgggtagaaaagtagtcactattgagtacttttcttattgcatcacaaacgcccgcaggggcttaaaaagcagcaggggttcctgcccttccccacactggccggtgtggtctggggcgggcctgatcacccggcgtgctggtaattcctagggaggatgacctcttcccggaagcgggacttc

SEQ ID NO: 12606 - DNA, 715 bp, Homo sapiens
  source 1..715: mol_type = other DNA
aacttaacatttgttttacaaaattatgttgaaagatataaacataaacgtatatttgaagcacaaaaataattacggctttttttgggtagaaaagtagtcactattgagtacttttcttattgcatcacaaacgcccgcaggggcttaaaaagcagcaggggttcctgcccttccccacactggccggtgtggtctggggcgggcctgatcacccggcgtgctggtaattcctagggaggatgacctcttcccggaagcgggacttccgggtcccgggcacctgatgcgggggtcagcgggagaggcacccggaagctcccggcgtctgcaccccggcagcaggcgtgggaagctcgacccttcccggggtcctcggcgaagtggccgaggccgcgccttacgcagggaactccgccgggccatctgggtggcccgagttcgcacccaccggcctcaccaagtcgcacgcagaggggcggcggggcgctgaccgaggtctaggtctcgattgccgccggtcgagccgcgcagtttgcctgcagacctcggtcccctgcccgcgcagcctcggctccatcaggcccggcccctcgcccgggccgtggctccaccaatcgcagacttcgcccgccgcagccgcacctgcgaggaggggcccgcgcgccgctgcagccgccgtcgcagcgtccccgccccgctccgcccctatcgc

SEQ ID NO: 12607 - DNA, 563 bp, Homo sapiens
  source 1..563: mol_type = other DNA
aggctagagtgcagtggcatgatcatggctcactgcagcatcgagtgatccctagcctcctgagtagctgggaatacaggagcataccaagccctgctaactttaaaattttttataaagacaggccatcttggcctcccagactgctgggattaaaggactaaacaagcctttttaaagtgacttttccagaatgcttttgaaagccaaaatgtatgtgatcaggagtgttatacagagactgcccagtatttagcatgtgattagtggcattatgaaataaagacgttaagacaagttgatttgaacttagaaaagagtaaaaataatgagtttacttcgaggtgaaatccttatcttcatcattattatcaccattactagacctgcaatttaagaaactgcaaacgcacgaaactacataactggtaagtattttaatgcatttaattaaaaattttccttatgttgctttgagtttttaaaattcttttcgttcataatcaggaaaggtagtaaccttaggtggcgggcaagccgcactcccgcctcatccaaggcag

SEQ ID NO: 12608 - DNA, 571 bp, Homo sapiens
  source 1..571: mol_type = other DNA
agtttttatttctgtaaccagttacaggcagaaggcctggaaattatcaccagaccaactcaaaattacaaagtttttcagagtttatataccttataagctatatgtctacatgtaagtgtacattcctctgaagatataaatgtttctttatcagcatttggaacatctaaaattctgaattagctatgaatattctcattttacgaatgaggaaagaaatgtgatctaatgcctttatattacactaagatggagaatgatatactgaatctgtgtttgcctttaaagccaaggcagtcacgctgcatccggcgacagggggcggtgtgtcctgcgaaaagtcaaaacgccggaagctgccctccaacatattattattctgataatatgtgacttatggggtgcgcagctgcaatctgcaaacccttgcagggcgcggggtttcgtacacagatcagctaggcccagctaggcggcgccctcggccggactctgaaggtcagggccgctgggcgtccacgccgcctgggtcccagtccccgtcccatcccccggcggcctaggcagc

SEQ ID NO: 12609 - DNA, 590 bp, Homo sapiens
  source 1..590: mol_type = other DNA
atagtacagaacatatatacatatgtgtgtatacatacatatatattacatatatatatatatatatatatatatacataacatagcatacatttagttagatagcttccaatttctgaaaaattctccagtactcactccttctaaactgaaaggcagtaaactctagtatctgtaagatgacttccttatctaagattttaaggttttataatttaactgtattactttccaattataattctacttcatgctgaaaagaaatccataatctagcttttttgttggcaaggttagttcatagaaaccatcttaagaaacattgacatgatggcacaaaatagagtgattattgatagcaatcaactcattgtatacattaatcaaattattctaatgcgtgccaaggtttcacatgctttttttttttcaaacaaatactgaaaagtcttggagaaatcacacaagaatataataatcttttatgtgattttattaaacctctctagataacaagagttttactataatattcaggaataagattcttcctgagcctctgttttctccagctagctttcctgggaaca

SEQ ID NO: 12610 - DNA, 273 bp, Homo sapiens
  source 1..273: mol_type = other DNA
atgttttacatgcctttaagacactcacatgttgatcagcagaagaatatgtttacttttctgaggcagagtctacacattttagatgcccaataaactggatctctctacagccttcgcagaagccgtcaaatattgaataattaccctggtttaaatgcttaaacacagataatgaacgtttcgaagcctactctaggcagagttcatagcaccgcctttgtcagctgcccccgcctttggggaaggtcgggcagacaacctctctgagtt

SEQ ID NO: 12611 - DNA, 430 bp, Homo sapiens
  source 1..430: mol_type = other DNA
cacctggatgtgtccacaggaaagcgaactcttaaaaatgtccttcagtgaatctttttcaaatggataaaggctagcggcggatgtgagcgccactcacagctgcccgctctgataagaggggcgaggatccaagccgctcacggactggggtcgcctcggtccgagagggggagcgcgcgccctgacacgcaggcatgcgcgcgcctgtgggaagtcggggagcgcgcctgggcccctgcccgtcgcccggctctctccgcagctgtgggcctccgctggcccacgcggacgccccgcgacccccgcagcctggcgggcagcgcgtcacgggagcggaccagaacacagcccgctccgccccatcgcccgcggccccgccccctctggccgacaaggggcgggcaccaccggagtgggctccgtgggt

SEQ ID NO: 12612 - DNA, 383 bp, Homo sapiens
  source 1..383: mol_type = other DNA
tacacattttagatgcccaataaactggatctctctacagccttcgcagaagccgtcaaatattgaataattaccctggtttaaatgcttaaacacagataatgaacgtttcgaagcctactctaggcagagttcatagcaccgcctttgtcagctgcccccgcctttggggaaggtcgggcagacaacctctctgagttctgcacttggggccgtcgtggggctggtaggggtccccaggctatctccagccgtggccgatggccgtgccgggggcagagcccgctcccctccgcgcgttgctacgtgcgcaccgagcgcggagagcgcggagagcgcggagggaggcgcgcgcgggagcgaacaccctcccggatccagag

SEQ ID NO: 12613 - DNA, 549 bp, Homo sapiens
  source 1..549: mol_type = other DNA
tgacaaaaagaatcattatgaaaatgatatttcccaaacaaatatgctaaagtaattgttgctgcttccctggctgggttgcttgagagcatcttgggacactgtccccagcaatagtgtctctacgaaacccagcctgttggaaaatctaacttttgcagttttcttcaggtctgggacagccctagctgcaagttaagggacagtcgtggggacaaagcattggctggtcagcacctgagccgaaccccttcctttcggggaaaagaaaggtgctgggaagcaccagctctcgacatgcccttggacaggtgcagagcagagctgagctcctccgaggagttgttggaggacggcgatgtctcctgggaatcttccatcctcgggagccctgacggcctcaggcggagcggggctaggcggacgcaccggctctggcaagggcgcggccgcagctgctgcttcgccgccgccgggctctggatccgggagggtgttcgctcccgcgcgcgcctccctccgcgctctccgcgctctccgcgctcggtg

SEQ ID NO: 12614 - DNA, 293 bp, Homo sapiens
  source 1..293: mol_type = other DNA
aaaactggattttataaggaagtgtcagaaaccttacttgtttgaccaagcaaagaatctttgtcagtttttaactctgttttacaagtaaacgattattttaaaacttttgtctcaagaaacttgttttcataaacctacttacttaagatgacaacctattttgtaaaatgaaacttgctgacttccgcaaagatctactttctcttagataacagatgttgaaaactgaacaggaagatgttttctttatataactgctgcaaaggagataaacttgataatcttcccgg

SEQ ID NO: 12615 - DNA, 376 bp, Homo sapiens
  source 1..376: mol_type = other DNA
aaaaaaaaaacttcattaacaaaatcttgaatatgtttcggttgtttagaaggaaaaaaacctgactgtagccagttttaaatctttccgtttctgactcctaaactgaggcgggtccattcaaatgtaacggcggcttctttcagacacctgcaccccggcggcggcgcggggtagggggcacgccgcaggcctcataagtcacgccttgagattctggctacggctgggacccagccccgccttcaaggcggcaccgcgcgctaccgtgaccctgccgtgatgggcggggcggcaggagaagcggagtttgcagcctcggaattggctagagcgccagagccgagtcagccataaagctacgcgctaggctctt

SEQ ID NO: 12616 - DNA, 319 bp, Homo sapiens
  source 1..319: mol_type = other DNA
tcaattctggaaaattttttcaagatgcatagattgtatctcaagctcctgtattatatgtattacgaccttggagacaataccattgataattatcgacggctttattaattcagttgcttttcttagaaacagggaccaaaatcctcacgtcagggccaagagcctagcgcgtagctttatggctgactcggctctggcgctctagccaattccgaggctgcaaactccgcttctcctgccgccccgcccatcacggcagggtcacggtagcgcgcggtgccgccttgaaggcggggctgggtcccagccgtagcca

SEQ ID NO: 12617 - DNA, 374 bp, Homo sapiens
  source 1..374: mol_type = other DNA
tcttcactttaatttaaaaacaaagggattgttattataaaggcttccagaaatcagatttctattctccaaacagcaaactatatacatggtattcttttccttgagtttttctttttcttttggaggctaagcaaaatgatcataaaataaaaatctttgacagtctgttctattataaaatgtaacaccccttattaaaaattctcagtaaatttcagttacagtaatctcctgtcacaaatatgtgctcattgtgatacttattctcttagcccatgagatgaaattttactttcccgagggcagtagctaggacctttgaaaatatctcaaagaaatagggctggattctctgaatatattttgcacaa

SEQ ID NO: 12618 - DNA, 483 bp, Homo sapiens
  source 1..483: mol_type = other DNA
aaattgctttgaacagatcaaaaggtctgttgctttgataagttacagcagttctgaagtatgaatgtccattattgggtaatcaggaaatttcttcatatctgccacatactcatgaaaaaaatattagcagtgtctagttctttttgtttgagattattaattggagtattggtttcatgcttttaaaatggcaggtcataaatttacaccttttaagtaaataatagtttcacttcattgtataacacatttcacctatgtagcagtgatttttaaaacagataacctatttcatctaacaataggatataatataacctagttacaaatcttaagtggggtttggatgataaaatcctgatttaaacgtcagtagataagtgtattttattgatagaagatgttgaatttcttctgttcacttgcttttaaaaaagataaaccccacttgaattcctggtggcatcctccagactccac

SEQ ID NO: 12619 - DNA, 482 bp, Homo sapiens
  source 1..482: mol_type = other DNA
tgagatcatgtggttattataacatttttaaaggcttgtttaatagttacttcacttttctaaaagcccaagtgacactcttatttgaatgatgattatttttattcttttattgcagcttccttaaaatgataccaaaattatttcaacttttaaatgtttattataaccaaagtgttaagaaattgctttgaacagatcaaaaggtctgttgctttgataagttacagcagttctgaagtatgaatgtccattattgggtaatcaggaaatttcttcatatctgccacatactcatgaaaaaaatattagcagtgtctagttctttttgtttgagattattaattggagtattggtttcatgcttttaaaatggcaggtcataaatttacaccttttaagtaaataatagtttcacttcattgtataacacatttcacctatgtagcagtgatttttaaaacagataacctatttcatct

SEQ ID NO: 12620 - DNA, 239 bp, Homo sapiens
  source 1..239: mol_type = other DNA
tgatgctggctgcaggagtcttcagctggcttaactgctctatagactcagtaggaacatgttccagcctagccctggagcagggaaatacagttgggcatgcaggcgacttctagcctgcctctcattcggtctggggtctgagctttaaatacaaagccgcggtctgggtgccgcctcggccgcggccgctctcccgcgcaaggggggcgtggggaggcggcttttctctctccctc

SEQ ID NO: 12621 - DNA, 283 bp, Homo sapiens
  source 1..283: mol_type = other DNA
gtctccttcctgaccctgctggggagggggatgaaccatgaggcagctcaagccgagattgattgcctcaatttcagattcccctcctcccccaacacaatttctggaggtggagcaggtctctaagtcacctgtggtgatgctggctgcaggagtcttcagctggcttaactgctctatagactcagtaggaacatgttccagcctagccctggagcagggaaatacagttgggcatgcaggcgacttctagcctgcctctcattcggtctggggtctgagc

SEQ ID NO: 12622 - DNA, 671 bp, Homo sapiens
  source 1..671: mol_type = other DNA
gacggaaaataaaattacattttggattcaattcctggccataatattctgtgagatttcagaaagccttctggttagtttctttctcaagggcttttggaaaaagatattatgtgagcaagagaaaaattaaattggttgcataattttttgaaggaattttagatttagttcaccacaatattaaaaaatgatggctgcaggcacttagatttgttgaatggttgaataaatctagcttcattgtccataggctgtggataatactttgtaaggattacatgagtataatttataaagcatttaatatttgaatacttttccaataagtaacatcttaatatttcattcccattttgtagatgtgaaaattgagtacccgaacataggctcctaaatcctaattttttgcaatctttcctaaatttattaatctctggttaatgttaatataaaacgatttttttttcttttttgctgtttgaatgggcaattaattgattgtttacacagacagtgagggacgctcctttcaataatcaaaataacatatttttccgttttatattaactaaacaagtcacagtctttatttttaattaaggcctcagggccagcgcctttgcgtcctggaccggcgaatccgagagcaggctgaggcctggtcccgc

SEQ ID NO: 12623 - DNA, 510 bp, Homo sapiens
  source 1..510: mol_type = other DNA
aaaattttttctctttgtgtagaaatatttcaaacttagagaaaaatgcggcaaatattataatgcccatgtatctttcatcaaaaaataatgagggttaagattccttaacattttcttcaggtcatttaaaaaatattttcaattgacaataattttatgtatttgatgttttaatgcatgtatacattgtggaatgactgaatcaactaattatttttttgtggtgagaacattaacaatctactcccagcagttttggaagatgcaatacattattactaactatagtctccatgctgtacaataggtctcaaaaacttactgttccagtcagactgaaacttacatatatgtgacatcacttctttttaaaggctgaatagtattcctttgtgcacatatacaccacattttctttattcgtaaaagatatggtcttcatgcattcaacaaatatttttgaagcttgcatgctttttaaaccctttagaggagaaacagttactg

SEQ ID NO: 12624 - DNA, 489 bp, Homo sapiens
  source 1..489: mol_type = other DNA
aatagtgcttttccattactgaaatttcagtactggctcatctgttctcttgtttcaaaaatccagaagatgggaacaaatttataaagacacttcacaaggttatttatatctataaaaccgacatctaaggcagtaaaattaccttggagtgcagcggtgcgatctcggctcactacgcctcagcctcccgagtagctgggattacaggcgcccgatgcaacactgaaaagacaagtcgccttttctctgggaaatctttaaagtttgtccgccgtacttcgacagttgtctaccgaagattctcagcacatctaccggctgggctgggcagaatctgggcatgcgcagaagctcagccaaccccggggctccgcctcccctcctctagcgaggggaaacgggtgagcggcagcgcgcgtgcgcaagcttggtggtgggttgcgcctgcagagcgcatgggcagataaaccgtacgtccgtttgtcc

SEQ ID NO: 12625 - DNA, 476 bp, Homo sapiens
  source 1..476: mol_type = other DNA
agaaaaaaatcaggcttttaaagactcaaagttagttttattcggagtcttggagagtctttcaaagagtttatgttatactgtgctcagaagttacgttggagcaaaatctcatcaaagttttgtttggagaagattacagaggcataatcattaatcctgtatcgctgactgtatctttttaaaaaatgaagtgattcaagcaacagatgtgaggactgcgttcagtcactgagtcaggggctttgtgaaaagaatgagcaaacatggttttttttgacatcaaattgttaaactacaagtcatgtttcctttaacgtgaaaattacctagtctgaataaattctgatgtaactataactcgacaaattatgatattttcaacttacgtcttcgcgcagggttggtaacctagcaccggtacccggacttgggttgtccagctcagcgaagccgccgcagaggctgatgggggg

SEQ ID NO: 12626 - DNA, 347 bp, Homo sapiens
  source 1..347: mol_type = other DNA
tatctaagagttaacatgtggtagttagacatgatactagagtataattatcatagtggcttgtgcctgtaatcccagctactagacgattgtgccactgtactccagtgtctcaaaaacaaaaccctgtggttttgttgttgttgtcacccaggctggaggcaatggcgtgatctcagctcactgcaacccctgagattacaggcgcccggtcttgcctgacctcaggagatcagctgtttcctcatctgtaaaagaagataagaattcttatttgacaaggtcgttacacagtataatgagataaaaacatgtaaagccctttccgtaaggctatgactcagact

SEQ ID NO: 12627 - DNA, 514 bp, Homo sapiens
  source 1..514: mol_type = other DNA
atctcatctgaggtggaggcgatagaaaacatgatgtgcaacgaagcaacagctactctcgaggttctttgctacgcctccgcaggctggggtgagccgcagggagtgaggttcccgtgaggctgggagccgctcccgcagcctaccctgggaagcccgcacccaaccgcgaggcgcaggggaggcttggccgctgggccggccacccacaccaccgcatccccgcagaggtgccaagcctgcacgacaggggagcagcccgttcctcgggccccatgcacgcgaagacattggagccggcccaggcgcctcccctctcccgaccccgcagcctgctagcgccgcgcagccacaccttccactcgctgggggcgggggggggggggtcacgtgaggcgggcccggggaaccaatgggcggctcgcggctggcggggagcgcgctcctcttccgcccccgccccactcgtcactgcgcagccaatcggcaggcgggaagcactccggcccgaacg

SEQ ID NO: 12628 - DNA, 378 bp, Homo sapiens
  source 1..378: mol_type = other DNA
ctctaattttgcatgtgtgtaaatccagattttcatatactgaaagattggcatatctatattacagagtttagtgacagaaagctgggcttatgtttatgtatgaagcccagatttatacctttaatggccactttaattgggtccttaatttgtcaaaagcgataatttatgccgctcttagcaatatacagtgaggaggaaaaatgttatgaattccagtcaagcttcatagccttagggtgaattattttaattcaaagcccttcatgctttttaaaaaataaataaataagagatgactgactctaagatttgtctatcacttagcttttttcacgggggacaaaaatcaatgcttatgtgttgagtaaatga

SEQ ID NO: 12629 - DNA, 694 bp, Homo sapiens
  source 1..694: mol_type = other DNA
ctcgtcactgcgcagccaatcggcaggcgggaagcactccggcccgaacgtgcgggcggggcagggtggcggccccgcacggtagggagggctcgcgctccgggagctgcacggggctgcgtggaaagagcgccgagcggtggcgtcgttgtcgccccctccgacctccacccgtccaaagttgtgagggggcgccgggcgtgctcgcggatcggcggccgcgggcgtgcggagggctggacgagccctggagcgccaggtgcgcgccgggcgtccgggctgtggggcgggcgtggcggcgcgctgggggcgggggcgggggcgccgtgcagccctagcgtcttccggcccctgcgctccagctgtcagcacgaagggcgccgcggggccggcggcagagtgagctccagggaggctgtagggctgcggcactgcctgagggtctccctgacgcaccccgggtcagggctggccccgctggcagcctgacaccggccggcccctgttcgtctggactgaaacgggcacccctggggcggggccgggccgggcagggcggggcgggcagcgggcggggctgcagtccatgggcttcgcgccccggctggatggaggggctggccctcggggcgcacccctgctcgcgcctgggccccgctgccttggattcaccgggctggagcgagacctcgcc

SEQ ID NO: 12630 - DNA, 505 bp, Homo sapiens
  source 1..505: mol_type = other DNA
tggaaaggagggagcccttctagagagtgggctctcttgctttccctctgtcagatgcacacctggagaccttcagtgtggattcccagagtgaccaaagtgtggaaattttattggttaatcaaaaacctcattttgattggggaaaaataagttgttcctaggtaaatttggaagggcccttggatttcaaatcatttatgatatctcatgtggctggttatcaatgaactgtgtcattgctcagacatggcaattaaagtctttgatgtcatgaacctcacactctagagatagttggatacacaaaaacttttccactctaacttcttgtcttttcattgactcatctacattgaaaaatgtagcaaccttgagatggattagatgtaagttaaacttcttttgatacaaagtcatttctttcctggagtaaaagtaatgacactttttatgatacccagtggctctcgaagagcaataaaaaatgttaatggttaatgtt

SEQ ID NO: 12631 - DNA, 464 bp, Homo sapiens
  source 1..464: mol_type = other DNA
gccctgcaggagcatgctcagattatgcttaagttattgctgtcaggtgtgtctaccttaaaaccaatatgccttaaagaataccagcctaattattgagaaataagttctcattgcccatgtcaagctcaggaaatatgccattgacactgagtcccatgggactgggtccctggtaacttctttgctttgtgaccagaaaagaaaaggaaacaaagatcagcaggtcagcattgctgtattgctgaagaggattttcaatattgagggagggtacattttagaaagtccactctggcattatgcacaactctgaatagtacgcttgtctgagttgagccgagctacactgaagttaaccacttcctcagtagctgtgggagaggatgcctgcctcctggacagctgaaagagagcagctgcatttgaggaaaatgctacctaagcaggcttttcagcgaagg

SEQ ID NO: 12632 - DNA, 342 bp, Homo sapiens
  source 1..342: mol_type = other DNA
tggaatcaccagaggggatggagaggacaatgggctctgttcctgcccagagagcaggagcctgtccctttggcagattccctcctggaggaagggggcaacccagaggagcccagggagctgctgcacctcggcttgaaggcccacggactcagaagcccctaataagtgccactttccaaaagggatctgggaccctcccgtatcccagtgcctgcgcaggcccaaaagacagcgagtacccacctgagccacgcagtgtcctcacctcagggcacccccaacccacagatggggagtggaggctgggctgaagccctgacctcagttccttctggattc

SEQ ID NO: 12633 - DNA, 497 bp, Homo sapiens
  source 1..497: mol_type = other DNA
aggggtcccaggaggcctaacagtacctactacagaggtcctcagaggtacttaataaatggtagtagtagttattatcctgtgatggcccaaggcgtagccttgccagggattccctgattgaggagcctcagcattctggcccagagcaggagggccagcaatatttagcacaatctgcttggatcctcaattaaattgcccttctctctgggtccttgccagagaagggaaacaaagctccatctgcttccccctaacaagccttggctaaaggtggctgcagtctcatcctggaggctatttcttggcaaaactgagttctcaactcgtatttttccattttcctgtgttcatctggtaaaaagaaaataaaacaaaataatcattatttaagtggctgcaactccgagtttgctgcagagccgccccctcccggcgggggcgctgacgtcacggaaaagccccgcggcgggtcggctgggctggttataaac

SEQ ID NO: 12634 - DNA, 424 bp, Homo sapiens
  source 1..424: mol_type = other DNA
agactttcattaacacatttttttttttaaaagacagggcctaggcataagccactacgtttattttctccagataataaatactttatttgggaaagaaaatcaggtaccttagcaagattctgtggtgcaaatgaactttcatccttatgtatactcctaagcaggtgtcttaaaactggaagtttagatattgactttaaaatggaatatgcaggaatacctatgttttaattgtacaaggtcattctcaatgtcagtgataatattattgtggtattttctttcaactaagaaaatctaatgctgcctttaaatttatctaaagaatctttcttttaactatacacaaaccttgaacattttacaagaagtatgtaagcgtcatggatatgcttatacaagactaaaggcagcagattgt

SEQ ID NO: 12635 - DNA, 574 bp, Homo sapiens
  source 1..574: mol_type = other DNA
gacttaaacagcatctgagtcatatggttcagaataggtaaaacggaagtttttcctatcagataaaagcatctgaaataagaaagttaggataacctcatatcccaaagccatatacaatctttatgttttattttttgggcaaatcaagcctgaggtatgcattaaatggctctgtacaccatttgaaaacctttgacaacatgaaaactggcttttctaatttcctgctcctttaaagcacaattttaaagttaaggatcccaatcttagtcactttaatgtttcaagtgtttaagatttttttttattttgtaactttatagttttaaagctttatcatttaatgtacattaaattaaaattatgctataaatatacactttttcttcatttgatttacatattatgctggtaccagttcactaatgttggatcaccatcctgttgctattacagtggaggtgaagcaagaagaagacattaaaccacctcctccactggttttaaattctcaacagagtgatactttaattagtacatgttatatatgagaatgacatcgtctccatct

SEQ ID NO: 12636 - DNA, 494 bp, Homo sapiens
  source 1..494: mol_type = other DNA
aaggagaagcttagctttactctagaggatatgcaattcctgattgacagcagatccagcattatgtgatgagaggctctgttaggaattactacattcactactcatatcttttagttttctgtctactggatttgtaaataaatagcacaaaacagttcctcttttgtttttattaaagtgatactgcaatgcagttcagtctgcatacatgtgtgaaatttgatattctcactaaattagctaatttttagtaggtcaggcttggcttaagcagatttcctgaacctgcgtcagcttaagctggaggaattttaataaaccctcccctgtaggcgtgggcctaaatgaggctagcctagttaagcctgatcttaacaatggtaggaaaggctagatcttccaattttaccttatccgaaaagcttgatttgctaaagcttgtgaatgatatcatagcagttaactataatgcaattggagtagaccgcgaa

SEQ ID NO: 12637 - DNA, 249 bp, Homo sapiens
  source 1..249: mol_type = other DNA
ccccctcacctcagcctccagagtctcgcgtgcagtggcgtgatctgagctcactgcaagctccgcctcagcttccagagtagctgggaccacaggcgcccgccacctcgtgatccgttttttttttcttaattttaatttttaatagagacgaagctcctcctcatcctgtcatggttgtattaccagtcataaatcaatgcatcattgatttggcctaaatgtattaaaagattctctcttcctcca

SEQ ID NO: 12638 - DNA, 632 bp, Homo sapiens
  source 1..632: mol_type = other DNA
tgcttacattattatgtatcatatattttcatactggggttaacaaatatattctaagcaccgaaactggtggccttgaaaatggctagactagctgtttctgtgtgaatatagctaaataaaaaatctggctctattataatagcaaatgtgattttgtaataatccattgctttaaaaacatgatttttacctgctttttagattgagtgttctataaaaattttttcttaagtgaaaaaaatatgcagagctgtaaaatgaaggagaagcttagctttactctagaggatatgcaattcctgattgacagcagatccagcattatgtgatgagaggctctgttaggaattactacattcactactcatatcttttagttttctgtctactggatttgtaaataaatagcacaaaacagttcctcttttgtttttattaaagtgatactgcaatgcagttcagtctgcatacatgtgtgaaatttgatattctcactaaattagctaatttttagtaggtcaggcttggcttaagcagatttcctgaacctgcgtcagcttaagctggaggaattttaataaaccctcccctgtaggcgtgggcctaaatgaggctagcctagttaagcc

SEQ ID NO: 12639 - DNA, 295 bp, Homo sapiens
  source 1..295: mol_type = other DNA
ctgctgagtacaccaaaaccagctaatttttcaggccaggctggtctttactttttgtcaaactgctggataaaactcaatctagcacttagaaggtgctcagtaaatactcattgaatgatgtattcgtttctaacatcaatgttttttcggatgaatgaataaccaataggatatcgtatacttctgcgatgcacgcatttctagcctcggcatctactatttttttaattgaaccgtaaacttgaatcaaacttgggctaggtagtgcgcacgcgcggcgggctcgtccgcg

SEQ ID NO: 12640 - DNA, 335 bp, Homo sapiens
  source 1..335: mol_type = other DNA
tgctatatactattatataaatacgccactatttacttaaacttataaagtttgctatgaatattcttgtatttgtagatacgttttcctagaagagttaggcacgtgatttttcacattttacagataagaaaacaaagaatctcttcgttggttgaaacaacagtttttcttctatttaaatcaatgtctttcccagcgctggaaaaatagaccgctgtcgcggaggaacgacagggtttgaaccactggagaccccgcctctgcgttctagggggcgccctccgccgcgctggaaaaggcggggccggcaactcgcggaggctggagcgctg

SEQ ID NO: 12641 - DNA, 404 bp, Homo sapiens
  source 1..404: mol_type = other DNA
acatatgatccatatgacagggagcttcagttgtccatacaagactacttttgaaattgaaattcagtgaagttaacagaactcttagatttgtatagtttagaagaaattccaagtttaataataaaagggttaagctatttgcaattgaaaaacactggtagactggaccatgcaagctttaaatttacaagtagcgcttcttaaagcaggagtgagttaaatgcttttaaagctttggacagtgtcatgttatcaaaagcttctggaactcatacttttagaatgccatttctatgaagtcttgtcagagattaaaagacttggtgaccatttagcagagaagacttcatctcttcccttattaacctcctagaagaagtttttcatttaatggaaactgc

SEQ ID NO: 12642 - DNA, 502 bp, Homo sapiens
  source 1..502: mol_type = other DNA
cggcgcgggcctcgggctcctctcccccctcccgggagctgaacccccactgggaaagcccagcttcccttgacacgcgtctgcccgtttcacatcatgaatatgaacggggctggccgaattattaatacttcagacagaattctgttcccaagaacaaatcgctttgagattactgccaccgatctggtggctggggttgggagcttggtcaagtcaacacactccgatttaagaaaatttttattaggcatgcgatgcttttcatttggggcccaaggcaaataaaaggaaatgggccccagctctggaggatgttccagcttcgaactagcagccaggacgctccattgtgcctccagcccctggcgtccggctctgccgcgcgcggggttcctctccggaaggtgggcagcgcggcacgagcgtgcacccgggctccggcccggagaagggggggcccggggatctgcagttgcccccgccacctcctggctgcggt

SEQ ID NO: 12643 - DNA, 371 bp, Homo sapiens
  source 1..371: mol_type = other DNA
tccagcccctggcgtccggctctgccgcgcgcggggttcctctccggaaggtgggcagcgcggcacgagcgtgcacccgggctccggcccggagaagggggggcccggggatctgcagttgcccccgccacctcctggctgcggttggcaggtccctcgcctgcgccgcgccctgggcagctccgcgccccgggcctcacctggagccaatgggccggcgccgccaggtgtctcttacctgcaccacgtgggggagggggaaggagctttcagccattgcgtgcctcccggggggggcagccttgctccaggctttttgcatagacgcccgggcaactcctgccctgggcgtggagcaccgaccaggtgtg

SEQ ID NO: 12644 - DNA, 377 bp, Homo sapiens
  source 1..377: mol_type = other DNA
gaagcttaaagtcagggaccctagttgtgttcattccacaagtgaaagctagtgaccagccactggtcttctgtttctaaacctagaagatgtttttaatttaatctgagccagcttaggcatcattttttctttttaaaggtctgaagatataaattagcttcaaagcccatcatgtggctagcctttaaatgcagaatttctatgctttgacctaagcataacttaaaatttaaaatatttagtagcctctagtatgaaacttaaactcttgatccgaatttcaggcaaagaactgttttttaggttgaaattcagatacttctatgcattaactgtataatcaaaaggaaattgctgcacgtgtgttactgctg

SEQ ID NO: 12645 - DNA, 543 bp, Homo sapiens
  source 1..543: mol_type = other DNA
ggaacaacttaaaggtgctattaggagaatctctaataatggggtgtccataattaccccatgacttcagtgaatgggtatatttcatttactaaatttacttctgaaagttaaacacagtttaacaaattaaaattattccctattgctctgtaatatctaattgcagaaatgcaacatatttgctaaaccagttttggtgatttaaaacaagttccaagcacaagcttctttcttgtaatggtcaaaccaaagctggctgcactctgaaatcccagcgagaacgcaggcagcgatggcagttctggagcaccgggttccgatgatcgtctctgactcgcttcacaaaagggacgaggggcggggctgcagcgagacccaccagtctcgctttccagggcaggcggcggccaggagctacagctgtgggctgcactcccggcgtggagtctccttcctgcccgcgcaggccccggcgccccagcgaaacgctccggcctggttcccgggccgcctgcggggacgcggttggcggcgacaccg

SEQ ID NO: 12646 - DNA, 416 bp, Homo sapiens
  source 1..416: mol_type = other DNA
agacagggtctcactctgttgcccaggctggagtggtgatcctcccgcctcagcttcctgagtagctgggaccacaggtgtgtcatacccggctacttaaaaaaaatttttttttgagacagagtttcgctctgttgcccaggctggagtgcaatggagcgatctcggttcactgcaacctccgctgcatcttttttcagttttaatcgttaatgaaaaatacaagaacactagcagcaagggctgctcaccgtatgctgccatccgtccagcgacccggcttcatgcggcgccgtctcctatggcaaccgggaggaggcgtggttcgaaggttagtcacgcccctttccttccaacccgaacaacgattggtccgaaggcgcggcggtggcgcggggaggcggatccaggaccgc

SEQ ID NO: 12647 - DNA, 662 bp, Homo sapiens
  source 1..662: mol_type = other DNA
agggggaggaggaatgccgttcccgggccccgctccggagaggggttttaccctctgggatcccgctttcctgcgcggggactgcggggtggcagctggaggccactgcaggggcgggctggaaatgccttccctgggcgcgccgcgcaaggccggcggagcgggctccgggtggtcgcggaccgggactggggagagcagagccgcacttggccaggcgcgtggctgagtggtctctgcagccactccgccaacgctttgctcctccccgaggggcgggccctcgggtccccgcgtcgctcaggaaagacctgggttccctgaggccttggcgggacagctagggcgcgcccctggacggtcacttcccagccaccctatggtcgcccccgggctgagccgcaggctgacacccccgaaatccaggagtgcgaaggagcccctgagagtttccctaccgccgccggccgcgccgtggagcgcggtggacgcgggcagaaggcccggtagagtggaccccacggccgctccgggtggcgggcgcgcactgagagcagggcgcggcgcgcgggcacgcgggcggacgggcgggagaggggagcgcgctgtccgcagtctgaggcgcatgcgtgcggggcgggaccggcccggcctatatattg

SEQ ID NO: 12648 - DNA, 367 bp, Homo sapiens
  source 1..367: mol_type = other DNA
gaataaagaaatgggtgggctaagcctgaatttttttttttaacagtttatttaccatggtgttttaactttacatgtacaataggggaaatatactttaggtgaattttaactatgattgcattctgttcacataatagtcaagggtatggaaagaacatttataagagcagtgtcttttaaaatcaatttactagttaactcagtactgagcatacattcatcattcaaagatgattgttctcgacatactggttttcagtatattttatcaaacgatcaggtgaccagctagctataccgctaaattctcaaagcgcccatccggcggcggctatttcccgggcctcaagcgcgctcgagcggc

SEQ ID NO: 12649 - DNA, 608 bp, Homo sapiens
  source 1..608: mol_type = other DNA
atatgtgggacagagccttggtctggaaaacactttcgtgagttggctcggcgtgaatgcccacaatttgcagctaggctgcagcgcctggggaggcggccgttcccgcccggtgcgcttgttgtccgctggagcagaggcccccgagcctgctgacctctgcctcgcctataggcaggcggaatccagagcgtgcagcaagcccggccggctctcggtggcggtttctacagcaggtggggcctggctccgtgattgagcggcctctacccctctatctggggcccagcagcggccccctcccggtggggctctcggaggcgttagccccagccctcccaggagaacgtccctcgacccttcactcggcgagaggggtcgctgagggagagatccacctctgcccttctcccgccggctcctggaaagccggccccggccccagcgcttcccggagctgagcgcgccgccggccgggcgccaggtcacgtgcgttggtgacaacctctcgcagggcggccccggggcccccgcaccgccgattggtggggcccggcctggcgcggcccggggcggggcagcggggcccgacggcgagcggagcggcc

SEQ ID NO: 12650 - DNA, 425 bp, Homo sapiens
  source 1..425: mol_type = other DNA
tctctcatccctcagcttggctggtagtgactgaataagaaatataaaatttacacacactttgtttaaaataagtatgctcagagcgcttagctatcagatcaattagggcacatttaaccttatatactatgcaataattacagtttttttgggaagaccagaattctaatccgatgcctttgggcatttaagaacttcgtagacagttgagcaatactttctaggcgcctcacgtgcacaacgcgtcgcgggagcgcgtcccgacctcacacatggacaagctccgcccgcggccggcctgagtgggtgtggcctccgccaaaggccccgcccctagagcgcgtcgcgaggggcgcgaggggcggggggggtgtgggtgtgctcgtgcccgcgcgctcgcgcccggagtgtggacgggggcg

SEQ ID NO: 12651 - DNA, 496 bp, Homo sapiens
  source 1..496: mol_type = other DNA
acacacactttgtttaaaataagtatgctcagagcgcttagctatcagatcaattagggcacatttaaccttatatactatgcaataattacagtttttttgggaagaccagaattctaatccgatgcctttgggcatttaagaacttcgtagacagttgagcaatactttctaggcgcctcacgtgcacaacgcgtcgcgggagcgcgtcccgacctcacacatggacaagctccgcccgcggccggcctgagtgggtgtggcctccgccaaaggccccgcccctagagcgcgtcgcgaggggcgcgaggggcggggggggtgtgggtgtgctcgtgcccgcgcgctcgcgcccggagtgtggacgggggcgcgcccgtgcgcgcgcaggggagaggccagcccaggcagccgttgtcgggttcggggcgggggagtcacctgcgagcggctgcgctggcggccagcccgcccaccgcgtctggatcgcgccggc

SEQ ID NO: 12652 - DNA, 370 bp, Homo sapiens
  source 1..370: mol_type = other DNA
ccacaaggaagtcgggaagctggttggcccctacccggttcctgggctccaacattgtgcaagcaagtgggtgtgcaatagttttgccaacaaaacgttctaagacttttacaaactgtaaatcttaacagaacagaacgtgcctattgctgcagcagacgcttatgcagagtctacatgcactctgccgctcaaaccttccacagatttcaggaatttacagagacagctccgaactctggcgttctctgccgcgagccctcgtgggcgccgggttgccacgggaagcggtgcgcatgcgcggggacgcctaacggggcaggagcccgccaggtcccctcgttactcctggaaaccaccggagccttgg

SEQ ID NO: 12653 - DNA, 318 bp, Homo sapiens
  source 1..318: mol_type = other DNA
ggttaaactatgcacagtatttattaagaatgccatttacaataccttacacttgtatgaccctgcagagtgaatttaaatcgctgggtaatagcttccacaaggaagtcgggaagctggttggcccctacccggttcctgggctccaacattgtgcaagcaagtgggtgtgcaatagttttgccaacaaaacgttctaagacttttacaaactgtaaatcttaacagaacagaacgtgcctattgctgcagcagacgcttatgcagagtctacatgcactctgccgctcaaaccttccacagatttcaggaatttac

SEQ ID NO: 12654 - DNA, 721 bp, Homo sapiens
  source 1..721: mol_type = other DNA
ctggggcctgcaggggagcgcagcagcttttagcactcgtggcctttgcctgacctcgagggtcgggaatatggggctgttccgagctgggccctgcgcctggcccagggcgaggcttctctggctccgggctggcccctgaggggcgcaaacggcaggcctggcggttggggccgaggagggagggtaccaccgccccgaggcagcacgcagcctgcagcagaggcgcctgctccaagctgtctcttgggggcgccgccgccgcttccctcctccggggccgctcgctcccaggaaagtggaggcggctggcgaggaccgagagccggggccgcgctgcggagggaccacacctccgggagttcgagggggaccctggcgcggcgggccagcctttgctccccggccacgggccggcagcgcccgccttcccccggtcagcgcttgcggcccgcgccgcgcgcaccgcccggcaaccccgcgcgcgtcccgcgggggcgctgcgtcttcctgccacaccggcgcaccgcggctccctccccattcctcccctcccggcgaggggcgggagggggcgtggcggggccggggtttgtgtggctgggacccggctcctcgcactccgagtccgcccgaggagccgggccccggccgctgtccagccgctccgtgccccgcgcgtcctgcgccgccgccaccgcctcctggggagacgcagcca

SEQ ID NO: 12655 - DNA, 599 bp, Homo sapiens
  source 1..599: mol_type = other DNA
ctggggcctgcaggggagcgcagcagcttttagcactcgtggcctttgcctgacctcgagggtcgggaatatggggctgttccgagctgggccctgcgcctggcccagggcgaggcttctctggctccgggctggcccctgaggggcgcaaacggcaggcctggcggttggggccgaggagggagggtaccaccgccccgaggcagcacgcagcctgcagcagaggcgcctgctccaagctgtctcttgggggcgccgccgccgcttccctcctccggggccgctcgctcccaggaaagtggaggcggctggcgaggaccgagagccggggccgcgctgcggagggaccacacctccgggagttcgagggggaccctggcgcggcgggccagcctttgctccccggccacgggccggcagcgcccgccttcccccggtcagcgcttgcggcccgcgccgcgcgcaccgcccggcaaccccgcgcgcgtcccgcgggggcgctgcgtcttcctgccacaccggcgcaccgcggctccctccccattcctcccctcccggcgaggggcgggagggggcgtggcggggccggggtttgtgtg

SEQ ID NO: 12656 - DNA, 413 bp, Homo sapiens
  source 1..413: mol_type = other DNA
aatgagataattacagtacttttagaattaaaagatagtttaggggagtgagagatcacctccaacctttggttgaatctaggaaccaaaacaagagaaaagcatactaattttactagttttacatgtacatggggatccaaaagagtgaagtggccaatgtaagatgcctttatactttttacacgaactacacgaggaatcctggaggaagctttatggcttgctgcatgcaggaagagataggtcatcaaaccttttctgaaactacaatttctccaatattttcaactcgaaataatcaatgtaccaattccatatatttttgggatggcacatcgaacccagctttaagccttggtgcaggtgctgaacggcagtcgtcagaactgcgcctgcgcaagcggcctttc

SEQ ID NO: 12657 - DNA, 439 bp, Homo sapiens
  source 1..439: mol_type = other DNA
gcgtgcgttccccgtgtaaccggcaccgggcgggcggaggggccgcgtgggcggcgggctgccagtgcgtgtgcgtggagcagccagcccacttcctcggacgcgccccccgctcggctgggccgccccacctggtcctccacttgctgtagggtccggctccccacgcaggacgccatggcccgcctccccgtcctgccgcggtggcggcggccccagcccgagaaggccgggaccccgggggtgactagccaggcggcaaagccgggtctggcgcccagcaggcgcgagagggcggggtcgcggcgccgccaccgcggcctggggcaggggacgccgccggccgtccccacgctggagaagggtagccggggcccctggctggctcttttcacatggtctcgcccactccgggcgcggcccacgtgggcccgggagc

SEQ ID NO: 12658 - DNA, 432 bp, Homo sapiens
  source 1..432: mol_type = other DNA
gcgtgcgttccccgtgtaaccggcaccgggcgggcggaggggccgcgtgggcggcgggctgccagtgcgtgtgcgtggagcagccagcccacttcctcggacgcgccccccgctcggctgggccgccccacctggtcctccacttgctgtagggtccggctccccacgcaggacgccatggcccgcctccccgtcctgccgcggtggcggcggccccagcccgagaaggccgggaccccgggggtgactagccaggcggcaaagccgggtctggcgcccagcaggcgcgagagggcggggtcgcggcgccgccaccgcggcctggggcaggggacgccgccggccgtccccacgctggagaagggtagccggggcccctggctggctcttttcacatggtctcgcccactccgggcgcggcccacgtgggcc

SEQ ID NO: 12659 - DNA, 425 bp, Homo sapiens
  source 1..425: mol_type = other DNA
gcgtgcgttccccgtgtaaccggcaccgggcgggcggaggggccgcgtgggcggcgggctgccagtgcgtgtgcgtggagcagccagcccacttcctcggacgcgccccccgctcggctgggccgccccacctggtcctccacttgctgtagggtccggctccccacgcaggacgccatggcccgcctccccgtcctgccgcggtggcggcggccccagcccgagaaggccgggaccccgggggtgactagccaggcggcaaagccgggtctggcgcccagcaggcgcgagagggcggggtcgcggcgccgccaccgcggcctggggcaggggacgccgccggccgtccccacgctggagaagggtagccggggcccctggctggctcttttcacatggtctcgcccactccgggcgcggcccac

SEQ ID NO: 12660 - DNA, 429 bp, Homo sapiens
  source 1..429: mol_type = other DNA
ctcttaacaatttagatgattcttgcgcaggaaggagccctgttttcactacatcagccgaaaacctaaaggcccttgaggccctggggcgcggtctggacgcgggtgcgccggaacctgaaccctcgccaggagcgcgatcctcgtgctggggcagctcctgcctgcttcccgtagcgggtgaccccgggaccgaccaactcgctgggccgcacgtcccgtcccgccgcgccgcacgccggctcctcagcccgccctacacagcgcagccgcgctcccgggcccacgtgggccgcgcccggagtgggcgagaccatgtgaaaagagccagccaggggccccggctacccttctccagcgtggggacggccggcggcgtcccctgccccaggccgcggtggcggcgccgcgaccccgccctctcgcgcc

SEQ ID NO: 12661 - DNA, 439 bp, Homo sapiens
  source 1..439: mol_type = other DNA
acaaaatatttcatgtcagctacttccatttaggaaatacatgttcattattttcttcaaactaagaattactttatcatggtatttaagcccttaatgaagttactatatatttattacattaattatcttctcttttaaaatgcaattttcatgaactggcgatttatgaacacttcacattgcttgaaagagaaaagctacatacgtctctcgtttcttcactaattgttctctagaaaagggaaagcctggcttgccggtgagcagagccggcgcagccacagcgcggagccgcggcgcccactggtcctcggagctgccaatcggcgtgtaatcctgtaggaatttctcccgggtttatgcctcctctccccagtcgcccaggggagcccggagaagcagggaggaggggcgcagccgcggagccagtggcccc

SEQ ID NO: 12662 - DNA, 602 bp, Homo sapiens
  source 1..602: mol_type = other DNA
tctaattaaaagttctgtttggtttttttagttaagagtgtttcacaaagataactgtttgtatttgataagagtttcgttaaacaaaggaatttgcacttatcaaaaaacactgagcacatactctgtgaccagaatgcgtgtccacaccgggtaatcagatgagtctcctttcttcttggttcaggcacaaacgaaagagaaaacgctttttctgatctctcaggggtgggaaaacggtttaataatctcttccctttgggaggcgtagacacacaaaaaccatgagccttctcaggcccctgccgcccgcctcgcctgaggctgcgcttctgaaaagcacgcggccctggcctgcgcaccacccagtctgaaggcgacgcccctgcacgaaggagtcaggcctaggggctcgggacccaggccttccggccgatctgtggccctgaggtcgcccttggagggcgagtgagaaccccccaggcgttccggaggtggcccccagcccgaacccggcgcccgccccggcttcccgagtcaggtctttgccccgcctctcggccccgcggcctggccggcaagcagggctgcagtcacggggc

SEQ ID NO: 12663 - DNA, 283 bp, Homo sapiens
  source 1..283: mol_type = other DNA
actgcactccagcccgggcggcatataaaaatggaatttttgcaaaccccttttgcagtgttgtagaaaagcttagtaaatacaatctaatgtgcttccccttatgtgttattaaagctacaaattagtaggaatccaacttttgactcgccaggctggcaactggtagttgcccgtcagactccgttgagctcattctggaaggatccaactggcgccctagacccggtgacccggttcctagcgcccactggcgcccacgtgacccacggtcgtccccgcg

SEQ ID NO: 12664 - DNA, 412 bp, Homo sapiens
  source 1..412: mol_type = other DNA
tccaacttttgactcgccaggctggcaactggtagttgcccgtcagactccgttgagctcattctggaaggatccaactggcgccctagacccggtgacccggttcctagcgcccactggcgcccacgtgacccacggtcgtccccgcgcgcggcgtggatcgcggcccaagccgccattgttccgccgagggaggacagcggggcctggcgctggcgccgagacgccgcttagcggccgccactggagacactccctcccgcctcccgggtctcctggcggcggcggagtgaggctgacagcggggaacctgggagacccctccgccctccccgcggtggcagcggccgatccccggctccggcgcgagggacggccgcgatgcgctcggcctgaggttacccggcccggc

SEQ ID NO: 12665 - DNA, 288 bp, Homo sapiens
  source 1..288: mol_type = other DNA
gcctgtagtcccagctactagagccgagatcgcaccactgcactccagcctgggtgacagagcaagcgaggatgtccttgacacacatcctattttctgggaaaagattaccacagtaattccttcctctcgtgcaagataagagtgatcactgtaatcccagctaccagtgcgagatcgcgccattgcaccccggacctccactcagggccgactcaccgggtgcttggagctccagcagctggctggagcccgcgatgacgtcacggactcgggtcacatggccaa

SEQ ID NO: 12666 - DNA, 250 bp, Homo sapiens
  source 1..250: mol_type = other DNA
cacgcttgcagtaagccaagattgcgccactgccactcaccccagcctccaggaactggggagctggtagaggggggtgccggccaaggctccatggggacacccggggcctggtccccagccagtggacgaaagctgcctgtgttccgtgcctgcggctccggacccctggagtctgatgcccgcctgggctcaggcacggacggagtggagccaggtggcagcaggcagggcgcgccgccagagtgcc

SEQ ID NO: 12667 - DNA, 311 bp, Homo sapiens
  source 1..311: mol_type = other DNA
ccactcaccccagcctccaggaactggggagctggtagaggggggtgccggccaaggctccatggggacacccggggcctggtccccagccagtggacgaaagctgcctgtgttccgtgcctgcggctccggacccctggagtctgatgcccgcctgggctcaggcacggacggagtggagccaggtggcagcaggcagggcgcgccgccagagtgcccagctcccggggctgcccacagggtggggccgccctcgccgccgctccctctccccttgcccagcgcctcccaggcagccagcgagcgaaggg

SEQ ID NO: 12668 - DNA, 582 bp, Homo sapiens
  source 1..582: mol_type = other DNA
gtctctgctcactgcagtcctgggttcgactgcaggcttgtgcccaccttggcctcccaaagtggtgggattacaggtgtgacaccacacctggacttttttaactttttaaataaatttaaattttttttttgtagaaacgaaccaggctggtttcaaacggattgcagacatgagccatggcacctagacttgaccctggtgtgaccttgggcaggccactgacctagggcctggcacatggcctcagtctagtaccagagtccaagcccataaccactgtgccaacactcttgtaatactttatgtcaactacacatgaattttatatgtataatttatataaactaattgatgccatctactattattagactgaacaaatattgttacttggaagatatgtaatagcttttttttattcaaatccaaaatgtaaaatgtgactatgagtaattgataatgaacttaactgataagaaacttcaggatagatttttctcaagttttccattcagtcttacagtgattaaagtgatgaaaaattccaactatgcatgccctgctcggagcgtccaagaa

SEQ ID NO: 12669 - DNA, 330 bp, Homo sapiens
  source 1..330: mol_type = other DNA
accgttctccaggggacaggtaacttgggtgaccgcaggggtgaggacacagctgcttctagggtgctgcggcgcatcggagtcacccgagaccgtggtcgcagccgccgcagcgagggggaaaagaacacccccgccgtcattctttttttttgagacagagtctcactctgtcgcccaggctgagtgcagtggcgcgatcatggctcactgcatcaagcgacctctccgcctcagcctccggcgtagctgggagtagctaggactatgggcagccattctagctagcggtaccaatagcaaccggcagctgccggctctgccgtgttg

SEQ ID NO: 12670 - DNA, 397 bp, Homo sapiens
  source 1..397: mol_type = other DNA
tctggacatacagcaaaaatacttttaaaaaattagacctgtttacgagttttgggaaactcgaggcgccaccgttctccaggggacaggtaacttgggtgaccgcaggggtgaggacacagctgcttctagggtgctgcggcgcatcggagtcacccgagaccgtggtcgcagccgccgcagcgagggggaaaagaacacccccgccgtcattctttttttttgagacagagtctcactctgtcgcccaggctgagtgcagtggcgcgatcatggctcactgcatcaagcgacctctccgcctcagcctccggcgtagctgggagtagctaggactatgggcagccattctagctagcggtaccaatagcaaccggcagctgccggctctgccgtg

SEQ ID NO: 12671 - DNA, 268 bp, Homo sapiens
  source 1..268: mol_type = other DNA
gggagtcccacgcgggcggatcaccgcctgtaattccagctactcaggaggctgaaggttgcagtgagctgagatctcgccactacactccagtcttggtgacacagtgagactctagctgggcacggtggcaggcgcctgtaatcccagctgctctcggtttcaaaaaaaaaaaaaaatctattctcttaataaatgtcctgtatcaaagttaaacttccttgtggtaattgtagttatgtcaaggccgcctcgcctccctggctat

SEQ ID NO: 12672 - DNA, 234 bp, Homo sapiens
  source 1..234: mol_type = other DNA
gttgcagtgagctgagatctcgccactacactccagtcttggtgacacagtgagactctagctgggcacggtggcaggcgcctgtaatcccagctgctctcggtttcaaaaaaaaaaaaaaatctattctcttaataaatgtcctgtatcaaagttaaacttccttgtggtaattgtagttatgtcaaggccgcctcgcctccctggctatcccgctgcgcgcttgcgctctac

SEQ ID NO: 12673 - DNA, 339 bp, Homo sapiens
  source 1..339: mol_type = other DNA
caaaatgagagggaataaagcagattttcttgtattgggactcatatatctatgagtgcccgcataaatgaaatattaacaggataagaaatatttaagggctctgttcagacagtgaccttagcgtggtcagaagaggggatgcaagcccattcccaggacggcctccacccggcggggccgggcgccgggaggggggccgccgcatacagttccccccctggagagcgcgctggagagcgcatgcgccagaccgggcgcttcctccacgtggcctggagcgtcgccgaaactatgccgcacgagcccgcccccagcgggagctgtggggcagaggcg

SEQ ID NO: 12674 - DNA, 434 bp, Homo sapiens
  source 1..434: mol_type = other DNA
ttggtcataaaggactgcatgttttatgattcaatttatagtctgaagaaagtggtgatggctgcacaactctgtgagtatggtcaaaaccactgaattgtacatgttaaaggtaactggggagagctttctggcaggctgtgctccgcagcgaggcagccccagaaggagtgcaggttcctggtagctggggctccggcccggagtggccccaaccccgaatcacgttacctgtagggtccaatggcccctggggctttcgcgggatcaaggacgacatggctaagccttccctcttgcagccccttcaggagaagaagccccagcaccagccctgctggcttcttactcagcagcgcctctgccccacagctcccgctgggggcgggctcgtgcggcatagtttcggcgacgctccaggccacgtggaggaa

SEQ ID NO: 12675 - DNA, 449 bp, Homo sapiens
  source 1..449: mol_type = other DNA
ctctttcatgaactcatggtatagaatcatggtttttttaaagtgagaaataccctacagatcatttgtggtcacacattagaattgaacatctcgttagagttcttaagattaataacaacatttatctttcatcctaaattcatatatacagtagctggcaactttcaatatttctgggaactcatgactttttcatatgcaatcaatttttaaaatatcggtgggccccgacaggcgcggggacccgttgcggacggccgcggggattgcccccttgggcagtgcggccccgaggatgcagacactggcccagcgcgcggtgcgagctggacggccccgggaggccgcagaccgccgggctccccgaggacacctcgcaggcagcgcccggccaggctgggagcacctacggccgcgcgggggcgggagccaggtggcctcggcgc

SEQ ID NO: 12676 - DNA, 450 bp, Homo sapiens
  source 1..450: mol_type = other DNA
aagtaaatcagcctcttaaaattgggaatagttacctacaattgttagctgttcactgaacatctcgagtgcttaagcaagaaactacacaatttctgagacgacatgtcttgttttttctctctttcatgaactcatggtatagaatcatggtttttttaaagtgagaaataccctacagatcatttgtggtcacacattagaattgaacatctcgttagagttcttaagattaataacaacatttatctttcatcctaaattcatatatacagtagctggcaactttcaatatttctgggaactcatgactttttcatatgcaatcaatttttaaaatatcggtgggccccgacaggcgcggggacccgttgcggacggccgcggggattgcccccttgggcagtgcggccccgaggatgcagacactggcccagcgcgcggtgcgag

SEQ ID NO: 12677 - DNA, 402 bp, Homo sapiens
  source 1..402: mol_type = other DNA
taaaataaaatgtaatataacaaatagagacctttttccttcagatatttatttgaagtaaatcagcctcttaaaattgggaatagttacctacaattgttagctgttcactgaacatctcgagtgcttaagcaagaaactacacaatttctgagacgacatgtcttgttttttctctctttcatgaactcatggtatagaatcatggtttttttaaagtgagaaataccctacagatcatttgtggtcacacattagaattgaacatctcgttagagttcttaagattaataacaacatttatctttcatcctaaattcatatatacagtagctggcaactttcaatatttctgggaactcatgactttttcatatgcaatcaatttttaaaatatcggtg

SEQ ID NO: 12678 - DNA, 384 bp, Homo sapiens
  source 1..384: mol_type = other DNA
ctccccagggactgggtccatttctcagctcagcccagtaggcagggccttaaggcagaccgagctcagatctgggccacgagtcttcttaggaaccgcccccgccgtgcggcctgcgctcccgcgggcttcgggaaacaggccctaaaaggggacacctggagttcctccggtcccgccctgtccctcccgccagacccagcggggaaaggtcaccgtaggcagccccctgcctgcgccctgggggtggtgataataacaggagaggtgtcggccccgcgccgagccgggggcgcaaggtggtcgcggtgacgcgccggggaagcgcagagaagcagcggcggcggcggctgcgccttccgagcccgggcggcggccgaggca

SEQ ID NO: 12679 - DNA, 466 bp, Homo sapiens
  source 1..466: mol_type = other DNA
ccgcccccgccgtgcggcctgcgctcccgcgggcttcgggaaacaggccctaaaaggggacacctggagttcctccggtcccgccctgtccctcccgccagacccagcggggaaaggtcaccgtaggcagccccctgcctgcgccctgggggtggtgataataacaggagaggtgtcggccccgcgccgagccgggggcgcaaggtggtcgcggtgacgcgccggggaagcgcagagaagcagcggcggcggcggctgcgccttccgagcccgggcggcggccgaggcacgcggagctgtccgttcagcaccaccgcgccgcgccccgcgcagggcgggcgccccgtcacacccgctctgctcccgccccggctcacggggcgaatgcggcgcgggttcctgcctctctgggtgggtgaggggcgcgcggatccggagagggggctccgggagcggcgggaccacg

SEQ ID NO: 12680 - DNA, 584 bp, Homo sapiens
  source 1..584: mol_type = other DNA
atgcatgcagtggtcagattacaaacttttcttgagtattcttcctggcagcattgggacagctgcaagggcccagtgcaactgaatttggtgtaccgagagatctcactgtacgaattattttctcggtaattagatgtaattattgtgaaatgtagcgagccaataggggcggagctctgggccagctcagagggacttgcccttccccagcctagagcggctccggcccggtcacggggctctggggccagccaggccttcgtccccggccccgcccacccgccgcggcaccggccccgcccgccaacccaggccgcggcaggctccgccccccgccgcggtgcccggctccgtccaccttctctgggccgccgccgcaggctggcggccggcgcggccgggggcggggcggggcggccgggggcggggcggggcggccgggggcggggcggggcggccgggggcggggcggggcggccgggggcggggcggggcggccgggggcggggcggggcggccgggggcggggcggggcggccgggggcggggcggggcgggaggagccgcgctcctaagcggga

SEQ ID NO: 12681 - DNA, 418 bp, Homo sapiens
  source 1..418: mol_type = other DNA
tgaaaaattgaattctattaactttcctggagactgaacattgaactcaatttttgctgggaatgaagatgtaaatgttttgaaaaactagaatcgcattttcctaaattttaaaaatgattgttcgcccactgttttaaccaagttggtttactgcgtgcaataattactaaattagtcaattgccacctctgtaaacaaacttcgttctacacatgtagtcataattgaccaaaagtatgtacaaaactgtttaaaattgagtgatttatgctggagaatgcagtctagacctgaattattctaaatgccctttgggatagactccgccgggcgcggaggcggagccagggcgctgagggccccgcgcggcggcgggacgcccgcccgaaggggaggcggggccgctactaaagcc

SEQ ID NO: 12682 - DNA, 435 bp, Homo sapiens
  source 1..435: mol_type = other DNA
ctatagctctctaatttatataaaatggtatattatttttagataattcagtgtaatattaccattaaactccttatcaagttacttcttaatttttttttgaactgaaataagtcacattggtgacagccagtcaagtaaattttacaaaatttctccacatgcctggaaattcctgtgaatttctttccttgcaagattaaaagtaatgttatttcctgtacttcttttgacatacatttccagcaactcaatgggagtgtggaaatttaaccttccaattcgaagaaaaattaaaacaaacaggtactatgaaatagcactttttttttttactaacatgaacctgaattatattagtcgttaatttctgtattataaaccattcagagaaaattcgctgtgcctttggtatagaaatcacaggtcacaaca

SEQ ID NO: 12683 - DNA, 249 bp, Homo sapiens
  source 1..249: mol_type = other DNA
caagctgaaaactgtttccagttaatgacagctaaatagctgtagatccgacggctttaagtcattaaaattggagttacatatgactccagcatcttttaagagagcgttcgttatctcctccgccggcagtgcggcgccacttccgggtgtgtcccacttggcagccggaccggatttctcaggctggagaagcaaggagaactcttgcgttctgctagccagggtcccagctccgaccctgctagt

SEQ ID NO: 12684 - DNA, 311 bp, Homo sapiens
  source 1..311: mol_type = other DNA
tggtctagcaatttggaggccttggcctaccaaagtgctgatcaccgcgcctggccaggagtctgttgtaggtgttttcttcagcgataaccaaaaataagacttgtaagctattatacggaaaggtaatattttatactcattcagccattgctttgtgaaagtaccagaaaacttgtctacacgtttggccaaaacgcatcctccaacggtgtaccttggaactaagttgaaatctgtcacccaagacggacctccacatcgggaaccgccgccggcgcagcggccccagcagccgcagccaccttctc

SEQ ID NO: 12685 - DNA, 304 bp, Homo sapiens
  source 1..304: mol_type = other DNA
ttgtaagctattatacggaaaggtaatattttatactcattcagccattgctttgtgaaagtaccagaaaacttgtctacacgtttggccaaaacgcatcctccaacggtgtaccttggaactaagttgaaatctgtcacccaagacggacctccacatcgggaaccgccgccggcgcagcggccccagcagccgcagccaccttctcactagcagggtcggagctgggaccctggctagcagaacgcaagagttctccttgcttctccagcctgagaaatccggtccggctgccaagtgggac

SEQ ID NO: 12686 - DNA, 276 bp, Homo sapiens
  source 1..276: mol_type = other DNA
gaacaaattactctctggacaaattccatgcaaagattttcagaacgttggtaaagtccaaacctacttttgaaagaatctggcacatagtaggtactcagtgtatatatcgactcaatatgacttaaataatgcttttaaaattcaggttatttcaatacaaactcaaaatccttgttttcttaagaaacccacgcttctgcagtagctgggccaaagttggttcttcaatttactaacttcggctgtcacctgcggtgggcgcactagaggtct

SEQ ID NO: 12687 - DNA, 430 bp, Homo sapiens
  source 1..430: mol_type = other DNA
attcatcatggagaatgggcttaagcgcaaagactgaaaaaccattaaaaagtttttacaactgttcagctcctgaggaatgaggaaaactggaggcctgacttcccccgggaccagccgtcctggccgcctggcgccccgcatgcccgcggcctctccctcccgtggagccagtaacgaattcgctgccagtggagtctcgagggacacaggcgtctccagggcgccccttccgggtgaccgcgctgggggtccacacgcgcgtccgcccccagccttcgttcgccgcgctggtccctgcccagaggaggaggcggcgggggtgttcccgtcgcagcttgggaaccccgaaaggcacctgagtggccggcctcggcctccctgggcggccgcatagcaaccccggcgcggcgccggccacgctagccag

SEQ ID NO: 12688 - DNA, 549 bp, Homo sapiens
  source 1..549: mol_type = other DNA
gcatataatagacgcccagtaaatatttattgaatgaaaaaattagggtttaaaaaatttatttgggcccaaaaatggatgtttgtaaacaatgaacacatttcactctggtttttatgaatagattttttaaaaatcttttttttgagatcctcccacctctgtgctgggattacagatgtgagccaccaggcccggctcagcttttttatcacaaaatctgtatatattcattgttgaaacatgagaagaaaattacctttttgcacttgacagtttggagaatcatttccaagggaacattctcatacatgatttctatggcatcccactgtaggccacgttagcattcctaaatacggtaatgcttcccaaagtgggaatggggactttctgacccgcctcgggacgggtgcaggggtgagcgagagagggggcgctcctcccgctcaagcgaggacccaggcctgcgggcggccgggcgggagcgctgcagagccggaggaaggggcgggacagcgcggcgcggggcggggctgcgcttagcgg

SEQ ID NO: 12689 - DNA, 350 bp, Homo sapiens
  source 1..350: mol_type = other DNA
agtttgaacttctggaagtgaaaggtgaagctaaagaacgcctacttctttcactaactttaaaatagttattaacaattaagttatttttaaattttttaaaatagcttcattttcttcaccctactaagtaaaataaaagaacgcacctccactgagcagggcgttttgtttaccaaaatctcttagatttaagagggagttgttcatgtagctaccgtcacactaacctttgctttaatatcaaacaatttttaaaaacaatctggaaaagtgtttttctacgtgctggaaaagtgttactttgtaccactacattagcgggttgtctggccacgcctggggcggaa

SEQ ID NO: 12690 - DNA, 318 bp, Homo sapiens
  source 1..318: mol_type = other DNA
aaagaacgcctacttctttcactaactttaaaatagttattaacaattaagttatttttaaattttttaaaatagcttcattttcttcaccctactaagtaaaataaaagaacgcacctccactgagcagggcgttttgtttaccaaaatctcttagatttaagagggagttgttcatgtagctaccgtcacactaacctttgctttaatatcaaacaatttttaaaaacaatctggaaaagtgtttttctacgtgctggaaaagtgttactttgtaccactacattagcgggttgtctggccacgcctggggcggaa

SEQ ID NO: 12691 - DNA, 544 bp, Homo sapiens
  source 1..544: mol_type = other DNA
gaacatatttgttgaaagaataaatgaattaatacttatacaggttacttggagcaagtaaggcaaaaagtttaacacatttagtcattcgttgaagaccttacagttccaggtattgaataatgcaagaaaatcttttaaaggatcgttttaaaaaagcagtctagtaagcgacagcatcctgtacagattcaagaatactgtatctcaaagcctagatgaagatatcctttggaaaactgcaagatgttttccttaaaaaatttatacatctttccccctaaagaaaagggagttatggtaagtaacttccaaaaatctgtgggtaaactcccttcagatatctagatgtcccctagaactgtgcttgggagattccaaggagtagaaaaatctaaatagagattttagctaattgactagccagtgacttaattgcccagtaactacagagcctctataagatatccacaatatccagtttataataagcagttacaaggcatgtaaaaaagcaggaaaatatgcttcttagcaactgcag

SEQ ID NO: 12692 - DNA, 484 bp, Homo sapiens
  source 1..484: mol_type = other DNA
aaatttacctaggtatggtggtcgcagttccagaggcaggagaattgctccaacctgagatcaaaaataaaaataaataaataaataaaaacttttttttggagacagagtttcactctgtcacccaggctggagtgcagtgacgcaatcttggcttactgccctgccagtagctgggattacaggcacctgccaccgcccacgtcagctccaaagtgctgggattacaggcgtctggcccatttttaaaattatgcacaaacgttaaatatcctttagatttttgcataatttagcataccttactgatgtccttagcaaaaatttccatattttagtgtgttgcatggtaaccccacaaaagatattccccagaatctgcaaatgttatttggaaaaaggggttttgcagagtaattaagttaaatcttgagataagatcatcctggattatccagggacaagtgtctttgtaagggacaag

SEQ ID NO: 12693 - DNA, 430 bp, Homo sapiens
  source 1..430: mol_type = other DNA
caattgttgatgaaattgcaaaaaaaaaaaaactcataatgttttaagagagtttattaatttgtgttgctaaactgtcttggctgcatgcagcctgcagacggtcactgtgaaaaactagttttgcatgaaagaatgtttccagcacatgtaataagtcaaggattcaaactgcgaatcgcttgaaccttcaaactgcttttgaaaaaagtaaaaatgcagggttatattttagaaatagtgcagccaatcattagtggctattcctaaggccagcaactattaattgatgcttatagcacctaatcagagcaggctttcccggagtctctgactcagagcagcccgagccaccgtgaggaccgcccacctgcagggggcgcgccgggggctgcagcgcgagaccgctctggcccagcggggactccga

SEQ ID NO: 12694 - DNA, 281 bp, Homo sapiens
  source 1..281: mol_type = other DNA
gattactttagtaagatatgcatctgaatagccaaattgcattttcaaaatactatatacaaaagatcttgtgatactaaaaatcctttattactttttaaatttgtataacaactgtattaagatttaacttacatcctataaaaaaaacaatctggggccatttagagtgttttccaggacgtcatcgggaatccaaggttacctcaggacttgcaaacaccatttcagcctgcagactcattgtgttaggacgccttgttgagaattccgaagtctct

SEQ ID NO: 12695 - DNA, 702 bp, Homo sapiens
  source 1..702: mol_type = other DNA
aagaggacgaggaacccgaggggccctcccctctctctccctgccccccaaccccgcgccgggagctccagcggtgccggggtccagcgcgcaggacggttggggggtcccggagcgggcggccaggacccgcgcagccagttggtgtcagcgagcgccgcggccgttggggactccagctcccagcaggcaccgcttctgcggccgacgcgcgtggcggcggtgccggctgggactcgtggtaggagagagcagggggccacgctggctccatctacgcacgtttcggaaaccgggcccggaggggaccacgcccgctcacccgtgcccggcgtcccccggagctggggctagaggagccgggccggccgcagcgggaagaggccacaggcggccgcgcacgtggggggtggttagcgcggaggaacccggaagccctttgcaccgcccaccgccgcggtgacgggttaacgctcctcctggtggaggcaggggcgggcggggcggaaggcggggacgcctcagccaacacccccgaggaccgcccgcgagccccccacggacgcgacgcagcgcgggctccgcttccccggccgcggcgcctgcgcaaaagccccgccccttcgcccgtcctcctactccggcgctgacgctcgcgtaggggccctggcgtcagacgcgcgggggcggggcgagtgcgag

SEQ ID NO: 12696 - DNA, 641 bp, Homo sapiens
  source 1..641: mol_type = other DNA
agaacgccttcccgccggctgagaggaagagtgggccggggagtggcggctgcgggcgaggacgcgcgcgcctccgctcgccctccagcgcgggcgggcaggacgagcgccggggagcggcggttacgcggggccccgatcgctgtgggcaccaatcaacggttgccacggctgtagcctgtgagcagcgagatccagggacagagtctcagcctcgccgctgctgccgccgccgccgcccagagactgctgagcccgtccgtccgccgccaccacacacaggtgaggaacccggccgccgccgcgcctcgcttcctgtcccaggccagccttccgaacgcgtgggcgtcccctcatccccactcgccccgcggtggcggcgccgggctgaggcggagtctcctcagcggacacgggcggcggctcctcttccgctgggctcgggagggcggctagcggccgcctccggctccttgcttccgcatcgacgccccggcgccgatcggtgctcgctcccccgtcctgcccccgggggtgggtagggcgcccacacgcgagatccctggggatctccctgtcgccggctcccgaaggtggacgaggcatggccggggcgccgccggccgcgatccatccccacc

SEQ ID NO: 12697 - DNA, 532 bp, Homo sapiens
  source 1..532: mol_type = other DNA
cccctcgcgcagtcaccgagcgcagatcccgcgcactcaggggctggccgcttcccccgagccagcaggtaaagccgcggcggcgggagggaggccgggaggggccgcgcgccccggtcggcccagccggggaaggggagcggcgggcggggcggggggcagcgcaccacacacaaccctcccttgccgtgcgaccgcgccctgcccccgccccggggcccccgccccgcaagtcctgatcacaatgccggagccgccgagccacccttgtcatcctgcccggggacggccctggggcagttactaccgcgaggggcgggccgggcctcaacgggagccccttccagaggagaacgccttcccgccggctgagaggaagagtgggccggggagtggcggctgcgggcgaggacgcgcgcgcctccgctcgccctccagcgcgggcgggcaggacgagcgccggggagcggcggttacgcggggccccgatcgctgtgggcaccaatcaacggttgccacggctgtagcctgt

SEQ ID NO: 12698 - DNA, 490 bp, Homo sapiens
  source 1..490: mol_type = other DNA
cattatatctttattgtgcagacacattgataaaaaatgccttgctattaaagcatgaggcaaaagcctaacttagctgtttcctgaagtaaatccatatttatacagaaaaaccccatatatttgagacattaaagaaacatcaatttccattttaaaaaaacgtttaacttagtatcctctgtcaaatttcgaaaaaactgtaaaaaaaatagcttttgaaatattactcattttaagtgagtcacgccctaaaagaatttacttgggagtcaaagctagttgagaaataaaactccaatttgtttgatttggcaacttgctaaatgccagctgtcatgtcaggcaaaaagtaaatgtactggaagtcaatcatttcgtgtctactactgagaaactaaattctgtagagaacatgagaggctctggtccactttaaagagggaaggggcagagatcatacactgtcggaggccctaccggttcaggc

SEQ ID NO: 12699 - DNA, 575 bp, Homo sapiens
  source 1..575: mol_type = other DNA
aatggcgctcagcctcccgagtagctgggactacaggcctcaagtgatcctcctgccttgggctcccaaagcgctgagaagcccccagcttgggaaaacacctggggtttccatggccgcgttcagagccgctgggtccgccgggctcgctgggggccggggccgcggtgtcctgggtggcggggctccgggaatgtgactcagccaccgcggccccgcgatccgctcccgggccagcgcctcagtcggtgccgaggagggcggcgccgagacgggcgcgtcagcctggggtcgcagcgcctgaggcccggccgccgcccgagtggatgcttgtgaaacacgccgcggcccggtcaccaaccaggaccgggatcacgtggctcccagggctgggtgaagaagccgcccggaccgagcgcgccggagaggaggggcgcctggagaaggcgacgtcccctagggcccgccccctcgcgcttatgtaataggggcgcgctgccattggcccgcgcgaccagccagggcgcaggcgtgcgagcggggtgctggggcgggggcgccgaggagagcggcgc

SEQ ID NO: 12700 - DNA, 678 bp, Homo sapiens
  source 1..678: mol_type = other DNA
ctcaagtgatcctcctgccttgggctcccaaagcgctgagaagcccccagcttgggaaaacacctggggtttccatggccgcgttcagagccgctgggtccgccgggctcgctgggggccggggccgcggtgtcctgggtggcggggctccgggaatgtgactcagccaccgcggccccgcgatccgctcccgggccagcgcctcagtcggtgccgaggagggcggcgccgagacgggcgcgtcagcctggggtcgcagcgcctgaggcccggccgccgcccgagtggatgcttgtgaaacacgccgcggcccggtcaccaaccaggaccgggatcacgtggctcccagggctgggtgaagaagccgcccggaccgagcgcgccggagaggaggggcgcctggagaaggcgacgtcccctagggcccgccccctcgcgcttatgtaataggggcgcgctgccattggcccgcgcgaccagccagggcgcaggcgtgcgagcggggtgctggggcgggggcgccgaggagagcggcgcggcgtgcgcgggcacgaggcgtagtggtctcccctaaggctgaggcggcggcgggcgcgcggcggcggcgggcgtgcgaggctgttgtgctcccggctctcgtgtttcccctcctgagcgggtggaggaggcccaagcggt

SEQ ID NO: 12701 - DNA, 387 bp, Homo sapiens
  source 1..387: mol_type = other DNA
cttgttttatcatgtaattttcagaaaatatgtgatccataaagattaaaagaaagttgtattaagtctggcagctttagtattaacttgaaataaaatatggcaagctttccacgtcctctgcatgttcccgcagcaaccatattaagctggaagaataaagtctattgaattacaatgtaaatgttgattcaaacgaattcagtggttgtttgcagctctggaatcccaggctgcagagttgtgaaaatctgtaatatatctgatgtcttttacacagcaggacacgaaaatgtttgttgtggataagagtgtctgtgggcattaaatgccttgtcccatccctgctttggagaaggaggaaaacgcagcttgagatctactcga

SEQ ID NO: 12702 - DNA, 383 bp, Homo sapiens
  source 1..383: mol_type = other DNA
tgcatgttcccgcagcaaccatattaagctggaagaataaagtctattgaattacaatgtaaatgttgattcaaacgaattcagtggttgtttgcagctctggaatcccaggctgcagagttgtgaaaatctgtaatatatctgatgtcttttacacagcaggacacgaaaatgtttgttgtggataagagtgtctgtgggcattaaatgccttgtcccatccctgctttggagaaggaggaaaacgcagcttgagatctactcgaagaactgaccctcagctctaggctgccgccgagctgcaagcatgccgccgtcggagaagggccttacctgagcgcgcctctgccaatggcagctcacctgagggagctccccagcca

SEQ ID NO: 12703 - DNA, 448 bp, Homo sapiens
  source 1..448: mol_type = other DNA
gatgttagaaaacatgtgagataacccccgtttactcaatgttgagtcttttaaagtaacactgttacagtacaggaatcctgaatttatgttatctgacattagactgtcttacctgtctctgagtcataagccactgtcatgaacagatggtctcagtatatccatgtagactctgatatagtttttaaaatacattttctatttgcttgcaaataagtttaattggctaagaaaactactccagaatttttcagtttctttccttttgttatagagaaagagagagagaggggtggcatatattttcctgcaagtaactgtagctatggtgtgtgcgtacacacatactctctctaataatttcagagccggtctgtggttgctacgacaaccaatgatctcttggctgtgacagggactttgacgtcagctagaggcagagtct

SEQ ID NO: 12704 - DNA, 477 bp, Homo sapiens
  source 1..477: mol_type = other DNA
catgttaaaagattttgcaaacattacaacgaggaaggccaggtcacggtgcctttgcagccttgttatttttaagcagcaactttttaaattgatgaatttgagctggcagccagcaggtactcgataaatattgggtgaatgaattgacaagacattttgcttctcattatctccacacgaagaggggccccttagacagtttacagaaggctttgggtagacctgagaagcttttcaactgccttccaaggctcccttgaacttcactgcggtagagcagggaccccagcccccctcaaatcgaacgtgggacacgcccggaggctgcaccagggcaagcgggggagggggggggcgtccactgcacctgcaaatcccgcgccctgcaaccccgcggtgaagcccacgccggagaggctgcctgcggggctgcagtggggaggcgggcggagggaaggcgctgccgctgctgcc

SEQ ID NO: 12705 - DNA, 449 bp, Homo sapiens
  source 1..449: mol_type = other DNA
ctccattggcaggtgtcaatttagagcatgaatggcaataatgtttggttttttaattacatctggaaaatcttctttgaaaagtggagtgcagtggtgtgatctcggctcactgatcccggctctctcaagtagctgggattacaggcacatgccatcaccatgttcctgaatagttttttttttttaagtaaaataatttaaaaacgttaagaaaagaaaccggccagagaacacatcacgtggtctactgtgtaaaatgttagatgctgctcaaaaaatttagaggagttttccaagaagtcttgcccagaacttagggtaataaattggtggcaaataaagatatgcttgcttcaatttatttaaattccagactgatatgttgatcaagggggccaacttccgcctttctcatgatagagtgagttctcacgagatctgatcgt

SEQ ID NO: 12706 - DNA, 298 bp, Homo sapiens
  source 1..298: mol_type = other DNA
acgaaaccagccagcgaaccacgagggcgagctcgggaatctcgagccggcctgcaggacacctgccgcaccaagtggctagagccgaggccgcgcggactctgggatagctcctcaggagtgggcgcccgccagagcagggggcgtccctcagtggaaagccgcggggcttgcccctcggagccccgaggcgggggaggcggggccgggccggcgcagggagagcaggaccggcgcggcggggcggggccggccgagtccctagagctgggggcggggcggacccagcggaccagcg

SEQ ID NO: 12707 - DNA, 264 bp, Homo sapiens
  source 1..264: mol_type = other DNA
ttttatttttgttagaccaaactatttttttcaaaatatatttttttcaaaatatttgcctgacgaaaccagccagcgaaccacgagggcgagctcgggaatctcgagccggcctgcaggacacctgccgcaccaagtggctagagccgaggccgcgcggactctgggatagctcctcaggagtgggcgcccgccagagcagggggcgtccctcagtggaaagccgcggggcttgcccctcggagccccgaggcgggggaggcg

SEQ ID NO: 12708 - DNA, 434 bp, Homo sapiens
  source 1..434: mol_type = other DNA
ggaaaaaaaaaaaaaaaataataattttccgttctgattccactgatcataaattgaactcctttgtagaacaggtttatcatctttcatttaaaagtaataaaaaatcacgaatcatttatatcaggaaattagtggaaatttccacatttttggaaaggcccttacataatttccttacttttccaataaaaggctgtaaggatccgccaaataattagggctgccccaggggtggagacatcccacccccggcggggctgggctcgggagccgaacggaccaatcggcacgcgccttacagcgtcgtggcccgacaacgttgagcagcccaatcgagggggccttgccgcccgtttcccggagccccgcctctcgccgccgcgcccccgcccgccggttgcccctcccccgccgctccggagcggagcctg

SEQ ID NO: 12709 - DNA, 442 bp, Homo sapiens
  source 1..442: mol_type = other DNA
ttagtttttctaatttaaacaaagacggtcctttcccaaagcagaccgccttcttgcctggggagtagaaattatggtttaggagtcatgcagctggaagtctacaagattccacttgatagatcagctggcaccacccagatcaataaactggttcatcggatcttgtgcccctggaccgaactgattcgaatgttggcgagactgatttgagtacagtctaggcagcaggcaagtttgtggagaaaaacataacatcgaatattatttactatgtgccaaacactaagcacttcatacatattaattatatttttctgtagataaataaactaaggcagagcagctgctagaagcctgcgctgtgctgtgcactccgtgcgctgtgtgctccgtgcgctgtgtggtccgtgctcgctgtgtgctgtgcacgcggtgcgct

SEQ ID NO: 12710 - DNA, 226 bp, Homo sapiens
  source 1..226: mol_type = other DNA
acaatacctgagctctagttcatacagttccccaggacaggcccccgaggacgaggagaatgatgagaacattctttatattctacctgtctggagacagaatgaatagaaaggcgtgggcagctcctgccttcgccatggctggtctggagaccatgactgtgtacagttcacatggtaaccagaagactatgacatacttcaagctttaaagtaagtgaatcat

SEQ ID NO: 12711 - DNA, 694 bp, Homo sapiens
  source 1..694: mol_type = other DNA
tgaaacagctacaatttaaacttcagctacaccgagctcaaactcgattccgcagccgagtgtcggcccctggtccggtcctctgggcttccaggagtcctcacgccatcctctgggttgcccaggaggaaggatgggcggggcgggcaggcgctgcgggcgctgcagatggggagggcgagcccgcggcacggcgtgagcgggggggcgcgcgagcaggtgtcggctccgtgacagggtcccccatcccgcgccccgcttcctcatcagacgcgcaagaggatggcgcttccaatgcaaatctcttggctccggccccttggctggcagccgccgcgtcccccgcctgcctggcgtcccgcccactccgtggcgggctgagacgaggcccggcgcggaggggacggggcggagcgggcatccctccccaccccccacgtggggctggccctccgcagtgcctgggcgcgctgcagtcgccgcgcctccccggccgcggcaccgcctctctaggcaggggcgggggacgagtctggagttccccggggcagggcagagggaacacgctgccggggattgtgtacacgctcccgggcagtcgccgatcacgcgtggccccgcgagcccattggccggcgcccggcctcaggctccgcccccacccccgcccgcggcgcggggcaggctgagcggc

SEQ ID NO: 12712 - DNA, 574 bp, Homo sapiens
  source 1..574: mol_type = other DNA
ggttaattttctgtagatcaacaatattatttgaaaaccattaaaaggagttaaaacagcttcatggaaattatttggcccatagcattgcaaagcatgtagctatatgaactctgcttgaactggtccactaggattcccgtgcagtagtctggcttcagagttaggttttaaatcaaccacctgaattttgatggaataaactaagtatctggaaattttggaagttgcttacataatccttttctttcataatttagaatgtgtgtatgatgtagtacgcaaacactgtaaaaatgtcttaacaaaatattttaaggtcaatatcaaagattaatgggcccctaattgtgaaaaagtttttgtgacttttgagaaaggccaggtgaggtggctcacgcctgtaatgccaactacgccattgcacttgttgtaggtttaattataattaatgaattagcctaatggaaaatattttaaaacttaaaaagctaagtttgcttatcacataccctttaatgttgtgcagtatggaaaagggattcagttaattgatttgcttaaatgggctctt

SEQ ID NO: 12713 - DNA, 592 bp, Homo sapiens
  source 1..592: mol_type = other DNA
actcggggtctctgatcatgatcattagtgctgaagatgaaaataaattaaaagctatgtaggttttaaaaatgaagacataaaagccatattcctttaaaaaattttggccacgaggaactcgcttccctaaaggagtaccgcatcaccgagggcgggcgcctcagcccgggaggacactccccagggtcgaaggctcggcagcggcgccgacaggcttaccccaggcccactctaggccgcacagggttcgcgccacctccggcccaggacagctctcagacgctgccagcgtggagctcgacccggctcacaatgcgctgggccccgcagcgtgagcgcaggcgcccgagaggcggcgggggtcgggcggacggcgcgctccagccgagccgcctccctctctcggcccacacccgcgcggccgcccttcgcctgccggggagctgcgggtggctggagggcgggaagcgaccggccagtctgcacctgcatgacccggtcggggctgcaaccgggttccgccccgctcgcgcggctgcccggccagctgtgatgtcaccaggccacgccccctaatataaatactggc

SEQ ID NO: 12714 - DNA, 466 bp, Homo sapiens
  source 1..466: mol_type = other DNA
ctataatacatagtaataatgacgaccatttactggttgtttcctatgtaccaggcactgtgctaaccacaggcttcatttaatcctcacaatacctgtgtaaggtattattaccaccactttgcatgtgaacaggctgaaattcagattcaacacctggtatcttcttcatctgtagatctaaaaggattaaattagaacatctcaaaatttctactacttctaaaactctgtgttctaaattcagtaaatgctccatggaccatttatgaaattaagtctaagtggacttcagctagcagtatactagtctgacccgcagaaacctgcagtggcgctgacgtttacaagtggtggacaaaacgccacttgcaagcccctctcccaaggcccggcagtggcagcggctgcggctgcgcagtggcgcgggcgtaggcggagcagcgcgcgccgcggtcagctgact

SEQ ID NO: 12715 - DNA, 417 bp, Homo sapiens
  source 1..417: mol_type = other DNA
gtaaatatacattgaatgaatgaatgaatgaatatgatacttaataccatattctagcagagcttggtcattgaagagttattcttaagaagattttcatctttcccgggaatgtcaaggccaccctgggcttgaagggaccggccatgcctccaagccttgctgtaagtgacactgcctacgacaggcataggctctgactgttccttaagtcttagtggcaatatgtaacaggtggccagaaagcctggggtcccgtgtttcagttctttccaggatggatggcggccagacgggtccgagcgcctcgggagccccagccctcctccggctgcggggccgctgctcctgctcccgggccgtcacggagccctgagggagggggcgggcgagcggccttggggcggccagggcgct

SEQ ID NO: 12716 - DNA, 586 bp, Homo sapiens
  source 1..586: mol_type = other DNA
aatatgacattccttttctgcaacaggatgattactttgcatttttcaaagtacttctacaagttcatttgccttacaggttaggtgtaaacacttgtaacgaacttggcttaacgttaacattacaactattgtcataagattagggtaatttatctaatatctatgacagagttggtaccaaccgccagggctggaatcccactgctacctgagcatccagttggtgttaataatcgaactcaagtcacttgggcaattggctttacaaagcaaattggctccgtttaaggattcttgactcctgttcttttagagccagcgccagagctggacccggatagcgagaggggctcagccaaggtggaggtggcttcccggccccgcagccggacctcggcaccccgagcccgttcaccggggccgggtcctggcgggccgcggagtgaggccgggcggcgcagcgcaggcggtgcccgggcgcagggccagtcccgccgccgccgccgccgccgccgccgccgccgccgcgagcccggacctgcccgcccgacctggcggcgcagtctcgcgggatcgctcagct

SEQ ID NO: 12717 - DNA, 405 bp, Homo sapiens
  source 1..405: mol_type = other DNA
tcctggctaacacggtgaaaccccgtctctacgccggggccgggcggatcgatcgagacgatggcgggcgcctgtagtcccagctactcgggaggcttgcagtgagccgagatcgcgccactgcactcctgcctgcagtcccagctgctctggaggctgaggcatggcgccactgcactccagcctgggcgacagagcgagactctgttagccacgtgtctctaaggaatccccgacctgcggctcctgaccacgggccaccccgcccagaccctgcaggcgggctctccacgagggtctgcgcagccccgcgggggtcctgacaggccgagcgactgcagtaggagggggcgggcccggctctcggtccgcccccacgccgggctcggggtgggggctcggggc

SEQ ID NO: 12718 - DNA, 406 bp, Homo sapiens
  source 1..406: mol_type = other DNA
tcacaaagtacaatttataagtgcaggaaggataaattaatttcatttaaccattctttcatcaaacttcttaagggatggtaagagaaaactgatgcttttaaattcatctttgtctctggaaggttttaaaagcctgtttaactttttgaggaaattcttagaccgtaagcacaaagtttgccttagcgaactcccccggctttactccgcgaaagccgaggctacaacttggcggacataattgtccggatccggactccacgaggtgtccgctaggagtacgtgactcgcggagcggcggcctgctggctcaactggatcctgcgccgctccgtagttttgccggcaaacgttagcaaggggcggagactcgggagaggctgggacctcccctccatcgcgc

SEQ ID NO: 12719 - DNA, 531 bp, Homo sapiens
  source 1..531: mol_type = other DNA
accttaaagatacacatggccatcagtaatgtagaattttcttaacggtttatatgactaagtctaacgcctacaattaaattctaagttccctgaaggcaagaactttattagatacttctgtagcccatacagcagtctacaaatattaagagaatataaatcaagtgaactgaattgcctaatgctaaaataaacaacttctgtagatttaattctcaaggctgaacttaacttgtaataactttatttggaaactattttctgcaatttcagttatcaaagatcatctttgaaactctttccagactttagtgttgagtttaacttctaaaatgctttgttaatttcaacatactcaattcatctaatacacttaaaatagtatttcgattctagctattttttcacagaaacttgtaccattctacaattcgaatgatttgcacgtgtgaggactaaaccttaaaatgtgacaatcccttctttattttacaaatcaggctttcccttgaggagcggggaagatcg

SEQ ID NO: 12720 - DNA, 485 bp, Homo sapiens
  source 1..485: mol_type = other DNA
gcgcattgatgcagcctgcggcggcctcggagcgcggcggagccagacgctgaccacgttcctctcctcggtcgcctccagctccgcgctgcccggcagccgggagccatgcgaccccagggccccgccgcctccccgcagcggctccgcggcctcctgctgctcctgctgctgcagctgcccgcgccgtcgagcgcctctgagatccccaaggggaagcaaaggcgcagctccggcaggtggtggacctgtccgagggagccgagccgggaccgccgcgctggtggaggggacctggccgcgcgccccacgggcagggcgtcagtctggctgtaggccccgaagtacagggagtcccccaataatttctggccccagggggaccccttggtgggaaaaaccctggcctcgctgatcacatggacctgggcctgggccagggcggtgcaacgtgtggtggccacgactatgagtcagacaaccac

SEQ ID NO: 12721 - DNA, 391 bp, Homo sapiens
  source 1..391: mol_type = other DNA
atgatttgcacgtgtgaggactaaaccttaaaatgtgacaatcccttctttattttacaaatcaggctttcccttgaggagcggggaagatcgcccaggtcgagcggatggacgtggcggaataccgtgctccacgccgacgacccggacgccgactggccctggcccgtcataggctcggggcccgtcgacaccacggcgcccagggccgcggaggtgggacgcgatgcagtggccgccaccgtggcgacggtcgccccttgtgagcgcgcgatggaggggaggtcccagcctctcccgagtctccgccccttgctaacgtttgccggcaaaactacggagcggcgcaggatccagttgagccagcaggccgccgctccgcgagtcacgt

SEQ ID NO: 12722 - DNA, 629 bp, Homo sapiens
  source 1..629: mol_type = other DNA
cgcgctcgggaggggcggctgccgcccgcggggcgcccgcggtgcccgggcctgggcagcgaggaggtgacgccgcccccgcgggatgagcccgggaggcggaggggctgctggcggcggcactgagcggcggcggcgcagggcgcgcgggccttccgcgccgactccatcgacccaaggggcggcggcggtggcggcggctgagcgaccctgggccgggcgcgtgatgaggaggggccggcgccagaccccgctgcacgtcggagctcgcctggatccgggcgttggcagccgaagggccctggccccgggactctccgccgctagccggggtgggtggggttggggtctccgcgggggtttccggccccgcggcccgctcccgggtgtgcctggaggagttcagccggcgggacggatgagttgttctctcccgcctgggtgcccctcgggccggcagtactccgcctccgggcgctcgaagcgagttccccgggggcttgttcgcaggcaccccttcccctccgaggcggcgcgcgcgctcccggccctgaccgcggccggacacactcgcgccccggtccgcctgtccctcccctccccctgcttttcttgggggaggggggctg

SEQ ID NO: 12723 - DNA, 623 bp, Homo sapiens
  source 1..623: mol_type = other DNA
gctattaaaagtgagttaatatttaaaatttggtttacacactagttttagagatctggtatagaataacctaaatgtttatcagaaacagaattattcactgagacattttcttctacaaaatgctatgaccaccattattgaaataaattagtaataattgataaagttaggtgaattttaattgaaaagctataatgtttttctaaaattatgtgaataaccatgtagtcactatgtatatagcctttagaaaggaccagattcaacattatccacttttctttaaaaataaataaatggagaaattttaaaataagaaattaaaacacctaagtacatgttttccaaatgtacttctcttagaaatatggcattttaaatgcagatgataaatgctctattgttgatcatatttttattgcttcatgacatcaaaagaagaatataccacttatttttagagtgttctgaagttggggaaatgcataatttctcttactcttacccagtagtagcattttattgctggcagccagatgtgctaaaacctgagcctattcattgcatgtttttaataggcttagagaaatatgagtagaggaaagcagctcagcttcaca

SEQ ID NO: 12724 - DNA, 475 bp, Homo sapiens
  source 1..475: mol_type = other DNA
agcccactgaagagtggtgcccaccccaccatggctgcttctggatgactcaatcagacactcaaatgaaaacatctcatttcaacagctctcttcatctggactaagtcagccccttacacaaaggactcatgagggacatgcagtctgtgtgcccagcctgagctttttttttttaagataaaggtaacaaaaagtaaagaataattttgtagaaagattttgagactttcctaactctccgaaattgacttggaagctaaatttctaagatggggggtcatgagtgcagaggcggctcctacgaaccatcggccgtccaagctttcacaactcactctcttgtgtttgaaaatatctgatttcattattttctataattaatttctagaacatctattctgaggaaaatgctagaaagaaatatgctattcatttgtatcagcattactattaaatgggtcactttatcaag

SEQ ID NO: 12725 - DNA, 414 bp, Homo sapiens
  source 1..414: mol_type = other DNA
atcccttctcaaagatagaatgttctgttttatatattgaaatatgaatgttacaaagccatgatcatatttgcttctcaaagcaaatatggtattaatcaattttatatatgatgaagatctctaaactggttttgtaaagctgggagtagaaatttaaatctttagagttacagtaccggttattttccaagaaacacttgctggtatctttcaaatacattaaatattttgattatctgtcttttggtacaaacacacccccaaccaagggaaagggtctaatcttatgatgaaaaacgcaggttcctttctcttaaaatgcgcagaacacttggggtctgagtgtgcaaggaccagctccagcccagccttcccggggggaggagccgcatatgcggccaggtcataaac

SEQ ID NO: 12726 - DNA, 136 bp, Homo sapiens
  source 1..136: mol_type = other DNA
tacttgcccttccatgagaggaaaagtaagaatagcatcttcccatttcatgctttttactcatgtgatcaatacatccaaaagagtcacctttgtgtgacctcggcaagccgcaggctgagggtcaagcttatac

SEQ ID NO: 12727 - DNA, 546 bp, Homo sapiens
  source 1..546: mol_type = other DNA
cctggcccagctgcacccgagtgatccacgccagactggaggggctctgcacaagccttgcccgactcattccgcacactggaccgaccagctgccaggttggccgcacccactcgctcgcaactcccaagttgtcagccgctgggccagagcccagccctcggacagcgacagcccctgggcatccagcagccggcgttcgcacgctggattgccgatcgcacggatgggcgcgcgctcagtctggcgagtggcggcgccggctagcccgagcggcgcgaggccggagtccggcgtccgccaccctctcgtctcgcgctggcgcgcgagctccttgcccttgcccccaggagggccgccccgcgtggggctctcgcaccgcccggggtgggagcaggcgagccggagggaggagggaggagggagcgcgcgcgggcggcggcggcccctcccttccccctcccgcagccgcggagagcgcagggagcagccggtggctcggcggcggcggcggcggcggcggcggcgtcggcgtcgtctacctcc

SEQ ID NO: 12728 - DNA, 446 bp, Homo sapiens
  source 1..446: mol_type = other DNA
cctggcccagctgcacccgagtgatccacgccagactggaggggctctgcacaagccttgcccgactcattccgcacactggaccgaccagctgccaggttggccgcacccactcgctcgcaactcccaagttgtcagccgctgggccagagcccagccctcggacagcgacagcccctgggcatccagcagccggcgttcgcacgctggattgccgatcgcacggatgggcgcgcgctcagtctggcgagtggcggcgccggctagcccgagcggcgcgaggccggagtccggcgtccgccaccctctcgtctcgcgctggcgcgcgagctccttgcccttgcccccaggagggccgccccgcgtggggctctcgcaccgcccggggtgggagcaggcgagccggagggaggagggaggagggagcgcgcgcgggcggcggcggc

SEQ ID NO: 12729 - DNA, 430 bp, Homo sapiens
  source 1..430: mol_type = other DNA
ggatccgactcagcacctcatccacgtgggcccagagcgggacggtccgtgtccgcagcggtctcctgggagccttccgaggactttgccagtggcctaaccttcctgccaagaagctgggaggatttctttgtgccccgctggcagctgcccagcgttgacgcggtgacaactgcagaaggtggccctcgcacttcgcccgaccaaggccggggccgtagtttgcatccggactggatttggatgcagccaatcctcctttggctgatggaataccggcgcgcccctccctcgcgcgcctcgccgcctcccgccgcagaacaggagctgcgcggcccggagcggcggcggcggcgccggagtatccgtcccgcacgccggggcgaggggcgagcgagcgcgctcctcctcccgcgccctgcgcccccgc

SEQ ID NO: 12730 - DNA, 545 bp, Homo sapiens
  source 1..545: mol_type = other DNA
ctgggatacatcccgaactgcattccagttcaggtctgggaatttcgttttgcaatttaaaaccgggttcttgcaaagaattctgaattttagaaatctgaagaacatttttttcctccgtaaatctgaacaaatttaagcttttttatttaacaaaactttcctttctctagggagagcctagtattagagctgcccgacaggcgggaccccgaaatcggggcagctctggcttagtccaggctattcgagtgggcgcctgaactggaggcgccgtctccaccgggatggggatcctagtgcaggcagacgcctggcaggactcggcgagctggggtccccaccgcggtagccagagccccgaaccccagccagaggggccgcgcgcggggaggggtgcgcgctaagccagcgtggcttcctgcctccccccgcccccggcgtggtagcctccggctcgcggcgccccacggctctccacgcgggcaggtccggaaactgtctgcaagcgctcagcggcgccggcagcagcggggctagagctg

SEQ ID NO: 12731 - DNA, 450 bp, Homo sapiens
  source 1..450: mol_type = other DNA
gtagtatggccaaaagcttaagcctgattttagttcatcaacttcctaagtaattcccccaatatattaatatattggtgattccagggtttaatttatttaatgcctgggaaaactaaaagcaggaagcaaaatttctgtcaaaagttactgttctttcccaatggcacaacgaacttaaaatgttactattcatgttttaattatgattgcagtcttacgttgaaggtatctccgaaagttttttttgacagtggcgggaggctgggtgtccaccctttcccctgcagtcctgaaagtccggtccgagcgcggacggggcggggaggggctgggcgggccaggccagctccattggcgccaggcgggtgggctcattttgcatttagaagccacaagaaaaacttttcgaaaacttttgtccgtcccgtccccgggcagagagaggga

SEQ ID NO: 12732 - DNA, 540 bp, Homo sapiens
  source 1..540: mol_type = other DNA
tgctttaccttaaaatggaagaaattttcaaatgtatcatcatgatattgatattctgattaaaactgaattctagatagttttagtttatatgtatttgtagtttatatttaatctttaaaaaattcacttctttgcttatattcaaaatatcactggttagtgaagtatatgtaggcatagtgaatataactaccttttcaagaaattagatgttagaaaatgcaatttaaaaacagactgtgtaacaggcaggtttttacacagtcattctgtaaaattttagggtggaagagtccacacttattgcttaaaaaatgttcacataaaagatacaatcttatagtactgttagctgtaagtaaggaacataattttatgactatatgaacaaataacaaaatgttcattcaaatcattcatgtgctttaagagactctggaaattatatttactttggaaatataggctctgtgtctttaaactttttgcacatttgggtacagtgcaaccaaacttaagctatggatactacttagt

SEQ ID NO: 12733 - DNA, 681 bp, Homo sapiens
  source 1..681: mol_type = other DNA
ttatcttttagaaagatgggctgaaatatttatcaaaagaatgatatgctctctagggtttatttcaatagaatctgaaatagaatgtagtatgctatactccctacttttgctacatttgtaactttgcccaatatagagttttaaaggatataattagtaaatatataagctcttcaaaagctttaaaatatctgaaatcttttaaaacactttaataaataccattgccttcatagtacatgttgtattcaacaaatcaaagattgattttggaatgaaaatttaggctcagaaaattaaaattagaaaagaagctaaaattagtaaagagatcttaaatattatatattctttcttggcaacaattacttgtacatgatcagtattgaacaacaacaaaaaagtttacatattttctgaaaagttttgagtctagttagagatacagttccaagtaacctaggatctctcaattgagtttctgtgtaaatgagacataatatgaactctctcagagacattctttctgttctattgagggcctgtttcatccaaaaaaaaaaaataaaaccctatagtttgagctttctctcaaatgtaagagaaaagagactcattctaacttagaatttaggtgtgtgtcacaatccaaattcttagagctctgtttgtaaaaac

SEQ ID NO: 12734 - DNA, 459 bp, Homo sapiens
  source 1..459: mol_type = other DNA
tcccgagtagctgggactacaggcgcgtctaatttctaaaatccaatgtgtatacaggttttaaaaacattttttaatgattggaccaaaattttgactccctttttgtattttaatatgagttatctatacaatagttcaaagttgggactagaaagtaattagtctttgacaattttctcatttggaaaatgaagattggatgattctaaggtctatttctaatggagttgaatgaaaaaggaattacacagagatggatttgaatctcatattttattagctgctggaagttagattttattttacttagctataaagtggaactaattaggaaacaatcctataatgttcccaggataatatgtatgcacctataaatggtaggaccatattaaggtcagacaagagtgagcatatcactgttccttaccagcagagatgtcatgatttataaaa

SEQ ID NO: 12735 - DNA, 585 bp, Homo sapiens
  source 1..585: mol_type = other DNA
ctgaagcttgaatgatacaggaccagttatcaaaaatcacaagaattcattgtgactcatattttgagcattttctaatatccttaaaatgattaaaaatattttcaacagtttcaaaataagagatttttttctttcttaatgtcattgtacataaactatactataactatcgtgaaatttagtcaatgttaacgttttgaaaaccaaagtgaataaaaagtagtttctacgtgttgtttgttttagtgaaagttatactataacttctttagagtgtagctatttgggtgtaagttagctaccttggatataagatacacccaagcaaacattactctgacaatatctggtttacttattttttatttgacatgttatatgtgtaactcctattctgaagaatacatattcttaagtctctcacttaaaaatatttttacagtgaaatgtaaaatttctcatcttaaataaattcaggaaccaattgaattataagggtttttttgtataacattttttcaaatctaagttttattttcacttccttgtagtttattagaacataaaatcttagaaaaggtc

SEQ ID NO: 12736 - DNA, 489 bp, Homo sapiens
  source 1..489: mol_type = other DNA
cttgttctcacatagtatgtctgtgcagccacaggggtttttatgtggaaccagattaggatataccacaggaattaataattctcaagccactagttgctcaatttatatacacaaagaaccctataccaaaaggtacttagataaccctctttaatatgcacatactatattgctttgtgcaacatattgctttgagcaacaaatgatgctaattttcttgctaatttcttcaactcctaaaagtctaagtgaatacaatgaaagaataccatctgtaaaaactgttttttaacatatttttcctcagagtcaagaatacatgttttttaaagacatttaataatgatatgggtttatcattctctatcaaaaataattccattggacattatgccaattttcttcttagggtccctcgactaaatagtaactttaaaaacatactgctagtttgctatattttagtaggtcagcatgaaggctgcc

SEQ ID NO: 12737 - DNA, 506 bp, Homo sapiens
  source 1..506: mol_type = other DNA
tttaagtcatcaaatttctgaacatcttctgaaactgaaggaaaagggaatttaaatagtataaaatgctatcataataatatggtaactgcggatatctatagacattcatactgccacggttagtggcataaattcttatcttttgcttaaggaataaatacattttttcctacagtagtgaatgcaggacagatttcaccagaatgaaattggatggcatcaagtctatttaatgtaacactttgttaaacagaatattttccaaagtttaattcaggagactttgaaaaatactttagtgggaagtgaactttttaaaattatttttaaagaatcaaggccccaacttcgtttttgttttattggagaagaaacaaagtagttgtgggtccttcagtcagatctccctgcagaaaagaggaccccttgggggtgagcagccgggttctgggacccagcaaggtccccaggaactccgaggcagcctagacttagatgccttg

SEQ ID NO: 12738 - DNA, 206 bp, Homo sapiens
  source 1..206: mol_type = other DNA
gactgcatatccctggggctcttcaaaatcagagaaacgcacacactaagtcccttcctatatctgaaatttgtttcacttattaatgattagcgtagcaatcaattctgagctttcaatagttattaacggaatagactgcaagccactgactggtaatcgaaaagggtgggacaacccgcgcgcatgcgtcgctaccaataaag

SEQ ID NO: 12739 - DNA, 284 bp, Homo sapiens
  source 1..284: mol_type = other DNA
ggtgggaaaggaggctcccccatccacccaggaaggtctccttataagtacttacatactcgcgacagtttgaaacctagtgtggcatgcgtctctcaaaactttggagtttatccgtttagtcgattaaaaccagggtatcctgagattgcgggagcgccacgcaccgcccacctagagcccctccgcagagccgcgtgcacgtgcgtggcggataccgccccctctgctctcttggccaatgagaaaaagtccaccgcccggtggcgggtcacgtgactgcg

SEQ ID NO: 12740 - DNA, 600 bp, Homo sapiens
  source 1..600: mol_type = other DNA
aactcagaagattcaacctgctaagtattagttgtgtgacattgggcaaattattctactttgtaactcagttcttctgttaaaatgaggatttttttttacagtactttaacaataaattgtgaccattaaatgagataactggcaataataagcgctatttatgttaactgttattttgagtcattattattcatacattcaacgaataccactgtgctaagatgtgtgagacacgcaatgactttcgaatctgactcctggatgcaatttcagaagctgctgttggtaatgtggatgaggcatgtttccacatctgtaaaatgaggattaataaaatctacttggaagatttgttttgactattaaaaagacaaaatatgcaaattatctggcacatttgaagtcgaatatactttccttttgtggccacacctgaggctagggaactccactctaggcttagaaaacagtgctgtcttcatgcagggaccgcccctggcctacaactcccgggatgctccgggagcgccccgccccgccccaccccgcccgccgtggcgggcgctgcccacccggcggagccgagcggcgtgcaga

SEQ ID NO: 12741 - DNA, 417 bp, Homo sapiens
  source 1..417: mol_type = other DNA
aacggaaaattcagactgttttttttttcttttttgagaggaacagggaaaaggttgcttttgtaattggaggctaacattttcaaaataactacaacaagtcacttaattcttaaaggcctcagttttctcactggtaaaacaaggttggccaactccggtagcacgccctgtcggagagccctacaggcccgcgagcgcgggtcggggacgctaacgaaaggagcctgggctgggcccgggtcccggccctgaggaccacgggcatagctcaccaccatcaccgcgggcgagggccgtcccttcccagcgacgaaatgaccggggcggggtctcgccaccctgcctataccagcgcgggccgcctcctggttgctagggcctctggggcagttcgcaccgcagtgttttctggga

SEQ ID NO: 12742 - DNA, 392 bp, Homo sapiens
  source 1..392: mol_type = other DNA
tgacttcagacatagctccttgttttgggtcccaattgtaactaagctttttcccagtggaaaattgccaagggagtacattttaaatgtagtcaccacaaaaaaatgataagtatgtgaggtgatgtctatgtcacttagcttgatttaattatcccaaaatgtgtacatgtataaaaacacattgtaccctataaatatatgcaattattgtcattcaaaaaatttaaaaacaaagttgtttttattatctttcttaaaagtgcaaaatgaaagaaaaagaaatttgcatattcagaaggcattaatcctataatatatacatataattctcaaagcataatgtgtgttgagacactcaaacagactcatccactgagtgtcaggttctc

SEQ ID NO: 12743 - DNA, 373 bp, Homo sapiens
  source 1..373: mol_type = other DNA
gtagtttctcttctaagaaacggctctaggaggtgtggtttctccagccctcagacctcagacctcagaggctgggctgctgacggagggggcccagggtcccgttaccgcggctcccaccgggttctgggatgggcatcattccccagaagcagcggcctccgtgagtccacgcaagccgccacggtggcttcgtacgaagggcgccgccgcttcccacctgcgtcaagctccagctggtaacaaggcagcggctcaagaagcggcgtggttcccatcccagaaaacactgcggtgcgaactgccccagaggccctagcaaccaggaggcggcccgcgctggtataggcagggtggcgagaccccgccccgg

SEQ ID NO: 12744 - DNA, 456 bp, Homo sapiens
  source 1..456: mol_type = other DNA
gctgcactccagcctggattaattaatcaaaaaaaataaaattactagataaggctctaagtgttttgctttacacaattaaacctaagtgtgtggatgtgtgtgtttacacacacactgctggtgggaacttacaaagtcctcaattgtcagtaggttttgaaagcgttaaagccacttaaaagtttaaattaaataaaacttggcgtaaactaacgttttcgaaaattcagactgttttttttttcttttttgagaggaacagggaaaaggttgcttttgtaattggaggctaacattttcaaaataactacaacaagtcacttaattcttaaaggcctcagttttctcactggtaaaacaaggttggccaactccggtagcacgccctgtcggagagccctacaggcccgcgagcgcgggtcggggacgctaacgaaaggagcctgggctggg

SEQ ID NO: 12745 - DNA, 312 bp, Homo sapiens
  source 1..312: mol_type = other DNA
gtgcaggggtgtgatctcagctcactgcaaccgcatcccaagtagctaggctgtgcccagccccttctcaccttttaaagagtagggagaggtaataaactctgctatctggcatcccagaaacaggtcagcaatctcatatggtcttataggcccaccttcaatgaccattgattcctttcgccaaaaggagtaaggcccttccacctatggggacagccttggggtgtgtgtgtgtgtccgcgcgcgcatgcaaatccccagcaggggcggggcaggccacgggagggcggcccagttccccagctctcc

SEQ ID NO: 12746 - DNA, 232 bp, Homo sapiens
  source 1..232: mol_type = other DNA
ttggaaattaaattattaataaaaaaccttgttgagaacaatttgcataaactgattttgtgtggagcatagtattctgagggtcccctgctcacggtgaagtgccacttcttcatttctagttcaacacaattcaattaaactgtctagccacatccaaatcttcctgagacagagggagatccctcagcctctcaacagccgagagccgccttcaaggagggctgggggc

SEQ ID NO: 12747 - DNA, 295 bp, Homo sapiens
  source 1..295: mol_type = other DNA
ctgtctagccacatccaaatcttcctgagacagagggagatccctcagcctctcaacagccgagagccgccttcaaggagggctgggggcgcggccatggcagctgcgcagaggcaacgcaggctgctacggagcgcgcgcccggctttgaatgagcggggcgcgagctcagacaggcagcgcgcgtgagcgcgccttgtgtgcgcgcgcggcccgcggcagctcggagcctccgccgggcgggcggggagggggaggtgcctgggaggggctttccacagctgctctgggggtc

SEQ ID NO: 12748 - DNA, 570 bp, Homo sapiens
  source 1..570: mol_type = other DNA
taacatctagcatagtatattttcttttatttaaaatgcaaatctctgcttttcaattggaatgctatacaatttgcatttaatgagattataatggacttactagaggtactcctaggtattggcatttctttaatagattcccagatcaatttagctatgtgactttggtcaagttatttgacctctcttaattcaatttcctcatctataaaatggatataaggaaatatattcatctgcaagttaaaaatatttaaagtattttaaatagtattatgttcatgtggttcaaactttaaaaggtacacagagatttaatatattctattttatacttttttattttttgaattgtagatttttgtattaatagatttaggtaaaattattttcaaaaactcagaatgaagggttttatccttacaaccattgaaaactcgaaaacctggtttttgacttgttaatatgatttaaattataattttaaaatttactgtgttatagtttctagagaaaggtaaaaaatatcttagatttttcttagtgcatattgaaatcaatttaatg

SEQ ID NO: 12749 - DNA, 395 bp, Homo sapiens
  source 1..395: mol_type = other DNA
cgcatgcaatggcatccgcatgtctgtactactaaaggcactcaggctgaaagtgtgctggagctacttcctggagccgggcagctgcagggcagcgctggggaaaagactgttctctggctacatagcagcctggcttctccaagcgaaggcctttcacccagaggctgtgtctctgcagctctcgggcgaacccctgggctggagatgccgctagccgcagcctgcctacaccgggccgagctccttggagagggagggacatcgggcgggtggggcgcgcccaggcgcggtcgagttgccccgaaccgcaggtgagggagggcgtgggaggcgccccaggagctgcctctagcgagtgcggcaccacgtgtccggccggggcggggtcgggc

SEQ ID NO: 12750 - DNA, 290 bp, Homo sapiens
  source 1..290: mol_type = other DNA
acacctacttgtccaacaatgtgtccccattttgtttttttgacaaatatttggttctgttattcactgagagaatactctgactgaacacttctgagcccagtgaatgttcaagcatggcctgcctcagggatggagaccatcctggccaaccaaggttgcagtgacctgagatcgcaccacactgcactccagcctggcgacagagtgagactctgtagggttgatcaatcacacatgctcttatgagtttctttccttcgtgacgtgttgtgaagcacgtcagctgc

SEQ ID NO: 12751 - DNA, 331 bp, Homo sapiens
  source 1..331: mol_type = other DNA
tgcggcgccggttgtgcgcagaccagatgtgccgggagctgcaggtgagtcacttgctcttccaacaggttggctggagcgcagcttccaggggccccgtgggtacacttctagtcccgagggaggccgtcgttactagagctccgctgtgctcagaacacctgctctccggagtgacactcctagttcttagtgacccactgggtcttcaataaaaagtcatcattaattattcttgtttctcaaccagtgcggccccctagcgaacaccccgggggacgggcaggagtgagtctcgccatcccccgggaatcgcaattgcgaagttggg

SEQ ID NO: 12752 - DNA, 435 bp, Homo sapiens
  source 1..435: mol_type = other DNA
tttgcaaatcactacctcatagtgttgtcattatgattaaataaggttggcataaagtaagcacccattaaatgttgggtgttttcattaaagcttgaaatttcactgaggaaggcactgagagcttattctactacatcaggctgcctgcttttatatatactaatacgtgtgtgtgtgtatgctttctaatatatacttatatatgtaagtgtatccataatatatgctttccaatatgtattctatatatacatactagaaaacaaatgattctgctcaagtttagcacactgatccagttggaaattttgctctggagcatttacagcagtaattctgcaagtgtattcaggatgaatgtaatattctgctggtgctggaagcactgggcgagtggctctcagagcgggcggacacgcttagcgtaagcgc

SEQ ID NO: 12753 - DNA, 535 bp, Homo sapiens
  source 1..535: mol_type = other DNA
ttgtctattcttcaacatcgcaagtaccttgaatagtgccagtatatagtgaatgctcagtaaacttttgttgaaagagtgatgaaaatactccttcattagaaacttgtaaaatcacactgatttatcaacaaaaaataatgtttctagaattttgtttatgaatttgcaaatcactacctcatagtgttgtcattatgattaaataaggttggcataaagtaagcacccattaaatgttgggtgttttcattaaagcttgaaatttcactgaggaaggcactgagagcttattctactacatcaggctgcctgcttttatatatactaatacgtgtgtgtgtgtatgctttctaatatatacttatatatgtaagtgtatccataatatatgctttccaatatgtattctatatatacatactagaaaacaaatgattctgctcaagtttagcacactgatccagttggaaattttgctctggagcatttacagcagtaattctgcaagtgtattcaggatgaatgtaatatt

SEQ ID NO: 12754 - DNA, 728 bp, Homo sapiens
  source 1..728: mol_type = other DNA
tttctgtctatgttatattattattattaatctcataatggaacttttggagaagagaaaaatctatttaaagagctgtaatcattgtatcccatttaaatccaaacttatatgaccattttgaaaatcttccaaaaaagcaagcacaccattgctcctcgtttattttttagaaaatatattttaatattttttcatccaggtgctactttgaaagtattgaataaataacttttggcagataaatcattactcaacacaatctgctataataattttgggttgaaagcttatttttaggcttaatggtattgaaccccaatacagatctgaattgcagatgtttgctaaaattagagtttctattgtttgtaaaaataaatatttgcaagttttataaataccgtctaacacgtgtaccttctttggattaaaaatatagctcaaatgaactaaaactcagctttcagatagctggcacataagacttgcacttatgtcacttttgacttatcagcatctccaaaaattgataagaaatagataaatcactttcagatattattttacaactggaatacttcatgtgtatactgaaataatttattcttttctgtattttaaaaagaaaatgatgttaatgaaggtaaacttctttatttcagcatccaaaatatttttaataaggtctctcgcgcgctcgaacttccggccattggtttccgggg

SEQ ID NO: 12755 - DNA, 420 bp, Homo sapiens
  source 1..420: mol_type = other DNA
atccagatgtatagatacatacatttttcgttttgaaagaaacctcctatttacatatttggtaccgattcagaattaagacaaatgggtttgttctagataactaccacagataaagtagtttaagaaatccgttatcataaaaacccggtgaagggtttacacgtagttatttgagtatgtaaatacatgtgttcaaatacattcttttccgtgtgaaggcagaatttattgagaaaattctctgtgatttcctttttcaattaaatcacaggataataaatggatactgcaactacagtagttataacgacgtgggcatcgatggagcccgattcagaattgatctattcggggaaaaaaagcaagccccttaatttcaaatattgtgtggagttacataacgagcaggttgctgtg

SEQ ID NO: 12756 - DNA, 477 bp, Homo sapiens
  source 1..477: mol_type = other DNA
ctgatcaccaactaggtgtcctaagacttcagggcgggggagggggcgcacacgcacacacacaaaaggtaaaaggactttgagagttctttaaattgttgggaacgtcggtttggcggccacgcactgccccccaccccagcccgcacgttcacagacgggaggtgggggaaggcggggcgggaaggtagccgggtccctgcaccgcgccgctctcatttgcggcgctccgactcgggcgaagttctcgcgcagccggctcgccgcggccggggccggtcccggcgggcggcggcggcgggtgctcggagccgggcggggcggcggcggcggcgcggggacgcgcgctgtctcctatttcttttttttttttttaaacaaaaaacaacacccccttctctctctctctcttttttaataagggtgggggagggaaaggggggggaggcaggaaagacctttttctctcccccccgc

SEQ ID NO: 12757 - DNA, 547 bp, Homo sapiens
  source 1..547: mol_type = other DNA
ttttatgcattgttgatctttagaagtcaaaaaaaaaaaaaaaagctcaatccagtgaactttatgttgaggcaatttctcttaataatgagagtaaaagaatgtcacgcttaattcagagttccttatctgaaactgcatgtattaatcttgcagcatttgaataatgccatttaggatagagttcaagtgggactgatcaccaactaggtgtcctaagacttcagggcgggggagggggcgcacacgcacacacacaaaaggtaaaaggactttgagagttctttaaattgttgggaacgtcggtttggcggccacgcactgccccccaccccagcccgcacgttcacagacgggaggtgggggaaggcggggcgggaaggtagccgggtccctgcaccgcgccgctctcatttgcggcgctccgactcgggcgaagttctcgcgcagccggctcgccgcggccggggccggtcccggcgggcggcggcggcgggtgctcggagccgggcggggcggcggcggcggcgcggggacgcgcgctgtc

SEQ ID NO: 12758 - DNA, 728 bp, Homo sapiens
  source 1..728: mol_type = other DNA
tgtattttaataaatatttcatatacacttgaaatgagtggatattaacttttcattttgtagtgttaagaatttgtaacatgtaactatttctacttcagggcaggatatgccgtttattgatttaattatttcatcagttctgtatacatatttattgaataaacatttcaaaaataatcatttggaagtagaaaagaatgtttcaaattacttatctaaaatggcttcttacagttgtcatatattcttttaaggagtgtatttcagagtaatgtgtcataaatcagcgtgatttttagaaaatatattctgtatcatccttcaacaatacctcagataacttctttggtactttactcaggtaaatctctacatgaagctaatagcaaaaggctactatttctggtaattctgataaaagtttctatgtcttaatttctatataatctaagtggttacaagcagctatctaaaattacgtaaaacaagtaaataatgtcggacaaatcacttatcagttttctaatatgcataatgcgagttagtacagtacagaaataatgcgaactgtaatgctattaagtggtgaatgattaaacatttaaaaagtttactttcatcttagatcattccagagggaggcggggcccaattttggcttctccttccgtctccgcccctcgaacgccggcctgcgagtgacgtcacgcgagacttgtacttcc

SEQ ID NO: 12759 - DNA, 493 bp, Homo sapiens
  source 1..493: mol_type = other DNA
gaaattttctgattcattctcctcattaatcaaattgaccaagtaattagtatgtagtcttcctatgtcagagggagttgcccaagatcaaacggcttgggtttgtggcaaaaccaggagagttcttccaaaacactccatgcgagtgatttagggtggcaccctttgccctgtgtagcaagaacatttgaacttcagaacaaactacgtgcccttcgtgaacgtgcttaatttctttatgggattcacttgggaattataaacattcagggaatattaaggctcaatattatcactgactactactatactgccagtctttcagagaagctcttgctctaaaacgccccagactgcgcatgtgcgcccccgtgcggaatcgcgcaccccagcggtccgccctaagggaccgcccctttaagcgcgggcactgcggtggaagcgcgcgctgaggcccggaagacagaggcgtttgcttccgtggccaaaggcg

SEQ ID NO: 12760 - DNA, 560 bp, Homo sapiens
  source 1..560: mol_type = other DNA
actttgtagtataatttgaagtgaatgtcattgatattttgatagggattacattgaatcttagtatggaaattttaacaatattgattcttccaatccatgaacatggaatatatttccattttttctttcatcactggaaagatctctacaataaaaacaaaagtaaatttcttcgtggtacaagtaagtcttttaagataagaaattttaagattcctcccaagcaatactgaaaatttccaaaaggcagttattatctctgttatattaatcattataaccctctataatataggttgactgaataaatgaacctctatattttatggaattagtttgaggtttttatgttactttcatccctatagagccataaaatgaattttttggtgggggcacacaaattttttctttaaaacaagcactgcgcgtgcgctatcttacgcgcttgctcagttgtggactccacacctgcgccgctccttctggggggaggggggggcttgggctggctgcgcaggcgcacgtaaacatcctgccgatttgaaccgaggatg

SEQ ID NO: 12761 - DNA, 494 bp, Homo sapiens
  source 1..494: mol_type = other DNA
agagttttttttgtgagataaaaactgttatggcaaaaaaagatagaaaaagatgataaaacttacagtagcagatttgtttaagatttaattctctataacattaaaataattatagaatcctgtagtcccagctactagggaaggtcatgcactccagcctggctcgagtctcaaaaaaaaaaagtattattattattatagtaagtagattaaacatgtggtgcaccaggtttttaaaaatttttatttaaataaaaatcaaagtataaaatatgatgaaagagtgaatagcctttttaaggttttgggctacaaagaaaaatggactgaaagtgactttaaaaactgtagattctgtggttttggtcaaaaagggaatgcattttaaggactcataatcagacataaacattatatgaattaaggacaaaatgtcattatttgaaacaattcctaattcactagatattaattaaattagtgataatagt

SEQ ID NO: 12762 - DNA, 262 bp, Homo sapiens
  source 1..262: mol_type = other DNA
ggtgtatgccttactgaacctgtagaaggtacattctaactagccagggccaaggctctcccccttgactgcgggcaatacctggggaaaggtgaggggtctaattaagcctttgcattccccaaacttggcaaagtgcctggcaaaaaaaaattgtttttctttgggttgaaatattctaacctttggtcaccttctccttagaaagacttcctttcaatgcaagcagcatccttcctctgtcgctaatggaggttggcaa

SEQ ID NO: 12763 - DNA, 525 bp, Homo sapiens
  source 1..525: mol_type = other DNA
agagccggtagccactgctggctctggcagcctggattggtccattattagctagacacagagcactgattggtgcgtttacaaaccgatctagaggtgtgttttacaaaccttgagttagacacaaacagctggcttcacctagtggatcctgcactggcagcaggcggagctgcccgccagtctcgcgcgccctgcgccggcaatcctcagcccttgggcggtggacggaaccgggcgccgcggagcagggggcggcgctcgtcggggaggctctggcgtcgcaggagcccaccgcgggggttgggaggaggctcgggcatggcgggctgcagttccccagccctgcgccgcggggaggcagctgaggcctggcgagaattcgagcgcagtgccggcactgctggggaacccggcgcaccctccgcagctgctagcccgggtgctaagcccctcactgcccgggccggccggcggctccgagtgcggggcccgcggggcccacgcccacccggaactcgcgct

SEQ ID NO: 12764 - DNA, 524 bp, Homo sapiens
  source 1..524: mol_type = other DNA
aaagtgctgtcttcactgatgagagttcaatttctaccaatgttggcattactgacattttagaaagggagctttctgaagcatatatcttgatttgaaagactgaagatttctagtatcatacagggtaacttcatagcattttagaatggattaaataagatcaaaatccctcaagttaaaatgtagagagctatatttttattctgttgtggtcactacataatgttgcataattctcccaataaccctatgaattagatgtatacgtagttacagaaacacatgaagagattatttaactttacctgcaatcattgcaatttagaggctgcaaagttcccctcatcactttcagagccctcaggaatacatcagtcatttggaagctttgaaaatgttttttcacttcctgaaatgataggtctctttatcagaataagcaagagccccctggccctattagaaaatggcttttccaaaagtgagaagagcgactccattgtcactcacagaggtggcac

SEQ ID NO: 12765 - DNA, 319 bp, Homo sapiens
  source 1..319: mol_type = other DNA
aacaatcattcaataagtatttattgatacttgtgccaatcactaggtgttgagaataagtgaataaaatagtctgttttaaaatatcagacagtaggccgggcatcgagacctcccagcgtgagccgaggtcgcgccactgcactccagcctgggtgacagagtcattttttttgcttacagatactgggaaaactcaaaaagcttaggaatcttgttttctgaattcgaatactaggctcccaagaacatcgcccctctggctggagcgcaattggtgacagcccggctccgctcggagacagttcgccgagtgggc

SEQ ID NO: 12766 - DNA, 336 bp, Homo sapiens
  source 1..336: mol_type = other DNA
atcagacagtaggccgggcatcgagacctcccagcgtgagccgaggtcgcgccactgcactccagcctgggtgacagagtcattttttttgcttacagatactgggaaaactcaaaaagcttaggaatcttgttttctgaattcgaatactaggctcccaagaacatcgcccctctggctggagcgcaattggtgacagcccggctccgctcggagacagttcgccgagtgggctgttacgtcacagtgggcggaagtcgcggccgctgttttgaaatcgggccgcggggggtctctcaagctggttccaacgctgaggccccaacctgctgtctg

SEQ ID NO: 12767 - DNA, 467 bp, Homo sapiens
  source 1..467: mol_type = other DNA
ctagacaggtactttaaccaagtcctggcttcactggtgtaatcacccatcacgcaagaaataagacaaatttatacttcttacagggaacaagaaattgttttcgagaacagttgtcttggggacacaccgtgactaggtcaacatatccttggtctcaagctcaagatgaactttatctcgttcatttttgttaataaagtgatctctgaacctgagatagccatttctttctcctggggcagggaggagagggagcagcaagccagcctcgtggccttctcgtctctagcctacaaggaataggctgatttccccttggcaaggcgcctgaagcagctggcaggcaagcccctcttcctacttcaggactgcactcagaaaccaaaattctgcaggtgaatgtaggctcccacaatcatttcatcattcaggcacagcttgacctctaatgtgacatcatttct

SEQ ID NO: 12768 - DNA, 559 bp, Homo sapiens
  source 1..559: mol_type = other DNA
atagctgggacagttggcaattctaccagtcatatgtccttaagagatatctcctgcagccattagaaaatttattttttctggcctaagtagataatgaggatttaggatagccgtcttacacatgaagaattgcaacaattcctcttgattgtaataattcctgttttaatgcttagcagaagcgttccggcaggcagcccaggaggccagattctccagggcgcccggggccgcgcggcacggggcccctgccggtgcctccttccccggccgccgcgtttccgcaggcgcctctggtccccggcacggcgcaggccgagatccgggcctgggcgcgccgaggggccgcggggctcgcaccgggccgtcccgcgctccacctgcccggcagcccgccggcagcttgcaacccgggagccccggctccctgcgccccctacgcccccaacgccgcgccggcgcctcggcccgcggccgggggttatgaatgggcgcagcggaagcaccgccccccccggacgtgacgctcggccaatggcagcgcgggctgtgtaag

SEQ ID NO: 12769 - DNA, 514 bp, Homo sapiens
  source 1..514: mol_type = other DNA
gctaggacataggttcagaagttgaaggaacctgattctcaggcactgttaattattaggccctatcacaggctgtcaacaggctccaagtctaggcaaattgaaagcctcctatcctggaagccagacaggctttcatctcctaacaaccccttggggacgttgcctattggggtttaagtgcgaaggaacaagtttcaacctcaccctgggcagcgttctctggcccaggtggagaaccacacaggaggacagtggtcctgctctccctggcggtaccggcggcagaggcccacggacgagctcgcaggagctcggtccctactacggcctcctgggagatgtagtccagaccgcttcccgggaaggagagattgctcggcctggccagctgaagctggagttgctctccaggcggcactccgcggaggagtcggggtgctctccccagtccgagcgaagggagggaactacacttcccaggacgccctgcgcgcgccgagccgggagccgg

SEQ ID NO: 12770 - DNA, 632 bp, Homo sapiens
  source 1..632: mol_type = other DNA
ttctatgtaagattaaataatattttttctttattttgttaatgtggtgaataacattgactgattccaaaatattaacctttcattgttgagctgtttaatctttatagatcatatatcttttgtactacttcaaaagagaaattggccagaattttttttcttataatgttctgaagtttatgcgttgcataaaatgaatcggaaatcatttgctttctttttaaaatggaatatttttagtttagtttgaaaagatttttaattatggtttcaatatctttaacaatataaaattattctgatctatatcggataaacaatatttgtgacaaattatttattgtttatctgaaattcaaatttaactgcatttcctatatttaactggcagctgcatatatcattatatttcatatggaaatagtctcactagaggctcatcagtttaattagtctttacaaagaactaacttttggacatctaactgaatggataatatgatctttgattctcacatttttttctttttaaatgtatgaatataaatttctctttaagcatggtgatatggtttcactgtgtccccaccaaataatccccacatgccatgggagggaccatggggata

SEQ ID NO: 12771 - DNA, 505 bp, Homo sapiens
  source 1..505: mol_type = other DNA
ggtattttcaaaaactttcaaaaattattctaacattaccctaaaagtaaaataaaataagatttttggctcaaagtgcagtaatgttttgttttgttttttgagaaccgcagcaagaaaaattggtcatgcccaggaaagtcaagtggccataaaacacttctacagctaatatttgttgagagcatgttctgagccatgtgctatgcagaatacatttactatacaattctgaggcattattcttcttctggatttacaaaagaagaaagagaggcagctcagcacctgaccaagaagtaagcaggtagactgcagaatctgcctgatgttatatctcctttacactgtgacagttaagataaaattacttttgaaaaaaaatcctttgctcatgtcatatcatgaaacaatttaatccatatctgatatggtttggctgtgtgcccatcgaaatctcatcttgaattgtatgaatcatgggggcagtttccctcatactgtt

SEQ ID NO: 12772 - DNA, 430 bp, Homo sapiens
  source 1..430: mol_type = other DNA
ttacaagtcatcaagtctaacttctagaccagcttctgtcgatagcttgaggctagtggaaagacctcgaggaggctactccagagggaacagtgctccgcaaggttatccctgccccattagttagaaaaattcctactacatggtttatgtaaacttgaagatgaaggggccctgtaatttgaggtttcagaacccgaagtgaagggaaactcacagctttcgcccagcgagacacactccaactgcgtccggatcttggctacagcagctgcccagcgtgtgcccagccctcccaccgctggtcccggctgccaggaggctggccgctggcgggaaggggccgggaaacctcagagccccgcggagacagcagccgccttgttcctcagcccggtggctaaagcgttaaccctgcgctatatataac

SEQ ID NO: 12773 - DNA, 417 bp, Homo sapiens
  source 1..417: mol_type = other DNA
cttgaatctggtgaaaggcagcacactttacaagtcatcaagtctaacttctagaccagcttctgtcgatagcttgaggctagtggaaagacctcgaggaggctactccagagggaacagtgctccgcaaggttatccctgccccattagttagaaaaattcctactacatggtttatgtaaacttgaagatgaaggggccctgtaatttgaggtttcagaacccgaagtgaagggaaactcacagctttcgcccagcgagacacactccaactgcgtccggatcttggctacagcagctgcccagcgtgtgcccagccctcccaccgctggtcccggctgccaggaggctggccgctggcgggaaggggccgggaaacctcagagccccgcggagacagcagccgccttgttcctc

SEQ ID NO: 12774 - DNA, 459 bp, Homo sapiens
  source 1..459: mol_type = other DNA
atattgaagttgagaagtgaaataattttaacaataaaattttattaaaacattacacagttaagaagtgtgtgtgtgagagatcttttctcctaattattcaaaatttcacataatatttacattagaaaaatctatcatgtcatattctaattataatggttttaagaagactaacgtcttatattgacagaaggttaatgactaaaactttcaaacaatgaaagcggtttcctggcctctcctgggagggagcgagtggagccttctccccgccggtccgctgggaggttgggagaccaggtggcagcagcctccccaggcgccgggcacccgtcggctggcccagggactgtccccggaaggcttggaggcggcggctgggcgagcgctccggtgcgtctccgcagcccgtgcgctcatcacgttatatatagcgcagggttaacgctttagcca

SEQ ID NO: 12775 - DNA, 537 bp, Homo sapiens
  source 1..537: mol_type = other DNA
atactatttgtacaggttgtggaatagatagagatcctgatctctgtatctatatctgtatctgatctacatactctacatctaaatctgttgagctttttatgaaacataataccacaagcttttcccccttattttgtaaaagacttgctgaaaacaccattttaataaaattgtcatggaaggccttaatatttcctttaggccaaaggtaataaacattttaatattcctaatacttatcaccaagttaaagctggttgttctttccttttgaatttaatcacaagagaataatcttggtagcaatatcaccttatgaaaagctcaaagccatgcacggtgtttgcataacatgttgctatctgaaactcagcgtttaaatgcaatatagcctattaaatgacatgcacactggagttcagagataattttcaataaactgttgtcacttgaaaataaacagtctggacaatgtatggtccatttggttccaaatacttccccttcttccccaaagcaggaggttttatttaa

SEQ ID NO: 12776 - DNA, 551 bp, Homo sapiens
  source 1..551: mol_type = other DNA
atctttagtagacgagaaaattaagctcatctcctctgttgaacttacaaaatgttgacgttaaaatccccttaagccattaaaaggcaataagcaattagttttataccagtgaaatcaataattaaaagttctacttaaaaaaataaagagctctcatcatatcagctagcatttaaggagcttactgtgctcaactcttttcatgttatatgatctaatgtgagcattcacggacgaggacacctccggtgacctgcagggaccccgcgccagtggctgctgcagctgactcatccgactcagtcccatttaaatgagtcacagcatcaaactgagcacagtgggcgagggcgcgctgtgagcccgcggagcgctggcgctggccagcggagggtcggcggagctgggaggaccgcgcctggcggctgcaatagccgcacctgtgcacgtgatcgcgagcggctcgggcgccagggcggagcggcgctcacctgggcccacgtgacggggcggggctcgaggagccccacggccacgcctcctcccgc

SEQ ID NO: 12777 - DNA, 290 bp, Homo sapiens
  source 1..290: mol_type = other DNA
tggttgaactgaacccacttagaaaactgtcatcaaaagaattttgccatttggccaatagcatcttctgccaatcccctgcagatggccccaaactgcaggcatcccgtaaggggaccccacgcttgcagccctggttcttcgtcctgggagaaggcgaagcaacttccaggaggaaacgggcgtttccttcccacgcgctcgagcgagccctgggtcctggcctcggaactcccggcgccgcgccctgcactgcagccaaccggcttgtgcgcgtcccaggagcgcgc

SEQ ID NO: 12778 - DNA, 490 bp, Homo sapiens
  source 1..490: mol_type = other DNA
attgcttagtaaagaaactttagtacccacacacagtatttggtggctacatttaaccaagaaataactagggaaacaattcttgacatttcaattcttgctgccattgagatttccttcctaaattcaattgcgggaagaagttattttgtccgtcctcccagggcagaaggactttatgtattttgataaaagttacttctctaaacttgaaccacagcatgggaaaataatgttatcttttatgttagttacaattttgcgaaatttcatcatgagaaactttccaggaacgttattaggtttataaatgataaaactttccttgcttaaaaaaataaagacgccattgaatgactgcattgtaaaccttaaaagcttaaagctggatgaaatgcatttggtttctttttgacaaaccatgtttttgtgaggaaaggatagcttaagcctcttaggctcagaggtgatgtaatcaagctctgtagac

SEQ ID NO: 12779 - DNA, 276 bp, Homo sapiens
  source 1..276: mol_type = other DNA
ctggtgcctcaccctcccgagtggctgggaatacaggcgcacggccaggctgttacaggcgtgagccaccacgcctggcctgtacagctctgtcgcccaggctggagtgcagtggaacgatctcagctcgctgccccaagtagctgggattacaggcccaaagtgttgggatggccttgtaatctatattttaaaataaatactaaggcagcagtagactacctgcagtgtgtgtcactcctaaattttaacaattctttacgatcgccgttccac

SEQ ID NO: 12780 - DNA, 462 bp, Homo sapiens
  source 1..462: mol_type = other DNA
taataatgcttaataggcccaagtacaaattaaaaacacacgtttccagggcctgtttttattttttaactagaaagtgaagttctttcagttcccttaaaggtactttgaggtatatagcaggtatctgactggagctccctattttgcaggagctggggctgcacagggtggtaacgattctctagacttctcaagactgcctttaaaatcttgcagcaagtttgtatctgacctggaattagaaacagcttcagatccctactaagcagcttcggggtgggtaggggtctcacccatctatcatctgagtaaaataaatataagtggaaggctataaacattgggtatcaccactgtagtagtccctgtaatcaccggtaactcttcaaaaacttcacggaggtcagctggaccaactcatcaccgcagtgcagctaactggacggcccaccggaggcg

SEQ ID NO: 12781 - DNA, 540 bp, Homo sapiens
  source 1..540: mol_type = other DNA
gctctcagggacagccagggccctcaacgattccgctgttacaagcaattcatgtatgtgtgcatagtgaaaaccttttctcttaaaactcttaatactgaagttccccaaacctttggaaaatgtacaagtcacagatgctccaaataaacctctattgaacgagaccgactttaccaaagaagcgagatactccttcccagggcctcgctcccgagcatgggttatttgtggagtcagactctgttacctcctgactctgccatcacgagcaaggagcctgcttcctcattggcaaaagggaatggtacagggcccgccgtgggcgagggatccgtgtcccaacccgccgagtcgcagctctgcccctgcgagcttccgccgagaccgccccccgggaagccgcgtttcctcctgcagtcgcggtccggcgtggggcacggaggggctcgcgctcccagaagccggcaggccttcccgcgggcgggcccgcagcgcgctccgccccggaaacacgcccatggccgccttggcgcgctt

SEQ ID NO: 12782 - DNA, 473 bp, Homo sapiens
  source 1..473: mol_type = other DNA
tggtattttcgtatcattttacccaagaattgaaaaaaatgtctgctcagatcctttgatcacttcaagcaaggtctgatttgcactaactagtaggaggtcaccatctcttaagtgctctcagggacagccagggccctcaacgattccgctgttacaagcaattcatgtatgtgtgcatagtgaaaaccttttctcttaaaactcttaatactgaagttccccaaacctttggaaaatgtacaagtcacagatgctccaaataaacctctattgaacgagaccgactttaccaaagaagcgagatactccttcccagggcctcgctcccgagcatgggttatttgtggagtcagactctgttacctcctgactctgccatcacgagcaaggagcctgcttcctcattggcaaaagggaatggtacagggcccgccgtgggcgagggatccgtgtcccaacccgccgagtcg

SEQ ID NO: 12783 - DNA, 308 bp, Homo sapiens
  source 1..308: mol_type = other DNA
ctcctgacctcaggtgattgccttagacaagtaacttcccaatacctattttatgaattattgtaataattaaacgaggtaataccatacctgaagtattatttttattttgtaagggaggattaaacacatttaaaaggtcagctggggagagaagaatgtttaatttctccatgcccttcaatgacatgtataaccttcactgttgaccatttggccagattgttatgagctttgtggcctagccacgcccccaagctcaagtttctggggccggactagcccagcgcgtctgcctacccataggg

SEQ ID NO: 12784 - DNA, 368 bp, Homo sapiens
  source 1..368: mol_type = other DNA
ctcctgacctcaggtgattgccttagacaagtaacttcccaatacctattttatgaattattgtaataattaaacgaggtaataccatacctgaagtattatttttattttgtaagggaggattaaacacatttaaaaggtcagctggggagagaagaatgtttaatttctccatgcccttcaatgacatgtataaccttcactgttgaccatttggccagattgttatgagctttgtggcctagccacgcccccaagctcaagtttctggggccggactagcccagcgcgtctgcctacccatagggagcggagctgccccgaacaaagagggaagcgtctgtgagggcagactgcacccaaaccct

SEQ ID NO: 12785 - DNA, 411 bp, Homo sapiens
  source 1..411: mol_type = other DNA
gattgcgccaccgcactccagcctggaggtataatacctaatcaataattgaatgtttctcttgttttcgtacctactaaacaaaagagaaaatgctagctgggactaaaattcatgctcagaaattctcagcttttctcatttttaagtgggataataatctcatctcttattaaggctaatgaatgaatacatgtaaagctttagtacagtactagtaggtgctcctaaattaactataggtattgttatcattattaatactatattatgttaattacctaatgcacaagaacattacaatatgcattttagctgttctaattatcataagacaataataaaagtgtgatatagttaatccccacatttcaaaagaggggagtgagttttcatgagatctgacggctt

SEQ ID NO: 12786 - DNA, 369 bp, Homo sapiens
  source 1..369: mol_type = other DNA
tctttttttccaaagcaaggaagtattttcttcttctagagggcccacccagcaggtgagcgcgcgggacagagtctccggagagccagcgccgggccctggtggcctccgggggtgtgatattgcagagtccctcgtctttttgtaacctacagaaatgtccattcgagacctcccaaagagagcatggaagggaaagagcctggctcgctctcggcgcgccacatccggctgccgcgcgcacctggggggaccgccaggttcggggtaggcgagcgcgtgagcggcacggggctggcttctccacatctccggtagggcggggatgggggaggggcgttatgggcttaggcctgcctcccacctccc

SEQ ID NO: 12787 - DNA, 287 bp, Homo sapiens
  source 1..287: mol_type = other DNA
tgcaatcgcaaacaattaaaatcatttaaaattcatcatttgtttttaaaacttaggttatatgcatgctcctttccgtattatttgcatgtgaaacacaggagcagaaataataaatgcatatatttccaaacaggaaattccattactaaggcatagaaaatttattaagttaaacatttactacaagaacttctaaggctggaatcttgcatccacaaatttgtatttttgggagttattccctaaataactgcattatatgctcctttcatgacgaagacttt

SEQ ID NO: 12788 - DNA, 327 bp, Homo sapiens
  source 1..327: mol_type = other DNA
taatctaacttagtctctcaagatctgttcaagttttgatacagaaaatctaaagccaaaattcccctcaaaagaataattttaaagagaagggaaatttttgcaatcgcaaacaattaaaatcatttaaaattcatcatttgtttttaaaacttaggttatatgcatgctcctttccgtattatttgcatgtgaaacacaggagcagaaataataaatgcatatatttccaaacaggaaattccattactaaggcatagaaaatttattaagttaaacatttactacaagaacttctaaggctggaatcttgcatccacaaatttg

SEQ ID NO: 12789 - DNA, 173 bp, Homo sapiens
  source 1..173: mol_type = other DNA
aggcaggtcagatcctgttagagctcacctggggcgccctagagaactctactagcaggaccgtacgtccttgtagccacgccgggtcactcagccttactggcccggcgggaaagtcttcgtcatgaaaggagcatataatgcagttatttagggaataactcccaaaaata

SEQ ID NO: 12790 - DNA, 373 bp, Homo sapiens
  source 1..373: mol_type = other DNA
actaacttgcaaagcaacttttgaaatacaacctggggtctgaggcaggcatgacctgttgaaaaccccaggccagcagagacacctgtccagggctcgatagaaaacatttcttgcatttaaggacaggaggttttcattctagaagagcccagggccttggtcttcctccagggaacccgggagtgagggcaccgaggcgggacgcacgcacccggcgaaggtgcagtgtgggcgcccacggagtaggcgctcgggaagctgtccccgcggcgtcgtgcgctctggggacagagaccgccgaggctgcggcggctggaacaggtgagcggccgctgggttgtgggtccccgccaccggcgctgagctgctt

SEQ ID NO: 12791 - DNA, 242 bp, Homo sapiens
  source 1..242: mol_type = other DNA
cctccagaaaacaatttttattattttatttttaattgaccagattgagcaaaaatatacatataattacttttctatgttttccctctttatgagaaaggctttgatcccagccggctgttagctgaagggcaccatttggctttaaaacaaattacttcagctttctgcacacgttagcaatcaagttaattgaattcattggagtttagaacgtctggcccagtcctggcttcgttttt

SEQ ID NO: 12792 - DNA, 303 bp, Homo sapiens
  source 1..303: mol_type = other DNA
aatttccaaattaggttcttagccggaccaaatgaggagctggattaccgaatcctgtaagagcccctccaggtcgcctttcaggtacgcaagagactccttcccaggatagaatcttgttttatgggcggttaaaatgcaaacaaacagaaagttttgcataccctagggcagaacttacaaaaaccttttagctacttccttctccccggcctcggaaatggcgctgcccgggaagccccgacgcgacgcgcctgctaatctgcagggcgggcggggactccgcagagcctcccagcccca

SEQ ID NO: 12793 - DNA, 283 bp, Homo sapiens
  source 1..283: mol_type = other DNA
ttgtcctcgtcaactttgcagaaggcttgcaaaaagcaaccatttccttcaagatggctaaatataagtcctccagaaaacaatttttattattttatttttaattgaccagattgagcaaaaatatacatataattacttttctatgttttccctctttatgagaaaggctttgatcccagccggctgttagctgaagggcaccatttggctttaaaacaaattacttcagctttctgcacacgttagcaatcaagttaattgaattcattggagtttagaa

SEQ ID NO: 12794 - DNA, 625 bp, Homo sapiens
  source 1..625: mol_type = other DNA
gcctgctaatctgcagggcgggcggggactccgcagagcctcccagccccaaagtccccgcccgggagctgcccaagagtccacaggccagcccagggaatgcgcggcgcagactcactgtggcaggagcgcggcgcccggaatacaggttccgagccggcgggcgaagggcagcgcgatcccccgccacctttgctctaaggcgcctaggggaacctgggggctgccgcggtgagagctccgctcccactgggaacattggagtcccagttgcgaaagcgacccgcctgcgagcaccgcaggcgtgtgcatttcttcgaatctgagaattccagcgaactcgggctctaccagagtttaagtcgaaaaaagtttgaagatctttaaccagcctggcgcgggcggaaatcccggaaactgggagtaaaatgtcaacatagttttaaaatcgttattattattttcctgagcctgaagccgggccaaggcgcaggcagcgcccagggtgcgtggtggccccacccgcgcacagtcccacgcaaagggtcccggggcccgggtaccgccagagccgggcctgcaagcgcgcccttcggtcccacggtaacagtttgttgagctcatc

SEQ ID NO: 12795 - DNA, 602 bp, Homo sapiens
  source 1..602: mol_type = other DNA
aatgcgcggcgcagactcactgtggcaggagcgcggcgcccggaatacaggttccgagccggcgggcgaagggcagcgcgatcccccgccacctttgctctaaggcgcctaggggaacctgggggctgccgcggtgagagctccgctcccactgggaacattggagtcccagttgcgaaagcgacccgcctgcgagcaccgcaggcgtgtgcatttcttcgaatctgagaattccagcgaactcgggctctaccagagtttaagtcgaaaaaagtttgaagatctttaaccagcctggcgcgggcggaaatcccggaaactgggagtaaaatgtcaacatagttttaaaatcgttattattattttcctgagcctgaagccgggccaaggcgcaggcagcgcccagggtgcgtggtggccccacccgcgcacagtcccacgcaaagggtcccggggcccgggtaccgccagagccgggcctgcaagcgcgcccttcggtcccacggtaacagtttgttgagctcatcagtgacaccttgaacttttcatatttggccgcggccgccgcgcggggtcgtgcttaatattcaatgatctcgctc

SEQ ID NO: 12796 - DNA, 491 bp, Homo sapiens
  source 1..491: mol_type = other DNA
tcttcgaatctgagaattccagcgaactcgggctctaccagagtttaagtcgaaaaaagtttgaagatctttaaccagcctggcgcgggcggaaatcccggaaactgggagtaaaatgtcaacatagttttaaaatcgttattattattttcctgagcctgaagccgggccaaggcgcaggcagcgcccagggtgcgtggtggccccacccgcgcacagtcccacgcaaagggtcccggggcccgggtaccgccagagccgggcctgcaagcgcgcccttcggtcccacggtaacagtttgttgagctcatcagtgacaccttgaacttttcatatttggccgcggccgccgcgcggggtcgtgcttaatattcaatgatctcgctcgttactgggctcagattaagttaatttactaaatgacatttcgccggtgtctccggagggctgaggaacccgagcccgggtggcagctcgggtggtggaatacg

SEQ ID NO: 12797 - DNA, 221 bp, Homo sapiens
  source 1..221: mol_type = other DNA
cccaggctggagtgcaatccaagtagctgggcaggctggtcttttcttaaagattccttcttatacaagttgaattagacaagatggatcattttggtcattatctatttgtttataaattatcccaatgaggatgaatggctccgccccccaggacgccgagcctcggccgggcggtaaaatcggcgctgggacttctggtcacgtcgtccgcggtcgcc

SEQ ID NO: 12798 - DNA, 274 bp, Homo sapiens
  source 1..274: mol_type = other DNA
actaaaaatggagataattagtactacctaacttgtaaatttgctgtatagtatacctagtaagcgctccggaggcaacatcataatgctgggaatgaactatttcatctgtaagtttcattctatacaattccttaatccctaaaagcaatttagaaaaaatgagttttattgcctctgatgggagcctaaactttccttccaaggtgctggacctaggccgccgcggccggagctcaaatttcccgggccgggagcgctgggcctgccggga

SEQ ID NO: 12799 - DNA, 283 bp, Homo sapiens
  source 1..283: mol_type = other DNA
agtgaagttcagtaaggtcctctatgttaccttcctgatgctgttgcactgctcaagcccacatcagtcaccgggtgagggcccgtcacctgtgagtgtgttcctcagcctcagcgctgcagagcaacaccccctccagctgagtgccactgtcctagataaatggaattgcccggcttcctcttattgttggatgacctcatgaaaaggggagtcctccataatccacagtgcctgtcactgagggctccttgataaggatttttcaattgttattacagcc

SEQ ID NO: 12800 - DNA, 420 bp, Homo sapiens
  source 1..420: mol_type = other DNA
gtctcagagcctgttgccagatcacgatctgatctggaaagaacacgggctcgtgggccgccggcagcctcctgaacctctgcggtctcaaggagaggaggcgcgcctggtcaacagctctccctggcccgtgtccagctccctcctcacacagagaggggggcgcatctcagggatggcggggagcagaggcaggcaggcctccttcaggcccatcctccagctgggctggtggtgccagggaggctccctgcttggtacccagcaggaaagccggctcaccttcgcctccccctgcggctgggaggagaggatgccaaggaggtgtctgagccagccctcccggcccgagggcagggcaggtggccctgagagataagccaatcccgcagctgcagatgaggagttctgagaagcatt

SEQ ID NO: 12801 - DNA, 242 bp, Homo sapiens
  source 1..242: mol_type = other DNA
tcccagcgcgcgcctgtagccccagctacttgggggggctgcagtgagccacgaaattattttatttatttgagtgcaatgatgcgatcttggctcacgagtagctgggaagtgctgggattacaggcgaaccgcgcccggcctcttattttaatttttaaaaaggtacctgcgagttttaaacacaggtaaggatcattctgtcaagtcccagcgtgccgcgctctgggccgtggaagccc

SEQ ID NO: 12802 - DNA, 805 bp, Homo sapiens
  source 1..805: mol_type = other DNA
taaaaacagcctatttacatatgttgaaacaataagattttgtggtatcactgtcccttaataattacagacacagagccaaaccatattatatacttttgtgatagcatagaagcatgcctttttaaatacacaaaagtctaaatttctgaaacatcaagttatccttggctgagtaaaataatttttcacttataagaggattcaccatagccttctctaaatagttatttcttcatttaaatattgttcaatttaccaaaaaagttaccagttattacaggaagtgaggtacatatatatcttttgcaccttgtatagaaatagaaaaaagtacaagtctttagatttcatagtctgcttattacagatactgacaatgaaatatatactccctgctcatacagtttgaaataaattattacataaagatgataaatgtttataagcaaatctagcatatgaagaacatatacatagatgagttgcacacacatatgtaggtaatctcaagagaatacaaaagatgtattttcacttttatttctaaaagtagtaaaaattaaaatatggttttctttaaattttcagttttttatgatgtttttcttttttagctgcctaaaacgttgaaggagaatcaattcttcaactattttacttaatgttgtgccaaagttaaactactgcagttggtggaagttctgcaatgtaaatagaacactaattaaaaaacaacttgtaaaaatgcaatttaaattttaatacagtacatttttcttctaatatgatggagacattctga

SEQ ID NO: 12803 - DNA, 392 bp, Homo sapiens
  source 1..392: mol_type = other DNA
tggtttaccatctattttacagacatgccaaataggtggctggaacaaacaccttgccagttacgcagtaagttagctaccttaaaaatcagtttccccatgattcagaaattatcagacttatgaaaaaaagagtaatcagtgcttacatctcaacaattaagctccagtgatgaaaccacggaatccccaactgttggtactgcacagcctaagcaatcctggaatccttttcctgactttactccccaaaagtttaaagagaaaactgcagagcagcttcgtgttggcaagttttctcaacagctctgtattccaaagaagaagctggagaaacttctcctgcagatgaatctggtgcacctctgagcagctgcacatgcttaagagtg

SEQ ID NO: 12804 - DNA, 707 bp, Homo sapiens
  source 1..707: mol_type = other DNA
ggagacgccgggcagtgttcccgaaacccctggccctcgctggccccgctgcggggctggttccggctgaggggcagagggcggctccgccttgcccggcggttctgagtgcagctgaacagcgggtggagctgcggcccgcggaggagcggggtccgagagctgccgctgacaaggggcgcggcgacttctgtcagggcgctgggctcccggccggactcgcagcagccccccgaggggcggggcctgggtcgtgtcgccccaggggatgggcgtgtgatgacaggaaggcggggctgccttctgtgctgacccgagagaagaccaggcttcagtcctcgcaggcaaagggcggggccatttcgagccctgggaaggcggggcgtctcctgacagggggcggagcttccgcagtctggggttgacaggggggcggggcgcctccctacctcccgcggtgcgccaatccccggactaggggccggggtcggaccccagtggagtggagagctcggcgccgcacggggtgggggcgcgcggaggacgcgcgcgcgggagggccccgccttggccggctctctcccttccccctccgcccccggacggccgctggggcgcgcgcctctcctcgcacccccaccctgagtccccacactccgcggggccaccgagctgctgaggcccctttgcgggcccgccgagcggtt

SEQ ID NO: 12805 - DNA, 582 bp, Homo sapiens
  source 1..582: mol_type = other DNA
acttccacttgaagcaattgcatcttttaggattcagcggagctctgctgtgctcagcggatcaaggggcccaggagcgctcgagcgtccaaggcccggtcctccacgttctgaccgcggtgcgggggagacgccgggcagtgttcccgaaacccctggccctcgctggccccgctgcggggctggttccggctgaggggcagagggcggctccgccttgcccggcggttctgagtgcagctgaacagcgggtggagctgcggcccgcggaggagcggggtccgagagctgccgctgacaaggggcgcggcgacttctgtcagggcgctgggctcccggccggactcgcagcagccccccgaggggcggggcctgggtcgtgtcgccccaggggatgggcgtgtgatgacaggaaggcggggctgccttctgtgctgacccgagagaagaccaggcttcagtcctcgcaggcaaagggcggggccatttcgagccctgggaaggcggggcgtctcctgacagggggcggagcttccgcagtctggggttgacaggggggcggggcgcctccctacctcccgc

SEQ ID NO: 12806 - DNA, 307 bp, Homo sapiens
  source 1..307: mol_type = other DNA
ataatagtactttagggccttaggtattacaatctactttccgattatatgtacattccgagatacgtataaaaagtatttgttctttatctgaacttcacaaggctggagtgcagtggcacgaaagcgattctcctgcctcagcgcgtcaagccctcaattatttaaaaaaaaaaaaagttgaatcctggatgcaggggtggggaggagacgccggaccccaccagcctccttccgccgagctcagcgagccggaacgagggattctgggcgcgcgcgctgcggccgctggcgcggagcttgtggc

SEQ ID NO: 12807 - DNA, 449 bp, Homo sapiens
  source 1..449: mol_type = other DNA
gagctccacccttctggccccgaagcagagatctgctgagcgggagcgcccccgaggaggggccgggaagaggcggggcccggttgcgactcgccgcccgggagcctgggagacccagaggctgcgcccgcgccccctcaccagtagcagctgctgtagacgcaggcgtcccgcggggggctggccggctggtagtggacagcagcggggccattaccttccatggccggctagctgggccagggcccgggccggaggaagaccgactcccgggcggggccagggcgggactagcagcacgagttcccggcgcgggaagcccgggacggagctcggggcaagcggcgccagttccgaactcccggtgggcggagcccgggacgaggaggacagcgcgcttccgggtaggcggagcccggctggtgggctctggtcaggggcggggcccc

SEQ ID NO: 12808 - DNA, 455 bp, Homo sapiens
  source 1..455: mol_type = other DNA
gggaaatatggtgtcttttcttccagactgccagtaattgaacaaaatatataacacaaaaaggataccatatggactctttaaacttttttttttcaaatttactgtatcagggaattaatatatcttttcgagccaatagctacaggccttccaatttaaaagatttcggaaaggctcccgcagactccaggctgagtgcagaagcgtggattctccacagcgcagaagctcagcccctggttggaagagcctccccgcggagattcacagcggggccccgcccctgaccagagcccaccagccgggctccgcctacccggaagcgcgctgtcctcctcgtcccgggctccgcccaccgggagttcggaactggcgccgcttgccccgagctccgtcccgggcttcccgcgccgggaactcgtgctgctagtcccgccctggccccgcccggg

SEQ ID NO: 12809 - DNA, 285 bp, Homo sapiens
  source 1..285: mol_type = other DNA
gccaggctggtctcagacttgcttttctctcaaaatgaaagaaccaagggaccaagtgcctaataaacatttattgaatgaatgaataaaacaatgactgtgcatgaacttcagaatcacgaagaggttccagtttcaggctcagtctttttattagtaaaatgaggataacgataataaagcaatcagggccgaacaaatgttaagctcttggtgtacttcagctgcagaggtggcctaggacaggggtgcactgctggattccggggccagatacaagtgctg

SEQ ID NO: 12810 - DNA, 603 bp, Homo sapiens
  source 1..603: mol_type = other DNA
cctggcagggtttgtactacccgtctcttagagggcgggtaggatactccttcccctcctttgctgccccaggggcaggtctgaggggcccggagggctgggaggctgtccctcctccccgctccaacccccgcgcgctagggcggggttggggcagtgagcgaggtcaggaggctgcgccccctactccccgcccggcgggcgcggtgccggccccagctctgcggacggcccgggaggctgatctggctgcgtcgggggcaggaggggggctggccctgctcctcacgcccaccccgcagggacccagacgcccctccggccccctccctgcaccccgtcagcccgggagctgcaggagaccggggcgcatctttccaagcgccgggcctcgctctgggacaacggtgtcctgggggcggggagggcgcgcggaggtgccaggggcggcggggtacccggcccggcagcaccgcttcaagtttccaccggcgcggttgtgcaaccgggaaaagccacgtggcctccgggccggggggccgggctaagagcgggcggctcttccggcaacaaagagctgcggccggctgcggggataaatac

SEQ ID NO: 12811 - DNA, 418 bp, Homo sapiens
  source 1..418: mol_type = other DNA
tgtaagctttttttttactattactacactaataaattatttacggtgggaaatctaaatcagaaagctctggcttcttgaaaacaaactttattaaaaacgacaatttctttgcctgagccttaaagattacaccgagtcagtggactgaagctaatgcttgacctggcagggtttgtactacccgtctcttagagggcgggtaggatactccttcccctcctttgctgccccaggggcaggtctgaggggcccggagggctgggaggctgtccctcctccccgctccaacccccgcgcgctagggcggggttggggcagtgagcgaggtcaggaggctgcgccccctactccccgcccggcgggcgcggtgccggccccagctctgcggacggcccgggaggctgatctggctgcg

SEQ ID NO: 12812 - DNA, 324 bp, Homo sapiens
  source 1..324: mol_type = other DNA
tcacttgcgccaagaccgcatcactgcactccagtgtgggcgagactctgtctcaaaaaaaaatattaattttgaaggcacacttgagatcatataaacagctatagattgctctagaactggcagactacaactgcagacttttgctttctgtgaaaaaattgtagacaaggataggaggaattgtgtttttctatttccttatgaaaaattgtcattgctgttaatgatcatccttcaatcaacctgggtgacagagcaagactctgaccacaaccatctttataatgtgtgtgtgtataaattgacttctccagaattcaa

SEQ ID NO: 12813 - DNA, 388 bp, Homo sapiens
  source 1..388: mol_type = other DNA
aagtcttctctaagagaagccccaaggaggcatgtgggcatgcgccggccctgcaggccctcgggttgctgctcacatgtcataacagtggaaagtacatatgcaactattcttagccctggaatgtatacactgtgtccctcatacttatttcttccaataaaccaggggattgtttggtctttccttttatttattctatctttaaaacaagactcaatgaagtcatatttaaatatatgcatcaaaggttcatccttggggaatgattgacccagaaagagaggtttagacatctgttactcaataacactaacatagaccaacaactttagtttgtttgtagctgaagatactatttgcctattacttttgaaaataacggtcc

SEQ ID NO: 12814 - DNA, 296 bp, Homo sapiens
  source 1..296: mol_type = other DNA
cctccctgaaggcaggggcaggaggagctcggccttaccactgtcttcctgagtaaaggtttgggccttcaggagtctggaaaccctggacaacaacttttgtcatggatttcatcacctaggatcctggaggactccccaccaggcagatggtgggaaattgaatagcaggtcacagcaacctgtgcaaagtcttctctaagagaagccccaaggaggcatgtgggcatgcgccggccctgcaggccctcgggttgctgctcacatgtcataacagtggaaagtacatatgcaac

SEQ ID NO: 12815 - DNA, 450 bp, Homo sapiens
  source 1..450: mol_type = other DNA
attcagtgttggatagtagagtacggtggctgtactcaacagaaatctacactactcattatatgcatgtaacaaaatgtcttatgtaccacataagtttgtacaaataaaaaaagaaacatgttttatgtattattagaaacaaatttaccatctgcacatattactttttaaattcaaaactcagtaaaattttttaaatgatctagtgtaatgcaatgtagccttcgaaaaattctctgtaataataataacaatgttagtaaaaaatagtaatatttttctatttggttaatgctttcattactaaaaggcataatattttaaattttgggaagaagctattcaactttaaaagcctaaactttatttattaagaagtatattattttaaaaacatgggtaccaaggaaatttatctgtagctttaaaacacaagagatattatgt

SEQ ID NO: 12816 - DNA, 501 bp, Homo sapiens
  source 1..501: mol_type = other DNA
aagcatcaggtgtgagctaggtatcttataaaaagttctaagtatacatctcccagtatataataaaacattatttaaaaccattgttaaaaactgaaaaacagttgcaataacactgaacttgtctctggttgctgccaacttctgaaagaaattattcccaaagaccttatcactcaatctgaaattaagacatgctggatttttggcatcctgcattgtaagaatttggatcttcttgagcagggcgcaaccccccgccccgtctcactggcccgggttccgggctggcctgtggagaacccccgcgagcgcaccgcattttctctgaaaaccgaccccagtgcctccggctttacaatttgagtaaactgggagcgcgcgggcggggaacgctcacccgggcacctcccggtacctcgtcgtcgccccgccccgcagcctgtagagggcgtggctagaggccagtccgtgccccgcccctccggccgcgcgccagcg

SEQ ID NO: 12817 - DNA, 291 bp, Homo sapiens
  source 1..291: mol_type = other DNA
agattaatttcagctcagggaatcaatatagactctatgttcaatagaaatatatgacgaaacagagtgaacacctcaggctcagtttgactgttaacatgatccactaatttttcaagagaagctggagatcttcataaacattgtcaatggatttagtctgcagcaagccaagcttgggagccagcattgcatgcaatacactcccaaggagtttgggccttatttgttgaaaacagtttctaaaagaccatattaagactcaaaatctatgccttcagaaattaactt

SEQ ID NO: 12818 - DNA, 569 bp, Homo sapiens
  source 1..569: mol_type = other DNA
ttcagtttaatattctacttacatgtagcacatttactacctatcttgattctaagggtgcctaagcgtcattagacagcagagatctcctcccttagaagacctttcacctgggccttgaaagatgcctaggacctaattattcttcccgctttagcacaacaatttgcatgccagctgctggacgtgtcaagggctcagtctcagaccctctttggggcgcccagagcgactgcattagagccggcctgctcggccgaagcggcggtgggcgctgacttggcgaagggcgcagctggggcgcttcgttccggagcagagcgccgtgatcccgtcggggctggggtggcagcgcagctctccgcctgtccagagcggggccgcacgccggggcacctttcagaacaagctccagatgtggccccaggttgggggccgggtggcagctgtctggcgggcgagagcttccaccttcacgcaccagcgcgggaggggacgcgtgtgcacgctcctcccctaggagggagggcggcccgagagcctgcagactgcgcctgcgcagcctcgct

SEQ ID NO: 12819 - DNA, 553 bp, Homo sapiens
  source 1..553: mol_type = other DNA
aattattcttcccgctttagcacaacaatttgcatgccagctgctggacgtgtcaagggctcagtctcagaccctctttggggcgcccagagcgactgcattagagccggcctgctcggccgaagcggcggtgggcgctgacttggcgaagggcgcagctggggcgcttcgttccggagcagagcgccgtgatcccgtcggggctggggtggcagcgcagctctccgcctgtccagagcggggccgcacgccggggcacctttcagaacaagctccagatgtggccccaggttgggggccgggtggcagctgtctggcgggcgagagcttccaccttcacgcaccagcgcgggaggggacgcgtgtgcacgctcctcccctaggagggagggcggcccgagagcctgcagactgcgcctgcgcagcctcgctcccgttcccacttctgctgccgctaggggtagcggcggcggcggcggctgcggctcgggagcgcgtggctgactcatcctctggaagatcagactgcgcccgcccgcgccgctcctcctca

SEQ ID NO: 12820 - DNA, 377 bp, Homo sapiens
  source 1..377: mol_type = other DNA
taatcctcctccccctgggggggatcttgataaaggatagccacccataaactggattgcagaatgcacttgagctgggagcccacccctttaacctaggatagctaggtctatagtgcagactcagacctaacttacactttcatttgcagctgaagtttcggaacactcacttctgtccatctgggcaggaggtgggaagtcctggcgtcggctttcagactcccgagggtgggataaatcgagagggttatgcaacgtttaatgggctctaataaaacggctaataattttgatccgcggactcgctcgctaagccgaatctgcgagggtgaagctgcaactggcgcggactctgcggttcgcttgactgacgg

SEQ ID NO: 12821 - DNA, 343 bp, Homo sapiens
  source 1..343: mol_type = other DNA
cccctttaacctaggatagctaggtctatagtgcagactcagacctaacttacactttcatttgcagctgaagtttcggaacactcacttctgtccatctgggcaggaggtgggaagtcctggcgtcggctttcagactcccgagggtgggataaatcgagagggttatgcaacgtttaatgggctctaataaaacggctaataattttgatccgcggactcgctcgctaagccgaatctgcgagggtgaagctgcaactggcgcggactctgcggttcgcttgactgacggcgcagcctccgggcctagccacagcagcaacggcagaggccactccgcggg

SEQ ID NO: 12822 - DNA, 316 bp, Homo sapiens
  source 1..316: mol_type = other DNA
attaccttgctaaagcagaggtgtgatcactgtcatttcccaccttcaggttccaccagatggtgatgacagtacaacatgcgaagcggtcagcctctccgccaaggcagaggggaagggctttttggagttttcttcttaaaaaactgaatacattacagatgttgaaaacagcacaaaaatcataactgtacggcttgttaatttttacaaataaatacaccccggagggcgcaattcctgggtcctgtgaccttggtgaccgacgcccgggaccctccccagcggaagcggaagtggccgccggcaactccgc

SEQ ID NO: 12823 - DNA, 338 bp, Homo sapiens
  source 1..338: mol_type = other DNA
tgcctctattttctctgtaatgaaagaggagggattaactactttaataagggtgccttgtaaacgaattgttttatatttagctttctaactttcacaggtaagtaaatatatatccatgttcatagcggatcacgaggtcaggagatcgagaggcacctgtagtcccagctactcgagcgcctcaaaaaagaaaaatactagattgattttgattctaatagtgatgataattaatctgatgatattctgtaagccgcctgacaagcttctggtccaggaccctaagggttaagatcaacgagagtgcccagcaaagccgccgggggagatgaggg

SEQ ID NO: 12824 - DNA, 559 bp, Homo sapiens
  source 1..559: mol_type = other DNA
tcttaatatcttttaaactgaatgactggttatgcagcaacctgggcacatttgcgccaggttcaacctcccaggagggctccctgcggttatccaacgctgatcggcatgcagtcctgacatcagagaatgggcgtcttctcagaaggccgcagtagcggcagcagctttcccgccctactgagcgctcactacaagcgggctctgggctaggcgcgccacccgtgcaagtccccggggagcggcggtgcaccctccgtcccgcgcgctcgcagccattgtaggggtgggcgctcgccaggcagggtgccgacacgccctctccgcgctgcgacgggcggccgggggaggagagggtgcgctgtgcgcaccggagggagaggctccggcccagcgccgcctgcccgccagcagaccagcaggctcctctttgcggcgggtgccccacgcgcctctcgggcgcgcgctcccagccccgcccgcgtgcggcggccgcacggccgcgagagcgcgcctccgcttggcgggcacggccgcgagcgcgcgtgcgcccctccga

SEQ ID NO: 12825 - DNA, 447 bp, Homo sapiens
  source 1..447: mol_type = other DNA
cttaagcctcaataaattttaggaggccaagggaaggagagaacgggctgggcagcttcagctggaatagggcagggaagctgtgtctgattcctctttcggactccggctgacatatcataagctgcgttccgaccagggagggcgcaggagctggggctgctgcggtgaaccaaccccaacccccccggccccagagcgcctcctaggcgacccctggccccacccacgccggagccggcccgcgccgccctagcgcctttcggggcgtcgccgcgcaggttgcgccgcctccgattggccaaacgcggcatagcgccatctcggcctaccgcgcggtgcgcgccctcattggccggcggcggcaggagcagggcggggcagcacgcggggcgcgcggtatgggcggactcgcgcctgagccccgcccccggtccctcgtctggg

SEQ ID NO: 12826 - DNA, 435 bp, Homo sapiens
  source 1..435: mol_type = other DNA
aagtttagaacaagttgtgcatttcctgagttttttctctgcatgttatttatagacaatatgttgacttcctttaaatccatggccttgtacaagtcagccagagctgcctctccaacatgcaaggataatcccttcttattgcatataacactgcaatctacataactgaagaggaaattgaggtccacttcccgtggccttacttttaaagtcagttcaaacaaaatctatttggatcaaaaattcgtaatcttgcccctacacacttgaggcgaaaagggtaaactgtcccagactcactatccgggtagacggacccccggctcggagtccccgtggagtgtccctgagggtggcgaaactcctgctgccgctgaaaagtgagagcgggctcttgcgtcatcagccgtcgccggcgagtggtcacatgat

SEQ ID NO: 12827 - DNA, 397 bp, Homo sapiens
  source 1..397: mol_type = other DNA
ttttccagaaaagttctgataatcctgattccgatcccaggaatcagggccctgggaactcatgcgagcagcaatgacgcctttcagttttctcaaaagcaaagagatgttcccggaaactccgctgcacgcgactctgcagacctccccgtggccagcgcggcccagcggggaggggaagggggccaatggggcgcgctcactccatccctgtcagccgggccgcgccacggcgcacgcgcagggccggaggtcgcgcgcggagccggcacccagcccagtcccggacctggagcgggtcagaccccgacttccgcccctgactccccaggcggtcacatgaccgaagcggctgggagcagggaggggcatcatgtgaccactcgccggcgacggc

SEQ ID NO: 12828 - DNA, 599 bp, Homo sapiens
  source 1..599: mol_type = other DNA
cgtgcaatccgggcgggcggcaggcgccctccaacagaaggttctatttgtggaagcgaagtcttccccggaactaccgcgtgggggtgaatgactgattctggaattcatcacctccccttcctccggctgcagccgggcctcggcggcgcccacggctccaaccggagctccccaggcgctgggcggtggggggatccccggggcgaaaggcgtcgccgcggggctgcagcgagcggcgggtgcagagaaccgtggtgcgcgctcccgcctcgcgcccgcagcccattgtgcttactgtgaatgaggcgcgcgcaccaatcagcggtcgcttcgcctccttcggcttctccgctgagctgggggcctgcgggagggcgcgcgcgccgcctcctgcccagcccctcccagccctgggggcgtgtgcgcgcgtccaggccggcccgggacgcaccacctgcgcccgagcgcgcgctgcccggagcattcctccctccgctccggagactgctcgctgggcggcggggccggagtcgtcgcagccacctactgtttacacagcccggcctgtgagtgtgtgtgtatacagcgcactggcc

SEQ ID NO: 12829 - DNA, 406 bp, Homo sapiens
  source 1..406: mol_type = other DNA
gcctacatttaggtaaagctaatttgtttctaatttaaggacaattagaattaggatgtaggaattaggcaattcctacatcccctaatgaactttgtactaaccctttcttgtgacctttagggcaagaaatatgttccaggaaagaaaagaaacgatgttcctccttctccaggtaaccagccccaggcggcgggtggattatttacgggggatttaaacccgctccggcgcgggggcgtggccgggcggagtcccgaggcccgagtgggcggggcgggggcggggctcccggccgctcggcgcaatgtgaaaaagacccgagctcggggagtgagcgcctgtctctttaaatgccacgggctgcgctcccgcccgggagcccggagccggatctacaatcccg

SEQ ID NO: 12830 - DNA, 354 bp, Homo sapiens
  source 1..354: mol_type = other DNA
gaatgttttttgtttttcatgccgtggaataacacaaaataaaaaatcccgagggaatatacattatatattaaatatagatcatttcaggtgaatacacgtttacagtgcactttcactagtattcagaaaaaattgtgagtactaggaaattaatgcctggaaggcagccaaattttaattagaagtaatactcctctcctcttctttgatcaatccgcatttccaataataaaaggggaaagactggcagagagcaggcaacctccctctcgccctacccaccgcacggggccccacggaagcctgagcaggcggggcaggaggggcggtatctgctgctttggcagcaaa

SEQ ID NO: 12831 - DNA, 267 bp, Homo sapiens
  source 1..267: mol_type = other DNA
tgagtcggactgtaggcacttggaggctgcagagtcaccacatgcaggaggcacatgcacgtccagggactgcttttcagctcctggacaggccaactcacatcctaagcccaggttgagaactcagcaacattactggcattgtggaagtgatccttggggaaaccaaggcctatgtcttctttgagcgggaagaggaagccgcccggctcttcaagcgcccactgccaccagtcagccatcgtgctgggggacctgaagcgttcg

SEQ ID NO: 12832 - DNA, 292 bp, Homo sapiens
  source 1..292: mol_type = other DNA
tgaatacacgtttacagtgcactttcactagtattcagaaaaaattgtgagtactaggaaattaatgcctggaaggcagccaaattttaattagaagtaatactcctctcctcttctttgatcaatccgcatttccaataataaaaggggaaagactggcagagagcaggcaacctccctctcgccctacccaccgcacggggccccacggaagcctgagcaggcggggcaggaggggcggtatctgctgctttggcagcaaaccaagtatacgtggcaatgcgttgctggg

SEQ ID NO: 12833 - DNA, 290 bp, Homo sapiens
  source 1..290: mol_type = other DNA
agactggcagagagcaggcaacctccctctcgccctacccaccgcacggggccccacggaagcctgagcaggcggggcaggaggggcggtatctgctgctttggcagcaaaccaagtatacgtggcaatgcgttgctgggatcaaagcgcggccctttccccagccttagcgaggcgccctgcagcctggtacgcgcgtggcgtggcggtgggcgcgcagtgcactgcaggcgcgcgtagttaattcatgcggctgggcgtgggggactccgcccacccctttataatgc

SEQ ID NO: 12834 - DNA, 361 bp, Homo sapiens
  source 1..361: mol_type = other DNA
ccgcacggggccccacggaagcctgagcaggcggggcaggaggggcggtatctgctgctttggcagcaaaccaagtatacgtggcaatgcgttgctgggatcaaagcgcggccctttccccagccttagcgaggcgccctgcagcctggtacgcgcgtggcgtggcggtgggcgcgcagtgcactgcaggcgcgcgtagttaattcatgcggctgggcgtgggggactccgcccacccctttataatgcgagggtctggacggctgaggacccccgagctgtgctgctcgcggccgccaccgccgggccccggccgtccctggctcccctcctgcctcgagaagggcagggcttctcagag

SEQ ID NO: 12835 - DNA, 263 bp, Homo sapiens
  source 1..263: mol_type = other DNA
ctcctgtggcccagggcaggtccagaaatgcttgaagaccctaggcctggtcttgagggccccaagagcctgcttggtgcactgcaaggcaaagcttttctcaaacagaaggagccaccgcagctgggaatatgctgagtcatcttcacttaaacaaagggaatgagacactttcatttctgtgaggtagcgcaaccccttgcaaggcttgccgaaggaatgggcaattcctctttggcactgattgagcccagcctggctct

SEQ ID NO: 12836 - DNA, 406 bp, Homo sapiens
  source 1..406: mol_type = other DNA
agcgaggcgccctgcagcctggtacgcgcgtggcgtggcggtgggcgcgcagtgcactgcaggcgcgcgtagttaattcatgcggctgggcgtgggggactccgcccacccctttataatgcgagggtctggacggctgaggacccccgagctgtgctgctcgcggccgccaccgccgggccccggccgtccctggctcccctcctgcctcgagaagggcagggcttctcagagtttatctaactcgctgtagtaattccagcgagagcgccgggcgagcagagctgcgctgcgggcgtcggggcttcgcctctggcccagccctcccgctgggccgctcccgacgcggggaggctattctgcccatttggggacacttctctctgaaaggctctccttgcagctg

SEQ ID NO: 12837 - DNA, 481 bp, Homo sapiens
  source 1..481: mol_type = other DNA
tcccattgcaatgctcattcttgaataaatatcactgtcttttagagagtaggttggtgtgactcacataactgttcccaaacagctaagttacttagggttatgtatgtaattataattttatatttcaagtctatagtttttacaatggaaattatagaacgtgaaagttaagacttttatgaatattaaaaggtcagttccaggaagttactcaaaacttaaagttgaaacctttcaggcaagtttttaattcctttcacaaatcccctttttatttatatttaaaataaagattgttgtaagattggatttagataatacatgcatggtcagaggaggcattaagcacagtaattcctgttcccagggccctggcgctagtgccattgaattctaaattcagcacagttgttccagctagagttgctgggaatccatgaatcaaagacttgctcagctagttagcctttttaattct

SEQ ID NO: 12838 - DNA, 494 bp, Homo sapiens
  source 1..494: mol_type = other DNA
gctgtcaaactgaaaacaaccctgggagagataacattgtcatcttttcccctttaatgttaataaaaaaaaattcagctttataacattgtctgtaaagggaaagggatcacaggggtctgatatatctgagaatgacatcgcaggcggtaacagtacagtctcctggcgctgggcgcctgccaggaacacgtgccgcgccgggaatcgcgggcgaggctcagtacctgacccagggagaggcgcgcccgcagcctagcggttccagggctgacaagaggcaggtcaccgccaccgtttcccatctgtacatctggaaggctgcgcgatatggtgctgcccctttaaggaggccggggtgcaagggggtggccacgcctccttcctctgcacgcctggcttcgccccgccccttcgggaggggcggggatgaggggcttgcggggcgggcgtgcggcgcatgcgcacggccggacaggtccgcggcgccctca

SEQ ID NO: 12839 - DNA, 599 bp, Homo sapiens
  source 1..599: mol_type = other DNA
tattttgggaaagatgaggtctcccataatacctgtctgtactaaatttcccgggcaggcagctgcagctccagggcctagaacagcccgggcacttagtaggcccatgggtgcgtggacagcattcctctcactgaccccgctgcgaggtgagccaggcaggggctgtcaccttcctctggccggcctgaaggtctggagaccggggttcgagcccaagccctgcctgacaggcagtgaccttgggggcgcacaatgagggcgatgacccccaatcgcagcgcgccccgcggtgacttgcccaaggtcaccaccgtcccgggcccgtggcgccccggctcgggaggacacgggccaggcgggcgcggggttctggggtgggggccggcgcggggcggtcccggggcgcggcgcgcgctgacgccggggccccgcgatgcggcggggactgggcgcggggggaggcgcgtcgcgaggcgagcgtcctccttttgtgcgagcgccggcggctcggcttctcgaaggtaaacactcgcccgggctgctgctgctgctgctgctgccgccgcggcgggggcagctcgcaaacctgtggcggt

SEQ ID NO: 12840 - DNA, 423 bp, Homo sapiens
  source 1..423: mol_type = other DNA
tgataggattccaaattaggatttcttctgaattttgtctcaagtttagaggaatgttggaaattacctttgactaaattttgtgcatacccattatatactttaattatttgaaataattgaagtcttgcaagctgtcgactttttttattataaagtgctttacccaatagtaggtaaactatcaaaatttcttcatgcctaccaaaatttaagagaaatctgtcatgtgtaagatcaaaggaaaaatgtaagaggtttcccatatgaaaatccatacagtgtttgtgttttaagaattcttgccttttaactttaggaattaataatcagtggctttcaaatccatagtttgtattaggatctatgagtgtattttttttttttaaataatgacattggctttaattacagtacaaaaat

SEQ ID NO: 12841 - DNA, 271 bp, Homo sapiens
  source 1..271: mol_type = other DNA
tgtctgtacacaattccctgtaataaaagattaaaaaaaaaagattattctgctttcagcttggtccagagctggaccggataaaagccaaggaggtcccttggctcaacagcaattaattaagctttggtatgcatgaattaattaaaatcctaaatatccagctgcaggttctagagaagttaatgacttgtaaattgctctccaatctctgtggtgcaagaacattcctgacaaaggtgcagcctccataatcttggtctgagacaat

SEQ ID NO: 12842 - DNA, 582 bp, Homo sapiens
  source 1..582: mol_type = other DNA
ttcatgggacgccacggggagccgcgaacgcgcccagggcctgacgtcacccagctgactgtgctctgggcccgggctccactggctgcagccgcagtcttggtggaggaggtggtgaccaccaccgctcctccacctgcatccggctgcgggactgcggcggccgcgtttgccctgcagaccctgcaccccgggacgcggcgccgcaagctccgccgcaggtccgctagcgctcggctgacctgggctagggcgaggcggggcccctggacatgcctttctcccaggggacgtccccattttagaggctcctgtatccgtcgcgctgggctctccgagtccgtgcgcaaagcggcctacgagtccgctccgctggcgcggccagctggaacgctggatcgcagtgcgcccagggaaggccgggggcgcccgccggccctagccctcagtggtcctctcccacgccggcccgcgcgtgcctctgcctacaagacctggggcgtcctggccagatctggatggcaggtccctccgccacccccggcccggttccgggggcgtggcttggcgcgggggcgggtt

SEQ ID NO: 12843 - DNA, 375 bp, Homo sapiens
  source 1..375: mol_type = other DNA
ttaatcagaaggttagccctactttttaggacaaaggttctcagtattatcattgtatttaaatcgtccccaggggatccaagcacaaaaggatcctggaccactttcatatgggctgtccgcagcccacggcgcctagcatagtggtgactattagatacctcaattattaatgacacccagccaagtgcacagagctgccctctccagaggagactaactcctgagggataaaaaggaaattacattttctgccctctagtgcatctcaaataaaccatgctttcagagtatgcaccccacacccgctcgacaagggatcctgggccgagcccggccatccgcgggggcggggccgggacggcggcggcgcgc

SEQ ID NO: 12844 - DNA, 441 bp, Homo sapiens
  source 1..441: mol_type = other DNA
caatggccttgttgaaacaaatgaagactttgagctttattctgcagaagattttttttaaagatacagtgatcctcccatctgtagtagctgggactacaggtcccaagtagctggaactacaggtggatcctccttctttaacctctcaaagtatggagatcagagacatgagcttctgtgcccagcctagaagatctatctgcctatctacctatctatccacacacatacatatatatgtatctctctctctatatatatatataatatatggatggatatatatatagatagatggatatatatctagaaagatggatatgtgtgtgtatgtgtgtgtatgtatatataatatatataattaatatatataatatatataaatctccatatctctgtctctatctctatctgtaatctctatccaaagacaggtcc

SEQ ID NO: 12845 - DNA, 428 bp, Homo sapiens
  source 1..428: mol_type = other DNA
ctatagcgttaccacatactatttaccaatatcggaaattctactgttaaaatttgtctttgaggtcttaggagtgcagagacctcatatcttcaggacagagatcacaaagcaggaatcaaagattctgactgcatttctgggaggagagggccgcggcatccaccgcaggtgcgttcgcggtgcgcccgcttggcttttacctctgaagccgaggagcaggggttggtggcccacgggagctccaggagccgggctctgcagccgcctggcgcactgcctggttgcaacgggggcggcggtagcccaggcgatcctgggtccccagacaatcagcggtgggggtcggcgggaagaggcggggcgccgccgcccgggcctcccgccgcgacggggcgggacaatggggccccaccccggggaaggag

SEQ ID NO: 12846 - DNA, 379 bp, Homo sapiens
  source 1..379: mol_type = other DNA
ccatactgtttaaaacgactgggatgggagaaggttttaccctttttctgcaaatggagtaaagaataataattactttcataataatggtaccttttaaagattcttgggaagctaacgcattaaagtgctaacactaatatacttcctacattttacaattaagagagtggagaacgaatctttatagtgtctttcattcactcaaattatctaattaaagcttcacagtgatcctcttaggttatttctcatcttacagatgtgcaaactgagggttcactctaaaccattgctccgcggagctcaggaaacgcggctgtggtcccgcgcggccgccgtagagtccccgttgccatggctcctgaattccgacggg

SEQ ID NO: 12847 - DNA, 491 bp, Homo sapiens
  source 1..491: mol_type = other DNA
aagatcttaacttttccgccagccggaccaactggtgcctcataattcttcaagccatcatatgacatatatatttttatgtttataattgagaaaactgcaactcagttgctggaatatatatttgaatgtacatttcttttatcacttacagtagtacagatgtgtatgaacccataaacaccatcaagtctttgagctctactataatgtaaatgtaaaatgccatctatagagttttttgtttcattagataaacctattgcctctatagaaattttcataagatcaagctcttgctatttaatagtattctgaatttaatagcatcagtgcattatcctcaataaatttaagtgatttggacaaagatcccagctggcctgacacatgggctgcacattccctgctgctggcccattcagcacactcctcagtgtgaatgccactgatgtgagcccaacaggaagtgtgaccgttttcaaaagaaa

SEQ ID NO: 12848 - DNA, 598 bp, Homo sapiens
  source 1..598: mol_type = other DNA
tcagtagctattagtgacttagtagatgctgaatgaatgtttgttgaataaaaaaagaatgattgtttaatttaccaaatcttactataactgaagcttaaagagagttactttgctattttaactccacactatgaagcaagataaatataagtgacatttgtatgcaacgttgcacttgaaaaccagagtggtaagtggaaaccaagagaaaaaagatgtttcatttcaatattattttcaatggcagttctgctatcatccataggttaaggttattcagctgtgcctgagcacgcgcgtacacacatcttagtaatattcgtctttgtattgtaaagatctccaagactggaaagcaatacaattgtaatacagttgtacagttgtgattgtcatgaaggagggtaatgcatttgaaaaagtttgccaagggtcctgcgcgttctcagccccgcccgctagcggtccgtcaacgaccgcaaagccccgcctcctacggcggcccgccaatcggctgcgcggcccgggcccaaccctcgtgagtcacgtgacaaggccaggcccgcttccggcacgtcgcgggcggctgacgtcg

SEQ ID NO: 12849 - DNA, 672 bp, Homo sapiens
  source 1..672: mol_type = other DNA
ccataggttaaggttattcagctgtgcctgagcacgcgcgtacacacatcttagtaatattcgtctttgtattgtaaagatctccaagactggaaagcaatacaattgtaatacagttgtacagttgtgattgtcatgaaggagggtaatgcatttgaaaaagtttgccaagggtcctgcgcgttctcagccccgcccgctagcggtccgtcaacgaccgcaaagccccgcctcctacggcggcccgccaatcggctgcgcggcccgggcccaaccctcgtgagtcacgtgacaaggccaggcccgcttccggcacgtcgcgggcggctgacgtcgccggggcccggcgtcgcgtcagggctggccggcggcggaggcggcggcggcggcggcgatggcagcggaccctgagcgagcttgagggctcggacccagctccctcccgcgaaaccttgggcggatccggcgctgcggccccagctcgctccgctcctgctccctccccggccgctgcctgggcggaggcagaggcagaggcccgggctggccgccctgctcgtgccccagctcggccccggacggcccggctgctgtgcagagaggaggccgagtcggtaagaggcggcggcggctgagccggcaggccgcctggcccccgccgggccgcccggg

SEQ ID NO: 12850 - DNA, 216 bp, Homo sapiens
  source 1..216: mol_type = other DNA
aaataagaaaatcaataataataataataactgctagtgtctaatcaaatagggacatattattattctcctttcatagaaatatgaatatgagtgtgtgtgtattttgcttagctcggaaagaacaaaggattgcttttccctcacggccacacgagtgccctcaggaggagtagacacaggtggaggcctcactgaggactctataaaagctcc

SEQ ID NO: 12851 - DNA, 270 bp, Homo sapiens
  source 1..270: mol_type = other DNA
gcaggtagatcacctgagatcagggcttgaacccgggaggcagggttgcagtgagccgagtgctcacttgtaagtacacagccagaatttaagcctgggtggttaacttgaaaacccagagatttagcatcagtggttcaaatctcagtgtgtcatcctttgttaaagcatgctgacaaactgacaaaaagtagcagcagaaagtaccttctcctgctgcttaccatcctcagcaagggtgcggaggaccaccaacagcatttgctagca

SEQ ID NO: 12852 - DNA, 506 bp, Homo sapiens
  source 1..506: mol_type = other DNA
agtagggagattttatatgcaatatttacataatgtataacatatacaacatacattttataatatataacataaagacacacgtatttttcttgatatatagatgtagatgtttgtggtttttgccattacttctatggcagaaaccacaataacttttgtgccaatatgatggctgtagatatagggatgcagcttttcttttaacaaactctttgaaagatataaagactggaacagtattatcaactgtgcagtatatttggcaccaagtcaaagctgcagctcttagccacagccttcgtgggcccagagagttctggggatgtacaagagcaaattcacagccccattgatttgccttttaattagagaaaggttgaattccagaatattctcaaatgctttgtaaaaaaattaataacccatctatcttcccagtccttgcagagagaagcttgctcagagtggttactgaaaacaggaacctgcccctgtgccttcct

SEQ ID NO: 12853 - DNA, 503 bp, Homo sapiens
  source 1..503: mol_type = other DNA
ttaggttacaactgtgccctctaaagcctagagagagtccagcgcacagaagcctctgaataatctatgttggagagatgctgcatgggttaatgcttgaatgactcctgtcactgctccttatggtgttaagggacaaggaccaagcacagcttgctcagggcatttaggaactcacaaaagtcttttctttctaatttcttttaaaatcagaagaaaaaatataataataatgaaaatgtaataatgaatccagcctggtttacattcatccttataacaatgcagtcatgaaatacaatattttaatattttggagagccatgagacctacagggctctctgggtgttctctttcgttataacactgcaagagacagacagggtggctctcactgtgtccattgaccctaacaccctcccgtccctgagtgctggggatttaaggcagcagtgcctcctttcaggtgctggggctcgtgccagcgcctcgggctgccagg

SEQ ID NO: 12854 - DNA, 519 bp, Homo sapiens
  source 1..519: mol_type = other DNA
tgtaaaatggtgacacaattatgcttatttcagatgctgaacgaggtttagcaataaaatatttttaatctctctgacccagtttctggctcatatacttatttcctttttgattaactgaggagacatctgagtccttaactttaaaattacacataaaatgctgttaagtgtgagagatgtttcatatcctccatcacattctcaagaaggtcatgacctgataaataatcagctggattgcttgagctcaggacccaggaggttcgaggctgcagtgagccacgattgtaccactgcactccaacctgggtgacaaagtgatactctgtctcaaaaaaagaaaaaagtttaataattgactctctatttgtaatacttgccaatttttacagtgtaaatactcccaccttagccaatttcaaagtgatatcactgagcatggtgctgggtgtgtaccaccagctctcgtgggcaggcactgctttgggggaaagtcctggcattccagcccatccc

SEQ ID NO: 12855 - DNA, 188 bp, Homo sapiens
  source 1..188: mol_type = other DNA
cgtgtcatgaaggtgatgctgtaacctgagcctcagagctgaaagccacctctttcgcttgcagctaggtagagggggcctggcagagcgagacttcccactgggagccctctcaaagcccacacacgcctgcctggggtaacagtatctcctcggtgtgagaatttcacaccctagtgtgaaccaac

SEQ ID NO: 12856 - DNA, 361 bp, Homo sapiens
  source 1..361: mol_type = other DNA
cctctcatctgggcttggcggctgctgggcaggcagccgaatccggctggagagccgcaacgagactctgtccacatgcacacgcacgagcgcgcacatgaacacgcacccgggcagggcacacgcgcccgctgcacaggccgaggccctggactcggaggggactgcagagccgacccacaacccgggccccgatgcccctcccggccgcgcccctacgactgcttgcgcaacaggcggcggctccagtgggcgcccgccgcgcgctgccggagcccagcccagcccggcgcgcccgggaggagggagcagggagcggggggcgaggcgcgggggcggggccgcggcgcctataaagtcg

SEQ ID NO: 12857 - DNA, 555 bp, Homo sapiens
  source 1..555: mol_type = other DNA
ctccccttccactgcaaaaggttgatctctctccagctggagcaagttccgtaaaaccagatttacatgacttgtgtactgcatttagcatcaaagcgctgcactctgccaccgcccccgcttccctgtaaaagagggagggctctccagccgcagcctccgcatctggaaggaaagcggcggcaggcgagccagggcaagggctgggccagggccggggccgggaccagggccggccgcagtgcccggctctgtggctctgaacgcggttctggccgcaagagtcgtccagtcccgcgcccttagaggaagtgggtggctctgcccggtcgccagcaggggatcggccccttctcccacggaccccagtggctcccgggcctcccgggcgctcttccttagccccgccagcttgagggccgcgtccagagagcggggagctcctctcggggcgccgatcaggtccccgcgccgcagccgccgcctccggcgtctcccaggctcggcctctgccgagcccgctgcggtccacgtccgcgcgcaggggaggcggtg

SEQ ID NO: 12858 - DNA, 620 bp, Homo sapiens
  source 1..620: mol_type = other DNA
acttgtgtactgcatttagcatcaaagcgctgcactctgccaccgcccccgcttccctgtaaaagagggagggctctccagccgcagcctccgcatctggaaggaaagcggcggcaggcgagccagggcaagggctgggccagggccggggccgggaccagggccggccgcagtgcccggctctgtggctctgaacgcggttctggccgcaagagtcgtccagtcccgcgcccttagaggaagtgggtggctctgcccggtcgccagcaggggatcggccccttctcccacggaccccagtggctcccgggcctcccgggcgctcttccttagccccgccagcttgagggccgcgtccagagagcggggagctcctctcggggcgccgatcaggtccccgcgccgcagccgccgcctccggcgtctcccaggctcggcctctgccgagcccgctgcggtccacgtccgcgcgcaggggaggcggtggctgggctctggcgcgccctggcacccggccccggccggccagggaaggcggcccctcctcggtcgccccgcctttcactcccgttacacccgggggaaggtgttcccgagccctctcccggctccagcctccg

SEQ ID NO: 12859 - DNA, 427 bp, Homo sapiens
  source 1..427: mol_type = other DNA
atcagaggcaaaatgtagggtacctcatatatctattaatttgttttaacatatcccattattgaatgtttaaatattgctaaaaccttaatctttttttccaggctggggtgcagtagcgctatcagcctcccgagtagctgggactacaggcacccgcgactgcgatctcctgacctcgtgatctgcccatctcccggcctaaaaccttaatctttttaagacaaatgcctttggcactccaaacagagttaggagttctgagtcctgcactactcacctgactttcagggttatgtctgaggtccttgtgagatggtccagacccttgatattctgggccagcaacctggaagatgcagctgctcctctccaggaaggaagatgcagctgctccgcggcctccccaggtggagctggctgtgcc

SEQ ID NO: 12860 - DNA, 370 bp, Homo sapiens
  source 1..370: mol_type = other DNA
tggatctcctgatttcgtgatccgcccaccaataccagcctggccaagataggtgccactgcactccagcacctgtaatcccagctactctgttgcagtgagccgaaatggcgccactgcactccagcctgggccaaaaaaaaaaaaaaattgttggattagtttagatacgtagagtccaagtttttctagacgctgggcgcttctcgcctgcagcctcctgggactggagcgggctcccagagacctaggagggacccctgctgggtgggggcggctaccagcctcaggccacaccccctcggagtggctcattctgggccaatcagagcctctgtggcggcaggatgccctgtcccacctgggcagg

SEQ ID NO: 12861 - DNA, 449 bp, Homo sapiens
  source 1..449: mol_type = other DNA
cgttatttgtcatgaacagcatgaaataaataactgtcaggctcagtttgtttcttcagctgcctgccgaaggctgtgccacaagcagagaaatgaatgagcgggtgttggaggcgcgcacatccagtgcagacttgttgtgcacgcttcgggaaacgccgcagctttgagcggcacccagaactctccttgcacgcccagctcggcggccccacatgccgcgggtctagggtcgcgctagcagaggcctggcacaaccgccagactcctgaccccgagatccgcgctccggacctcccgagggcccctccctgggcgtggctcaaaacgcggaagcacggcctccgactgcgagcatgcgcgttagctcggccctgccgggccgcgctcggcgccgggggagggtcacccgaagcggacgtccgctacgcaggcgtctgcgccccgtg

SEQ ID NO: 12862 - DNA, 410 bp, Homo sapiens
  source 1..410: mol_type = other DNA
ttaagttgactgatttttgaaaatgtaaacgaacaatttaaaaactttatatgactactgtaagtgaaaaacgttatttgtcatgaacagaaacatgaaataaataactgtcaggctcagtttgtttcttcagctgcctgccgaaggctgtgccacaagcagagaaatgaatgagcgggtgttggaggcgcgcacatccagtgcagacttgttgtgcacgcttcgggaaacgccgcagctttgagcggcacccagaactctccttgcacgcccagctcggcggccccacatgccgcgggtctagggtcgcgctagcagaggcctggcacaaccgccagactcctgaccccgagatccgcgctccggacctcccgagggcccctccctgggcgtggctcaaaacgcggaag

SEQ ID NO: 12863 - DNA, 522 bp, Homo sapiens
  source 1..522: mol_type = other DNA
ttgccagggaggtcctgagaggctcaccgacaggcggggcgtcccagggcctctccccaggagcggatgagctcagacgcggctcactcagctgtgtccaggcacccgacctctgagctggcggatctcaggaggttggcgctctgagctcaggcgcggagaaaggacggcgcccctgccttactctcttataagtcccgctgctattcctcagagcgcgactggggcgaactggggcgcccttcccagctccagctcggccactcgctgggtgaccttgggcgacgtggggctccccactcggccctcagggccaaaggtgggcgccggacacgcgggaggggcccttggacgcaccccctctcgcagtcccggcggactcgcagtggagagcggccccaggaggcggcgggcggcggggcggtgggcgccagtgcgcaggcgcggcgcggcagggcggggcggcgggcgcggggcggggcggggcggagccgggcggggcggggccggcggcaggcgctg

SEQ ID NO: 12864 - DNA, 373 bp, Homo sapiens
  source 1..373: mol_type = other DNA
cttcctgagcatgaatttcatcaactatgaaatagagattacatttatttaatactcttttaaaattattttatttatttatttatttatttatttatttatttatttatttattgagacagaatcttgctctgtcatccaggctgggagggcagtggcagaactcctgacccttaataatctttttaaatgaagattaaagatatatataaaataccttacacagttcctgaaatataacaagtaatcagtaaatcttgttttcttttcagtggctggaaaaagtcagatctaattttattatgactgaacagattttggatggacaatgttccattgttttacaaacattaaggttttctggggccccgtc

SEQ ID NO: 12865 - DNA, 228 bp, Homo sapiens
  source 1..228: mol_type = other DNA
tcatgagatctctgctctataatcagacatgatgtccatatttctgatatataggaagacaaagtatctttctccctcatggccaccactgaccaaaagggcatctgaggatatcaccattctgtttagtgagatagtagtgcctgctagtgtgagtgacaggatcagcttacatttacaaaaaatgggattgtcagccatctaaggttaccatgaccttgtagccat

SEQ ID NO: 12866 - DNA, 585 bp, Homo sapiens
  source 1..585: mol_type = other DNA
cacgcccccggatatctgcagggacccttttcctgcccgaggcctggggtcttggctcgagaggggagccccgccgcggggactgagcatgctcgcgccggtcagtctgggagggccgcacgcggggccgcagcctgcgccctgggcacccgggcggccgagcgggcggggtttggccgccgggcggcccgccccgggctcccatcagggcctcgcggcggagagggaccgaggtgggagcgcgtgagccgcgccgccagccagtcgcgcagcgtctacccacgcggtgcgcagcggctgcggagcggagccagcgggagcagcagggcgggctctcccggccgcgagggcgcgcggcgcggcgcggagggtctggccgcgtcccggcggcgccagaggtgagcgcagcccgggaggcgccagcccagcggcgcgggcgcagccggtcggtccgcggcgctggcggctgcgttcccccgaccgcgctgacagcctcgcgtcctggcgcctgctcgctggggctgcccggaggccgcggccgggcagctgttgcacggcagcaccggcggcggcgggcgagggcag

SEQ ID NO: 12867 - DNA, 359 bp, Homo sapiens
  source 1..359: mol_type = other DNA
tgtcctggaaagagcagtcttctctgggtggagttagtgcagccgagtctagtggacgggtcactgggcttccgagtccgccacgagaacttgccagcacagtggtggtgataattacacgcccccggatatctgcagggacccttttcctgcccgaggcctggggtcttggctcgagaggggagccccgccgcggggactgagcatgctcgcgccggtcagtctgggagggccgcacgcggggccgcagcctgcgccctgggcacccgggcggccgagcgggcggggtttggccgccgggcggcccgccccgggctcccatcagggcctcgcggcggagagggaccgaggtgggagcg

SEQ ID NO: 12868 - DNA, 394 bp, Homo sapiens
  source 1..394: mol_type = other DNA
tcatagttcaaactggcccatttttaggaacagtgctcagaaagaaaaagtagaagggtgccccgggcctgcacctgttcatggtctgaaagcccattagccaggcgagtgtcctcatcaggccaacgtgggcccatatccctgctctgctgggggcgctggcagactataaaggctctcctcagagctgaagtcacagccagtgaacagggctgcctgtaggtggagcccctggcacagaggggtgcgcgttacctgctctcacctgctcagacaggagggggcctctcagatctggagccccctggccccctggtggcgccaaacttcccaaagtttcgggcagctgcggcactagtctccactgtccggggcgccccgcgctcttagccgg

SEQ ID NO: 12869 - DNA, 464 bp, Homo sapiens
  source 1..464: mol_type = other DNA
ccacacagggggaagccggcccaggctggggctcgcacctcacgtgcctcccgggccctgcgatcctggaggcgctcccaggccgcgcgcgccacggtcacccacccacgtggggggcacgaccgtgggagtcacggggggtaccgtgagggtcacagggggtgccgcagggatccacagtgggcttccgcggggcctccaccttccagctgcgccgccccagggtctcttgcaaaacccgggacggatcgggggcccaggcctggcctccgcgcacgcgcaggagcagcgccggctcggccgccagtaggaagcgccagcccagagcctgggaagtggccgcagaggctgctcggccccgctgcccgccaggtcgtgggctcccgctccgggcccggggccaccggctgtgtaagtgcaaagcgggggggctcccggtcaggcaattcggaccggctgcgggg

SEQ ID NO: 12870 - DNA, 933 bp, Homo sapiens
  source 1..933: mol_type = other DNA
tcccaacggcgcgcacgcacgtagcgcccggggcagaccagcgcggcggccgcctcccgggacgcccggacgccggagggccccgacccccgcgcggctcatgcgcccgcgtccgccccgctgctccgcgaggcccgcgggacccctcccgccgccgccgccgcgcccgccgcccccggaggagcgggctggccgaccgccaccgcgccgtcccccggccgcccccgaagccgctccatcgcggtccctgccgtcctggggccgcgccccgctcccgcgccttgggggttgagccgagcaaacttcgcgcaccggccgacgcccggcggggaccccgctgcgcacccgcgcgcccgggtgggcgctgggcgcgcggacctttggggagcgggctgcccctcccgctgcacctgctcggccccctccccgcttgcaggggacttttcctccccaccaccgagagggggcgaggaggggtaaaaggggaagcaggttccgctgggcgcgcggacctgcaggctccttgctgggcaccgccacccgcgagctggacccacaggggtaccgggccccgcggccgccctccggccgctttctggctccggttcccgtccctgcgtttcccgcgggagcggggggcggggtgcggagggcagcaaggcccgcgcggtacccagcggggccgccctgcatggccctgcgcagtggggcgggctgcttcggccgggtctggcgcagggtgtcggggttcccggacgcctggccccggcgctcgagcagcctcctgtgcctgtccgccttctcggctgagcccgggcccgcgccgcccctgccccgccagccgcctcgcggtggcggtggctgtggcggccccagcggagggggccccccccagcctccccgccccccgcctccccgctgctgctgctgctg

SEQ ID NO: 12871 - DNA, 350 bp, Homo sapiens
  source 1..350: mol_type = other DNA
tgaacccagaggggtttaaatccttaaatggcttcgaactaacgacaccatggtgccagctcgcgccacacagggggaagccggcccaggctggggctcgcacctcacgtgcctcccgggccctgcgatcctggaggcgctcccaggccgcgcgcgccacggtcacccacccacgtggggggcacgaccgtgggagtcacggggggtaccgtgagggtcacagggggtgccgcagggatccacagtgggcttccgcggggcctccaccttccagctgcgccgccccagggtctcttgcaaaacccgggacggatcgggggcccaggcctggcctccgcgcacgcgcagga

SEQ ID NO: 12872 - DNA, 360 bp, Homo sapiens
  source 1..360: mol_type = other DNA
gcatcttatttgaattgctgtcgtccgaaagaatcctggagtcccagctactctagagtgtgcacatgtgcaaaacttgtgacgtacatgaggaattccttgtgttaatagaaagtccttgagacagttcttatctcaaacctcatcctggtagctgcaagtttcacatggataaaggatataatcacgattcttattacaatgcgtgtcaattttgtgaatttaaaagtatacatataaagtacatatatagtaatacatataaatataaacacacaagctctttgagaataactgatctctttaaaaatgatttatgtttcattataaaatcaatgtatgtatgcttaaagaaaaaaa

SEQ ID NO: 12873 - DNA, 474 bp, Homo sapiens
  source 1..474: mol_type = other DNA
cagtgagccgagatcgcactgcactccagcctggcgacagagcgagactctgcgaattctgcggtctccgcggccttccctggtctggcctcccagccggcagctgcagggatccttttttccttagaaaccccgggctgcctgtcagacctcggcgagcacgccaggctctgcacaccgtctctcggagcagtcccgaagaggccgttcccaccccgcggcgcagcaagcctggccccgccgcatcgcccgcgctggacaccggtcgcctggctaccggcgcaggacgcatccgctgtccgctcctagtacagcgcagcgaggcccggagtcagagggctttgcttgccccgaccgcagcccggagactcccgggagcggcgcggtgcgccccgcccccgccaggctctcggctgccggttccgcgccgggcctcgcactcgggggcggtgtccgagcgtcggcgcatgcgca

SEQ ID NO: 12874 - DNA, 512 bp, Homo sapiens
  source 1..512: mol_type = other DNA
ctccgcggccttccctggtctggcctcccagccggcagctgcagggatccttttttccttagaaaccccgggctgcctgtcagacctcggcgagcacgccaggctctgcacaccgtctctcggagcagtcccgaagaggccgttcccaccccgcggcgcagcaagcctggccccgccgcatcgcccgcgctggacaccggtcgcctggctaccggcgcaggacgcatccgctgtccgctcctagtacagcgcagcgaggcccggagtcagagggctttgcttgccccgaccgcagcccggagactcccgggagcggcgcggtgcgccccgcccccgccaggctctcggctgccggttccgcgccgggcctcgcactcgggggcggtgtccgagcgtcggcgcatgcgcagatcgggggcgcgaggcctcacggagctcgtagtttcccggacgggccgctcccggcctcgcggcccccacggggcagcgggcgcggctccccgtacccacca

SEQ ID NO: 12875 - DNA, 350 bp, Homo sapiens
  source 1..350: mol_type = other DNA
ccgagctcgagcgatcctccctcagcctcccgagctcgagcgatcctcctacctcagcctcccgagctcgagcgatcctcctacctcagcctcccgagctcattgagacagggtctcactctgtcaccaagccggatcagagctcactgcagccatgaactactaggatctaggaatctatagatcctcctgcctgggcatattagttttattgttgaagttcattattttccatacggaaatccaattattccagcaccatttgttgaaaaaaatctttctctaatgcaatttgtgttttaaaaggccccttggggattttgcagctgcgtgtggctgggaggctctgc

SEQ ID NO: 12876 - DNA, 654 bp, Homo sapiens
  source 1..654: mol_type = other DNA
tcctagtacagcgcagcgaggcccggagtcagagggctttgcttgccccgaccgcagcccggagactcccgggagcggcgcggtgcgccccgcccccgccaggctctcggctgccggttccgcgccgggcctcgcactcgggggcggtgtccgagcgtcggcgcatgcgcagatcgggggcgcgaggcctcacggagctcgtagtttcccggacgggccgctcccggcctcgcggcccccacggggcagcgggcgcggctccccgtacccaccagctggccgggcagggcagccacttcgcggtcgggcccgccggctgcgggcacccgcgcgacgggcgggaagatggcggacgacaagggcggggagcagcggctcatctcgctgcctctatctcatcatgaagagctcccccgaggtgtccagcatcaaccaggaggcgttggtgctcacggccaaggccacggtgagggggcagggcgggggtgtgggccgcccttacccctcgcgccccgccccgccgggctctgggcactgcccagtccccttaggcccgcgcgccgccggctgctcttgccgggctcgcgcgcgccccgctgtccccgtcccacgccggcgcgcgcttcggtgcccgcgcgcccccacactttctcg

SEQ ID NO: 12877 - DNA, 638 bp, Homo sapiens
  source 1..638: mol_type = other DNA
cttaggggagaaaggaggtagccacaggctggcttttccaggaaagcctccgctcggaggtgcacgacggtccgagcaggcccctgactgctactaaaaacttcttagattttctcaccgggaggtggcggtgtggtcctgcgcgagcggccggccgcgttcaagttcaagctccgggctgggagggagcttcccgacctccgtgtttctgtagtaacttaaagagccaggctgggctgagggtgggagggttctgcgccccccaccggggggcggcggggaaagcgggggcgcgtggcctcccctccggctccggcggcacagccggggggcccggctcctccccgtcgggaagacgcggcttctctgggtggcagtgaagggtccccggggccgcgcccgcccccgcgccacacgggccgcgccgccctcggccctcgtccccgctcccgcccgcggttcccaccgcccggcgaggtctccgggcccctccccgggtccccgccccaggccccgccagacccggcgccgccgccgccgccgccgcggaccccgcccgcgcgcccagccccgctccccccgcgagcgcgctcccgccgccggcctcgcccgctcccgccgccgcctccgcccgccgc

SEQ ID NO: 12878 - DNA, 589 bp, Homo sapiens
  source 1..589: mol_type = other DNA
tagatgtggaatgattgatatcccagtgactgtaaaccatatatattctctatttgctttgaactttaatatctgaatgcagtaataaacagaagaaagaacttgtagcttttcgtttcattggtgttaaacaaggatgctaggtcaaagcttagctgaagattttcgtttttctagaaagagaaaaaagacaaggctgaagtatgggtatttttaaatttcccattaatatagtggtggacttttaagtttcttgacttcaaaaaacctcattgtaatagacattaatgcctaaaatatctgagtttaaaagttaggaaacaaattcctgttgcatttctcaaccctgagcaaatggaatgaattagcacagttaatctcaaaaattaggtaccatttattttctaaaggttccgttagattatgctgtcaagtctaattgttaataaaatcagataccgtgttttatagataccagtcttatttggagaaagcccagtagacaactgtagttttaaacatctccgataaacaagtctgtgtattataacgtattggacaatgatgtcacttttatttccataaatga

SEQ ID NO: 12879 - DNA, 616 bp, Homo sapiens
  source 1..616: mol_type = other DNA
gctgaaactggctcacaccgcggaagcccgggtcggtgtcggggcgagagccctcgggagggattgcagggctcgttccctgatttttcatcttccaaaatcaaataattctctgagcctcagtttccttgtcggtgcctggagagtgcactgcaaggcccggggcccgcagcgggtgcccgacagcgggcgtccaactctgggggcggggccgcagggccgctcaggagggaggttctccagaggggaccccttcgggaggactttcccgaagtccgtctaatcccgctggcggagagcgaggcaggtgggaccccaggatgtccgctcggcggggcgaccccggccacccccgagaccagggctttcctcgtccggccgccacgcccgcgcgcagcctcgggccaccccgaaaccccggcggcctagcggcgcgctgggcatgcgcgggggcggcgcgcatgcccagtccccccgagaggcgggaactccggactgagaccgggtcgggcgtgcgctgccgagagaggacgcgcgcctcagccggctgccgcgcacgcgcgcgggcccgcgccgacgcagcacggcctcgagggcgcgagcccgcgccgccgcc

SEQ ID NO: 12880 - DNA, 585 bp, Homo sapiens
  source 1..585: mol_type = other DNA
cggtggccagtgtccagctgggctgacccaggtgtctggctctgtcagccagggtggcagctgtggttctgagccccaagtccacgaggacatgcctcagggctcaggggtcaccgtgggaggtggtctgacccctgaccttattgtcccccaccacactgctggctggcacagagatgtggttccccagcgtgaagccgaggggatgccctggccccagctcgcaggtgcggcccaagaggggcactagttccactgtcaatagaatctgtgctgatggtgctgacctgagaccccgggacgaccagtctgtccagtgggctgctgagccacctgcaggttcctgggaccctgtggaggagcctgtggcatccccacctgcaggggagaagattcccagcctgggtgtcagtgctgtgggcccagagaacatgggctcatcacccctctcctctgggtctgattccccattgggagcgggagcaggtgcaaaaacccggggcccaaggcctttgctgtttttaaacatgggatggggcctgctgcctcctccctctgcccagggaagggttcccagatgcgagg

SEQ ID NO: 12881 - DNA, 315 bp, Homo sapiens
  source 1..315: mol_type = other DNA
tgcccctacccggggaaggcactggctggaccctccccagtggccgtggctgaggttcgagggccctggacgccacggcaggtgcaagcagtggaaactctgctcctgagagtgcagctcttttaaggagccgaggaggcagcggcacctggcgccaggtgggctgtggggcagggctgcaggacatggcctgacctgcattttgtgctcttcaggaagcttccggaatctacagctacgataacatcactgtgtcatcacaaagatgtttgcttgttgcaacatctgttttaccatgctccagctgcggggagt

SEQ ID NO: 12882 - DNA, 422 bp, Homo sapiens
  source 1..422: mol_type = other DNA
gtgccttgggttgctgtggccccccctgccgcctggccctgtcatggtgtgaacccactcctggccactgagctcctggaggggcagagctggcctgtttatccccgagcctggctgagatgtgagcctgctgacaggcaggagactttctgcaggggtggcccacggccgcgtgtggggccaggcccctcacctccctgtgctggcagcactgaccgagtgcctgggccccattccctgaggatgggccacccagagacacctgggctcagatgttcacagggcaggggccaggctcaggcttcttaggaactcggcctctgtccccacagagggatctgtccctgtcgcctctgggccctgggtcccatataaggaaatagacccaaaagggtctctcatgacctggggttcatggagtg

SEQ ID NO: 12883 - DNA, 671 bp, Homo sapiens
  source 1..671: mol_type = other DNA
cggcgggagaacctccgcttgccggagaaggtgccacctctggggaaacaggctgaaaggtgaccctggcggcccaagtctccagcaggtcaccgggagagcgcgccccaggcccctgcggaaggaggtcccaggagggtctccgcaaggggctccctactctgcctccagggaggggctgcgacctttggtgacactgggagtccggagtccccgcggggcctgccagcccccggccgagcacggccccacgcggagcccgtgcagcctgacttggggcccaacgcccgtccccgcagcgcgagacgcgcaggtgcccggccctgccctggccgagacccgccgcctgcgcagccccgcagaagctccagctttggcccgtgtgaggtccgggctcggcctgggctgggcggagcccgctcccgaagcgcctcagcgccgggccgccgccctcgccgtcatccccatatgcaaaacggggaaacggggactcgcgcgcgcacccgcagaggcctcttggcccagccgaccgccgtccgcgccgcttccggctccgcgccggggcctctggggcgggtagtccccgcgcgcgtccgggaccggcggccattggctggtgcgggagggggcgcgcacgccggcggcgggaggggccgtcacgtgatgtttgg

SEQ ID NO: 12884 - DNA, 682 bp, Homo sapiens
  source 1..682: mol_type = other DNA
tgtccacgagcacacttttgtgttcgtgttcacagaacccgtgtgcgcacacatgcacagtcctgggctgcagagaccccagccagcggggcggtgggggaaggggagggcacgcctccttcccaggagctcagcaaggctgtccgcgggagcccagggctgcccgcagggctttggcgtaggcctcgccggcgggagaacctccgcttgccggagaaggtgccacctctggggaaacaggctgaaaggtgaccctggcggcccaagtctccagcaggtcaccgggagagcgcgccccaggcccctgcggaaggaggtcccaggagggtctccgcaaggggctccctactctgcctccagggaggggctgcgacctttggtgacactgggagtccggagtccccgcggggcctgccagcccccggccgagcacggccccacgcggagcccgtgcagcctgacttggggcccaacgcccgtccccgcagcgcgagacgcgcaggtgcccggccctgccctggccgagacccgccgcctgcgcagccccgcagaagctccagctttggcccgtgtgaggtccgggctcggcctgggctgggcggagcccgctcccgaagcgcctcagcgccgggccgccgccctcgccgtcatccccatatgcaaaacggggaaacggggactc

SEQ ID NO: 12885 - DNA, 658 bp, Homo sapiens
  source 1..658: mol_type = other DNA
ggtcttcagggcccacactgggggctaaatgccagatttccctggaaacacagaaaggggcatggggcagccctgtccagtcactgccacgtgggcccctgcaacgccagggccaggcagagcgagcctctgcctggctgtgcgtccctcacacagagcccaagacctggactcaggacccgggcaggagtgagtgggagctcaaagccacatctgggagctcacatggagacttgctgagcccctgggcacagaggctgcttcccgggctcagctgcacatcctgcagagctgggtgggcggggaggagagcagtggccagcgccagccccctccagccccgcagaccctgggaggcagcagatgacagcccgcccagcgcccgggagggggcgtgggaggggcgcccagtgcccggctcagtccctcggtccccgcaggctgaatgagccccgccgtccggggtgggaggtcctggccccgccatgtgtgcagggggtgggacctcccgtcccttgccgcccgggagccgagtgggcgcagggcggggcctgcaggggcgcgggcggggcgctggcggggagcctgcggctgggccaatgagaaaccgggctcggcgagccggccgcccacgggcctcgctggctgcataaagagc

SEQ ID NO: 12886 - DNA, 392 bp, Homo sapiens
  source 1..392: mol_type = other DNA
tcaaggattttagcatccttgagaagtggaaccaatcctaaagaatcttaacttcattgcatttgcagaataatgtagacatccttggagggccagggggtcaagcaggcgggctgagcactggtcctggtgaccggaaggcagcactgccctccccgcatcagcaccgggaagaccgtcctgggctgatcggcacgaaaccctgggcgcctgtggctgccccagaactgcaggagccccaacgccttcagcgcagggttcactgtcaggagagagcagggcggagcccggggcccaggccgcgcgccccgccttcgccccgctttgaaagcctgcgtctggctcccagacaccaccgagtgctgagtcctccagcctgtctagagcgtccc

SEQ ID NO: 12887 - DNA, 550 bp, Homo sapiens
  source 1..550: mol_type = other DNA
cagcgctggggctgactccgtcctgggggccgtgcgccccgcagagagcgcccgagagccggcgccgagttccgctaggagccctccacgctgggggatcctggcgcagagacagcgctgggctactggcgaggctcgcttaaaaagcgtccgtacccctcggtctggtttttctgagagtgggaagggtccgggctggggcgtcaaggccaggcctggcggcaaggggtgggtgcggctcgggggccgcgcgctcaggccgcgggggtcgcgcgggaagcacagggcttcgggttccgagcgcggctcccgggagggggcgctgccgcccgcggctgggtccggccccgcagcctcgcgaccaaccccgccccgccccgcgcgcccgcctgcccagactgcggctcccgcccgcgccgcccgcgcccaccagggaccggagagcgcccgcacccatccggcccggcccggccgcccagcgcctcaggccaggacctgctcacccggagcagccgccgccggccggaagtgccggccactcggttctggg

SEQ ID NO: 12888 - DNA, 646 bp, Homo sapiens
  source 1..646: mol_type = other DNA
ggggccgtgcgccccgcagagagcgcccgagagccggcgccgagttccgctaggagccctccacgctgggggatcctggcgcagagacagcgctgggctactggcgaggctcgcttaaaaagcgtccgtacccctcggtctggtttttctgagagtgggaagggtccgggctggggcgtcaaggccaggcctggcggcaaggggtgggtgcggctcgggggccgcgcgctcaggccgcgggggtcgcgcgggaagcacagggcttcgggttccgagcgcggctcccgggagggggcgctgccgcccgcggctgggtccggccccgcagcctcgcgaccaaccccgccccgccccgcgcgcccgcctgcccagactgcggctcccgcccgcgccgcccgcgcccaccagggaccggagagcgcccgcacccatccggcccggcccggccgcccagcgcctcaggccaggacctgctcacccggagcagccgccgccggccggaagtgccggccactcggttctgggacgctctagacaggctggaggactcagcactcggtggtgtctgggagccagacgcaggctttcaaagcggggcgaaggcggggcgcgcggcctgggccccgggctccgccctgctctctcc

SEQ ID NO: 12889 - DNA, 456 bp, Homo sapiens
  source 1..456: mol_type = other DNA
gtgcccaaggtggtcaggagacatcaatcaaatatattgaagatatacattgggttggcaatcgcttgcaagagttatgctttatcatcagatgaagcctccaggtacatggcctgaaccagtttttcaggttaacttcggaaagcccttgccacctgtcctttgcagcacctgctaatgatctgtcagtgacgctgtgaccaaggctcatcaccctgcgggccgtgggccccagagggcggcacagcttctataggagcacagggcccagggaggtgccctcatccttggctggaaggccgaggcctggaggagggaaagggtctcccttgtctggccttttcagccctcagcccggggtggctgactcagggaggagactcggacctgcccagccccggggccctcactggctccaggaaacccgctggtgttgactgtgggcagtccagcctc

SEQ ID NO: 12890 - DNA, 509 bp, Homo sapiens
  source 1..509: mol_type = other DNA
gcaagtgcaagtcctgggaactgccctcccaccctctgcagggacgtcctcctttcaggggccaagctttgctcctgttagggcggaggctgcagcccatgtgaccagggccctggtccagacacagccctggatccggtgcccgcctggggtgtgcaaggacagctgaggctgccattcagggagccccacgaatgtgaggcctggccccttcctccaggcctccaggccccatctctggagactcccagccctcctgagtgcctgtcccctgctgggtgcgggggacaccacggaccagacctggctcaagtcacatctgcaggcggatctgggccgggtgtgtgaggagtggcacagaggcctggggcaccacacccagtgtgggctgcagcggggccccccagagcctagagctggccgggtccccagagcagcaggccgagtgcagggagcagcgcaaggatggcagcagccggctgcagggcatgggccccgctggcgttgca

SEQ ID NO: 12891 - DNA, 320 bp, Homo sapiens
  source 1..320: mol_type = other DNA
tccctgctctggaaacttctaattttagtgggctgaggacccatctctgggcatgaggtagcactgtcactgtgagaggcacctttctagtgactagtctcgctctgttgcagtggcgcgatctcggtcccgagtagctgggattcttatttgagccagtcgctactcacgctggggagaccctcttgatgagagttactcacgaacggcccaggcaggggccttactagtaagcacgaagtcctcagggcacgcaggcaccgtgacctcacacactagtgcgctggagtgtgttttttttttttttggtattataatga

SEQ ID NO: 12892 - DNA, 528 bp, Homo sapiens
  source 1..528: mol_type = other DNA
ctagtgactagtctcgctctgttgcagtggcgcgatctcggtcccgagtagctgggattcttatttgagccagtcgctactcacgctggggagaccctcttgatgagagttactcacgaacggcccaggcaggggccttactagtaagcacgaagtcctcagggcacgcaggcaccgtgacctcacacactagtgcgctggagtgtgttttttttttttttggtattataatgagctaaaagctcgtgctcttcagcggagaagatcccctacctggccgccggccactttctgtgggccgtggggtcctcaaggagacggcccttgggctcaggggctgcgttctgcctggccgccggccgctccaacagcagcacaaggcgggactcagaaccggcgttcagggccgccagcggccgcgaggcccagaccccgacaggccccggcgggtgggaggcgcgcgccccggggcgggcggggctccccctaccggccagacccggggagaggcgcgcggagagaagggcg

SEQ ID NO: 12893 - DNA, 307 bp, Homo sapiens
  source 1..307: mol_type = other DNA
tctcacaattgtcaggcgcctgggctggcagtgatgaggggccactcctgggcccaaccttgtcagcctgagagtggtctagctggcccatttgcaggtgtgtatcaggtgtacacagaccaggttaagggtcccccaggctggggctgggtggcctatgtgaaccccagaggcacagccaggacatgggggctcatcatctgagctcagcaggaaaggccttctctgtcagagctgtcccaggaccactggacatggctgaggaacagtgaaggcctggccataagccggtgcccaagggcctggg

SEQ ID NO: 12894 - DNA, 788 bp, Homo sapiens
  source 1..788: mol_type = other DNA
ctttgagggcggtccagaaccctggaaccccagcccaggcccaggcctgaatccggagcttgctggcatccgctgtcattcgagagcctggggctgacggggagagctggtccggccttctctgggccgcctttcctccccagcctcgtcaggaaggggcacaggacagccgagctgtgcgacagcccgctgggcctgcgccccagggcctccggcgacacttggagtccgcagctgagtcactgactctcacccgggctcgcccggccgtgatttgctccggtttcaaaagggatgcgcacggggaccatgagcgtgattcgccctgagccgctgcgaacgcgagctggggtggccctggaggtcctggagcagaagctaggttcccgcagagtccgctgcagcgccgctggcgatcgggctgaagtcccgcggcttcggccgcggaggtgctggagcctttgcgctcagacgaagggccgaacggccagggccaggccgcgtcttcagagcctggcgagggtctcgcgctgctgggaaggcggagacgccggggcgcgcgtgcaccctcgcgcctgcagcgccgcgcacggccgccaggtgccgctgtggcgctcagcgcgccgcccgccccgccccagggaacgcgaaagtggcgcgggcctggacggcgggacggaccacgtagggcgctgagaaggtcgcgccacggtgggcggggctccgggcccctccccctcggccgccctcgcgctgtggttcgctccgggcgcgctgcgctcgtgagt

SEQ ID NO: 12895 - DNA, 419 bp, Homo sapiens
  source 1..419: mol_type = other DNA
ccccgggtaaggaactttcccccttacctgcaaggaggtggtaagccctgcctgagggcagctttaggtacccagctggcaggtggctgggggcatgggattagctgtccgggtggcagttcactcccaggcccccaacacccgagctcggaggtgggaccaaggtcctcctggaaagattccagcccagaatcttggaagatccagcacacagatctgccttggaacacagatgacctgaggcaggagggatcccgcagagagtggcccgtaacactcccctgcccccttccaggcagtctggggggtccctgggctgcctggggtgagccagtggggccccaggccatggtccaggccagcctggaaggctggggagcccctggaggggcggggtcttcacacctccaccctgggga

SEQ ID NO: 12896 - DNA, 557 bp, Homo sapiens
  source 1..557: mol_type = other DNA
gaaggagggcctggatctgccagcccctctttcagggcagcccgagagacacataggggtccccgggttggcactggctacggacaggccctttggggccccagcccctggccagcctttggaggaacagctgatggctcccgggggcgttagtcacagtgtgacaatggccatgagacaaccatgtccctctgtgttctcccagccctgcgggggtatgaaggcctgtggcttccacccagccctgagcaaggggtgggctggtggctggtgcccaagaccctccttcccaccagaagcctctgagggagaccggcctgtggccgtcacctgcctggtgccaggccttcccccagccactgagggagagtggcctgtggccattgcttgcctggtgccaggccatttcagccagggctatccctactttggctggcccagcgagctttggggccaggttggcccctaccgcccggaccccagcccggctccttgactgagcccggctgcctggtgactcagacccgcagagtctgctgagcgggccaggtataagg

SEQ ID NO: 12897 - DNA, 633 bp, Homo sapiens
  source 1..633: mol_type = other DNA
cctcagccatgcccagggtcaggactgtggaggggctgatcagcccctcgcctgtccagggctatttaggggccatgggagctgtggccaagcccaccttctgggaagccctaggagaggcccctgcctcagtctgcccctggtgtgctggggcagggagactcttaggaggaaaggctcctccaggcctagtcacgcttcctactgaggccaggagctgccaggaccggtacgggagggctgtgggaggagggcctttggcaccggcccctgtgctaggaagtctgccaggcccgagttggagccaccccctgcaggggagggggcggctctgcctcagcaggccccagggcccccgaagtcacagaagctttttcggggccccttgacgtttcccaccccctcacggggagggcaccaggcctgaagctggcaggagctagggccagtcctggacgctgacccggccagcgctattctgggcagggagggaaaggggcagagcaggtggtcccccgagtcctggtccccaaccgcgcacaggctgggggttgggagcagcctggggccggcgcgggcctgggcgtgggaaggcggagcatgccaccctctcgtggccgtgcgggggcggga

SEQ ID NO: 12898 - DNA, 757 bp, Homo sapiens
  source 1..757: mol_type = other DNA
ctttctcacattggaaaaaatgaaaactttcggacccatgaaattttattacattttgccaaaaacagaaccaataacataagtattcaaagttatgtaaagataattatttaatatgaacattatgatgaaggggctgccttgcaggcctgccttccagctttgctacaggggtgcgccaaagggcgccagttccggagctgctgggcctgggctgcaggagggcggagctggggccgcaaggctggtgccggccgacaaacgacgcggcgcgggcgagtgggcggaggcggctgcggggaaggctgggctgccgcggccagggaatcactgcgtggctgcctctgtgtcggagatccagatgcctggactggcctcggggtcccagcgcttgcccggcgagccggcggtccggggacgggtccgggccgaggcctgcggtgaactcggctcggcgggtgcccaggaggcgggtccggggcggggcctgcggtgaactcggctcggcgggtgcccaggaggcgggtccggggcggggcctgcggtgaactcggctcggcgggtgcccaggaggcgggtccggggcggggcctgcggtgaactcggctcggcgggtgcccaggaggcggggcaggggcggggcctgcagagcccaggaggcgggtccggggcggggcctgcggtgagctcggctcggtggggccggggcaggcctggggcggggcctgcggtgagctcgcgctgggcgggctgttcc

SEQ ID NO: 12899 - DNA, 603 bp, Homo sapiens
  source 1..603: mol_type = other DNA
atttgctataaattccttaatacattgttattatttttgctttaggtaatcaactatcttttaacttgattcaaaaataagaaaaaaattaccttctatttcctatttctggttctgcctgaagaacttcctttaacataaaggtccccaacccctgggtcacagaccggttagccggcgagcgctggcgggcgtcgtggtctgaggctgaagaccgcgacatcaccagagtgtgagctccatggggtgggggcctagtttgctggggcctggaaccggagcccgcttgcccagcaggcatggtgtattctgtaccttttttaaagaaaaaaatgagctttagggtagaagaaaaggttttatttttctttctcacattggaaaaaatgaaaactttcggacccatgaaattttattacattttgccaaaaacagaaccaataacataagtattcaaagttatgtaaagataattatttaatatgaacattatgatgaaggggctgccttgcaggcctgccttccagctttgctacaggggtgcgccaaagggcgccagttccggagctgctgggcctgggctgcaggagggcggagctgggg

SEQ ID NO: 12900 - DNA, 620 bp, Homo sapiens
  source 1..620: mol_type = other DNA
atttgctataaattccttaatacattgttattatttttgctttaggtaatcaactatcttttaacttgattcaaaaataagaaaaaaattaccttctatttcctatttctggttctgcctgaagaacttcctttaacataaaggtccccaacccctgggtcacagaccggttagccggcgagcgctggcgggcgtcgtggtctgaggctgaagaccgcgacatcaccagagtgtgagctccatggggtgggggcctagtttgctggggcctggaaccggagcccgcttgcccagcaggcatggtgtattctgtaccttttttaaagaaaaaaatgagctttagggtagaagaaaaggttttatttttctttctcacattggaaaaaatgaaaactttcggacccatgaaattttattacattttgccaaaaacagaaccaataacataagtattcaaagttatgtaaagataattatttaatatgaacattatgatgaaggggctgccttgcaggcctgccttccagctttgctacaggggtgcgccaaagggcgccagttccggagctgctgggcctgggctgcaggagggcggagctggggccgcaaggctggtgccg

SEQ ID NO: 12901 - DNA, 620 bp, Homo sapiens; identical to SEQ ID NO: 12900
  source 1..620: mol_type = other DNA

SEQ ID NO: 12902 - DNA, 490 bp, Homo sapiens
  source 1..490: mol_type = other DNA
tggggcccagccccaaagagttgatggcgctgcccccaacgtagcaatcccacggggagggcttctggggccctggagggcgggaggcagggctggtggagaccaggagggctcagtctctccctgcacaacgcagggtggagttgctgcctccacagcccgggccttctgcccacagggctccccaggcaacttcgagggccgggtcctcacagagagtaggaccagcacctgcccttcctacctgccctggacacccacgggcacccacagggcaccgggccaggaggccactgggccccgttgcggagggcagacctctgcctggcggggggcagcaggggcagcgcccagcgacagccaggctggtgggcgtgggccaggcagggtggggcaggtgcccgtcctgggctgacgcttgcacagagccctgcagaatgccgctggctggcggactgcccacccccgcccagcccgtgcctataaggcc

SEQ ID NO: 12903 - DNA, 527 bp, Homo sapiens
  source 1..527: mol_type = other DNA
gcccggggccccgccttgtccaccaggcacccattcagccaggacagggcccagggctgggctggtgcaagcctggagtacggtgctgtgccgccctaagccaggcacccttgtgtgttcctaggggcccacttcggctccagacagaagcctgggcttgtccccgtgccgggtttcctggttcagggagcagggggcaaggctaacggggtggggcggtggttttccctgccccaggcccctaccctgatggtaccaaccaggcccagggccccagctccaggggctgagtggcccaccaggttctgccccagaacgtgcctggagctcttcctcaccagtgaacaagcactgggcagggatgacatgaggggccacagtgtctccttggcacctgggatgggcagctcatcctcgtgggcagccctgccaggtcagaggcccggctcccatgcctggcagggacgcagccacagtgatgcctgaggtcccacgggggtgagccaggtgtgcagggccctcctcca

SEQ ID NO: 12904 - DNA, 509 bp, Homo sapiens
  source 1..509: mol_type = other DNA
gatactctggtctatttaaaaaagccttttctttgttctttacgaaggccagccagtctcaaataaaacatttcaatttcagaaattcacctattttatatgatgaagccagctgtccctggccacacaagcgaccaggcaggtctccccctgaaacctctgcacaggtgggcgctggcggggagggacagggccggctccagaggcgacggggtcgcaccctgagcggaggggctcccggggtccccaggggttatggtgatggcgggaccccctagagggaggtcccctgggcggtgccaacaggctgccgagggtggctgctgtcccgtttctccagcagccagggcctagaacattccccgtggctttcctaaagggagcgagatttctgtgagaaatattttcacctgggagccccaagggggaccctgcccacctttgaacactggcagatgggctggaggcctggagcctgggcggggctgtgcggccggcggaggcccccg

SEQ ID NO: 12905 - DNA, 225 bp, Homo sapiens
  source 1..225: mol_type = other DNA
atttcttctagatatcaattttgttgatcctttcaaaaaaccagctcctggattcattaattttttgaaggagttctagtttgattgcactaaaatttttaaaaagtaaaaaaaatacatgtggtttaatacaattcgttttttgctataaaccttgcaaggagatgatcttgctcctctcagccctggaggaggagggagagtcctctcggtctctcaggcaga

SEQ ID NO: 12906 - DNA, 257 bp, Homo sapiens
  source 1..257: mol_type = other DNA
gatacgtcactttgatcattccaactatacaacattttggaaaagggttttcttttcctctttttaagacagtgaaaatactcctaggatcctgcaaggaggtttttgatcaattttgcaatgaactaaatctgtggtataaaaataaagtctattaaaagccctggagaaaggagaggccaggagagcaatggggaattaggcacctgacttcgctctgagagtctcaggcaggtccagagcccgtgatccagagc

SEQ ID NO: 12907 - DNA, 541 bp, Homo sapiens
  source 1..541: mol_type = other DNA
tgagacaggggtgttacaggtgtctgtcagccccagccccgtgtggggttcagaagacccctccctggtgcaggccggtggcagagccccagcgcccacagcccctcggagagggcctggcgggaggagaggcacccaccgatggcagagcctcagtgccccacccccgcctgagggatggccaaggaacagcccagcggaatcccaggctgcgggggtgcctgcgtcctcccctcccgagctcacgaggactgtccaggtgtcagtgacggtcaccccgacctggtcccctgtccggcctcgccaggtcagcacccgccgcgcgcacagcagggccgggtggaaggaggccgggcctggccgtggctcaggcgccacctcactggggaaactgggaggtggtctcagcccccttcaggagccggggtaggcctgggcggcgcggggacccccaccgcgggctcgccgactccgcccgccggaggcccctcccgcgtcccgcccctgcccccgccccggggccgcgcggctgcctgggagg

SEQ ID NO: 12908 - DNA, 674 bp, Homo sapiens
  source 1..674: mol_type = other DNA
ccgagaaacgggtccaaggctcggatgctctggccaggatttgcagaagcccctggggctgcggcttccggggccccagggcgggagtctgaccccaggggtctgcgaacccggacctgcgcgtggcgccgcgccgggtacctcccctcttccgagaaaggggaagggatcctgcccacgcctgggtagggggccgcggagggagcgggaacccgagggagcgcgcgcgccagcaagggggcgcggagggcccgggccagctacctgcgtgggggccgcgagccccgggcgccccccgccccgcgcgtctcccagccgcccccgccccccgcgcggcccccgccccggctccgccccgcccctcgcgcggggtccgcgtctgcggctgcgttccccgaaagacgaggctgcgcccggattccggtccgcagggagaccgaagggcacagctccccgcgccgcgcacgccgcccgagcccggagtgcggacacccccgggatgtgagtgagccccccgaccccgaggcccgcgctccacgccccatccgcggtgagcgccgaggcgcgcgcggaaggccaagggaggggactcggcccggggttcccggccccccagcccaggggtgggggtggggacctggcacgcgcccctccccccagtggcaggtcccacc

SEQ ID NO: 12909 - DNA, 527 bp, Homo sapiens
  source 1..527: mol_type = other DNA
aataaatgttagctctgtcacatcctgcaaagatatgctgcagtaggcgagggcagaaaccaggtctctctcctcatgccctttcccagggctcagggcagggctagggcagcggcagatcggggcttccccagtgccccggggaggcccgagaaacgggtccaaggctcggatgctctggccaggatttgcagaagcccctggggctgcggcttccggggccccagggcgggagtctgaccccaggggtctgcgaacccggacctgcgcgtggcgccgcgccgggtacctcccctcttccgagaaaggggaagggatcctgcccacgcctgggtagggggccgcggagggagcgggaacccgagggagcgcgcgcgccagcaagggggcgcggagggcccgggccagctacctgcgtgggggccgcgagccccgggcgccccccgccccgcgcgtctcccagccgcccccgccccccgcgcggcccccgccccggctccgccccgcccctcgcgcggggtccgcgt

SEQ ID NO: 12910 - DNA, 490 bp, Homo sapiens
  source 1..490: mol_type = other DNA
tcctgggagaagctctccctgaccctgaggcacctccacccctctggagccacaatggagcgggcccaagctgcttgggttcccacttcagctgggtcacctgtcacctgcgtcactgtgtgaccccgagcagggagcgccgccttatactatctgcacagcagggctgtggtgagacttctaaggtggaatccatagtacatgctcaataaatgttagctctgtcacatcctgcaaagatatgctgcagtaggcgagggcagaaaccaggtctctctcctcatgccctttcccagggctcagggcagggctagggcagcggcagatcggggcttccccagtgccccggggaggcccgagaaacgggtccaaggctcggatgctctggccaggatttgcagaagcccctggggctgcggcttccggggccccagggcgggagtctgaccccaggggtctgcgaacccggacctgcgcgtggcgccgcgcc

SEQ ID NO: 12911 - DNA, 464 bp, Homo sapiens
  source 1..464: mol_type = other DNA
caagcacacagagacgctcaggcttgaccctggctccggacgtccagcccctgccgctgccccacccctctgctgcccttgggagaggggcagctcagagcctcgactctgcactctgcatcagcaccccccaagggcttgggtggggtcttgagaggagggggtggcctcagggagcgacctgggctttccaagcctctcccggggggcgggcccccaagagctccagctgtgaccccaaggtcctgtgactatggagcccagacatgtcaggcatggcccattccggggcgaggctccctgccctgcactgcagggctgaggcactgagcggcaagccaggcgagccaccttccacctgccgtggcacgggtgcacaggtccttcccctctggccccagatgtcctggagggaaacaacagtccctggcctggcgcctggagctggggaccagtgtgaggcc

SEQ ID NO: 12912 - DNA, 640 bp, Homo sapiens
  source 1..640: mol_type = other DNA
gctctggcgggcctggcggctcagtgcgatctgggcgagcacagccagcggctgggagcacatcccggaggggctgcctgcggcgggaggagcggcaggggccacgtggtgggggacggctcgccagggcgcgcacgcggtggcggcggcggtggaggcgttgcccgcctagctaggggcccgcggcctggagaggcgtcggttctccttccgcgctgaaggcggagacagcgacttcccgtggaggcaagccgtgggcgccgcggaggcgggggctgggggtcgggagcgtcctcagggacaagtctcccagcacgcggccgcgacctccccgttgggggtctggagccaggagcccacgcgcgtcggatccggagagtctggtgggcgcagcctacgtgacagggtcggctcgggaccgagctgctggggactgggccttgcggggcggggccgctgggggccggctcgggaaggagctttcggaggcggggcccgctcggggagggacctgatttcgggggagccttcgggagggcgcctgccatagagtcggctggggatggagccgctcgggccgagccctccaccgcccaccatcaccgagtccggcccaggctcctagcgcggccgccggaag

SEQ ID NO: 12913 - DNA, 648 bp, Homo sapiens
  source 1..648: mol_type = other DNA
ggctcgggaccgagctgctggggactgggccttgcggggcggggccgctgggggccggctcgggaaggagctttcggaggcggggcccgctcggggagggacctgatttcgggggagccttcgggagggcgcctgccatagagtcggctggggatggagccgctcgggccgagccctccaccgcccaccatcaccgagtccggcccaggctcctagcgcggccgccggaaggggcgggtcagcgggcgggcatttcctgccggtgcctagggccgacggggacgctggcactggcgttggggggtcccgcatctagggctctccctgcctccggcccccgcgaggggcgcgcgcctctccccgccctccagcagtcctggtagggcccgggcgcgtccgcgctctgcagcgggaggtcctcgtgtactcactgggctcctgcctgccgcctccggcccaggacgcgcagcgtcggtatgggccccgccgcctccccgcaccccggcgctccagggatgtggcaagacccggctttgagcacctcccgggcgccggccccgaggccgacctagctctgcacgtgggccgcggggctctctaactaggagcacgcacgggaccctggcgggcccctccgcctggctcaga

SEQ ID NO: 12914 - DNA, 603 bp, Homo sapiens
  source 1..603: mol_type = other DNA
tgagcgtccaccctggcagctgttgccccagctcaggggtccaagaacccgtttatttttcccagaaagtgacaattttctcttttcaggtcgtaagcaggggaacctgtaacatcctcctcaggctcccggggacgcccctggaagagggcgctggggcccccgcgaggggagcgggaggtcgcgcgtctcgcagcggttcccggccgccggtgaccatcgctgcggacacaactccagccgaggacccccggaggcctggagtgcacggaggggccgcgggcagcgtggggacggcgccgtcatctcccgaagcccggccccgcgctggctccccgggcggtgcagggccggcgtcgggaaggaggctccgaggcgccggcttctgcgccccacgcagcgccgctccccgcgcccgggcgctttgcaggcgcgggcgggatccgggccagcgtgtacgcgaaagccacgcgcgggcgcagcccacgaggggaggggcggggaaaggcctcctcttcgctcccggccccgcccccacacggccaccgaggcgtgcggtcctcccggggcccagagcgtcccggaagtgcgcgccggccgggc

SEQ ID NO: 12915 - DNA, 693 bp, Homo sapiens
  source 1..693: mol_type = other DNA
agctgggcggcagcacacttgccaccgaggcctggggcagccccatgaggagctgtgcccacaggggaggcgccctctggagctctggcgtcccccaggctccgggtcgaccccatggtctgtcttgccactgtggctccgtgcaccggcacggccgccgtggtgactgtggatggtcccagcagctctgggtcgcggcccgtccccgtccctccgtgccacggtgggggcatgcgggtaccaggctccacgctctcctggctctcaggcccctgacgagggggcgggcggggcgctgcgcagcctcctgaggagccttccccgcagggcccggtgcagcgccggcttcgggcctgaatccagcgcggagcggccggcgggccagccgcctggggccgtcccttgcgcccagccgcggggcgcctggcgcgtgacgctcgtgcagcaagcagcggccgggcccgagggtgcgcccgagcgggctgccgagctgggagtcaacttcggtcggagccggcagggcagcgcgcggggggccaagccgcacaggtgcgaggcctgcggcaagagtttcaagtataactcgctgctcctgaagcaccagcgcatccagaagccctacgcctgccacgagtgcggcaagcgcttccgcggctggtcgggcttcatccagcaccaccgcatacgagtgcg

SEQ ID NO: 12916 - DNA, 732 bp, Homo sapiens
  source 1..732: mol_type = other DNA
tgccgggtggcggcggcgcgggactgtcggaggcgcgggcagggacctgggctcccaaggctgtggccctcccgccccagtccagggtccagttccaggggcgcgtctgtctgtcttgtaagagggaacaagtccacattgcagctgtacactttgcacccatgatgaaaagcgtcacttttgcagcattccagctggagatggaccttcggtctgcggcaggcggaaggtgcatcttgcccggggagcccagagcccagggcttctctgcagcggagacgcgagggcggcgtcctgcagggaggcggggggcagcgcctggggcgctccaagctctcggccccaaggaagcccacgctcgggacccgcgtgctgccacagccccgggggcctggagggtcccgtgagccgagcgggacccgggacaagcgcgggacgccgcggggaacggacgggaacgcgcgtggccgccccacagcgggccttcgacacctcctgtcctgcgggtgcccggtcctcagttggctcgagccggatcccggcgcgccaacggctcgaccttgccccccacgaggcagggcttcctgcccggcaggaaggactcggccggcgcctgcgggcaaccgatgagctgaaggcgccgcggctgggccgtcccgctctcccgccgccgagcgcgctgtcctcccgctgcccagagcgtcgccggaagtgccgagggggcgtttccgg

SEQ ID NO: 12917 - DNA, 617 bp, Homo sapiens
  source 1..617: mol_type = other DNA
tgcggtggcagcccggactccacagtgaaagtgcggaatgcatgtgaattcatctggctcagggcctaccgccaagtggccatgctccccagtgaagacactggggttaaaccctggtcagggtcagcagtcacgctggggactgagcgcaggaaggaggctccagctcctgtgacctttgtccagaggcaccacctctgaggggctgctgtgggctggacagcaggtgcttggccatctgagcctgtgtggtcccttctccagagccagagcgtgtacttaggaaggacctgctaggtgcccctgccctcagaggctctgggagagagctgtgtgcaagccctgggcaggagttcactggcctggtcgtgtgacctgtggggcatcctgacagccagccctgtgctgcagaggtcagtgggactgggtttggatctgggtccccgcccagcgtgaaggggcgctggaccacaggccggcaggacagtcagtggtcctgctgccgcagccccgtgcaggcttagaccgcccagccttgggatgagcgccgctgggggcggaggccgcgctcgggggcggggctggccgctgggggcggggcggggctggccgctggg

SEQ ID NO: 12918 - DNA, 384 bp, Homo sapiens
  source 1..384: mol_type = other DNA
tgctctcccagaggcctccaggaggactagtccaggggccccggctctcactccacactggccaccggtggccactaccagactcagcctctgggatcgcgcatcctgcaccccacgggtgtggcctggcggccctcctcctcccatgtgcaggctgctaagcagatgcgacccctctttatcttcagagtcgcagaagcgctgcagggactggcgagactccaccacgtcgcggggccggccgcccacctcctgggtgcccgtcagcaccgcggcccacggagcgcgcgagcccaggggcccaaccgagcgcagccaccggacgccccgcgtggccaccgcgtgggcctctcccgcgcctgcgcagcccgcccccttcccggc

SEQ ID NO: 12919 - DNA, 518 bp, Homo sapiens
  source 1..518: mol_type = other DNA
acacacagccgggtgagccccgcagggagctgtgcagtctcaggtcgtccagtcctggggctgcaggccagttctccaagctctgaaagcacgtgggttccagaacagaggcgcctcggactggggccaggcctggagcctccgctccgcgggcactaacaaaaccgtttttaaaaaccccattgtgaacatttttggaacaagcctcttcgcgagcgggcagactcctggagtccccgcaaagggagccgaggagctaggcgcgccgagtccaggtccgccctgactacgctcagcggccgccgcggcgcatgcgcagtacaacctgccagccagccgcgggcgttccggccgcggttgccaggggttaccgtcccgcgggcgggcggagctggccgtccagagcccgccttcctgggtcgaagcggcattgccgcctattgggcaatggccagcttcgcacgccagacccgtgccccgcccagccgcgccgcgggccgcccccactcaggagggac

SEQ ID NO: 12920 - DNA, 557 bp, Homo sapiens
  source 1..557: mol_type = other DNA
tctgaaagcacgtgggttccagaacagaggcgcctcggactggggccaggcctggagcctccgctccgcgggcactaacaaaaccgtttttaaaaaccccattgtgaacatttttggaacaagcctcttcgcgagcgggcagactcctggagtccccgcaaagggagccgaggagctaggcgcgccgagtccaggtccgccctgactacgctcagcggccgccgcggcgcatgcgcagtacaacctgccagccagccgcgggcgttccggccgcggttgccaggggttaccgtcccgcgggcgggcggagctggccgtccagagcccgccttcctgggtcgaagcggcattgccgcctattgggcaatggccagcttcgcacgccagacccgtgccccgcccagccgcgccgcgggccgcccccactcaggagggacagtcggggaccggcgcgggcactcaggagcccgcggcccaggtggtgcgggcggccctagcccggctgcggagcgctgcgcgagcggcgggctggctgaccccgagggacccccagcgca

SEQ ID NO: 12921 - DNA, 370 bp, Homo sapiens
  source 1..370: mol_type = other DNA
ctgagctgcagcttcgggagggacgcacttacacttgtacatgtttccaatgacgaactaaaaactttcatgttttcagaggttcaacatgaggtaccctcctgggtcaagaatgggctgggtgggccccaggtctcgcccctcgccaagtctcccaaggggacgcgatcccggactgcacaagctgggcccgcgcggcctcccagagcccaagcagtcccaggccacttcccggcgctcactagtgacgtccgcctctccgctgccgttgtcagcgcgacggcgggtcctcggcggtcggcagacatccgggcctgctcctggcagctccgccctggcccgctccgccccgcccgcgggaaaaaggacg

SEQ ID NO: 12922 - DNA, 326 bp, Homo sapiens
  source 1..326: mol_type = other DNA
gcgaaggatgatgccgctgtgacgacagctgctgccgctgtggcgaaggatgctgccgctgtgacgacggatgctccactttggaagatctgcccagacccttcggcacaggcccaagacggagtctcactctgtcgcccaggctggagtacaatgggttcaagcgattctcttgcctcagcctcccaggtagctgggatcacaggcctggtcttgaactcccgacctcaggggttcctccggacgcgcgaggctggtgctccaggcgggctggcggccggggcgggctctccgggacggttccgggagggcgtcctgggcgggcc

SEQ ID NO: 12923 - DNA, 420 bp, Homo sapiens
  source 1..420: mol_type = other DNA
cggcctgcacggggaccgcgggcgtgctgaccccatgtgcgctgttgcagagccggcccaccgcacggctcctgcgggaggaggtcatcctggagcgactcctcacctggcagggagaccccgaacccactgtgcgctggttgggcctgctgggcctgggccacctcgcgctgaatcgcccggtcgcggcgaggtctgcaagaggctgaccccgagtcccagcaggtgcggcacgtgagcacgctgctgccggcgctcctgggcgcactgggcgaaggcgacgcgcggctcgtgggtgcagcgctgggcgccctgaggaggctcctgctgcggccccgggcgcctgtgcggctcctgagcgcggagctgggaccgcgcctccctccgtctgtccagctccgcccctccagggccgtgtcc

SEQ ID NO: 12924 - DNA, 325 bp, Homo sapiens
  source 1..325: mol_type = other DNA
gcccggtcgcggcgaggtctgcaagaggctgaccccgagtcccagcaggtgcggcacgtgagcacgctgctgccggcgctcctgggcgcactgggcgaaggcgacgcgcggctcgtgggtgcagcgctgggcgccctgaggaggctcctgctgcggccccgggcgcctgtgcggctcctgagcgcggagctgggaccgcgcctccctccgtctgtccagctccgcccctccagggccgtgtcctgcaggggctccaggtccagctccaggccctgttccccctgactgcgccctcccacgcagacacgggactcaatccgcgcct

SEQ ID NO: 12925 - DNA, 564 bp, Homo sapiens
  source 1..564: mol_type = other DNA
ccctgccccttgctccagggactgtgcccctcccatgatgttctggggtggccagaacgtggctgcctggcctcagcatccttgtggtcagcatgggtggccacactccctcccctggaccacccgtgtttgcattggggtgttctggtcagactctgtcctcggggccccaagccacaggggaatggattctccctgggtagtgacctttagaaagtttcctgtggggcttggactgcaggaccccatcaaaaggtcttttggtgccagccgacagtgggcatgcgcccccctgccccacgagcctggctgctcaagctctaactaaggcagcctctggcctccctccccaggcccagggcaggagctggctgctggccagcggttgggggtggagtctggctggtctgtcctccacctgagctgcacctcattgcccggccaaagggcagatggtgaccaagccgtccgagaggagttgggtgacatcccccaccccatccccagcccctctcggcgcgccgatactatcagcgccataggccggggcgcgtcacggggtcg

SEQ ID NO: 12926 - DNA, 560 bp, Homo sapiens
  source 1..560: mol_type = other DNA
tctttccattgcaaaagcaagtccagttcagggggtttaaaaagccactgcctcctgttggcattgtccccatgggagcaagcgtgcaagccaggaaagaagtcccagtagcacccggccctgctgccatccctgccccttgctccagggactgtgcccctcccatgatgttctggggtggccagaacgtggctgcctggcctcagcatccttgtggtcagcatgggtggccacactccctcccctggaccacccgtgtttgcattggggtgttctggtcagactctgtcctcggggccccaagccacaggggaatggattctccctgggtagtgacctttagaaagtttcctgtggggcttggactgcaggaccccatcaaaaggtcttttggtgccagccgacagtgggcatgcgcccccctgccccacgagcctggctgctcaagctctaactaaggcagcctctggcctccctccccaggcccagggcaggagctggctgctggccagcggttgggggtggagtctggctggtctgtcctccacctgagctgcacc

SEQ ID NO: 12927 - DNA, 887 bp, Homo sapiens
  source 1..887: mol_type = other DNA
cccgtagatctggcgcgcgaaggcctcggcctgcgcctggatgagcgggccagacagcggcaccccgtgctggcgcagcgccaggaaccaggcgtacacggcgcggtcgatctcctcctcccagctgctccaggaaccagcgcagcttgggctcgtccttgagccagccgcgcagcgtcccgcccggcacgccgaagtcgcggcacacggcctgccgctcgccgcccttgacgcgctcgatggcctgcagcttgtccttgatggagtaggccttgcggaaggccatcttcacggccacgcggggccgcggcccgggcgcggggggcggcggccgtgcagcggggacgggggctggggcgggcgcggggggcccgggcaggggacggcggccgcggcgcggtaccgggccggccggggggcccgcggggtacatggctgcggcgggggggacccgggccgcgcgggtcgcgggagccacacgcccagccgctcggggcggggcactcgggggcggggccgcacgggtccctcccctttgtcccgcagcttggcgggcgcacgcgcgctgacctagcccggcccggccccgccccgcgcctgcgcgctggccgcctcgtgcgtcactcggcgcttgccggctgccggacccgcccccaccggcgacaccactggccgcgaagcgcagggggggcgcgcgcgctgccgcccgttcccagcacttgtgcagactcctccggggaagagcggcctccgcggtcatctccaacggaattctgcctttgaagtgtcggggcacggcgcgtcgagggtcctggcggccaggcggggcgtgtgcaagggtcgcgtcccccccccgggcccccggcccgtggctcttggtagagccc

SEQ ID NO: 12928 - DNA, 385 bp, Homo sapiens
  source 1..385: mol_type = other DNA
gatttcattactgaagagcttcaatcccagctcgagcccagatggcgccactgcactccagcctgggcgacagagcgatcaaaagaaaataacatatgtaacatgcagctttagataaaaaccgcactcagatcttcaagccttgggtctcaggcccctggccctggcctgctctccgtgacctgggtccccgcagctccaccgtctgtggtcggcggggcctcagtgaccgcacgctctggagcacgcgcgaccgggaccccgcgccggccccgcggccccgcccccagtttctctcagccaatgggcagtgaggggcggcatagccctttcgggccaataagcagcgagaggcggggttcccgcgccttgcgaactgcggggc

SEQ ID NO: 12929 - DNA, 909 bp, Homo sapiens
  source 1..909: mol_type = other DNA
cgcagcctgctccggaagcagcttccagtagaggccggtgacgctcgtccccgtagccgccctcggccgggggcggcggggccggggcgcggtcgggcagggggccggcgccggagggcagcgcgggctcctccttgacgggcgggccgggcgcggggctcggggctgggggcccggcctcgccgtagaagcgctggctggagatgccgtggcgcttctgccagcgccagaaccagccgtggctggccttgaaggtgcactcgggcccgtagatctggcgcgcgaaggcctcggcctgcgcctggatgagcgggccagacagcggcaccccgtgctggcgcagcgccaggaaccaggcgtacacggcgcggtcgatctcctcctcccagctgctccaggaaccagcgcagcttgggctcgtccttgagccagccgcgcagcgtcccgcccggcacgccgaagtcgcggcacacggcctgccgctcgccgcccttgacgcgctcgatggcctgcagcttgtccttgatggagtaggccttgcggaaggccatcttcacggccacgcggggccgcggcccgggcgcggggggcggcggccgtgcagcggggacgggggctggggcgggcgcggggggcccgggcaggggacggcggccgcggcgcggtaccgggccggccggggggcccgcggggtacatggctgcggcgggggggacccgggccgcgcgggtcgcgggagccacacgcccagccgctcggggcggggcactcgggggcggggccgcacgggtccctcccctttgtcccgcagcttggcgggcgcacgcgcgctgacctagcccggcccggccccgccccgcgcctgcgcgctggccgcctcgtgcgtcactcggcgcttgccggctgccg

SEQ ID NO: 12930 - DNA, 887 bp, Homo sapiens; identical to SEQ ID NO: 12927
  source 1..887: mol_type = other DNA

SEQ ID NO: 12931 - DNA, 646 bp, Homo sapiens
  source 1..646: mol_type = other DNA
aggcgcgcgcaactgtgctgggatcacaggcctgagccaccgcgcatggccgtgactgcttttaaacgcctttcgatctcgatgtcagggccgcgctgccaccccctcccgccccaggcagcaggactgggctctgagctgagggcaggagcagctggcggctcgcagcgcgaccgtgggaaccactgtgagccgccgcgaccctccttgactcgccgtgacccatcgtgacagtcacccgtgggcacccatgggcgcgggtgcttgggacgacaacccgggctcctcatcgcggccggaatccaagaggctgcggcgcgagacgccgcagcgtaagcccgcctggccccagcgccggcgaggctccttccgacgccgcgggcatcccgcgcggcgctgccggctggccctcgtctcgcgccgtcccaagcagggcctgggcccagcgccccgcgggctaaagaggttgcggcccgggacttcgtccggggacccgcccgcgcgcggccggcggacgagactgcgcttcccaagcggctttgcggccgcggactccaagtcccagctgtgcccgggacgctgcgcgcccccgggactccatttcccatcccggccccgccccccacctggctccgcgggcagccgg

SEQ ID NO: 12932 - DNA, 418 bp, Homo sapiens
  source 1..418: mol_type = other DNA
agccggggagcccctggagaatcacagcaggagttccacatggattctgccctggaattcctgtagaaggtccttggatgagggcacgcgcctagcgtgtcccccttggcacactgcagttgtttgcttctgtcaaaatttaaaaaggacctattcaagtggtcaactgacaggtcattaagtacacttgaactgctgttatgttttttgcatataagtcagaaagagctaacagcggttcacgcctgtaatcccagcacggtggaagatcaagaccccagctactccagccgaggcaggagaatcgagatcacgccactgcattccagcactccagcacaatttaggtaaacaagtttcaaaacccaaaatacgaatataatgtttttttggtgggactcattctagcaatgagtaa

SEQ ID NO: 12933 - DNA, 529 bp, Homo sapiens
  source 1..529: mol_type = other DNA
gatcaagaccccagctactccagccgaggcaggagaatcgagatcacgccactgcattccagcactccagcacaatttaggtaaacaagtttcaaaacccaaaatacgaatataatgtttttttggtgggactcattctagcaatgagtaatgtctaccagtcaatgagccggcgcggtggcgcgcgcctctggtcccagcactttgggaggccgagatgggaggaccacctgagcccgggaggtcggggctgcagtgagccgagatcgcgccactgcactgcagcctgggcgacagcttccccacttctctggggcgcagagaggtgaagttagctggtcttgggctgcggtcggacctcgccgcgagctccagacccgagtttccgagcccgcgcttcccggccctagcaacgccctcctgccggacacccctggcccctccgggggtcttagtccccgggcccggaagtccgcaccactgagaggggagccgatccctggcgctcctagaacggcgcaggaagttt

SEQ ID NO: 12934 - DNA, 354 bp, Homo sapiens
  source 1..354: mol_type = other DNA
caggcctggccgcagtcatccggagggaaatagtgaaagtcttaaagtctttgattacctaagagggaagggccccattcccttgtcaatcacttataaatatcagcgcgcccagccgtttggggccactattagccccgcagggctggactggcaggagagcaagtgacagtctacccaggcggatcacctgaggtcagcgcttggctgtgaccggggcggggcctgccggctgcggcggaaccacaagcggtgcggggcgaggcgggcggcctggacggcctggaaggccagcgcgcaccaccgagacgtgggctcctagaggggccggaagctttcggataacaacttccg

SEQ ID NO: 12935 - DNA, 659 bp, Homo sapiens
  source 1..659: mol_type = other DNA
acaatttaggtaaacaagtttcaaaacccaaaatacgaatataatgtttttttggtgggactcattctagcaatgagtaatgtctaccagtcaatgagccggcgcggtggcgcgcgcctctggtcccagcactttgggaggccgagatgggaggaccacctgagcccgggaggtcggggctgcagtgagccgagatcgcgccactgcactgcagcctgggcgacagcttccccacttctctggggcgcagagaggtgaagttagctggtcttgggctgcggtcggacctcgccgcgagctccagacccgagtttccgagcccgcgcttcccggccctagcaacgccctcctgccggacacccctggcccctccgggggtcttagtccccgggcccggaagtccgcaccactgagaggggagccgatccctggcgctcctagaacggcgcaggaagtttcccaggcggggcctctcgcgacttccggtcgcggcgggctggcggcgtgtggggcccgcgccggcggggtccagtcagcggctgcagggtcgggctcgcgccgtcctctccccgcccgcgccgggtgagtggcgcgttccggacgggggcgggcaacgccttagccgcagccccggctggctccggagcccggccgccttg

SEQ ID NO: 12936 - DNA, 432 bp, Homo sapiens
  source 1..432: mol_type = other DNA
gatggtctcgatctcctgatctcgtgatccaggattacaggtgacagggtctggctctgtcacccaggctggagtgcagtggcgcaatccaggctcactcaagtagctgggacaacaggctcatgtcattttttttttttaatagaaatgaggcctgagtcattagccacccacgccaggctggtctcgggtgatccacccgcctcggcccgcccaaataataatatactattaatacttcacatgtaacttaagaaccttacaatacatattctcatgttattttgtaatagtataaatgtgtatttccaattttacttctacaagttatagagtccacaacagatagttcttgttgggcccactgtggggcggagccggggcctgccggggaggggcgccccgaggggcggggccgggccgccgtcggtt

SEQ ID NO: 12937 - DNA, 928 bp, Homo sapiens
  source 1..928: mol_type = other DNA
gacccgggaagcctcgcgcgacgggaccacggacgaggcccggggggccgcgcgcgacggtaccacagacggggtctgggaggccgcgcgcgacgggcgcacccggggcgcgaggtgggctgggagaaggccggccgctcccagagcggcgggcctccggggcccctgcgcagccagccgtgcacacgcgccaggtcccgcgtgtcctcgtgctcgcggtgcagttgctcgcgctgttccagcagctggcgccgcgtgtggtgcagcagctgggtccggcggagcagcagcagcagctcctgccgcaggcgtccgttgccgttgatggcctgcgtgtgcgccacaagcgcgcgcaccgcctcccgctccgcgcgccgcgccagtgactgcacgcgctgacgcgcctcgcgctcgaaggccgccttgtcctccaggaagcgccgcttcacgcggtggagcagctgcgtgtgctccacgcgcatatgcagcagctcgcgctccagcgcccggatccgggccagctgctccagctgcagcacctgcggcgggggcgccgtcagctcacccccaccccgcccccggcccggccaccagccccgccccgcctcaccccggccgcgggcgggctcactggccttgtagggctgcagctcttgcacctgctggtgccgcgcgcgcctccatctccaacagctgcgcgcgcaccccgtcctcgcgcccgtggtagagcgaggccagttccgcccgctgccagtggatctgcgctaggtccacgcggttctgctcgtccagccggacgatggctttggcgcagcgctgggcgcgcgcgctcacgtagctggcgtagagccggttctcctcgcgcaggcgcagcgcctcgcggtccaggaaggcgttctcaacgctctcctcgcaggtgtccagctgc

SEQ ID NO: 12938 - DNA, 899 bp, Homo sapiens
  source 1..899: mol_type = other DNA
gcttcctgttggcaggaggggcctgccgtgggcgagacctgggcagggggttggcgccccgggccccgtcccgcgggtggcggcggctgggtgggcggggctgcctggggcgccaggctctcgcgcgcgggctcgcagccgtccccgcagggtggtgctgaaaggctgggcaccgggacaccgcgacccgctggacagcgcgcgctgccagtgcttttgtgccgcagagccggccgtccaaggcgggcgggcgggcatggtcgcttcccgggaggaggcaaatgccgcggggccaggggccgggctgaagaccggagggcggagggcgccgcctctcgtggattgtagctcccaatatcccgcgcgcggggcgggcccggcttcccggcacgctttgcgcggtgccgctacgggtcctcagaggcggcggcgcgcggggccttctgggggccgcagtccgggcgtgctaggcggcgagggccggactcggcttcccgacgggctgcgcggcggccgggtgggtgtcggcggggcagtccggcgggcagcggcggttccggtgcggcacagcgggcgggaccaagcgggatgcggagccgccgccgccgccgctccccgcgcttcctaagagtctgagacccgccgggccgcgccccctgcccaggcccgcagtccgagcgttccgagcgcgggccgggcccagcgccggccgcggccgcgtccccgtccagtctcgggcggcccgccccctgcctgcgccccctccccatgcgcggcgcccatgcggactgagccccgccccccggccccgagcccgccgagcgccgccgccggagcccgcgccgcccacccgcaccatgtcaagtgcatcccgctgtggcgctgcaaccggcacgtgg

SEQ ID NO: 12939 - DNA, 792 bp, Homo sapiens
  source 1..792: mol_type = other DNA
cctgcttcctgttggcaggaggggcctgccgtgggcgagacctgggcagggggttggcgccccgggccccgtcccgcgggtggcggcggctgggtgggcggggctgcctggggcgccaggctctcgcgcgcgggctcgcagccgtccccgcagggtggtgctgaaaggctgggcaccgggacaccgcgacccgctggacagcgcgcgctgccagtgcttttgtgccgcagagccggccgtccaaggcgggcgggcgggcatggtcgcttcccgggaggaggcaaatgccgcggggccaggggccgggctgaagaccggagggcggagggcgccgcctctcgtggattgtagctcccaatatcccgcgcgcggggcgggcccggcttcccggcacgctttgcgcggtgccgctacgggtcctcagaggcggcggcgcgcggggccttctgggggccgcagtccgggcgtgctaggcggcgagggccggactcggcttcccgacgggctgcgcggcggccgggtgggtgtcggcggggcagtccggcgggcagcggcggttccggtgcggcacagcgggcgggaccaagcgggatgcggagccgccgccgccgccgctccccgcgcttcctaagagtctgagacccgccgggccgcgccccctgcccaggcccgcagtccgagcgttccgagcgcgggccgggcccagcgccggccgcggccgcgtccccgtccagtctcgggcggcccgccccctgcctgcgccccctccccatgcgcggcgcccatgcggac

SEQ ID NO: 12940 - DNA, 497 bp, Homo sapiens
  source 1..497: mol_type = other DNA
gccaagtgggctcttcctataggaggcctgcccgggatgccttgtggccttaggcagctgaaggtgcctgagcttacagaaaatgtccaggacaggcagctttcccagcagtggccatgaaagccagttcagggactaacggggcctgcgggaacggggcctcccggtcccagggatgtcgcgacgcggggacgacgcatctcacgacgtcagcccaggagggccccgctctttcgcctgcctcctgggggagagcctctggacgacgcattttagggcgacgggcggcgaagggtactacgcacgcccgcgtcggccacgcggagagatacgcccgactcgagtcccgcggcgcacgcccctagacgcccgaggtgcgcgggccacgcccctcgcccggccaagagcacgccccttccgtcgcccctcccgggggcgtttaccgttcctccccgccccggaagcggttccgtgcaccggcacccagatcgcgcgag

SEQ ID NO: 12941 - DNA, 689 bp, Homo sapiens
  source 1..689: mol_type = other DNA
aaatgtccaggacaggcagctttcccagcagtggccatgaaagccagttcagggactaacggggcctgcgggaacggggcctcccggtcccagggatgtcgcgacgcggggacgacgcatctcacgacgtcagcccaggagggccccgctctttcgcctgcctcctgggggagagcctctggacgacgcattttagggcgacgggcggcgaagggtactacgcacgcccgcgtcggccacgcggagagatacgcccgactcgagtcccgcggcgcacgcccctagacgcccgaggtgcgcgggccacgcccctcgcccggccaagagcacgccccttccgtcgcccctcccgggggcgtttaccgttcctccccgccccggaagcggttccgtgcaccggcacccagatcgcgcgagggcgcgcgcggaggccgcgacggacgcaagatggcgacggcgaccatagctctcgtaagtgagcccccccatgagcgcgggcggccctcggcttgcggggccgggtcgtcgacccagcctgggcgcggagggcctcccaagaacgcggcggtcttcccaggtcccgcgcggactccctcgtgtccccgggtcgcgtgaggcgggggcggggcgggcgcgcgccggcggccggctcgcggcctcagcttccggcctgcggaccccagcttccg

SEQ ID NO: 12942 - DNA, 533 bp, Homo sapiens
  source 1..533: mol_type = other DNA
tcggggacagccccggtggtcctccggagggagaggtcgtgtgagccgggtgggctcccccctcatggttccactgtcccatgggagccagcccaccgatcaaagtcagcctgggtcagcctgctggtgccccttcgacctgtcccttgggggtcggccggggcgtggccaggagagcgggtcccgctttcgagcccgcggggtcttctgcagctggagggtgccgtgggcttgggggcccccagatgccccgggtcttcccccagatcctaggggagcaaccgcgagagaagtgggcgctccgggctccaggtgtccgcagggcggggcctccgagggggcctgcgcggggcggggcctcataggggcggggcttcgaggacggggcttcgcggggcggggcctccgggggggcggggcctgggcgcggcccgggctcggcagctctcggggtctgctctggctccggcaggcacaggcggctcgggaggtgcgcgccggctccgcccccgggccccgcccgtccgccgcgc

SEQ ID NO: 12943 - DNA, 689 bp, Homo sapiens
  source 1..689: mol_type = other DNA
gctggccagaggcagctccgccccggaccccagggagccggaggccccagccagcgcaggcccccacccctggggtcgcccaggtcctgcctcaggtgtggcttcccctctgtgagtcacaggcttgggccccctccccatccctgactcactggcgaggcccctcctggggcttcccgatgccatgaggcccggcctccgtgagtcagccctcagctacgcgcctccgacgtgaggtgtctgcctggggcagggtgggctccgcaggtgggcagaggggccaggcctggggtgggaccccactggccccagggccagggcaggcaccatggggcagggtgtgctccccgcttcatgcaggtgggggctgcaagagctgacaggcagcaggtcccctcccctcgcgcttcttgagtccgccctggcagggtgggtgggcagaggctgaagcagggcctggcccaggcctggagggagctccaaagagaggcgtggcctcagagcccctcccgtcgggggagcccttcagtctgtctccccgtgtccccaggtccccctagggggctgcagtggtcggggggggagggggctgcttgctccttcccgccgggacactcccctccctggcggcggcctgggcagggtggggcctcgggggcgggccggcctcgccggggagtacagcaggc

SEQ ID NO: 12944 - DNA, 687 bp, Homo sapiens
  source 1..687: mol_type = other DNA
tgcagtcccagggcggggcgggctctgcagtggccctcagcctgcagcctgtgcgggacaggtgggtggaagcggggagcgtcccccacacgaagggaggcctgtggcagccgccgtggcagggacaagtgggcaggtgcctgtccggccagcacggaggtggctccctgcacacacagcagggggtggagccacacgcaggtgaggcaggtgccctcatgccctcgggccgcacagggggcgggggcagccaggctgtgccctgccctccctgctctcctgggctgtggtcccaggtggcaaccgtgcccagcacaggatggggcggggctggccagagggactgcctatcggggacctggctggccagacctctcctgcagtgagggcgctgcctggctcagctcctctgctggatccccggacttgagatggcgtggcgctggggacgcccggagctgccggggactcagctgccaggagacttgggctgagggcttcttccccatccatgtttttggctggggaccagacactgtccctggccctgcagtccccaccgcacatcctgctgggaggccccctcccacagtcccagggcagcctcccagcccggcccgtgggttggggcgcggcttcctggctgcgctgggcggggctgcgcgccaggggcaggctcgctcccgc

SEQ ID NO: 12945 - DNA, 406 bp, Homo sapiens
  source 1..406: mol_type = other DNA
tggctgggccaggcctgcagggcctcacagggctgcagccatccatctggcctgcagacgggcacttgggctgcccagggtgggctctgcctccaacagctgggttggaggtgggggtgaattgaggcccctctgagccccctagccggtgctctgctcagagggctgtgggcttggccactcccttgagtggccactgcctctaatgcccgcctgatggacagcagcagcggtgcctgcagccctcctcatgtgctgtggcagctgcccccagccgctagctgtgggggtggccgctgcctcttgaggtgccccccactctacaagggccccgtcggctgtgggtgggaggggccgcccatgctgctgagtcagagggggccggcccggcgtcctggaggaaggc

SEQ ID NO: 12946 - DNA, 657 bp, Homo sapiens
  source 1..657: mol_type = other DNA
gcccagtggcccggggccaggctggttcactgtgccttgctgtgggctgaggtaactacactggaggccacctgggctcagatggcagcgtgcgggacagcaggcggcgcctcaggctcctgattctcctgggcctgaggggtgcgcccagcagacaggggtcccaggaagaggagcaggactgtgcgtgtcccacgtcctgttggcctgcctgtggcccggctctctgacccaggccttccacagagcagggcttcgggactcctgggtggagccaggccagtctcctgccgtggcccaggagaggcgtctccatcccagatccctgggaccccaggagaggctgtgctgtggggcaggcgcaggcctgagccctggtttcgggctgcctgggtctctgctgtcccggccaccggtggggccagcagggccctctgggagggcggcctcttctcttggcccctgtggcctttccaagagcaccccctggcttggcagggcaggtgggtggggactgcaccgcctcctgcagggacgtgagcccgcacctcccgcgagaacgaccgaggtgtcgggtggcaccgtccagccagacctgactgcagcggggcctgggtgccctggcgccgtgcgtcgacaagctgctgctgacagcag

SEQ ID NO: 12947 - DNA, 598 bp, Homo sapiens
  source 1..598: mol_type = other DNA
cagcacggactggggtggagcacagtcccggggccagtgttgaaggggtgccctggtgtgggcagggcccagcattcctccgtgccccctgcagcgcagtgagtgaggcagagctgacctcaccctgccagtgctacctgctcccccaggcgtgcgcagtgacctcctgcgggctgaggaggctgaccccattagccataggggcagtgtcatctggcggcagcagactggggggcgcagccaggaggacctgtggggctgcctgtggggcatcgacccagggctgcgcagccagggtctgggggcttgatctcagcagcctgccagcccaggccctggagttgggccggctggtaacggcttcaaggccctcgcacgtgtgtcccacaggtccgagcgctcctggatccggcctggtgacctggcagtctggctggggttagcggggtcgcgtgccccagaaccacaggctgggggggaggggtgcgcggtgcggccgggagcatgcgcccggggcggccctgtccggcgcattgatcagctgaagccccgcccctggccggcaagccctgccccggacctccgggctcctcccccg

SEQ ID NO: 12948 - DNA, 607 bp, Homo sapiens
  source 1..607: mol_type = other DNA
cagccagacctgactgcagcggggcctgggtgccctggcgccgtgcgtcgacaagctgctgctgacagcagcacggccgtgccctcctcccacccgacgctgccgccagtggcttgtgcctcctccgaggggcctgtgacctcccacacgctcctgccaccgtccccgatgaagatcgtgcccggtaatcctggccccttgctggggacaggggccagagggctggggctgaggctggaggccaggggcgctgtccctcgccctgcacacagcctgcaggcttgaggtgggggctctggcatccctccatgcctgccagctgtccccagagggcagccttggaggcagagtgggctgctcgggcccctcttctggtggggacagcaggccgcgggcagtgctggggggctgcggcttggccaggcgtgcggctggcccctcctcccggcgggtgtggccgcggggacgcaggggttaaggccaactaaccttgagcgtcagtagccctgcgcagggacagctgagccggccgggtgggctgccgccgcgtatggggcggtcctgcgggcagggcaggctccggtcccggcgctccccctcgctcgcc

SEQ ID NO: 12949 - DNA, 558 bp, Homo sapiens
  source 1..558: mol_type = other DNA
gtgcacccagctccagccccagggtctggttccatctgcactttaaagaaagaagtcactttcttcccacttgaaagggaatcacttgtgtaggagtggggggtcccgaggccccggctgaccgtggttgccttcggtactcactgcaaaggctttgcccccagccagcaccttccgcgccggggctccgattcctggaagcgggacttgcagttacaggacatatggggtggaaagagttgttttaattatcaccaagcatttttgcaggagcgtctcggaggcaggtcgccggcccggcggggaacagacaggtcgcggccgcccctgggcgggggccacccgaggacccccgggcgaccgcggtgtcggcggccgcgacccgggcgagaacgggacgtgcgtgcgggactcggagcccgcggaaccggcccgccgggaggggcccagacgcggctccctctgcccggccgcggcggccccggccccgccccgcccgtggggcatcctgggtgcgggggcggggcgggggcggggcgggggcggcctctttaagcg

SEQ ID NO: 12950 - DNA, 666 bp, Homo sapiens
  source 1..666: mol_type = other DNA
gctgactggcgactacgggcagggccgccgcggtctgcgggcgccccctctgcggggtcctggccacgcgagcacgtgccccgcgcttcccccgacgacccctctgggctcccgggccgctcgcccccaactgtggccgcctgagctgtccccggggacgcccctgcctccctctgcgggctccagaaggcggtgtgggggatgggtcagcagcggccgaggggggccgggctaggtcccagcctgggccgaccccaccaccaggggtcagcagagcccaggaggcgacaccgcccgcccgccgctccctccgcggcccaggggcgggatctgctgcttccgaggaggcgtcggggtgcggggcggggcccggagctcaccggggcgagcgcacgacgttcccgtgtcgcgcacgccggcgcagacagcgtctccttgactaccggcccgccccgtgcgccgggggctcaggtgtgcgccgctgccctggccgaatcgcccgcccgggccccagccccgccgctcccgagatctcggcggccccgcgcagacacgggcgcccgatctcgctggcagcgttcgctcgctctcggccgggcccgcgcggcgcagctctgggtgggggccggggcggggctcggggctcgccccgcctgcgccgcctcc

SEQ ID NO: 12951 - DNA, 402 bp, Homo sapiens
  source 1..402: mol_type = other DNA
caggctggccagggtcctcagctccctggcggcagcaaggaatgcagtgtcaccttctgaggtgcacattcttggagaccaagggtggggaaccgcccatgctcagcacctggcaggtgtgcgttgaaggccagccttggccgggggcgggcctggagacccagcactttgtgtgcagagggtgtcatggacacagaggcgatcctgagtggggcagtgactcccatggaggccaggggagtggagggccaccaggggacactcctgtctaccctgccaaccaggggctggagtgggccaggggtcctgaggggtccagcctggccaatacctcctggtcagctgggggtgggctgcatgagccccagtacccaggcctcagcgcccagggcccagctgctc

SEQ ID NO: 12952 - DNA, 200 bp, Homo sapiens
  source 1..200: mol_type = other DNA
gttcttgggggctctggtccctggggccagagtgactgagccggcccccccccaaaaagaggtttggagtcctgagttctgaaactccaagttatacagatcaccaagaaggggcatttttcattcaacaaatatttactgtttacctacaaacattgtgccaagccctgtgctggacactggggtttccaggaacgtgt

SEQ ID NO: 12953 - DNA, 419 bp, Homo sapiens
  source 1..419: mol_type = other DNA
cagagcggcctgggagaggccggccctccaagggcgggagggcaggtggggtctgggatgtaccctgcctgtgtcagtcactgctcccccaagaggacttgggagctaagcagggaggtggcctggcctccagtcctgctgcaaacaagacatcgtatttgttagtataattgtacattttaaaacaactccaagatgattattatccatggcatgcctgtatcctgccgagaacggacggtcaggcatttaggaataaatttcttaactaccgaacggccagaattggccaccccacccctcggcagacagtgagaggcgggcctctggccggcggcgcagcgggaggggtccgcggaagccccgcccacctgcccctctgccccgccccgtcacaaggccccgctgcgtcttccgag

SEQ ID NO: 12954 - DNA, 223 bp, Homo sapiens
  source 1..223: mol_type = other DNA
cccaaaaagaggtttggagtcctgagttctgaaactccaagttatacagatcaccaagaaggggcatttttcattcaacaaatatttactgtttacctacaaacattgtgccaagccctgtgctggacactggggtttccaggaacgtgtattccaggccgaggcaaggcctgtgtacaggcctggtgcacagcctctgacagggcccactgggccagccttg

SEQ ID NO: 12955 - DNA, 476 bp, Homo sapiens
  source 1..476: mol_type = other DNA
cctggagtgcagtgacacgatctctgctcactgcagcctccctcagcctcccggtagctgagattacaggcgcgtgctgacttagaatgcattaatcgtccggggcccacggggccgggagctggggctggtagagaaggccgcagggcctcccctctcctctctgtccccctccacggggaaggacgtccgccagtgggaagccctgttgtggcctgggctgccagctccccttgcccaggacacctggaggtgggatcctggggcgcccacgctaggcgagcccaggcccggcgccggagacccgagggccgcagagccaaggtgcccttgatcctgcgcccgtggcccggggaagcgcagggcgaggacggaggcgcggggggcgggcccggcctgataccgcgagtgccgggaccagtggcgcggggggcgggccctgtaggctcctccccgaggcgaggctggtgcgggca

SEQ ID NO: 12956 - DNA, 459 bp, Homo sapiens
  source 1..459: mol_type = other DNA
agcccagatggcgccactgcactccagcctgggcgtggatagaagaagaaagtcctttatgtgatctaaaatgcacactctcctgtccctgggcctggcccgcaggcccagcctcccttgtggtggctcagccctggcctgccctggttgctgctgtccagctcctgctgttgctgggccccatcctgcagggcagccacgcatcctggcatggccaggcctggagggtgggtgcggaagccgccgggtcaaagaagcttccatcttctaggaggaggattcctggagtgagccagagacctgggacagttctgggcacccactggccatttggccctcagggggctggaggtcagaggtcaggccacctctgccacggggtggacagctgggtcctgaccctgaaggcccggcaggggcagctgctgacctcacaatagcagggtctgctgtccctgg

SEQ ID NO: 12957 - DNA, 535 bp, Homo sapiens
  source 1..535: mol_type = other DNA
ggcagctccaggcctgcgggatggcccggcccctactcggcgacagagtctgccgttgcagtgactctgacagcttcacctcagggcctggcacaggctgttccctgggcctggaaagccgcgccccagcctggcagctccctcgcccgctcaggctcctggaagagccccagggccctggctttgctccagaggcaccgcagcacccagcgggtttgcccaactccacagagtcttggggcccctgggtagccagggactggcagccacctcagccaggaacccggagctgcagaagcccaggctgctgccgcggttcctgagcaccagcttcagctcctggttctcctggatgagctgcaccagccgccgcagctcttcgttctcctgtgccagccgctggatctcctgccgcaggccctcatagctgctgaggagggacatgcctggcagccagcggcggcagctggcgggggccagcaggccggccagggacagcagaccctgctattgtgaggtcagcagctgcccctgc

SEQ ID NO: 12958 - DNA, 495 bp, Homo sapiens
  source 1..495: mol_type = other DNA
acccttggaacccagttgccatactgcaaggaagccctggttgcatggagctgcctgacaggcacagatgaggtcctggcccaagctttaggatggctgcagccccagctaccatctggcagcaactgagcacataataatagaatgatttttattatttgaagcctgtggaccatcctgggacaccagcctggtcactttccagcgggcgcccacctcctggcacccgtggcacagctccgggaacggctgcgggcccagccgctgcttccccgatagcgccgccgcagttccccggagacaagccggaccgccggaaaccgtagatccggggaggtcggggccgcggtgaactccagttcaccaggcggaaaccgcagatccacggaggtcagggccgcggagagctgtagttccccggaaccggaagtgatggcggacctccggaaaccgtagattccgggcggtcggagccgccgggagctgtagttctcc

SEQ ID NO: 12959 - DNA, 413 bp, Homo sapiens
  source 1..413: mol_type = other DNA
aaaacttgttctcacatggagtcttggctggagtgcagtggtgtgatcacggctcactgcagtctggatctcccaggctcaagtgatcctccgactaccagtccctgcagtctggaccctgcgaacgtcctgagtcattggcagtccgcagcccccgaccagctcggcctgctgtcgggcatctctgctgtcctccggctgtagggctacctgcctccctcccggggggtgcactgcgagtccgactctagtgggggcagcgcctagcggactcccaaacccgctcaggtcctgccggcctcaccggcaccgcccaccctccagccggccgcggctctgcgcttgcgcgccggcagcacacagtgttaggggcgcgccctctgctctggacatgcgcgccgtcgcgagcgtct

SEQ ID NO: 12960 - DNA, 568 bp, Homo sapiens
  source 1..568: mol_type = other DNA
ggctggagtgcagtggagtagctgggactacaggcgccaaggtttcaccatgctgaccaggatggtctccctttgcttactttttaaatattttacaataaaaatattctcacataacaagatcatatttacttacttttttggcagtggcgatctcggctcctaggacccaaggcgcgcatcacgcgtcgggccatgagaacagggtgctcagcctgggggcccagcctcccgctgtcacgcgctgcctgcggccgagacccctgcccgcgccctctgccgggctgccctcctcagcctgcaggggcaccctccacccggccatcgcgcagcctggggcggcgtgggaaacgccgggcggagcgtggcgctgtcacggcaacagagagacgcgacggggccccgccccaccgccagtttccgcgtggggaggcaggcggtgccccggcccctgactgacgcgaccgggaccagcgcgcttcgtccccgcccacccgacaggccccgcccccgagcccggccccgccccgcgctccccggctttcgcgaggttttgactctcgtggcg

SEQ ID NO: 12961 - DNA, 303 bp, Homo sapiens
  source 1..303: mol_type = other DNA
acccaggctggagtgcagtggcaagatctcaccttgctgaccaggctggtctcaaactcagaggaggtctcatccttcctgagggttaaggaagtgcaggctgaggcgctgcaacttgtgctggctggggcctcagatggtgtaggagactgactccagcagccactctggaagccttcccatccagcagtggggaaggtggatccaacttccccaaccaggactggtccacggtggcacctcggactaggactgcccaccgctgagcttcctgagggttgaggaagtgcagaggccctcctg

SEQ ID NO: 12962 - DNA, 668 bp, Homo sapiens
  source 1..668: mol_type = other DNA
aagatcggagggcggcgccgcggcctccgctcgggccgcactgtatccgggggaagaagctccgcggcgacgtcccgttactcccggccctgccggcccatccgggctgcgctctcgcgaccgacctgccgccgaccgccacagagcgctccggcgagtcagcgagccgagcgagcgagcgagcgacctccgcctcccccggccggacaacaagcgtccgccgggcccggccccgcgcctctgaatggcccgctccagtctcagctccgccccctaggggggtcgaccccgtaaccagtgaggcgcgggccaacctgcctcccgggagcgaagtccagctgccgttaggcgctgggatagtcgcacgctggatgcatctacgtccgccgagcccctggggcgaagaggccgcgtccgccttcagttgtggccggtgctttcggccgccctgccccagcctcgtacacgccgccagcctcgcccagccggtgtccggagaccctcgggccgttgggcaaagccagcggggcaggcttggccagagtgcaccactcggcgccgtcccaggcccgacgctctgggcgcgcccggaaccccaggttcgcggcccgtgtttccgaccggcggagggggctcagcggcccgatcccacggaagcgcgctcggag

SEQ ID NO: 12963 - DNA, 653 bp, Homo sapiens
  source 1..653: mol_type = other DNA
ctggcccggggagaggaaaactacaggttcctccactctacccggaaaagcctaggagggcggtccctcggccccgctggggcgctgcagtcaccaggcagcgcccgcctgggccacgtcgggcaccagccaagccgcaggaggcagcgcgccgcgcgaggcctgctgggggctgtggttccgggtacgcagacggcgcgggacgcagggcggacacccacctgcctggctgggttagatcaggccgcgccgggccgggtctggctgggctgggtcgctccgcgtcggtgccggtgcgcaggcgggggcgggctccgcgcagcgcgggctcttcaagatcggagggcggcgccgcggcctccgctcgggccgcactgtatccgggggaagaagctccgcggcgacgtcccgttactcccggccctgccggcccatccgggctgcgctctcgcgaccgacctgccgccgaccgccacagagcgctccggcgagtcagcgagccgagcgagcgagcgagcgacctccgcctcccccggccggacaacaagcgtccgccgggcccggccccgcgcctctgaatggcccgctccagtctcagctccgccccctaggggggtcgaccccgtaaccagtgaggcgcgggccaacctgcc

SEQ ID NO: 12964 - DNA, 709 bp, Homo sapiens
  source 1..709: mol_type = other DNA
tgccctgcccgggccaagaggactgaccgcgcgccctccgcccccactcaccgccccaggtcccgcgcccagcagctccagccggaagcgcccaggccgctcagggtccgcgctcagctgcagcctccgcagctgtgcctcggcgtctggcccggcgcccagcggcctcaccgcggcgtgcacagccaagagcactgcggcggagcccaagtccgaggccgccgccgccgccccgcccgctggcggcgccatctccggtccggccgggtcccacccctccgagcgcgcttccgtgggatcgggccgctgagccccctccgccggtcggaaacacgggccgcgaacctggggttccgggcgcgcccagagcgtcgggcctgggacggcgccgagtggtgcactctggccaagcctgccccgctggctttgcccaacggcccgagggtctccggacaccggctgggcgaggctggcggcgtgtacgaggctggggcagggcggccgaaagcaccggccacaactgaaggcggacgcggcctcttcgccccaggggctcggcggacgtagatgcatccagcgtgcgactatcccagcgcctaacggcagctggacttcgctcccgggaggcaggttggcccgcgcctcactggttacggggtcgacccccctagggggcggagctgagactggagcgggccattcagaggcg

SEQ ID NO: 12965 - DNA, 608 bp, Homo sapiens
  source 1..608: mol_type = other DNA
cagtggaggacacgtgaagaactggagtccttttctggggcagactccaatctgggacagagaaacttctgccacgaccatggaactgggaggtcccagtgtctttctttcccaactgctctgagaaaatcggccagagcagtgccggaagctggctccctccaaacccttgcgactgaagagatgcccagaggcctctccaaagctgcctcctcaggtccccactggggccctgtgttgtcctgtccctggacggcctgagcttctcggtggccgtgccagcctggacaagagcaggcctgagaggccccgacagcctagtcgaggagccggggcgcgggcctcagaccctcagggcccacgagaagccagggccggctgaccaggttcggcgtggccagcgcccagtgggaagcactggccgaccttacatggacgcttccagcgagtgtggacgcggcaggcggccaaatcgcgccgggcctcggtccccatggctcagcttccggccagacgccgagacactccccgcgcgcggcctggcccctcccctccgcacgccggtcccgccccttgagcccagtgcgcagcctcggattggcccctct

SEQ ID NO: 12966 - DNA, 692 bp, Homo sapiens
  source 1..692: mol_type = other DNA
ccgtcccgtgcggggctttgtaagcagccctcgggagaaatacagactcaggcctgcccctggcggaggggctggcggcagaggcgggggcggcaccgccacaggcgcgtgggaagccgccgcaggggccgcgcccgcatccgcaaagggtactgcgctctcccgggcgccgtccccacagcgggagcccagtccctccggccaggagtggacatcctgcccgcgctgctcccgccgcctccgcctctgccgacgcccagcctggacgcgcggcgggcgctcccgagttcccgggaccccgctggtcgcccaacgagcgcagggccctgcgagtcctgcccccctccgggtgccgcggcctccagctggcgcttccggggcagacagagggcgggcgggccgcgcgagtccagggcgggcgtgtgcttgcgagcggccgcaacgccgcgccgagcccgcgtccccggcgtctgggagcggaggtcgcgacggggacacggggactgcagcaccccggggctggcgtagctgtcgcgagcctgaaggccgcgcctgcgccgtggcggccgaactgtcgctcaacagacgggcggggcgcgcactccgctcgggggcggggacctgctgccgcgctccaggctgcgggtggccagaaggcagcgggggcgggctcggcgcgcgcggctccgccc

SEQ ID NO: 12967 - DNA, 656 bp, Homo sapiens
  source 1..656: mol_type = other DNA
caccctgggtgctgcttcaagtaaggaggtggtgaggaagcaccttcaagagctgctggggccgctttccctgcagaagccccagacaccccagggctggaggacggtggtgcgtgtgtgcatacacaggtggtgtgcgtatatgcagagagggtgtgtgcatgtgtgcaagtgtgcgcatgtgtgtacatgtgggtgtgcccgtgtccacacgtccctgcccggggtaagtgtgctgcccccccatctcccacctcgaggacacgctggcccagctggaggacttcgtgtcagaggtcttcagaaaatccattggcattctcaacagcaggaagctggttgcgtccctggaccaatttttgctcctgcattccttccatgggcaggacctgtgcgtgggtgctcccagtggggagggcggcagaatggcctcccggaggcaaacgtagctgtggccagggccacgtctctgccagaggggttcgcggctggggcaggcctctgccccctggtggctggcagattctgcgttgccaaaccaccagctgtgctggcggagcctaagcctggtttaaggaaggagtgggcccctgctgcaggcccccaacccggctttacagcatctcagggctggaccaagcatgcagggcttccca

SEQ ID NO: 12968 - DNA, 603 bp, Homo sapiens
  source 1..603: mol_type = other DNA
ctggacgtggttgcagcccctgccagccgccaccgctccttccagcctggggaccgctgcccaggaggctgcttcctgcaacagtagccacggggaggggcccaggcaagacagagcacagctgggagcctgccgggccccctgctgcaggagggaccccttgggccctgccccctgctgagggtccttccctctcctccccatggagatagggggccatccccaaattggataatggacagtctgtgccaagcctggagaggcagactgagctctaggccccctgtgcccgccccctgcacacggcctggcacaggcaggcgctggcgcgcggctgggttaactcagttgtgccacgggagaaaacggggtggtgggttcctcccctctcccggggacggggggcactgcagtttggctggccacagaaggccgagggacgcggcgggcgctgctcgaggagcctccgggctgagaggggcggggggaggggccgggacgccgctataaaggcgcagctcggggccccgctccggcccgggacgcacatgtgcgcgcgacgcccggcagctgccaccgcggggcgcagccgagaccccgcgc

SEQ ID NO: 12969 - DNA, 714 bp, Homo sapiens
  source 1..714: mol_type = other DNA
ggaaacccagatttgggattcggaaacgggcttgagatcaacctgaagcttcatgacgtccccgtaggctgtcccctggggacgccgatgtcctctggggcatagcgtccgctggcgaagccgggtgcttgccctaagcgcccccatcccagggaaacttcgctggggcagggtctgagcaggctcgggacccgccgcccttctctggcgggggcagggcaggctcaccgcgcgtaagctgaagtgcggcagggcccctccccgcagccctcccgcgccgtccgccgcggccctgctccctcccggtccccacgggccccgcgcccgcgcgctgccctcaccgggctccagcagatgagcgcgtcggtgtccgggtcgctcacgagggtccacagcttggtcaggaaggccgggacgttgctgggccccgccgcgccggggcccacgggcagaaagaggggccgagggccgggctaacgccgtcgccgcgccagccttccgggccgcgccgccgcccgctgcgcacacacagccccggggcccagcatggccgccgccatcttgcaacgggcgcgctcccgccgccgccgctgccgccctcccgcgtcacccccggcgcgagcacgcaggccccgaccccgccctggtccccggcccagccgcgcgcctgcgcgtgttggtcccacccccttccctccacccgccaatcggggc

SEQ ID NO: 12970 - DNA, 701 bp, Homo sapiens
  source 1..701: mol_type = other DNA
agcctggcgacagagtgaggatccagcggcccagacttctgacatcctggagaggctggcccacccaaggggcctgcgccctcgccctcgccctcgccctcctctcgccgggctctgcaggcggggaggtggagagcctgggagtcgcgtgcaaggcaggcgtcccggtgacgcagggcctggtgctcttctgacctggcccttgtctgacgtccccctaaggcgaagcgccagggacgttactgtaagctgcgtgcgcagaaaccaacgcgctgggtggcgggcgacgcgagccgccgcggacaccggcccggacagctggaccgtggcgcgcccggagtgactcgccgagaccccgtgtgtacacaagtgggacgaggggcgggcgcacagcggccaggaagtcggggcccagcgcacccctcagcggaccatcccgctccgtggggccggacaggaccccgggaccacgcgggagcgatgcaaggtccgttcccgctgcgcgcacttgcggcccgcagccccggccctgggagctgccacggctcccagggtgctctgcgccggtgcggccgcggcgactacgactcccagggtgctctgcgccggcgcgcccgcggcgactacgactcccagggtgccctgcgccccgtcagcctctccaggccccgcctcaggtcggccgcggactacaaatggac

SEQ ID NO: 12971 - DNA, 604 bp, Homo sapiens
  source 1..604: mol_type = other DNA
tggcctgcgggccattcagcccatgggacaacaacccagcgcggccgcggccgagggggctgtgaggggctggctgtccatcccctccaccacctattctcatgtctatcccatgagcataaaaacgcaattaactagcgtatacgtggctggagaggctgctgcaaggggcgccccgtccccactccccgtctgccgattcactgggcgcgggcgcccaggtgacagaagccgggcccacccgccccagcgcggccacgtgcccgccgggccctctagggacgcgccccgccgccccgcaggctcaggctccagttcgggctcagaccgccgcttctccggccgcacgctcggcgccgccgtgcgccccgcaccccgcgaacccgccatgccccaccgcgcgccggccgccacccgcacagccgcttccgacagcgaccgggccgcgtgcgcaggaggacgcgccccgcccagcccggccccgattggcgggtggagggaagggggtgggaccaacacgcgcaggcgcgcggctgggccggggaccagggcggggtcggggcctgcgtgctcgcgccgggggtgacgcgggagggcggcagcg

SEQ ID NO: 12972 - DNA, 563 bp, Homo sapiens
  source 1..563: mol_type = other DNA
ccatccacccttcacatggggactgtgaacaggccatacagggggcctccagtggatggactggccaagaagttaatgccaagaggtggtcaacagagcagccccttctagaaccgggccgcctgtcagctgggcctgcagccctggcgctgtgggcagtgggcggcggcagcggacgagcggccaggctgaccacctctgcctgactcagatgcctaagggccgggccggcagcctgcccacgacctccatcggctggcgcttccgagcgccacctgggcagaggcagggccagggccctgggtggggccggccggtgctcctggggacggagaggccgcaggcgagacgtcgcctccgcgagccctgcgcggacccagctagtccgggccaagccttggcaccgccacccccggctgcgggcagggccggggcgtcctcacgcgccgcgccacccccagtcctgtggaaggggatgctgctcttcatcatcagcgtggtcctggtcagcttcagctccctgagagaggtgtgagcccctgggcccgacccccaccgccctc

SEQ ID NO: 12973 - DNA, 528 bp, Homo sapiens
  source 1..528: mol_type = other DNA
tcctgcctggcctgagacctccaggggtcagaggggcatgcatactgtccaagcccctgcgtggggtgggcctgaggacaccaggggactggtggctatgggtggcagagccaggtgtcgaacaccagcagtggtctgccctccccacagctctgtgatcagcggctgcccgccttccccggggtctgagggtgtctggagcagctgctcaccagcccctcacccagctagcaatttcagatatttgagcattttgttaaaataaaacatttttatacctgatggagccactggggctacagccggcccagagcctgtcccatgggctcttgagcctgcaggtggccatgcctttgcctgcccactgctggagggggtggggccccgcccagctgtggggctcactgagtggtccatccacccttcacatggggactgtgaacaggccatacagggggcctccagtggatggactggccaagaagttaatgccaagaggtggtcaacagagcagccccttctagaacc

SEQ ID NO: 12974 - DNA, 784 bp, Homo sapiens
  source 1..784: mol_type = other DNA
ccccgcagatcccgcgccccaggccccgagcgaggcaggcgggactggggtcctccctacgttcctccccacaagaccccgagtccggggcgcttgggtcccaggcctggctccctgctggctgccgggccgcggttccccgagccgcgcgggggaattccccactcgcgcaggctgaggcatccccgggacccctcccaggagacccaggccggggctcggcccagcgcagccatttccgcccagctcctgggctttaaaagccagaggctgggccgggccgcaggcagaggcggctgcgggctctggaggccgggcccaggagcagtccgagcgccgagccccgcccccggagcccccgccccccgcccgccgccgccgccgccgccgccgccgccgtcgccactgccgctcgctccggctggacccccgccgaggacccctgcccggcggccaaacccccgcggaccgcccctctccgcccgcgccggttgagcgcgcccgggcgctggccgcggtgctgcccaggccggcgctggccgcggtgctgaagctgccggcgctgccgctgccaccgcgttctccgggcccggcgccgccgcccccgggggcatggggggccgctgactgaggctccgccgcggcggcggggggggggaggggaagggggccaccgagccgggccagccctgcacccactcgcagcctccaggcccgggacggagccgctccccccctctccgcccccccagcctcctcccccgcctgtccaggggcggcactg

SEQ ID NO: 12975 - DNA, 616 bp, Homo sapiens
  source 1..616: mol_type = other DNA
ccagcaggtgggtcagcaccggacgggcgggcgagcccaaggctgggcccttccaggtcagggcaaaggtctcccacctagggccagacacgctttggctctcctgggaagtgaaacttcttccccagcgggaccgccggcaggcagggaagcaggaagccggcccgagtcgctgcggccccaggggaggaggccgaaggagcgagtggagccctcctctccagggagaggcggggctggagtcaacgccaccaccaccccaagccgagggcgcaggagccccccagggcttcacggtgcccgcgacccaggggagtggccgggacggctctgctcggaggggcgccgccctctcggtaccgtcaggtgggcgactcgggagccgtccggtccctgcgcctcccggtcccgcgcccagtgcgctcccgctccagtgccggcttcccgccacgccgggacaccgccgtccggcccagggacgccacctcagtccggagcgcgcaggacccggcagcagccacgacccgactcacccgtggcggttccgggcccgcccccggcatggcccacgaccggaagtcccgccccggaagctggtcggcgggcgggcgggcgt

SEQ ID NO: 12976 - DNA, 824 bp, Homo sapiens
  source 1..824: mol_type = other DNA
tctccccagcccgcgtcgggcccttcctcgggcgtgggcgtgggtgccggtgcgggtgcgggcgcggccgccgcctcggacctgagcccggccttgggcttggccgcggcgctggggccccggggcggctgccggggagtgcggcgggaagcgcgccgctgtgcgcggggccgggcggggccgggttcggacagcaccagcagcatgctgtcggactgcagcaggtggtaccccgagcccctcggcgccagccggtcccaccaccagtcctcggccgagcggggccgcggcgctgcccgggctctgcgtcggacctgccgggaggctggggcagccatgaccaccgacggcgctcggggaagccccagggagcacgcccgcccgcccgccgaccagcttccggggcgggacttccggtcgtgggccatgccgggggcgggcccggaaccgccacgggtgagtcgggtcgtggctgctgccgggtcctgcgcgctccggactgaggtggcgtccctgggccggacggcggtgtcccggcgtggcgggaagccggcactggagcgggagcgcactgggcgcgggaccgggaggcgcagggaccggacggctcccgagtcgcccacctgacggtaccgagagggcggcgcccctccgagcagagccgtcccggccactcccctgggtcgcgggcaccgtgaagccctggggggctcctgcgccctcggcttggggtggtggtggcgttgactccagccccgcctctccctggagaggagggctccactcgctccttcggcctcctcccctggggccgcagcgactcg

SEQ ID NO: 12977 - DNA, 853 bp, Homo sapiens
  source 1..853: mol_type = other DNA
cagggaagcaaggagcttcttctccgccttgaccccgcccttggcaggccggccgaccagcggggacgacagggtcacggtgtgccagagcgcgggttgggaagcggcctcctgccagcggcggcacacgcgcgcagccctgggaggacagcgtgctgagggtgccggcccctccgtaggcgatgcccccctctcgcagacaccccggctcaaagccgggctcctgggactccaactgggcgcctaaggggctgcgctctcggactgagcggtgcgcgctccgatgctttcgccctccgcccccgcccgggccaccgctcggaccacgtctggcccaagccgctacgctcggcggcgggcccggcaccagcgttacctgcccaggaagggcatggggccgtccgccgccaccaactctccccagcccgcgtcgggcccttcctcgggcgtgggcgtgggtgccggtgcgggtgcgggcgcggccgccgcctcggacctgagcccggccttgggcttggccgcggcgctggggccccggggcggctgccggggagtgcggcgggaagcgcgccgctgtgcgcggggccgggcggggccgggttcggacagcaccagcagcatgctgtcggactgcagcaggtggtaccccgagcccctcggcgccagccggtcccaccaccagtcctcggccgagcggggccgcggcgctgcccgggctctgcgtcggacctgccgggaggctggggcagccatgaccaccgacggcgctcggggaagccccagggagcacgcccgcccgcccgccgaccagcttccggggcgggacttccggtcgtgggccatgccgggggcg

SEQ ID NO: 12978 - DNA, 573 bp, Homo sapiens
  source 1..573: mol_type = other DNA
gaggcctgaaatggcaccttaggccaagctgactcaggagccctcgtggattccaaggcagtaagtgccaggacccgtgttggcgcccgaggatccctggcagtagccttgctggctgcatggcatgcccgggcctgggcccctacccagccagggctgtcacagagtgagtagcagcagcctagggcactgcaggaggctgtgacgtcactgacgttcccaagccctggccctgggaaggtctccccatgggcacgggagctgctccaggaccggttaaagagattcacgctaatcacactataggccgtgaggacctcaggaagccctcagccctccccggatccttccggcaggtgcctgcccggggaatgcgcagtgcgccgagggcgggactggaaccctccgctctcaggaggcgcggtccgggcgccaaaaggtaagcctctgggggccgccaggggacgctgccccgccgcggaggccggcacgactcggggcgtggcctccagcctcgcccaccgcccacggggcggggctctggctccggcgcgtgcgcactacgcgccctcc

SEQ ID NO: 12979 - DNA, 763 bp, Homo sapiens
  source 1..763: mol_type = other DNA
tatgtcttccttttctacatagacacagtaacaacaggctggtctacctcaggtgatccgcccacctagccaccgcctcctattgacttttaaaaggcggttgagtgtggctcaggggtcacacgcctgagcatccaagcaagtagatttggatgcaacaaaaacacatatttccaggtcctaggcccgtgcctgatccaggatccaagctcccggaagctggcactgggcccgccctgggtaggcagcagtgagcaaggcgggcggacagcgctgggctcgcggggtcctgcgtcctccgcgggagtgggcggcgggggtcgctctgcgcggggacactgggcagagggggcgtgcggcctctctaggaagctttctcggagccccagacactggcgaggcgccgcgccccctcttctggattccggcgcgccccctgaacccgggagctacgagcggagtcgcttctccctgcagccgtcctgggtctggcgcggacgcaccccccggccgaccccgagccgctgcagccggcgcccctgcggcttccaacccgcgctgctccgcccgcagcggaggccccgcacttcgcgcgctaggggtttgggttccggacgcccagcccggagccgagccgccagccgcccgcatcccgggccactagggcccgctgtcgcccctgcagccacgctcacgcggcggcgctgcgcaggcgcagaagcccggaaccttcccgcccagcttctgggcccggccggactga

SEQ ID NO: 12980 - DNA, 624 bp, Homo sapiens
  source 1..624: mol_type = other DNA
agggtcagcctgagtgagggcctggcccacactgacggcctgcagctctggtgagcagcgcccgggaagcaggggctgagacctgcactggctgcaggggggtcacccactacatcctgcagaccagtgggtgcagtcactggggacgctgtcctgcatctgacgcggactcccaggccgtgcctctccctgggtcttggtgggaggcgccctgggacctcccccccagcccagcgcccctactccccaggtgctggggctgcaagcgaagagggcctcagcccacagcccacctggcgcctcctggtgcccagggacccggaggtcaggcttcttgggaaggtacccggcgggtgggtgtgctgggggcctggtggacactgagcacctaccctcacaggacctggaggacgggccctgcggccacagcagccatagccacgggggccacagccacggtgtgtccctgcagctggcacccagcgagctccggcagcccaagcccccccacgagggctcccgcgcagacctggtgagtgggcgccagatgccccatcccacgcgggccccaccccaggcctgcggctccgcctcccgcggtgatctggggccccgccccgcccc

SEQ ID NO: 12981 - DNA, 601 bp, Homo sapiens
  source 1..601: mol_type = other DNA
ccacagcctccctgcccccggggctagagctggggtcttgccccaatcttatcctgacccaagctcggccaggtggctgccagggcccagctcccctggggctgtctccggcctaagggagcatgatgcagcaggagggaccaccccaggacccaggaggagggaggtccatgtccccacccccaacaggggccaccgagggtgtctgggcagcctctgttgggacagggacctgggagctctcaggctctgggggcatctgtgcacctctgccctgtgtcccccagcttggaggcagcccccagatggacagccagaaggggacaccccagccctgccccacagcttggggggcagcaggcagaggacagaagcccacccaggctggcctggcgtggtgagccacgccggtaatcccagcacaagcgggtcccagctactcgtgccgtgcctgtccaggggaaggggcccagccctcgacccccacaggcagtggctccaggctgttggggaggatctgcagagctctgcaggaatacctgggagaggtcctcatgcagcccgggcgggtcctagcccagccccagtctggccctggaca

SEQ ID NO: 12982 - DNA, 219 bp, Homo sapiens
  source 1..219: mol_type = other DNA
ctcccgggcctctcccgagagcttcctgcgcctgcccgccaggcttgggccaaaaacagggggagctggcccagcttccgtgctaggcaggaccctcccacgggccagctgcaccttcagcttgtgagccctgggtctccaggactggccaggctgtgacctcaggtgatccgctcacctcggcctcccaaaggattacaggtgtgagccagcgcctgg

SEQ ID NO: 12983 - DNA, 631 bp, Homo sapiens
  source 1..631: mol_type = other DNA
agagtcatggggcctctccggagctctgcccactgcccctcgctacagccctggggccctcagcgaaagcgttgttccctggagcctgccgcgggcaccaggacgccgccggcccccgcagcgctgaggtctgccctcttcccctccgcaggctgcgccgtccagggtcccctgggcctgggcctgtgggacaagatagccgcgcagctccgggaactgcagctgtgcagcagacgcctctgcgctgaggacagggacgccctgcgccagctgcagcccagtcggccgggccccggcgagtgcacgctggaccaccccaacactttgggaggcccaggcgggcggatcacgaggtcaggaggacagtcccagctactccggaggctgaggcaggagagccgagatcgcaccactgcctgcctccctccccgtggctgcctggcaggcgggtgggcggggtaagaccgtctgctgcgccggttacgtcccgggggctgcgcggctggagggaatgtcccgaagtccgggcgggcgcgggcgcaggcgtgagggctgagcgccgagctgccgatggggacggaggggcggggggtcgccccgacgcgcgcaggcgcacgagtcgctgaccgag

SEQ ID NO: 12984 - DNA, 470 bp, Homo sapiens
  source 1..470: mol_type = other DNA
agatcagctgtgccagcttggaagagctccctgcctgtcaggtgagtgctggtatggtggccacgcctgccatgttcggccttttcagggacctgcctgagacccaggtgcctcctcctaaggggctgtcactgctaccagccaggcagcaaggctgggctccatgaggctcctaaaaccatgggttaggggggcaagaccctccacagggactttcttcttgtccctggcaggaaaagggataagggaccctcctacttcctggcaggggctcctctgacacaaccctgcccagggctgtggtctgatttagcgagccacatcagggcctggaagacaaccccaggaagggctttgatgacctggcttgccccactggggccggggcaggctgtgccctccagggggccaggccgccttttccaggaaggcccccggtcagaggtaaagaagggagccacccttcctcc

SEQ ID NO: 12985 - DNA, 649 bp, Homo sapiens
  source 1..649: mol_type = other DNA
tgagccgagatcacaccattgcacgccagcctgggtgacagaacgagactccgtctcacacacacagcgctcggattacagtgcgggccactgtgcccgggctacttctgcagctgaagcacaggttcaccattgctgaaacaatacttgttcacttggggccgagtccccaaatgtgacccagctgcgttctggggcggcggcacagctcgtccaccatgagtagcgcgggcggcacgggggctgcagcccagaagaccccacccagggcgcgctgcgaccccggacgggctggctccgggcccccggcctcccgcgtccccgccgcctacgaggaggaacggggtccccaccaggcactccccgggccgggcagagggctccacgcgcgggccaacccggcgtccgggaagacggcccctagggtgggacgccccagttgtcgccgccaccccgccgcacgagaactccgaggatgccgcgggcgggccgaccgtacttcccggaatgccccgcgcccgccgccgccgtcgaggggcggggcctgcgtgtcggcggcgaggggcggggcctgcgtgtcggcggcgaggggcggggcctgcgtgtcggcggcgaggggcggggcctgcgtgtcggcggcgaggggcgg

SEQ ID NO: 12986 - DNA, 354 bp, Homo sapiens
  source 1..354: mol_type = other DNA
ccgctcacctgggcggggtccccgggctccgcggccgccgcggcgccaccatccctgcggaagatgggagcgcggggcggcagagggccccgcttcgcgccgccccgcgtccccgcgcccagactcggcgcccgcccgccgcagtgccggtgcgcatgctcgcgacggccgcccccacggcccggctcccacggctggaaggcgagcgcggggacgggggtatagaaacaggtgcccgcggccgcacctggagacccgccgtttctcacggcgccgcccggcgcgccccaacccctacaccgcggacaccgggctgagagcgcccacggctcccgcgacggtttcgcggagcct

SEQ ID NO: 12987 - DNA, 510 bp, Homo sapiens
  source 1..510: mol_type = other DNA
aggattggggccgaagtctacgcttccagcatcggggccgagccgagggtcctcggcacggccccgtcgccccgcgccccgtgcccgcccccgccccgggaacctcggcgtgggggtggggcaggcggcgggagacgacgggctgcacggccagccccgctcacctgggcggggtccccgggctccgcggccgccgcggcgccaccatccctgcggaagatgggagcgcggggcggcagagggccccgcttcgcgccgccccgcgtccccgcgcccagactcggcgcccgcccgccgcagtgccggtgcgcatgctcgcgacggccgcccccacggcccggctcccacggctggaaggcgagcgcggggacgggggtatagaaacaggtgcccgcggccgcacctggagacccgccgtttctcacggcgccgcccggcgcgccccaacccctacaccgcggacaccgggctgagagcgcccacggctcccgcgacggtttcgcggagcct

SEQ ID NO: 12988 - DNA, 322 bp, Homo sapiens
  source 1..322: mol_type = other DNA
gggggaacgtcagccctggggccctggagcccaagtgggagtgcgggcctagagcggcgaggcgctgcaggcccacgcggcggcctcggcctgctccctgcgttccgggaggcgttgtcctgggaacccgggtccaggaggagcgacggcgcaggactccgggaggccagccgtgcgcagttaccgggctgcgcggtcccaacgcagcggcgagcgggaggcccgagcctgcgcaacgcaccgcccaccgccgtcggccctgcctcctctgccgtgcccccagttgcgggagcgagcgcggtcgggagcggccgggcggggc

SEQ ID NO: 12989 - DNA, 327 bp, Homo sapiens
  source 1..327: mol_type = other DNA
taccgggctgcgcggtcccaacgcagcggcgagcgggaggcccgagcctgcgcaacgcaccgcccaccgccgtcggccctgcctcctctgccgtgcccccagttgcgggagcgagcgcggtcgggagcggccgggcggggcaggctccgcgaaaccgtcgcgggagccgtgggcgctctcagcccggtgtccgcggtgtaggggttggggcgcgccgggcggcgccgtgagaaacggcgggtctccaggtgcggccgcgggcacctgtttctatacccccgtccccgcgctcgccttccagccgtgggagccgggccgtgggggcgg

SEQ ID NO: 12990 - DNA, 356 bp, Homo sapiens
  source 1..356: mol_type = other DNA
ccacccgaccgggggtgtggggggcaggagcagtgtggtaccccacatacaaggccccttgcggcccacacctcagggtgtgctggaccccaccgtatgctgcagaatatccctgggcccccgtgtgtctgggggcccttggcctggtgccagcaccaaccaccgcgggggaggtgagcggtccacctgggctcctgaagcaactcccaggaaatcagttgagtctggacagggcctactagcagctgctagatcttgaactccaggagcgccccacgccttgggagctccatgggtcatcgcagcccctttgaagccgggcctggccacccaaagtggactgaggcctcaggaga

SEQ ID NO: 12991 - DNA, 443 bp, Homo sapiens
  source 1..443: mol_type = other DNA
accccggcttctactgtacaggacactggcccctctcaggtcagaagacatgcctggagggatgtctggctgcaaccctggctgtgtgggagtgaggctcacagccactgggctggaagcctgggcctcacctttgctctcctgagaggagccaggtgctttgaaggagcctccatgggggccagggccgaagctccctgggggggttgtgggtccccagttcctggcacgcagccttaatcctggggcctggctgccagcttccgcctgggctggcgccactctggctctgagctgggtgagggggccccttaggggcctcaagcaggagggctgagggcaccgggagcccagtgtcctttgggcctgcccttcccctagcatccctggttggaagggtgtcctcacagggctgtgggcgggccgggggtggggcagctgcc

SEQ ID NO: 12992 - DNA, 693 bp, Homo sapiens
  source 1..693: mol_type = other DNA
aggagccaaggtccgacttgggcctggctggttgcccacagccctgctcagagggccggctccctgacccccatggttcaggtttcggtgcccgacgctggggtgggccagcgtggagcctggcccgtctcctccaatcgggaacaagagggctggagagctcaggtcacccctagcctcgggtgtgtcccaagggcaacccccagctggtgcctggtgaaagggcatgacagcagccacggtgtgagctgtcccagggctcagggctggactgcctggctccagccccccagctacagagctcttgcagcctctgggccatagctgccagctctggagggtccagatggaacccagcctggattcctgaggcctggctcagttaataggagtggccccgggtgccacgagggccaggcctcggccaagccctgctggggtaaatcccagcagcccaggctccagtctcgcctcgggggtccctccttgccagctctgccagcccctcagggctgctgggcaccccttcacctcctgagcaccccaggtgctcagagctgtccggactgacgtctgtcccttcgtggggacactaggcaggcactgggccttgccccaagccccgcctgcctctgcctccctggggcagagctgttcccagacgggtggggcggggcccaactgtccccagct

SEQ ID NO: 12993 - DNA, 336 bp, Homo sapiens
  source 1..336: mol_type = other DNA
caggccccacacccctgcccccaagaatctagggagccaggggcccaggtggccaccagcctttcctgaggaaggcacagtgaactcttccctggggcaggggcttgggcagcgctgtgtcctggcctggggagcatggctgagcacctactacatgcagacgacagggctggctttagagactcacactcatctggccctcgggagccccagagggcacagctctgggcaggtgggcccctcccttggcagggcgggctcgaatcaggcagggtgctcctagccttgtcaccggacaccgaagggcgtcacgggcagtggctggcggtgtccttc

SEQ ID NO: 12994 - DNA, 767 bp, Homo sapiens
  source 1..767: mol_type = other DNA
ctcatctggccctcgggagccccagagggcacagctctgggcaggtgggcccctcccttggcagggcgggctcgaatcaggcagggtgctcctagccttgtcaccggacaccgaagggcgtcacgggcagtggctggcggtgtccttcatggctctgtcaccgccttacggaggagctgaagccacagacactggggtccgcaccggaagtatccagtgacccttaagaaacggacgccttcatgcgggcggctggagaagcgggggctgggcactgcagcaaccacgctggggccagggctggccgtgggcgcaggccgatccttacattcgaggccggcccagctcttccccctctgggcctctcacccgcgcaggacctcggtgggagcgcgcacgtggcggggcggggggccgcgggcccgagcccggactggccaccgggggcgcccgcgagctgacgctctggcccgttgcggtctctgtggcccgcgcgaccttccggccctggagccggtggccgcggggctccagcgacgccgtgtggtccgtgctccgctctgtggctccagggggccgagaaactgctgagagtccggcccggccggcagtgctgggcgcgggccgagggccccgggaggcagcggccccgccctctttacctgcggcctcgcagagcatgctgggagccgcgggaggcagtggccccgctcccctcacctgcggtatcgcagagcatggtgggagccccgggaggcagtggcccc

SEQ ID NO: 12995 - DNA, 819 bp, Homo sapiens
  source 1..819: mol_type = other DNA
accctgcaggtgagccgctgcccgtagtccggcaccgagccctggcggctccgccctggcgtagactggtcgcagcccgattcagatggggcccccagcagcggggctctggcgcctgcaggagacaacaggggcacaggccagaaaaggctgttgtggcggcagaagcgctcccagccacccctcccgcacctggagcgaggcccggcccttcttacggcggcctggccgcgactccgtggctcccgccactccgccaaacagggaagtgggaggaggctggggcggcggggcctgggtacctcttcggccgccgcggggagcgactcggagctgcggagcccgccgccggcctggcccgtggtacgcaggcggggtcagggtggggcctgggcccctgccgacccggtgtcttctcgcccccgccgccccgccgcgcgctcaccgcgggtctcctccggcgccgcctccacgtcgttgtaaagggaacgcgtcagccgcgggccgcgccctcagcccctcggcccctgggcagcccgcacctggctcggtcgccgcccgcgctgccgtcggaacgcgcgctcccacgcctgcagccgctcccgcacgtcccgcagccgctccatggcgcgcgcgcccgcccggcctccgcgcttgcgatcgtccagcgaatctcccgcgcagccgtcgcgggggccgacagccaatgcggatgcgcggcgggccgggggcggggccaccgcccctgggcagccagtccgtcgggcctcggacaagcagccaggcgtcaacgtcatcgcggggcgccgcggcgccggg

SEQ ID NO: 12996 - DNA, 690 bp, Homo sapiens
  source 1..690: mol_type = other DNA
ggcctcggcctggcccaaggtcacagcctgagcagggaagggggccggggaagacactctggccccaaggcccttctttacactcgctctgacaggacaggcctgcccaccaagggaggcaggcacctccgtgcgacgccccctcccctcccgccggccgcagggaacgcgacggtcctcggtcgcctgcgtttcgcgaagacgcccccgcccggctcctccgggcctcgagccgcgggaggcgctggaccctccgctctttcgcctcccgagcggggcctgctcctccaggtcggatgcgtctcccaccagggcctgacgccgctccgaccggcccggggactcccagtccttcccggcccgcggtggcacctcccaggctcccggcctcggccccgggctcccaaatgcagccactgcctccctcggccaggccgccccgagcgaccggtgccccgccccttgaggccaggcagggccaggggcgtgcgccgccccgctcagacacccccccggccgcccgcgccgggcctagaccgtccgccgctccccgcccggcgccgcggcgccccgcgatgacgttgacgcctggctgcttgtccgaggcccgacggactggctgcccaggggcggtggccccgcccccggcccgccgcgcatccgcattggctgtcggcccccgcgacggct

SEQ ID NO: 12997 - DNA, 876 bp, Homo sapiens
  source 1..876: mol_type = other DNA
cgggcagcccctgatgggctccccgactctgccgacgggcccagcgcaccaaggagtgggcgtcctgcgctcaggagccccgctgagtgaggccaggcgaacctcttaccgtcggcgcctgccctcggtatggtcctgggcccggaggccttgggagcccagcgcgctgagtacagcgggcgctacgaggcgcccttcctctcgccctgcggcagagagcgcaacttcctgcgctgcgaggaccggccggtggtcttcacgcacctgctgaccgcggaccacgggcctccgcgcctctcctactgcggcggtggcgaggccctggccgtgcccttcgagccggcgcgcctgctgcccctggccgccaacgggcgcctgtaccacccggcgccggagcgtgcgggcggcgtgggcctggtgcgctccgccctggccttcgagctcagcgcctgcttcgagtacgggcccggcgcgcctgcgctgccctcgcacgtgcgctggcagggccgccgcctcgccctcaccatggacctggccccgctgctgctcgcggctcggtcgccctgagcggggccaagggaaaggcgggaggccgcgggcgcctctcgccccgctcccccgggactccacgccccggaaagcccgcgccacccgcgctcgcggcagcctagtgcgcctgcgcgctcggccccgcccccacccggcgctgtccttggtgctgccgcggcccggccctcccggacaccccgctccccacggcgcgcgccccccgcgcacccgactccggcgccctccggattggcctgcgctcgagacgtcaggcactggcggcgggcgcggggctctggtgcgcgtgcgcgagcgtcccccgccccc

SEQ ID NO: 12998 - DNA, 855 bp, Homo sapiens
  source 1..855: mol_type = other DNA
cgggcagcccctgatgggctccccgactctgccgacgggcccagcgcaccaaggagtgggcgtcctgcgctcaggagccccgctgagtgaggccaggcgaacctcttaccgtcggcgcctgccctcggtatggtcctgggcccggaggccttgggagcccagcgcgctgagtacagcgggcgctacgaggcgcccttcctctcgccctgcggcagagagcgcaacttcctgcgctgcgaggaccggccggtggtcttcacgcacctgctgaccgcggaccacgggcctccgcgcctctcctactgcggcggtggcgaggccctggccgtgcccttcgagccggcgcgcctgctgcccctggccgccaacgggcgcctgtaccacccggcgccggagcgtgcgggcggcgtgggcctggtgcgctccgccctggccttcgagctcagcgcctgcttcgagtacgggcccggcgcgcctgcgctgccctcgcacgtgcgctggcagggccgccgcctcgccctcaccatggacctggccccgctgctgctcgcggctcggtcgccctgagcggggccaagggaaaggcgggaggccgcgggcgcctctcgccccgctcccccgggactccacgccccggaaagcccgcgccacccgcgctcgcggcagcctagtgcgcctgcgcgctcggccccgcccccacccggcgctgtccttggtgctgccgcggcccggccctcccggacaccccgctccccacggcgcgcgccccccgcgcacccgactccggcgccctccggattggcctgcgctcgagacgtcaggcactggcggcgggcgcggggctctggtgcgcgt

SEQ ID NO: 12999 - DNA, 736 bp, Homo sapiens
  source 1..736: mol_type = other DNA
agcgagcgggaaggcgccgggcccgggactgtccgttctcggggccagagctgcattttggaattttgagttccaattgttgtaaaacttaatttctccccagtttttatatatatattttttagagttccgtttttatttattaaaaacaaaagccccagccctgccgaggcctgggcggcgtcctcagtcgggtggtcccggggcctttgcggtcccgcccggctgagacgctcgccccgacgcatggacccgagaacatggaccctgcgcgtcctcccgttccttgtgggcgcggccgggggcgggaagagacgcggggcggaccggaaggggcgtcaccggcacacgcctctcggaaggccagggcgggcgagcccccgaggcccgagggagagggaagagcgccgggcccgggtcgcggaggcgggcgccgccggaacgcgaagcgcggggctactgcgggcaggcgcgagttcgcgcagcaccgcccccggcgtgacctgctggtcgcttccggcgcgggaggagaatgtggccggcgggacgctccggaccctggccttggcgcggtcgcggggagcccgggcctgcagcggggatgggcgtttcctacacgcagggccagagtccggagccgcggacccgcgaacgtggaccaccagggccaggtgggcgggggggccgtgctcgagaggcggggccgccactccggggcctgcgcggtgggcaacct

SEQ ID NO: 13000 - DNA, 528 bp, Homo sapiens
  source 1..528: mol_type = other DNA
ggctcctgcgcgccctggcctgggccttgcccagccgcgtggtccccagctggtgactgctcaggagtttgggggctccaggacagtgggcccggggcctggcaggctctcggtgggtggggtgggggcccccaaaccaaagtcctctggggtataagaactaaatttgctaatgacatagttttaacctaaatgctatttaagcgagcgggaaggcgccgggcccgggactgtccgttctcggggccagagctgcattttggaattttgagttccaattgttgtaaaacttaatttctccccagtttttatatatatattttttagagttccgtttttatttattaaaaacaaaagccccagccctgccgaggcctgggcggcgtcctcagtcgggtggtcccggggcctttgcggtcccgcccggctgagacgctcgccccgacgcatggacccgagaacatggaccctgcgcgtcctcccgttccttgtgggcgcggccgggggcgggaagagacgcggggcgga

SEQ ID NO: 13001 - DNA, 402 bp, Homo sapiens
  source 1..402: mol_type = other DNA
gacacctcctaggcacaggaggctggcgcctctcttctgggctcagggccaatcagggaccctgacagatgtgagggtggccacagtaccacagccaagatgcaggctacctgccagtgggactgcacagagccccagccccgctgtagagctctgaagccacggccgcccaggctgaagcctcacacattggctaggcagctggcccaagatgggcccaagaaacctcaggcctttgtctgctctcgggggtacccactgtgggctgcatgctgtgctgagcagtgggggctcagctccatagcctccagctcacccaagaccagggactgggcttcacaggccagcccagtctgcctggcacagctgatgggctgggtggtgcctatacccaacactgtc

SEQ ID NO: 13002 - DNA, 445 bp, Homo sapiens
  source 1..445: mol_type = other DNA
ctgtttgggcgcccaccactgtattttagacaggctctcgctattgccaggctggagggccggtcccagggtccctccaggagggcggtgtttcctcctgaaggatgaaagcactagatgctccataagcagggcttggccgatggaccggccatgagggaaagttcctttctccagagtggacactgggcccaggcttctttggccagtaagcatcctttcttggccctaagggagagaatttctcagaaaaagggaaagactaatatgttttcgcctctgaccatcgccccagttctgaggcctctgggccgtggcttcggactgccacccggtggcagcacccggagccttactgcaagccagggaggtgggcagccgacacgcggcgtcctagcttcccagagcggcccggacggcgcctcggacccagacagtcggctga

SEQ ID NO: 13003 - DNA, 598 bp, Homo sapiens
  source 1..598: mol_type = other DNA
gtgggggcaagccgggagccccagaccccgtggcccggagtgggtcgctctgtgacaccctgtcccggagaccccgacaccttcagccgcgtctcctggtgcgcctgcgcgggggccctggaggaggagaagtaggcggggccggcggccgctggtgactacaagccccggcgtgcaccgcgctaggctggccgtggcgcgcccggaaggtgtcgcggccctgggccccgccccggaagataagggccgcgctggtgaacagggccttgcgggtgaggcgcgctgagacccggaccggccctcctgagaggatgccggtgcgggcgcccgcggggcgcggcggcctcgggggcggggtcccggaaagccgggctggcgggggtacccgggccgcccggccgcgctaatcgtgagtcgcccccaggacccgtcgccatgggccgtgtgatccgtggacagaggaagggcgccgggtctgtgttccgcgcgcacgtgaagcaccgtaaaggcgctgcgcgcctgcgcgccgtggatttcgctgagcggcacgggcgggaggggaagggacgcccggccggaacgccgcactcacgccgcc

SEQ ID NO: 13004 - DNA, 461 bp, Homo sapiens
  source 1..461: mol_type = other DNA
cccacttcctgggccggccggccctcaccctcggcaaggatcccggggctcgtgggggcaagccgggagccccagaccccgtggcccggagtgggtcgctctgtgacaccctgtcccggagaccccgacaccttcagccgcgtctcctggtgcgcctgcgcgggggccctggaggaggagaagtaggcggggccggcggccgctggtgactacaagccccggcgtgcaccgcgctaggctggccgtggcgcgcccggaaggtgtcgcggccctgggccccgccccggaagataagggccgcgctggtgaacagggccttgcgggtgaggcgcgctgagacccggaccggccctcctgagaggatgccggtgcgggcgcccgcggggcgcggcggcctcgggggcggggtcccggaaagccgggctggcgggggtacccgggccgcccggccgcgctaatcg

SEQ ID NO: 13005 - DNA, 361 bp, Homo sapiens
  source 1..361: mol_type = other DNA
gcggcctcggggtcccacccgttaggggcccgattccgcgagtcgggccagggttctggtcagggtcccacttcctgggccggccggccctcaccctcggcaaggatcccggggctcgtgggggcaagccgggagccccagaccccgtggcccggagtgggtcgctctgtgacaccctgtcccggagaccccgacaccttcagccgcgtctcctggtgcgcctgcgcgggggccctggaggaggagaagtaggcggggccggcggccgctggtgactacaagccccggcgtgcaccgcgctaggctggccgtggcgcgcccggaaggtgtcgcggccctgggccccgccccggaagataag

SEQ ID NO: 13006 - DNA, 558 bp, Homo sapiens
  source 1..558: mol_type = other DNA
ctatgctctcctcattttagtatgggaacagtagtattttgataggattaccatgaggattaaattagtaaatacaaagagcatacaacctggtccgggtgggaacctgtagtcccagctactccggaggctcaggtaggagaatcgcttgaacctgtccagacaatgtcataaatttatatgactggccggacgcccccgctccgcccttcctgcgggtccgggagtcgatcccccaccgtgctccccaacccccgcaggccacccgggggcagagagtgggcgcaaggggtgaacgttcgctgcctccgatcccgggggaaacggagcgccgagaacgtcgacgcccttccgcgcccgtcgggcctgggactgatacccggtctggcccggaaccccccaggcgcgcccctagctggggccctggcgaccgccgcgccgcaggggctagaagccgtcgagacgcgagcgccatcgaggcgcgcggtcctccaggcctcccagagcggcgcagcggccgtttccgggggcggggaaggaaccggagcctgagagccg

SEQ ID NO: 13007 - DNA, 711 bp, Homo sapiens
  source 1..711: mol_type = other DNA
ccgcgcgggttcggatcaacacgccgggggagcccggcttacgtccctcctggacccccgccccgttcttcccgtggggaggggcgcgtcaggcggacctggcaccctccggctgctgggcttcgccgggagccacgcggggaggtccaggcagtcgggacgcaggcagcgtcctcgccgaggctgcgagtccgtggccgtccgggggaggcgcgcaggctctgccggacgcaggcgagtggcgagtggacgccgggcccggcctcgggcaactccgaggggcgcccttcctcggggtcccggaggctctgcgaccccgcggccgctccagccgctcactggggacaaggcccgagccaggcgtctccgcgaggcggggtccatagcgcgcccagcaggcgcctcctgtcgcagggacgcgggggagcggcgcctgaacagcctcggtgggaaccagcgcccgaagctggtgatccggggtgcgcagggcccaaccgggcgatcccctggatctccgccagccgcaactcccggccccggcccgcgtccccagctccaggccccggccccgccccgcccctgctcaggcaccgcccactccgggctctgactccaccccttctccggagcctgggaggcggggctgagaaccacagagatggccgggcctccgagcggcccagggcggccggaagtttgcggggcggggcg

SEQ ID NO: 13008 - DNA, 679 bp, Homo sapiens
  source 1..679: mol_type = other DNA
gcctcttgagagtctgggcccgcccacgcgcccaatggacgacgcggacctgaccttcgggagtggggccagcagaaggtggactaggcgtcagccttcccgtccccccctgccgcggctgtcaggtcctgggctgtgcccgaagcctccacacgggtgtggcccgcgccctcgtgaaggcccgcccctctcccccaggtgcgcggtgggcgacggagacggtcgctgttcagtgacgccccctgtcgggagcacgccgggccggacacagcgaagagcggctgcgcctcggacctcgcagcactcagcctcctaagtgggaggaacccctgggcgacattcgcactgcagcggcgcagggaccagccaggcggctgagggcaaggtcgttcccagcagcgggaacctcgaggagggactgcggggccggcaggggtgtcctccacagggccggagtcggcgatgggctgtaacctccgcgcccggaagtgcggccggggagccggccgggcccattgcccagaggtgttcggcccctctagggatcgcggaggtctggctctcggtggctcctgagagctccctgcagtcggtcaccgagttcgggcgggcaggcgggccaaatgacgtaaacatgcttgccctccagaggagcccccagggattggcggctgcgcag

SEQ ID NO: 13009 - DNA, 582 bp, Homo sapiens
  source 1..582: mol_type = other DNA
taatggtatgaagttttattgggctataattcacataccatataattcacccattttgtacaattcaatgattttggcatattattttttaactatggtaaagtacatgttaaataaaatggctcggccattgtttcggaccgagctcctgcgctagggcccaacagacacgcgcgccggacgccacccgacatccacacgggacagggacgcccgctcggctccgctccgcgctgatccggccgccgcccacccggacgccgacgaaatcagcctcaggtgacttctgaccccagaccacgggattctcccgctttaccctcactctgcgcgggcggggagggagacgcgggcgcaggccgcagtttctacctcagaaacggaaacacaacaccgccttctttttctttggggaaagaaaaaaaaaaaactgtctaagacgaggtctgggaccccgccggcgacccccgattcccccgggcggggagggggcgggacctggcgcggcctcggctccgcccctcgggccagcggaccacagtggggcggtctcctagagcggcccggaagtggctctcaggg

SEQ ID NO: 13010 - DNA, 519 bp, Homo sapiens
  source 1..519: mol_type = other DNA
aacgtttcctccctcagaagggaagggtccattatcctggaagatctggtgctgaaaccccagcccacatgtgggagccacagccttctcttttctcaaaaactggtgccaccgttccaggcaacgggcccattgctcgaaacgcgcgtggtgtgcgaacccctgcccgcaagggctgctaagttcgctgcacagacttcgcgtctgcctggtgcgcggcaagtacgcacgggccgggcacagcccccagccccgccctgtggggaagcctcttgagagtctgggcccgcccacgcgcccaatggacgacgcggacctgaccttcgggagtggggccagcagaaggtggactaggcgtcagccttcccgtccccccctgccgcggctgtcaggtcctgggctgtgcccgaagcctccacacgggtgtggcccgcgccctcgtgaaggcccgcccctctcccccaggtgcgcggtgggcgacggagacggtcgctgttcagtgacgccccctgtcgggag

SEQ ID NO: 13011 - DNA, 421 bp, Homo sapiens
  source 1..421: mol_type = other DNA
aaattccaatagagtttgtcatgcatttttttcctgattttgatagtttaatctgcctgcaaaatgaacgtcaaaatatttgtgaggttttttttggtgagacagggtctcactctctcatcagtgcccggctcactgcagccgccctcccaagtgctggaattacaggcgtgggctgtccaagtgtacaattcattatgttatctactgaaggaatctgaattcttccatttatctatctaatcacttactgattgaatgattcagttcttccaaaaaacgtatccttaggtttttatccgccttgttcagtgcacgggtcaactaccaggtctggggctgaaccatctagagaggctacgctgccagcggcgggccggaattcggggcgggacttccgggggtcagccggccgagacgt

SEQ ID NO: 13012 - DNA, 338 bp, Homo sapiens
  source 1..338: mol_type = other DNA
gaagagaggtggtgggatggggctctccctctcccccataccgccagagagatctgcagaacatacgtctacacgccgtgaggaaaggtgccgggcacgtagtcagcgcccgcgatcactcgctcaccgcgccccgccccgcccgctccccgccccgcccgcgccccgcccgcgccccgccccgcccgcgccccgcccgcgccccgcccgcgccccgcccgcgccccgcccgcgccccgcccgcgccccgcccgcgccccgcccgcgccccgcccgcgccccgcccgcgccccgcggaacctagagtcgcaggcgcgttcttgaaggacggaattcgg

SEQ ID NO: 13013 - DNA, 665 bp, Homo sapiens
  source 1..665: mol_type = other DNA
aagtatagcaagcctcaggagtttatatattatatggataattttatgaagctcaaaaacacccaaaattaaacaacatattctctaagtacgtacgtgggataaggtacgtgtaacttactggtaatgcttttacgttaggaatgacgtcaaaggagttcactataaatttatattagaaagaagtgattaatgaacttaggttacctgagaagtgatgcatgaatactaaaaatttggaattacatatataatatgtaataataaaaaaagaaaaaagtgtcactggttatccttcaggtataaaaattacaattaaaattataatgttataaccttccattctttcccctatgaattaaaacttttttttttaacgagactaaaaaatcaaggtgataaaatgggaactggttaggtcaggctacccactacctacagccagtagcttattaaggctctaggcgccagtgacaccttcagacaggtggttagtgcgccctagggactctccgcagcgtcgctcaggttcaccccaggggcgtgtccagctgtcgtcggggagagcccacctccccggggggtgtggctaaggggcgaggcgcttctcgtccagagcccaggtaatccgggcgggatcagcgagcgtcgcgatgtgatgacgt

SEQ ID NO: 13014 - DNA, 517 bp, Homo sapiens
  source 1..517: mol_type = other DNA
ataatttttaaaggaaagtttgctaatctttgttcttttcatattgaaagattttttatgacaaaacaaggaatgagaaaattaggagctacaaattctaatatctaaagtatggctggttttaaatacctgcactcaaatctttctgtatgtttcaccaattgtaagacaacaataaagatatctacttgctggtttgatttttcaaaccaagaaacaaatacaaagtaaaaactgtcattgtctcctgaaagacaagtgaaacttgttcacttattcattcatttattcaataaatactttttgagcacctactatatgccagggctctagacagtagagtgatggaacttttattctagaagcataagagataataaacaaataaataaaatatatagtatgtcagataaggaagggacatgaaaatgatcacacttttttttcctctcccacacttttaattaattaaatgatgctgtcagactgaaagagacactccatccagaccctgagg

SEQ ID NO: 13015 - DNA, 413 bp, Homo sapiens
  source 1..413: mol_type = other DNA
gaaccaaaaatacttcgctttggctgtcgccaggctggagtgcagtggcagatctcggttcactgcaagctcccccaagtagctgggactaaggcgtacctcgtgatgcgcccgcctcggcctcccaaagtgctgggatcacaggcgtggaggccgggcttcttagcagacctcagtctgaaactgccttcagtgtttctccggagaaaagcattcacgccaggttgtgacgaaaacattttttgagaactcataatgtttattccttggatgaatccattatatttatttagtgtctcagtggggctcccccgacttgcctacattccctggcagcctcgcagcttcgggcagatggagcttccggcctgcgcgcagtggtcgcctgtcgtccgcccgcgctcccttcggcc

SEQ ID NO: 13016 - DNA, 484 bp, Homo sapiens
  source 1..484: mol_type = other DNA
acctcgtgatgcgcccgcctcggcctcccaaagtgctgggatcacaggcgtggaggccgggcttcttagcagacctcagtctgaaactgccttcagtgtttctccggagaaaagcattcacgccaggttgtgacgaaaacattttttgagaactcataatgtttattccttggatgaatccattatatttatttagtgtctcagtggggctcccccgacttgcctacattccctggcagcctcgcagcttcgggcagatggagcttccggcctgcgcgcagtggtcgcctgtcgtccgcccgcgctcccttcggccggaggtcggcggccccgggcagagcgcgccgtctgccccagtatcgggaggccagttccgcgctgggcccacgccctcctcgcccgccgctgcctgcgcgccaggccgggtggcggagccggccgtcgctgctccgagctcggaccctcccccggggtgatttcggct

SEQ ID NO: 13017 - DNA, 405 bp, Homo sapiens
  source 1..405: mol_type = other DNA
tgcatttttttggaaaagcatattccaaaatctgaaatgccaagttacagacctcctttttgtaaaataattttcttgctagtataatttacatataataaaattcacacattttaggtgtacaatttggtgaacttgggcaacttagagtcacttaacctttcctcagtcaagtgctctatctggagcttcatatcctgttacagtatgtacaaatttgagacagggtgtcagtctgtcacccagcctggagtacagaggtgtgatctcagctcactgcaatttaaaacacatttcctcttaaattgaagattgcctacatttttatatcaaatatgtgttatattatttgagcactaaatgccagatgtgtaccctctgtgagagacagcagcactctcgaaa

SEQ ID NO: 13018 - DNA, 380 bp, Homo sapiens
  source 1..380: mol_type = other DNA
gaaaggccatgcttatcagggctcttatctgactagacagtctgttatatgatatggggtgtattacctaacatctctatctctcctcacttgtgacatggggatgatgacaatgataatagtaccaacctaattaaacaaattagtaaatatgaagtatttggaacattcctgactcaggataagtcctgtttaaatgttagtatcattattattgtttcttcaagccaggaatatacttcatcaattatgtgtacactcattccttcatcctaggcactgttctagtgctggagatacatcagtgaatctagtggaatctacccaggcactgggtagcctagtacctgtcggtttgagctgccatcttagataagaac

SEQ ID NO: 13019 - DNA, 747 bp, Homo sapiens
  source 1..747: mol_type = other DNA
gccaccttcaatttgaaaaagactgaattgctccaaatcgagtatttgggactgaactaggcaatcctgagcccccgaggcaggcgttgggtcttctgtggagtccccagagacctgcacctgcagccgagccagggcgaatgcacggagtgcccttggaggcggaggtttctggccgccggggcgaccgtggacgaggcacctgcaggaaacagagctctgcacgctccggtccccctcacccggggagggagaggaggtacagaggggaggacgtcgagcaggccagcctcgttgccagaacccccgccccagccggagatgggagcaccgcaccgtctcacgggggctggatttcttctgcttagttctcgccgcggcgaggcccgcgggccaggcgcggcgacgaaggtgcacgaaggtgccccgcgggcctggtggagttgcagcggcgcgcaggcgcactgagggccgcccgcggccggctccgcggtacaaagagcgcccccgcggggagccgggcgtcctctgggcggagggagcagccggggcttcgccggcccgcgccgttcttctcacgcgccgctccggggcgcagccacagctgtcgcccaccgcgggtgagaggcttgctggtccgccccggcttccccgccccggcggcggccgtgcggttcgggccgcttgccagccggggccgactccgccccctgcgccccgcccttccccgagctccgggtccgcggc

SEQ ID NO: 13020 - DNA, 152 bp, Homo sapiens
  source 1..152: mol_type = other DNA
tacagtggcgcctgaaaaccagctgtgacagcctgggggtcgcctgcagcctcccaggctccactccatcggctccagcgctgcaggcgggccgtgcatgtctctagatgcatattaagcaaaaagtttcagaatctcctgccgggggcggc

SEQ ID NO: 13021 - DNA, 640 bp, Homo sapiens
  source 1..640: mol_type = other DNA
ccaggctggtccttggcttcccagagtgctgggatgtgagccaacttttaaaaattaaaaaaatttttaaaaaccaactttttaaattttcaaaaaccaattttaaaaaccaatttttaaaaagccaacttttaaaaatttaatattggagcataatagaattcagcaatataagatttgattgggaataagaaataacatctcttttaaaaatgactacagccctcttaacaattttaggggtaccagtttactaattgatcaaattccagattggaaattagtcatcatttgattaaccagagttaagcctcttgaatcaaattccctaatatatttagctaaaaatttttctttggggcctcacctaataaaggtaaatagaaaactgatagctatcacataacatacatattggttaataattgcaaccaaaagtaaattaataattttgagctatttatattagctctgccaaaattacatcattaaatttggccttatgaagcattgctgactgtagtaaaaacaagtgtgagcaaagtcttctgcactgagtctggtttcagttccacgtaatactgacttggcaagtgtggaaattctcatgtcatcattaccaaaaatttctgcaaaagcc

SEQ ID NO: 13022 - DNA, 563 bp, Homo sapiens
  source 1..563: mol_type = other DNA
cgtgctctccaaaaaaaattttttttaattaagttttttgctctctgtctggtacaaaagacaaaaaagtgttttcgtcttgtcataagtgcctaatttatgttgatgtatgtaaacatacactagaaaacaggatattaaaaaaataatgacaccgggtagttttattgtagaataatttttaccatggacaattgtttgtgaaaatgacaccttgattaggaaataagcaagcctaacttagttaaattctaacctcttctgattcccagaagtccaaagttcatttggtgatttctacaaggtgaactaaagaaataactaaaacatctttcctactgaaaatccttaagtgggaaaagtgttttacaagcatgtactactttcgtatctggaaaaaggtttgtttttctttcattttttaagaagaacttttcatcagtggcaaaggctcagttgaaattaatgataaaggataactacttgccacgtgtcatcaggcagtgctctggaaccagtgagtgctgcccggatcctgagaacccggcacctcctcaggtgac

SEQ ID NO: 13023 - DNA, 480 bp, Homo sapiens
  source 1..480: mol_type = other DNA
aggcagaaaggtgcatttgtaatgaacgcagcagggttcctgcactgtgttggacaacttgtactgagagcatcactctctgccaaattgtagggcctttcacaataaccacatcaccagtttgctttctaaatagaatggttattgtttgtcctacaattgaatcaaatcaatgaattgatacattaatacaaagtgtaccattagggtttaaccttatggtgcctgtttctagaaagattttggagggcatacaccagaaaaactatcgattgcctatgtaatctattccccttgatactgggagaatttctcatgatttatgttaacaagtgttacatgataccaattggttatatgataccgataaccagtttaagttacatttaaatagaccttactttgaacttctaagtgcaggatctaaaaccactagtgaaatttctggagtcaattagcaaatcccttcatagaaatttc

SEQ ID NO: 13024 - DNA, 407 bp, Homo sapiens
  source 1..407: mol_type = other DNA
atacatgcctggcttgctgcccgctacgggtagacccttttgagttcagagggcactgtcctgggaaaaggaaatgattatttacatctgagcccaggtttgtaacaaagaaattgcttcataatttaaaaattattcatccctcatcccaggaaaataaaagagtagcaattaattgtgcatcctgatttaagaggctgttgcctgagtcatactgatgtctgtgctcacatctgaaggcacttgtaccacaaggcgctttcaaatagaaaagaatttaaacatatagattgttataggattctatcattcttacagcacccaaaagtgttttacgtccccctccaaaggccattggctttcttgcactttaaaaagcaaaggggactttaaatgcagtgcccaca

SEQ ID NO: 13025 - DNA, 444 bp, Homo sapiens
  source 1..444: mol_type = other DNA
acatacatgaagtgtagaatgagttttgatacatttctacatctgtgtagtttagaaagttccaacctttgagatttttgaatagggcaactctgatttatttaattctcttaagcgagaaaaaaaatttttttctgacttggctgctagaagaccccatagggtggtttgcacccacggctctggtcttgacctggggagcccagcttcctcggtgcacctccgagagcggggcgaggggtgccacgcgattcccaggccgctctgtatctctcggtgcgcttgcagggaccctgcagcaaagccctggatgcttgcagccggtgcaagtttgcaagcgtcggggggcggtgggcgtggccacgctccctcccaggcagtcccgggaatgttctgaaaagtatccgaaagttctgagtcgcgcgcgcgccaccactccgggcg

SEQ ID NO: 13026 - DNA, 426 bp, Homo sapiens
  source 1..426: mol_type = other DNA
attatttttaattgagttcaagaaatagaatgcagcgttgaattagaagactaattccttcttttaatatgttgaaaattttttatcgttaaacattttgtaaaggattttttgagggagtcgttagaaagtctataaatacaactacgcacactaaaaagtagtcatctttttaaaaataactttgtttaaatgcatgcttagtgtgaatggatttacctaattctcttaatagcatgcattctacattaactgtaatagcaactgatataacagacatcatttttattaatgatcagtccgcgagataaatggtgacttacaggcgagccggctgcaccgaaggccgcgggaggcggagggctccctgccagcgtgcctcggaggacgtaaagctccggggcctgagcggacagtacggggagc

SEQ ID NO: 13027 - DNA, 490 bp, Homo sapiens
  source 1..490: mol_type = other DNA
aatgtaggagtcaggcaataaatgcctcatttttaaataagcaactccattgtgatttagacatgttttcaagtcatttacaatagcaagaataaaatataagcaataatcataacctatttgccaataaggttccaaaatatataatagatttctaggtagtaagtagcgctcaactctaggagtggctggtatcttctgcattcgtgaactttgaattcacaagtattgcactagactcttctatagcaaattctaagaaggcagaagtagactcatttttcatgagagatatatctgcatgcaagagtttggccaatgttgcaagagatgatatcttctgagttagcaaacatagtttgttggaagcatttatattttaattaaaatcttgcataacttatatcaatttcctattctttagattagattaacatttaaatcagtagactttgaataaagcatattaccttccaatcaattgaaggtc

SEQ ID NO: 13028 - DNA, 303 bp, Homo sapiens
  source 1..303: mol_type = other DNA
acactgtgccacaatctctgcaggctcgcactggcaggcggaggcacaccgcagtctccctggaggagccccgcggcgcccgaggaagagcagcgggcgcccagctccagcagggcttggggctttctggcagtttctctgctccaggcacaaacgcggcccgtccccccgcgctcccggagtcgctgagctgagcgagtgacaggcgcgtcccgccaacccgcgcccggacgggcagggaggagcggcgcgcggggccaactgcggcgcgtcttccggcgcccgcggaggaggcgagggtgg

SEQ ID NO: 13029 - DNA, 453 bp, Homo sapiens
  source 1..453: mol_type = other DNA
cttgtaattgaatgttacaaaaaaaggttaagcttttaattacaggccctcaaactatcattttgtgcaattagcaattaactataatcgttgatgagcaaatgcaaagctgcgctagcaatttctctcacttaaagacacatttagtttgcccaaacgtttgtacctaccagcctctctcaggggcgcaggagagggtggtagagccctggaaactgcaagtaccccccaggtgcacgccccgtcagtggggaggcggtggcaacagcaacgatagttgcatcagcgctaactgctgctgctgctgcgtgttctgccggaggctgccgggagggtacagtaatgactgtagggagcgcacagccgctgcggcggcaggttccctggtggaggcgagggcggcgcgcgagccaaccagcggtcgccccgggcccccgtgagccccaggcgaac

SEQ ID NO: 13030 - DNA, 626 bp, Homo sapiens
  source 1..626: mol_type = other DNA
taattgaatgttacaaaaaggttaagcttttaattacaggccctcaaactatcattttgtgcaattagcaattaactataatcgttgatgagcaaatgcaaagctgcgctagcaatttctctcacttaaagacacatttagtttgcccaaacgtttgtacctaccagcctctctcaggggcgcaggagagggtggtagagccctggaaactgcaagtaccccccaggtgcacgccccgtcagtggggaggcggtggcaacagcaacgatagttgcatcagcgctaactgctgctgctgctgcgtgttctgccggaggctgccgggagggtacagtaatgactgtagggagcgcacagccgctgcggcggcaggttccctggtggaggcgagggcggcgcgcgagccaaccagcggtcgccccgggcccccgtgagccccaggcgaacgcgcggagcagccgggcccctagagcggtccgggtggcggcggcggcagccacgaccacgaccgcggtcaactcgcacgctccccgcgcgggcacccggctgcccggcgcgtgcaagaggagcgcgtcgagggaaaggagggccgaagccgccgcgctcccgcccgcccgccgcgcctc

SEQ ID NO: 13031 - DNA, 593 bp, Homo sapiens
  source 1..593: mol_type = other DNA
aatacctaccagcctctctcaggggcgcaggagagggtggtagagccctggaaactgcaagtaccccccaggtgcacgccccgtcagtggggaggcggtggcaacagcaacgatagttgcatcagcgctaactgctgctgctgctgcgtgttctgccggaggctgccgggagggtacagtaatgactgtagggagcgcacagccgctgcggcggcaggttccctggtggaggcgagggcggcgcgcgagccaaccagcggtcgccccgggcccccgtgagccccaggcgaacgcgcggagcagccgggcccctagagcggtccgggtggcggcggcggcagccacgaccacgaccgcggtcaactcgcacgctccccgcgcgggcacccggctgcccggcgcgtgcaagaggagcgcgtcgagggaaaggagggccgaagccgccgcgctcccgcccgcccgccgcgcctccaccccgctctccggccgccgccggtgcgggtgctccgctaccgcaggctcggcttgcactgctgctgcagcccggggagttgtaggggagggggtgccctcttcttccccgctcccctttc

SEQ ID NO: 13032 - DNA, 453 bp, Homo sapiens
  source 1..453: mol_type = other DNA
taaactttctactgtaatatgtctttttacctttacaattttttatcatgaatgtgtattagctatgcaaaataaattgaatagaaaaaccaattccctagattgcacattgccttaatcatgaaaagggttttttttttttttttaaagtgatgttttgaaggatgaagaagacaggctccctttaaatatggcctaatattgctgagcagggttgtgaggccctaaaaacgtcttcctaccatgaaacatgtctctatcctttaagagaaagggaggtgagagggaaactgacttgtcatgacctagggcagaggctaagacacaggcatccgtattctatagctaattcagttgatttcatctcagcaaagagcatttttattagcaataattagagatttatcatcctctacctcacagggtcaagggagtgggggaggaaaacttgct

SEQ ID NO: 13033 - DNA, 311 bp, Homo sapiens
  source 1..311: mol_type = other DNA
aaattcaatgttcagtgtcctttggaattcttgcctctagaacagttaaagaataaaattctgttgcttgacacgagcaagtttggtgtcagtttcttcaaaataaaatggcaaacatttattgagagcgttccatgctaagcgctttgcacgtatcacttaattatttctattttattgatcaggaagccaaagctcataattacaattcaaatcggaagtatgcaaattaacacactttagaaactttagctacttcaatcccgacggatagaaattccgaatttttgtattctatccgccgcggaaga

SEQ ID NO: 13034 - DNA, 664 bp, Homo sapiens
  source 1..664: mol_type = other DNA
tgtttcttctgagtcagtaatctcatctataaattggagacagtgatactaaaccttttaactttaattttaaaagcgtcattgatattattaaccaatgagacaatcacggaatttccttggaactttgaaacttcagtggtactttcaatcttttctgatgagattggttcttgtagtttgactgttaatagaaaaagttaaaacaatacttctcactaacattttaacttgaaatgtgcaaaatgtataaatagactgtttttgtgactaggaccaagggcctttttttcaatataggcttggattggaactgcaagtcttatataaatctacatctataacaagtcatatccagtttatgctttatttctttaatatagattaaaaaattgagacacatcatgggaatttcatagcatgcaaattctttggttttactccagacctactgaatcagaaactatggcattttcagaaacattatattctatattttattatttttcccaggtttaaaaatatttctcagtgacttgcctttatcaagtcttttcaatgcgtacttagtttttaaagatacaagaccttttatttttgcttttatggtttatgtgatatttaattaaattagctaattacaataacaataaaacttcagcag

SEQ ID NO: 13035 - DNA, 576 bp, Homo sapiens
  source 1..576: mol_type = other DNA
ggcaggtgtaagctaccccgcccctctacgccttccgtcgaggggaaccgccaaatgttcctccgggcagggcaatttcttgctctctacaggcacttactcccatcccttgtagatagggagtgatgacctcgcgtgagggccggacacgcttggacctcacctctccgcgccacgctgcggcggcaccgcgggaggccgactcgcgcccacgcacacgatggcggcagaggcagctcgctcacgccccgccgcccgcgctcctccacaagtcgtgccctcaggaggcgggagcggcgagagtgacgcggaccctccagtctagcgcaggccgcggagccctgaagccgggcccctctgcccgccccgccccggaagtaacgtatcgggcagggcgggggccgctgtctctgtacaaagctggctgctgggacaggcagccctcgtctccgagaggaggagtcctgcggtggaatcccggcctcgtgccccgtcaccccgccgccccgccaccccacccgggtttgggggccgtcagtcacagcgctgcgccctccccttccggcggcttggccg

SEQ ID NO: 13036 - DNA, 442 bp, Homo sapiens
  source 1..442: mol_type = other DNA
tgaatatgttaagaactgaatttgacaaaatcaggtcaataattaaaaagtatctttagaacaaagtacctatctcatgtaagacatgtagataatatataggttttataggttaaaattgccaaattagttatgaattttcttggaaatgacctttttaggaatttctatattttgtagtttatcatacaggcttaaatgaagtatattgtttaaattctactgagcgggtatgcacttcccagagaagattactctctctgggagtcagaacttccctctgacagaatgttattagattcattgatcatgttgttccaatcaattggttgtactatatgtatcacagcagttgtgtgcaaaaggtagatatgtttgcttatagaaaataacacacacaattgaaccacctttgggtgtagtcagtagtgggacgttgtag

SEQ ID NO: 13037 - DNA, 514 bp, Homo sapiens
  source 1..514: mol_type = other DNA
ccacgaccttgagtctgacggaaagtcagtcggcctcaagtggtcccagggctacagggccctcaagtaccaagaagagagcgctgtccttgtccccgctgtccgatggcatcgggatagagtccttggacgggtcgagggcttcgccggccaacctgtccccgcagccggaggtctacgggcatttcctgggcgtgcgcggcagctgcattccccagccgcgcccggtgcccggcagccagaagggcgtgctggtggcccctggaggcctggcgctgccggcctacggcgaggacggggccctggagcacgagcgcatgcaacagctggagcacggcggcctgcagccaggcctggtcaaccacatggtggtgcagcatggcctgccgggccccgacagccagtcggccggcctgttcaagaccgaacgcctggaggagttcccgggcaacccggagctcgggccccacgcccagcagctggccttgccccaggccaccctggacgacgacgg

SEQ ID NO: 13038 - DNA, 403 bp, Homo sapiens
  source 1..403: mol_type = other DNA
cgcgctggccggccgggggaagggacccgcacgccgggcttcccggttaccttcgcgcgggtttaaggatacgcgcacctcaactcccggcgtcacaggtcactgagagacctgcgctgactgagactgatagcaacaattagggttcaaaccatgtttctgtctaaagttatggggcgcaccactctggagtccccactgaagggaaacttcgggctgagggtacctacactcctcgcgggtaccggcccggcgatccgcagccgccaggtctggccccgccgggttacattttttatggggcccgacaaaatgtcagcactgtttggaaaatgtctcagtctcggagacgttgagtcggcccgggtcgctctctggaaagcgtgagtgagccgccggctct

SEQ ID NO: 13039 - DNA, 417 bp, Homo sapiens
  source 1..417: mol_type = other DNA
gaaaggatttttttatgacctgacatcaaatcctgtctaaacactaacactttttcatgttaaaataagtcagtttaacacgtcaagagggagacacaagctcggcattggccagcctacagccgcgtccacactgcgccgcccgggcagcccagagcgcggcgcgcacgggcaccggcggcgagtgccgcggccactgcccctcccgggaccccctgtacgccgtccgcgccgtccagggtcacaccggcgacggaaccctcccggggtcggcccccagaagcattccccggcctgaactttttagaaacattatatgagctgatgccgagggtccagccaccccgcctctgcctctgccgccgctgccctcgcagacgcgcgcgcacacacggcacttgggccgggtttccgcgc

SEQ ID NO: 13040 - DNA, 270 bp, Homo sapiens
  source 1..270: mol_type = other DNA
tcactcatttcattcatgatggtagaaaggcctttcccaagatggaagtccttgcatctgtggcaatacatgtataaagtgccatgacgtaacatacggaatatacctccaacagcctgtgttcagaattacttggaaaggatgtttttttatgacctgacatcaaatcctgtctaaacactaacactttttcatgttaaaataagtcagtttaacacgtcaagagggagacacaagctcggcattggccagcctacagccgcgtccaca

SEQ ID NO: 13041 - DNA, 359 bp, Homo sapiens
  source 1..359: mol_type = other DNA
agtttactttctataaagagctgataaactcattcatactaaagtctacagggttgtaaatcttaatctattatcgcttaaaagatgcttgtatcaatttactcagaaaatctagtaggggaaattctccctacccaccaaatatatttggcaccactaaccttaggggatggaccgcccactttctccccagagcggctcccgggtccggttccactgccccaagcctccatgctccagggcctgtggtcacagagcaatcccagaagcttcaggctttcgcggctgctggcacatcccagctgcaggtgccgtccgcgcccaggagggcagtggctccgcctctctgggttagggac

SEQ ID NO: 13042 - DNA, 313 bp, Homo sapiens
  source 1..313: mol_type = other DNA
ttggtgcaaaaataattgttgtactaatgacattctcacatcaaacacatggaaaaaaatggcgtcatgttgtttttatttgcctgattgttaaacgttcaagttttgaagttaaactacatatctttaggcttaacgatacgcaggcatacaggaagcccttcttaagccgtgccggctccggtcaaccaaccaattctgtgaaatgagacgaaaattggctccgcttgttcattagaatcactggtttaaatgtcaatgtaaaggaatgagttgcaatttcccgggacgcgcctccacagccccgcccgcc

SEQ ID NO: 13043 - DNA, 373 bp, Homo sapiens
  source 1..373: mol_type = other DNA
tgacataaacacatggaaaaaaatggcgtcatgttgtttttatttgcctgattgttaaacgttcaagttttgaagttaaactacatatctttaggcttaacgatacgcaggcatacaggaagcccttcttaagccgtgccggctccggtcaaccaaccaattctgtgaaatgagacgaaaattggctccgcttgttcattagaatcactggtttaaatgtcaatgtaaaggaatgagttgcaatttcccgggacgcgcctccacagccccgcccgccgtccgccggtggcgaggcccaggctgtcgccgggtgtgcagcggcgtcgcggctgggtaacggcccggacccccggctgggcttctggctcggcgc

SEQ ID NO: 13044 - DNA, 386 bp, Homo sapiens
  source 1..386: mol_type = other DNA
accaaatatatttggcaccactaaccttaggggatggaccgcccactttctccccagagcggctcccgggtccggttccactgccccaagcctccatgctccagggcctgtggtcacagagcaatcccagaagcttcaggctttcgcggctgctggcacatcccagctgcaggtgccgtccgcgcccaggagggcagtggctccgcctctctgggttagggactccagtggaaggctgtggggcgggactcagggttcccggagaggccgccccagctcctgccgcagcgctgggcgccctaccacgcctgctccctagggaccccgggcgtcccacgctcctcgctggttggcccaggcgccgcagagcgcggcggcagcaggag

SEQ ID NO: 13045 - DNA, 540 bp, Homo sapiens
  source 1..540: mol_type = other DNA
tatctcttgatatgcagaggataaggatacaatatgcccttcttcatcataaagtttttcccttccagggaaataaactctccaattgtataactctctaatgcaaaatattagtaataaatgactgaacataatttaggatttaaaatttttttttcacctctgacagtgtttacagtaactgtggttttggcaaatgcaataactacccattggactactcaatgcttaacttttaaatatgtttaagaattaaccttatatttctaattagcacacgtttgttattttccgaagcaaacataacatttaatactatattaaatgagaattgttacagaaactacaagcagctactaaacgtgtactatttaaattataacagacctatgatctcattctactttcagaatgaaaacggtaaacattctgattctctatccgtctagcacgccagacagggccagtctctccggctgggggcactgccagcgaccgtgagggcgcgcgtctgcgctggggcctcgcgcgcgttccacg

SEQ ID NO: 13046 - DNA, 355 bp, Homo sapiens
  source 1..355: mol_type = other DNA
ttagggccttttcctaaaactggacataggaagggcccatgtctcttttacgttatttataaaagagtctcatcaaggtcactccctgtgattctacacagagagggaggatgcgggtggatcccgaaaccaagcggctccgacggtctatcccgccgaagggatccgggcccagcggccggtggagaggggccgcggagaggcgcaggtgggagctgggcggccgagcgagcgcagagggggcgcggcttgcgcggcttgcgcggctgggcgggaacaggcgctcggtcagaggcggacgcaacagcggggtcccgcgctgtctgggcggccccaggggctgtcggctcacttc

SEQ ID NO: 13047 - DNA, 259 bp, Homo sapiens
  source 1..259: mol_type = other DNA
catcagattctcagagagttctctgattcttgaaagaataagaacctctgcttagcaatagcttttgttctaggcattaagagctttacatgcattttatttcatgtgttatgattatccttcttttccagatggttctaagcaactggctttaaagtagtcctagaactcggagccatggcagttaagtgggcagcctcagacctcagaaggacagcttgagtcaagttaaatatttattgagcatttctgagtacaa

SEQ ID NO: 13048 - DNA, 446 bp, Homo sapiens
  source 1..446: mol_type = other DNA
tgatatcggacttctacttgtgtatccaacgtttgccagggcatggagctgcgggactgcgccggcagtgcgctgagcaccaacccttgttgtctctcttagtaagaaagaggaggggtagataatagcatcttcaccccagtagtgctaccacgccaggaggtacacagaggagactgccccgactggcaactcccgcgccggggttccctggccatcctcccgcgttccctccagccgcgcgctgttgccagggcccgggcaccgcccagctccacgcagcgcggcttgggcaccgcccagcttcagcggaagccaatggaggcgcggcgcgggcaccgccctgatccggcgcgggccaatagcggcgtggcccgaagcgggggccgccccggtcgggcggggaggcggggaggtggccactggctccgccccgctcccctctg

SEQ ID NO: 13049 - DNA, 656 bp, Homo sapiens
  source 1..656: mol_type = other DNA
agacactcagtaaatatttgaatgaatgctctcccgggtcctctaggagaaatgccaacccgcaggcggctgggcgcaccctcacccctttccagccaaggtggctgatgggagtcagcgtgtgtgagcgcgttgtccccggcccccggcgccacttcccctcggcctagcagcctggactggggcgggaggggagtctccgcgcggaggcagcccggcctcctccagtgcaggctgcgcgctggggagccagccagggtgagtcactcccggccgcttccctggagggcggcggccacacacacacccgcccatctagtgagggccgggcccagcgctggcgcctagctccagccgggcaccagcgtttcgcgaggcgccgccgcctcttgcgcgctcacgcccaggggccgtcccaggaatctccacgcgcgctcgccggcttcccgagaggcagctgccctgcgtggcccgcgcctgccggtcccgcgaccagcaccgagcggcgcacgcgcactgcaggacgcgcgtccggctctccccggcccggtctcctgccattcggggagactgcaggccaaccgggaggctgagttcgaagctagcagggcggcgaagccagtgtcgcccgcggctgacgggcttcccggctgccc

SEQ ID NO: 13050 - DNA, 561 bp, Homo sapiens
  source 1..561: mol_type = other DNA
atttttggcctcaaattgttaaaaattcacagtatagttttatttgtatcaaatttgcttgtcatataatggcaataggtcaagtcatttgagattggaaccattaaggataagttcatttaacattgaattattagatctgtggttaattgattttacaacttattattttagagggtcaaatttagaataatatttttaagctttttaagtagaagtatatggatcacctgaggtcaggagttcagagacaggagaatcgcttgtacctcattgcactcataaataaataaataaataaaaataaatacataaatagaagtatactattctgattctcttatttatatgtataatttatttttttaaatacatgaggtattgtagatgatgtgaaatatagttttcattgcatcagatcttcagttgtaatgaacagacttttaaaggtaagtattctgcgataattggattatatttactattatgaaaatttaaaattattagaagtaaaatgaaatatacctccattgtagtaagtttgattcacagtgcctagtt

SEQ ID NO: 13051 - DNA, 394 bp, Homo sapiens
  source 1..394: mol_type = other DNA
ttctatgatgcaataaaattttttcagatagttataagaaaaagacgcaaacctttttgaaacgccggaggggtttgcaggctgaaggcagcctaatccttaccttgagttaatagcttaaggcacagatacaaatgaatgtagtttatctataagactaatctttgatcaaccgcgggtgcataaatttaatctgtggcccggaccctcagctggactgacaggcaaactatctgtgtctgtgggacagaccccctaaaagcttatatgccaaatgttaactaagataatttctagccaatgagcttacaggtcagttctatttttatttcatctaagcaaaggacattaaaaattaccattattttagtaagcataaaaatagtattagcct

SEQ ID NO: 13052 - DNA, 224 bp, Homo sapiens
  source 1..224: mol_type = other DNA
gcaaaattatctcacctaaatgagcatttcatgctgcatgcttaatttggtaatacacaatcctctaaaggcccatgcctccccttgccttcatgtacgttatcaggtaattcggaacgcagccggcgcgcgccttcccttgaagttctggcgacgcccccacgcgctcggaattccgcagtgtttgtgcgcgccgctcggcctggcgcaggcgcagacaggga

SEQ ID NO: 13053 - DNA, 479 bp, Homo sapiens
  source 1..479: mol_type = other DNA
tgagtatattatgaacacaagcaagtaagttatttttaaaaatgaacctatttgtactaaaaatttacaggtagaagggtcgtctatacaaatgaacatatccttgtgctgtaatttgttatcaaaatattacagagacatagactagaattttaaattaaaatatttagacaactagttacaatcaaacttctcaatggagaaattgttttgtaaattaaagacattactgcacaagtggggattttaatctttttacctggattcagattaaaagtcatcagatcaacaatttattcattcatccattatatttttatggattgatatgcccaacattatactaattaatccaatttataaggtaatctataatcctatttaggttagaagggttttgatctcaattttatttctgtgtatgtaaaaagaaaggcttcatatctaaaataactttacctaagtatacaaagttgttt

SEQ ID NO: 13054 - DNA, 323 bp, Homo sapiens
  source 1..323: mol_type = other DNA
acatatattatcttttagtcctcacaatccaataaattagatctggaatgtgggacccacagtccagaatcctgagggctgctgttgagagcatcaagacgcgcccaggaggttggtggttagcagggactttcctgaaggccagtatttttccaagccatttggtagcaaagaacattctctcaggctgggaaatagtgccaatttaacagaggcctttaattgagaatttccgcttctgcctcatctcaaaaatctggcagctgagtcgccgcggctttgaagcttctggcggaagtgccggctctttaaagaaatcccga

SEQ ID NO: 13055 - DNA, 423 bp, Homo sapiens
  source 1..423: mol_type = other DNA
ccaatttctcaatttagaaaaagagaagtcaagttaagtaaattatgaaagctttcaaaagggctttcttaactaggcttccgcagccttaatccttagggtggcagaatatcagggatcttttaatgacaaagcaaatgaagtttcattataaaaaccaaagccatatgggtctgctgctgacttttgacgcctttctgataaaggttaaggggtaaccttaagctcttacccctctgaaggtaaaattgttgtaaatttctttttttattaataacatactaaatgtggatttgctttattcccggtgaaaatctcatttacaagaaaactggactgacatgtttcactttctgtttcatttcgccttgggcagaggtgggcgggaccccgcctccgggcctggcgcaacgctgagcagct

SEQ ID NO: 13056 - DNA, 303 bp, Homo sapiens
  source 1..303: mol_type = other DNA
cagtcactgtggccagaggtactacacagcttcgtagtacttcttaaagtacttcttgttcaagcaggagagatgttttcttaaaaacatcctctgtctgaactgaggtccgagttcaaatgttttctcatgtgtaaaatgggtctaactctaaaccacacattgcactcaaattcatgtctactgaggacctcagaatgtgactatatttgtacgcagatgtagtctaaatgaggtcatactgcattggacttgaggtcatgtgttacagaagccctaggaaatgagtcaatttcctggcac

SEQ ID NO: 13057 - DNA, 375 bp, Homo sapiens
  source 1..375: mol_type = other DNA
cgttgtgcacatgtacaaaaacaaacaaaaaaaagaaatggtgtgctggatattttctatttctcccattgtgcctagtaggctgacctctacagactacacatctggcttcctggtggatccagccagcggaagaccccagctggatatcagagctgggagaacagagaggtgggtcttctccactctgtccttactaacagctccccgctgttactggttactactggacatatattatcttttagtcctcacaatccaataaattagatctggaatgtgggacccacagtccagaatcctgagggctgctgttgagagcatcaagacgcgcccaggaggttggtggttagcagggactttcctgaaggccag

SEQ ID NO: 13058 - DNA, 222 bp, Homo sapiens
  source 1..222: mol_type = other DNA
caaattcatgtctactgaggacctcagaatgtgactatatttgtacgcagatgtagtctaaatgaggtcatactgcattggacttgaggtcatgtgttacagaagccctaggaaatgagtcaatttcctggcactattcctaaatgtgctccagggacaatggggaaggatgacataattttatatctagactccttaagctgataaacttcagaaagtttc

SEQ ID NO: 13059 - DNA, 494 bp, Homo sapiens
  source 1..494: mol_type = other DNA
actgtcaagcgattctgagtagctggtattacagacacccaccactacatccagctaattttttgtattggccaggctggtctcaactgagcccggtccccatgggcaagcactgtaagttcttaccccaggctgtggactccacccacatggcaacctggctcccaggctttgggccatccctggcttgaaggttgggtttcatgctgtccatgatgcccaggctgttcgtgccgaggggtgcctgcaggcctgccctgagccaccctcagccgctagtgtgtcagtaccatcctgagcacccacatgcctggccgggttgtgacagcacctaggcttggccccttgtgggagcaggggacttcctgggcccctgagagtacagagatctgggtccagactgctcaggggtgcctgggagcatgcggttcccaccccgccaactcagtacggggcgggactcccacctccactgctgcagctgctctaaacgg

SEQ ID NO: 13060 - DNA, 341 bp, Homo sapiens
  source 1..341: mol_type = other DNA
ggtctgggattacaggcgggtcattttttaaacctggctttttaattgaaaaagtaatacaaacatatggaagcaaatctttctatggatttcaaagacatagatttagaactcctagacagaactcaatactttcatggtgagtggtttatttactgattaaataaacgctcccttagcaggagcttagcggccggcagcccagtgggaaaccgcgccggccgtcacgtgactccagctccccaatccggaagggaggtccaatttggccaggccagggcgtgttccaccggcccggagtctcaggccgttgcctaggtcctcccggtaaaaccctggag

SEQ ID NO: 13061 - DNA, 602 bp, Homo sapiens
  source 1..602: mol_type = other DNA
tttcctttaaagtaaacctcggccggggagcgtgcggagtctgcacgccgcggccgtcggtccaacgcggggagcttcatccaccccggaccgccggctggaggacgtgcctgcagccggcgggtacctgcggccgaggcagcggcgaaaggcggcgggcggctctacttgctgaggcgggccgcggccagcacggcgaagaagcctcggccgggctccccagagggcacagcagcctcttgggccagccgctcagaaaatacatggtccgtgcggagcccccggcgcccccagttgcgtccgtcacactcagcggccccgggctggtcgcccacctcccacaccgccaccggccgagtcggcggcggcggcggcggcagctcggggcatctgcccgctggcctggccgggccgggccgacgcaaggctgcgcgacgaaggcacccccaagctgacggggccgagagagggcgggaggagcgcggaggcccgccccgaccccgccccttcctcaggccgcgcgggcgtcaccacgccgcgccgcgtgggtcgggccggggagggcccgcgcgcgcgctctggagactcctgcggtctcccta

SEQ ID NO: 13062 - DNA, 432 bp, Homo sapiens
  source 1..432: mol_type = other DNA
atggatttcaaagacatagatttagaactcctagacagaactcaatactttcatggtgagtggtttatttactgattaaataaacgctcccttagcaggagcttagcggccggcagcccagtgggaaaccgcgccggccgtcacgtgactccagctccccaatccggaagggaggtccaatttggccaggccagggcgtgttccaccggcccggagtctcaggccgttgcctaggtcctcccggtaaaaccctggagcgcagaagtgcggacgcaacccggcggccgcgggcgagtagggagaccgcaggagtctccagagcgcgcgcgcgggccctccccggcccgacccacgcggcgcggcgtggtgacgcccgcgcggcctgaggaaggggcggggtcggggcgggcctccgcgctcctcccgccctct

SEQ ID NO: 13063 - DNA, 344 bp, Homo sapiens
  source 1..344: mol_type = other DNA
aaaatagtcatattgttggtattacgattttataagtttgttttgttctgatttgcatttgaaaattagatcagccaaaacttgatggcaaatagtctgatttacaatgatcaccagtattaccagggaaggggattttggggaggaaaaaaagcatttttatactctgaactctgtcgttctcatagacaaagtttctttctcatatctactcagtaattcaatacaagaaagaaagttataactgggaataaagaattcaggctgtagtttgtagaaataagttattacaggcctgtaaagtctgtgggtaaagcccaagaggctttccctttaaagtaaac

SEQ ID NO: 13064 - DNA, 542 bp, Homo sapiens
  source 1..542: mol_type = other DNA
tttctcaggttataaaatgggaacaaagatatttccttttaagtattgttaaagataattaaataagatgatgtattaaaggacttgacctagcgcttagctcatagcaggtattcaataaataatagccattatttttctttatctgttaaatggagacagtaatagcacatccttacgaaagccaggtcagtcctacagagggctggaaaagccctgcgggagacggcatatccaccacccgctgctgggtcggccctgcagctgtgtgcacccgggtcttggcgcggcgggacgggccaatccactaggaggcgctgcggcagcgacggcggcgtcggcggcggccggggctgtcgcgggttggctgctgtgaggcggcaccgcgtcggagtagagcgtcgagagggagcggcggccgcgccaccgccggagagggaggcccgagcgcaggagcctctgggccccgggggtagcggcggcgcgagcaggggcgcggggaccgggctgtctgaggtgcgcgccgcgctggggctcgcgct

SEQ ID NO: 13065 - DNA, 477 bp, Homo sapiens
  source 1..477: mol_type = other DNA
agtgaagaatggcctttctgaaccttcacttgcagagtgctaatgtagtagtggaacagaatgctgttttgggagcccatgaaattagatttacattcttcatctgttatctccgtttctcaggttataaaatgggaacaaagatatttccttttaagtattgttaaagataattaaataagatgatgtattaaaggacttgacctagcgcttagctcatagcaggtattcaataaataatagccattatttttctttatctgttaaatggagacagtaatagcacatccttacgaaagccaggtcagtcctacagagggctggaaaagccctgcgggagacggcatatccaccacccgctgctgggtcggccctgcagctgtgtgcacccgggtcttggcgcggcgggacgggccaatccactaggaggcgctgcggcagcgacggcggcgtcggcggcggccggggctgtcgcgg

SEQ ID NO: 13066 - DNA, 430 bp, Homo sapiens
  source 1..430: mol_type = other DNA
aaatttcatctatccctttcacatagatgggctcagccacgtgtgagcttgttacaatgacatctatctgacatgagaaaaacaaatgtggatttcagataaacaaaaaataactcttttagtgtatatgtcccatagaatatgtggacatatttatcctaaaaatattgtatgggacatagttgtattaagaaattatctgaagttcaaatttaactgggcattcagctgagccatctatgtgaaagggatagatgaaattttctttttgcaggtagaatatgacctacttagacatcaattaggttggtgcaaaagtaattgtggtgtcggaccatgaattttaaatcattataactaggctcatgtcatattttatgtgacatgcagtcaaggaaggaataaagttggtttctttcatgccaattta

SEQ ID NO: 13067 - DNA, 227 bp, Homo sapiens
  source 1..227: mol_type = other DNA
actgcactccagcctggagagtatgcaattattcaattagtctctcagcaagcattctttgagggtacactcaattaaagactaaattcatgaagatatgtgaatctcatagtaaatcagagttgacttttgaagaatgagtcctcattaaccatttgaaaagagagaaagttgttctaagtaaagggtacagctttttcaggtatacatccagatagtctgaagta

SEQ ID NO: 13068 - DNA, 339 bp, Homo sapiens
  source 1..339: mol_type = other DNA
aaatatatcaataattacaatagatgttccagttcaaagacaaattattgtcaaactgggaaaaaaaaccagtatactacttatatgtgacacatctttaatgtaaggaaataatgaaggagggttcaatatacataataaagatacattattcatcctttgtaatttcctcagtatttgcaagaattcccagagtagagtatgctaatattataaacaagataacagagttccttagttgttttttcatgccatgagaaaaactaaaaaattcctatttcattttacagtaaacttttttctaatcttgtagattgaatggatgtagaggcggaatca

SEQ ID NO: 13069 - DNA, 302 bp, Homo sapiens
  source 1..302: mol_type = other DNA
tgaaaccactagtgtttctacaggcaatagaggaaccctctggaacaaaaattatgtgaaggtatttgctgaggatcaaattatgttccacaagatcatgctcgcaagaattacaagtattctctactccctatttaactagttgcagactacctcccacaacaggtaaccttgaatgtaggcagacatgcttccagaaaaaactgaaaattcatactagcacaatgatgtttaaatgattttcaagcttgtcatttaccatgtcaggagaaattcctctaggtcctcgcaatgccagtgtg

SEQ ID NO: 13070 - DNA, 293 bp, Homo sapiens
  source 1..293: mol_type = other DNA
aaattatgtgaaggtatttgctgaggatcaaattatgttccacaagatcatgctcgcaagaattacaagtattctctactccctatttaactagttgcagactacctcccacaacaggtaaccttgaatgtaggcagacatgcttccagaaaaaactgaaaattcatactagcacaatgatgtttaaatgattttcaagcttgtcatttaccatgtcaggagaaattcctctaggtcctcgcaatgccagtgtggggcgggaagtcccacctccaccacgagctagcgtgtct

SEQ ID NO: 13071 - DNA, 439 bp, Homo sapiens
  source 1..439: mol_type = other DNA
tccccagctgtagcagggaagcctttcgggcagctgccccgacttctccaaggccggagggccggctgggagcgctgcaagccagagagggcgatcccagcgggacccgcggcctgaggataggcctggagctgccgcctccgccaggcgacgggaaaccctcggaagtgggtttccgcgcgaagagcattgcggccaggcgggaaacgtgttcgcgaagcaggagggcccccggggcctttcccgggcgacccgacccgccaggccgcgtggcgggagctttgtgtgtttttgagaccaaagaacgggcgtgcccagtggccaggtgcaggcggtggggcaagtaacggcttttggtagccccggggccgcttcctctttaaggcggagcccggcgtggatctcgcgagatccggcttggcgccgtgacctccatgtg

SEQ ID NO: 13072 - DNA, 601 bp, Homo sapiens
  source 1..601: mol_type = other DNA
tgtagataagcaattatttttcataagacttttctaccaacaggtggcactaacaatttgttttactaatgccccagtagtaatccttgtgtcacatttgaatatatcatgcatttctgatcaagtctttagcatatagtctttctcctactgattggcctttcaagaaagtcagggagaaaaacataggggtaaatataaaatgtttttcttgaggttcctaacattggaggaattcaatttttaaaatatttactaaatacttattgcagaactactacatgcagagtactgttctatatattccctgttgaagaatatacagaactctgagaattagaccctactgtcagagcttatgctctaatagtaaatgtgaaatcggtaataattttctatgtccagtacatgtataggatattaatgtcagataagattgtagagtaaaatgctatgataggattatttctttaatcaatctatcaaatattttttatgtcagtgttcttggaatagagaatacaattgtgaacaaggttgacaaaattcttgccttcagggaaggcctctctacacatcacatctgccctgtgtgatgggt

SEQ ID NO: 13073 - DNA, 402 bp, Homo sapiens
  source 1..402: mol_type = other DNA
aacatatacacacacacacacagttctttttttttttttttgagtgcagtggtgcgatcacatctcactgcagcaccgcgtcggtttccgaaagtgttgcgataatctactgttcaagtgctttccatgtacatataatctctttttaaaatctgagaggttgagtaactttatcacgctattaatttccctgagatgaaatgtgacaccgagtcccccaggaacttggcccggagtctttgggctgccccagtgcggctccacaccctggcgggcggcgtacggagcgtcccggcccccggcaccagccagcgtcggggcagcctccggtccaggggaagcgggaagagggggcgggggcgggaactgttccgccccctccccctctggcgccgcttaaag

SEQ ID NO: 13074 - DNA, 461 bp, Homo sapiens
  source 1..461: mol_type = other DNA
ggcccgcaagggcctggcagttgagacacttcagggcagttaagaaaattcatttctgcagaatgacaggatacacctgcacttctaattttttcaattttcccggaagcttacaacactcgttgcagtgagacgagatcgcgccactgcactccagctggtgacacctgcactggtacctccatggccgcgcctctgaggtcaccgctccagaaggtcccaggccggcgtggaaacctggtggacaccagcaggtcccgccctaaaggagtcccgcggccgcttgggcctcagcgaccagactgtggcgttagctcagcgactgcactgagccgccgggaagatcctggtcccgtcagccagctgacccacatgcggcggaggcgctgaccaccccgcttcgctggctggtggggggtcacgtgaggacctcggggtcacgtgaggtcctcgggcgccgc

SEQ ID NO: 13075 - DNA, 457 bp, Homo sapiens
  source 1..457: mol_type = other DNA
gtagtcccagctactatcgccccgctggagcgccgctgcactccagcctgggcgatagcaagactccttctcaaaaaaaaaagtgtttccaggaagttcccagctactcaggaggctgaggcacgagaatcgcagtaagccgagatggcgccactgcactccagcctggacagtcttcagagcacctaggaccagcggaggttaaagcttatctacaacagcttgcagcaagcttgctttggttctgggccagattcaggccgaagggcgaccttttaaaggctccacctgcgcagggcgggtgcgttgctccaaggtctcgggtaaccgattggcaaaacctaggtcttcccacttagggaagatggccccgccggacccgcgaagccccgagctcagaggtcgcccagtgctcggccccgcctctgacgtcacggctcggtgggactcccggagc

SEQ ID NO: 13076 - DNA, 382 bp, Homo sapiens
  source 1..382: mol_type = other DNA
agactccgtctcaaaaaagagtgtgtctgtgtgtactttgtttttaacaactaaagaaatatggtgacccaataatatatttttaaaattctgttatcagtataatgtaacagaaaattcagcatattagcccaactttgctcactggtgtgaagatatggacccagctgggagctctgtaggaagttaaatcattcagctttgcaaaacatctgatgctcaaccatctgtccttcagtgactcaacaccggactcttcgcctattcgggatctcccattgtgcagtggtcccggccaccgggtgaagggagaacgggaacacagcgctgtcatcgccggagagctgcgagccccgactttctcggtaacgccacgctgacg

SEQ ID NO: 13077 - DNA, 392 bp, Homo sapiens
  source 1..392: mol_type = other DNA
aaatcattcagctttgcaaaacatctgatgctcaaccatctgtccttcagtgactcaacaccggactcttcgcctattcgggatctcccattgtgcagtggtcccggccaccgggtgaagggagaacgggaacacagcgctgtcatcgccggagagctgcgagccccgactttctcggtaacgccacgctgacgtccgcgcgtcggaggccgccataggtgcgcgtcggcgcccaggaggacgtgtggcgcgtggactacatcaggtccagccctgcgggaccccagggaaagaagcgtgccgggcacctttaagctgtttgtacgtgactcaccaagtgcgggccccagcggtcacgtgacggcgcgcgcgccctcgcgcagggagagccg

SEQ ID NO: 13078 - DNA, 322 bp, Homo sapiens
  source 1..322: mol_type = other DNA
gctactcgagaggcttgcacattaggatttactgaaggctaaggtaatcgttaccattttttgggcaagatgttttttaaattaagatatatatactgttttttagacacaatgctactgcacatttaatagactacagtataaacaacttttatatgcacagaaaccaaaaaaaaattgcatggcttgctttatctgtgttggtctagaaccaaacctgcaatgaacttctttaaggagcggttgttgctgccagagaaatccagcaggaaagagcagcattctttcaccttttccgcctctgaagcggaggagaacttca

SEQ ID NO: 13079 - DNA, 419 bp, Homo sapiens
  source 1..419: mol_type = other DNA
ttattttccctactaatctggaaacaaaaataatagaacctgactcatctaaaaatcctgttaaatgcttattgatgccaaactagacttgaacattgatgtgtcttcagggaagaacctctctatttacctggagaagttgaattagccctgtcatttcaactgatgccaaaaaagcagcttccattattgtgtcagtaatagactaatgtttcataagaagtgacagttccttttttaggtctttgcccaaaaggtggcataagttatttccttcctaatacaaacaaagtatgacagttacaatttattgtgtatttacaatggaaagagtaagaaatctaagcacttttgtgttttcttcctttggctctgaaagtgttccagctgaaatttcagatcggacagactcgctgcgg

SEQ ID NO: 13080 - DNA, 242 bp, Homo sapiens
  source 1..242: mol_type = other DNA
cctttcagtgggtcagtggtccaattcgccagcgggcgcagcgggcccagctctccccgcgtccgggcgcccccagcgctggagcacagcaattccgtgggatccccagaaagagagaagcctttccaatgactttcctgggccaggtccaaagactgggctgcacagggaggagaggagacgcggccccggaccccccagccgcgagcggcggagcatcgaggagcggggcggcggcggca

SEQ ID NO: 13081 - DNA, 530 bp, Homo sapiens
  source 1..530: mol_type = other DNA
gattccattgcaacggaaaataataataataataataaaagcacagatcgggatccgcatctggaccagtcctcgctttaccctggatccctggaatcgtgcctaggcacccgggcggcggggtccgcccaggccgcgtcaggcagctctgggccggtgggtgccgggtctcccctcctcccgccccatctggcgcgcccgcagcgccgccgccgccgccgcttctctccccagcgggcgctcggagcatcccgcgccgcgttctccccgccccggcccccgcccgccggagcggggcccacgccgctggcagccatccgccagcgagcgagcgagcgagtgcgggagcggccgcctcggctccccgcccagccgcgcccgcagccggcggccggagcgcgtgggggcagcgcctcgccccgacagagcctcgcctcctccttgccgtctcggctgcttctccgaggagccgggagccgctcatcggcctccccacctcctcccctccggcgcggcgccgccagccagcc

SEQ ID NO: 13082 - DNA, 671 bp, Homo sapiens
  source 1..671: mol_type = other DNA
tgaaataaaatatttgcaaaactcctactttataaaagacatgtatcaaaaatatataaaaatgtaaaacttaataagaaaagaactcaatttataaatggggaaaatatctgaattaacacctcatcaaagaaaatatttgaagattcatcaaaatggtggactaaaagcaatttttttcaacctaacctttgttgctaagattatcttcaccaatatcctattgtaatattcctaacaaaaagaaataaaaaatgttggaaatgatggatatctcaagcattcttatttgattactgcacattgtatgcatgtatcacagtatgacatgtgccctccaaatattataaaataattatgtgttaacttaaaaaatacaaatgacctgaagatctttcatcattaggaaaatccaaatagttaaaacaataagatatcccatctgaaagattacatactatattgtttatatcgtattctcaaaaagacaaaactatagagttcaatggttgcccttgaaattgctaaacaaagaaaacattttcaatgtatctaggtaaaaaataaattccagaaaaaacaaaactgtctttatccttttactcaatataaaaagccaaataaagagagatttctgatcccaaacttaacttatggcttaacatctctat

SEQ ID NO: 13083 - DNA, 369 bp, Homo sapiens
  source 1..369: mol_type = other DNA
actatcactccgtagtataatttgaagtaaagtaatatgattcctccagttttgttattattattgaataggtaatacggactttttaacaatcttgattctcccaatccatgaacatataatatttttccattatttggtttgtagttatcattatagagacctttcattcattggttaattcctaggtatttaataaaatagttttttagaggagtctttaggttttattcaaatataagatcttatcatcagcaaacaaggataatttgacttcttcatttccaattagtaaacaaatctcactagtttatctgacttgtattttttcttaaaactttaagcatcacactgatcaagtccttaaag

SEQ ID NO: 13084 - DNA, 464 bp, Homo sapiens
  source 1..464: mol_type = other DNA
agggagtctttaggttttattcaaatataagatcttatcatcagcaaacaaggataatttgacttcttcatttccaattagtaaacaaatctcactagtttatctgacttgtattttttcttaaaactttaagcatcacactgatcaagtccttaaagtaaactccattagtgtaagggactttaaatcacagaaattaacttgctggaaacaaggttaaattaaatgtaattaatgatggttcatgcttttgataactgatatctagtatgtatatatatataaacaaaatgacgaggacagtttaattatttgcacatgcaggtgttatatatgccaaattttaaaggtaaaatttgtgtgaaatgtcacacttttattatttgtgtgaaatgtcattttacatatgggttccattttgaaagtggttaccaagaaaaacttgcataatctcattttacttt

SEQ ID NO: 13085 - DNA, 599 bp, Homo sapiens
  source 1..599: mol_type = other DNA
gaatatgagaaaaaagtatttttattcagaatattaaaagaaattcttttaaatgttctaaattggatggtcctataatctaatatcagagggatattttgaaaaagagtttcttatgcagaaaaaaaaaatagaaatgaatatctgttcttcctggccatgcaactctaatttgctttttaattggatcatcagactaagaatgcacttagaaagtgagaggactgcccccacccttctgattaaagcgcttctcataagcatcctatgcgtttccgagaaaattaaatttgaatttccataagtacgtcccaaatattgcatgggatatacttgtactaaaattattcctttttttttttatttgaaattcccatttaacagagcagcgcccaggagcgagtttaaaaccccgcacaggcctgctcggccgcgtcccctgattggccaaggcgcgcccgccgccccgccggtcgcaggcgtcacggcagccccagcagcctgggccccgccaccgcctccgcggcagccccggtcggcgcaagtgcggcgcgcgctgggggagggggcgcggcggagcgctaggctggcgtcgggcc

SEQ ID NO: 13086 - DNA, 633 bp, Homo sapiens
  source 1..633: mol_type = other DNA
tgataaaaacaaactctgagatgtatatacctatgttcctacaagtgtaatacttatatgtcacagaaatagaggggcacatactttgaaatatttcaatggaaatcaaaaattgtagtttactggattgaaattagtatcctctacttaaacatttgctgattcagatctgtaatccatgtagctcataataacttacttggtagaagtatttcagattaatgaattgtacaattgtacaaattaataaattgtacaattgttcaactatacaattaattgtacaatttgtatagttgaaaaaatctataaattaatttatagataaattatcaaagaagacaacattttaaatagttattcccaatattttttcttccataattaaaataaaagtaagtatctcagcaattgcttgttcttaaaatttcactgctatctcagtacttaacagttggtaggataattaattttgattgtacatttccattgaacttttgatgaaattgtttcactctttttattagaataaaattattaggaaagtcttctaaagagaggttttctgtttgtttttcctttgacctctatctctcattttaaaacctgttttaaaggttgtagctagtcagg

SEQ ID NO: 13087 - DNA, 492 bp, Homo sapiens
  source 1..492: mol_type = other DNA
atacataagtaggaattcctaaaaaatgttagaatcgcttgagaaattaaactggaatgtatgatgctatagcaaaaagttatgatttatcatttttatgtagctatagattgatctcctaatttataagtcactgaatcttgccttgatttctgagagagattttcagagagttctcagctctctgactgtcttcaggagactcgagagataagtttctagtttctttactttcattttgaaaaatcaggaaacaattgcaagatctcatgaaatctgttctagaataaaaattctgatttcagcattaaatctaagttttatatgagaagaaactaacaggatgttcttgcatttaatagtagaagcagcaatttcagtaaaaccagcatatgattttcctgcttaaccaaatcactttcttggctcaagtattcaaattttgttgaaattcattatcaagttcaaaattgccttttctaggcaagcaaa

SEQ ID NO: 13088 - DNA, 490 bp, Homo sapiens
  source 1..490: mol_type = other DNA
gaatatgagaaaaaagtatttttattcagaatattaaaagaaattcttttaaatgttctaaattggatggtcctataatctaatatcagagggatattttgaaaaagagtttcttatgcagaaaaaaaaaatagaaatgaatatctgttcttcctggccatgcaactctaatttgctttttaattggatcatcagactaagaatgcacttagaaagtgagaggactgcccccacccttctgattaaagcgcttctcataagcatcctatgcgtttccgagaaaattaaatttgaatttccataagtacgtcccaaatattgcatgggatatacttgtactaaaattattcctttttttttttatttgaaattcccatttaacagagcagcgcccaggagcgagtttaaaaccccgcacaggcctgctcggccgcgtcccctgattggccaaggcgcgcccgccgccccgccggtcgcaggcgtcacggca

SEQ ID NO: 13089 - DNA, 437 bp, Homo sapiens
  source 1..437: mol_type = other DNA
gatgattgtgtaattaaataataaaacaatccttaagtccggtgaatttttcaacttccaagttttgcaagggctctgggcagcggcggcaacagcagcctccacgctcggccgggtcagacgcggggcgaggcgggcgggcgggcggccgggcgccgaagacccggcgcgggcggcggcggctgctgctgccggggaccacgcgccgcgagcctcttccgccccagatctcccgcgcgcgccccgccacccgcgcgcactcgctcacgctgcctcgcgcacatggtcggctcgcggcaaagtttcgaaccactccgggatcctgccgcagtgcttggggccagcgcggtgatttgaaaaaggcagccaacaccggcggcggcggcggcctcggcaagcacggccagcgcgctcggactgcgatttcacccctggaa

SEQ ID NO: 13090 - DNA, 362 bp, Homo sapiens
  source 1..362: mol_type = other DNA
gatgattgtgtaattaaataataaaacaatccttaagtccggtgaatttttcaacttccaagttttgcaagggctctgggcagcggcggcaacagcagcctccacgctcggccgggtcagacgcggggcgaggcgggcgggcgggcggccgggcgccgaagacccggcgcgggcggcggcggctgctgctgccggggaccacgcgccgcgagcctcttccgccccagatctcccgcgcgcgccccgccacccgcgcgcactcgctcacgctgcctcgcgcacatggtcggctcgcggcaaagtttcgaaccactccgggatcctgccgcagtgcttggggccagcgcggtgatttgaaaaag

SEQ ID NO: 13091 - DNA, 232 bp, Homo sapiens
  source 1..232: mol_type = other DNA
cctggcccagaattctattagaaagctttgcatctggagttttctaatggtgccttcaggcaaaaaaaattatgacttggttaaatagaattcattaattttactctcgaaaatgtaaactgttaaaacattttgtggttacaagaattctgaaaataatgcgttcacatgcgtgcacacgcacgcacatacgcgcacacacacacactgggccagcctcagatggtcccta

SEQ ID NO: 13092 - DNA, 368 bp, Homo sapiens
  source 1..368: mol_type = other DNA
agcaccgaaatacctcttccagggcgggatgattgtgtaattaaataataaaacaatccttaagtccggtgaatttttcaacttccaagttttgcaagggctctgggcagcggcggcaacagcagcctccacgctcggccgggtcagacgcggggcgaggcgggcgggcgggcggccgggcgccgaagacccggcgcgggcggcggcggctgctgctgccggggaccacgcgccgcgagcctcttccgccccagatctcccgcgcgcgccccgccacccgcgcgcactcgctcacgctgcctcgcgcacatggtcggctcgcggcaaagtttcgaaccactccgggatcctgccgcagtgcttggggc

SEQ ID NO: 13093 - DNA, 344 bp, Homo sapiens
  source 1..344: mol_type = other DNA
aaaaaaaaggctgttcagagcaagttgttttattgtgcttaggggataaagaatttttttcccgagaaggaggaagcaccaggcccattgcctcctggttgaactgttctcaaggctgatttatccttccagactgcaggactcagagttaacctcagctgaatccagctgcagctgctacctgctgtgtgtgtgtgcgcgtgtgagtgttctcacacacacccgcacgcccgtgtgtgcagtgacatggagatatgaattctgagcaattaaaactttagtctgcatcaaaaaaaaaaaggcaaaagaactgatccttgtctttctatcttgtagtccagcaa

SEQ ID NO: 13094 - DNA, 427 bp, Homo sapiens
  source 1..427: mol_type = other DNA
agcacatcttataaggaatacagattttatacaacaggtaatatttcttcacgtgggcagaaagatctagcaaaagttgtcggcttttgcagggatgggaaagcaggaaacttttggaggtctcccaaaatatggacgagaccatgcactacagtgcaatgctttgcaccccaggagtcacctggtgatcttgctgaagtgcatgtactgattcagcaggcctgaaattgtgcatttcaagaccgcgctttgaagcaaggtaccatgggacatccccatcctgtctctcgggagagggaggcgcccaggcgcgccaggtgcaagcgctctggagagtgcggtctgcctgggtccgcggctctggggctgcggcgcgattgcaggagtttcggccctcagcggctcccatcgcggctcccgggagcta

SEQ ID NO: 13095 - DNA, 322 bp, Homo sapiens
  source 1..322: mol_type = other DNA
actttgataaccactgaccaaagtttttaaggtcacaaggtgtttataattacaagatttccactctcaaatctggagcacatcttataaggaatacagattttatacaacaggtaatatttcttcacgtgggcagaaagatctagcaaaagttgtcggcttttgcagggatgggaaagcaggaaacttttggaggtctcccaaaatatggacgagaccatgcactacagtgcaatgctttgcaccccaggagtcacctggtgatcttgctgaagtgcatgtactgattcagcaggcctgaaattgtgcatttcaagaccgc

SEQ ID NO: 13096 - DNA, 190 bp, Homo sapiens
  source 1..190: mol_type = other DNA
tctggccagaataacacacggtatgaattatcctttccatgtctagaaaaaaattccattttaatgggagagcctcctctaagagtggtggactcctgacagtgggtcctaataatgacaaatagctagactatatagggtaattggaagtttccaagatatgaaataggacacatggtttgctttataa

SEQ ID NO: 13097 - DNA, 356 bp, Homo sapiens
  source 1..356: mol_type = other DNA
ctggttcttggctctttgttcaaagggaaaaaatttccctatcctcattgaagactgatgagctgtcagtcacatgtgaacaattggaagagtttatctgatgactgaccagttgtgaaatttagcacccattaattgattcttaatgtgagaggaaaggaaaacatattccctttactcagtgaaacaatatgaaggcctgggctttttctaaatgtatgcctttaatttttatccaaaatggctgactcttaggcaaagaatgtgttgtctttgctaatactgctaattaccccctgggtcccaggctttcactggggccttttaaaataaataaatgtgtttatggcaggtat

SEQ ID NO: 13098 - DNA, 371 bp, Homo sapiens
  source 1..371: mol_type = other DNA
tctttttttttcctggtgggaataaaatacaggaaagcattttattaaacagttgttaaggattaagactttcacagaccactgaatactgacaagttaattgcgcactatatgcaaatggatcagattaatgggatttttatgggttttcgaaaagagccagacacacaaaggtggtacttaaaaacagcaccttaggatctagttccatcctatcttttcccttaaatgccatgacaaaagttaaaacgggccctgtcccttctgaattctcatctaaatttaaataaaaacctttgagaatgcatgcacatgtgcatgcatgtgaaggcgctcggcagtttctagcggtggctgtccgccagggaggt

SEQ ID NO: 13099 - DNA, 358 bp, Homo sapiens
  source 1..358: mol_type = other DNA
ctgtagtggttacagaacttccgaaatcgtagtaaaatcttcaaaacccattttcaaagagttgtcttaaaagtcttctttaacaccccctgggacttgttaacccctcctccccaggccggaggctctacatggagaaggggcaggcgggttgaccccccgcgggtgggcgaatgaatgaaacgttggttggcttaatccgtttcccgacctgggcagggtccccgcagtatctgcggccccgcccccgcgccgggcctgcgcttccagcttctgcagctgcagcgccagccgaattcccggatccgcggccgcttccgagagcagccaagcgccgctcgggcgcgccaatttagct

SEQ ID NO: 13100 - DNA, 520 bp, Homo sapiens
  source 1..520: mol_type = other DNA
actgaatcacacttaaagatctagcttttaattttccagttattttacatgaatatctgttgagcacctacgatgtgcaagacactgttctggagtttatagttcaagcacgaattatacacctatgtttggagttaccaatatgtataaatctctgtcccgcgtttttttctattttttgaacacagaagcaagcagagtccttccacctacagtccaggtgggtggtgtgtcagaggcctctcggggaccagtgaccgtgacccaaggctgccctcaggccacaccatctgcgagatgcggtggccacctaccctcccagagggcgtgccagaccgggaaactttatctgggaggtgactccacccacttgggcggggctgccgcccgctgggggccgggcaagtggcccggccagcggcgcggcgtccggggagggctgtgctggcctgccggctccgggggcggggaaatcgagtagctgcactcaggccccgcccgagacccggagggagcgccg

SEQ ID NO: 13101 - DNA, 443 bp, Homo sapiens
  source 1..443: mol_type = other DNA
acatgctctaattaaatttatatgaaattctagagaaggcaaatactgaatcacacttaaagatctagcttttaattttccagttattttacatgaatatctgttgagcacctacgatgtgcaagacactgttctggagtttatagttcaagcacgaattatacacctatgtttggagttaccaatatgtataaatctctgtcccgcgtttttttctattttttgaacacagaagcaagcagagtccttccacctacagtccaggtgggtggtgtgtcagaggcctctcggggaccagtgaccgtgacccaaggctgccctcaggccacaccatctgcgagatgcggtggccacctaccctcccagagggcgtgccagaccgggaaactttatctgggaggtgactccacccacttgggcggggctgccgcccgctgggggcc

SEQ ID NO: 13102 - DNA, 523 bp, Homo sapiens
  source 1..523: mol_type = other DNA
ggtgagggaagagccctctcctgccctttccgtttatattaaatgtccagattagttaaatctaagtttcttctttataccaaaaatcactgacacttcaaatgggtgaattatatggcatgtgattacagtctaataaataaatagtatgtcctgctgtatccttcagggcctctgagaaatggagagagctccatctgaagccagactgagttccgatccctatccggaaaggttgttgtaatttttaaaaacattaaaaacatacattagggttaatcatgtagcgtgtgatacacagacgctctggaaccagatctggagggctggtcgtgtccctggtctcgccctcctgcaaggaacggggcctaagcgcctggcgaggccgccctaccggacccgctgcggttaaccgacagccgcaacggttcccgcaccgcccgggtcggagaacaatgctgcgccctgcacgtagagcctcgcggtgccgcgccctggggcgggcctgcccatggcctgccgg

SEQ ID NO: 13103 - DNA, 649 bp, Homo sapiens
  source 1..649: mol_type = other DNA
caggggcgggccgggcccgaccactccgcaaacgcagggggaacttgcggcaggtgcatgcacctgttacatgaaagcgaacttggggccgggtgctgcttggtcgcgccccagtgctagcgggcgccgagcgggagccgcgcgggagcagcgcagctacggcggcggcagcggcggcgcggttgcgattccgagccgttgagacgcctctgcggcagctggtggcgcaggtggcttgcgtggacgcgggtagaggcgaccggccagcaaccgcagcgtcggcgcccgcggccccggcaggtgagcgggcgacggggactcgccccgcccccccctcggtggcgtcgctcctggctgtagcggggatggacgcggcccgcccgggagccgagggggccgaggctgcagccgctgggcagcaggttgcggggccttgcgtgggcggaagggggccgctcgcggcagacgggcgatttctggccgggcagcatccctgcggggtggaggacctgctccagcgcggaggcagcgcactggcgggggaggagcgggaggcggccgtcccctcgctctcccacccccaccagcaggcgcgtcgggacgccccgaggcatcctcccccgcccgcgggcccggtagctgggcccgc

SEQ ID NO: 13104 - DNA, 520 bp, Homo sapiens
  source 1..520: mol_type = other DNA
agtttcttctttataccaaaaatcactgacacttcaaatgggtgaattatatggcatgtgattacagtctaataaataaatagtatgtcctgctgtatccttcagggcctctgagaaatggagagagctccatctgaagccagactgagttccgatccctatccggaaaggttgttgtaatttttaaaaacattaaaaacatacattagggttaatcatgtagcgtgtgatacacagacgctctggaaccagatctggagggctggtcgtgtccctggtctcgccctcctgcaaggaacggggcctaagcgcctggcgaggccgccctaccggacccgctgcggttaaccgacagccgcaacggttcccgcaccgcccgggtcggagaacaatgctgcgccctgcacgtagagcctcgcggtgccgcgccctggggcgggcctgcccatggcctgccgggccctgcccgcgccgcctcgccgctcgccggccgggcgccccaggccttgatctgcaggct

SEQ ID NO: 13105 - DNA, 436 bp, Homo sapiens
  source 1..436: mol_type = other DNA
ctaatatatgtcttattattcttatttttatatgtcttaacattctttttaaaaatattttcagcctctctaaaggatcaaaaaattaacctttaaaatcccttgaagagcattttaagagagaaaatatttgaggtttagtaacacttctagggaaataaaatttagatgcagctaaaatttagttagggcccaaactcacatcctatctaaattcttggtgatgcaaatgcaaaagaaatgaaactctcatactacaatttcaaacgccgcatgctggatgatgcaaaagggagagaggcccggcagcaggggcgggccgggcccgaccactccgcaaaccgcagggggaacttgcggcaggtgcatgcacctgttacatgaaagcgaacttggggccgggtgctgcttggtcgcgccccagtgctagcgggcg

SEQ ID NO: 13106 - DNA, 381 bp, Homo sapiens
  source 1..381: mol_type = other DNA
aagaatcaaggaggttttaatctcactctcccatgggagagattgattacaatcaacaaggacccagtttagtatagaaggctcgttttgcattaaacacatctttgaccaaatcctgtcaatttgcattgttctctggaagaataggcttttaggcggcagcagattgtgcatcaatgcaggggacaggatgccctgtgcaggcagagagctgtccagagagaatttctccccaggccccgggaccagcccaccgttgctgttttcaaaaagcaggatctgggatccgacctcttaggccacagcagcgcgtgggcagggcgcacccccgcgcggggacgcggagctcctggagcgagagcgcgtgcggtcgcgagcccg

SEQ ID NO: 13107 - DNA, 400 bp, Homo sapiens
  source 1..400: mol_type = other DNA
atctttgaccaaatcctgtcaatttgcattgttctctggaagaataggcttttaggcggcagcagattgtgcatcaatgcaggggacaggatgccctgtgcaggcagagagctgtccagagagaatttctccccaggccccgggaccagcccaccgttgctgttttcaaaaagcaggatctgggatccgacctcttaggccacagcagcgcgtgggcagggcgcacccccgcgcggggacgcggagctcctggagcgagagcgcgtgcggtcgcgagcccgccgctccccagcaacggcgcatgcgcccgttcgtccctcagcgaaggcgcgctgcttggcgggcgggccgagccagcgttctcggagtacgtatccaggagctgcaagctgagggctgc

SEQ ID NO: 13108 - DNA, 413 bp, Homo sapiens
  source 1..413: mol_type = other DNA
atttggtatacatactttttaaaatagttgcttttgatctaatattgttgcttgtttgttttgtaataatagcatgtaaataaaaatgaatttttctcaacttctctggagaaatagtgtaaatctaaattgaatgtcacttaaatgtgaaagaactggcacctttgatatactgaatcattttgtcattaataataacataattatcaatgcaaatgtaaagtttgttttttaaaaagtccaaaacaaacactttggcgtctgcccaagagcctgttgctctgcgtgacacatgcctcgaggaagcagaggtggcccctctgtgctcagtgctggcccagcgcggccaaaaaagcactaaaatggcattgtgttaaaattccaagtcgcatgaatgttttattgccacagtg

SEQ ID NO: 13109 - DNA, 632 bp, Homo sapiens
  source 1..632: mol_type = other DNA
actatctaataaataggtgaatagttttaagacttgtttaattaaaaatacgacatgttatcaagggtgtatttcatcaggcaggaaaacgttatagaattttccacagagatcttgaataaaaaatggagtttttatattcattacttttttttcttaacgatttgaaaggatattgcagatgcttcatctaggaactttaacaaaggatttttttctacttctgagctttaagaaaaggtatacttttttcctttgagtttctcattagctaacatccagtttagtaattaatagcctgaggtactagatattaaatagtatatatttatatttggcaaatgtttattgtgcatcttctatgttataaaaacaggcttatttgcttactctttagagtataagagctgaatattttactttcttcagtgtaattaaaaaaaaatttaagtatcacagttttacaaatgttaaagccaaagactggtgtcagatattatgtgttatatcagaaagcattgtttcccggggaagggccctagcttccccttgccctgtgcaccgtgactgctatccaatgacatgcagtggctgaccagtgccgcctgcacacctgacaggcagctgttaaa

SEQ ID NO: 13110 - DNA, 456 bp, Homo sapiens
  source 1..456: mol_type = other DNA
ctttaccaaagtacaggagtatctttacctgaggtttatcttttgagaaaggtctgaaactttttttctgaataagaataaactgtgcattatattttacaattaatattaggaaaatgttaatagcagtacattcctactacctgattttttcttctatttgagatgtaagatatctgtcagatagagatatgttgactattgctatattaaaatgtaagtgttacagtttgaattttcaagtgagagtgcagtcaagaatgccaatttgcattccaggagttcttgccatgtcacgagttcgtcttttcaaaaatctgcctgatttagacaagaaagaaaagtactttcatgttgcagccacccctgctaacttgtcagcagcaggaatgaagaacaggtctgcttagttcttgggactgaaattaagagcaacttaagttggataatacagct

SEQ ID NO: 13111 - DNA, 444 bp, Homo sapiens
  source 1..444: mol_type = other DNA
actcgccttctccccagcggcgcgcggaggagctgggctgagagggtcgcggggagccgggtcggccgcggctgacagctgggcgctagcggccacctctacctccacgcccgcagctccccgggggggggggggggcgccagggtgcggtggggggagggagaaacatacatcctccttccccaagccccattttgcaaaagtggggcttgcacggccgccgaggtcacctcgcccgccggtcccccgcctcccgcgagcagggcagccccctcccgggacaagccggggaaccgtgccggctgggactcggggcgcgagcgcgaccccggcgcgagtgacctgagcgcagaggggccgcggcgagggcgcgcgcgggcgggcggggaggcggaggcgccagcggcggccgaggggctggtccaggcgcggccgctaagagga

SEQ ID NO: 13112 - DNA, 370 bp, Homo sapiens
  source 1..370: mol_type = other DNA
ccctttctgaagcaatatgcatctcattaatcttatcaatagtaacaaagtatttgaagagaacaaaagataaagtaggtcttgtttcttcaattcaagttggaaacctgcttgagtcagctggatgtcagctgtactaaagcaaaaacacttaagtgtaaaacgtattccttcgggaaatccaggcgatcctggccaaggactcaggcacaggacgctgggatggcctgcccggcggaccggccttaccctttcgggccacggcgcgtgcgtaccccaaggctcgcgctgggcgcattgcccgcgggaagccggccaggaccagggcgagcctcgcgcatgcgcggttcggcgttccgggctcgccggg

SEQ ID NO: 13113 - DNA, 580 bp, Homo sapiens
  source 1..580: mol_type = other DNA
agcacagaaggcatttagtgctggttacatatgaagcatctgtatataacttagtatcatgctttttcacattatattttgatacaagatcacatttgggctttttcatttattgaacgctagttttgtagtaagacttcaattctatttttttaagtcattaaattgtatcagacaagggggaaaacggtgtgtgactttccctaaggtaagatggaatgttttctgtgcaatgacttattccttttgcggcgcaggctcaaagggcaggagggccgtctgcaggcagcgccgccgcggctacctggaagcccagcaagtcacctgagtcctgcgggtgcctgggctgccaatctgcagcgacccgtccgcagcccccgggggcaggaacaccaaccccgggacaggaggacgtcctcggcccgctgactagggatccgccagcgggtgccgctgagccacatccccgcagttggcgccagcatccaggtaccgcgcgccacagcacctgcctgggcgttcccgcgcttggggcggggcttcccgcgtcccgaggccgcatcgagcccgtgtcccgcta

SEQ ID NO: 13114 - DNA, 301 bp, Homo sapiens
  source 1..301: mol_type = other DNA
agaaggtttggggattaactgaggatttaattcatcctttctttctctcccgtggctaaaatagatagttgataattgtgcctttacaattagcaaatcttaaatgccttttgtttttattaagtccttaataacacaaaatataggcttagttcagaaaatgtatagagtatttattttgcaatacagaacacatttcataccaggtccatgggaagcacagtgctttgtctgattagcaggagcctgattggctggctgcctgctccacccacccctcggtcaggaaatgtgagagggg

SEQ ID NO: 13115 - DNA, 440 bp, Homo sapiens
  source 1..440: mol_type = other DNA
agtcaaaatgttttaagtccaaacaactggccagagcagtgtcttttgaacttaatcacctggcttcttgttgaagctagattcccggagttttcatcaagccaggtggtcctgatgccaactagaatttgagaacgcctgcttcaaggcatcctcttaaaccactgtgttctcaagagcgcaggtctgtgggtgagacatctgcaaaggcctaggtttccacaggaagatctggcctaaggaagccttttgccaggttcaccggggaacccctgtcctgggcctgccagtgaggtgctgggagcttcccgacctcacaagcggctcttgtgatgtaattgccacctgaggcgtgcccctcctggccctggcgacatcacagaggctacctgggcacggaccccgcagcttcctggggcccagtcagccgctccaggtgc

SEQ ID NO: 13116 - DNA, 195 bp, Homo sapiens
  source 1..195: mol_type = other DNA
gtcccagctactcgggaggctgccactgcactccagcctggagcagctactcgtttcgctaacgacagaaatttgattagagtcaatgctttaactctacaccgaggcatagtgctccatttatggcttttttgtgacgtaacaactgcagagcaagtcgctggccgcgcaatgcccgggacgcctggcggcgcc

SEQ ID NO: 13117 - DNA, 529 bp, Homo sapiens
  source 1..529: mol_type = other DNA
gggccaggctggtgattcgctcgcctcaaaacttttaaaagttattacttcgctaaaaataacagcgtagaagccattgtgcagcgccacgcgatctcggctcactgcagaggctcaagcgatcctcccacttagcctcgcaggtagctggggctgggctattttttaaaataaaataaaaatcttcgccaggaaaaccccaaagccggcctgggcgccatccccatttgccccgggcctctcaggaccccgaccacaggcaggaccccgaccacaggcagcgccccgactccaggcagcgccccgactccaggcaggggcctccccaggccgggcccccgcccggctcccgacaggctcctctccccgtggcggggcccctcgcccaggcagcaacccgaccgggcccccaccactctaggagggccggcgttgggggagggcgccgggacgtgcccgagggtgacactcgggcttgggacagggcgtgctgccgcgggtcacgtgcggcgaggcggggtttatagcc

SEQ ID NO: 13118 - DNA, 604 bp, Homo sapiens
  source 1..604: mol_type = other DNA
aaaaaaaagtgatactgttaatactgctgtaatatgttgatttgttgtttttggtggagaaaagatatcacttaaaaaacttatagaaagaaactgtaccaaagtattcagttatttgatatgagacacttattttagaatagagagttttagatactgaatttgggctcaaaattctactactgattttgaagtttttcacttagagatggtctatatattgatgaccttagaggctaatgactcacatactctgtacttagtcacagtgtgaatttttcacagaagactaactgaaatagttggtaaatttttctgtatgtttcttaccattttccacaaggtgttggcatgtgtagaagaaagattggttgaatggaatctcaactagtatattaatacattttaaatgttacaatgaactgtaaattcatgggtaaaatataacttattttagtttctgttatacaattttaaagaaattcggcattaaaatattccattaatacctatcatatgcaatttatggaaaagtaactatttaaaaaatttattgttgtctcattcttcaaaaggtttaatttttagatatccagaagaggac

SEQ ID NO: 13119 - DNA, 288 bp, Homo sapiens
  source 1..288: mol_type = other DNA
aatgtactaaatgccactgaattgttcactttaaaatgactagttatgtcaatttcacctcaatttccaagattccatgaattaatgtgagatgatcaaagaggattcagtagaatcgttcaacttcgaatgtaaaacagtcctaaactcaaacctttgtgacactaaatagttttagatagtaaaaattattcttgtttacttggtctcgaactgggctgcagtgcagtggtgcgctagtaactgggactacctgggacagaagtggggctccgctggcgcccagct

SEQ ID NO: 13120 - DNA, 433 bp, Homo sapiens
  source 1..433: mol_type = other DNA
agaagcccctcacagggtctctgctgggcacacgttatcacctcttgaacctcgatatcttggagatgtcataactgccacagaaggctagattaagccttaaccccccggggactgggcggcccaacctgctccagcagccgggaaggtcttcctgccacagtgaccgcagcgagtggcgtccggcctcggagggactgagcccggacagaatcaaactctgggtccagagaggtccaggcgtgggtagcaccatcgaggccctggccacctgccgggtgctgggtagtctggaagagtctggagcccggtctccgcctccaggcgccccaccctggacccctcctccacgcgggtcccgccccacggtgggcgtggcttccagggggaggggccggacgagtaacctcccgcaggcgaggcgacaagccgc

SEQ ID NO: 13121 - DNA, 560 bp, Homo sapiens
  source 1..560: mol_type = other DNA
tcttgtggtcaaggggatcttgctttccagataagtgattcaaaatgacacggggttttgggtctcactttcatcacccatgaaatgaaaggtcaccctgcaagactgaagcccctgcagtagcctgtcctgcaggccactgctatcactttttgcagacccaaagttgacagcactttcaggctcctaagagacggctgccagcgtcgcctctgcgcccaggaggcgtggagcaaaggactcgggagctgagcgcgctgcggccccgctcccagcgcacagcgcacagcccagagggaggggccggcgggggccgggcagcgccagactcggagcgccgggctcacagcggctcagtctcctcccgaacccagcccggctggcgagagcggcagccagtgcgagccagagcccgggcctcagagcgggtaggcggagggccggcggactggagcggcgggccgcgctcgggggccccgccgtgtgcgcgtcctcccatcttatcctggtaagtgcgggcggctgcgccccgcctgccgctgtagccgctgtggcggtcg

SEQ ID NO: 13122 - DNA, 248 bp, Homo sapiens
  source 1..248: mol_type = other DNA
ctaaagattataatccaatttacgcacattacagtcagtattaactttattgaagcttcccagccggggacaaagcggaaggcgttcccttgcaaggaaatagcatccttgtgtgagttcttgtcttttcagcacaaaaccacagaaatagggggctgggatggctccccagctggccgctctgaacctgtaagcgaggcccgcaagccctccctccgccctgtgaggctcggagcccgggtgtcagg

SEQ ID NO: 13123 - DNA, 230 bp, Homo sapiens
  source 1..230: mol_type = other DNA
tggataatatcctgcagagtttctaaatttttttcaaagttttcaatgaggaactgagttttccttctaacagacaggaccctcagctgcaggtctgttggaatacccctgctggggggtgcctcccagtctgcgggacacttaagtctgcagaggttactgcgccctgcccccagaggtggagcttacagaggcaggcaggcctccttgagctgtggtgggctccgccc

SEQ ID NO: 13124 - DNA, 429 bp, Homo sapiens
  source 1..429: mol_type = other DNA
ttcctaagggtgccccagggtttagaaacaactaagtcagatatttttagagtaatttgtcttaactagtaagtattgcgcatgggctagaactacctcaggactatctaacaataccaccgaagcgtcttcgcggaaattttctgaatccttaatgttatcagtattatttatttcccccgagaaacaaaatctgctgttctgtattgctgcggtgctgctccacagccagcccccgcgcgcagccctccccgcaccagctcggctgcagagcgcgggtccgccgcccacgccgcctttcaaccgcagtgcgcggcccgggccttagacgcgcgtgcgcgcgagccggggagggcgggccccagccggaggaggcgtgcagcccattggctctctcctgcagtccccgcccccgggcgttcgaggcgg

SEQ ID NO: 13125 - DNA, 509 bp, Homo sapiens
  source 1..509: mol_type = other DNA
gttagcttttgtgaaatggtcaaaaacatagcagcctggaaaatttcttataccctagactattccagtgcctttcagaagttcatattgggcaaaactccttgcagtttcagctactattccctgattgacttttcagtaaatgcagtatttgcatataatctgcacatgtatttctgtatattttaaatcatccctagattacttataatacctgatacaatataaatgctaaatagctgtaacactgtatctttaaaatttacattattttttgttgttgtattattatttttattgtatttttaaaaaatattttccatctacagtcagtagaatccacggatcaatttgctttagtcattcactgaaactttaaaaaacattagaaaacctcacagtttgtaaatctttttccctattatatatatcataagataggagcttaaataaagagttttagaaactactaaaatgtactcgagagaggaccatctcatataaatagg

SEQ ID NO: 13126 - DNA, 689 bp, Homo sapiens
  source 1..689: mol_type = other DNA
tgtatcacatgagaagcactgatattgagttcctgaagatacacaaaatatttgcaagatcagtgttcccatttttgcttgatcttaaaatcttatcataatatgtggctgactttgagaattcaatgcaaatagcttgtatcatatgatttatttctagtacagttattcaacacatcaatatttatgtcaagtgctgaaaagaaaacagctagtaaagtttacaaattattttctcatattaagcaaaattcaaagcttcatacactatgagaaaaattttaaaaaattattgattcatatatttagtagttttcaatgattcagtatgtaattacattcatattaacgtgtatttatatagcttttatattgcatatgtaatttgataaaatataatttacattaatgaattacactaaaagttattccagaaatatacttatcaaattaagttatatgtcaacagcttttaaacttagattttagtttaacttttctgtcattcttaactttacattgaataaaaagagcaaactttatagtttttatctgtgaagtagaggtatacgtagtatacataaatagatatgccaaatctgtgttattaaaatttcatgaagattccaattagtaaaaaataccataatttagaaaatggaaattagtatgttcactatttaagaact

SEQ ID NO: 13127 - DNA, 611 bp, Homo sapiens
  source 1..611: mol_type = other DNA
cactggtattgagttcatgaaggtaaacaaaatatttgtaagatcagtgttacaaacctatggcaagagaattcaatgcaaatagcttatgttatatgatttatttctactaaagttattcaacacatatacatttatgtcaagtgctgaaagtgaagtttacaaattattttctcatataaagcaaaattcaaagcttcatacactaagagaaaaattttaaaaaattattgattcttatttttaggagttttgaatgattaggtatgtaattatattcatattattaatgtgtatttatatagatttttattttgcataggtactttgatacaaaatttacatgaacaaattacactaaaagttatttcacaaatatacttatcaagttaagttaaatgtcaatagcttttaaacttagattttagtttaacttttctgtcattctttacgttaaataaaaaaagcaaactttatagtttttatctgtgaagtagaggtatacatagtatacataaatacatatgccaaatctgtgttattaaaacttcatgaagatttcgattacaaatttagaaaatggaaattagtatgttcactatttaaggcct

SEQ ID NO: 13128 - DNA, 582 bp, Homo sapiens
  source 1..582: mol_type = other DNA
aatctatacaatatctggatgaatatctagcagctagtgaagttaaacattttctaacatgacagaaaattaagttagactaaaagtaaatgttaaaaaattaaattttagtagtctttagcagttttaaatgatttttaagtattttataatattaggtattattatgtgtttttataatttgttaatttgctgatggaattggacacattacaatttatataggtaaataaatcattttaaagacacaaacaaattgagttaaatgtccatgggttttaaatttaactattaacttttagcttaaaaatttcattttgtcacccaggctggagtgcaatgttgcaatcttggctcactgcaaccactgcctagctaggattacaggcacttggcaagtctggtcttggtcattcttaacactatgttaaataaaaagattaaactttacactccttataaatagatatgtacagtatatcaacaaatatatggtatgtctgtgttattaaaatttaatgggactttgaattagaaagaaatttctaaaaaatggaagctagtatgttccttatttaagac

SEQ ID NO: 13129 - DNA, 669 bp, Homo sapiens
  source 1..669: mol_type = other DNA
tagatgtcaaagtcatatcatgtgaggtggcctctgtatacatatgagctttgaggtttcaataaaaatactttatcttttactatttaattctactaaagttgttcaacacatcaataattatgtcaagcactaaggtttttgacaatatctagatcaatatctagaagctagtgaattttttaaatttccctatgaagcaaaattgaaagtaccctaaaaataaatgttacaaataatttcaattttaatagtctttagctattttgaatttttaaatatttcattatactaggcaatattatatattttcataatttgttaatttacttatttaatctgacacactacaatttatataagtaaataaatcacattgttacttaaacaaattgaactatgaagttaaatatccataaattgtaaatttaattattaacttttaccttagaattttcatttgctcattcttaatccgggactgaataaattctattttacattctattacgctgcttttaaagcattaaagaagtacaatattctctctcgataatgggtactgtaatgtatatacatcagccaacacatagtatatctgtgttattaaaatttaatgggatttttagttagaaaaaaaatttctaaaaagcaacctttttaagatct

SEQ ID NO: 13130 - DNA, 591 bp, Homo sapiens
  source 1..591: mol_type = other DNA
tgtgtcacatactgacattgtgttataaatctatttgagaattaaatacaaatcatgtatatgttattatttaattctactaaatattttcaacacatcaacagttaatgtcaaatgctgctagtgaaattaaaaattagtttattttttaaagcaaaattaaaagttaagtacactaaaaatcaaacttaagaaaacaatttcattttttacctttaagaaacttatgcatgtcatcatgtttgtattattatgtatattactaatacattcttaatttgcaaatttgtttgagataatttatataaacaaatagagtgaattaaaagttgctgctcagagttaagttaaatgtcaaatttttaaaaatttaacttttagttaaattactttgccattcctaacagatcaagaaataataaaagtaaactttatgctttttcttttagtgtgcaaagtagacatacatacagtacataaggagatatacaatatatttgttattaaaatttaataaaaatttaatttcaattaagaaaaaaatttcttaaaagatctgaaaatggaaactagtatgttccctatttaaga

SEQ ID NO: 13131 - DNA, 624 bp, Homo sapiens
  source 1..624: mol_type = other DNA
gatctcaaagtcatatcatgagaggtcatacatatggtttcagctttgaaatgaaatataaataatttatattttaacaattctactgaagttgttcaacacatctatatttaggtcaagaattgaagaaaaaattcttcacactctctaggtgagtatctagcagctagtgaagttaaaaattttctcacatgcaacaaaattaaaagttaagtataataaaaataaatgataaaaatattttaaattattaagtctttatcagtttcaaataattcataaacattcattacttagctgtataatgtttatctagaaacattagataatgtttataatttgttaaatttcttatgtaatttaatacattacaatttatatcagtaaataaactatattgaagcccacaagcaaatttagttataaagttaagttaaatttgaatagcgtttaaatttaacttttatcttaaaattttcatttggttatttttaaacttgcattgaataaaatgattaaactttgtactttttgagtatagagatatacatatagtacacaaatagatagatattatatctgtgttattaaattttcactcagtatgttccctatttaaggcat

SEQ ID NO: 13132 - DNA, 356 bp, Homo sapiens
  source 1..356: mol_type = other DNA
tcctgaatccaggtgtataaatcatagttcgtaaatcagaaagattatccagtactacgttcgcagccgcaggaaggacaaatcttgcccccgccgcggcggccgccccgcgttagctgcctaagagaatctccgtggccggccagtacccgccttggtgaggattctccctcccgcgagaacttctggaatgccgccgggccagattttgcagctgaggcctccgacgccactatgctcttccttataaggttttgaaagaagcgctctataaatggtctccattattatcattatccgttagttataactggggataaaaaaaaaggggaggaagaggaggagtcaaggcccgc

SEQ ID NO: 13133 - DNA, 344 bp, Homo sapiens
  source 1..344: mol_type = other DNA
ctggtgctgctccatattacagaagaagttagtcaagatatatgtatgagttctctactgttgtgtaacaaattaccacaaatttatgagtccccatctggagcttgaggtccttgttcaagctcgtgtacacaggtaccttgcaagcatgcaggagtccggcaggagaatctcctatgcatgcttgcaacactgatcctttatacagagcatgacagtggggcttctcagaatccagtgaacctaaattttagttttagttgagagaatcacttaattttttctagactctaggagaaaattctctccttccataggcatggaaggcagcacaccatcttcaa

SEQ ID NO: 13134 - DNA, 543 bp, Homo sapiens
  source 1..543: mol_type = other DNA
tacaattgaattatgcgatatcattattctcaatttacacttgagaaaactaaggcatacagagatgatttttcaacagagtaagttaacagttaagttgaaaagacttttttttaattaaaagggaatattgaataagctaagaaaaaatgaaggtaattaataacttgaagattagatgtgcagtattaaataaaacactggagaaaaggatcgaacttttcaatgatgtttctaaaaatccatgcctagccttgccggaactgtgaacagaaaagcttttacagaagtcttcagattctgtatttttaaaagtaatgagaattaacttttcagaagcctggaagcttagcctgcggttaaaagttaagactccagtctgtattctcaaaccagcttagtctcttaaagttgttaagaagcaaatgagcttgtgtagctattagtttctacatgctaggttttttctgagagcctggcagacaaatcatctttaagaaggtcacaatcgagggacctcgttttagctcccgggcagaaagc

SEQ ID NO: 13135 - DNA, 554 bp, Homo sapiens
  source 1..554: mol_type = other DNA
tccctttttctggggtagtattgttagcactgaaatgtgtatcattcattcccgatatagacacataaaaatttcaatgatttaagtgattatcagaacaatgctctgagataagcattattaacctcactttacagttagagtacccgaagttccacatctggttagtgaacttgaaaattttctgtagaatttatttaaagtgtatttgatctagaaaatcaaaatctgtttttttttttaacaaacatctcagtaattgttttattaccaagacattaaagtagcatggtaattccagtcattttgggaattcctgcttaacttgaaaaaaatatgggaaagacatgcagctttcatgcccttgcctatcaaagagtatgttgtaagaaagacaagacattgtgtgtattagagactcctgaatgatttagacaacttcaaaatttttaagggggaaaaaaaaacccaccattctcttctccccctattaaatttgcaacaataaagggtggagggtaatactttcctatactgccaaagaatgtgaggaa

SEQ ID NO: 13136 - DNA, 526 bp, Homo sapiens
  source 1..526: mol_type = other DNA
acttttcctcattcttaactaagaatgtcaggcattaaagtacagttctctccaacttgcagaggtacttttcttgattaaatagccttctaaatgaatgcagtatactcttttcttttcctcataccttatgcttgaggatattgttgaagaacacttcctggaacacttctactaattttttttttttaatttaagctagtatactaagtgaacaccatggtcagttgtgagcatttacttagcccttagtgattaatagatttgcatgtacatagaagtctttatcctggccctgtggtccccgagggtcatggtccttgtgacctggcccctgttcactgcccccttcgctagcacgagcttgtttcaaggaaggctcccctgccctgagccagctgccctgcaggtgccacgtgagcctgctctggcatccacaggatgctcctggagcctcttctccatggttgtggccccaccaacacctattttccaaataattattcattcttgtgacagtggctaa

SEQ ID NO: 13137 - DNA, 461 bp, Homo sapiens
  source 1..461: mol_type = other DNA
agccagctgccctgcaggtgccacgtgagcctgctctggcatccacaggatgctcctggagcctcttctccatggttgtggccccaccaacacctattttccaaataattattcattcttgtgacagtggctaaagtgaaacaatttgataaggtttcaaggagtatctggaaatgaggagttcttgccccatgtgaggtaattaaatcatgggggtggttacccccacactgctgtcctgccatcatgtgaagaaggacgtgagttaattaaacctctttcctttataaattacccagtcatgggcagtcctttacagcagcatgagaatggactaatacactcctcaaatgttttgaagattgttgcaccttggaactaccagtgtgcacacaatctggctcaatgtatatattggcccagcaaggcaaagaactgaagttccaggatggaagaacctt

SEQ ID NO: 13138 - DNA, 413 bp, Homo sapiens
  source 1..413: mol_type = other DNA
agaatggagtccgtccttccaatcagagtctgctcttataccagcaaggaatcctttgaactagggtttctgaaaccccgcgctcctgaaaatcaagcacaactaggaaagaatagttttgctttttcttatgattaaaagaagaagccataccgattcaatttggctccacgtttgcggcaggtggggaggagcccagtcctccttccttgccaacgctggctctggcgagggctgcttccggctggtgcccccgggggagacccaacctggggcgacttcaggggtgccacattcgctaagtgctcggagttaatagcacctcctccgagcgtccccttgcctggaaagataccgcggtccctccagaggatttgagctcttccgccagcaccgggcggaccgcgtgcgct

SEQ ID NO: 13139 - DNA, 392 bp, Homo sapiens
  source 1..392: mol_type = other DNA
ataattcaagagctaacaggtattagcttattcttaaggcttatatgtattaatacatcatttaaactcacaatattcccttccccctttataattacgaaaaatgcaaggtattttcaagaatggagtccgtccttccaatcagagtctgctcttataccagcaaggaatcctttgaactagggtttctgaaaccccgcgctcctgaaaatcaagcacaactaggaaagaatagttttgctttttcttatgattaaaagaagaagccataccgattcaatttggctccacgtttgcggcaggtggggaggagcccagtcctccttccttgccaacgctggctctggcgagggctgcttccggctggtgcccccgggggagacccaacctgg

SEQ ID NO: 13140 - DNA, 546 bp, Homo sapiens
  source 1..546: mol_type = other DNA
tcggtgcttgtcccagccaggcgccctcggcgacgcgggcagctgggaggggaatgggcgcccggacccagctgggacccccgggtgcgactccacctacctagtccggcgccaggccgggtcgacagctccggcagcgccagcgccgcgccgtgtccagatgtcgcgtccaaatctagaagaggagcggagcggcttttagttcaaaactgatagagcaatgagatgacctcgctttcctttcttcctttttcatttttaaataatctagtttgaagaatggaaggcagcaccagaatccgcgggagcgcggctgttcctggtagggctgcctggagttgcgttccaggcgtccggcccctgggccgtcaccgcggggcgcccgcgctgagggtgggagggagaggaacgcgggccctgagccgcccgcgcgcgcgcctccctacgggcgcctccggcagcccttcccgcgtgcgcagggctcagagccgttccgagatcttgggcgggcgcgctcagggaaggcgggtgcgcgcctgcgggggc

SEQ ID NO: 13141 - DNA, 484 bp, Homo sapiens
  source 1..484: mol_type = other DNA
ttttcctgtctcccagctggaaaggaggaagggaggaggcggcagcggccaacggtcgccaagacaaccattctactcggtgcttgtcccagccaggcgccctcggcgacgcgggcagctgggaggggaatgggcgcccggacccagctgggacccccgggtgcgactccacctacctagtccggcgccaggccgggtcgacagctccggcagcgccagcgccgcgccgtgtccagatgtcgcgtccaaatctagaagaggagcggagcggcttttagttcaaaactgatagagcaatgagatgacctcgctttcctttcttcctttttcatttttaaataatctagtttgaagaatggaaggcagcaccagaatccgcgggagcgcggctgttcctggtagggctgcctggagttgcgttccaggcgtccggcccctgggccgtcaccgcggggcgcccgcgctgagggtgggagggagagga

SEQ ID NO: 13142 - DNA, 442 bp, Homo sapiens
  source 1..442: mol_type = other DNA
atatctagatagatatttacgtaagagtgatcgctaaatctcactctctaggctaccgcaccgccttaagtgggtggctcggccagtgcaggcctcactttcctcccctggggcgacaagcgggccacatttccaggttcccggagctgggcctagtcccgaatacccactcaggccgcgggtccagcccgcgaggtttcagaccgcaggctccgggtcggggcaccgggtcagcgcgccggcctgaaggcggcgtcctgggctcgacttcccgcgcgcggagagccggcgagcccgcgtccgagttcctggacgagagccgagcctcgcttagaccgcgctcaggacccggctcctccgaccgcttttcctgtctcccagctggaaaggaggaagggagggaggcggcagcggccaacggtcgccaagacaaccattctac

SEQ ID NO: 13143 - DNA, 552 bp, Homo sapiens
  source 1..552: mol_type = other DNA
taaatattttaagtaataaatgttgattcaatttaaatcttcagaagagaattttcattattactgcataaatttcctttattactcatgataaataaaaataagatatttactgtacaaatatgatgaaactgggatctcagattcttaaagtataattttttttatgccactctttttctcttttaagggttgtatccataatgcaaaaatggaaagaataaaaagcacacgcaaaacatgattctcgggatttttctctatttttatggttgactaattcaaacagaaagacacatgctaagtttgatacaagttatgaaacttgtgaagccttaagaaacacggagttattttgaatgactatcctctgctccgcctactggggattatttactggacatccagcgagcagtgcagccagcattcctggcggctccctggcccagtcccgccctcgtgacgcgtcggcccgggcctggcctcccggcgatcacagcggacagggggcggagcctaagggggtggggagacgccggccccttggcccag

SEQ ID NO: 13144 - DNA, 365 bp, Homo sapiens
  source 1..365: mol_type = other DNA
gttaaagtcttgccttcttagaaagaccaatctttcttctttattagaacgtaaactccatgagatcttacatcttacctgctgagcacttaatacttttaataaaagaatcctccccccttccttggcagtggcaatgtggtgcagagagcttttctgcaccctcagtgctgcccttgttatagctgaaagcagagccggaccactgatcccagcggttggaacttgagttcctacaagcctcaccactgtgggcaaaagtgctttggggcttcaaataaatttgaaacgcaatttaggcctctgtggttgcatgcgacctactgcgacaccagctggggcagctaagggagtgctggcctcac

SEQ ID NO: 13145 - DNA, 566 bp, Homo sapiens
  source 1..566: mol_type = other DNA
gaagaaatcgctattcacttcaaagaaagttcaaacttctctaagcattagtttttctgatcgtagatataaataattgtctacaccttttacagctgtttagagttttagaactaatgcttatagatcctcttagcacaggttcagtgatattctaagtgctcccttacttccatgtatacattcagaaaatacttccttgattctttttcgctatttgttttttacacaaaaacgaagaggcaatgggtttagttaacacactttgaattagatgttgtggaccccactcagagacttacatccccaaagggcaacctggagttgcccttttaaccacatcagttagtggagctagctctgtcccaaatcaggacaactttgactcatttcagtctttattcctaggcagaagcaagtgtctctggctgtcagacacaactatgtctgaaattaagattaagccctatgagtccctggagtgagaggttgttttctcaattaaaatttatcttttcgtagaagtctaaagactcagtcagtgggcatgagtcatcttaattcct

SEQ ID NO: 13146 - DNA, 576 bp, Homo sapiens
  source 1..576: mol_type = other DNA
taaaaatatcattattaattgctatcttagggatggaaaatgaataacttgtccaaggtagttggataccatcttgaagccattaagaataaacattcatgaattttctatctcagattaaacgccttatggtcttttcttataattaaaggcattaaattcatatgtgaagaatgcattcatgacagcatatttaaataatgatctaaacgactttccccaatactttacaatagacataagtatttttgaaacagctttaacacaatcgctgcctagtttgataacttttttaaagtagcagtattttaaaatagagtacatgaaaagaatctgaatgtgaatcacttcccttagttatttgtcctaagacccatttaaaataagttcgtagtctatcaagctgggatcccacctgcagacatgaagacttcatctgggaacccgaaagcttcagacttctccccgccccgggccctcccccggcttccgcgctgggccgggagcctgggtgggcggggtagcctctctagccttgccttcttggctggaggcacaaaggcattaacttagcgc

SEQ ID NO: 13147 - DNA, 405 bp, Homo sapiens
  source 1..405: mol_type = other DNA
tacaatttcaggtagcggccgagcaggtgtaaaaacgtgctccagccgcgtggctccggggtgggttttgacttccagccgtggggccgcaaggcaaggcagcgatgggacgccccctcgcggctagcggcaacagagtacagcactctagatctgtccagggacaggaccccttggctttttaaaagagacacacatatgtgtgtatacttatatatatttataaatacatttatgaacacataaagtaacgagtccagaccggagggacggagctgagctgctgaagcccggcatctccctgccggcacggacccgaagggcggtcgggcagggcacgcgccggcggcggccgcggcgccgcgaactcgccgccggccccgcctcctgccccgctacaaacgg

SEQ ID NO: 13148 - DNA, 306 bp, Homo sapiens
  source 1..306: mol_type = other DNA
acctgtctttttatatacagctgctcttataggatatttatcctacacttttctattctaacatgacttcatctttatcttaaaaggatgctttaaaacataaatctgaaatatgcgtatattaaaataaagacatacaggcaaataatggatgtacattcatccctttcactcagatcaaagagagggagctctcaatgactgccatatcgcaaactctgctctcgagagtgacacgccaatcgtctcacgcggccccgcctgggcggcctcaatggaagtgctgcccgggggcagagcagctgc

SEQ ID NO: 13149 - DNA, 425 bp, Homo sapiens
  source 1..425: mol_type = other DNA
cacaattcataacaggtttataaatgtaacatgttattaattttatgtgttttttcaatcctttcaggtatgactccaatgagtgtgatacttaaaacacagtgggctcagccccaggatttaccttacaaggccaatttaagagttctttaattgcttcttacctcagtggctaaaggcccctgctgaaacgacaaagaccttggttcacgaggtgatgaggaaaatgagatggaacaacttttccctattctctttattgtgttaatatcttaagatacaataaaaagttttgaagttaaaaggacgtaagttccaccttctatcctttgtagagatataaaaacaaaacaactcaaatcgacctccgcgaccggagggggaagcgcaactggttatccacgttctgtgccacggccggaagt

SEQ ID NO: 13150 - DNA, 382 bp, Homo sapiens
  source 1..382: mol_type = other DNA
aatggccaggggcaggagccctcgcccgacttgggagtctcggaccctgacactcgctccagcatcctggcagccctcccgagagggtcgtgcctcggtgcagaagttactcctgcagtctcaaccccagccagggcctctcgggtgcagcccgcccccgacaccgtcccgggcactgggaggagcgcggctcacgtggaggcggcgtcccgcgcctccggagcagcgctgagtaggctgcgcgtgttgaccggcagttgcaaactattggccagttaacacctgaggggagggcagggggcttccctcccctctcctggaggacggacagaatgatacatactgtcattaacagtggcgctgtcacacggcttgccctgcc

SEQ ID NO: 13151 - DNA, 357 bp, Homo sapiens
  source 1..357: mol_type = other DNA
ccagaaacactggcaacttgtctgtctttattccaactgaatttatggatggtgactcaaattctaaaatctctagcaaataacaaaataactaacctcaatttttctttatcagggctgaacccgtgaactcgatcaggaggatgctgcttctcctcaagaaacagcagtgcaatttttgagaactaaagtcttcaaaaattaaattttacagaagactacagattttaaattttcaagtctaaaaacttgagttctaatagtctgagaatgactgacagggaagggtcactctccttccactctccgggaagcgtgcaacacagctcccagcgctcacctgtctggggcccagag

SEQ ID NO: 13152 - DNA, 336 bp, Homo sapiens
  source 1..336: mol_type = other DNA
ctcagctctaactcagacctactgaatcagaatacctttaaaaaattgacttgaccaccgtatttgctaaatttggaatagttcaatgattaatagttcccaattctcgttttaattgaaaaacaaggttaacttgttcggattcggcgcgccggatgtccacgccagctggcgcggcattatgggaattagagacccgggtaggaccccagggtctgctcagcagggagtccagagccctggaggaaagccagctcagctccgcatcggcgtcggcggttagtgcctgtcaggcttgctgtgtcactcggcccgctcggcgcgccccttcccagc

SEQ ID NO: 13153 - DNA, 298 bp, Homo sapiens
  source 1..298: mol_type = other DNA
aaaaaacaattaagtgtatatttcagaaagataattatattttaatgtaataatttaagtaggactaattggtacagatttctaacagatagctagaaatacagatctctcagctctaactcagacctactgaatcagaatacctttaaaaaattgacttgaccaccgtatttgctaaatttggaatagttcaatgattaatagttcccaattctcgttttaattgaaaaacaaggttaacttgttcggattcggcgcgccggatgtccacgccagctggcgcggcattatgggaatt

SEQ ID NO: 13154 - DNA, 555 bp, Homo sapiens
  source 1..555: mol_type = other DNA
gataattacatgtcagccacataacattatctcattttgtgttgtattgatttgttggaaataatgtgtaaaataatgttaaaatcccaatacatatgcaatcacatttaagctgttatcacagtaaaagttattttattagaagtgggatttaaggtgaagtagttcttaaattaaaaaaaaaaaaaaaaaggacactttccattgaattcacttggatccagcaggaacggaacagttggtgccagaatcgcatccatacttcatgatgcgttgtgtacgctatgccgtcctaataggaaattaggagtttagaaaattgcacaatgctgcctaccacttaacttcaaatgtaacctgttaacaacgttagccgacgtgaggttacctagggacatagcaaaactcgctagagttacttcaagtgattatcaagaaaaccaaacgttcacataaaatgtttgcactttttccaaaaagcactgaagcgctcgcgagagctccgtgtgcggaggaaggagcctccgctatcccgcccccgttgccgggatacgc

SEQ ID NO: 13155 - DNA, 358 bp, Homo sapiens
  source 1..358: mol_type = other DNA
tggccaggctggaagatataaaatcatcatataaaaattggtagaatttagatatgcaagaatataaaataccttggaatcaatttaaccaatgaagtgaaatatctatagaaatataatccatgttcatggagtggaagaacattgctaaaatatcaatactcaaagcaatttactgattcaatgcaattcctatcaaaatacagtgacgctcttcatagatgacttcaaaattttctacaaagacagatccatagaccaatggatggagaaataatagttgtttcaataaatggtgctccatatccaggaataaaaatggattaaagactttaataagacctcaaactataaaact

SEQ ID NO: 13156 - DNA, 306 bp, Homo sapiens
  source 1..306: mol_type = other DNA
ttgtcacccagactagactgtggtagcactgtcagactctgcacctgacctcagtttgaaacataaattaatttagcaacagtatatctttcaaaagtatgcattttcaatattgtaaactctaaatcagtaagtaaaattgttaatactttaataaaattttcaaagagtaattaagaatcatgccactgcactccgccttacttgttatactaaaaaaggaaaagatgactttaagaaattattcttctagtcaatcttttgctaattttttttaaatcacctgttcactgggtacaaaggtta

SEQ ID NO: 13157 - DNA, 489 bp, Homo sapiens
  source 1..489: mol_type = other DNA
cctcctgggctggccaaggccgcagccggctccctcagcggcgggaacgggggctgcgcacggtgcttgcgggccagcacgagttccgggtgggcgtgggctctgcggaccctgcacacagagaggccggcaggccccaccggcccgggcagtgaggggcttagcacctgggccagcagctgctgtgctcaatttctcgcctggccttagctgccttcacgcagggcatggctcgggatctgtagccggccatgcctgcgcgtgggctcctgtgcagccccagcctccccgaggagcgcagccccctgctccacggcgcccagtcccatcgaccacccaagggctgaggagtgtgggcgcacggcgctggactggcaggcagctccacctgcagccccgatgggggacccactgggcgaagccagctgggcacctgaccctgtgtctcaccctgtgtctagctcagggtttgtgaatgcaccgtgggga

SEQ ID NO: 13158 - DNA, 342 bp, Homo sapiens
  source 1..342: mol_type = other DNA
ataattcatattgtgtaattataatcattctagatattgttttacacagattagtttttaaatgttatatataatttgcttctgaaacaccattcaacttcttcaagaaatttgatcacctttagatgaattgttaatgaaaattaaagctataggggctaatggccacattgacctcaccggtgctcactgaaattaatcccaattcaaaccatgtgggttaaaattgtcagagatcccagtagccccgggacctctgcccctacagcagcagcaaaagcagcagcagaagcaacagcagccctggaacttaaaactccctgtgctcagacagaaatgaga

SEQ ID NO: 13159 - DNA, 327 bp, Homo sapiens
  source 1..327: mol_type = other DNA
ttctgtttgcagacagaacctgcatctgccttttcctctggtgggtcaaagtgtatactctctaatctaatgtcataattcatattgtgtaattataatcattctagatattgttttacacagattagtttttaaatgttatatataatttgcttctgaaacaccattcaacttcttcaagaaatttgatcacctttagatgaattgttaatgaaaattaaagctataggggctaatggccacattgacctcaccggtgctcactgaaattaatcccaattcaaaccatgtgggttaaaattgtcagagatcccagtagccccggga

SEQ ID NO: 13160 - DNA, 445 bp, Homo sapiens
  source 1..445: mol_type = other DNA
catgttcaagcacgtgggccacctgaactcctgacctcaagtgatgactagtttttaaaagatatttttattgcatttatccaagaaaacacatcatattgcaatgctttgagaaacaaaaagatctgttctcattttactcttaacaatattaatggttgcagggaggctatatgatcaaacagcaaactgtttatttcctgcccacagaaggtttgctggaggcaatcactccctggcaccgagagaatgcagtgttgcatgccctaataaatacagagggctgtaaagctcagggcccttgcccactagaggcaaggtgcccccgaagtaattaacattcttttatgaaaacacacttattaactttcaaagaaaatcttgtaatggtttatttaaaaaataactaaaaaccattatcttcagactgagtcaatctgacagt

SEQ ID NO: 13161 - DNA, 631 bp, Homo sapiens
  source 1..631: mol_type = other DNA
acttactgttcctccaggattgtcccttgagaaaaggtcttttgtgtgttacagtaaagggaactcttgaaactttatctttctaaagtgaatgtccaggattaatctttcctgatagttctcttgcctggatatcaaacaataaagcacttaatactctcaatactggtaatatatgaagttagtccagtacccttaatttcattcattacatgaatttcatacattcatggattcattactttcttcatttgttacatagcctgaattgagtgtctgaattgaattcagcagtcccttggggccatcaggatgggttccttgtcttcaaggagctcccagcgaacagggatggagtagctaaccctgcctcgctccattcatttaattaattaatttatttatttatttatctatttatttatttatttttcactctgtcaccaggctggagtgtggtggatcatggcttactgcagccttgacttccagggctcaagtgatccttctgcctcagcctgctgaatagctgagccagctgatttttaaaaatcacttgtagagacaaggtctcaccaggttgcccaggctggtcttgaactcctgggctcaagtgatttttattttaata

SEQ ID NO: 13162 - DNA, 417 bp, Homo sapiens
  source 1..417: mol_type = other DNA
ttcacttagctaaatggtttaaaaataaaaccccctcagaaaaggatatttagagattatcaacattttctaatgcaacagaaaaagccaacttagtctcctacttagtaagtctattcttcatctttttggagatccagaaaaatcaaaaagagaaaatatccaaatatagaagcttaatttaacaaaattggaaaaaataatcacagtcatttggtcaatgtctatgattaactcaatgagacagagcaccaggtacaaaaaatatattttcatgaaggatcactccctcttatgtaatagatttgggtgagtgagtgagtgagtgagtgcatggactcacagctagtgctgggatggatcatccaggcataattctttgctcatttttcagggaaaaaaaaaagttatcacttc

SEQ ID NO: 13163 - DNA, 576 bp, Homo sapiens
  source 1..576: mol_type = other DNA
atttgagtcttatattcacaatcggtatctttacattacacaaaagtgacacagaattagagtcatttaatccagggttgatatcattaagtcatgactatttattaaatgtttcttacaatatctgagatgatattgcaaaagatgtaagtgattttagaagttctcacttcgtagttggatgttttctctatatatcctaatttctacttaatatatttccacacctctttgaagtgtgtagtaagaatgatcaatatgcattaagatgtgatcatatgggtaatagaaaaatgtgaaagatccaattctttttcgctcatatttgatttctgttactataaactataaaaacgtttcaaatgtagtttatgctccccgccaatttacggaggagtgggttgagctttaaaatccaggttcatccatgactccctagtaaatccactagaatctgagtatttcatggtatttttcaacaatcagaaaatcctggggaaggcaaactgtttccccctctctctttccggagggaagatgatccataccgcaggcggccgccaggggtccccgctc

SEQ ID NO: 13164 - DNA, 474 bp, Homo sapiens
  source 1..474: mol_type = other DNA
ttaggtgttgtattacttttctaagattacttaacaaagcaccacaaactgagtggctttaaacaacaatttattctctcacaattctagaagctagaagagagagaagactctttcagagcagttattggattaggccccactctaatccagtatgaccccattttaacatgattacacttatttctagataaggtatctccagtcatactagaattgcacatggatattctatgagctttagtatgtaacatttaatatcagtgtaaagaagcccttttttaagttatttctttgaatttctaaatgtatgccctgaatataagtaacaagttaccatgtcttgtaaaatgatcatatcaacaaacatttaatgtgcactatcctgataggagagattccatttgacttaagaggacaaaccaaatatgtctaaatcatttggggttttgatggatatctttaaattgctga

SEQ ID NO: 13165 - DNA, 413 bp, Homo sapiens
  source 1..413: mol_type = other DNA
gggagcagtttagttgggtataaaaagaatgacccaatttgtatgtctgtgtgatttttagtgatgaaaaagattaaattccgtaagtaaaaggcacacagtttaaaaaacctttgtttttttacacatctgagtggtgtaaatgctactcatctgtagtaagtggaatctatacacctgcagaccaaaagacgcaaggtttcaaaaatctttgtgttttttacacatcaaacagaatggtacgtttttcaaaagttaaaaaaaaacaagcaaaaatgacattccccagtgtgaaaatcatgcttgagagaattcttacatgtaaaggcaaaattgcgatgactcgattcccgcccgcagtgcgttttgaatgcacttaacagtgtcttacggcacacgctattgcgccaacg

SEQ ID NO: 13166 - DNA, 385 bp, Homo sapiens
  source 1..385: mol_type = other DNA
aaaaaacctttgtttttttacacatctgagtggtgtaaatgctactcatctgtagtaagtggaatctatacacctgcagaccaaaagacgcaaggtttcaaaaatctttgtgttttttacacatcaaacagaatggtacgtttttcaaaagttaaaaaaaaacaagcaaaaatgacattccccagtgtgaaaatcatgcttgagagaattcttacatgtaaaggcaaaattgcgatgactcgattcccgcccgcagtgcgttttgaatgcacttaacagtgtcttacggcacacgctattgcgccaacgcagtactcgctgagggtggagtcgcgcgctaggggccggggccggggccggggcgtggtcggggcgggcccggggg

SEQ ID NO: 13167 - DNA, 572 bp, Homo sapiens
  source 1..572: mol_type = other DNA
agcaaaatcatctaacacaaagcctgttttatgattaagtattaaatatcttatgtaatgtattgaataatgtactgaaagtacagtttcactatgtgtatcactttctcatcactgtaaaggtaaaaaattgtaaatattaaaggaaaattccaaaataaacaattcacaattttagattgtggatcattctgagtcttctgttcagcatattcatgctgtatacactgcctgcactttggtcactaagtagccatcttggatacaagatcatgggtcatggcttcaagtaactcttattttacttaataatggccctgaagcaaaagagtagtgattatgacaattcagatcctttaagtaaaaaggttgaaagttcttcacttagtaagcaaagaaaacaaaatcatttgctgaggtttctaagatctaaagtaagaatgaactttctataaaattgtgaaaaagaaagaaatatgttctagttttgctgtcacacctcaaaatgcaaaagttacatgtttagttaaagctaccctttgcagcggggaggagcctggctcctcctcttc

SEQ ID NO: 13168 - DNA, 369 bp, Homo sapiens
  source 1..369: mol_type = other DNA
gagtctcagctgttgcgcattgcacacctgcaaattactcatcctataagctgcttattcagaaaactacagtaactttccaaataatttgttgacatgtccaaggaaatctacatatagaacttttgccacggaaactattgacactcctggccaaatcattttttaaaaataattccaggggagtccaggtcccatgctggcagaagcggacccgggccgagggatcagccctcccacttccagcggaggagcccttcgcctagcctccagcccggggcgaagtcctccaggcccgcgggggcgcccgcaggctccgcccccccgcccctgctccgcccatcgcgcggcggccccgggggcgagagg

SEQ ID NO: 13169 - DNA, 250 bp, Homo sapiens
  source 1..250: mol_type = other DNA
tatttgaaacaatattttcatgaccttgatataagtgtctgctcctcaaagatatttcgaatacatatatttaacaattttgtatcctgaataaataactctgcaaatgtcattaattatatgggaaattaaaattaaaaccacaataatataccattggagaactgggtacacaggtgtacactttcaattgcacactcagattgtgtgcattttactgtgtccccgggcttcctcggtgcggagggaa

SEQ ID NO: 13170 - DNA, 268 bp, Homo sapiens
  source 1..268: mol_type = other DNA
aacaaaattattttgagatagtagaaacaatattttcatgaccttgatataagtgtctgctcctcaaagatatttcgaatacatatatttaacaattttgtatcctgaataaataactctgcaaatgtcattaattatatgggaaattaaaattaaaaccacaataatataccattggagaactgggtacacaggtgtacactttcaattgcacactcagattgtgtgcattttactgtgtccccgggcttcctcggtgcggagggaa

SEQ ID NO: 13171 - DNA, 362 bp, Homo sapiens
  source 1..362: mol_type = other DNA
agcaacaagtgtttgttgcgcgcgtgagacccgtcacatttgcagttatcttaaaagagttttagaggggatcccctggtgttgcttccgggaggcgtactaaagataatttcctaagtttccgcagagtttggtggggagggtcgcgctgccctcctccggggtctggagcggcgggggaggggccgcatttgggccggtgcgctgagccccgcccccgaggccggcgtccatctgctgcgcatgcagccctttgcgtcacaggggtcgcagccgccgctggggtctccgctgtctcgcgaggagggtgaagcgcccccgcctgctcccgcttcggagggtaggcggagaagtcgccgggt

SEQ ID NO: 13172 - DNA, 416 bp, Homo sapiens
  source 1..416: mol_type = other DNA
cacaataaacaaatgtaagaacagcaattccatgcacttttgttttcgggctcctgtagtcccagctactgcggaggctgaggcaaaaaaaaagctttccgaatcatttttgaagaatttagaaacttgattgaaaagcttattccaactatgatctgacactcaagactgtcagatttaggttgtgttaattttgtcatgagaatgtaaaatactaaaatctctaagtgaaaaatttgcatactagtgcttgttataaaggataatgcaaaaataaacttgggaactttgcattatgaattttatttttatatctacataagcatgagggaaagaactgtattttcagataattaaatccagaagagttacaaattttcattcccagacaccatcccgatcgtatcctccaggaa

SEQ ID NO: 13173 - DNA, 426 bp, Homo sapiens
  source 1..426: mol_type = other DNA
gtcgtttgtgctaagtgaaatgggccagtttcccaaaaaataggaaattcccttaagtctgagtcagaagtttaaagttcagctgatcagaacactcattctactttatagaatgaggtgttttttgattctagaatcacgaataagagtcaattaagatttttaaactaattcgttgtaatgctgtcttttgactgttgtactacaatttattcaagcagtcctttatttaggaatttgggggtaatttccaatatttcaccacacgtatttttgggtgaaagcatgaattcatctatgcaattttgctacctgtacagatggagggacagatgagacagctgcccagggcactagtccccacccggtcctaatttggtcgggtgtgcatgcccacacactgctttcctcgcgaggactggtaat

SEQ ID NO: 13174 - DNA, 824 bp, Homo sapiens
  source 1..824: mol_type = other DNA
cttgccccccggggccagaggaatccatctgcccctgcctaccagagcgggaggaacgcaggctctcaatgcctgcttcgggtggtggtcctgaccggtcaaggccccttctcctcgtgaactgggggccagggagcccttctccctgtccccccggcaccacagcgctccaaggtcaccctctcccgagcctggagctggaaagccacggggactccggggactcccccaaggcccggactccactccgcctgggcgctggttctgtgcgctcccgcggcgcagtcgctccgctgcaagagcgctttcgcgcgccgccaccgcccagagccgggccaagcagtcctcgggcaccggctccccgagggacacacacccccccgcgccccgagtcgaggggttgagagaagggcggtcggggagcccctgggcctgccgtcagtcacccggattgaagggtgcgggtcccggagggacatctccagctggcacctaactcctcggatcccggactgggagcccgagctcggatattgcaacggctgccccgtgggcaaaccgaccctggtttccgactccggccactggcagcctcgcgccccagacccttcccgggcacggaagcgggtcaggtcgccctgctcagcctccggaacggcggcggcacaaaccccggccgctcccagcagccccgacgagaccccgggcagcgcctgccgccgggtggcctccctctggggctgaccccctcgcgcccccgcgcgtctgtctgcgctgagcctgctctgacagtgatgtaacaaggccaggctcgcgccgcgtcc

SEQ ID NO: 13175 - DNA, 279 bp, Homo sapiens
  source 1..279: mol_type = other DNA
aatatacctaacatagccagaaagaatttttgccagtgtgttgtacttgagaaaaattataaactatacttaaatgcctttgaataactgcaatatgattcttagggaactttctggaattgctgtaaaaaatcagtacacgcattcctccctgcacaaaggagaaaggtgctacagcaggttgtctgcagcagaatgtcacccaattcagagactgtgaggcagttcgcgatacgccggcctctgacgtcatcccgcagcgccggaagcggtgaggca

SEQ ID NO: 13176 - DNA, 444 bp, Homo sapiens
  source 1..444: mol_type = other DNA
tgtgaagtgaggtcaaataattaaacaaattgttttagtcagacactcttgcggctactctgtatttagctcagtcccagacacactgagctcaatctgcacgagggcagcttcacaatttgattaattatgccgccttggaccacgcgtgaaaaacagcaagacccaaggcctatgctattggtctggggactaggctcgtcccgccctcgcgggcccaggcggccaccccacaggtttgggaaccctaggacttgcagtgctcctgggccatgccccccggagacttccgcactctcaggctcgctgagccacgagcgccgggagctttcggcgcagctcctcccgacccgtgcgcccccgcgccgttgcccaggtaacggcggggcggtggcagcggccgagaagggcgggacttccggcgggtgacgcgcccgggttcgg

SEQ ID NO: 13177 - DNA, 250 bp, Homo sapiens
  source 1..250: mol_type = other DNA
aaaaaaagcaatctttccaaaccagtgctctcaccgcatccacgtgaaacgatgcccaggctggtctcgaactcgcgcgctgggagtacaggcgcgagccaccgcgctccgccccagcggggtgcaatggcgcgatctcgctgcctcaggctcccgagtaggggcgggcaggggcataaactccgccctctgacagcccctgagggtatctccagagcgggagccagacgccccaagcggaagtgacgtt

SEQ ID NO: 13178 - DNA, 355 bp, Homo sapiens
  source 1..355: mol_type = other DNA
aaacaggtccccatttgaaccctttggactactggagaccagccagcttccagctggtggagcatgagcccagttttagactttattttgacttatagtatttattttcttattgtggtaagaagcataaataatagaagggctttgacatcttaatatataataataggccaggtatgcacacctgcaatcccaacactttgggaagccgaggtgttttgtatgaattaactcatttaactctcataacttaaaattcatgttctgcaaaaagcacatagaattatgtgatttttttctctgctatcctgttagaagaaactggtctagtttaatagaaaataaaacgaacctt

SEQ ID NO: 13179 - DNA, 526 bp, Homo sapiens
  source 1..526: mol_type = other DNA
cagtgggtagcccagtgtagactgtgctggtctgagagccccttatagcccaaactttctttgccgcaggaccccccgttaagcagcggggtccagccggggccactcctcgcccggcgtcgacgccgcgctgcaggcccaggctcgcacccgagtcccttcgcaccccaggaagtggcgcggcctgtcgagggcggctcaacgcgaccgaagctccgccgcccggggaccccacgacggcgccccgcccgctgcccaccctcccgaggccccgcccagcgcgcccatcccgccacgggctgccccgcccccgcgcccggccccgcccccgccttcgccggggccccgcccctcccctctccgccggcgcctcgggcggcttctcgccgctccggggaggagtctccagccgctcgcccgcccccgctccgggccctcccctagtcgccgctgtggggcagcgcctggcgggcggcccgcgggcgggtcgcctcccctcctgtagcccacacccttcttaaagcgg

SEQ ID NO: 13180 - DNA, 380 bp, Homo sapiens
  source 1..380: mol_type = other DNA
gacagtgggtagcccagtgtagactgtgctggtctgagagccccttatagcccaaactttctttgccgcaggaccccccgttaagcagcggggtccagccggggccactcctcgcccggcgtcgacgccgcgctgcaggcccaggctcgcacccgagtcccttcgcaccccaggaagtggcgcggcctgtcgagggcggctcaacgcgaccgaagctccgccgcccggggaccccacgacggcgccccgcccgctgcccaccctcccgaggccccgcccagcgcgcccatcccgccacgggctgccccgcccccgcgcccggccccgcccccgccttcgccggggccccgcccctcccctctccgccggcgcctcgggcg

SEQ ID NO: 13181 - DNA, 410 bp, Homo sapiens
  source 1..410: mol_type = other DNA
aggtgcctgtaatcctagctactcaggaggctgagcaggagaatcgcttgaacccaggaggcaggggttgcagccagccgagatcgcgccaggcaagtgtgagactcgcaaagcaagaaggcatcttccttttaattgttagttgtgcccactttgcggtacaaaaaaataagtgaaataaaagtaagtaaaaatgatcatttctgcttacgtttacagctcatttcatattctgcaaaattccacttcgtgcatgggtgatctgaggcccagttggttgctggaggcactggcaaaggaatccagggattggagtcagctttgcaagttgtccaaactttttgtcactctggaagcgtgcaaagattaactctggtctctccagattaggagagcggcactataaatag

SEQ ID NO: 13182 - DNA, 168 bp, Homo sapiens
  source 1..168: mol_type = other DNA
ggcacatgaaatgggccagtgccaagtgaaaatgttgacctaggatatcaagctgagtcctgcccaccgtgccaatgcagtcagtcaggctgggcggcggagccactcacttccgggcgcaagcgcaatatgccgctctcgagggcggggccggcaggccggggcggg

SEQ ID NO: 13183 - DNA, 432 bp, Homo sapiens
  source 1..432: mol_type = other DNA
ccacagaccccgccgggctttcgggacctgcatggagcccacctggcgcccgacactcactgtgggtgacagtcacggtgagccccgggtcaactcctcgctccgggtcgagcggcgccgccgcggcctgcgagcgccggcggcggcgcccctggtgggtcggtcatgcccgctggcagtactccgggcaggtggacgcccagagggaggcggaccacgctgggccgggggctccgactggcgcggctcccggcctggccgaagggcgcgcagccgggaacccagccgctcccggtcgcctcgcggtctccgcgcccccccgcgctgagccaggcccgaccgcccagcgatggaagctgagcgcggccccgccccggcctgccggccccgccctcgagagcggcatattgcgcttgcgcccggaagtgagtg

SEQ ID NO: 13184 - DNA, 263 bp, Homo sapiens
  source 1..263: mol_type = other DNA
gacagggttgtgccttacccggttcccctaccctgggaagccagacgcaggacaggctgcccaccctgtccatgatactgagccaggcgtggtggctcgcctgtaagccaagatggtggctccgcctgtagttccagctaccggaaggctgagccatgatcacgcgtctatctgacgtcacgaacgcgccacacaggctgcgcaacctctgtggccgtctacacggcgcgcagatgcgaatattctcgcggcgccggaagtcc

SEQ ID NO: 13185 - DNA, 255 bp, Homo sapiens
  source 1..255: mol_type = other DNA
gcgtgagccaccgggcccagccccaagtgccaggcccacaaatacttattgcacatctactatgtgcctggactgaagatacaccaggaagtagatccagtccttcctaacctggcgcttgtttcagcgctcagtgctgtttatagagctcacacctcacactgttgccaggccctggcctgtgatttttactggtccagtcccaactagaaggggcatggcctggccatcctgggttacctattaactcagctg

SEQ ID NO: 13186 - DNA, 473 bp, Homo sapiens
  source 1..473: mol_type = other DNA
ggaagttgtctgcagaccagaaacttgtgtctcagcactgggtttgagacccagtcaggccttggctccaaaagtcctctgggactgctgctggcccccagggtcctcggtcccggagctcccacaccgctgagccccgagcccgatgtcccgatccagctctgggtccttcccgaggacaggtggactgctcctcagactaggggccctcggagggccaggcctgggcttctacctcagactgggggcccctgaggactgggcctgaggggggttccctgaggactgacccagggcctgctctccccagcgctgggggctcagaggcctcttcagccttccccagggctggggctcagggagggcttcctcaggcgctggccccagagtcaggctgggacaggcctttcctctgggactgagaggcccagagtgcccacccagagccttggttcaagtggcacgcagcgctc

SEQ ID NO: 13187 - DNA, 414 bp, Homo sapiens
  source 1..414: mol_type = other DNA
gctggatcagctggcagagctgggcaccctaagcctgtggtgacggcagcagcttccctaaccttatccctaagctcccggctgcaggccagggtggttccactgtcctaaccccaccccacaggccacacaggcaggctgggagcagtgagtggcaggtgggcactcagtattgctttctcttaccccctctgcaggcaggagggacgtgagggttgtggggtgagcacgtcagccccaactggtgtgttggcccctgccccggcacctggggcctggtgctgcctctccatgatctgagaaccttgccaggctgctgggtaacagattaggggttcagacctcctggggaccctgctgctggagtgagctgccatgaactccagcctgagcccgggaaccagctcagatctt

SEQ ID NO: 13188 - DNA, 277 bp, Homo sapiens
  source 1..277: mol_type = other DNA
cagcccactttggaggagctcatgtttcttaaaattcagatcttcagtgtgtgtgtgcacccaagcaaatgcacttagtgtcttttattattattattattattatttttgagaccaggctggagtgcaatggtgtgatctcagctcactgcaacccctgacctcaggtgatccacctgccttggtgccagtgtgtgaccctcagatctctcagtgtactttgagtacacctccatgtactcagtaaacctagggagaagagggactactccaccca

SEQ ID NO: 13189 - DNA, 364 bp, Homo sapiens
  source 1..364: mol_type = other DNA
agactccgtctaaaaaagagacagactcttccgcaacgtgtgacaagctacctagccatgttcaacaggcatgtacatccgccatgtgtagacacagctgtggacatagctggccacacacgacgtgctcatagcacatctgtcctgacagaagagacagtgttctttctgacaggtctcctcctgcccgcaaggaagtggggtgatcacagggcgcaggtggtctccacccggcgtccgcaccagcctcccagccgaggtggggcgggggcgagggggcgcgcactcctcggcgctccgggactgcagggcggggctgcagggcgggcggggcccgtgtctccagcgctcctataaagggagc

SEQ ID NO: 13190 - DNA, 373 bp, Homo sapiens
  source 1..373: mol_type = other DNA
atatgtaaatacataggtaaagataaacttaagtgaatctaggtgaagagtatatgcgcattcattatattattcttgcaacatttgttttaaatttttaatagtttaaaaataggccgggagcctgtaatcccagtaatcccagctcctcaggaggctgaggcacgagaatcgctcgtgccactgcactccagccaaataaataaataaataaataaataaataaataaataaataaataaaaataactaaattacttgaaattgtaataagctaagtaataatttgttaactgataaccctaatgggcgggccttgagactgcccggccaatggcaagcgagtaatcgactgataatccaatagctctgga

SEQ ID NO: 13191 - DNA, 317 bp, Homo sapiens
  source 1..317: mol_type = other DNA
tttacaaacccaccaattagctggacacagagcactgattggtgcagtgtgtttacaaactagcttagctggacacagagcactgattggtgtattttcacagagtgctgattggtgtgtttacaaacctttagctagacacagcagcaggaagcccccttctccgggacagggacactgtgcccacctgtcagatctgttatcagatgggaacgtggcagatttgtcagcctgtgctcgggcccgcctcccaggccctgcgatctctttgcatcccaggaggtcccggttggttgcagtcctcctgggtgactcag

SEQ ID NO: 13192 - DNA, 430 bp, Homo sapiens
  source 1..430: mol_type = other DNA
ttagctggacacagagcactgattggtgtattttcacagagtgctgattggtgtgtttacaaacctttagctagacacagcagcaggaagcccccttctccgggacagggacactgtgcccacctgtcagatctgttatcagatgggaacgtggcagatttgtcagcctgtgctcgggcccgcctcccaggccctgcgatctctttgcatcccaggaggtcccggttggttgcagtcctcctgggtgactcaggaaccagcctctcctgaagcacacagcctagggagttcctggggccagagacatctccaaggggacctgacgacagatgccccgcacgctggccgggaccgggaagggcggcggctgccaggcctggcagagtggagcggggcggggcgcagcggggcggggcgggcctggagctgc

SEQ ID NO: 13193 - DNA, 253 bp, Homo sapiens
  source 1..253: mol_type = other DNA
agatcagatggtaacccagatttaccatggtccactggttcaggctgtcagccctgagcaggtgagtctccttttaagccttggtaggaaggacccagaatcctatggaatacccaaattgtgcacagtgactgcaaagaagcatattcatattcacaaagccaagcttggaaagcgaaatagccagtctccctctctgctctcagaaggcaagtttccttatcatgtgctgatgcaagaccctggcaagggg

SEQ ID NO: 13194 - DNA, 262 bp, Homo sapiens
  source 1..262: mol_type = other DNA
agaacagtgcagtctactaataaacaatgtctttctgtggaattccagttcctgtctgaataagaggggctgcattcactaggatactccctcttctctgaggggagctctaattccagtagagttcggtctaggatgttttaaaacactgagacctcgtcttttacaggaaaattgtgtagagtgactccattccaaagagtaacattgctaatcatgttgctattgatgtgatgaaatggcatttctctacaaaatactt

SEQ ID NO: 13195 - DNA, 351 bp, Homo sapiens
  source 1..351: mol_type = other DNA
atggctgtgcacatagagtgagctataatcactctactgtactccagcctggagagtaatacagctaaatcacatttaatcattacaattgcttgtgttgggtataattaatccccttttacagaagctgattaaacagccgggtgtggaggcagtgggccatgatcgcgccactgtgctacagcctgggtgacagagcaggttggaaccaagatctgtctagttccgaaactgtgaactctcacaatattctggcttttctaggaaatgttaggcagttatcctaggacatgccttcctaggagaaaggagtactgtattctgtagggaactttgacccctaagttcaac

SEQ ID NO: 13196 - DNA, 593 bp, Homo sapiens
  source 1..593: mol_type = other DNA
gtggaactgccgcacccagggtgagtaacgtgccaaagggcacacttgcctgtgggctggcctgcgggaaggtctgttcccacccacggggaggggcctgcagcgaccaggcccgtcccaggatggctgcggaggcccctggatccacagtggggagggccccgagagccgggagacctgggttcccttcccgggcacgctgcggcgtccacgcactggggccacggcaatccctgcgcccgcccttggtcccctgggcgggggacacgcgccagcgtcacaaagcgccgcgaccgcgcgggaggggagggaggggcacgcgcacgcgcgtcgggccgccagccgctgagagccgcccagcacccggcgtgcgcccctgctcccgcggcgcgaggcgctcccgcgcagcccccgccgccaccgccgcgagacccccgcacgcccgcgcgccctccggcccctgcggcccccgaagagaacgagagggcgagcgagcgcggcgttcccgggccggcccggccccctcccttcactccccccccccaagttgaggccccctccgggggggggaggcccgggaccgggacccgtag

SEQ ID NO: 13197 - DNA, 360 bp, Homo sapiens
  source 1..360: mol_type = other DNA
ttgagccagctctaactggactggcaagccagttcagaatacagcgtgatgactacttcataaagcacaaaagaccatgtggtttagatgggctacccggtgggaaagtctggccacactgccctgacttcctgactggacttcacctcgagggtgggagcggttcctgccccccacccccccacccccctgtccagcccttggagccagggctaaccgggttaaggcctgcactagggaggattccttcccccagcagcacggataggcgggctggggtcggaggtcggcggccagaagccagattcccttgtggcctggcggcggccggtccgtggcgacgctatccgaagtgcggct

SEQ ID NO: 13198 - DNA, 271 bp, Homo sapiens
  source 1..271: mol_type = other DNA
ctgaggccaccagcctgggcaacatggtgagaccccgtctctccatatatatatataaaataataaaaattatcatagtccaagctactcagaaggctgaggtgggatgttgcagggttgcagtgcgccaacatcgcgccactgcactccagctggtttaaacccgaaggaagacttagaggtcacctttgttttgtgcagtggcgcgatcacggctaccgcagcctggtccgggcgtgtggagcgcggcgccatgacgtcagacgcccaa

SEQ ID NO: 13199 - DNA, 430 bp, Homo sapiens
  source 1..430: mol_type = other DNA
tgtcatttgagaacagagattttttaaatgtatttcatacattcaggtaagtaacagtgtcttataagaagtttttgtctaagaatttttgcttaatctaaggtcagaaagatgttctcttcttgaagttttatactttgtctatgattcattttgaattaattatatatgacgtcatatggatggaattgcacatagatatctattttagcactttttgttgaaaagattaccctttctaaaatattttgtccatgtctatatttggacctgttccagtatcacactatcttgataattgtagctttataataaattttgaaaccagaaaagaaagtttcccaaagttgttacgactgtagagccttggagtgcaatggcgcgatcgattcttcagctcccgagtagctgggcctcaggtgatccacct

SEQ ID NO: 13200 - DNA, 464 bp, Homo sapiens
  source 1..464: mol_type = other DNA
agaggaatccaatctatttcttgtaaattaaattcaactcaacaaatatttcctgaaaatctactatgtgcaagacatcttcaaaattttatgtcaggcttatcggttcaaaagcaagaaggctttgggactcaagagtttagtctcccactcagccgacgtcacgcgcacccgtgtccgcgggcaggcgccacggttccggactgccctgtctgagacccgggagccaccggcggcggccaggccgcatctccatggcaacgccgccaagcgccagttcgaacgcccgcgctgtggcccgcgcgtcgccagtcccgcaccgcccaccaatgggcatccaaggaatcggttgacgttcgttgacttctcctctggaagaccaatcagagtcaatttccgaccttcagccaatcgttccgcttgagggaagcacctttgaggcgggtcgaagatccttctgccga

SEQ ID NO: 13201 - DNA, 430 bp, Homo sapiens
  source 1..430: mol_type = other DNA
cttgcccagcccccggggagaggggcatggcggggcacacccactttcccgcagcaaccggtcttctcagtccctgacctcggacaccgctggtttggtccggtgggaaccgacagcttggactcgcggcgggttggaactacagctccctccgtggggccctcgattggaagcaattccgccaccacttttccgttataccgatatggcgtcccagcaggcctggggccgagccccgcccgcttgcgggttagcagtggcccaggaggggcgggcccgccggcgggagtcggagccgcggggcgcaggacgggctgaggggcggggccacagatccgcgcagggctggactctgaggcccgagacgcgtggccgaggaaccccagggcgggacccgaggaggggctgtgccctgccagacagagccccg

SEQ ID NO: 13202 - DNA, 209 bp, Homo sapiens
  source 1..209: mol_type = other DNA
ccattttttagttgaaaaagtggctctcaatctctggggattgggtgccctgggctccaatccctggctcctctgtgatactggggctagccaaggagtcagtgatacaatgactcctttgtgatgtgagcacagacggttaacttcctcaagaatcaatctttcaggttgatgtaaaagcgttgcccggtgacagccgccaacacaga

SEQ ID NO: 13203 - DNA, 369 bp, Homo sapiens
  source 1..369: mol_type = other DNA
tgtggccctgagactagttccctggcaggcaagggcttccaactgaggcagtggaggggtgtggctccctccttccctgtctgggaggttggagggaagaatctaggccttagcttgcataatatttttttaacattttcattgaccatcatccttggttgtgtatcgtgtaacacaaataatgatattaaaagcacctccctggggtggtgggttcccaggcatgccactgacctgctgcatgaccctgggtgagtcaaagatctccagaggccctctgaactcttagaaagggagggaattagacctcctcaccttcccagatggggctgagccaggtgatatcacaatgggcagtgcccatcctgg

SEQ ID NO: 13204 - DNA, 562 bp, Homo sapiens
  source 1..562: mol_type = other DNA
gagtgcggaggcttctcccccggctgtgtgtcctcggggcgggaggcatgggcctgggctcccggcagggtccatccccggtcaaggaagcccctttcccccgcgcgagggggtgaccgggagggggagaggcggagccggctggcttcttctgctcgcgttcctctcacggcgacgccggagggaggaccccgagagttgcatcccgggggtgagtgcgcgcccagccgccctaggggagcgggccgagtggcgcgcgcgcgtttgcgagacccgcggccggggctgcgcgtgaagcacggggaccacagccgtcttgagggcgcgcccgagaagcgagggggccacgcgtgccagtgcgctgggcgagtgggagtgggggctcacaggcccgcgcagggcgagcggaccgcgtgtgccaggagcgagagcgtgccaaggcgggggcgcgcggggcccgtggcggggaggggtcgtggcgcgcggccgcggaggcgcgggggaggggagcgagggcgcgcgcggccgagcgggcgcccgcggtcacatgggcgagagaccg

SEQ ID NO: 13205 - DNA, 715 bp, Homo sapiens
  source 1..715: mol_type = other DNA
atcccagacccctgggcctgccgccggcggtgccccatggcagttccctcgccagtccctgctatgggcctccccatccgacggtgccctgcttccaccgacggtgccccggccttggcctgcccgccgcccgccccctcaccagcggctgcatctccgagtgcgcggtgggcacctggaaccggtcgatctcctccatcatggtgccggcgggcgagcgggccaggggccgggcgcggccgcggacgccgacaggaccgcgcggggcggcggccccaggagcccggcgggtggtgcagactaggcctccccggaccactcgggcgggcaggggccgggcggatgcagggtcgcagactggctgaggccggcgtgactccgtgggcttgcctagcactaccgcggctgtggccgggccgagccgcaggtcttgcctcgcctcctactccgctgccgcctcctgtcagcagctcagccactgcggtgactcggcaactccacttccgggtccgggacaccgcccggatcttgcattattcatgaggaggcggtgcctggggaccccagccccacccacatgcgggagttccgaatgcgcgcggccgcccagctgtgattcctgagggggcggggcttagtggagactcgctcgccgcgcgcccaaccccgcctcctttccgggccggctgggcgcgccgaagcgcctgcgccttgg

SEQ ID NO: 13206 - DNA, 513 bp, Homo sapiens
  source 1..513: mol_type = other DNA
cgctcgaggccgctgggtcccgcgccgggaggagctgctgacacgcctggacagaggtccgacgtgcgcgaccccggactcccagtgcggatcttgtccccgcagccgtggactgctgctctgccgacagcagcctctgcgtccccgggggccgagggggacgttggaccgggacagaattcccgactgctccgcccctccccggccggattagagcgccgaggccggtcagccccctggggaggagcggcccccggtgtaccgaaccttgccagggcctagagcttcgccgcaggggcaggggcaagtcctgctctcccggtctgcggcacgggaagcaggaggccggcggcccagagagcccgtgggcggctgtgcgctgaccctcagcggggcgcagctcccgacccctgccagttgtaggggcaaggatgtgaggaaacatggagacatttccctcccttctcctcgccctcagccctagagcagctccccggaggggcagggcccagg

SEQ ID NO: 13207 - DNA, 394 bp, Homo sapiens
  source 1..394: mol_type = other DNA
gcatgttgagaaacagattggcaccgtagtccaccaaatgtttggcccattggccgccccgcctctggttcattaatgtaacaaatcatttaacaaatggctccgtgggcacccccgccccctcagcccccagactccgcggcaggtgtcgtcaggggctgtggccccccccgtggtccgccagcgcccacaggatgaggtcagggaactgtcctgcctccctccggggcgtaacagcggaggctgcgctcgtgttcccatccccgctgggactggtccggggcgctctggccagcgggttgtttccgcggcggagatgcctcggggcccgtccctcacgccccgcccctcacgccccgccccctcggggcgtgcgcggccccgcggccttagt

SEQ ID NO: 13208 - DNA, 316 bp, Homo sapiens
  source 1..316: mol_type = other DNA
tctatctccagactggagctgagcttcgagacactcaactcattttgtgccgcagaacagagaagggggctggcatgccccttctgcgagcgcccaccctggggctcctaaaggcgggccttaacaatcgtccgggctcgtctgcttcaccagccagtgagctcgggcgagcccgtccattctgggtctcactatctgtagagtggcgctagctaggtcagacctcgccgctgggcgacttggccccgcccccttgccaagggcggtgccaaggtgcccgggccgctccgattggtcagggcgagccgtaccacgg

SEQ ID NO: 13209 - DNA, 210 bp, Homo sapiens
  source 1..210: mol_type = other DNA
tcccagccccatgaggggggaggagcccactctgggacccagccctgggaggggacgacacctcccatgccatgtggacttaaaaccaaagtttcttttgatgttacaaacagcctgagcaagttacttaatcaactgaaccttagaagactccaaaagtttcttccggcactgaagggctgaatcatggcgtcacttcctgcataaagg

SEQ ID NO: 13210 - DNA, 416 bp, Homo sapiens
  source 1..416: mol_type = other DNA
agtctgctctgtcgccaggctagagtgcatgggcacaatcgaggtccgcctgccttggtctcccaaagtgttgggattgtcttggtgtgtgtatgaaaaagagagagagagaaaaagagaatatggttacttagccctttttcccaaatctgtttcctgcgctacagccactgagcaggtgactgaggcgctgttgatcccttactcatgtaagctcaggcagggcagaggccatgcctgacatgtgcatcccaatgctttacacagcctaggtgcctagcacatgctagaatattaatgaatgattgcagcaagcaagtcctgtaggcatcctggagcccaaggattctgcagtcacagctgttctgagccccgcccccaggtggcagggcagcccagtcagtcagtcacgtgct

SEQ ID NO: 13211 - DNA, 618 bp, Homo sapiens
  source 1..618: mol_type = other DNA
atatggttacttagccctttttcccaaatctgtttcctgcgctacagccactgagcaggtgactgaggcgctgttgatcccttactcatgtaagctcaggcagggcagaggccatgcctgacatgtgcatcccaatgctttacacagcctaggtgcctagcacatgctagaatattaatgaatgattgcagcaagcaagtcctgtaggcatcctggagcccaaggattctgcagtcacagctgttctgagccccgcccccaggtggcagggcagcccagtcagtcagtcacgtgctggaaccgatcctcagcaacgccagcaggcgtcagaggcggacgccgcagcagcaaccttccgggcaaacggtaactgcaccgcggcagggactcgctggggcgcggagccgagccctccccttccttaggaagctttcgtcccctccgaaggaggcgtacagtctgcaggcctgtacgagcagcaggccaattggcgctgggaaagtccaatcctgggcctctagctcctgagcgggacagggccgagagggcgctcccgagcttgggcctgctggtgtgagacccaggagagagctagagagctctgaggactgatcttga

SEQ ID NO: 13212 - DNA, 415 bp, Homo sapiens
  source 1..415: mol_type = other DNA
tccccttccttaggaagctttcgtcccctccgaaggaggcgtacagtctgcaggcctgtacgagcagcaggccaattggcgctgggaaagtccaatcctgggcctctagctcctgagcgggacagggccgagagggcgctcccgagcttgggcctgctggtgtgagacccaggagagagctagagagctctgaggactgatcttgactgtctgcccgctgcaggatgagtgggtgctggtgcaccgcatgaagcggccctggcagggtcaagtggagccccagcttctgaagacagtgccccgccagagaggtaagcctgtagagccctgcatctgcaggctgggggggtccaggtaacctggactttcaaaccagagttggagattggggttcggccctgcccgtagcacagcc

SEQ ID NO: 13213 - DNA, 281 bp, Homo sapiens
  source 1..281: mol_type = other DNA
cctggcagggtcaagtggagccccagcttctgaagacagtgccccgccagagaggtaagcctgtagagccctgcatctgcaggctgggggggtccaggtaacctggactttcaaaccagagttggagattggggttcggccctgcccgtagcacagccaagccctgagatccgggctgttgttgatgcatgggcctcagtcacagaggagctgggtgcccagtacccttgggtcgccccttcccctggatgggcagggagggggagagctccgcctatctg

SEQ ID NO: 13214 - DNA, 338 bp, Homo sapiens
  source 1..338: mol_type = other DNA
ctctcagagtgacctggggtcaacgctgtgggaacaacagtctatgcaacacaggagacctgatgccactggtgtcctccaaatttcgttctttccccaggggaaccaagcctccagggtttttcttccctgagatcctggaggggaagtaccatatacggaagttttaaagtggggttttgcagttttcaaaccacaatatccagcactcaggcggagacccaggaatccagctccagactctgtcccaagcagcctcttcagtccgggacgggacaggaagtctccaatggttggcgcctgggcggagccacccccgctgcgggggcccagggcgg

SEQ ID NO: 13215 - DNA, 179 bp, Homo sapiens
  source 1..179: mol_type = other DNA
gggtctgccccggctaagagctccctgagagagggggctttggcaccaagggaccaaaggcagcacagccagctgtaccctaaggaaacaaaggcagctgtgtgaaaacacagggcatctctcactgacagggacggaggcctcttcccttcccagggccttgggtgggagggaaggag

SEQ ID NO: 13216 - DNA, 273 bp, Homo sapiens
  source 1..273: mol_type = other DNA
gcccacccccagcctctggcagcagccagggcatctgggccagaccaaggagccaggttcaggcgagaagcctggcagccagggctcagatccatgatgacacccttcccccagggtgataaggtctgcctaggttaatcagaggcagtgagcttttgttctgggccctaagcccaggactgaggtgtgtgtgtgtgtgtgtgtgtgcgcgcgcacgcacatgcaaagcacctcaggtcagttccttggagaggaagagccaggctttagcct

SEQ ID NO: 13217 - DNA, 159 bp, Homo sapiens
  source 1..159: mol_type = other DNA
ttgagtgcttgagtccaatgtcttcaacaagtcagggctggatctggagaccctaggcccctgtattctctgaatggggctggcctcagccaagaaccctcctcagccagaaaaggcaagttggtgcttgcctgccctcaacctgtcagaatctgtgtg

SEQ ID NO: 13218 - DNA, 270 bp, Homo sapiens
  source 1..270: mol_type = other DNA
aaaacagtactggacttagtcccacgaatagtaaggagggcgggagtttaggctgcgctgacccctctcagccccccctaggccccggaggtggcaactgaggcttctcgggggcatcagcctcagattacctctgggcagcctcgtccggggctagggaatccctgattcaatcatgccgctcccccctcccgaggcggggcggagccttcctcgacggcgaggcaccgcggggcggagtctgtagggtcagctcctccccgccccgcc

SEQ ID NO: 13219 - DNA, 479 bp, Homo sapiens
  source 1..479: mol_type = other DNA
cttaaaatgttttagatatactccagcagagaagattcttcagacagctggcaaagtcctcgctccgaggaagggagtgaggggctttgacgtggaagggcacccttccagggagggacgccctgtcagtacggaacagagcgtgaggcagcggcggtggggctgcggcgggggaagccacgacccgagcgctggggagtaggacccaggccgctggaccatcaggcctcgcagaggctccagcttctgctccccggggtgcgccgagctgtggggcgacccgacactcggggcgggagctaccggattccccccgacagagactgagtcccgtccatgcccggggcgggtccgcggtatcgcagcctcctcacctccgctccctccgcggggcggggcggggcggggaggagctgaccctacagactccgccccgcggtgcctcgccgtcgaggaaggctccgccccgcctcgggagg

SEQ ID NO: 13220 - DNA, 269 bp, Homo sapiens
  source 1..269: mol_type = other DNA
ctcagagggcagacaaggtgcctgtctgagacggagtctcactctgtcacccaggctggagtgcagtggtgcgatctcagctcacagctggccaggctggtctacagtgcctgacacacaggtggtcattcagcaaatatttgttgattgaatgaatgtagcaaaaaaaaaaaaaggaagggcaatgaccctccggccattcagtgacttagccgaggccactcaactaggtacctcctcggcccaaaacagtactggacttagtccca

SEQ ID NO: 13221 - DNA, 418 bp, Homo sapiens
  source 1..418: mol_type = other DNA
ataccattactattattatgattaatgaatggatttaagagggaaatgttccccctccctctctccatcataaggatgggaagtgattccttgaaattttaagatttgtctgaatatgagctggtcttggttcccaggactgagaaaaggggggagatgtgggatgggggtcctgggcctcctcccaaggtacctggcttgccccaagggaaggactggttcctgggcaggcacagtgatgaccttggaggccaccccaggatctcatggttgtcctgagggtgccagggagccttcttcaccacgggagcacagttcctcactgtgggccccacctttgaccatcacttctgaaccccagcttcatggttgatgatgcaaatgccatcaatgggatgagggcaatccctctctctga

SEQ ID NO: 13222 - DNA, 235 bp, Homo sapiens
  source 1..235: mol_type = other DNA
tacgagcaaaatgtttatataccattgaaactaagttggtattattcaaactaggttgttatcagtttagaatgttaattataatcaccaaggtatccattaggaaaatcctgtggtcccagctcctcaagaggctgaggcccaggagctcaagactagcctgggctagacaaaccactgcactccagcctgggtgacagagttagacgaactcttacaatttaataatcagatt

SEQ ID NO: 13223 - DNA, 450 bp, Homo sapiens
  source 1..450: mol_type = other DNA
tttatatgatgatgttacaacctccttttccataagttagggggggacccccagactatatggaaggctcagtctgctttttagtgctagtttcacaacaagcaaaataaccatagtgtctcttgagaaataagcactaattttagaactaataagtactaattttagaactccatatattaatggtttctcagtggcaggactgagaagaaatcagaatacctgaatttcagcatgtgaatggtgtgaaaattaatgacaacatatttaaaccatttaatagaaatataccatacttgccttatatcctctattggtaaatcaaaaaaatgacatgcattatatttgaggtaaataaattgaatgcacaagaaaataaaggtattttaaaaatgtaagtgcaattaatataaattaaagggctctcgacatatcatttgcatatcttca

SEQ ID NO: 13224 - DNA, 674 bp, Homo sapiens
  source 1..674: mol_type = other DNA
aaaggtattttaaaaatgtaagtgcaattaatataaattaaagggctctcgacatatcatttgcatatcttcaggccagtgggaccctccggaggccagtggggtactgcaaaggtgagtgccccagtgccaggggtcgtgagcccggagccctgcgggggacggctggtaggccctgcggatggtcattctccccaccccgggcacgtgctggtggcggcatccacccggaccccgccttccccccacccaacccccggcgcggaacgcgagcggtgagcggccccagcgcccccaaggcgccccctccgggccgcctcctccgggcgggcactgtccttgccgcagtcggccgctggcgcagtccccgcgccgcagtgccgggcgctcgtggggggcgcccacgggcacctgggccgtctgctcatcggagccgtccgccgtcctccccccacggcgccccacgcccgcgcgcccgtcgccggtcacccgccgcccgcggagccgcgagggcgtctcctggaggcgcaagaggactgggcggggcggggcgcgcccaccggccggcccagggcacctcgcgcgggtgcacacgccgcagccccccggggcgggtgggtgtgctccggccgcgcgcgccgccgccgccgccgccgccgccgccgcctcctcag

SEQ ID NO: 13225 - DNA, 357 bp, Homo sapiens
  source 1..357: mol_type = other DNA
ttcctggaggcaccggcctgggcagagccatccgtttccctcgggggagaggtccggggggctctgaaacccggcaaagtgctgaccttttggccccggtccagggactacctgttctctccgtgggtacagttttcctttaaggctgcctagactgggattcgagcagtgacccgcccccgggctcgggtctgagtctcaggcaaagggcgagcgaggttgccgccctctgtctttttagatccacaccaatcactgcctggaatgtgtgcgcgtgtacaggggatgggcggctatcaccaagccgcgcgcggaggcggagccgtgggggcgggctcccggtcccgctatcggcgg

SEQ ID NO: 13226 - DNA, 550 bp, Homo sapiens
  source 1..550: mol_type = other DNA
tgggattcagtacccgcccccgggctcgggtctgagtctcaggcaaagggcgagcgaggttgccgccctctgtctttttagatccacaccaatcactgcctggaatgtgtgcgcgtgtacaggggatgggcggctatcaccaagccgcgcgcggaggcggagccgtgggggcgggctcccggtcccgctatcggcggccggcgggcaggcgactcctgtcccgggtggaggcggcggagccggagccgggggagggggcagcggctgtctcacggaccacggcggcgcccgcagctcctcaccggtgagggcgccaagccaggactcgggggtcccgggagcggggcgtcgtgaagccagggctcctgagggcccgtaggctctgctgccttggggatgcggggccccggggtctgcagggtgctcggagtcctagaccagggcttggctgtcacagggggcagccggaccggaccgcgcgggtgacatcacggccgagctccgctctgccccgcccatctgcgagggaggagactcccgtcagtgactt

SEQ ID NO: 13227 - DNA, 532 bp, Homo sapiens
  source 1..532: mol_type = other DNA
ggccattgtccctgcccacctagggccttgggccggttacaggcctcactcctggaaggacaccctgtacacctccctgctgtgaagcagtcagagctgtggctgccagcctagcgccaagtctcagaagggctgagaatggcttctggccatcccccaagctctctcttaacaaatgctcctgcaccaccttaaaagggactcagaggaatatgggatcctaaaccaatagtgtcgccccccctgctaatgagggagggaaacagcagtttccaaaggctgtgagtcaccctgtgatctgagtcacacgtgaggcttagcggggaggcctggggtctccgatggcagacaggactccagacacccattccctgactcagtctggctggccaggacagctggcggaagacccaggcctgttcccggtcctgggccactgccccagctgccctcagcctgggcaccatgcctgaggcgtggcgtaggagaccagatgctcaggtgacctcacccgtacactgaccttcgccag

SEQ ID NO: 13228 - DNA, 610 bp, Homo sapiens
  source 1..610: mol_type = other DNA
ataaagtaaattgatttattacggctaatttaagaatgttaacagaggtctttgaataaattttgcttctaagagatgttactatttattcctaataagatggagaggaaagtctttgaagaggaacctctactttactttttacctgtgtagtaagtaataatattattgtgctgggtaatcccagctactcagaggctgagatggaaggctctcttgagctcaggaggtcaagaagaataatatgccaggcaagatttgggaggccaaggcgggaggatccctatagagagatcctgtctctatgcctgtggtcccagctactcaggaggctgaggcaggaggtgagtcgtgatcacaccactgcactccagcctgggtgacacagtgagattctgtctcaaaataataacaataaatatctataaaataaagataatgatatctttattttatagataagaaaaatgaggcactgaaaaaattaagtagtttgagttttcatgatttaaggcagttcggtgctagaatccatgtacttaaccacaatgcctgaagcataattctgatcacccacatttcactgtgtgaagcatgaattgcctgataa

SEQ ID NO: 13229 - DNA, 258 bp, Homo sapiens
  source 1..258: mol_type = other DNA
gataggcctctcaggacacaggtacctgttacttagagacaggcaggtttctctcagagtaactttccaaattctagaaattcgactcgtcttagtcaaatgtgtatcaccaacagctgcctgttgactactaacagggacccctgttatttggggcccacttattataaggtattaatattaatgactaatacaagggtactccgccaattgacgtggcgataggcgtgtcgcatcactgaggcgggagccaggccg

SEQ ID NO: 13230 - DNA, 534 bp, Homo sapiens
  source 1..534: mol_type = other DNA
aacttttttttaaattgtacaagcttttagtgcttgtctaacaacttgttgccaaacccaaagacggagtctcactctgtcacccaggctggagtgcaatggcacactgcaagggttcaagcgattcttccgcctcagcctccggggtagctgggaatattcaatctccatttaatttgaaatagtgcaagtacagagcggcactgccagcagactacacgcggtagaaagccgaccttggtgagcgtgcctcgtctccagtttttctggaaacaccatccgccggggcggagctgttccgccccggtgcggtactacgactcccagcatgcacctcgcagtcggccctcggtggaagcgggaacccaggaggaccgagccacggactgtggggccgaaactcgctcccgcccaccctttctcgaggctgtggcctccgcgagagccgagcgggccgcaccgccggccgtgcgactgccccagtcagacacgaccccggcttctagcccgcctacgagtttcccgcgggaacta

SEQ ID NO: 13231 - DNA, 474 bp, Homo sapiens
  source 1..474: mol_type = other DNA
aaagtgctgggatcacaggcgtgagccacggcgcccggccccagcgttagtacaagagtttttaattttaataaagttaacttttttttaaattgtacaagcttttagtgcttgtctaacaacttgttgccaaacccaaagacggagtctcactctgtcacccaggctggagtgcaatggcacactgcaagggttcaagcgattcttccgcctcagcctccggggtagctgggaatattcaatctccatttaatttgaaatagtgcaagtacagagcggcactgccagcagactacacgcggtagaaagccgaccttggtgagcgtgcctcgtctccagtttttctggaaacaccatccgccggggcggagctgttccgccccggtgcggtactacgactcccagcatgcacctcgcagtcggccctcggtggaagcgggaacccaggaggaccgagccacggactgtggggcc

SEQ ID NO: 13232 - DNA, 412 bp, Homo sapiens
  source 1..412: mol_type = other DNA
ccgcgagtagctgggaaagtgctgggatcacaggcgtgagccacggcgcccggccccagcgttagtacaagagtttttaattttaataaagttaacttttttttaaattgtacaagcttttagtgcttgtctaacaacttgttgccaaacccaaagacggagtctcactctgtcacccaggctggagtgcaatggcacactgcaagggttcaagcgattcttccgcctcagcctccggggtagctgggaatattcaatctccatttaatttgaaatagtgcaagtacagagcggcactgccagcagactacacgcggtagaaagccgaccttggtgagcgtgcctcgtctccagtttttctggaaacaccatccgccggggcggagctgttccgccccggtgcggtactacg

SEQ ID NO: 13233 - DNA, 466 bp, Homo sapiens
  source 1..466: mol_type = other DNA
tgcaggtgagccagggtctcccgagaacctcaagggctaaccaaggtgctcagtaccgcggctagggtgcccagcgggaggctgggaggcagagccggtcgcacgcctgggtcccagcggaggcccagtcgactctcgacccgggccccagcctccttgcgtggcgaaggtcgtgcctcaggtctcctggcgaacctggccgcccggaagcggagagtgactcctccccttcgtcccctcggtgcccgccaggcggcgccgtcggctgggcccggattcccctgcggcttcgatccctttccactgggtattatgtacaggcagcattagcatttcctgcctgtacatgtgaacggatcctgattcagtagatctgggggttgcgtcagcctccccagtagctgagtcacctcaggtgatccgcccgatgcccagcctggaatcagggaccagaatatccactggt

SEQ ID NO: 13234 - DNA, 560 bp, Homo sapiens
  source 1..560: mol_type = other DNA
ccttaggtgatgggattacaggtgtgaaccactgggcccatgcttaattattcagtcgtaagatctcagttaagcaaaaaagggaaaataagtattatctccattttacagatgaggtaatgcctaatgataggattcaagtcaagtttgactccaaaactggggccagccccacgctcctggccaaacttccaccgaggtgccggcagatgccgacgggccacatctctgtgctgccaggtcgcaggcgccgccgccgccgcacttccgggtgccattgcaggtgagccagggtctcccgagaacctcaagggctaaccaaggtgctcagtaccgcggctagggtgcccagcgggaggctgggaggcagagccggtcgcacgcctgggtcccagcggaggcccagtcgactctcgacccgggccccagcctccttgcgtggcgaaggtcgtgcctcaggtctcctggcgaacctggccgcccggaagcggagagtgactcctccccttcgtcccctcggtgcccgccaggcggcgccgtcggctgggcccggattcccc

SEQ ID NO: 13235 - DNA, 365 bp, Homo sapiens
  source 1..365: mol_type = other DNA
gtcagtagcgccacgcctggctaaattttgtaatttttagtagagttgggggccagcccaggctggagtgcagtggtgcaatctcggctcactgcaaccggtatctgggatcacaggcgcccccttaggtgatgggattacaggtgtgaaccactgggcccatgcttaattattcagtcgtaagatctcagttaagcaaaaaagggaaaataagtattatctccattttacagatgaggtaatgcctaatgataggattcaagtcaagtttgactccaaaactggggccagccccacgctcctggccaaacttccaccgaggtgccggcagatgccgacgggccacatctctgtgctgccaggtc

SEQ ID NO: 13236 - DNA, 285 bp, Homo sapiens
  source 1..285: mol_type = other DNA
gctgggactcagccctttctaccagagaggcaacaggcctgggcccatgaggtcttaggctagtccctgctagaagctgaactctgaattgtagatcaggattctaatactgccatatgatggaggggactgtatttaagaccgggcataacaaaccttccaggcaatattaggcccagtttccatggcaacgggattggggtcagtccccagtgggagtcctgggcacaacaagtcgcgaaaaatagcctccattttggccatcaggccggggatcttcgggga

SEQ ID NO: 13237 - DNA, 467 bp, Homo sapiens
  source 1..467: mol_type = other DNA
atggggttgagctccatcacaagagttgggctcatttcccccattctgggcacatgggcctgtgagtagaaagagccctgagatgtatccctatcttaggaacccgtggggctcccaggcctgaggaagcttcctgggctccagctctgaagagagggttgtcaaaccgtatctagccctcgggcttcctattaaccgtcctggaggaaggcctacgcctttgaatgggtaagcctacccccttatggaccaataggcgtgtgcctcttggagggggcgtgcctcgcacttgaggtcgcggggaggctggctaggggggcgtggcggccgtggccgccgcggcgcgggtggtggggcactgggcggggcgggcggccccatcagctgcagtggagtcggcggcgcggagccggggcggccccggggagggaccgtcgcagggaggggcgcggcagcggctggggggc

SEQ ID NO: 13238 - DNA, 386 bp, Homo sapiens
  source 1..386: mol_type = other DNA
aatagggctggggcccagtgactcatggggttgagctccatcacaagagttgggctcatttcccccattctgggcacatgggcctgtgagtagaaagagccctgagatgtatccctatcttaggaacccgtggggctcccaggcctgaggaagcttcctgggctccagctctgaagagagggttgtcaaaccgtatctagccctcgggcttcctattaaccgtcctggaggaaggcctacgcctttgaatgggtaagcctacccccttatggaccaataggcgtgtgcctcttggagggggcgtgcctcgcacttgaggtcgcggggaggctggctaggggggcgtggcggccgtggccgccgcggcgcgggtggtggggcactgg

SEQ ID NO: 13239 - DNA, 336 bp, Homo sapiens
  source 1..336: mol_type = other DNA
ctgctttcccagggtacactgaggcctggaacaccaaggcctggcctgtaagtttttattaaggcaagtaggctcttacattgatacactgtaattttgacaagggcattgaaaatttccttaaccctgttcctttgtctcccaagtctaggactgagggactagggggaagaggaaggagcctctttttactatctagtcctcagggccctggggggtccacagcacatgcttctgtgaaggacgggttacctctagagtaccctctagaaagtctggtcatttaaagaataggagctggggcccagtgactcatggggttgagctccatcacaa

SEQ ID NO: 13240 - DNA, 188 bp, Homo sapiens
  source 1..188: mol_type = other DNA
agttccggcggcagctcacaccggtgagccccaacccggctcagagccctcaggctggtggctttggccctctgatccgctccgctcaggctagcagcctgccggccgaggccccgcccctgaagccgcacgtggccggggtgggacctcaggcgccaccgccaatccttctgccaggctggagctag

SEQ ID NO: 13241 - DNA, 531 bp, Homo sapiens
  source 1..531: mol_type = other DNA
ttggaaggatgccttccctcgtcatggaagcaggaaaacttgccttccttgttggaagcaagtaaaactccaaaataataataataataataataataataataataatagagggagttgtacaacaaaatgaactttagatctcgaccaaattttgggaaccaagcatggataggagatttgtcaaagatcagaggtatctccactcttcattcagtaaatatttacggactgataggtctccagacatactttaagttttgtctagttgctaaacaaaacttaactttgctgtggttaacttaaaattacaggctgtcagccgctagactctaagaaagtccagtggaaatccttcaatgaaaagaattgctccctgcagtaagcctgattagtgcttccttcaagaaagaaaggaggaaggggaccccgcctcctacgtgctcgcgggggggggcggggtcggtggggggcggggcaccacgggttggctccgcccaggcgctcgcgcggatcccgggtggaatgacg

SEQ ID NO: 13242 - DNA, 505 bp, Homo sapiens
  source 1..505: mol_type = other DNA
agtgagtcccacaagatctgatgattttataagaaaaggatcccccacacatccggccctgaagggcagggggcgcggggttccgaaccctggctcactccaccccagtggttctgagtcggtactgggaagccagcgttgagaaccgccgcctcaggcgaagctgggactcacacccaccggccctggaggcccgcggaaggtttccctgggttccagcacccgggagccgcgcgtcgccaggcaccaccccgcgggggcgggcgcgggccgcagaagattgggccacggcggaagcctctccgctcctctgcgcgtgactcggctgcgcccatcgctgcgggagccggggagggggcgagcaccttaggccgggcggaccgaaccaacgcgccgcccggaggggcggcctgagggcaacccagatcggaccatcgcgccacgccgacaggggccggcctttccaacccgcccggagggaggggccgccggcgcctctagcctg

SEQ ID NO: 13243 - DNA, 377 bp, Homo sapiens
  source 1..377: mol_type = other DNA
aaggaaaagaaaagttacatctcttctggatcctgagggctaaggacctgaaatccagcagggctagtgtttggggaccaagccctgtacaactggctctagctgcaggtctccaggcagaactgagatttttctgtggcctaggagagaccatcagcctggctagaggcgctgagcactgaccgagactgatgtatgtgagaaataccgctgcagcctctacagaagcctgtctaccgccccgtcttaggaaggcagtgctaagactcgtgggccatccaccaggactgagttcgagttactgctggcagaatggtgactggtccctgcagcctcccccaggctgactgccccaccctgaggctagtctggaatcc

SEQ ID NO: 13244 - DNA, 355 bp, Homo sapiens
  source 1..355: mol_type = other DNA
caactggctctagctgcaggtctccaggcagaactgagatttttctgtggcctaggagagaccatcagcctggctagaggcgctgagcactgaccgagactgatgtatgtgagaaataccgctgcagcctctacagaagcctgtctaccgccccgtcttaggaaggcagtgctaagactcgtgggccatccaccaggactgagttcgagttactgctggcagaatggtgactggtccctgcagcctcccccaggctgactgccccaccctgaggctagtctggaatccgctctgcccagacatcttccctgagaaaccccttccctaggctaaagggcccacaggggcggaaggg

SEQ ID NO: 13245 - DNA, 276 bp, Homo sapiens
  source 1..276: mol_type = other DNA
ctgcctccctgagccctcagcctggcccgaccagacgaattttttattttattttatttttttaacaaattctaacctcggccactgtggccggagcctggcagagcctggctcattatgactctgattatagcaggtattcagtaagccactcttgttaaattattgaaaataaacgatgttatcatgaggaacacagtgtacctcagacagagctcagtggtcggttcgggccctgccccacgagcaggaccacctttgtcctggacagacaga

SEQ ID NO: 13246 - DNA, 452 bp, Homo sapiens
  source 1..452: mol_type = other DNA
cagaaacctgccggattcctgggctccagggaccaacggggcagaaaggtaggcccctcaggccccttcctggcctgcgccccggcccagccttaccttcacgggaggttgtgataccccggggctataggaagcctttggccggcccatacccagggaagcccgtccttcttcctcagtgagccctttcgggggcacttttccccagtgtggcactgccaccgtcagtgtgtcagaacccctcagtgctcccacgcagtgagcctcctcagtgtgagggttccgccctcccgtaggaacacggtctgccccctaaggccggagagtcggcgcggtgcctgggtgcgcacgcagtctcaggactccgtgccggttgccgctggttccgaaatagccaatcatcgctagggttgggtggtgacacgcgatcccggcggtccactcccggttgt

SEQ ID NO: 13247 - DNA, 516 bp, Homo sapiens
  source 1..516: mol_type = other DNA
ctatgatattaaacaaaatgaggcataaattcctagtgaataaaaagcaaattcacaaattagttgtagatgttaacattaatgtgatgaaacaggatgcacgtgccccgtgcaattcggttggcctgcctccaccggctgtggaaggattgcgaatgtctcccattcctcgtgtaaccagactccattggaagacggtattgtattaattctcttttaagcttactacagaaatatcaatacagtacttgagaattcctgcaggactcagcccttcctcgaggagtccgcccaccgttccgccgctaggtggcaggcggctcaacgacaaccgggagtggaccgccgggatcgcgtgtcaccacccaaccctagcgatgattggctatttcggaaccagcggcaaccggcacggagtcctgagactgcgtgcgcacccaggcaccgcgccgactctccggccttagggggcagaccgtgttcctacgggagggcggaaccctcacactgaggagg

SEQ ID NO: 13248 - DNA, 471 bp, Homo sapiens
  source 1..471: mol_type = other DNA
ctcactgcgtgggagcactgaggggttctgacacactgacggtggcagtgccacactggggaaaagtgcccccgaaagggctcactgaggaagaaggacgggcttccctgggtatgggccggccaaaggcttcctatagccccggggtatcacaacctcccgtgaaggtaaggctgggccggggcgcaggccaggaaggggcctgaggggcctacctttctgccccgttggtccctggagcccaggaatccggcaggtttctgctgggcagctaagcttcgcagctcaggccggagcttatttgacccgggcggcccagggcatcgcggccggaaagcggggaggcgggggtgcgcacctgagggggcgtggccgctgccgggaggccgggctggaaggagttaagcggaggcccggcccagccccgcccccggcaggccgcggagcctgatccccggcggctaagcggag

SEQ ID NO: 13249 - DNA, 560 bp, Homo sapiens
  source 1..560: mol_type = other DNA
gaaggacgggcttccctgggtatgggccggccaaaggcttcctatagccccggggtatcacaacctcccgtgaaggtaaggctgggccggggcgcaggccaggaaggggcctgaggggcctacctttctgccccgttggtccctggagcccaggaatccggcaggtttctgctgggcagctaagcttcgcagctcaggccggagcttatttgacccgggcggcccagggcatcgcggccggaaagcggggaggcgggggtgcgcacctgagggggcgtggccgctgccgggaggccgggctggaaggagttaagcggaggcccggcccagccccgcccccggcaggccgcggagcctgatccccggcggctaagcggagcagccgccgcccgcccgcccgcccgcctccgcccgcggcaagccagcccgccggcgccccggagcgctgccgccaccgtcaccgccaccgcccggtccaggcccaagcccaggccctgcgcggagcggagcggcgcggcgtccacccgggcccagccagccggcgcggcgggggcgggtcc

SEQ ID NO: 13250 - DNA, 372 bp, Homo sapiens
  source 1..372: mol_type = other DNA
ttcctagtaggggtcacgcccccaccacctatgagggcctcgcggtccctgggtcgtccggaggaagctgcagccttcttaatgctccctggctccccatgagggtgcatggggggcagtgctgccacaaggtgctgcagccatggcacctctggcccaggcctgttcctgaacccccagttactggaagtctcatggggagaacggagcctcaccctggagctggggagatcgtctgggtcagtgcagctccagctacacatctttggggcccagcatggcccatatgggcagggaggacatggggacaggcccatcccctacccctgtgttctggtggcccctctggccctggcccagggactggaagtc

SEQ ID NO: 13251 - DNA, 284 bp, Homo sapiens
  source 1..284: mol_type = other DNA
ctcagggaccaactgcccgtggcctgcaggctgaccctcggctcagagcagtgtgcttgtggactctcacatctgcagccatgagcagaggcgacaactgcacggatctactcgtggtgggggaggggtcatgtggccccaggtcccacctgctgggccctgggggtggggcggggctgttacaccccccttcctttccataacccaggcctggggaccacttgtcccagtggaccaggggccggagcaggagagttctctcttacctgctgaccagattcctg

SEQ ID NO: 13252 - DNA, 422 bp, Homo sapiens
  source 1..422: mol_type = other DNA
ctccccagggcctctgtagaggcgggccgcgcttgacagatctagaaaggagaagctgaggctttcacttccaagcttctcttcttcccactcaggaagccacagaggaggaacccgtgcgcctgattcctgcctggtggtcccaatttgaaagggaccacccctgggtccctggacctctgaggaccccaccctgggcctccccaggagaggcccaggtcgcggacaccggatgcggggaaccaccggcacgccagaggaggcgggggttggagtcccgcctacccactggcggttctcctggcccgcccagacccacggcgctcgccgccttcgcccgcttaggactgagtccgcagcgccgccgcctggcgaggggcggagttgccaccacttctgcgcaggcgggatgcagcctggcc

SEQ ID NO: 13253 - DNA, 461 bp, Homo sapiens
  source 1..461: mol_type = other DNA
aaaaaaatataaaacttagatccataaaatatttttcagggaggataattttatcactgattttttttttcagaatttctggaacatggtgataataagaggactgatttttattttttaaattctctacagcctgcaactcaaggggcaggacttctgccatccctattgttggcacactgattttaaacttttaaaaaatgttgtatgggctagacaaaacacatctctgacttctggtctcaggtttatatttgcaacttaaagccttgcacgtgatggagttagctctaacatgtgcaataggagttttaaaatgcaattaattattgagagtgacagttcttacaatatcctctcagatcagccttagggtgtgatgggatcagaggtaccaggaggctcccccgaccatctttcttctgggaccagagtctcagggaccaactgcccgtggcctg

SEQ ID NO: 13254 - DNA, 364 bp, Homo sapiens
  source 1..364: mol_type = other DNA
aaagcagccgcgttgaccgggcgcggtgtctgcgcctgcggtcccaactacttgggagcctgaggtgaggcatcgcgtgagcccgggtgcgcggacacgcactgcgcccccgcgccacgccgctcagcgggatacgccgtgcgtatgcacgtggcacggtccggggactttcccctaggcggaaaggggaggaacagagtcctcagtgtgtagcctaggatacaggcctttttatagccctaaagaaattgtgttttacactatcggtctggccccgccctacggggagtgggcgtggcctccccggagccggccggcctgctcgcgtgcgcgtgcgcgttggggcggccggccaatgccggac

SEQ ID NO: 13255 - DNA, 536 bp, Homo sapiens
  source 1..536: mol_type = other DNA
ttttgttttttttaataactttttttttctaactacaaagtaatgcatgcttaatgtagtataagagaatttttaaaatcaccctgtttgatccagtgcctggcacagatacagattaggtacttaatacacatttgttaaacacattatcttcacggagataaaaaccacagttaactttttatttttattttttatttgtctcgaactccgtccaacattttatatatgttttatacaaaggggattatattatacaccttccccctggcatttggcatgggcccaggacagaatgtgtactgtaatttaagttcctgccagcatctgcagcccgtctcctgactcaaagttcaggctggccctgccctgccctgccttggccggcgccgcgcacctaaagcgccgctctggcggtggggctggacagaagagaccctgcgcggtccggccgctcgccgcgcatgctccttgcgcgctgccctccccggccccgcctccgcggctcccgcccgcgagcggttgggatttgaatc

SEQ ID NO: 13256 - DNA, 268 bp, Homo sapiens
  source 1..268: mol_type = other DNA
gtagtactaaataaatatttgttgaatgcaatagtaaatagcattaaaaataatagtttaattgttaaacctatcatacacttgcttttcattcaagctcaagtagtcagggatgtctcagccagaggacatgggggccccagctcccctgcctttcccctctggagctgggaagcaggccagggttagctgaggctggctggcaagcagctgggtggccagggagctcactccacccccatcctagctttggtatgggggagagggc

SEQ ID NO: 13257 - DNA, 579 bp, Homo sapiens
  source 1..579: mol_type = other DNA
cgggggcggggaacgcgcggtgaccagcctggccgcagccgcgtgggggagctgggtcctgagccgccgggtgctcgcaggaagggcctggctccaggggcaggggcggtcaggccggtcctgggggcagcaagcccggccacactccccaccgcgaccggggctctgggctggtaactgaggcactcaaactgccgaggagctccgcctcccgagcggctgctgcagctgagggggggcacgccggtccctgcgcccgggcagctgccgtgagctcacgccccgaaatagccccaggggccccagccgcagctgccactgggtccggctgtcactcagaggaagcacggagcccccagcccaagggtcccctccccttcccgaccgtcggccactttttcctccgacggctggcagggaaggggcgggaccccaagggaggcggtccccagtgggtgggcgaagggggcggccgcaccccccggccgggccgtgcttctgcccctacaaggtttgggccgaggtgggggagggtcctggttgccggccccgcccggtccctccccgccttttaggcgc

SEQ ID NO: 13258 - DNA, 388 bp, Homo sapiens
  source 1..388: mol_type = other DNA
gaggaggaacctccttggtagaaggcagcctctggaacactgcgaggtcaggccagggttgctctccgtgtggctagcaggcagctaaacagatcgccccggccagcggcctcgggttcccacggtccccagctccaggcctcccgcccctctatgactggagggtgggggcgaggctagcagctccctcccggcttcccagaccccacgacccggctccggcgctggtttggcggcctgggtgggagaaggcacctcgccccggaccccctatagcccggctccgctcccacgggggcggggaacgcgcggtgaccagcctggccgcagccgcgtgggggagctgggtcctgagccgccgggtgctcgcaggaagggcctggctcca

SEQ ID NO: 13259 - DNA, 371 bp, Homo sapiens
  source 1..371: mol_type = other DNA
tgttaaccctaaatgttgacccctaagcctaaagttcatttataatataggccaggaaaggcctgtcttccccaagacggcctacttcacgccgagctcaagccgagatgaagagaggcagggcccgcccgccccggggccaggccccgcggccccaccctaaggcccccgcccggcccggtctggcctacctgcgctgcctggctctgcgccccgcccgccggcccgccgccccgccgcttctcgggtcgccctcgggccctgggaacgtcccccacccgcgggcggcgccctgggcccgcgctctatggtcgcggggggcaggcaggcgctctggccccgttctcgatgctcgggagccgccaaagccc

SEQ ID NO: 13260 - DNA, 339 bp, Homo sapiens
  source 1..339: mol_type = other DNA
agggaactcggtacctgcgcagggttccaatgaacaggccttgacctcagcgcccagtccagtggggccctcacggcctcatcgggtgcggagcaggtcttggtcacgggtgggccaccgggccccaacgtccgcgagccccaggccagctgtaggcctcggcgggattccccgccggcggctttccatagcaccccgtggcactgtgggacttggagttcgaagggcttgggtgcagcgccacgtcccaggggctggacggccctgctgccgcctcgcaccccgagggcgggggttccggggctccggctccgccttctaccccaagctagaaaaagg

SEQ ID NO: 13261 - DNA, 526 bp, Homo sapiens
  source 1..526: mol_type = other DNA
ataggccaggaaaggcctgtcttccccaagacggcctacttcacgccgagctcaagccgagatgaagagaggcagggcccgcccgccccggggccaggccccgcggccccaccctaaggcccccgcccggcccggtctggcctacctgcgctgcctggctctgcgccccgcccgccggcccgccgccccgccgcttctcgggtcgccctcgggccctgggaacgtcccccacccgcgggcggcgccctgggcccgcgctctatggtcgcggggggcaggcaggcgctctggccccgttctcgatgctcgggagccgccaaagcccggcagcccctccctggcaggaagcgagggtgcggcgcaatccctttttctagcttggggtagaaggcggagccggagccccggaacccccgccctcggggtgcgaggcggcagcagggccgtccagcccctgggacgtggcgctgcacccaagcccttcgaactccaagtcccacagtgccacggggtgctatggaaagcc

SEQ ID NO: 13262 - DNA, 293 bp, Homo sapiens
  source 1..293: mol_type = other DNA
tagatttctctctgataaatgacttaatatcaagagctctctatcaccttctcatcacttcagaggtgagggcagggaggctcttcttacctactccctggagctaaagcttgaagacttgtgggaaataaggggttgagacccccccacccccaaataaaacaacattgtgttaaggctgattgcatgaccaaatgttcctaccctttccttctgaaacacaggcctaggaagcccatgcctatatgctttatcattagggagagatcctccggattgcagcagtccgccag

SEQ ID NO: 13263 - DNA, 469 bp, Homo sapiens
  source 1..469: mol_type = other DNA
ccatcttaaccaacaaggttagatggctgtcctagtgatcaggagaggaggtggtgtcgctacaggacaacctgagctctgcctcagccccagagatcatccccacctggatgcagaagtggccgtgggcggaagggggttggtgacggtcactacacactccagcatggcagctcggtgagcacctagggctgagggctgaggacaggggtggtcagcaccgtggtgcctcagtactgcccagggggaggacatcgctctgggccctagaccccagcccctgtgcgacgggttcttctccctgggcacccccgcggagttcccactagggatcggcacccctaggcctatctgcccgcccctcagggacctggctaggtacgcggcggcggcggcggcggcggcgtccgctgggcggtagaggcgggacttcccttcggtcccccaccctccgcggagtcccttccgg

SEQ ID NO: 13264 - DNA, 464 bp, Homo sapiens
  source 1..464: mol_type = other DNA
tgagttggcatatcccgtgaagtaatctgaccaggttacatagctaaagaacctgtgggaaactcagagctcctctttgaaaggggaaagaaccatccccagatgtggggtgatcccacaagatccctctgaggggcagccctatttcttggatacattagggaaaccctgccctaggccaggttcctggagagctcctgggtttggctggggcacaggattaaccatccccaggaaatgcctccctccggtccaggcagggatcccagcatacacacccctgggggggagaaagggggaaggtggaatgcttccttctctccaggtcagggaagagatctggggaccacctgggggccctcgcccctcctgtccttgctggggaagtgcccagtccagtgcccatgaatcagctctcacagcttgttaaagctagacctcttgttttcatgggaaacagagtt

SEQ ID NO: 13265 - DNA, 503 bp, Homo sapiens
  source 1..503: mol_type = other DNA
aagcccatgcctatatgctttatcattagggagagatcctccggattgcagcagtccgccaggcacagcttatctgctccgaggctgggacgccggttcccatgttccctggatcctgggtccccatgacctcgatgcagtgggggcggcgacagcaaagaagccgccttgggctctgtcgggcctcgtcgtcattgagccgacgattagctcgcccggccaaagggcgactgggcccgcagagaggggaggagccgcggggccagcccaccaggcaccgccccgggacgggcccgcaaggcaccgcccccgggacctcggcccggcccctgggccacggcaccgggtcccccaggattgggcgccaggtcccgccggccggctccggggcagcgcccgcgcccaggtgccagcccgtgggaaggtgaccctgggcgccgggatgacccgagccctttccggtctggcctgccgggcgcttccggccggaagggactccgcgg

SEQ ID NO: 13266 - DNA, 320 bp, Homo sapiens
  source 1..320: mol_type = other DNA
cagacctgatactgtgtccgttcgcccgtagcgacagaccctccggggctctggcccgcagctcccctctccctccggcggcgggggtcggctgtgactcaccagagggccagcggccggggtgggggggccggaatgctctcacttcctctccgcgcacctgccccgaggctggagcgccgcccggccgggcctccggcggagtgtagtgcgcgccagccgccccctccgggacctgcgcgccagccaccgcgcccccaggacccagcgggcctggtcctcaggcacgcatgcgggcgaggactcctggctcagcccag

SEQ ID NO: 13267 - DNA, 212 bp, Homo sapiens
  source 1..212: mol_type = other DNA
caaaaacaggtacctccaggaacattttgggtttgagaaactgtttctaggtattctccatagggatagtcttcagaaatagaatggacctcaccacggcctgggcctgctctctggtctgccgcctttcccagagagggggtccaggggacatcctggaaggctgggccctgggccaccttctgctcttgcaagctagagccagcccaata

SEQ ID NO: 13268 - DNA, 188 bp, Homo sapiens
  source 1..188: mol_type = other DNA
ggccggcagctccagtggcctccaggttgaacctctcctgtctttaatataaaattttataccacaaaggggaaagaaaactgattcagggctatgatgccccttcttcttgacaagtggtccaccctaggtcaagcttaccaggttctaaaaaacatggaagctacttgcctctcccgtctgaggcg

SEQ ID NO: 13269 - DNA, 367 bp, Homo sapiens
  source 1..367: mol_type = other DNA
ttccgattagaaaagaacaatgaatacatactcctttgcttattataattccaaaaaccacagactttttaatctatggagtgaatgcgttaattaaggaagaatttcccttagataagtacatttgtggagaaaatgctgcgcatcagcccccccgggtggttcttggagccaataagcgccggatgccctcagagccccgccctcctcctggccaaagcggtgagagggtctttctgcagcaggtggcggagccccgcccccttctcccccttccaatggagtggaagtttctctcacagagaaagtcctcgcgttgcgcgctccaatggggtagcagggctcgcccggccgccactaccccgct

SEQ ID NO: 13270 - DNA, 397 bp, Homo sapiens
  source 1..397: mol_type = other DNA
tatcagactaaaacttacctagcgtctgagaatattagtattttgtgaccccacgtttcttatgtcaaaaatatatattccagtcccagctactcgggagccgagatcgcgccactgcactccagttccgattagaaaagaacaatgaatacatactcctttgcttattataattccaaaaaccacagactttttaatctatggagtgaatgcgttaattaaggaagaatttcccttagataagtacatttgtggagaaaatgctgcgcatcagcccccccgggtggttcttggagccaataagcgccggatgccctcagagccccgccctcctcctggccaaagcggtgagagggtctttctgcagcaggtggcggagccccgcccccttctcccc

SEQ ID NO: 13271 - DNA, 461 bp, Homo sapiens
  source 1..461: mol_type = other DNA
gccagggccttaagcaaacgggacagggaggccgggatgggggccaggccaggggcagagactggagggggtcctggatggggacccaggcaggggctgggaggggccgggacaagggctgggccatggcccggggcgggggcggggccggacaggccagcgcggggcgctcgcagagctggcccgcggctccgctccccacccccggggggtggcctccggtgtcctcgcgggcccggggcgggggccggggacctgggtaggagttcaggcctgggcgactccgggctgcgctgaaccggcgataaccaggccccgcggcggcggcctcgacttgacgtcggcgtgacgccccgccccccggccggctcgattacccaccggggaggtgaccagaccgccgttgccacggagactactaggcgttccggttgccctggtgaccggcgcctactctcctg

SEQ ID NO: 13272 - DNA, 291 bp, Homo sapiens
  source 1..291: mol_type = other DNA
gagcgagactctgtctaacaacaactactactactactactactactactactactactactactactacaacaatgaaaccacctaccctctgcaagtccttaggtcaagaccttgacttactgaaagtcgaactttgactgaagcctccggaacccgggccaggagagtaggcgccggtcaccagggcaaccggaacgcctagtagtctccgtggcaacggcggtctggtcacctccccggtgggtaatcgagccggccggggggcggggcgtcacgccgacgtcaagt

SEQ ID NO: 13273 - DNA, 401 bp, Homo sapiens
  source 1..401: mol_type = other DNA
actgaaagtcgaactttgactgaagcctccggaacccgggccaggagagtaggcgccggtcaccagggcaaccggaacgcctagtagtctccgtggcaacggcggtctggtcacctccccggtgggtaatcgagccggccggggggcggggcgtcacgccgacgtcaagtcgaggccgccgccgcggggcctggttatcgccggttcagcgcagcccggagtcgcccaggcctgaactcctacccaggtccccggcccccgccccgggcccgcgaggacaccggaggccaccccccgggggtggggagcggagccgcgggccagctctgcgagcgccccgcgctggcctgtccggccccgcccccgccccgggccatggcccagcccttgtcccggcccct

SEQ ID NO: 13274 - DNA, 193 bp, Homo sapiens
  source 1..193: mol_type = other DNA
tcaagcacttgccatgtgacagaggtcatggccctcactcagtcacacttactcagacactcacacagcatggaactgggtttcaggctgcagatctgaaacctagcctctctggtttaatccttacgttaatcttatttaaaaaaaaacaaaaacaaaaaagagcaggctgaaactccacctgtggggcttg

SEQ ID NO: 13275 - DNA, 382 bp, Homo sapiens
  source 1..382: mol_type = other DNA
agatctatcaggaataggctgcaatccccgtactttgggaggaggaggcacctgcgcccgtggtcccagctattcaggagggagccgagatcgcgccactgcaccccagcttgggcgacagactcttgcctaaataaataaataaataatttttaaagtacaacaaagacacattgaggctactttctttgggtgcgaggcagcgtctcggcagaatggactaagcccttgttctcaggtgaactagctcaggaggtggcagaggttttctcccagctaaagagccctggtacggggcacgttcccgcccccgggaggttttggaacactgtgaggcagggggcggggcttgagcgggccgcagccagtcaccaaagggccg

SEQ ID NO: 13276 - DNA, 734 bp, Homo sapiens
  source 1..734: mol_type = other DNA
gagccccttccccagaaaggagcaagtaagtgcacttctcccacggggcaggggccatgggtgggaccacatctccccagtacctggtgtgtgctgctcccagggtcagggcacctggcagttggaaagaccggccgaccccgagggatgggcagcactggaatggtggctccagggccagcactcccggaggagggaccgccccagaacatgtttgggtggacgggtcagaggcggcggcgcttccaccccgactggcaagggcgtgtcctaggagaggagcatccccctccccggaccagccgccctccggagcccagagtcaccggagatgggggcacaccccggggctgcgtgtgtcgtgtcaggccgcggcagggagaggccgtcccctggtggcgccggccggaacgcccctcgtgccgcgaccgcgcgcccctctgtcctcgccgcgcgtcggcgcagagcagccacccggggcccagcaggcgcgggcttccccacgcgccccgggaagggacagctcggtgtggggtccgggaggcttgagccccgcggccgcatccggggagccctcggcagtcgcggagctgcttcccaggggtgagctctccgggaggcccacggggtggccccgggcgcctccgccctcagctgtcgctccttataaggcgggggccgggcggcgccggaggaggggccgcggcatcagcccggtcctgggctctggggcg

SEQ ID NO: 13277 - DNA, 569 bp, Homo sapiens
  source 1..569: mol_type = other DNA
agccatgtagctattaacatctccctgatttaaaaagaaacacggaactttctttttcctgctgtccttaggaaagtaaatataagagactgtagctagtatcttggaagtccccaggagacaggcgtttcctcttggtcactgactctctgggtcactgacgctccttgaacagcagggccaccgtaaggaattttccagtttagtaactcttcgttgaagaagataagatatattcatttttaaataaaaatacttatgaatcaattacagtaaatctatgggctctaagggagcaaataatccaggctggctgaaagaattaaatattttaaatttataaagccagggaccctcaaatccataaaaggattcaatcttcttcttctttttttttaggattttcttgtttacgaatgaggaaactgaggttcagaaagcctaagtgagtcccctcaggggtggccgtccctggtcagtccagctccagcagacggggtgggtaggacgctccctatcaggcagcacttccgcctcccggggcccgcgctttagggggaccgcgaccg

SEQ ID NO: 13278 - DNA, 422 bp, Homo sapiens
  source 1..422: mol_type = other DNA
tcacctgtggtaaatttttaatggttgtaaaaaaaaaaagatgttaatattttgtatcatcaacttcattcaaagttaaatctggagtgactcagaaatttgaaagggtcattaaaaagtcttaaagcctcctaggcctcgggactggctgggagttccctgggaggccgccgctgaactgattataaagatgagagaggctctgccatagcagtcacggcaagggttaagctgtggggtggccgcgctacacgagtgtagctggcaggacagccccgcagcagctccagcgcggcagaggccatggaagatggtccgctggtcagcaccctgcctgcgcctcaaaataccgccgggaaggtgtcacgcgagctctctcgggtggcgtcagggcgcgatcgcggattcggcactccgggtgg

SEQ ID NO: 13279 - DNA, 320 bp, Homo sapiens
  source 1..320: mol_type = other DNA
aggctgaggctgaagaaaaaaatgagttattttacgaggtgaaacccaggatctgagcaacatagtgagacccagtctctttcaaataaaataaaatagatgttgacttcaaaatctataaacatacaatggttaactaagagtggtcaaatgagcatttaccagtgaaatggagtgtgaaaacaatgtgaaaaaagacttttgtagatttttgaactacaaaaaagacttttgtagattttaagaaactcagaagaaaactttttctagtggaaagtaaaagagaagaattcagagccacattttttttcttcaaaaca

SEQ ID NO: 13280 - DNA, 696 bp, Homo sapiens
  source 1..696: mol_type = other DNA
actggtccgagtcgtgcgccgggccgcgcgcagccccgccccgccccgccccgcccccttccccctcggggtggaaacaaagggggttcggcgctggcgcgctgggcgggtgggacgggcgacccggacccaagaagtgggaggaccgcgcgtgtcgcggcctagcggcgaggggagtcgcctgcgcgcgcagcggaggccagtgcgccggcgcatagggagcccgggtctgtgatcgccgaggcggggggcggggtgcggcggggcgcggcggggcggggaggggcgtggccgggccgggcccctagtgcggtgttgcgggacggggccgaggcccggtcggttggggcatggagcctccgaggcgttaggcgaaggcccgcggacggcggatctggcgagctggccgcgggctgggcgagcagtcagaggcggcggcccagcgaggatccgcgggagctgcccggcagggcggagcctcccctcgcaggtactggccgccgcggccgttggctgcagcgcgagggcgggacgggctgcgggccgttgagagcctgcggggccgcgcccgagtcttgggctaaggtttgcctcggccgcccggcgctctttgttcccgcggtggcgaggaggcgcggtctcagctcgcggagccgccggcccgctgcccggcagatggcctaacgcggaacccgg

SEQ ID NO: 13281 - DNA, 341 bp, Homo sapiens
  source 1..341: mol_type = other DNA
tagtgaattgtagacaactacaattgtaaatgtgtaaagagactgtaaccttgtaacggtggccaactgtttaaaagttgcaaccaatgttatttggggttccagggattttggtcaattcaactctgtaaagtttaatttgtctaaagatttgggttctgtggagaggcatatccacgccacccacggctccacagcgaccgcgagccgttgccccggtgagaaccccccggcactgtgcgcgcccccgcctgccgtgcgcgtccgcttccctgggatccggcgccgcgcgcgcccccgccgcgtccccgccccttccggcccgggagatttgattccct

SEQ ID NO: 13282 - DNA, 439 bp, Homo sapiens
  source 1..439: mol_type = other DNA
ggctcattcggttctcaagaagcctctggcagttcctgatctgagcaggaaagagggccagccactctgcttgggcaacctggcccaaagccttagcccctccacccaggtgcgccctggtgcgccccagttcgttaatgcagcaatgaggtacttgataaaattaggaaataaaattaggaaatatttccgtaaggagccttcagtaaaatctagttaaccccactctgcccatggggccttgagagcgtcccaggatcccagcatcgctgtggggaggtccagcccgcgtgggacccgcagcgggactctccaggcactgcgtgggcccagcgcgttgtcaatgaacgtggcgccgccgcctgggccccgccccccatggagccgtggagcgcaggttagcccccgccccgcccccgcccggagggagctgagcccc

SEQ ID NO: 13283 - DNA, 645 bp, Homo sapiens
  source 1..645: mol_type = other DNA
gaagcggaagcccggatttcatctggcgctgccctagggtcaggggcccagcaatagtcaggaccccaacaaattggggtgggggttggactgggaaccctggggtcgggcgccgccctaggggtgaatcggagtaaaccggaacgtcgcctcggtgcctggcaacactgccagcctttgcaacccctttcaaaagcacctgcttggccgagcagttaatttcttcaaaaacaaaaaaggccccgcgcacagcgcagagggccgcgatgcggctggaagacccgggctcccgggctccgcttcggtctgccccttcccgtaggtgcgctggctagcgcccggcgcaggctgaagccttccttccctccccccaacccctataaaagtctggggcggcgcggcagcagcactgctgctctcccggcttcccgctctactccggccgggccgggtccgccacgtctggcgcgctgagcaggcccggccgcgcagcgcctaccctttcctcgctccgggccggcagtgtggggcggcgcgctgggggcgcggcgtgtgatgttggcgagaacaggacatgatctcacatggaacgtttagtttcagctcagtgatcagctaccccagctcggcgggggagcggaaggc

SEQ ID NO: 13284 - DNA, 451 bp, Homo sapiens
  source 1..451: mol_type = other DNA
tattaagggcaacttgaattgatgatcccaggttgccctcatcaaacttggctaaagttctacagatttaccttgtccctaaaggatcagtatttagcaggagtgcagctcttcgagattcacaaagtgagcgcaagggagaagcttgaagccatgcgctctgtttcccgctgcccaggtctgcgggccaagcagccagccacgctggccctcgtcccgcgccacgtggcactgagaaggcgtccaccgagcgccagggagaaggaggcggagcccggcctcaacctcgcccgtgtccggtagagggcacgaactccccggcttttgcccggtaaatatccttcgtacgaggttcgcacccactacgcatgcgcacatcaggcgcggcaggtgggcggggagtgttgtccccggaagtgccttccctcccgggtctgcgcggacgcggcct

SEQ ID NO: 13285 - DNA, 540 bp, Homo sapiens
  source 1..540: mol_type = other DNA
ttattcagataagctgggcatctttgtcttaggaactatttgtgcaataagtaaatcaaccccttgtctataaaatgagttgcaaatatatggtattttgttaattttttttttttaagataaacataagcctggtatttccaggcacctggtatttatggttaatttttcaatggagaatcacttatttattgctgcataaagaattactccactggagtcacccgaaggcttcctcactcatacctctggtcattgacggtggctgtgagccgggcccctggctgttggcctgaacacctacaccctggaacctgggtttctaccctgggccaacccaagagacagaagggctttcagtctcttaaggcctgagcctgtggaaaactgccccctctcccccggggccctgattccccagtggcacgaggcacaaggacactgtgtagggtcactgttactgtcactccccgagcacgcacagtcaccgctcagccacaccccctgcgcacgccgcgcgcgacgtctctcccggcctgg

SEQ ID NO: 13286 - DNA, 406 bp, Homo sapiens
  source 1..406: mol_type = other DNA
ccccggggctcgtcccatacaagtccgcgacccttccacgtttgggacaggagtgggagcctgcagccgagtgcggggccaagcgccgggctcctggggcgccaccgtttccagacgcgcagccacccggactggacgaggggcggggttggcttagttaaacctaaagagctttttggaatcttatctttcccaacgggaattcaccccggagaagagccctgtggcggtacggcctgccctgagggcccgcctctccggcgccctcagacagtgattggcggatttaggcggaaagcccgctagcctaaaccacagagggttttgattggttgcagcgaacagccgcaacagttttaaaaggcatttgataaccgttttatccgcgcgccggctggctgcatcg

SEQ ID NO: 13287 - DNA, 255 bp, Homo sapiens
  source 1..255: mol_type = other DNA
ctctctaaatggttcagggcaaaaacatttcttgcgggccacaggtgtgcacgccacagcccatggcgtcgccagcgaattctaaattgagagacgacactctctttaaggctcatagcaagcttaggctgaagcctttggcgcctcgggctctggacctacaaaacccagagtgcacgcgagctggtgctgtggcaccggagaccacgcctctctacgcggggggcggggacacgcggctcgcgcgctgtgggc

SEQ ID NO: 13288 - DNA, 403 bp, Homo sapiens
  source 1..403: mol_type = other DNA
agaaggctttatccccttttaaaatagcaaaagacaggagttgtgtcatgtcttaaggaccctttcttttgatcccagagaacggaaaatagactctatctctaataatacagtgataataataaagatcatgactgccttctgaaggaggcacggttattggtaacctgctcagggtctcacaactgaggctgcctcctatgcagggagtggacatgtggcctgacagtcctcagagcactttcacactgtggccgagcttgtgaggttcacctgatcctgatgacctctcttgtgtgaaggtgaagtctgcagctagagccatcagtctcccaggccagtcagggagactcaggtgccggttcagtgtcggtgtgtggatgatgtcgtccagcctccccca

SEQ ID NO: 13289 - DNA, 493 bp, Homo sapiens
  source 1..493: mol_type = other DNA
tttgaaacaagaggtcacccaggctggagtgcagtggcactgagctcaagtgattttctacaattttaaacacatattggtttaaatgacaactacagaattaacttcaggagaagaggaaccatatctgctttgttcacttttgtgcccataatagtaacggcaccagcagcaacaaacatacagcatttactttgtggcaggcattatgctaagcgccatacatacaactaatttaatatgtactcctagtacattgtctggcaggtcagtttgttcagtgaatgaaccccgagcctgaagcgcggtggtcgggaagcccagccccggccagccagctgctcccggcatccttcgccgccttgcgcgtcacatgacggcggcggctccgcacgatccccaggcagctgtccgcccccgggcggggctggccgcacgccgcaatcctaccggctgctgcggctccagcgggggcggcgggtggcttccaggg

SEQ ID NO: 13290 - DNA, 381 bp, Homo sapiens
  source 1..381: mol_type = other DNA
tttgaaacaagaggtcacccaggctggagtgcagtggcactgagctcaagtgattttctacaattttaaacacatattggtttaaatgacaactacagaattaacttcaggagaagaggaaccatatctgctttgttcacttttgtgcccataatagtaacggcaccagcagcaacaaacatacagcatttactttgtggcaggcattatgctaagcgccatacatacaactaatttaatatgtactcctagtacattgtctggcaggtcagtttgttcagtgaatgaaccccgagcctgaagcgcggtggtcgggaagcccagccccggccagccagctgctcccggcatccttcgccgccttgcgcgtcacatgacggc

SEQ ID NO: 13291 - DNA, 558 bp, Homo sapiens
  source 1..558: mol_type = other DNA
attccagcactttgcaagaccagccttggcaacatggtgatacctcgtcttttaaaaaaaaaaaataaataaataaaataatgttaacaaaattctattagtatgagtattgagatctttagatctatatgtcgacacttagttttctagacatttctatgtacatgatcttatatcagatgtgatctagagtatgttaagtgatatatagctaatcagtaagagacccaaaataggtgtccagctctcctttcaaatgagtttttaaaggtgaaaaatgcccatttgtttcctctagagttttgttccttttacagttaaaataaatcgctagagtaaagccttgtcatttgaaagtttatactttatggccctaaggggcaatgggctgctttggaaggcaactagtccgcttgaccatcacttggagttattttcaaaaacatgttgaataaacctgataattctataatgtagcctatgggctaatagatttgaaaactaattttagatttgtttttctttcagctccatttatcttaaagaaattggacagca

SEQ ID NO: 13292 - DNA, 521 bp, Homo sapiens
  source 1..521: mol_type = other DNA
ctgcactccagcctgggcggcagagcgagactctcaaaaaaaaaaaaaaaaaaaaaaaagtttcatctttgtctctttgttttaacttatgtaaagtttcaaacatactcaagaaagaaaaatgaagtactagtcaccagcagtttttaatatttttcacgcctgtaatccgggaggatcgcttggatcctggaacccaggagttccaaattaaagcacatttgggcaagatgttttaaagatctctgtgcttcaattgtctaatctaggaaacgaagattataatatcgaattcacgggggacaattatattgaatattcaataaatgttagttatcactgtttacagtggtacctatgtgcacataaaagcactttacagcgcagcgcttgttattgttgttgttattattattattattattattattttgagacggacccaggctggagcgcagtggcgcgatctcggctacgagtagctgggattatgacagatgttattaaaggcccgcttcaca

SEQ ID NO: 13293 - DNA, 518 bp, Homo sapiens
  source 1..518: mol_type = other DNA
ggaggccttcactcagtcagtgcaggcctgagtggaatagtcctagactgtacattccatgagactgagtcccagggcgctcggggaggtggtccacagtgcctaccgtgggcccacgctctccctctcccttcagccgaacacctgcggggcgtgggggtcagggggcgagtcccccagggctccccgtagctggggctcttcctctggcccaaccaccgctggtccgggtgaccttggcatctcccccctgggtactcagcggacgctgcgtgccccggcggtgagctgaggcaggcggcggaggcagggcccgggtgggagcgggaccgcccactgcggcgggccgggacctcggagccagcggaggcggcgcgcggggctcctcccccggggcgggggtcgcggcgccggcagctggcggccgcgcagctgcagcctcagcacctgccgccgccagacggcgcgggcgcggcccggcccggccaacccctccggctgcagcctcggcgcgggag

SEQ ID NO: 13294 - DNA, 272 bp, Homo sapiens
  source 1..272: mol_type = other DNA
aggcatcgatctggagtgcagtggtgcaatctcggctcacttggccaagctggatcttcgcaagacctggagtcactgcagagtcagctgcacctaggaacctaatgttctgtgtgagcctcccaagtcagggcagggcccagaatagccccagatagactgcacttggcctggctcaggccctgtggtcctcatcagccttttagggcccagcacaggtgcttctggcatggagaagcctctaatctcggtgctcccctgacctagaggtg

SEQ ID NO: 13295 - DNA, 300 bp, Homo sapiens
  source 1..300: mol_type = other DNA
ctgcccgagcaagcagcggcaacccgttggggttgcctttcatctgcagcttcactcctgaagctagcgtaagaattgtaacaccgcgatggtccgcggtttcattcttgaagtcagtgagaccaagaatccaccatttccggacacaatatgatatcaggttggaatttgatatttgagcacctgtgcaaccaccacagcaggacgcagctccctaccgccagggctgggagtagaagccgcagcctccgctccggctcggcccctccagaatgccattcggagcggagttacgaagcc

SEQ ID NO: 13296 - DNA, 368 bp, Homo sapiens
  source 1..368: mol_type = other DNA
atgcctctccttactacatatcctaaagatctggagaattaagtgtttttaaccaagaagcatgttattaaccataagtttaaagtgtcttaacactgtagataaaaaaagttatgattcggggaatgacttttacaaagttggtaacctaggtgtaaagttccttcttggaagaaaggaggcagcttcttggggaaaactctatccactggagatagtatttgtaattttggcaaacattttagaagcttgtgaacacatgaacaaaaaactatgggttttttcaggtgaacctcccccatttaaatactcagaagataaggtgtgaatgtatgtattattagagtccgaaagtatttttataattt

SEQ ID NO: 13297 - DNA, 358 bp, Homo sapiens
  source 1..358: mol_type = other DNA
tacacaccaaaggaatacattcgttcattcatcaggtattacctatttcatgccaaaaaacgggcaagattaaaacatcgtttattttcttcttttattttctctaacaaccaagaaggttttatttattttgaaaaaaactacttttcctgttaaaagcactctgtcctccagactggagtgcagtggcaccatctaggctcactgtaacctccgcctctagctgggattacacgtgcgtgccaccatgccaggctggtcttgcaaacttctgggattacagagatcccaagaaactcttacataccgacccgcggccaggctgtcagataggtggccggccacaatcactgccacc

SEQ ID NO: 13298 - DNA, 390 bp, Homo sapiens
  source 1..390: mol_type = other DNA
tggttttccaggctatctgggcatctgttagcccagtcaagcagactggctatctcagccatttgctggccaggcctctgcctgtcccagcacttcggccgaggcgggtggatcgtaatcccagctgctcgggaggctggcagtgagccgagatcgcgccactgcactccagcctgggtcacctattgtgtgtggcctacaccagtacatactcagcctcacaggactgactggtcaggccactcatccccgactctgccacccagatcaggtgcccagatgcctccgttcccgggactgcggcgccccaaacccggcggtgtctcagctttcccggtccccggcggacggtggccgaggggcggcgcgggttagccggtggggttaggc

SEQ ID NO: 13299 - DNA, 465 bp, Homo sapiens
  source 1..465: mol_type = other DNA
ctgggcagagaccagacccgcttttggagtcagtgtctaggggaagggggcacgcggggaacgtcgcccacccggagccgatccccccaagaacgcttcactcgggtggggttactgcttgggctcgccccaagcacagtgcttccaactcatatgactttgaccaagccttcttgctccatttggagttttgccccctgcaggcagcgcgctagagaacgcgttggctgtttctggcacgctgaggccaccgtacggcatcaagggtgaagcatggtggctagcggagcccgcatcctgacaggtgtgctggcgtggccctctacctgccccgccgcggcggcctgcggccaggagaagtaggctggcgacatctggcgggccgcgggccgagggaggggaggcggggcggggcggtgtctccctcacgtgaccccaacagcgcccagcgcgtcgcgctgcgcc

SEQ ID NO: 13300 - DNA, 307 bp, Homo sapiens
  source 1..307: mol_type = other DNA
ccctcgaggggggaggtccccggagggtggtctccagcttcccgagaggcaccccagccaaagtggggctgggcagagaccagacccgcttttggagtcagtgtctaggggaagggggcacgcggggaacgtcgcccacccggagccgatccccccaagaacgcttcactcgggtggggttactgcttgggctcgccccaagcacagtgcttccaactcatatgactttgaccaagccttcttgctccatttggagttttgccccctgcaggcagcgcgctagagaacgcgttggctgtttctggca

SEQ ID NO: 13301 - DNA, 359 bp, Homo sapiens
  source 1..359: mol_type = other DNA
ctgccctacccacttgtcatggcattggggactctcttgtagcagtggcggctgctgctggttccggtgcagctgcatttcatctggtcctgggcctcggtcctggcttggagaggtgcagctcacagccacttcatggctgggatcccttctgtcccagacagctgaggagacccttggcctcagcctgagtgtcattccaaccagggttttatgcacacgttctgggtcggaccagacctgccctgctctgtgacagagcctgagacttggaggtgccccaccaaccagcccagccactgttgctggctgtgtgcacaccacttctgtgaattaaaatatttgcaaatccaaagaga

SEQ ID NO: 13302 - DNA, 426 bp, Homo sapiens
  source 1..426: mol_type = other DNA
tgctctgatctctgagaaacccacccactgctgagcagactccgctgaagccaagcatggtggacatactgggccctgctccatggggcaggtagtacagactttctgccctccaatgcctgcaagggaggctgggaaatgtagtccctggctgggtggccccttcccagtgacagtttctactgaaagggaaggacagatgacccctgccctacccacttgtcatggcattggggactctcttgtagcagtggcggctgctgctggttccggtgcagctgcatttcatctggtcctgggcctcggtcctggcttggagaggtgcagctcacagccacttcatggctgggatcccttctgtcccagacagctgaggagacccttggcctcagcctgagtgtcattccaaccagggttttatgcaca

SEQ ID NO: 13303 - DNA, 349 bp, Homo sapiens
  source 1..349: mol_type = other DNA
gtcagcctccctgtggatgcagcaggagggaacccacggggtgcagtgcttgagcccaggagggtcagcatgtgaacgcgcctttctccctctgcctgagcaggcagcccaagtgctggtcctgccccatcggcacagcctggctcaggacttcccggggacgtctagacacctcgctatctgtcggcagccaaggtacagaggagaggtcagagccattattcatatgaaactcagttcccgccagcggctgtgaccctctatagatctgtgagcactcagtgcatgcacgcagaggggaatgatgtgcccagggtcataccctcctccgcaaagctgggcatgtggc

SEQ ID NO: 13304 - DNA, 492 bp, Homo sapiens
  source 1..492: mol_type = other DNA
tgagcagacacaataagtgtgatttataataacagcacattatccctgtttttcagagaaggaaacaggcccagctgataactggcaaggtggtctccaggaacctctccctcaaggagcatcctcccccagcctgtgggggtgaacgatgctcccacaggcccagggcggggagaagagcatgtggaatggcccttcctgtgctatgggctgggcgctgggtcctgggcccatgcgggggccctggcactccagctttttcccctgagaactgtccagaggacagagttccccaggcagtgccccccgaaggcagtgccatgccccccgctagaggccacagggaggtttctgtgggggtaaggctgagcccagtggcctctggaggctcagccagcccctgaagccaaaatcttttgtgccatgttatgtcattgcttccaactgaacgttacccttctgcccctcaccttcgcgggaccggcggcgcca

SEQ ID NO: 13305 - DNA, 343 bp, Homo sapiens
  source 1..343: mol_type = other DNA
tctcctcactaggtgaggcagtaggagggcatttcgagtagccattgactgctgtggctgccacctctggtctcaacttccagggagaagtggacagcatgtccggcagcagagaactggggctttgggtcttatggacagggagactcatttccacaaatgcccagcctgctccttgcaggtctgggcttgtggatggggaaaaagtcactttcccaggctctaggattctatgtcctggcccggaactcaggaaggagctcaggtgctgggccaaggggggcacagtgagtgctcatagatgtatcatccaggactcaggagacctggactcaagtccaag

SEQ ID NO: 13306 - DNA, 242 bp, Homo sapiens
  source 1..242: mol_type = other DNA
tctccaggatactcaggttcccccaggtgactcacgttctggactacagacacagaagatctggccaagcctctgctcacactggacctgtctggggaaatggaacgccgagctaattatctctagacaaatggagccagccaggcatgcacgagctcagagggctcttcatcgcagtggagccctgccagtatgggtccgcttgctcatctagctgaggcccaaattgatgccaagatgat

SEQ ID NO: 13307 - DNA, 392 bp, Homo sapiens
  source 1..392: mol_type = other DNA
cagggacagagctgccgcctgctgtccctttccgggcatcacattcctggcagctggcggtcacttccctgcctttaccaggcagacaaagggggattttcccttgtttgcaggcccctcaaatgccttacattccaggagctgagagaacactcctgtggtttctaattaaacccacaatttaaataacaattcatgtaaccccaagggttgagtgcctctcctaaaggttaggaagtaaattaattggagcctgcaatcgagaatttttactcttctccagggaaaagatactcaggttcccccaggtgactcacgttctggactacagacacagaagatctggccaagcctctgctcacactggacctgtctggggaaatggaacgccg

SEQ ID NO: 13308 - DNA, 369 bp, Homo sapiens
  source 1..369: mol_type = other DNA
attgggaggccaaggtggatcacctaagggaccagcctggcgtgaaacactgtctctattaaaaatacaaaaattagtgtctgtaatcccagctacttggtgtagtgagccgagatcaggccactgcactccagctcaaaaaataataataataataataaagtcaagatgagatgtgaagccagatctagcatctgttggtagaagtgactgattccaacatttatgtaagtattccagcctttcatggggaggagtgcattcttccctgcctcacagcagaggcagagctggtggccagtacctgaagggtggtaatatttctactgagagtttgagctttcctaactcccgaggcaggaagaactg

SEQ ID NO: 13309 - DNA, 551 bp, Homo sapiens
  source 1..551: mol_type = other DNA
gccaggctgccgcacccggccgaggtcctgtattaaatgttgctccccgccggctggcagcgaacagggctcggattggtgctgggcccggctcccaccgcctaccggagtctgtccctttaaggaagagggacagccactctgtccctaagggcactaggcactgccgacagggggatccctggagtgaacaacgcgcggggtcccgggggacctctgcgcgtagcaggctccgccaggcaacctctcgcccgaggcggcggcgagctgcaagctaggtggagccggctgcgcggcgggaccccagcgccctggggcaagaccctggtgctggcgccagggcagccgcgggaggtggcgtgtgcaggagcggagaggtgcgcccaccccggccccgggcgcgaggggggcggggcttgggccgcggcccggggccaggctcgcggggatgggcggcgggagcgggcggggggcggggcgcgcgagcgggctccgggggggcggggcggcggcgcggggcgggctctggcggcctgagtgtcacacacgcg

SEQ ID NO: 13310 - DNA, 547 bp, Homo sapiens
  source 1..547: mol_type = other DNA
ggcccgcaagcgccacgcgcagccccccgcaagctgagggagccggagccggctctggcctcagccaacccaggaaggggctcccacagtggctcctcgagggagggctgcgaggactgccagcacgctgtcacctctcatcacacacaaaaaggtcactatgtgagatgataggttaattgcttaatttgaccgtaaaaattatttcactatgtatatgtatatcaagacatcatgttatacatcttacatatatatattttaaaccatagtaagtgagatgtccagtgttccatccactcatgcattcaataaatagttatcatgtgcctactatgactacaggcactgttctggacactggaggtatgcagtgaacaaaagggcaaagatctctttcccgctgtgaaatatatgtaaaatataagacactgtgcccaggggaggcctcactaggaaggcacaagtgtgcctagaggcttcaaaaagaggcagcctggctgcaaggccttacgggctactgtaagaattttggcatttcctgtta

SEQ ID NO: 13311 - DNA, 306 bp, Homo sapiens
  source 1..306: mol_type = other DNA
tgctgccgcagaacatctctgctagtgccaccctacaggggggcagagtactactaattggcagcacctagtccatccctggagacaattaaatgtccgagaggatgatgtcatctgtaattagtgataggagaaaacttcaaaatacagcgctaagtttttaaattttttttaaagcattactatatgattttatttttattaaaataattttgaaagatgcaggagattacaggtgatatttttacactgtgcatacattctttttgtccttaggacaaaaatgtactttgaaaaatgcccaaa

SEQ ID NO: 13312 - DNA, 302 bp, Homo sapiens
  source 1..302: mol_type = other DNA
tccctggagacaattaaatgtccgagaggatgatgtcatctgtaattagtgataggagaaaacttcaaaatacagcgctaagtttttaaattttttttaaagcattactatatgattttatttttattaaaataattttgaaagatgcaggagattacaggtgatatttttacactgtgcatacattctttttgtccttaggacaaaaatgtactttgaaaaatgcccaaaagcggccttggccggcgacaggacgtaggcagcgccccaggcgcaggcggagcctcattggccgctgagcc

SEQ ID NO: 13313 - DNA, 866 bp, Homo sapiens
  source 1..866: mol_type = other DNA
gtggctgcggccaagccaggcattctgcccggcggcggctgcacaggggcgaaaaagcgaccccgatccccctccggtggaggaatgggcgggaggcacggcctgggggccctcaggctgggcgcgctggcgatcccgaggccgaccaggccatgcacctccagcccgcctgggcacccaagctgcatccgccttctgtgtgcaggcagcagcctccaggcaaccccatctcagaaccggggccagatgtccctgtggctgcggctgagctaggtggtctgccctgcagcgggaaccggctctcagccccattccccgtggctgcagagggccactggctagaggtcccaggggcagggcctggcgggctctcaggccaggtgcactcgcgatccagaggccgcctaggccgtgctccaccacctgggcgcccaagctgcaggcgccctctacctgctggcgacagctgcctggcaactcccaagatggctggcgctcccagcctggcagaaccggggctacatgtcgccctggctgcggccaagccaggcggtctacccggcggcggctgcaccgggacaggaaccgaccccccagtcccatccccggtggctgcggagggcccctgtcagcggccccgatctctcttcggaggaggagcgggtcgggagtcagggccaggcaggccctcaggcgggaagggatgcactcctgggattccgggacgtcccgcgggagcccaggagaacccgcaagccagcgacgcgtgcgcccgtgctgcaggtgccccctgccggccacgagggcttgggagcggcttccggagtcccggctggcgctgagttgtaggcgcgcgcctaactggc

SEQ ID NO: 13314 - DNA, 836 bp, Homo sapiens
  source 1..836: mol_type = other DNA
ccgcctgcgccgggtcgggttgctgcagcggtgcccgctgcaggagctccgcgcctgctgcttctccgacgtcagggcgccgccaggatgacaggtgcaggaggctgcggctgtgggcagatgtggtttccagccccaggtcccggcggcccctggcttcccagcccgctgtcctgtgggctcagcaggtcagctgccccgcctggcagcccagccagacaaggcaaccgaatctgagtgactttgtgcaggcagcgggccggcgcccaggatgctggggagccctgcgcgccggaggccgacaagccgtggggcccagaggcgccacagggcgagaaggcacccgcctcccagcgctttcaccccccggcccgcccgacccgctaggtgtagcagtggctgcggccaagccaggcattctgcccggcggcggctgcacaggggcgaaaaagcgaccccgatccccctccggtggaggaatgggcgggaggcacggcctgggggccctcaggctgggcgcgctggcgatcccgaggccgaccaggccatgcacctccagcccgcctgggcacccaagctgcatccgccttctgtgtgcaggcagcagcctccaggcaaccccatctcagaaccggggccagatgtccctgtggctgcggctgagctaggtggtctgccctgcagcgggaaccggctctcagccccattccccgtggctgcagagggccactggctagaggtcccaggggcagggcctggcgggctctcaggccaggtgcactcgcgatccagaggccgcctaggccgtgctccaccacctgggcgcccaagctgca

SEQ ID NO: 13315 - DNA, 539 bp, Homo sapiens
  source 1..539: mol_type = other DNA
gaccctgccactgcagtccgctggaaagagcgagactaataaaataaaaaatacccatcacctcaattttattttttgtggttagatatttgaaatttactttttgttatttaaatatacagtacattattattgactatagtctcaaaacgcatttctccgtttatgtacttttatgaattcaatttttagacctaaatttaaatccaaaagctgtaaaacttctgtaaaataacaaaagggatatttaggtaactttgggtttggcaattactttgtagatacaacagtaaagtacataaaagacaaatttctaccatgaaagaagatattggtatgaagtcgttacaattaaaaacttttgtttgcaaaacacctgtctggcatagatggcatatagaaggggaaaagcttatgaaaagatgtttgccctcccatccctcacacaccctccgctgcagcggagtgggagcgggtcaggacggccgtgggtcccggggaatccgagaggctgagcttggagcccagactgacccgcc

SEQ ID NO: 13316 - DNA, 499 bp, Homo sapiens
  source 1..499: mol_type = other DNA
tagcacacagtaggcgcgcaaggagtgcagtgaataaaacgtaaattttagacttccaccaaggccgactagggtgaagatcctgaatgaatgaaatagttttaaaattgaatgtaatcgcaaatattaaaactttaaataaaggcgtgaacagcgcagtgataaagcctggcgttctccacctgcaggcggaggctgacggcgcggtctttggcgcgagtccgtgcaccgcggccgccccgccccggtgggagagagggacggaggaggagagcgccaggcggagctggggcgtccctcccgctcgcttcttgactcgcgttgctgccggccgcctcccgcgcctagtgtccgggacgcgcctgaacctgccgcctccgtgcctggggtggcgccgcgcggccccgagcgctccagaaagctgcggcgcgagtccgcggggccgacctcggagacgcagctggggccgggcgcggcttggcgggagggtctgcagcgc

SEQ ID NO: 13317 - DNA, 512 bp, Homo sapiens
  source 1..512: mol_type = other DNA
attacatttgaattcattttacattttacatctattacatttgaattcattttaatgaaaaagcctttcaaagttgtctttctaaagggaagattaatacactatttcttagagataccatctaaaaaagtatctttctttcttttttcttttctttgcccctactgtgaatttgagaagcagaggtagcacacagtaggcgcgcaaggagtgcagtgaataaaacgtaaattttagacttccaccaaggccgactagggtgaagatcctgaatgaatgaaatagttttaaaattgaatgtaatcgcaaatattaaaactttaaataaaggcgtgaacagcgcagtgataaagcctggcgttctccacctgcaggcggaggctgacggcgcggtctttggcgcgagtccgtgcaccgcggccgccccgccccggtgggagagagggacggaggaggagagcgccaggcggagctggggcgtccctcccgctcgcttcttgactcgcgttgct

SEQ ID NO: 13318 - DNA, 448 bp, Homo sapiens
  source 1..448: mol_type = other DNA
cctggcacctgtcgagggagggaggtgcagcaaatcaccatggtacatatttgcctatgtaacatgtataaaataaatacataagtacataaaattttaaaagacaaaaaaaaatcttaattgtatgtgggtagttccctttgattgaaagtgagatagaaataattttttaaaacttactattcaaaatttgcaaaactaaataagagtaaaagaaatttacattttgtccctggattgatacaagacaaaattctgagaataaaaatccctggtacatagccaaaatttcagaacttcagattttcaagggctataaaaatatctatattccagggagatggggggtggggaggggctgtgcttcagtctccccctcccctgcccccctttgtgacatcaaggccccacctctgtgacgcaggcctgggccccagtccctagtccc

SEQ ID NO: 13319 - DNA, 714 bp, Homo sapiens
  source 1..714: mol_type = other DNA
ctctcaagtgggagggcgatgcacttgaccctgaggacatcaggtaccaggcccgccagctcacgcctgcatcggagccgcagctgcagtctagacgtggtgcaccggcagcaagtgactggacactccagaccaggcccgccccgcagtagcgtggatcctgaggccagaccgcaaccggccccgccagcagccgctgtttcatccgtgtggacacagagtgcccagcgccagggcccgagcggaccttgaggccaggtgggctgtgcgctctgcggccctgaggccatcgccagtgccagatctgcagctgcaaaccgcgcgtgtggcactggcagcagtgagggcgggtgggggaaggagcagtccctgactctgcctccatccctggcctcgccaatccgcgaagccactcaggtggccgcggagtgcccttgccagcaccctatctcccttctgaggaggagcggggcgggctgcaaggccagacaggccctccttctcaggccgggctggctgcgcgcctgcgatcctggggctgcccgggcgatcccaggagaaccggcgagcccatcggcgcacgcccagagctgcagccccacctgctggcgcgcgccgccagggagcgtcttctgggagcccggcagcaactgccgtgcaggcgcgcgcccaacggctttgcgaggctcactcggtctgagaggtcggaggctg

SEQ ID NO: 13320 - DNA, 673 bp, Homo sapiens
  source 1..673: mol_type = other DNA
aaaaatatagcaagcctcaggagtttatatattatatggataattttatgaagctcaaaaacacccaaaattaaacaacatattctctaagtacatacgtgggatatgtggagttcactataaatttatattagaaagaagtgattaatgaacttaggttacctgagaagtgatgcatgaatactaaaaatttggaattacatatataatatgtaataataaaaaaagaaaaaattgtcactggttatccttcaggtataaaaattacaattaaaattgtaatgttataaccttccattctttcccctatgaattaaaacttttttttttaacgagactaaaaaatcaagttgataaaatcgtgggaactggttaggtcaggctacccactccagatttccagcaggctggcctcagctctacctacagccagtagcttattaaggctctaggcgccagtgacaccttcagacaggtggttagtgcgccctaaggactctccgcagcgtcgcaggttccccaggggcgtgtccagctgtcgtcggggagagcccacctccccggggggtgtggctaagggctcgtccagagcccaggtaatccgggcgggatcagctagcgtcgcgatgtgatgacgtcaggccccggccaggccgggagtggcgtgctgggc

SEQ ID NO: 13321 - DNA, 838 bp, Homo sapiens
  source 1..838: mol_type = other DNA
gctccgccgactgggcgcccaagctgcagtcgccctctgtgtgcaggcagcagctgcctggcaacccccgagctcgctcgcgctgtcagcatcgcagaaccagggccaggtgtcccagtggctgcggccaagccaggcattctgaccggcggcggtggcggctgcacaggagcgagaactgagaagccgccgctcgtgtgctgagggcccaacggccccgatctccctcaggtggaggactgggcgggaggcacagcctgggggccctcaggctgggcgcgctggcgatcccgaggccgaccaggccatgcacctccagcccgcctgggcacccaagctgcagccgccttctgtgtgcaggcagcaacctccaggcggaacgagggccagatgtccctgtggctgcggccaagccaggcggtctgccctgcagcagctgcacgggggcgggaaccggccctcagccctatcccccgtggctgcagagggcccttggctagagggtctggggggctctcaggccaggggcacttgcgatccagaggccgcccaggccatgctcaccacctgggcgcccagctacaggcgccaggcaactcccaagctggctggcgcgcccagcctcgcagacccgggcatggatgtcgccgtggctgcggccaagccaggcggtctgctcggcggcggctgcaccggggcaggaaccgaccctcagccccatccccggtggctgcggacggcccctggagcggccccgacgtctcttcggaggagaagaggggcgggagtcacggccaggcaggccctcaggcgggaagggatgcgcgcctgcgattcc

SEQ ID NO: 13322 - DNA, 438 bp, Homo sapiens
  source 1..438: mol_type = other DNA
aggtgcagcaaatcaccatggtacatatttgcctatgtaaggcatgtctgcacattaaaataaatacataagtacataaataaaactttaaaagacaaaaaaaaatcttaattgtatgtgggtagttccctttgattgaaagtgagatagaaataattttttaaaacttactattcaaaatttgcaaaactaaataagagtaaaagaaatttacattttgtccctggattgatacaagacaaaatctgagaatgaaaatccctggttcatagccaaaatttcagaacttcagattttcaagggctataaaatatctatattccagggagatgggggtggggaggggctgtgctccagtctccccctcccctgccccgccctttgtgacatcaaggccccacctctgtgacgcaggcctgggccccagtccctagtctc

SEQ ID NO: 13323 - DNA, 449 bp, Homo sapiens
  source 1..449: mol_type = other DNA
cctggcacctgtcgagggagggaggtgcagcaaatcaccatggtacatatttgcctatgtaacatgtaaaataaaataaatacataagtacataaataaaattttaaaagacaaaaaaaaatcttaattgtatgtgggtagttccctttgattgaaagtgagatagaaataattttttaaaacttactattcaaaatttgcaaaactaaataagagtaaaagaaatttacattttgtccctggattgatacaagacaaaataaaaatccctggtacatagccaaaatttcagaacttcagattttcaagggctataaaaatatctatattccagggagattggggggtggggaggggctgtgcctcagtctccccctcccctgccccgccctttgtgacatcaaggccccacctctgtgacgcaggcctgggccccagtccctagtccc

SEQ ID NO: 13324 - DNA, 757 bp, Homo sapiens
  source 1..757: mol_type = other DNA
gcacacctgccgcgcggaccctggggcgggtgcctgggcgcccaagtcaggcagtccgcagagcagtggcaccagggtgaaaacctgctgctcggtaccatcccggttaccacgaagagccagtcaagtgggagggcgatgcacttgaccctgaggacatcaggtaccaggcccgccagctcacgccggcatcggagccgcagctgcagtctagacgtggtgcaccggcagcaagtgactggacactccagaccaggcccgccccgcagtagcgtggatcctgagggcaaccggccccgccagcagccgctgtttcatccgtgtggacacagagtgcccagcgccagggcccgagcggaccttgaggccaggtgggctgtgcgctctgcggccctgaggccatcgccagtgccagatctgcagctgcaaaccgcgcgtgtggcactggcagcagtgagggcgggtgggggaaggagcagcccctgactctgcctccatccctccgcgaagccactcaggtggccgcggagtgcccttgccagcaccgtatctcccttccgaggaggagcggggcgggctgcaaggccagacaggccctccttctcaggccgggctggctgcgcgcctgcgatcctggggccgcccgggcgatcccaggagaaccggcgagcccatcggcgcacgcccagagctgcagccccacctgctggcgcgcgccgctagggagcgtcttccgggagcccggcagcaaccgcgg

SEQ ID NO: 13325 - DNA, 736 bp, Homo sapiens
  source 1..736: mol_type = other DNA
agggcgatgcacttgaccctgaggacatcaggtaccaggcccgccagctcacgccggcatcggagccgcagctgcagtctagacgtggtgcaccggcagcaagtgactggacactccagaccaggcccgccccgcagtagcgtggatcctgagggcaaccggccccgccagcagccgctgtttcatccgtgtggacacagagtgcccagcgccagggcccgagcggaccttgaggccaggtgggctgtgcgctctgcggccctgaggccatcgccagtgccagatctgcagctgcaaaccgcgcgtgtggcactggcagcagtgagggcgggtgggggaaggagcagcccctgactctgcctccatccctccgcgaagccactcaggtggccgcggagtgcccttgccagcaccgtatctcccttccgaggaggagcggggcgggctgcaaggccagacaggccctccttctcaggccgggctggctgcgcgcctgcgatcctggggccgcccgggcgatcccaggagaaccggcgagcccatcggcgcacgcccagagctgcagccccacctgctggcgcgcgccgctagggagcgtcttccgggagcccggcagcaaccgcggtgcaggcgcgcgccgccagggagcgtcttctgggagcccggcagcaactgccgtgcaggcgcgcgcccaacggctttgcgaggctcactcggtctgagaggtcggaggctg

SEQ ID NO: 13326 - DNA, 677 bp, Homo sapiens
  source 1..677: mol_type = other DNA
aaaaatatagcaagcctcaggagtttatatattatatggataattttatgaagctcaaaaacacccaaaattaaacaacatattctctaagtacatacgtgggatatgtgggtacgtgtaacttactataaatttatattagaaagaagaatatgattaatgaacttagattacctgagaaaagtgatgcatgaatactaaaaatttggaattacatatataatatgtaataataaaaaaagaaaaaattgtcactggttatccttcaggtataaaaattacaattaaaattgtaatgttataaccttccattctttcccctatgaattaaaacttttttttttaacgagactaaaaaatcaagttgataaaatctattgtgggaactggttaggtcaggttacccactccagctacctacagccagtagcttattaaggctctaggcgccagtgacaccttcagacaggtggttagtgcgccctaagggctctccgcagcgtcgctcaggttcacagaacgcccaggggcgtgtccagctgtcgtcggggagagcccacctccccggggggtgtggctaagggctcgtccagagcccaggtaatccgggcgggatcagctagcgtcgcgatgtgatgacgtcaggccccggccaggccgggagtggcgtgctgggc

SEQ ID NO: 13327 - DNA, 625 bp, Homo sapiens
  source 1..625: mol_type = other DNA
tggccataaatcatgattcagggttataaacaaagtatatgctttattttgttgttcataactaggaaaagggagacaagctttcttacttttcaacaaaaagtttctctatatttacatgctgaccttcttatataaatacacaaagtgactcttaggaacatgtaagtgattataggaagttaacatataccaatgacttatttgccaccaactttataagtaggcttctagttactgcagcatattaaataatggtatcatttgtttttctgaaacatgcaaaacactgggtcaatttttttgccaggctgcagagcagtgatgcaatcttggctcactgcaaccacattgctaccactgtagccgagctgtggtctctccaggaggcgcaggctctggctccagcctccagcatgtcttccagcccggcaggagaagctcctgctgctagcagggaggcagcgccccaggctccaggctccaggctccaggcggtgaacccttctagtttgaagttacggatcctggactacatgttcagagaaaaacctctaggcctaatcttaagacttgctcttatgcaatcagaacatgaaataaatgatgctgaagagccgttacg

SEQ ID NO: 13328 - DNA, 825 bp, Homo sapiens
  source 1..825: mol_type = other DNA
cacctgccgcgcggaccctggggcgggtgcctgggtgcccaagtcaggcagtccgcacagcagtggcaccagggtgaaaacctgctgctcggtaccatcccggttaccacgaagagccagtcccggcggcccctgcgttcttgcaacctctcaagtgggagggcgatgcacttgaccctgaggacatcaggtaccaggcccgccagctcacgccggcatcggagccgcagctgcagtctagacgtggtgcaccggcagcaagtgactggacactccagaccaggcccgccccgcagtagcgtggatcctgaggccagaccgcaaccggccccgccagcagccgctgtttcatccgtgtggacacagagtgcccagcgccagggcccgagcggaccttgaggccaggtgggctgtgcgctctgcggccctgaggccatcgccagtgccagatctgcagctgcaaaccgcgcgtgtggcactggcagcagtgagggcgggtgggggaaggagcagcccctgactctgcctccatccctccgcgaagccactcaggtggccgcggagtgcccttgccagcaccctatctcccttctgaggaggagcggggcgggctgcaaggccagacaggccctctttctcaggccgggctggctgcgcgcctgcgatcctggggccgcccgggcgatcccaggagaaccggcgagcccatcggcgcacgcccagagctgcagccccacctgctggcgcgcgccgccagggagcgtcttccgggagcccggcagcaaccgcggtgcaggcgcgctccgccagggaccgtcttctggg

SEQ ID NO: 13329 - DNA, 673 bp, Homo sapiens; identical to SEQ ID NO: 13320
  source 1..673: mol_type = other DNA

SEQ ID NO: 13330 - DNA, 329 bp, Homo sapiens
  source 1..329: mol_type = other DNA
aatctttagcaacctagcacagtatctggtagtagggcattaataagggatttagccccctcctagtcgtctgtgttgctgctgttgcaaccaccacaacaaacaaagtcggggtgggagggtacacacacacacacacactgttcgctgatggcaaaaggtttcagccgacgggccgggcgccggagaggaacccggactctgcccaaagtctcgccgcccgccggctgttttctggcggagggtgtgccccggagggcggcgatcgcgggtgaaggctggggccaggcgcgggtggaggcgtcaccggggtcgggctagcaggccct

SEQ ID NO: 13331 - DNA, 439 bp, Homo sapiens
  source 1..439: mol_type = other DNA
gtcgtctgtgttgctgctgttgcaaccaccacaacaaacaaagtcggggtgggagggtacacacacacacacacactgttcgctgatggcaaaaggtttcagccgacgggccgggcgccggagaggaacccggactctgcccaaagtctcgccgcccgccggctgttttctggcggagggtgtgccccggagggcggcgatcgcgggtgaaggctggggccaggcgcgggtggaggcgtcaccggggtcgggctagcaggccctgggacaccccgaaagtgagtccaacttgggtctctgccgagagagtcagccgagcggccgcgcggagaggaggggcgggcggtccccaggcgggcgggtgcagggcgcagggcgccgacctgctggagagggggcccgggcgcgaggcggagtcccggcgcgcagccaggctggt

SEQ ID NO: 13332 - DNA, 369 bp, Homo sapiens
  source 1..369: mol_type = other DNA
atcctgagtaaaagcaacccagggttccttttttagcagcatcctctaaaacgaattctatttcatatgtactttatgaaagggggaaagattgcaggaattacaggcccaaaatccccccaaattcccttgtcaacagagcaggaaccacgaagttcacactctgaacttctgtcttggaattatgccagtatccttttaaacctcaaagaagatcgttctttaaagagtgctaacttctccagcttttagtggggaattgccctccatggggattaagagaccagcgccttttaatcaaaggagggctgtgctatgttttttggctaattctccaaggatattacacttactttcaatggttaatga

SEQ ID NO: 13333 - DNA, 303 bp, Homo sapiens
  source 1..303: mol_type = other DNA
tttccaaggatccccaaagaaattaaatttgttctggcttatttgtggattaaattgacctccctctagaacaaaatttatctttctgtttggccaatagacaggaccaaatattctgccaattagattttttaaaacattgctggaaaatatgatttttcctggcccagagacccactaggttccacccagggtgagtggggcctcacgtgctgaagctgttctttgccaaccaaaaaaaagccttcatataaatttgtcctgttttcgaaacaagggtattggcccatgtgcctggtaaac

SEQ ID NO: 13334 - DNA, 769 bp, Homo sapiens
  source 1..769: mol_type = other DNA
cctcgtgaagggggcgcctgcgctcaagtgccggcttcgccgcctcaggcagagtctagcaggcgggcctggggaaaggggacgccctatccccacagccctgtttcgcagggcttcaagacgctgagaacggccgggaacccctggagtcttggaggcacccgccaattccaggggcccaccccaaccccgctctcagtctgggccagcggcggcgggacaggcgcccggtccccacacaccggctgagacgcccagcccactgcggctgaagctccggccgctgttgcggcaggtgctgcaaaccggtctgccttcgctgcagggcttgcgaagagcctgggcggccggcaggcggggcctgcagcctccccagccgcggcagccgccgcgcagccggctctctctgcgcctcgctccgactccggcgcgcaccaagcgggaacccgcgcccgagcccggcgggcgccgctgctgctcctctcggtccccggttcccggtccccgaacgcgccgcggcgaggctgcgcccggcagtggagccgctcggagctgctgggctttggcggccgctcgctgctccgtctggccggaggaccggcggggaactcgccgcggcgcgcgcgcactgcacactcgtagccgcgcgcccccgccaaggcgcgtccggagcgagtttggccccgcggctccagccccggcacctgcccgccctcagcgttgcccccggccccggccccgcccgccgccccttcgctgtggggaagcg

SEQ ID NO: 13335 - DNA, 505 bp, Homo sapiens
  source 1..505: mol_type = other DNA
cacagactgcctgggagtgcctttcaaagttaagccatgtctcagtattgttataacggttgtaaggttccataataaattcttagaaaatgttggtagttgtaattttatgattagctttaaagcatatttctaaggtactatgtaaatattcatggcactctttctaaagcatacctataattatcagcttttcataggcaaacatttcttgcataaaccttgcctgccaaagaagggtctgcatagagaacctatgaattgatctcttgacactctttgaatactgtgtgccaactttcacaaagattgcagctactaaaaatgcagttttgtgattagacatttgttaaatgattttagaatagaatgagttgattgagaaattcctcaaagagtcatctggaattcattgctgcactgcaatagttacacaacattgtgaacatactaaatgtttactttaaagtgtttagttttatgttatatgaattcagataataat

SEQ ID NO: 13336 - DNA, 359 bp, Homo sapiens
  source 1..359: mol_type = other DNA
tgaacaaataaactcacttttaatgagatatcaaggttttatattaattacatgaagaattgtggtttcatttttaaaatgtgaggacctactggtttaatccttcatacttcacacatatgcttgtgctggaactatgactgtaaaaccctttaagttttcattgttctcaagataaagaccagaatgtggtctggtccaccacctcacgtcagctgccaactggctgggtctcgaggaagccctcccaatccagaatatgacaatcttattgacatcacgcttgcgctcaatagctatttgccgaagggcaggcgccgcgacatcgcgagcgcctgcgcgaagggctacgcatgcgc

SEQ ID NO: 13337 - DNA, 409 bp, Homo sapiens
  source 1..409: mol_type = other DNA
tgggcaacagagtgagactctgtctcagcgccttcccagttactcagtgagccgagatcgcaccactgccctccagcctgggcgacagagcgagactccgtctcaatcaatcaatcaatcaataaaatctattaacaatatttattgtgcacttaacaacatgccctgtaaaaaaaactttacagggcttaactcattttatcctttgaagtaggaacttttataaaacgcattttataaacaaggcacagagaggttaattaacttgccctctggtcacacaccgttttgctttgcacaaagcaggctctccatttttgttaaatgcacgaatagtgctcttcctgaggtctaacctctagagtgcctgcggccagtggccaccaggggtcgccgcagcacccagcgc

SEQ ID NO: 13338 - DNA, 450 bp, Homo sapiens
  source 1..450: mol_type = other DNA
aactgatttgagtaataataaaactccggtggaattcccctgtcttgacaaatcggctgtctacgcagccggcaaggtggacccactgggcggttacagcattattaggtatattaacactgttgtgccacgttaaacagaaggggcacctgcttgccaggtggaggcctgggcactggcagggttctgccctcccgactgagcaggggccccgaggtgactaagcaggctaaccggtccggatgggggcctcagacccaaaaagttaactttacactaaaatcacaaccatgcttcccgggggcttaggggacatcctccttgcccagaccctggaaaggattaccagctctgggaggaagctcagctgcagttctacgtagaagaaactccagtgacaaaggtctcccaggcagccgcggcccctgccccaccgctgagtggcgtgcg

SEQ ID NO: 13339 - DNA, 655 bp, Homo sapiens
  source 1..655: mol_type = other DNA
agtgagccgagatcgcaccactgccctccagcctgggcgacagagcgagactccgtctcaatcaatcaatcaatcaataaaatctattaacaatatttattgtgcacttaacaacatgccctgtaaaaaaaactttacagggcttaactcattttatcctttgaagtaggaacttttataaaacgcattttataaacaaggcacagagaggttaattaacttgccctctggtcacacaccgttttgctttgcacaaagcaggctctccatttttgttaaatgcacgaatagtgctcttcctgaggtctaacctctagagtgcctgcggccagtggccaccaggggtcgccgcagcacccagcgctggagggcggagcgggcggcagacccggcagcatgtggactctcgggcgccgcgcagtagccggcctcctggcgtcacccagcccagcccaggcccagaccctcacccgggtcccgcggccggcagagttggccccactctgcggccgccgtggcctgcgcaccgacatcgatgcgacctgcacgccccgccgcgcagtaagtatccgcgccgggaacagccgcgggccgcacgccgcgggccgcacgccgcacgcctgcgcagggaggcgccgcgcacgccggggtcgct

SEQ ID NO: 13340 - DNA, 479 bp, Homo sapiens
  source 1..479: mol_type = other DNA
ccacgttaaacagaaggggcacctgcttgccaggtggaggcctgggcactggcagggttctgccctcccgactgagcaggggccccgaggtgactaagcaggctaaccggtccggatgggggcctcagacccaaaaagttaactttacactaaaatcacaaccatgcttcccgggggcttaggggacatcctccttgcccagaccctggaaaggattaccagctctgggaggaagctcagctgcagttctacgtagaagaaactccagtgacaaaggtctcccaggcagccgcggcccctgccccaccgctgagtggcgtgcgtgcaggcccaccctggggctcgcgcgcggaagcaggtgacagccgccgcccacccccttacgggagcagccgcggaggccgctggcgccctcccattcccggggagcttcccgcactccggcttgggtgaagtgcagccagcgacgcgcgcaggga

SEQ ID NO: 13341 - DNA, 514 bp, Homo sapiens
  source 1..514: mol_type = other DNA
cccggggcggcagcgcctcacagggtctcgtgtgcctgaacacgcacctgcggcagccacaggtgtctgggtttcactcaagggatggaaactgtccgattaaaagggcctttgaatttctgttggcgcagccaactgcatcgggtgggggcaggagccggtgcctggcggagcgcggcgttgagtgcccgctgagcctccgccgcggggcttgaaccgtacagccctgggggtgctcgccctgcccgcgtggtccgcaaaacggggatctcctccgcctttaaacaacaaaaaaattttcactttctgagggctgcattgcaaggttcttctatagggagctctcagtcaagaattccaggcattcttcgagcttgagaagggcattttcaagactattttgaagtttgcaactgacagaggtgggcgagttccgtagggaggcctccgcaggcaggtcttctgtcttctgaactttccgtgaggaaccacgtgtcttgccactttaaggtca

SEQ ID NO: 13342 - DNA, 572 bp, Homo sapiens
  source 1..572: mol_type = other DNA
aagggaagagcagggcaggcaaaactattctcttacaagatggttttttaagatttcaaacccaaggttatatttttaatcggtacctgtttggattctccaaattaatttatatgctcttaaaataaagacacttaatagatgaacctgtcagatctggcaaccttttataagctgatgactctttatgaatatattgtcctgaaaagtcctgttttaatatttaatacgaacatcttatataaaactttgaggttttcccagttcgactcttcgtaggatttcaggatgcccccgcgacctcaccggggaaacaccgcggacagtcgggcgcccggagctcactccaggcttgcagcacttcccagagcgcgcgcgctcggagcgggacctgcttgctccagtgcacgccgcggagcgaaccatgtgggggctgcgggccgctcgggccttgggcttctcctgccgccgccgccgcctcccgcccccggccaggagtcgcgcgtgacgcggttcgccgcaggagcctcgaaggcgcggcgccggcgagcccttccccggcaggcgcgtgg

SEQ ID NO: 13343 - DNA, 400 bp, Homo sapiens
  source 1..400: mol_type = other DNA
tccatggtccagatttatatacatctcctcaaatcaatttgcacgctgtttggccaagcccattggcatataacatacgatgttcagaataaagacaaagaacagacggcagggctctttgttattcttttatctgctaagtttacaaaaaggttagacagtggaactttgctgagcaagcattctgtcccttccaaggacgtaaaacattttcttttcgtctatactgtataaatacttctctaaatattcttttaagtgtctcatttactcaattctgtcaacttagatgctgaatcattttatgtgcttaaaagaaagttccctggcaagggatccaaactgctttctcttttcaaagcgtttggcatccctgccatatggatgtgtcactgtgtgt

SEQ ID NO: 13344 - DNA, 628 bp, Homo sapiens
  source 1..628: mol_type = other DNA
cctgtttggattctccaaattaatttatatgctcttaaaataaagacacttaatagatgaacctgtcagatctggcaaccttttataagctgatgactctttatgaatatattgtcctgaaaagtcctgttttaatatttaatacgaacatcttatataaaactttgaggttttcccagttcgactcttcgtaggatttcaggatgcccccgcgacctcaccggggaaacaccgcggacagtcgggcgcccggagctcactccaggcttgcagcacttcccagagcgcgcgcgctcggagcgggacctgcttgctccagtgcacgccgcggagcgaaccatgtgggggctgcgggccgctcgggccttgggcttctcctgccgccgccgccgcctcccgcccccggccaggagtcgcgcgtgacgcggttcgccgcaggagcctcgaaggcgcggcgccggcgagcccttccccggcaggcgcgtgggtggtagcggccaatttgacagtttcccgggccgggcggccagcgcggaggcgccacgctcgggtcgggggcgggctgacgccgccgccgccgcgggaggagggacaaaggggtgggtccccgcgggtcggcaccccggcg

SEQ ID NO: 13345 - DNA, 424 bp, Homo sapiens
  source 1..424: mol_type = other DNA
atcacctagactagcctccagctacggttgcagtgagctgagatcatgcccctgcactccagcctgtagaaaaagaaaatgttaattttatagcaaataaacatataaccttcatctagttttaccagttgttaacaggtactatttaagtaagttgcaggcaactcaccattacccataaatatttcagaggtatcttccaccattataacacttaagaagattaacattaatatccctttcatatattatagttcattttcagattggatcagggacctatggtagttcatgcaacttttttgaagagttcaggccagtgaatttcccatatacaaaattaactttttaatacatattttaaaatagtcctataaaccagactaagttttttgaacaaattgataacatacgtgtatgttta

SEQ ID NO: 13346 - DNA, 253 bp, Homo sapiens
  source 1..253: mol_type = other DNA
gttttttataagaagccacttaggggaggtcttccgagtggtagacacactgtatgacggcaagctgggcaactggctggctgccacatgatgagttcattacttgtcaccatctattccagtttattgtgagtaaatttagtatacaagagataaggtacccaaatttcactctgagctcagaagtaaaattgactggatttgattaatgaaatgcatgttagctcagagctgaacaaatggccagtgttca

SEQ ID NO: 13347 - DNA, 620 bp, Homo sapiens
  source 1..620: mol_type = other DNA
gtgtttatttaatttactcttcttgttaaaaaaagattgtaaagaaaaagattgaaaagctgtccagctaaagttttctgcccagtctgatttagatgcaccagataattcttactggtgatgtgctaaagagaataatcatcaccactgcttacaatgcctctcattaagagagctgcttatttgtttaataaatcattatccagagcagaatcaatataaagacacaagggcttatatcaaaagattatttacctttagtcagaatcagagctgtgactctatgtttttcttataccagaataaaacctatttaactcaataatttattatttattattactattttttgagacagagtctcactctgttgcccaggctggagtgcagtggtgcaatctcggctcatcagcctcccgagtagctgggacttagaggtgtgcaccactatattcagaactcctggcctaggtgatccacccacgtgctgggattacaggcgtgagccactgcgcccagcctaactcaataatttagatgaggtaaatgtgataggtactaagtaataataagtgacctcacatgggtctcacctgggccggctcatgtaccctcagtgc

SEQ ID NO: 13348 - DNA, 379 bp, Homo sapiens
  source 1..379: mol_type = other DNA
gaactcctggcctaggtgatccacccacgtgctgggattacaggcgtgagccactgcgcccagcctaactcaataatttagatgaggtaaatgtgataggtactaagtaataataagtgacctcacatgggtctcacctgggccggctcatgtaccctcagtgcagcagtgacctcagaagccatctcctctagaacaaaattattccaggtctgatcttacctgacattcctaatagactagtataggaagggaggtaggaagcctggccagtgagtgtattaaatcactaatatagatttgaaaataaacttaatcctatgacttctccaaatggttatgttgcagcacctccactcccatccctcctcaagagggt

SEQ ID NO: 13349 - DNA, 255 bp, Homo sapiens
  source 1..255: mol_type = other DNA
tttcttttcttgtcgtaaaatatacataacataaaatttaccatttcaaccacttttttcttttacagggtctccctctgtcaccccggctggagtgtagcagtgtgatcacagctcgcaaccattttaaaacgttcggttcagcggctcctataagtagaatcatacactatttgtctttaaccatggaaatgaggaggccgcttctgtgtttcctcttctcaagcagagtgcccagtggtaattaccacagat

SEQ ID NO: 13350 - DNA, 440 bp, Homo sapiens
  source 1..440: mol_type = other DNA
ggagagatccagaccattcccagctactcggttgcagtgagccgagatcacgccattgcactccaacttattttgaaatccagaatttgaatttaagacaagtgctttaataatttaagaagtgtgcatgtaaacttgggcacattgacagtatattacattgggttaaagtgtagcataaaaactgacacatacttttcttggtttaccttatggtaagataagctttctgctctggttcttatcaggaaaaaaagtccattataatcattttaggcacgaaactttctacgcattagaattcttccgaggtgaaaagtatattattaagggaattcattttgcaaagaggaatctttttaaagatttttcataaattaccagagtagtttaggattttatatcaggtgatgcctaatagatgcctgatactccggctg

SEQ ID NO: 13351 - DNA, 497 bp, Homo sapiens
  source 1..497: mol_type = other DNA
aacaaagagttcttcctcgctgctgggtagggcaccccctgtccaacagggttaggtcagggagcacctggctgaccagggatacccagtcactgtgctcagagccatgcctccccgggcagccggaggacatggatgtgctctggacagctgtcagccaggcctgcctgcatggcatcagactagccactcctgccaggccgccgggatggttcttctcccaccatggagacgtggtgggactccagctcgtgtgtcctcatggagaacccaggggacagctgaaattcagaactgagggcttgtggctttttgttcagaattaagcagaacactgcagtcagatcctgttcagtggaccgaaatctgtattctgtttgcgtacttgtaatatgtatattaagaagcaataactatttttcctcattaatagcttcaaggactgtttcagtgtgagtcagaatgtgaaaactaaattcaaagaagtactttattgc

SEQ ID NO: 13352 - DNA, 640 bp, Homo sapiens
  source 1..640: mol_type = other DNA
ttataatcattttaggcacgaaactttctacgcattagaattcttccgaggtgaaaagtatattattaagggaattcattttgcaaagaggaatctttttaaagatttttcataaattaccagagtagtttaggattttatatcaggtgatgcctaatagatgcctgatactccggctggagatgccgggaaagcactcccgcgaggtaggcacgtcctgcgccctgtgagcggtaactgcgctcgtaagggcgggcccccttctcactaaagcgcgccagggcctctctcgtggctggacagagaaggctcctcgctcttctctagccccagctcggcgggtggggacagacgctgagactctcggtggccggcctggccgtgaggtgcctcccacctcgagggacttacttaaatatttggggcagggcaccctcccaggaccccaggaagccggcgcaggttcggcggggaccctgaggctgtggcgcacttgccccggcacagcgcgagcacggagtgcgcgtgggtcgcccagggccagcgggaggcggacccgccaggcggcaggtgggtgcggccggctggagccagggcagcggcagcggcggcagcaagtggttgggccgtgcgcatttcc

SEQ ID NO: 13353 - DNA, 347 bp, Homo sapiens
  source 1..347: mol_type = other DNA
cacagttattcgtgatcatttgtataatgagtaaactttcaaatagggttgtttaaagggactgaatttcacccatctggaaaattttgccatccagactggctaatatggtgtgtgcagcccacatatgttgtctgagatcaggttaagatcttgaggcttgcaccaagtgcaaagctgcttgtttgttagtactaaacaggattagtatgaaaactttaaaggagaaaggaggaatattaaaattccctttgttttgtgaaagccactgaaatttaggttcttaataattaaagtatttttttttacctttcctccgttaaggtggacttaggtgaaggcaagat

SEQ ID NO: 13354 - DNA, 412 bp, Homo sapiens
  source 1..412: mol_type = other DNA
gataatctattgtgatcagagtagtgtaaaaatagtaatattttctaggcataatctaataataataactggcatttattttgctgttattatgtgacaggcactgagctaaatgatttcacaaagaccctctgagagaggtactggtaatatctcgtaatctgactctggagccacagctggatctaaacactagtattggcccaaacggactggtttttgcccattaatattttactttagtaagtcaaaagttaatacaaagtatttgggaaaaatgtaagaaaatatgtggttttatttatgaatgagtactacagcgtttattgcttagctttgaaagttagagttaactgccagtcctagcagtaatggtagtctcttttgggtatgtctttattggcagtgtgag

SEQ ID NO: 13355 - DNA, 738 bp, Homo sapiens
  source 1..738: mol_type = other DNA
caggcctcccgggacagcacttgccacctggtccctgccgcaaagggtggcctctcgagttaggagccatatctaggaaaaccaagccgagccttcctcggcttcacaatccgcaggctctccgctgtccccggcgggactcggcagttcccctggagggctgcagcccggctgtcttcgctcaggcccaagcccgcgcggctctccccctggcggagaactcgcaggactgcgacgcattccggagacgccgtcaatctccgacactccggacgacgcggctgcctggcttcgtggtcctgcagcgtggcccgttgcttcgcgcagaggttggccacagctgctggctaggaaactggggaccacctgggttgccaccgaggagggtggaggcccccgtcagtcccctcggggatgcagctgcattttcccctccttgcgtccggccgggagccagaggatggggcccattccgaaggggcccttaggcgagaggcgcgggtgtgccgcacgcccaccggcgccggggcaggggcgctgcagccggcggcccacggaggacatcagcggtgccgccgccgccgccgcgggctcgcgggccgcgcgcgcacgcgagtgggcgagggaggcaggggcgctactagcaggcggcgtgcgcgcgcgcgctcccccgcgccctccctcgcaggcccgcccggccccagcgcgcgtcacgaggggccagcgagctagctggag

SEQ ID NO: 13356 - DNA, 272 bp, Homo sapiens
  source 1..272: mol_type = other DNA
tttttcagaggaagaaactagatctcaatctcttttagttaaacttattataaataactcgtaagcatgtaatcccagcagtttccagctactctggttgcagtgagccaagatcgtgccactgcactccagcctgcctgggcgacagagtgagactcggacacacacacacacacgggttcagggaatttgctgctcagcactcttaggatttggcgggtggacaggcgaaactgcggatcccaggatgggttggagggatccgcccctcc

SEQ ID NO: 13357 - DNA, 514 bp, Homo sapiens
  source 1..514: mol_type = other DNA
gcagccagatttttctaccagaggtgcaaaagaaaacctgatacacaaaaattttagttatggcatttcaaaatcctaaataaactagaaagctcgtttttcctacaaaaatttatttttgctattatgaacaaaccctgtcagagccttgatccttttttttaaattccaaaattgacgcaaagagtcgaaaaatctaaaaacgatttcacttctactttctcttcctttaataaatttaagaattttaattaatgttttttaaaaaggctgctttcaagttcagattccttcaggaatgcccggggaccttgctgggggggttcaagagaactttgcaaacaaatgtccagcatccgcgcggaggcgaacttctcgcccaggccgccaactggctgacccggaagtgctcggcggcggccgcggcggcggggacgcggcctagccgaagcacccgcgcgcgcgcgcgcgcgctcgttctccgcggaactcccgccggcggcccggctcacgc

SEQ ID NO: 13358 - DNA, 234 bp, Homo sapiens
  source 1..234: mol_type = other DNA
ctatcattggtatctgctcaactcaaacccgctgcggcagcagcagcctctggaaacggcccactccagagctactggatcggaaacggagggtgaggcccttcagcagattctgatgcaccctcaggtttatgaatgcccccatttcaccggacggagggaatgctgagcaccaggcatgccagacattccacctccagggttagcattgctggaccgtaaacgctgaaactc

SEQ ID NO: 13359 - DNA, 334 bp, Homo sapiens
  source 1..334: mol_type = other DNA
gctcaactcaaacccgctgcggcagcagcagcctctggaaacggcccactccagagctactggatcggaaacggagggtgaggcccttcagcagattctgatgcaccctcaggtttatgaatgcccccatttcaccggacggagggaatgctgagcaccaggcatgccagacattccacctccagggttagcattgctggaccgtaaacgctgaaactccccaccgcggctgggcggggcgggagcctcgggtcccaacccagcggagggactcctggaaggcctgccccttccaagtgtctgcaagggctctggtcccaagctttaaaatcct

SEQ ID NO: 13360 - DNA, 383 bp, Homo sapiens
  source 1..383: mol_type = other DNA
ctcagaataatttaaagttccaacagctttaagtttgaattatttaatttcacagttgattcagggatgcaaccttggcaggctcctaaactgcgcctcctctttaacgagagggggagctctcacctggaaggggtgggagcaagcagggcctgacgtcctcccgccttggcggccgtggacgccccaggtgccacccacagcagtggctttcaaaatactaaacgcaattgagattttttcctgagttaaaacaaaaaaaaaaagttcgccctcagtctgggcctcgcacagcgcggcggagcgcgggaggggcggggcgggcctgctgacgtcgccggacctgaactgcgcaggcgcggcgcgagatcgcgggagcgagc

SEQ ID NO: 13361 - DNA, 465 bp, Homo sapiens
  source 1..465: mol_type = other DNA
tttctgaaagtgttaaaaatagcctccaaataaagctaaaagaatttatttagactaaattgcaccgtttcaatgggctatgctgtaaaaccagaacttttgttagcactgcatttttaagatgaattggtcattggaagaatttttaaacatcaaatatataacaaaacgaattcttactcatttgtgtttattcttgggtttttttaattatagattcacactgcattcttcgcgtttacaagtgtcgagcgcttgctttcggaacgcccttgtgattggccgagccaatgccagtgacatcaaccaacttacttttgctggaaaaccgaagctgaagttctcttttgccataggaacaggaggcccggaccggccacgggaccgcgaggcactccgaaatgtgcggctgccgcagggggagaaaagttgaatcaccctccccactggccaattggagggggt

SEQ ID NO: 13362 - DNA, 348 bp, Homo sapiens
  source 1..348: mol_type = other DNA
atttaccaatctcttcaagttaattagaaatggaggatgtggggattctccccataggagtttcaactgctcccactgaggtccgatgcctggggggggagccgaaggggggttgtgtcaggaactcccttctcatgtgaaattatccaatttctaccttcaaattgaaaaactatgggggtggaataacccccatttaaaaactgccatctctaaaagaaactttaacagatctcttttactatagatgtatttgatgatagcctcactttattatgtcacataaatcaaaaggaaagatgctttgtgcaagaaagtgcaagacgcctgacctgcgtttactgagga

SEQ ID NO: 13363 - DNA, 483 bp, Homo sapiens
  source 1..483: mol_type = other DNA
agtgctcatatactcactttttaaaaagtatttttgccttcttgaaattcaagaatactattatctaaaatattcactcttggatgatatatgaaagagccctttcttctctccattgggcccaaataaacatatcagggcatcacaacttttgatctgcctctttttaataaggaagcaggactgtaggtttctaatcatacatttgcaattgctagattattattgacattttagaagttctcgaaggtccccgacaaactatgttcagggaccaaaatattctactgaaacattcagagattttagcagtttctctttaaagaaatgctaccattccattctttggggatggtggaacaatgccgcttgtgtgctccaaccactaagaaggatttgctttccaaagttgaactttcagaactcattcacaagctttctctctgaaaatggaaaaaaacgtctcttgggggaagagcgaac

SEQ ID NO: 13364 - DNA, 363 bp, Homo sapiens
  source 1..363: mol_type = other DNA
agccggcttcgctgcttaaccgcccagggtgagaggggaaactgaataccccattcctaccccggtacaggcccttgaaggcccttaattgttcactctccccaaggatacttaagggagcaggaagaacaaagttgccccttcctgtctttggtaacctaggcttccacacgcagctcggggtgggagggtgaggtgaccgctgggagcgctaccctgcggcgcatcaacagcctcaggcgtgggccctgcactctccagagaaggcggcggctgccgggtggctggctcgggcgcaggtggcgctcgcagccccagcccacagttgagccaatcgcgggcgcaagcgcagcctggtggcgg

SEQ ID NO: 13365 - DNA, 686 bp, Homo sapiens
  source 1..686: mol_type = other DNA
ggaccagaagagctgccctgtgtcccagagcaggctggttcttctgacagcgctgagaacctggcgctcgcgcctggccaggagtgtcaggctcagccagggagtgacaggcgcagtaccagccttatcggtgctggaggcacaggctccggttcggccaggcgggtgtgcgcgcccaggaagggtaggagcctgcagccgcagcggggggcgctggctggggctctgccccgccggcagtgcgctcgggcgctgttccagcgcgcggcagcgagtggcgctgagcctccgctttcgcagctcgcggggagcggggccggcgggaggggccgggcggggccaccgcctcctctgatggcacagttcccggcccagccgagccgggctgcttgtctggccggcggaggctgagcgcgaccctagcaagccgcggcgcccgccgaccagggacaagagcgactcctgggaccccatctgccccgcgccgccgcctcctcccctgttgtcgcggggacgctcaggcccgcgccgcccgggccacgattctcctcctctttctcccggaggggaaggaacggagaaagccgagcggcggctccgggagagagcgagccgaggcccctgcccccgaggctcggggcaggaggaggagcgcgtcactctcgggaggagagtatttcacctcc

SEQ ID NO: 13366 - DNA, 702 bp, Homo sapiens
  source 1..702: mol_type = other DNA
taaactatcctaccttgtatattattcactgaaagagtttcctggagggaaaacttccaattccaattaaatcgaggatgacgacggcccggatttggcagtcctgcagctgtcactagctcgggacctcgtgcgtctgagtgatccagcccgggccgcgccctcacccagagccaaggctgtgagagcagctccagcgagggggcagggtggcggcggcagggctgcttcagggccggtgccggtgtccgccggggcgtggctttcggcgccacctctgcaagcggccgccactccagagtggcgggcgtgggaagacctaagtatatttattccggcctgcggaccagaagagctgccctgtgtcccagagcaggctggttcttctgacagcgctgagaacctggcgctcgcgcctggccaggagtgtcaggctcagccagggagtgacaggcgcagtaccagccttatcggtgctggaggcacaggctccggttcggccaggcgggtgtgcgcgcccaggaagggtaggagcctgcagccgcagcggggggcgctggctggggctctgccccgccggcagtgcgctcgggcgctgttccagcgcgcggcagcgagtggcgctgagcctccgctttcgcagctcgcggggagcggggccggcgggaggggccgggcggggccaccgcctcctctgatggc

SEQ ID NO: 13367 - DNA, 584 bp, Homo sapiens
  source 1..584: mol_type = other DNA
gcccgggccgacgcagccgacgcgctgtcctccacaaggcgagatccgcgctccgggcgccgtccgactctctccgcctgcagactggcccgacagaggagcggggaccagggctacagcccccggcgccggggcgaagaaggacggcggcgccccaggggccccgctcacgctcccgagtctcgagccgactaacggccccggtgcggggcgctggagcggccgccgctgcccgtcggttgctctcgggcctcacgtcccgcgcggccgtggtcgcagccgccgccgccaccgcctccctagcctgccaagcgcgaggctcgttccggtagcgggagccaggagttggccactgactggaggaaggctgaccccggctccagcctactagcgggcggggggagagacggagcccagccttgcctcacttccaccaatcagaggccgcccggcagggtgggaggcgctctgagctcaaggagaggctgagctcgccacattcgggccaatgggggaattctcatttcgaagaaaggctgcgcggagccggaggggtcgaggctgcgccgcgtggtgctcttcct

SEQ ID NO: 13368 - DNA, 490 bp, Homo sapiens
  source 1..490: mol_type = other DNA
aggaagagcaccacgcggcgcagcctcgacccctccggctccgcgcagcctttcttcgaaatgagaattcccccattggcccgaatgtggcgagctcagcctctccttgagctcagagcgcctcccaccctgccgggcggcctctgattggtggaagtgaggcaaggctgggctccgtctctccccccgcccgctagtaggctggagccggggtcagccttcctccagtcagtggccaactcctggctcccgctaccggaacgagcctcgcgcttggcaggctagggaggcggtggcggcggcggctgcgaccacggccgcgcgggacgtgaggcccgagagcaaccgacgggcagcggcggccgctccagcgccccgcaccggggccgttagtcggctcgagactcgggagcgtgagcggggcccctggggcgccgccgtccttcttcgccccggcgccgggggctgtagccctggtccccgctcctct

SEQ ID NO: 13369 - DNA, 799 bp, Homo sapiens
  source 1..799: mol_type = other DNA
ctggccagtggaatagctactttcaggggcaatttgataggccttgggaaaagcaatcccaattttcgggatctgtcttagagaaacaatttgcatatgtgcccaagtccatatacacacattacagcattgtttgttattttaaaaaaaagaaggtatgtgatggataaatatgatgtatccataccagaaaatattatatagcaatgaaaaataatgaaagttttttcaaactttcataagaagactgacataagaagatttttaacatatttttgaatgaaatataagggggaaaataatatgtagagtattatattattttgtaaaagtaaaagagaaagtattattatacacaatcctatgttataagtgttatgatgaaatacccaacatattgataatgtggttagattttaacattcttaatactttcattttttcaaaaataatgtatattaatttggtactatatattaatttggaaataaacttttttaaaattcaaattgctttctgaatgcactaagtgctgctttaaagactatatggaatttttttaaaaattaagaccaagtactttacataataaatagatagtatgcccacaaggcaatctatttctgaattacctaatctttgcatagtgaacatagcaatcttcagccaaatttagttagtttaactactgaccaacttagccttattatattaatttcatgagtaaggaaattaagttccaagagtgttcaagtgaaaaaatattcacatttactcggtcagtttttactgtttaaac

SEQ ID NO: 13370 - DNA, 409 bp, Homo sapiens
  source 1..409: mol_type = other DNA
gcccagccttggataaattatttaataaatcattgaatcactctttcctcccccatgaaatgtggatgagaatattttctggggattaaatgcagtaggtactcaataattatttatttctttatcctgagaaagctaacatacttaggccaattagctttctttttcagagagctagcatatgtaggccaataaacctactatatgtaggcccaattcattgatcaatttttgggtacctactaagcaccagataccctaaatgtagaataaggatttattgatattctagtgctgtgctataacttaacaggcaaatttaaattgtgtaatgtttttgtcacaaaatgctcaaaaagtcagacctctgtcgcccaggctggagtgcagtggcgcgatctcggctgac

SEQ ID NO: 13371 - DNA, 320 bp, Homo sapiens
  source 1..320: mol_type = other DNA
agtggggatgataagcacactgaggcccacgtgtcttgtccacaggcacccatggtaccgaacttaattttctccctttgtacaactggaagtaaataaaagagattcattcattttacacgagaaaaattggtattggaattgtttgcggacaaacacaagaaccaaggcagccccagctgacctttcacctgtgcctgaactaatgcaagtacaggacctgccaggctgacttctgagcctcagctgtggttgatcttgataactcaaagagttaacacagagccagcccctgggcgcggcctgcagggtaccggcaa

SEQ ID NO: 13372 - DNA, 400 bp, Homo sapiens
  source 1..400: mol_type = other DNA
atttcagaagtcctttccgacttagtaattttgttattttgagttgaactgaaattcacttggagcggtcagttgaaaatctttcacccatgggggacctgaacagcgccgccggggcattggcagccctgggcggccgcgcgtttcctcgccacccgtgaccttgggcgagcgaacgcacgccgccagctgcgtcagggccacgctcgctcccaccctaggggccgactgccaggccagtggctgggctccgcgagaaggcacagcaacccgtctcggccccgcctcctggacctactgacagggcaccgggggcgtggccttgggcccgcgacgtcaccgcgctccccgccgccgccgccgccgccggggttttcgctgacgttttccctcacagccc

SEQ ID NO: 13373 - DNA, 205 bp, Homo sapiens
  source 1..205: mol_type = other DNA
agatctgggatatttccttagaatccttgcctgaaggccaagaagatgaggaagttaattttctctagaaaattgtgaagatctttctagttctaaagggaacaatatcttgttatgcaccagttgtatggaaactacttatttataagatttaaaattctacgtatattccttcaggaatcatgagaaactgagcatctttgtt

SEQ ID NO: 13374 - DNA, 524 bp, Homo sapiens
  source 1..524: mol_type = other DNA
aaaaaattggttgattctccacaatcagagcatccagagtattttatcttgttcctattgtaacgtttgctagagctacaatacaataaagtattgtacttaaaatgggagtaacactgtttaaaaaattgtccttcagctaaatattaatttaagaacttgaattgtttttagtctttgtacactgcctatgttgataaatagattactttcattttaaatgagtattaatagatgatattgccatatttctaattggcttttctgttcacataaaataaagactgagacacagtaggtctacatattttaaaactaacttagggtagggtgtagataaagggcctttcttccccaaacagcaccttgattttctgggagaaaattctctgattccaagtctgtcagagtaaattaattcatctgcaaatagtgcactgtctccaggtacaaattcgatgctggagcactggtttcttaaggatttaagtttaaagtcaaaggcttcctgccctagtacaaat

SEQ ID NO: 13375 - DNA, 443 bp, Homo sapiens
  source 1..443: mol_type = other DNA
cagatcacgaggtcgggaaagcctgtagtcccagctactctggaggctgaggcgcgagatcgcaccactgcatccagcctggagagtgagactcaagaaaagaaaaagaaagtaggtatagttctattggtttcttatcaaaagcaacattcctctatcttcccatgagagtcaagaaatgattttatttctttaatgtgcagaagcatctgcatatacagaaggagataatttttaagtaaatgagtgatgacatttgtaatttaagttttctccttcagctttagttttcaggaataaaacacactcacaaattggacagtatgttttgatggagcgtgtgtccacttaaagaaggcagccagctccttcattcttttaacctcacaggaggtttgtgctgtaggacagaaaggctaattatccagcagatgatctgcctt

SEQ ID NO: 13376 - DNA, 531 bp, Homo sapiens
  source 1..531: mol_type = other DNA
aatgtatatataactgatctatattacagtttatatatatagttctatgtaactgactctatttaaaagaattaatgtagataggccttctgatgtcaatgcttttattgaatgtcataatgatcaaatttttggcattacctttgttcaaaattttgagccaatctggaactttattacttctatatttcttatttataacaacaagctatatctaggaacaaaagtcgtttattttttaaggcaagaaaaatataaatagaaaattattcggcactgtgtaatgttaaaatttacaaatatatgttatttctccattgtcacaagaattctagtgggtagctgtgtctagttttgaaggtaacatactttttagtctacaacctatttaactacaaaagtgtgccaatcagtatactctgaaaataaaagtgcaaaaataaagagggaggaaaaatcagcccttccatttcttttcctttgtcatagctgagccatgtacttcaaacagaaggcagccaattactaact

SEQ ID NO: 13377 - DNA, 385 bp, Homo sapiens
  source 1..385: mol_type = other DNA
agtttggatatatgtattagatttttatcaaaatacaaataaatggtcatagatgacaattttcacctaaggaatagtaagtttatctatgttcagttacctaataaagttaaccttctaaaacctttctaaccagacaaaagaacatatacacgtttttttctttctttctttccatctgggtttgcattattctacactctgccgggcccgcgggggttgcgagacagggaccgaacgtgaaacccggggagccccgcgtctcttgcctggaagtgcctgtcacctgcggatctcccagcctctccaggcgctgctgggctctgattggcggctgcgctgacagcaggcggggcctggaagtcgcggccaagcccgccctcgc

SEQ ID NO: 13378 - DNA, 246 bp, Homo sapiens
  source 1..246: mol_type = other DNA
ttatgatgaatgactagcattgttaattacacttgtaataatgtgagcatcaggccatttctaaaataaataaataaataaataaataaataaataaataaataaataaaattagcaaggatcacttgagcctgggaggtcaaggatgcagtgagccatgatcctgccactgcactccagccaccagaaataacaaaacatttgtattgtatgttacacatgaagcacattaagtgatttcctttg

SEQ ID NO: 13379 - DNA, 372 bp, Homo sapiens
  source 1..372: mol_type = other DNA
ttaggtcttgccaactactcagctattttggatgagtgcaaaacatacacttcgatttgtgttttctgtttgttttgaataacaacctactgtgaagcttcttaaacactagttttatttaaagcttgtaagtgaatcttcctcctcagcctcccgagtagctgggaccacaggggcagaaatacacattttaaaggttttaaatttcctatagaagggtctagactgcgggccgcttgatcggcccgcctacccccgagcgcgcacttccggtcgcgagggcgctcgggagcgcgccccgcgagcctccaccaaccccgcctggccagacagagtgcgcgcgcgcacgttgtgcgcaggttcgaatctccg

SEQ ID NO: 13380 - DNA, 349 bp, Homo sapiens
  source 1..349: mol_type = other DNA
gacaacactattttgctgtaatggccatagaatctttaggtcttgccaactactcagctattttggatgagtgcaaaacatacacttcgatttgtgttttctgtttgttttgaataacaacctactgtgaagcttcttaaacactagttttatttaaagcttgtaagtgaatcttcctcctcagcctcccgagtagctgggaccacaggggcagaaatacacattttaaaggttttaaatttcctatagaagggtctagactgcgggccgcttgatcggcccgcctacccccgagcgcgcacttccggtcgcgagggcgctcgggagcgcgccccgcgagcctccacca

SEQ ID NO: 13381 - DNA, 427 bp, Homo sapiens
  source 1..427: mol_type = other DNA
ggtcttcccaagaccaggtgctggatagaaggtccttgtcagtaaaggaggcgcgatggctcacgccttgaggccaggaattccagaccagcctggcttagccgggcgtggtggcgcgcgcctgtaatcccagccactatcgcaccactgcactccagcctgccttaagtaattaaaaataggaattcatttaggaagtgaattaaaacttaaattagggactttctgaaataaaaattccgaataaaatcatcaaagccgaacttttccgcggccgcgcacaggtaacggcagtgccagtcccaccaccaaggggccttggccccgcccttggaagcgtggttgtgacgtcagcgcgctgtctccgaagcccggcagcatgagcgcagaccgcacgggccctccgcgtaccaaggcacacgcatgc

SEQ ID NO: 13382 - DNA, 450 bp, Homo sapiens
  source 1..450: mol_type = other DNA
taaatgtgctcttcaaatgtatctacaggacagtctgatattttaaaaagagaaaaatgtttccaggacttcttactctgtatggtaaacaaatccctcaaggctgggttttttttttaggctggagtgcaggagtagctggggttggccaagatggtcttgatctcttgacctcgtgatcgaagggctggggtttttgaaaacgcaattcaaggtaaacagttttttctttccccaaatatacaattaatttacaatattgactgttattttgaatccaggaaaattaagtgccagacaggaaatgctttgggctttgccagctgctactgttccagtaaaattttacggacactgaaatcgtaatttcatgtaattttcacgtgtcacaaagtattatatttctttttatttcttttcagtcattaaaaaaagtaaaaaaaaaaaaaa

SEQ ID NO: 13383 - DNA, 632 bp, Homo sapiens
  source 1..632: mol_type = other DNA
aaaattttacggacactgaaatcgtaatttcatgtaattttcacgtgtcacaaagtattatatttctttttatttcttttcagtcattaaaaaaagtaaaaaaaaaaaaaagaatgagaccatatcgatccgcgaggatcaagtcctgatcctgtccctggcgacttctccaggctgcgcggtctgagcttcactccaggccccagcaaggcggcgcggcgcggcaggggcgagcaggtacgcactcacctggcgcccgacagccaagcgcgcgcctgtacccagtgcgccgctacccgcagctcgctcctgggttagagggatgccatctcggcgccgggttccagcccccgttggggcggggcggggcggggcggggctccggctagcttggcctcttccgcgcgcccctgcgcagctccggcccttccctatcgggagcgcgcgcggcccgcggcactgcactggcgcacgcccgcttcgccctcgctcggctccggctggttccgccgccgtgcgcgccgcccgcgctcctgctgcggcgaagctgccagcccgggagccaattagcgctcggctaggcggggtccacttcctcgtcggcccggcgcgcgctctggactgctccggcg

SEQ ID NO: 13384 - DNA, 651 bp, Homo sapiens
  source 1..651: mol_type = other DNA
taaagatcatttcatgacattttttaaagggagatcaatggccctgtctttccggaaaacttccatgggacgttgccatcacaccctctgaaagtttcactcccctttaaatatatatatatatattaatcctcgaacgcccatcccggtggggccgatctcggaagccaggctcggggccgggtgcgcgccgggtcctccctgccaagctgcagaggaggcgccggcaccgcggcggtcgcaggacctggcaagcgcctatcctaggaccggcgcccacccttggctgcgggaagagcggacgcaggcagagcggctccgccgagtgctccgccccgccccgcggccgccggagcagtccagagcgcgcgccgggccgacgaggaagtggaccccgcctagccgagcgctaattggctcccgggctggcagcttcgccgcagcaggagcgcgggcggcgcgcacggcggcggaaccagccggagccgagcgagggcgaagcgggcgtgcgccagtgcagtgccgcgggccgcgcgcgctcccgatagggaagggccggagctgcgcaggggcgcgcggaagaggccaagctagccggagccccgccccgccccgccccgccccaacgggggctggaacccggcgccgaga

SEQ ID NO: 13385 - DNA, 431 bp, Homo sapiens
  source 1..431: mol_type = other DNA
cccacccccgctccaggaaggcagggaggagagggttaatttgagctccctcctgcctgctgcagtcacagtgcatgatagagtaatgaaggtgacgccgccacatatctctttcatattaaagtctttcactgttacaggactgtgcttggaaaagttgggaaacttttccctaacaaatgaatggagttatttccttggcggtagcttctcccgggagcagaataacgaagtgaaaatctcgagttatttgttcggcaattgacacgtaagtgacctccttaaatgcctagttatttaaggacgtttagaacgaggatgaatgaatcttcagggcggttaattcgcaccggccctggaggttacagcggcgaacccggaggcgctaggacctcgtcagcgcctggctgcggccgctttcaagagggcca

SEQ ID NO: 13386 - DNA, 579 bp, Homo sapiens
  source 1..579: mol_type = other DNA
gaattttatacaaatgtatagagcaaaaaagaaaaaaattaaacttctctggattccattgattaaaaatttaaaaaaataaataaaaaacttctttgtcttcgagacgttaagaggatgcaccttcttataaccttgcaaggcctctatctgcattgcagtagaggcagcctggaggggacagtcaccgcccatgtcggtatggtcctggaggacgaccgcgaggcgatctttgagctgaattttggagctttaataaatacttaaagctcactttggcttccggattgttatgaacaggaggaaggagaaaaaaagaatttagaattgtgctttcgcggctctcaggctgaaaacggggtttccacattacgaagcccgggatccagacattaggcgcctggggcgggagcctgcagcgggagcttgcggcgggagccgggcgaggcagcggcggggcggggccatgatggggcggggctacggaagccgagcgggctcgaggcgttcggctgaggaagggagcgcacgccggcggcgcggaggccggctctgcgcttcgggccgccccctcccccc

SEQ ID NO: 13387 - DNA, 576 bp, Homo sapiens
  source 1..576: mol_type = other DNA
tgactcagcctcccgagtagctgggacgatctcctgacctggtgatccgcgaattttttttaaacaacatggaaacaaataagacctcgttctgttttctaggagctaaaaatccaacgatattccccttgttacaaagagaactgtgtcaacttttataactgacacaaagatctgtgtttccacagcactgtggattgttccacagtttaatttgatcttaatttttatgtggaaatacacatgaatgtaatgagttcttaaatgctaaatttaggacatggttatctctaaactttacatatcgagaaccttggaatttaattttattgttgttctgtaacatattttcatgtttaaaatcagaaaaggcagcatttctcgagtttcctgctttcgaggaaggtcttaggatcgcagcgctactctgcccagagggcgccctcgcctgtgggaccaagtccccagccccgagctcgcgcaggtgggcgaggcggggacgtggtgggcggggcctagaaaggcggggcctctgggggcggccccggggcgggccacgctggtgtgagggctgca

SEQ ID NO: 13388 - DNA, 564 bp, Homo sapiens
  source 1..564: mol_type = other DNA
aaagtatgacacaggaattaatagaaatccatcattattcatttaacgtgtaaagagaaaacgctcaatgtacactttttcggattaattacagagtaaggcagggaatgtatgtaactccatcctcgactcgcagcaggaagttaactcctcctgagagccaggcggtcggaggaccaggggttacaggcaccaagacacccaggctggctggaccctcccaccctgtaatgatgaggggagatgctccctgggacagcccccttgaagcttctggcgacggggctgggatccgcccacccttactcaggggcgagccctgtcatacgcgtggaagcggccaccaccttctagggggaggggcgttcccgtcgggcgtaaccgccccgccctggggggccgctggggacgctgatcagaccggtgtcccgttgccaggcgatggctcggcgcgaaaagggcaccctccagagccgcggccgcgcagccgcctttcctccctctcagggctgcgcgcccaggtctgcgccgcgctccgcctccagccgcgcgcagacttgcgca

SEQ ID NO: 13389 - DNA, 482 bp, Homo sapiens
  source 1..482: mol_type = other DNA
aggagttttcctgtagggtcactgttactgtcaatttatgcctgcaagaaaactaaaatagtcacacattaaagcatgtatgcacatttttaatgtctgattcctctacatttcttaaactgtaaaataataaagtttgaatttataaaatatatgctactcaaatgaaaggcacttatgcctgctcttagtagaggaagcgctagctaattgcctaacgccccattagcatatgtcaaaatctacacagacaaaagtcagatgttgtaatatgcattttatcgtgtcacttaagtactaagaggtgcttttaaagtttttattaatgggcaggaaacttgccaggtgctactaggaacgtatcagccctttataactgaacccagcggcggctccttctccgagctcagagccagcaggctcaggctgccgagctgaccaagggctttggccaagcccgagctgggccggggcgtccggct

SEQ ID NO: 13390 - DNA, 508 bp, Homo sapiens
  source 1..508: mol_type = other DNA
tcaaaatctacacagacaaaagtcagatgttgtaatatgcattttatcgtgtcacttaagtactaagaggtgcttttaaagtttttattaatgggcaggaaacttgccaggtgctactaggaacgtatcagccctttataactgaacccagcggcggctccttctccgagctcagagccagcaggctcaggctgccgagctgaccaagggctttggccaagcccgagctgggccggggcgtccggctggtgggcaagcttccacttcaggtccggggctgtcccgcaacagacgcttggcgccgcgagcgagtgagttggcgaaaccactcacctgtcggaacccggtgcctggcggccagatggccgggacgccccagccagggaggcaagtgtgggagctgctcctagaggtgccagctcccaccccccttcggcttggggtgcccagaagggcaagtccagcagacgccagggctgcaggttcaagatgctccgcctcctcctgc

SEQ ID NO: 13391 - DNA, 494 bp, Homo sapiens
  source 1..494: mol_type = other DNA
aattatctggattcttccactccttttgtaaagtagaatataatagtatattccttgagatgttaggagaatgaaatgatttcatacttaaacattgcttaaaataatcccgaggacattatttcaaataagtactagttacaagggagtattcatgacagaaactacagaaattaaggcttatttgtagatattaacacagacataaaagatttaatgaccggtgcagtctctgtgctggctggacactgcaagcacagagactttttttaaaagtgcgttgttacatggagtgcaatggcaagtacaggcgagtagctgggattacaggcgcccgccaccatgcccgctggtctcgaactcctgaccccaggtgatccgctcgcccgggattacaggcgtgggccaccgcgcccgaccacacccgtcctcaggaggcgggacctgcgtgccgacgcacagcgagcacgttgacgtcttggcgcaccgttcca

SEQ ID NO: 13392 - DNA, 516 bp, Homo sapiens
  source 1..516: mol_type = other DNA
gtctagaagagtaaattcgattactcggcggctaaacatcgtgtgccttctccacagcccgggagcggcggacgccagcgccggcgccgcagggagcgcgtgcggggctccgcggggccgcctcccgcgacttcagcaggggccgcggccgcgctcccgggccggtgggctgaggcaggcagaggccgccatattcctgtctcaccacgcccggccggacggcagccgcaggtcggctgcggccctggcacgcaacggcggccgccggctcgggctgcgcgtcggcggccgggtctggccccgacttcggccgggggcggccgtgactgctgcgcccgcggactctgccgagggtgcgggagcagtaggcgtccgcagagcccgcgggggccggcccagcccgggagccgcgcgggcgaggcgagagccgcactgggaggcgcgccgcggcggccgcgagcccaggaaagccttccaggaggggccgggcggcaccgcctcccggctccctcctcc

SEQ ID NO: 13393 - DNA, 840 bp, Homo sapiens
  source 1..840: mol_type = other DNA
gagcgcgtgcggggctccgcggggccgcctcccgcgacttcagcaggggccgcggccgcgctcccgggccggtgggctgaggcaggcagaggccgccatattcctgtctcaccacgcccggccggacggcagccgcaggtcggctgcggccctggcacgcaacggcggccgccggctcgggctgcgcgtcggcggccgggtctggccccgacttcggccgggggcggccgtgactgctgcgcccgcggactctgccgagggtgcgggagcagtaggcgtccgcagagcccgcgggggccggcccagcccgggagccgcgcgggcgaggcgagagccgcactgggaggcgcgccgcggcggccgcgagcccaggaaagccttccaggaggggccgggcggcaccgcctcccggctccctcctccggatctgtgctccagttcagagggggagggctcgcactgagcagccgctccgcgcctggcaatcggggcagggggtgggcgcgcggttgccgggcgggacgggaaccgggtctgcgcgcgagccgggcggtgggcgcggacagggccgagggcgcccgggagccgtgtcaggcggcggcgaggagcgggcgcgccgggcgcggggagccgtcggcggccgctcgctgcggggacaccccggtgaatgagctctcgccgccaggcgcacggcgtaggggagcctcgcaggcggcggcggcggcggcggctcggggggcgaggcgggccgcctgttcccggggaaggaggcgcgggcgtctgagcgaggccgggcgcggcggccttctctcacgcgccccccgagccagcgcccgcctc

SEQ ID NO: 13394 - DNA, 516 bp, Homo sapiens
  source 1..516: mol_type = other DNA
ctgtttcagaaccccatgcgggtctccactggagttcttttgagaaggacacttctgtggaaaagtttgagcagctctggccctgcgcctggcctggctagggtcagcgcgggcgcaacctgagagctgtcgcaggtttccagctcactcgtttcccaaaggaggttgcctggcgggcatccacgcgttctttaatcctgcaggaactcagactggggtatctgacgcccgcacccagagagaggagctgaggtcctctggaggactggaaccggccagattgcgggctcaagggcgaaggcaggttggcaggggcagcctcttcccgccgcccacaatcctcgggcgggcgcgcagccgagccggctcggctggctggcgcaatctcgcgggaggagcaactgcttcgactcggctcagaagcgcgaccatgtgagctccttcgcgcgaaccaattagcgcagggcctgcgacagcacgggccaatggggcgccgactcggcgcaggaacaaggc

SEQ ID NO: 13395 - DNA, 395 bp, Homo sapiens
  source 1..395: mol_type = other DNA
tgccccccgcgacccccgatggagcgtcgggatgcgctttctctccgagtgcctccgggggaggcaatggcaatcacagcccccgcggggcttggagggacgagctccccgcccaccccgcggccccggccccagttctggctctaaacaagaacggggaccgagtcgcgttcaaagcccagcgtgatcctccccctcttgtctcataggagacattggaccctaagcgcggctgcggagcgaatgaagatgcagccagggcagcagcaacagcagcagccgccgattctccgccaaggcgaagctccgccttgggcgggccatctccgccccgggcgacgcccggcccccacgtgggtttcagctgcctccccgctggcttgccatttgtcagc

SEQ ID NO: 13396 - DNA, 488 bp, Homo sapiens
  source 1..488: mol_type = other DNA
ctccccgcccaccccgcggccccggccccattctggctctaaacaagaacggggaccgagtcgcgttcaaagcccagcgtgatcctccccctcttgtctcataggagacattggaccctaagcgcggctgcggagcgaatgaagatgcagccagggcagcagcaacagcagcagccgccgattctccgccaaggcgaagctccgccttgggcgggccatctccgccccgggcgacgcccggcccccacgtgggtttcagctgcctccccgctggcttgccatttgtcagcgccacctctgattggttggtggagacgcctaccgcaacgggggtgggcggggcgcttggagagctcgccagagcgctcgcatggcggctcaggcagggtcgcccggggcggactacatctcccgggatgctgcgcggccgccccgcggaagattgtgaatatgtatcagaatgttaatgattagctgctgctaaattt

SEQ ID NO: 13397 - DNA, 515 bp, Homo sapiens
  source 1..515: mol_type = other DNA
aacctaccactttgggtgcaaagcacagtcgtctttgctggtgtacctacgccaaccgtggcgtaaacaaacctcagataaatttttgaatgtggcctcacttttagagtagcatcaaatttgagttactttcacttagatctgaggattttcattaaagggaaaagtgagcaagtggcaggatttttgctaactcgctcgccagtccctcccgctagcgcgcgcccgcgcgctctctagccagcccccaatctccgcgaatcgccgcttcccattggctggttttggcgtcccgcggctcctccaggaacagttcctcaccaagcccgggaggaggggggagggagaacgccccgtccggcgctgcgctgccatacgctccggggaggagcgcgtcagcgccccacgttggttgcagcgcacgcgattggctgatgggctcacgtcccccgccggctccgcgctcgcgccccccgcccgaacggggctgggcggggccggcgctggttagctcc

SEQ ID NO: 13398 - DNA, 600 bp, Homo sapiens
  source 1..600: mol_type = other DNA
cctctgattggttggtggagacgcctaccgcaacgggggtgggcggggcgcttggagagctcgccagagcgctcgcatggcggctcaggcagggtcgcccggggcggactacatctcccgggatgctgcgcggccgccccgcggaagattgtgaatatgtatcagaatgttaatgattagctgctgctaaatttaattaaaaaaaaaagccgcaagcgtttcactcttttatttttataatccccttcaatttggggttaaaaaaaagataaaaggtgccttttaaaagatcgttagtttgtgtttgcttttagggaagaagaaagatcattcattcggaggaaagaggagctgccggcgggcggtggggcgcggagcccgcactttcccggccgggtgagcggcggccgcggcgccgggctcggcgggtgcgcctcggcggagcgaacgtcggagcgttgccttgggagacgcgcgccggacaatgcccgcggcgggccagtgacgcccgcggggaatgcggagcggcccggcagccggcacccagccgccgccgcgcgttcctgccgcccgtgtcacgcgagacccggcgggggccgg

SEQ ID NO: 13399 - DNA, 546 bp, Homo sapiens
  source 1..546: mol_type = other DNA
ttacttaatgatcacatttttaaaaaatcaaagtaataaaaaatgggtggattttaaagatctcatatccattaagcagtgttaaagaaacaatagtattgtcgaaaaaagtgtttaaaaccaaagggtaacctacctttggatatgtaatttccataaagtttgtttaagtaaaaaaacctacaaaacgacctcagtctttgtttaaacaatgctgtctgccaaacgattttgtttatcaaattttttctcaggttttggagacaaggattgagaaaatactttggtttgtaagaaacttctatataaagaagtttatcaagtttcgggagtaagataataaaagcttctgacgcgcgcgccagcacgttctgtggagaagcggagcgctgggctctacctgagcagcgcttggccagccaggtctcccccacctgcgcggcaagcagcggtggactccggggcgtgggaactggagaagcggtggcgcgcgctcctcctccctggctgggcggagctgcacccgccgggaaagtggcgagagcc

SEQ ID NO: 13400 - DNA, 552 bp, Homo sapiens
  source 1..552: mol_type = other DNA
tcattgatgttacttgcctgtcactgaagatagttaaacttcaggctctaacttttgcaatagatgtatttctttgaagtattatgggaaaaatattgtttacaaatcaaactatctaaaatgcatgtagtttgttattcagaggaatcaactgtaaactcttgtacatcaaataagcacacctgcttatattcaacttaataattctgaaagctcaacttgttctgttaaaattctccaaaaatttcttcctttgatgagcataacatttatttttccacagaggaagcttgatttctgcatgaataagatcatatcacttataaaatttttatcacaaaaataaaactgttgccaagacaggtttaagactgactgtagactccaactctctttcatactagaaagtttttccttttgtacatagttttataaaaacagttgtattggcatataaatgtcatataaaatgtacccatggtaagtgtacacttcaatgatttttgatttcagaaattttccatcatcccaaaaagttcaaatatctgtccc

SEQ ID NO: 13401 - DNA, 425 bp, Homo sapiens
  source 1..425: mol_type = other DNA
aagggcagtgtaatgttcccctcaaggggaacattattgctttacaagcgtggattcttgttctgaaccctaactgtaaactaggcatccaagctccgcttcctagaagtgctgcttatattattaacaggctgcactctgcgtgggaaactcagctcacaactttcagtattgcaaggagaggaatgggctctccaagcactctaagaatagcgaacctcgtatctaccctggttaaatccagattccggatcctggctgggagcccgggcaggggtcaagcccttgcgagtcaagggaagcaactccggcgtcgcccgggcagcccgacccagccaacctgcccaggatccgcccatccgccgcgatttccatggcgaccgatggcgccgccttccgcagccttagggcggggtaagcggggg

SEQ ID NO: 13402 - DNA, 543 bp, Homo sapiens
  source 1..543: mol_type = other DNA
aaacctttgtttcatagaggattattagaaaatcatcttttggtgacagaaattgtgtgaggaaaattttttcttctcatccttttcatgaaaagtcagaatgtagtggttgcatggcacctgcatttagaacactaactttagtaattggaagcctaggttcaaatcatgtgtcgtttccttatctgtaaagtgaagaaaagattaatgtgctatacatgtgcagtgtgcaacacacaaaaagaatgcaaactctttattaataaaagagttgattaattattaataaattttgatatcattacctgttgagatactatttgaatatctcgatttcaaataaaacacattattaaaattaattgtaatacatttattttgctttttaaatgcttataatcttactggacagtactgctgtagaatataataaaggccaatttttagaagaaaaagtgggttatttctccattatggaattatccagttgtggatgatgcataatctggtgagtggagagtttaaaaatagcgtcccctccct

SEQ ID NO: 13403 - DNA, 483 bp, Homo sapiens
  source 1..483: mol_type = other DNA
atggcccaccagactgtccagggcaggtaaaatttgtgtgcctgttctgctccggcaagagcaacagggtgagaggacttccatctctcccagctccctcgggcctacggtacctgacacagtggctctagccaccttggggacaacagcgtggggaattccagagtcctcaaacgggatggggcacatccgctttggtaggataggaacctatccctcttgctcggaaagatcacactcttttttggagaaagagactgagtcctagctagcattaaataaaacaatggcttaaacaatctccatgagtaccagagatttttactattagcgatattcttcccgaggcggaatccccctggcggtgtgggtcaggatcgctctccgtcccctacccgcgccaggtccctggagctgagcagagcagggcgctgtcgagcgcgttggggagccggggccgggacgagcacaaccgggagcccg

SEQ ID NO: 13404 - DNA, 591 bp, Homo sapiens
  source 1..591: mol_type = other DNA
ggcctacggtacctgacacagtggctctagccaccttggggacaacagcgtggggaattccagagtcctcaaacgggatggggcacatccgctttggtaggataggaacctatccctcttgctcggaaagatcacactcttttttggagaaagagactgagtcctagctagcattaaataaaacaatggcttaaacaatctccatgagtaccagagatttttactattagcgatattcttcccgaggcggaatccccctggcggtgtgggtcaggatcgctctccgtcccctacccgcgccaggtccctggagctgagcagagcagggcgctgtcgagcgcgttggggagccggggccgggacgagcacaaccgggagcccgcagtcgggcccagcttgacgcagcggcggctgcgactgagcaggccaccaccagggcacccgggccagccgcgcctgctcggcgcgcgtgggagtgagtgcgtcgcgagcccgccgggggtctcaggctctgggcgtcctcggcgagcgagcccgggcagagggaggcgcacgagcgcgcgcgagcgaacagagggagggacccgcccg

SEQ ID NO: 13405 - DNA, 461 bp, Homo sapiens
  source 1..461: mol_type = other DNA
gaacccttcgcctaggctatgagtgtgggggcgcagttgtggctcactgcagcctcgacctctcggcaccaccacacctagctaatttatatatataatttgttgttgttctcaaacttctgggctcaagagatttggcctcccaattttatttatttatttacttatttatttattaagagatcgacttgaacttctaagctcaggtgatcctcccacctcagcctccccagtagttgggacacagtgcctttaagtcagggttttcaaagttaaaaatgattattattattttttaaattccttttagagatagtctcactcgtgcagtgcgatctcagctcactaaagcacaggtgtgcaccagcacattttgtagagatgaagtctcaacaatgttgatctcaaattcctggctgggcttattttaagaagatggcttagcttatattaaaatgtaa

SEQ ID NO: 13406 - DNA, 455 bp, Homo sapiens
  source 1..455: mol_type = other DNA
gtggcgggcgcctgtagtcccagctactcgggaggcttgcagtgagccgagattgcgccactgcagtccgcagtcccacctgggcgagtaagtgcttttaatcaaatagttcaaacgacacataattaacattgttttaaagcaaatggacactttaaagtggtgtaagaaaagatggccgccatttattattgtgacaaaaggccagattacaaaacgctgtgttttctgtttattctttttacaagaacatttttataaatgaatgaatgaatgctttcccggcctgccagggtgaggatcctctggggctttgggcggctccctccagcccagggagacgcgagtgccaggccgggcgcgcgcttcacttccgggggagggcgcagaggggcacggccctcactgccccggccggggcgagagcggctccgcccctcgagcgccgggtaggc

SEQ ID NO: 13407 - DNA, 342 bp, Homo sapiens
  source 1..342: mol_type = other DNA
attgcgcagggcagtcacgggcgttattaaaataacaaaatacctccagagcaagcgcgcaggcgcagccgcggccgcagggcccactggtccggtgcgccgtgctttgggcaaaagtcgcgccagccggggatgactcggcgacgccgccaggcgcgttacccggcgtgctccgcgcggcgccggcgaagggacgtgggggggtgtgagcgagcggcgcctgaacacacggcggctgccgagcgcctgacccgggcctgcgccagagcctgcaccgagctccggggccccacacccgctacggtggccctgcgcccgttgctactgaggcggcgtcctgag

SEQ ID NO: 13408 - DNA, 374 bp, Homo sapiens
  source 1..374: mol_type = other DNA
ggattctcagagataatttctctctgtattacactgaaaataattttggaactatccttaatgccacttaaacttaatttgattaaggcgaacacctcaactatattaaattgtcccattgataatctgggggcgctcgcgcacagctgtcatcgtagcagcagaggccactattgcgcagggcagtcacgggcgttattaaaataacaaaatacctccagagcaagcgcgcaggcgcagccgcggccgcagggcccactggtccggtgcgccgtgctttgggcaaaagtcgcgccagccggggatgactcggcgacgccgccaggcgcgttacccggcgtgctccgcgcggcgccggcgaagggacgtggggg

SEQ ID NO: 13409 - DNA, 419 bp, Homo sapiens
  source 1..419: mol_type = other DNA
gatatcaaatgatgtctatactgaaatcgatatagagctctgctaaaaagtcgtgtttatgtaacagtatttattgtgcaacattgattaataatgggctggtttgtacattccttgcaagtcatctttaaaagccaatgacgtcatttcaaattaggattctcagagataatttctctctgtattacactgaaaataattttggaactatccttaatgccacttaaacttaatttgattaaggcgaacacctcaactatattaaattgtcccattgataatctgggggcgctcgcgcacagctgtcatcgtagcagcagaggccactattgcgcagggcagtcacgggcgttattaaaataacaaaatacctccagagcaagcgcgcaggcgcagccgcggccgcagggcccactggt

SEQ ID NO: 13410 - DNA, 639 bp, Homo sapiens
  source 1..639: mol_type = other DNA
gttcatcttaattttttcaaattgaatattcagtttttacctgaaacatttcaaaatacaaatttctgagttgccattctgttaagacaatctttgtcttttttaattagaagagcacttagtcttctggttcttaatttggactttcagaataaggttttaccttagctgtactaaggttaggaactactaggggacttttaagatcccttctaagtctaaattttgaaaagttgctctttatttttgctgtcagttctaaatcacagtctctagaatcaaacctatggtagtattttatatatgataagagtggtaaaggtcttttttttgtgtatcatgaaaaaatgatattcttttccactgtaaaccatattgatttaggatgttctctataactatgtatatatttcagaatgattgagagaggaagactgtgaatttttaaagtatacatggaaaaatgagtacattatatctgtgaaatctcatatttttctattgtaaaatgttatatcgtttacttaaatataaaagtatgttattgctaatagtgggtattaatccaaatttactaaatccagtgtcagaagaaatttattttatctacatatggttgttttagaatctacaacagat

SEQ ID NO: 13411 - DNA, 434 bp, Homo sapiens
  source 1..434: mol_type = other DNA
tggaagccagtacagctgggtgccggctctgccgtgtaagtcacttaacttcggggaactgagcaatgttagttattttccttacagaggtcgaaccccaagttgtgctgcgggggagtggcctagagtctcactccctcgggaggcctccctcccgcttgaggagagcccttctcttcccccgaagaccgtggcgccgccgcctacgtgaggcgtttggaccctgcccggcccccgtagacgtcaccggcgcgcgctcggcggacgcgccaggccccgcccccgcccccgcccccgccccgactcaccgcagcctgcagccgcgctcacctccgcggtccgccccggcgccccgggacccgttagtgcccagcctgtgggccgaccgcgacccccgcccggcgcgagcctgcccccagccaacgcccagtgcg

SEQ ID NO: 13412 - DNA, 318 bp, Homo sapiens
  source 1..318: mol_type = other DNA
gataatattagttgatggaagccagtacagctgggtgccggctctgccgtgtaagtcacttaacttcggggaactgagcaatgttagttattttccttacagaggtcgaaccccaagttgtgctgcgggggagtggcctagagtctcactccctcgggaggcctccctcccgcttgaggagagcccttctcttcccccgaagaccgtggcgccgccgcctacgtgaggcgtttggaccctgcccggcccccgtagacgtcaccggcgcgcgctcggcggacgcgccaggccccgcccccgcccccgcccccgccccga

SEQ ID NO: 13413 - DNA, 470 bp, Homo sapiens
  source 1..470: mol_type = other DNA
cgtggtggcacgcgcctgtaatcccagctcgagatcacgccactgcactccagcttgggcgacagagcgcgactcgatgttacaacatgactgcatcttgacatatactgaatgattccatcaataaagttatgaaaatgtttctgaactatatacagaggtgatggttgcacaacactgtgaatgcattaaacgcatggtttatgttaggcaagttttactcaataaaaataaaaataaactgcttgcgctcaggcctcacagaccggtcccagcgcgttggtgggacacaactcggatttgcaggcaagcccaggggccggccctttgcggacttcctggggacgcaggactcctgcgcggcgggcttggaggcgtggccaggatgggggcggggccaggacgcggcatccaggagaggacgcggcgggaggcgggcttcgccggttgccaggagaactcgcgacgac

SEQ ID NO: 13414 - DNA, 547 bp, Homo sapiens
  source 1..547: mol_type = other DNA
tgatatagtcactatttgactgccctcgatttagggggctctaaaggtttaaatcctagcccaaaccattgctgtgatgggggttaatcaatgaacaatagccgctttcgtcatgaagtacttaagtacactacacaaggttaatttaacaatttaacacatttgtctaacgttcgttcggaggaggcaccgccgcccatgtcgcagtctgggggtggctcagtcctcagcacccagatacggccagctcttcgaggccaaggagcccggatgcgggcatcgcgacccagggcaaggcggcgagtcgccgtcttcgagtcccacctgcaaagccatgcacctcccagggtgggcaactcacggccggtgaacgccggacccttagcagtttccagacctttggaaccggagcgcgcccgagagggcgtgaacgggaccgctttcccggaagtgcttgcggcctctgcccagcgagctgccccggggtctctctggtttccaatcagggcaacgccgcggcggtgccactccctggcagggcgggacc

SEQ ID NO: 13415 - DNA, 463 bp, Homo sapiens
  source 1..463: mol_type = other DNA
atggatcaaatttggattctaatataaggtacttgtgtgatatagtcactatttgactgccctcgatttagggggctctaaaggtttaaatcctagcccaaaccattgctgtgatgggggttaatcaatgaacaatagccgctttcgtcatgaagtacttaagtacactacacaaggttaatttaacaatttaacacatttgtctaacgttcgttcggaggaggcaccgccgcccatgtcgcagtctgggggtggctcagtcctcagcacccagatacggccagctcttcgaggccaaggagcccggatgcgggcatcgcgacccagggcaaggcggcgagtcgccgtcttcgagtcccacctgcaaagccatgcacctcccagggtgggcaactcacggccggtgaacgccggacccttagcagtttccagacctttggaaccggagcgcgcccgagagggc

SEQ ID NO: 13416 - DNA, 190 bp, Homo sapiens
  source 1..190: mol_type = other DNA
atgaaaagttacaatgcatcttattcactgggaaaactaattttatattaaaacttccaattgctcgatcttatgtgacatctctaaagtttacaaaaactagcggattattttaaattaggctgactacaaacagcctttttacttaatggcgactacgtgctactaggcggagccgagcgccgacccc

SEQ ID NO: 13417 - DNA, 526 bp, Homo sapiens
  source 1..526: mol_type = other DNA
cccgcgtttccccggctcccgccccggcgcaaggcaggccgagaaccgccagctgcgcccccgggcccggccttgactgacgggcgccccggccgaagcgtgggcccggcccagcggacgcagacggcccgcacttaccgcgcccacagaccacagcccggggcggggtaaggggcttcgggcacgatctgggccgagcaccgacctgggcttaaggacaggaaccgccgcggcgcgctcccagttcgcgcgcggactccttcggggctggaaaacgccccttccccgccccctccctgtgcgcgtgaactaggcagttgttagatctcgcgagaggttcgccccctagccgcccctccccccagctagtgagtgcgcgaacgacagcactgcagacgccagcctcccagcccgaagggaggcgctggcgggaggcggggttgtcgcctcctccgtcgccttgtggcctcgggccaatcgcgccatcgctgaagccctggcagccaatagggcgcgacgggggagg

SEQ ID NO: 13418 - DNA, 295 bp, Homo sapiens
  source 1..295: mol_type = other DNA
taatggcgactacgtgctactaggcggagccgagcgccgacccccccgccgctccagctccgaccccgggccgggagacccaaggtgaggcgggcaaagagagcggcggcgcgaccttctccccgcaccggagaggcacatgcaacgttcccgcgagactgccgtccctccgctgccgcgccgcctcagccggtcggagctagacagaaaacgagcgcaggctcccctcccccgtcgcgccctattggctgccagggcttcagcgatggcgcgattggcccgaggccacaaggcg

SEQ ID NO: 13419 - DNA, 451 bp, Homo sapiens
  source 1..451: mol_type = other DNA
aagtgaccttatgtgcctttaggagacaagggcaatacatattgcctaaaaattttatcggaataaactacagcccgcgtttccccggctcccgccccggcgcaaggcaggccgagaaccgccagctgcgcccccgggcccggccttgactgacgggcgccccggccgaagcgtgggcccggcccagcggacgcagacggcccgcacttaccgcgcccacagaccacagcccggggcggggtaaggggcttcgggcacgatctgggccgagcaccgacctgggcttaaggacaggaaccgccgcggcgcgctcccagttcgcgcgcggactccttcggggctggaaaacgccccttccccgccccctccctgtgcgcgtgaactaggcagttgttagatctcgcgagaggttcgccccctagccgcccctccccccagctagtgagtgcgc

SEQ ID NO: 13420 - DNA, 362 bp, Homo sapiens
  source 1..362: mol_type = other DNA
ggcgactacgtgctactaggcggagccgagcgccgacccccccgccgctccagctccgaccccgggccgggagacccaaggtgaggcgggcaaagagagcggcggcgcgaccttctccccgcaccggagaggcacatgcaacgttcccgcgagactgccgtccctccgctgccgcgccgcctcagccggtcggagctagacagaaaacgagcgcaggctcccctcccccgtcgcgccctattggctgccagggcttcagcgatggcgcgattggcccgaggccacaaggcgacggaggaggcgacaaccccgcctcccgccagcgcctcccttcgggctgggaggctggcgtctgcagtgct

SEQ ID NO: 13421 - DNA, 410 bp, Homo sapiens
  source 1..410: mol_type = other DNA
caaagagagcggcggcgcgaccttctccccgcaccggagaggcacatgcaacgttcccgcgagactgccgtccctccgctgccgcgccgcctcagccggtcggagctagacagaaaacgagcgcaggctcccctcccccgtcgcgccctattggctgccagggcttcagcgatggcgcgattggcccgaggccacaaggcgacggaggaggcgacaaccccgcctcccgccagcgcctcccttcgggctgggaggctggcgtctgcagtgctgtcgttcgcgcactcactagctggggggaggggcggctagggggcgaacctctcgcgagatctaacaactgcctagttcacgcgcacagggagggggcggggaaggggcgttttccagccccgaaggagtccgcgcgc

SEQ ID NO: 13422 - DNA, 265 bp, Homo sapiens
  source 1..265: mol_type = other DNA
gcttgaccccagcagtagcatggtgcggagcgcggcattgaactcagtgctgttctgttagagcagacagaggggaatcgcctattccagcctgagggctacagtgctctgggactctgtgcccaggctggagtgcagtgcctcttgagtagctgggattataggtgcccagcacccaggcacttcatgtcctagggctgaactgggcccagaatgtgacatactgagacaccagctggggtgcccctcctcttccaggctgcac

SEQ ID NO: 13423 - DNA, 402 bp, Homo sapiens
  source 1..402: mol_type = other DNA
aagtgaattgctttatgaaaacaaagcacttctattcacttttgataattgaatagctggtcaccttaagctggatttttgaaagcaaaaaggttttggaattaaccaaacttgaatttgaattctcattatccctttattagctaaatgacactaaacaaattgttaacttttctgtacttcagtatagaattttgagtttacctatctgtctatgtatctatccatagagaacgtttttctgaatcccagctacttgagaggctgaggcaggagtttccagcctttttttttttgagactccatctcaaaaaaaaaaagaaagaaagaaagaaaaagaaagtgtccttttctgttttgtgcaccacaagagttttctccccaggagtgcaggcgggccag

SEQ ID NO: 13424 - DNA, 544 bp, Homo sapiens
  source 1..544: mol_type = other DNA
caactataatagtagcatatatttactctaatagaaactctacaaatattccaacataattagactcttctggtgtacacctattctccataccgcattgacatgctgcatttctgaaaagtgtgagagaaatgtgggtgattacgcacacactccttccttcagcctggccgtgagacctgctggccttgctttcgggacctgcagcaagatttttgggtgctgtccaagaagagcattctttgaacgagactccaacccattgctctctcgagagagaaggattgcccgcctttttcccccgggcaggagctcggcgaggccaggagagccgcgcaccggccgggcagggacgcgcaggcgtcgggcgccgctggttgcgcatctggcgccagagcgcgcccccagcgctgtgcccgccgcgacccgggccatgggctggtgctccggagcgtgccgggcgctctctccccgcgcgggggcaccagagccctcggaagtgtcaggcactgcggtgtattttccccgttctcttttaaatgac

SEQ ID NO: 13425 - DNA, 399 bp, Homo sapiens
  source 1..399: mol_type = other DNA
tgggatgccctacgtggggcatcgcggggagtgaatccacgatctgggaatggctacatggtggccaccgaggctagaattgtgtttggagactcccttcccccgatccccaaataggtggcccggaatgggggcggtgatccttggttaccaatgcaaacttcctataataagaatcagcgcatttttcagagctgaaccaagcacggtttccatttcaaaaagggagacagcctctaccgcgattgttagaggtacctggatgtaaatgcacacacacacacagacacacacacgcacgcgcgtgcatgtctacacggccaggatgtgtgcgtgtgtgcgcgcgtgtgtgaactcccacatgctggccagtggcacacttcgccagcagtagcagag

SEQ ID NO: 13426 - DNA, 567 bp, Homo sapiens
  source 1..567: mol_type = other DNA
acagacacacacacgcacgcgcgtgcatgtctacacggccaggatgtgtgcgtgtgtgcgcgcgtgtgtgaactcccacatgctggccagtggcacacttcgccagcagtagcagaggcggcggcggcggctcccggaattgggttggagcaggagcctcgctggctgcttcgctcgcgctctacgcgctcagtccccggcggtagcaggagcctggacccaggcgccgccggcgggcgtgaggcgccggagcccgggtgagcagcgcagatagtgccctcggtcgcctcggccctcactgtctccccctggggcggcctcggctactccccaggtgggacgtgccgcgccacctgcccgcgccaccggcacccagcggccgtggcggattctgcagcatcattcgggggccccgtcgcggagccaaagccgccggcaagggccctcccttggcctcaggctcgaagagagagtgggcacactggtggctccagcggcgtcagtgccatcgcggcctgggccggagctgggcactcatccatccacagtctccgggctggggttgcg

SEQ ID NO: 13427 - DNA, 496 bp, Homo sapiens
  source 1..496: mol_type = other DNA
catttagaaacatgttctttaagaaaagtttcaggtatattacatacatatttagcattattgtaaaattattacattattattgggtattttcagataatagttgtttcaaaattattttaaataccgtaacctaactacgatgtttataaaatggcagtttcttgttcatccctgcttaattttatttgaacaagatcataaaacaaaacaaaatctagttgtgatattaacatgttcttgtgcaacgtgaaaaagtaaatgatgtcagtatttatttgcaatacattgcagtacactgaagtacagtcaagtattagtaatttctctgacacattactttggctcagataaattttgattatatgcaggcactttttcaaaaaacagtaaatcagcatgctattttgttcgacagccttgaggtcaggaaaggtctaagcttatgcgaccccgggatcacgtggggagctttaagaacccttcctaagaaagt

SEQ ID NO: 13428 - DNA, 242 bp, Homo sapiens
  source 1..242: mol_type = other DNA
ccatggtagccttttcagaccctttgggaaaggcctctatctactagttttagtttcctgacttggggcatgtgagtaaagtcaatttgccagtcctatttccacgctagcagcttgtaacctacattttccttggtccaagaaagtggaaccgttgctcttcctttggaagtaaactttttattaaaggccatcatgtccctgtgacctgcacgtatacgcaattaaccttgtgaatttcg

SEQ ID NO: 13429 - DNA, 676 bp, Homo sapiens
  source 1..676: mol_type = other DNA
ccagcagtagcagaggcggcggcggcggctcccggaattgggttggagcaggagcctcgctggctgcttcgctcgcgctctacgcgctcagtccccggcggtagcaggagcctggacccaggcgccgccggcgggcgtgaggcgccggagcccgggtgagcagcgcagatagtgccctcggtcgcctcggccctcactgtctccccctggggcggcctcggctactccccaggtgggacgtgccgcgccacctgcccgcgccaccggcacccagcggccgtggcggattctgcagcatcattcgggggccccgtcgcggagccaaagccgccggcaagggccctcccttggcctcaggctcgaagagagagtgggcacactggtggctccagcggcgtcagtgccatcgcggcctgggccggagctgggcactcatccatccacagtctccgggctggggttgcgccccagagagtcccgggagcgccgccggtcggtgcccggcgcgccgggccatgcagcgacggccgccgcggagctccgagcagcggtagcgcccccctgtaaagcggttcgctatgccggggccactgtgaaccctgccgcccggaccagctcagcctctgataagctgggcgcagggaaggcctccccgcacgggtgggggaaagcggcc

SEQ ID NO: 13430 - DNA, 580 bp, Homo sapiens
  source 1..580: mol_type = other DNA
cctgtaatcccagctactcgggagactgaggcacgagaattgagatcaggtcactgcacatgaacattaacgtacaagcctttgtatgaatatgtttttgttcctaagtaaattcgtagattactggatcgaatgataagtatatgattataaggagagattgtttttccaaagtggttgtaccattttgcattcttttaattttgggccatcctaaagaacaggtggtgataaagatgtgcttccatttaaaaactgatcattttattaataaattaaaaaaatctaaaacatataagaatctgaaattaaatgtctggcttgactttgcagatattttgaatctatgtttcctcaagagcacgctttgctctcggagcttggctgctcgttcgtgctcgcaaccactaaggtctacgcaaacctccacggtagaaattcccagagggcagcgcagacggggcgggctctgagactccgggctccgcctctttccggtccggtctcgcgatcgtctctaatctcgcgagaagagaaggcggccgccatcggccgaacggaggcggtggcgtccccgggg

SEQ ID NO: 13431 - DNA, 605 bp, Homo sapiens
  source 1..605: mol_type = other DNA
atgaacattaacgtacaagcctttgtatgaatatgtttttgttcctaagtaaattcgtagattactggatcgaatgataagtatatgattataaggagagattgtttttccaaagtggttgtaccattttgcattcttttaattttgggccatcctaaagaacaggtggtgataaagatgtgcttccatttaaaaactgatcattttattaataaattaaaaaaatctaaaacatataagaatctgaaattaaatgtctggcttgactttgcagatattttgaatctatgtttcctcaagagcacgctttgctctcggagcttggctgctcgttcgtgctcgcaaccactaaggtctacgcaaacctccacggtagaaattcccagagggcagcgcagacggggcgggctctgagactccgggctccgcctctttccggtccggtctcgcgatcgtctctaatctcgcgagaagagaaggcggccgccatcggccgaacggaggcggtggcgtccccggggcggggtcgcgcgtcccgggcatacgcatgcgtgcacgctgccggtcgggcggagggggcggcggcggccgaggcggcgtcgtta

SEQ ID NO: 13432 - DNA, 378 bp, Homo sapiens
  source 1..378: mol_type = other DNA
agtgtttaagaatcactgagtgagtcgctaattagttgctgataaatgagagactaatgctaagaatgtaaaaagaaagggaatttcctgtactggtctgaccctacaacagtttaacagttgcagataacaaaaatatcattttggaatatagtagaacattcctctaaaggaattcagctaagaggttttagctggtaaagataggtatcttgatcacctcctttgttctcaagtatactgtattaggattatctgggaagctcaaaacaaacaaaaaatatcaagttcactttgaactctctgccagagttaagaaccattgctttagaattttagtgcgcctgagcgtcatctgaggcgctgtttcaaatgcac

SEQ ID NO: 13433 - DNA, 564 bp, Homo sapiens
  source 1..564: mol_type = other DNA
tgttctcaagtatactgtattaggattatctgggaagctcaaaacaaacaaaaaatatcaagttcactttgaactctctgccagagttaagaaccattgctttagaattttagtgcgcctgagcgtcatctgaggcgctgtttcaaatgcacgtccgggaatcttcactttttccgttgctagcaaaagacaattttgtgagtataagccccctaaaaacctgtttttccattccctcggggcggaacgtgggatgggggctccccccaggtaccctttccccgctccgcgtcgctgctcaggcgccagctcccgcgtcggaaggggcgatggggtggcccggggaggggcaacgcccagcggcgagaactgggcgcacgctggcgttcctgctcccgccgaggggcggccaccggccggggcgcgcgcaccgtggggccgggagtccgcgcggccccggcagcccctgcctcgcttctccgcgctcgcggcgccgcctcctcccttcgcgccgccggcgctgctcgggggcggggccttgccgctgcggaggccggagacgcg

SEQ ID NO: 13434 - DNA, 406 bp, Homo sapiens
  source 1..406: mol_type = other DNA
acaacacgttttaaatcgagtaattgttgctcgctataaatgtgactattcacactgctccagtcacacttcagcatccccagcagtacagcacgctggggagagccatgctcttcactctgcatttgagagcataagctcccagtgcagggttgacttgtcaccgccgtcacggggtgacgctgcaccttgccccgggggcaggtggtgaagctacgtgccgtcctcggcggtgaagacattcctcccgggccctgcgccctgcagcgtggtaaccccactgccggagaccgtgcgcaacccagctgctagacccccggcgttgagcggcaaaaccccgccccgagcggcttgccccgcccccggctcgtgcggcggggggcggggctaggactgagggcgccgt

SEQ ID NO: 13435 - DNA, 660 bp, Homo sapiens
  source 1..660: mol_type = other DNA
cactctgcatttgagagcataagctcccagtgcagggttgacttgtcaccgccgtcacggggtgacgctgcaccttgccccgggggcaggtggtgaagctacgtgccgtcctcggcggtgaagacattcctcccgggccctgcgccctgcagcgtggtaaccccactgccggagaccgtgcgcaacccagctgctagacccccggcgttgagcggcaaaaccccgccccgagcggcttgccccgcccccggctcgtgcggcggggggcggggctaggactgagggcgccgtgcgccgaagcgtgtccatggagggctgaggcggccgaccttcggcccgaggcaccggggcgccgggacggcgaagatgtcgcttccttagtccgggcaactgtccgggctgtgagcaagaggaagctgcagcccacccgggcagccctcaccctggtgagtgctcgcggcgcgcggcggggcccgtgacattgctcgtgtccgccccgtgcaaggggaggtcacggcggccgggagtggggccgcagggacgcggacacgtcagacctcggcgtcgctccgacccgccgcacagcctcgagtcccgggcggggctacgtttcccgtcaggccgcgcggcaaccgcgtgcgggccggaggggatcccggg

SEQ ID NO: 13436 - DNA, 541 bp, Homo sapiens
  source 1..541: mol_type = other DNA
aatgaaaactgtcgattttctgcttgatgtttttcaaagcatttagaacactgtaaagttcgaggtgtgcactcttcaactcaaatgaactgattttttttttttccaagtaaaagtaatccttacacaacctaagaaaatttaaatgctggcatttctacaaggtcggcaattaagaattcacgaaagctacgaggcctcggagcctttactccccctggaagtaaccggggagcacccaggggcaaagccgaggccccaagcgcggggaatgcggctttgcccgaccgctggctccgcgggcgccgctctggtaagaagttcgggcctggcccccaagcgccggcgaaccggctatccggcgagccagtaattagcccgctccgacggttgcgcccggtggccagacccggcgcccgacacctggagcgagtgcgctggggcgctgggcggggcaccgcggggcggggcgcgtcgctcgtttccggtgtgcgcggcggagcgctagggcgggggcacagtcggctcccaatcgcgcaca

SEQ ID NO: 13437 - DNA, 632 bp, Homo sapiens
  source 1..632: mol_type = other DNA
acgtattttcacaatcaaaatatctaagtaaggaattatataaaagttgtaggaatgtgttttatatcacttttagtatagccatggttaataacagcctcatattcaggtctggattgcagcagtgcctttacactgcaagtgaatgtcctcatctttaaaagtgggataatgatatagtcttcatgaagctgtgaggataccacccctgtaatcccaacactttgggaggccaagttggaaaaatataaaacaaaggagttaatatttgtaaagccttcaaaacagttattggcatagccagaactttgtgtgttattattttaacctgacagctttcaatttacatgctttaaaaaagcagagaaatgaaaactgtcgattttctgcttgatgtttttcaaagcatttagaacactgtaaagttcgaggtgtgcactcttcaactcaaatgaactgattttttttttttccaagtaaaagtaatccttacacaacctaagaaaatttaaatgctggcatttctacaaggtcggcaattaagaattcacgaaagctacgaggcctcggagcctttactccccctggaagtaaccggggagcacccaggggcaaagccgaggccccaagcg

SEQ ID NO: 13438 - DNA, 504 bp, Homo sapiens
  source 1..504: mol_type = other DNA
ctggtcgacacggtgaaaccccgtggttgccacgctccactacactccagcctggcgacagagtgagaaaaaagaaagtaaacaggtgaaattaattttaataatatattttgtttaacccaacgtatccaaaatactatcatttgaaagtgtaatgaatataaaaatattcatgagatatttttcattctcatatccaaatgtgtattttacacttacagcacaattaattagctcaacaatagccaatagcatatgggatagcagcctcggctccaacaccggcagaggaaattaccttattaattagcttacatatttattatctatctgaatgcaggtttccggaaggcagggatttaaaaaaatctgttttgttctatgtgcccggccacaggtggggcgcccgcgttccgggcggacgcactggctccccggccggcgtgggtgtggggcggtgtgcgcggtagagcgcgccagcgagcccggagcgcggagctggga

SEQ ID NO: 13439 - DNA, 483 bp, Homo sapiens
  source 1..483: mol_type = other DNA
tttcaagaggccaaaatcttcacagttgaaaatttctgttgaaccacagagatttgaaccaactcagtttagaaagcctgtcttcgtctccacccaaacattaggtgggagcaagagcacagtcctcagaaatctgttatattttctagtggccaccttttaaaaagtaaacaggtgaggccgggcgcggtggctcacgcctgtaatcggagaccatcctggtcgacacggtgaaaccccgtggttgccacgctccactacactccagcctggcgacagagtgagaaaaaagaaagtaaacaggtgaaattaattttaataatatattttgtttaacccaacgtatccaaaatactatcatttgaaagtgtaatgaatataaaaatattcatgagatatttttcattctcatatccaaatgtgtattttacacttacagcacaattaattagctcaacaatagccaatagcatatgggatagc

SEQ ID NO: 13440 - DNA, 654 bp, Homo sapiens
  source 1..654: mol_type = other DNA
actcgcagcggcagggtctggggccggcgcctgggagggatctgcgccccccactcactccctagctgtgttcccgccgccgccccggctagtctccggcgctggcgcctatggtcggcctccgacagcgctccggagggaccgggggagctcccaggcgcccgggtgagtagccaggcgcggctccccggtccccccgacccccggcgccgccagggcgcggtggggtttgtccgggcagtgcctcgagcaactgtgcgatcgcagccgggaggcttccccagccccgcgggccgggtgagaacaggtggcgccggcccgaccaggcgctttgtgtcggggcgcgaggatctggagcgaactgctgcgcctcggtgggccgctcccttccctcccttgctcccccgggcggccgcacgccgggtcggccgggtaacggagagctgcctcggggtgccaccgttgccacttccggagccggttctgatcccaacagaccgcccagcgtttggggacgccgacctcggggtgccgtggtgcccggccccacgcgcgcgcggggctgaggggtcgggggcgtccctggccgcccagggtgctcctctccaccccgcgaggaggggcagctccggagacccggtcttcagcgagcgg

SEQ ID NO: 13441 - DNA, 608 bp, Homo sapiens
  source 1..608: mol_type = other DNA
acgctccactacactccagcctggcgacagagtgagaaaaaagaaagtaaacaggtgaaattaattttaataatatattttgtttaacccaacgtatccaaaatactatcatttgaaagtgtaatgaatataaaaatattcatgagatatttttcattctcatatccaaatgtgtattttacacttacagcacaattaattagctcaacaatagccaatagcatatgggatagcagcctcggctccaacaccggcagaggaaattaccttattaattagcttacatatttattatctatctgaatgcaggtttccggaaggcagggatttaaaaaaatctgttttgttctatgtgcccggccacaggtggggcgcccgcgttccgggcggacgcactggctccccggccggcgtgggtgtggggcggtgtgcgcggtagagcgcgccagcgagcccggagcgcggagctgggaggagcagcgagcgccgcgcagaacccgcagcgccggcctggcagggcagctcggaggtgggtgggccgcgccgccagcccgcttgcagggtccccattggccgcctgccggccgccctccgcccaaaaggcggca

SEQ ID NO: 13442 - DNA, 492 bp, Homo sapiens
  source 1..492: mol_type = other DNA
acaaaagtttagaatgtttgtgggttttgttccttaaatccttaattacataaattaatatctacattatacagattaagatacatatttttcctctatctcttaaatcctgacattaaatgtcattaaatttcttaaatctcaagagaacggaataaaagcagcttctaatgttctctctggaaaggatgcttgacaaaacgcccgcgctctctggagacgcagccagtagggcccacccttaagtgggagcgtttgctgtggactaaacaggagccactggactagagtacacttgactctcggctctgcggtcgtgtacttagttgactcgagcgctccagggagacgcccgactgcgccgccccggggcaccagctctgcttcctccaggtccactgaggcaggcacgcccagctctccgcccagctgccggcacagccaatcgcagcgcagccaggcggcggggcggtgccggccgaacccagaccc

SEQ ID NO: 13443 - DNA, 522 bp, Homo sapiens
  source 1..522: mol_type = other DNA
tacttgcagtgagccgagatcatgccactgcactccagcctggaggacacgagtgatctcagaagagtctgctgaacactggacttgagcctggcacggaatgcccagtcccgctcacacatgttccaaaactaaaataagtaaaggcttaattattgttttgaaaataatttgtcaaagtgtttgaggtttttttacagcaagctccataattcggtaactcaaaattatgttcctaatataaaaatgtcatttggaggtttaattatttgtaatttttatactttttagttttgtaaatttaagagttctattctggagattctgaaataatccttaagaaaccacctaaattcctaggagaatttcacagtttcaaaggctatgaagccaggtgacacctgtgtgggagctgagggcggggctgtgcttcagcctcctcctcccactgcccctcccccacccccaggagccctttgtgaggaggaggccccagctgtgtgatacaagcctgggccccag

SEQ ID NO: 13444 - DNA, 358 bp, Homo sapiens
  source 1..358: mol_type = other DNA
atatgtgaaaaactgtaactttagtttgcatttgtttttgagacagagtctcgctctgtcacccaggctggagtacggtggcgcagcgattagtagcgttaaaaatctgtgggtacacgtagccaactgacattttaactgaacctctacttacaggtgcggagcttccggcttgccaggggaaggagcccgcccctcccggctgcgtgcaccagcgcagctagtcacgtgacgccgggggcgggggcagataggaggtgcctgctgtcatcgttccgtgggccctgctgcgggcacgctccggagctgtcactggtgacgtcgcctacaggaaccgccccagtggtcagctgccgcg

SEQ ID NO: 13445 - DNA, 376 bp, Homo sapiens
  source 1..376: mol_type = other DNA
tgaaacaacgttgcaatggaataactttgtacatgtcatttcacatgtgtaaaagacgtcaaattatactgccaccagcaatgtatgaatatgtgaaaaactgtaactttagtttgcatttgtttttgagacagagtctcgctctgtcacccaggctggagtacggtggcgcagcgattagtagcgttaaaaatctgtgggtacacgtagccaactgacattttaactgaacctctacttacaggtgcggagcttccggcttgccaggggaaggagcccgcccctcccggctgcgtgcaccagcgcagctagtcacgtgacgccgggggcgggggcagataggaggtgcctgctgtcatcgttccgtgggccctgc

SEQ ID NO: 13446 - DNA, 316 bp, Homo sapiens
  source 1..316: mol_type = other DNA
cttcccagcagacttgcctgtaatcctagcacttcaggaggccgaggccagcggattgctggaggccaggagtttgagaccggcctggccccccgtctctactaaaaatatttttaaaaattagctggacatgtaatcccagctactcgggaggctgaaatgtgatcatgccactgcactgcagcctgagtaatttctcaataacttgtaagtacagcgatacacttttatatctcagttttgaaattagttttccagtaacatgttaggaaccaggtcagtgacctgctccaggacacgggactggcgggaagtc

SEQ ID NO: 13447 - DNA, 347 bp, Homo sapiens
  source 1..347: mol_type = other DNA
cgtctctactaaaaatatttttaaaaattagctggacatgtaatcccagctactcgggaggctgaaatgtgatcatgccactgcactgcagcctgagtaatttctcaataacttgtaagtacagcgatacacttttatatctcagttttgaaattagttttccagtaacatgttaggaaccaggtcagtgacctgctccaggacacgggactggcgggaagtcaaatgaattcgcgtgcgatcatgggaatggtttctgggcttgcagggtacttgtaggtgaggctccggggctccagctaacctgagctacctgcaagcggggtgagccggcgacgacgccggcc

SEQ ID NO: 13448 - DNA, 411 bp, Homo sapiens
  source 1..411: mol_type = other DNA
ttttccagtaacatgttaggaaccaggtcagtgacctgctccaggacacgggactggcgggaagtcaaatgaattcgcgtgcgatcatgggaatggtttctgggcttgcagggtacttgtaggtgaggctccggggctccagctaacctgagctacctgcaagcggggtgagccggcgacgacgccggcctctacgcagtgcggtggtgaagacgtctcttccaggaagatccatccttttaaagggctcgcgtcccgcggccctgaaccggcgcgctggagcagtagctcacggcccagccctgtgacggtgtgcacctacgtccaggacaaagggggcttgtcctgcccttctcaggctgcctgccttccaggaaaagctgcctgtgccccgcgcgcctgccgccgccc

SEQ ID NO: 13449 - DNA, 566 bp, Homo sapiens
  source 1..566: mol_type = other DNA
ggaagtcaaatgaattcgcgtgcgatcatgggaatggtttctgggcttgcagggtacttgtaggtgaggctccggggctccagctaacctgagctacctgcaagcggggtgagccggcgacgacgccggcctctacgcagtgcggtggtgaagacgtctcttccaggaagatccatccttttaaagggctcgcgtcccgcggccctgaaccggcgcgctggagcagtagctcacggcccagccctgtgacggtgtgcacctacgtccaggacaaagggggcttgtcctgcccttctcaggctgcctgccttccaggaaaagctgcctgtgccccgcgcgcctgccgccgcccattcccggcgcgcacctggcagtcccgggctcgagccccgccctgccgccagccaggtgagaggggccaggccccgccctcgccggccccgccccgccccactgcgcctgcgcagtcggccgtcggcgccaggcgccggggcggcgcggccgtcgcagttcggcgggcgcagtgcgcgtgcgccctgactgttggggggcgggcggcgtccgcg

SEQ ID NO: 13450 - DNA, 175 bp, Homo sapiens
  source 1..175: mol_type = other DNA
ctgacctcaggtgatctgcggctctgtgtgtgtgtatacacacgtgcacatctagtagatcacattataaatatcatatccagagaggatttatgctcccagctacttgcagtgagctgagatcgcgccactgaccaagctgtcaagttctcagctggtccttaacacttggcaa

SEQ ID NO: 13451 - DNA, 16 bp, Homo sapiens
  source 1..16: mol_type = other DNA
cccaggggcgcgggtt

SEQ ID NO: 13452 - DNA, 337 bp, Homo sapiens
  source 1..337: mol_type = other DNA
tgtcttaggagagcaaagaccttctctctgtcctttattaatctttaatatcacctgcatgggggcattgcaggaaaaaccccccaaaagctttgagagcttctaaattttaggaaagatgcataagtctttatgagtttgtgacatccatcctcccgggagggaaagaattgctatttttcaagtgcctctcgctcaaaataatcaatataccaaagcggcatattttaggatggcatatttataaactttttttgcattcattttgactttttaagatattgtattaaaacattatttaccttgacttctagcccgggtctggcagggagtcagg

SEQ ID NO: 13453 - DNA, 440 bp, Homo sapiens
  source 1..440: mol_type = other DNA
atgttctagtagggccctggaatttactctctatgtgacagagtgcatggcagaaagaacactgataaatgtagcaagtttatgttgaaaatttcattaaaagtgacaagaatataaatatatgttgcttgaataatgagttcttatcttccactttgtggatgctcatgtcctgcaaatttaggagagcataatataataccagcagcagtatttaaaaattctagcagaaaacaccttgctttcttgacatctgaatcaaataagattgatagtgagagaaaaataagactgttttcatcttaaattctcttccaacatagtagaaaatgaattgtcacctgaggtcaggagttcaactgcactccagcctgagcaacagagtgagactctgtctcatggcataaaacattccaaatatattgtcagatggttctgag

SEQ ID NO: 13454 - DNA, 403 bp, Homo sapiens
  source 1..403: mol_type = other DNA
cttttcttgacttgatgctgtaggagtccaacaaagaagtggcttcgcaccaggcactttgaacaagttggaaggctacagtgcccccagctcccgggggccagagcctctagggctggcagcctcagcaggcagagtcacttgcctccttcagctcaaccaagagaaggatgcgccggcctttgcacatctctgcagcggcccctgcggcccaatcctgccggcccaggaatgcacggtcggatcttcatatggatttattattattattattatttttgccacatcggctgagatctgctggctgccggtctagcggagtgggctctggtgcaccagcagaggctgggggagagtgctgcccccgcctggagcccaagtctctgcgtgcctgggggtagag

SEQ ID NO: 13455 - DNA, 459 bp, Homo sapiens
  source 1..459: mol_type = other DNA
cttcatatggatttattattattattattatttttgccacatcggctgagatctgctggctgccggtctagcggagtgggctctggtgcaccagcagaggctgggggagagtgctgcccccgcctggagcccaagtctctgcgtgcctgggggtagagggcgccaggcgcccacctgcaagcccaagccggtgctcggctcaggatctggacaacgataatgatagtattaatcctcctattaagtgtcagggcgacaggcgcccgcccaagcccagacctcggacctggttccaagcctgttcccggggcgcccggtttctgcacctggagctcgcccgatgaggacaaggtctggaggccggcctgggaacaggggccgaagggcgagccggaccctagggcgcacgggcggcgaggggaggggcggagcgcgggtcccgccccggcgggccgctgg

SEQ ID NO: 13456 - DNA, 520 bp, Homo sapiens
  source 1..520: mol_type = other DNA
cttcatatggatttattattattattattatttttgccacatcggctgagatctgctggctgccggtctagcggagtgggctctggtgcaccagcagaggctgggggagagtgctgcccccgcctggagcccaagtctctgcgtgcctgggggtagagggcgccaggcgcccacctgcaagcccaagccggtgctcggctcaggatctggacaacgataatgatagtattaatcctcctattaagtgtcagggcgacaggcgcccgcccaagcccagacctcggacctggttccaagcctgttcccggggcgcccggtttctgcacctggagctcgcccgatgaggacaaggtctggaggccggcctgggaacaggggccgaagggcgagccggaccctagggcgcacgggcggcgaggggaggggcggagcgcgggtcccgccccggcgggccgctggtgactcgctcgggcagaggccgaggaagccggttccggggacgggcaacaggcaggacccc

SEQ ID NO: 13457 - DNA, 633 bp, Homo sapiens
  source 1..633: mol_type = other DNA
gctgggggagagtgctgcccccgcctggagcccaagtctctgcgtgcctgggggtagagggcgccaggcgcccacctgcaagcccaagccggtgctcggctcaggatctggacaacgataatgatagtattaatcctcctattaagtgtcagggcgacaggcgcccgcccaagcccagacctcggacctggttccaagcctgttcccggggcgcccggtttctgcacctggagctcgcccgatgaggacaaggtctggaggccggcctgggaacaggggccgaagggcgagccggaccctagggcgcacgggcggcgaggggaggggcggagcgcgggtcccgccccggcgggccgctggtgactcgctcgggcagaggccgaggaagccggttccggggacgggcaacaggcaggaccccaggcccgggaacgacgtcgcgagcgctgagactgccgggcctcccagcccatctggcattcgagcgcaggaccgggcgccccggcaccgccgcgcgccacccgctaggatgccggtggccccagcgccctcagccgacggaggtgagaggcgggcccgggcggggcgcggaaccagggtggggggctgggggccgaaggacccacctttccc

SEQ ID NO: 13458 - DNA, 368 bp, Homo sapiens
  source 1..368: mol_type = other DNA
cagacctctggggacagcgaaagccttgctctcctaactgagaggaagaaggcctgtgcattttacttgcaagcccgagcctgactcctgaaaagaaggcatattttcctcctgcaataagaacagctgcattttttccttcctgactgcagggttgcaagcagcaactgaaggaacagaaagaagcactcttcttgaactgcattgccacaaagacacttgtcatcgctgctctgttaatttgaaaagaaaaagcaaaacccaggaaattggtattttacagtcaccattcatcaggagattcttaaaaagccttcgtcacattttaacgcatcgctgttagacacttttacaggctcacacagatg

SEQ ID NO: 13459 - DNA, 307 bp, Homo sapiens
  source 1..307: mol_type = other DNA
gaaagaagcactcttcttgaactgcattgccacaaagacacttgtcatcgctgctctgttaatttgaaaagaaaaagcaaaacccaggaaattggtattttacagtcaccattcatcaggagattcttaaaaagccttcgtcacattttaacgcatcgctgttagacacttttacaggctcacacagatgagaagggtctcctctcagagtgtgcttttgctgtgagcagccccaagcagctgggcgccccaagcagcggtctcccgggccggggctgcgcggccgccgctgtgctggctttagggc

SEQ ID NO: 13460 - DNA, 491 bp, Homo sapiens
  source 1..491: mol_type = other DNA
gtgttaacagatgaaaatgaccatttgaccattctaagttttcctggactggttcaaagaactggaaccctaattacttcggccacggccgagagtcgcccggcccggcgcggccaggcacccaaccatgtccgactgcgcggggcgccaggtggccgcgaccccaaaccccggccctcgccctccggccccgggctccgccccccaggccccggcccccacccccgaccctactatgcctgggtcgccccgcccgcgggggccccggctgagggagccggctcggggtccgcccaccggtactcgtagtgttcgtcgaagtacttgtccgagtagtagatctgctcagcccgccgccgattggacagcagcgccgaccaatcaccttctgcggaagtcggccggctgccagcctatcgtcgccgccgccctgggtcagccaatcagagatctgttgcgagggcagggcccttaacgggcaggggcgtggc

SEQ ID NO: 13461 - DNA, 484 bp, Homo sapiens
  source 1..484: mol_type = other DNA
ttggccgcagcagaatattattttaggcctgtctggaactcctgggctcaagcgacactccacctcggcctcccgagtggctgggaccactggcgcccgccgccaccgcgccggctccgggcctcccacacagtcgtctaggggggcgccaggagccccgcgacgggccaggccggaagctcagcaagtgcaccaggcggcgaaacggccggctgcgcagggcagccccggacacagccacgccgcggccgcccggcgctcccccgaccctacttttcaaagtggacctaggctcctggctcgagcctgagttccgtgtcctggaactttccacgttcggccacgcccctgcccgttaagggccctgccctcgcaacagatctctgattggctgacccagggcggcggcgacgataggctggcagccggccgacttccgcagaaggtgattggtcggcgctgctgtccaatcggcggcgggctg

SEQ ID NO: 13462 - DNA, 410 bp, Homo sapiens
  source 1..410: mol_type = other DNA
tcctccaagcctttgagtgagaggaaagttcctaatatttaacgtagaactttttttttctcgtgaaaattataccactttttttaatttttgaaagaaaccgagcgatttttaaattattcaaacttaaggtttctggaaatttaggataccatcaagagtcttgtaggctttccaggtttgtaggacctacagggtatgcaattcctgtaagtcaccaatcttggggaaatttggtgagagtaatctcggccttgactgctcaaaggtcacctcaggactatctccgaggtgggtccccagcccagaggactcctgggggtccactgcctccacgtgctgcccgcgcaggtccagtgccgccgccgcgtacttccggccggaagaaagggcgggctcctggcgtcgcc

SEQ ID NO: 13463 - DNA, 423 bp, Homo sapiens
  source 1..423: mol_type = other DNA
ggcgaccaagattgggcagggcaggtgcctgccacacttcattgcactgtgcaatgcccactaggatcaggccactcatgggggtgggcatgctggcccgcagagcagccagggccctgcagcccctaacaaaagaggccacgtgcttcctgttttagggtcgtctgcccagctgggagcaggccatctcgctgcagcatgagtccaaggctggacatgagagctcagagggccctgactgaagtagtggccaggcctgcagggtcctcaggcacccaggagcttgccctcgccaggcgacctgctgctctgcatggcttgggtgctgggccgcaaccccccacacccttgggctgttccacagcctgcggagaaggctcaccacgggaccttgtccctgcgctgaaggagcagtcctggcct

SEQ ID NO: 13464 - DNA, 312 bp, Homo sapiens
  source 1..312: mol_type = other DNA
ctccccaactcctcaaggggataggcctcccagcctggccagtcactgtgcgagccctgtcacctctcctgggggcagagggaagaggtcatacagagtggaaaatgatgaacgtttggcaaccaagactccaggtggtgccagcccctcccctggggaatgggagcagcctgtgccacgtgcctcacgcacactgcaggtcaggttctcagtggccccactcgagaccaacccagggctgagggacaaccctctgggcctggcgggggggagggggagcggaggaggggcctgcgcgcccgccccgcgcac

SEQ ID NO: 13465 - DNA, 602 bp, Homo sapiens
  source 1..602: mol_type = other DNA
aactcgcgcggctgttcggcacccgtgcgaggaacgggcactcagggaccacggagtggcactcagcctcgaccccacgcgccaggcagcccggcgacccccacgcgcggcggggtcctgcccaccccacccggcggcaggtggacagtgttgcctgctattgtgcgccctccatagaaatgcaaacgagcggcgtgcgccggccgcaatctgctcgtccccgcccgcccccgtctcccgcgccccgccgcgctcggccaagggcggggaggtggggtgggtacacattgagtatgcctggcaggcatcaccagcgcgctcgggacgctagtggtcagctgcagggggctgtgcccactgcctttaaaaatccctttgcttctataaaggtgcttttcgcaaattgttttttttttttactttttccttttaaggacttcaaaaaaaaaaaaaagccagtgaaatctgcaggctccagtctgcctggtagcgggcacgagccgctggctcgccgcctcatttacatcagaaagcgggtgccggccaataggcgcgcagcctcgcgccagctggcggcgccgcacccaccagcctatataagg

SEQ ID NO: 13466 - DNA, 736 bp, Homo sapiens
  source 1..736: mol_type = other DNA
tgttttaattatttagaaagtaaaaatcaaatgtaaagaactacagaatattaattttgctcaagtcttttagcatatttggtattacaaaagaatgagtaatataaccaagagaagaaatcttccttcagtctgtagtttaaacttaacatggatcaatgttatgctcaagcacttttaaaaatgcctgcacagaattgttagccattaatatttctgattcacctgttttttaatcaacgcgtctttgacaaaattgtttatcaatgtcaggaaataaacgtggtcatttgcttgaaatgctaatgtgttgtcataggatcctattaaattagaatatattaatctacactgtgtgtttaaatgagtcggtttttaaaagttaaaatctggaaatggaaaaaattcgcaatgcgaacaaaagaatctggttccctttcaatggaattattttaattcattaaattatcagaaaattccagcaagagcatgcagtaggtggcacctaaaagctctttggaggtttaagcaggagcagcagcctctgcagcagttggcacatctgcagtgccaggccggagcggctcaggccagcgcaggtgcaggggctgcgagcgggtggagcgcgagggcgctgggcgcagggagcacggccggtgggcggtgcagggcgcacggcgggcgagcagctgacagcatcgtcacggcggcgggagggagtgcgctgcgcctgcct

SEQ ID NO: 13467 - DNA, 712 bp, Homo sapiens
  source 1..712: mol_type = other DNA
gtagccttaaatgactttagtaaaaagagtgtatttttatttttatattccaaaaataagttttcttgactataagttgtaaaatgcgtagtttttaagtatgatttttaaaaagcatatttcctgtgaatagcagggcagaattttactatggaaatgaacttcaaaggttaacatgttttaattatttagaaagtgaagaaaaaatcaaatgtaaagaactacagaatattaattttgctcaagtcttttagcatatttggtattacaaaagaatgagtaatataaccaagagaagaaatcttccttcagtctgtagtttaaacttaacatggatcaatgttatgctcaagcacttttaaaaatgcctgcacagaattgttagccattaatatttctgattcacctgttttttaatcaacgcgtctttgacaaaattgtttatcaatgtcaggaaataaacgtggtcatttgcttgaaatgctaatgtgttgtcataggatcctattaaattagaatatattaatctacactgtgtgtttaaatgagtcggtttttaaaagttaaaatctggaaatggaaaaaattcgcaatgcgaacaaaagaatctggttccctttcaatggaattattttaattcattaaattatcagaaaattccagcaagagcatgcagtaggtggcacctaaaagctctttggaggtttaagca

SEQ ID NO: 13468 - DNA, 371 bp, Homo sapiens
  source 1..371: mol_type = other DNA
gaagtttatcttctataaaatgagaacttgtttttcatgaagctgtcagtgtttctgaacactagtaccctgagggagctggtcagaggtgctctgtaaagttgcatctgttgctagcaccatgagcagctgtctgaccaggaggcctgggaacagggacagagagagctggcacccttcttatcttgaggtctccattaagatctttttttgatacatgttatgatgtaggactttttaaaaaaacataaaacggtaaaaacacttgggaaagggcatttccaggctggctaagcactaaatggccattttgaatgtgcaattaaaagaggccccgtgctgcggaaaagcccatttccctaattacagac

SEQ ID NO: 13469 - DNA, 537 bp, Homo sapiens
  source 1..537: mol_type = other DNA
gaagttttcttttaacaggtttagaaaaaataatggcaaaaattacaatccagcacattatatatatatttttttgagctttttaaaacaggcactgccaaccagtgttatcaagaaggtctggatgccgttttttttgtataattaaggagcttgttggtttggtgaccaagatacactccagggaatatgccatgcagtggagtctcttccccggcactgcattgtctgtgggtcctgggcagtcacagaagccaccgcgctggcggggaggagggggaccgatgcggtccatgtcccgggcagccccaccttctctgcctgcgaagggcccttgtccggcgggaggagagaggcgcgccccacccgggctcctctacacctgccgccgcctgggccgattccgcgggcctcgcccggcgcttcagccgattcccgcccagctccgggctcatgggcgcggtcagcagggcgggccagggcggcggggcgcgacactgggaggaagtgcgggccgcctgcccgggcgcagagccg

SEQ ID NO: 13470 - DNA, 372 bp, Homo sapiens
  source 1..372: mol_type = other DNA
gagtagctgggattacaggcgtgtgccgccacacctgctcaggtgatctgcaagctttcccattagagatctgataaaagctaggtagcattaattatactgcaacgtgctttgaatttatgcggcaacttgaggagacaaaacttttttgttcaccggggagataattccctccgggtggttcttatagaaaagtcttccctgaattattccataaccttggaaaactacttggtcaccgggcttcggcggggcagtgaggggcgggaacacggctccggagggcggggccaagccggagcgaggcggcgggtccggacgccgtgcgcgtgcgcgcggcaggtcggcgccgggcgggggcggagcggccgt

SEQ ID NO: 13471 - DNA, 740 bp, Homo sapiens
  source 1..740: mol_type = other DNA
cagtgggcgtcccagcgggggcacccgagcgcggaccttcacatcctccgaggaacgccgcacccgcgtggcgggggtgggtagatggacctcagcgagccctcccggctccgggccgtcgcggctctcgggagaggcgccgggacatcgctgcctccgccgcgcagccctgcgcagctgcccggccgcgccaaccccttccccgccgcagcgcgccccgagtgttggcagcttgccagccgccacccccccaccccaaggtagagggctcctctcgggagtgtgcggggaaggggaggccgaggtccgggccacgcccgggtagccgcaacccgcagcggcaacaggtagcccagcaggctgcgcggggagcgcagagccaccgcggcgaccgggacggggcggtgggacggggggctcccgggctcctccgcaggctcgctccggtcgtgtcggccgcgtgggccgttgcgcaacactcgttgcgccgggaatggggcgccagccctcgcgggcgctcggacggcggtggccctggccggggagggacgcgagctggtagtggcgccgccgcggagggggagctgagggcggggaggcggggcggggccgcggagtgcccgccccggcccgcccctgccggccgcggccattggcggcgggccgggggcgggtgcgggcgcggcgattggggccgcggccgccagtcacgcggggctggcgggcggcgacgtagcgcg

SEQ ID NO: 13472 - DNA, 360 bp, Homo sapiens
  source 1..360: mol_type = other DNA
atgtgattcaagtcaggcatcttaaaacccttttcaatgatactttcttataagggagcgctgagtctcattttcagttgggaaaactgaggagtgtgtttccagagcctgccaagtcactctgctgtaccacctggcatgtgacgtgccagactgaacagcaaggcaactggaatgaaagtccctcctgtcattcattcaaatccagtgagtccctccttgtaagcattgaatgaggtgagaagggcagctgcttcctgctcccactaaagctgaaggagccgaagagctgcctctttggatctgcactagagtgccaaatgcccctcatgcagatggctgagtaatgcagcagccagc

SEQ ID NO: 13473 - DNA, 474 bp, Homo sapiens
  source 1..474: mol_type = other DNA
gaacctgcagggaaacaagggctgccctgtggctccaggcccctcccagggagattgatcgctttaagctcctcagggaggaagttgcctgctcctgccggcccagaagacaggggcctgcctccgggcttgccaccccctcgtcccacaggccctggatttataaaggccttttctgctgtagaacacgacctactggaatgtttttaaaaagtgccctggcagtcacaaagcccttgctccaagctgggacctggagtggcggggcggcgaggccccaccgcctgcccagtgaggtcaagcctggctgcaaaagggaaggctgccttcatgttgcttaggtggcctccccgatggtcactcgtgaaacaagatggcaggttgacactgcacataagtgtgcatggggggccctgccacttaccagtagtaggctttgttcctcgtccattgtggatggttaaaataataccc

SEQ ID NO: 13474 - DNA, 781 bp, Homo sapiens
  source 1..781: mol_type = other DNA
cactatgctcccggccgctgcgccggcgcccatgctcctgaacgaggggcgccaggcagggccattcgcatctcgcccgacgccgctcccggccctcgggctggtacaataagccgcgctctggggacgcctaagtgtttccagagtctgggggcgggcggcggcggctgggagcctctcggtggcgcttcccgagggtcgcgatgagtacccgccctgggcccgggacccgagtccgcagatgtgccccgagggtcccaggacccgggcttcctccccgaggtagggcacacggccccgagtgtcccccggagcgtccccccacccccagggcggcctgatgcctggcagaatcctggggtggacgtggccccggagaagcggctcttgcggcgggggtgggggcgccggcggctcccgggtcctgactttcccagcccgcgggccgcttgataacctctcccccaccgctctggggtggccgaagtggtggggtccctgagcggctggggcgcggccgccttctggccgcgccggggggacccccgggacctgtaggaggctggcggcgggaggggcggggcccggctcctaggtgggtttcctcccggggccccactcctcggctgcttggatccggggcgggttcggaagtgcagcttgggacctgcctagggaggcggcgttagctctggcggtgcagactccgggagcacctcccgcccgcgcgcctcgggccggattctcggcaccctgcgggggtggaggagggcgggcgggg

SEQ ID NO: 13475 - DNA, 528 bp, Homo sapiens
  source 1..528: mol_type = other DNA
aagtttacataaaatggaacgatgaatatacataaattattccatggaagtcttcagccattaaatatgagatatattaggaaaaaaatgctagaaaaaaaatttaaaaaaagttgtagaaaagtcttgtccctatgatctcaattatatttaagaaatccaatccaattaagtatgtgcgcgtgcatactgtttgcatatgcaaaaggttctttaccaaactgctatatgattttgtgtataattatgcatttcttaatgataatgcattgctggattactacctgaggtcgcccacgcctgtaatcccggctactcgggaggctggggcagttggaggttgcggtgaaccgagatcacgccattgaaaaaataaagtaaacgtattgcaatcattttaactctctactactttctccatcctgaatccagcagggagagtgcgagtaggcggtgcccagcgctccgccgccccgccctctgcggaggtgataacgacactgagcagcgacgcgcactttgggacgc

SEQ ID NO: 13476 - DNA, 605 bp, Homo sapiens
  source 1..605: mol_type = other DNA
agatcaatctcaagcaactgagatgctggagaatccaattccttcctctaagaggattttgaattccgttcaaaatgtctctaataagtgaagcaaattctgcacattctgggcctctgcagagaacaaatagtgttctgcctttaatgggtaaaattatacaatttgcttttaacagtaaaccaaagcggtggcttcggatagcatcgcgctcccgagggctccctccacgccgggggacgcgcttgtccccaccgacctgggagggcgccggtgccaaggcggagatccccgggtgtgtcgcccccgaaagtcgggggcacccgctctgggcgcctctcctgcgtgggcagacccgccgaactccggctgacgcccccaaggaggcgcaggcccgagggcgggcgcaggaggcaggtccggggccccagctgcagccccagctccttgggtcccgcccgccgcccgcgcgttcccccggcagggggcgccggcgcaagcctcgctctgcccatcggggcgggcgagcggggaccctgcctcctgcgcgctcgcccgcggtccgccccccgcgctcgtcctggcggccggcgggacgccccagc

SEQ ID NO: 13477 - DNA, 283 bp, Homo sapiens
  source 1..283: mol_type = other DNA
gtcccagctacttggccagggatgaggtgcgaggatcatctgatccggggaggctaaaaagaaaaaaaaatcgtttgtgcaatgttttcattaccggaaacattttaagtaaaatacaataaaacttttaaatctaagcggaatattaagccccttcccagtgggccgtcacctacccggaggtgcacagcgccgccctcagcgctggttcgttttgcgcgaccaatcggcgcctggcttgttggcaggtgtcaggcagcgcgcactgattggccggtgcgga

SEQ ID NO: 13478 - DNA, 431 bp, Homo sapiens
  source 1..431: mol_type = other DNA
tgcgtttacagctgggcgccgtacgcgctgctcattcacccgcctggcccgggaaccctggccagcgggccctgggggacttgggcgccggtgggtcctcacacgctcgccgcagggccgcgatctcagcttgcaaggcgcgcacctctgccagctctgcgtccatggcgcgttgctgaccgcagccgggccggcagcgcagctgtcactccgacctgcgcgcttcacccgcgcttcaagcctcgcgcgcgctcccggcgcggaccatcccagagctcacgcggaggggaggcgggagagctccgcgtgaccccagcggccctgcacgtccaactccgctctcaagctggagagcgcggcgctccgctgctcaccctagccggcagccttggagccgcccggccgcgtgcctcactaaagaggcagggctg

SEQ ID NO: 13479 - DNA, 269 bp, Homo sapiens
  source 1..269: mol_type = other DNA
tcatacattcatttactgtctttaacaaagtctgacagaaacagggcacaatattatgtcacaataatacagacttgtgtttttgctattgtacaaagtattaagtcacttcctcaatgcattagtgaatccaggattataatgcaggtctaccttcagaacttggaattcttaacactaggaaaacttttcgaggtactagggcgctcagcgactctttccagaagagaccgtgtattctgggcagaacttcggcctcgccgctgcag

SEQ ID NO: 13480 - DNA, 576 bp, Homo sapiens
  source 1..576: mol_type = other DNA
ttttatcaacttagttttttaccgaagttatttttcaaaggaatttttatgtcatcgtaaacacaaagtcattatcagttgagatggttagctgacctaccaaaaggaggcggaattatctagctagggatatagtgacttcctctgcgtttacagctgggcgccgtacgcgctgctcattcacccgcctggcccgggaaccctggccagcgggccctgggggacttgggcgccggtgggtcctcacacgctcgccgcagggccgcgatctcagcttgcaaggcgcgcacctctgccagctctgcgtccatggcgcgttgctgaccgcagccgggccggcagcgcagctgtcactccgacctgcgcgcttcacccgcgcttcaagcctcgcgcgcgctcccggcgcggaccatcccagagctcacgcggaggggaggcgggagagctccgcgtgaccccagcggccctgcacgtccaactccgctctcaagctggagagcgcggcgctccgctgctcaccctagccggcagccttggagccgcccggccgcgtgcctcactaaagaggcagggctg

SEQ ID NO: 13481 - DNA, 292 bp, Homo sapiens
  source 1..292: mol_type = other DNA
aggaaaacttttcgaggtactagggcgctcagcgactctttccagaagagaccgtgtattctgggcagaacttcggcctcgccgctgcagcagccctgcctctttagtgaggcacgcggccgggcggctccaaggctgccggctagggtgagcagcggagcgccgcgctctccagcttgagagcggagttggacgtgcagggccgctggggtcacgcggagctctcccgcctcccctccgcgtgagctctgggatggtccgcgccgggagcgcgcgcgaggcttgaagcgcg

SEQ ID NO: 13482 - DNA, 711 bp, Homo sapiens
  source 1..711: mol_type = other DNA
tcatatattattttaaatattgtttgttaaagtaatagtcttaataaatgtaatttaagtttcagttacctcaattaatttttaagaagtacttatgtatatcatcgcataaaagaagtcacaaatccattatcttcttcaatgcagcatcagcaactcttgagtgattctgtttgaagttacttaagaaaaagtctgaattgatgagcctaaaggaatcctttctattacattcctcaaagttctttgattaaatactattctttcagttttcttagcttaaattaaaaatacaatactattaactaaaaattatgatcacctattaaaattacaaaactaagaaaattaaaaacgtatggcttttcctatattctgtaccacctaaaggtgttaatgactacttttcataatgttaaatttaagttttaaaacttttcttggaacttgtttccaatataaatcaagagttcttataaagtagctaagtggaaatatgatatttttaactcaactttattttaactatttatactacaggtatcctaagaatatttcaattaaatattagtatgtctgctgaaggcacttaattattaagaaacttaaaattatcaatctttcttgaatttctgatagagaagtaaaactattttccaaaactatttttcagaatgttcactaaaacatcctctaagcttttaaatattg

SEQ ID NO: 13483 - DNA, 811 bp, Homo sapiens
  source 1..811: mol_type = other DNA
acaatatcacaattaaatttaagataattcacattcaaataaaaacttcagtgctcaagtcttagtttatttaagctttgatttgaaaggttctaaaacaattttgtctagaaaagaaaacaaattgttattctttcattttctattttaataaaatatatatccatatttgttaaatttttagcttaaaggagaaaagttaatttgattcaaggaggaattttttaaaagtgactctttaaaaaaatcttcaaagttgcttgtatggtatctacaatgccactttaatttttaaaagccaatttcaatattaaagtaattttataaagtttccttcattcagcaaacaaaagtatcttttactatcaacctcaaaaactataaatcaaatttacttttaaaaagctaatttttatgcatcagtttttcttatatgtaactaaaataaaggggagaaactatcaaataatttgtgctaaaactaatttttacactggaaaaatatattacactggctatatattaattatggtattagggcaatatttttaatcctcataaaattaacaacatggactatgttgtcagtgtcctatttcattcaaaaagcagattgtttgatctaaaatgaaaaggatgactttaaaactatatcatttttcataaactaatattcaccaaaacatgaatgtttattacacaataataaaatcacacaagtttatagtcaaattagttgaagcagactgagtgcagcagttacaacaaagttctctagtacaagctgggccctgaaattttactcagcagt

SEQ ID NO: 13484 - DNA, 365 bp, Homo sapiens
  source 1..365: mol_type = other DNA
tgggcccacaaagttgaggctgcaggagtcatgatcgtgccactgcaccaaagaagactctttcattgctttcatcttttactcctgtagagtaaaagctaaatagctttctatcagcattcaattctttctggaatagaatcagtttcaagcattttatattgagtactgtgtagtaaatgaattcaatcaatcaatcaatcaaatggaagtttcaagtctggagccttctaatcctttttctatataaaccataatcatgagtataatggtcttcatgataggaatctcctgaaattgctgttcgggtaatacccatcttgccagaagactatttcgcaggctggagggaggccgtcagtcaa

SEQ ID NO: 13485 - DNA, 426 bp, Homo sapiens
  source 1..426: mol_type = other DNA
ctttggaactgactaattttatctgaaaggatattagagcctttgtatagaaaagtgcattttaaaaataaacaatgcgaaatgttatgtttctaatcctgatttcttgttttaacaaatagaagtactgatatgaaggtgttgaataaccaggccaggcatggtggctatcccagcaaaaattaaaaaagaaattttgagttccaccttaagttgctgagactctggagttgtcacaagaattctttggcatgaaaatgaaaataaaaacagtaatcagtacatgctgtttcatttagttttgtttgcctttaggaaataatttgaatccacaaagtttcatgtaatgaaaagaaatacataattttaattcaacccgagtgttttccaagaagattgtatttgcttaaattctacagtaattca

SEQ ID NO: 13486 - DNA, 480 bp, Homo sapiens
  source 1..480: mol_type = other DNA
taaacattaaaaacagttaactgttactattcaggagagatagctctatgaaatgaagaaattttctaaatctacaaaataaaggcaatagctattgagtaacataagcttttcatcccattttattcaatactacagaattattttgtgcaatagtaaaactttggaactgactaattttatctgaaaggatattagagcctttgtatagaaaagtgcattttaaaaataaacaatgcgaaatgttatgtttctaatcctgatttcttgttttaacaaatagaagtactgatatgaaggtgttgaataaccaggccaggcatggtggctatcccagcaaaaattaaaaaagaaattttgagttccaccttaagttgctgagactctggagttgtcacaagaattctttggcatgaaaatgaaaataaaaacagtaatcagtacatgctgtttcatttagttttgtttgcctttaggaaa

SEQ ID NO: 13487 - DNA, 486 bp, Homo sapiens
  source 1..486: mol_type = other DNA
ggtggcgggcgcctgcagtcccagctactcgggaggctgaggcagcagtaagccaagattgcgccaccgcactccagcctgggtgacagagtgagactccgtctcaaaagaaaactgtcctctcttcaaataatgatttattttcaggaaatagcatcttcccatgtgtgtctgtgttatatcacatggagcctcatccatagtttccctgacatgctatagcagtgtagaaaaaaaaagtatggttctttctcaggtacatctgaagtttgggtatatacttcagtaatgttggtatcctttattcagattgataaatattttattagtctatacaggttgagtaatttttgaaattgtaatttacaaatattcattcacttaagaatctaatatttttaaaactaggtatttctctttcaatggccagttgccattccagtagacgtctagagtttagctagaagtcttggctacagcagtaac

SEQ ID NO: 13488 - DNA, 572 bp, Homo sapiens
  source 1..572: mol_type = other DNA
gcggaggtttcagtgtgctgagatcacgacattgcactctagccaaaaaaaaaatttaaaaaatagttctaaaattacctagtctagatctgttattccttttattttcagaaaaatttgaaaggtatcaccctagttttacagaagagtgaactttggtcagaaacattaagtaacttactcaaggatctgtctctaacttctcatttgcagataaagaaactgagtattatttcatggttagaagttacataatttccactgatattaatacgtaatgagttaaatattattaatccaatttaaaatagattccagatatacttagctgacgagaatatcatctataatctgataatggctagtataaactttaacatttttaatgcgaatagtctatgaaaaccacagatttcttaatcaagctttctacttttcttatgattaaaaaaaatatttcccttggtaaccattttcccgttactttttctgcacaaagaactgaaaggcatttattattttagattttactaagaagttcagcaaatacttttcatttctttgtttttaaa

SEQ ID NO: 13489 - DNA, 380 bp, Homo sapiens
  source 1..380: mol_type = other DNA
caggctggagtgcaatggcacaggctagttttacatttttaaaaatagatatcattttccttatttttaggaagtttatcttgattcagtctatctaggtcattttacaaaatcctgattcagtctaatcaggccgaggtcagaccaggcgcctttaagcccacctactcgggaagctgaggcaggagaatcccttgaacctgggaggcggaggtttcagtgtgctgagatcacgacattgcactctagccaaaaaaaaaatttaaaaaatagttctaaaattacctagtctagatctgttattccttttattttcagaaaaatttgaaaggtatcaccctagttttacagaagagtgaactttggtcagaaacattaag

SEQ ID NO: 13490 - DNA, 454 bp, Homo sapiens
  source 1..454: mol_type = other DNA
ggggattacagagcccatgttggccaggctggtcccgcgcccggctgtttacttttaaacgaaacaacaaaaaactttaaagcattttaacttagaatgtggtaacatcgatagctgtattagcaaaagcttggggccctcatttttatgagtgccattcttgccgccgcataggccctctgcctcaccgccaagcaggagccttgccgttggactgcgttaggtattcccatgaaatggggtctcgcgcaacacccagacaccctggctacccggggactgccggtcactaccgggcgccgaaaagccgccggctccttccgccagctacacatccggcgccgaggccggaagcttctcttccggctcccaagaccgcgttccggaaccgccggcccatccaccgtcgccggaattgcccgactccgtcatggcaggcgccgggggcgtggct

SEQ ID NO: 13491 - DNA, 380 bp, Homo sapiens
  source 1..380: mol_type = other DNA
ggggattacagagcccatgttggccaggctggtcccgcgcccggctgtttacttttaaacgaaacaacaaaaaactttaaagcattttaacttagaatgtggtaacatcgatagctgtattagcaaaagcttggggccctcatttttatgagtgccattcttgccgccgcataggccctctgcctcaccgccaagcaggagccttgccgttggactgcgttaggtattcccatgaaatggggtctcgcgcaacacccagacaccctggctacccggggactgccggtcactaccgggcgccgaaaagccgccggctccttccgccagctacacatccggcgccgaggccggaagcttctcttccggctcccaagaccgcg

SEQ ID NO: 13492 - DNA, 311 bp, Homo sapiens
  source 1..311: mol_type = other DNA
cagatttgtcaattttattaacatttacagaaccagcttttgtagtggtatatacatttacatcccacaaattttgatatgttgtgtttcactgtcattcatttcaatgtattttaaaaattcattcactttcactttcattcatttcaatgtattttaaaaatttgagacttgaacaatggattatattctattgtgttcagagaacaaactgtatgatttcagttttaacagtgttgttggccagagtgtctacatgggcgccgccatactggcgcccagcctaagccgttcaggccatgaagactgct

SEQ ID NO: 13493 - DNA, 620 bp, Homo sapiens
  source 1..620: mol_type = other DNA
cctaaaaatagatgcggagacaacaattatatttattaatggaaatgtctttattcccaagaaatagaccggcggtgctgaggttcccgctggcccctgggcgccccctgctggccagacgtcagcagcagccgttcacccgcgctctcggatgcgctccacggtcgggagcccagtcctgccgccccgccccctgggggttctcccggcagccgtcttgccaccccgcgtggccgccggctgccagaggcacaggggagcgcgaggcccggcgaccgagcagtgtccccggctctgagtgtggggaaggccgcggggccgcgcccactcgaccgccgtccaggggactgcaaggcgccggtacatccggctcgacgctggcggcgcaggccaatcacggacggggtcggtgcgctagcgggactactgtccccacagccccctgggccacattggcgtcagtggctgcgcccgagggcccgcccctcacagagcatgggccaatcatagccgggggccgggcgggcgccgggcatgatgtgtggtcggagcgcaggcaggactccagcccccagcgggccccgcgcgccggaggggaggagccgtgcggcggcgcgggc

SEQ ID NO: 13494 - DNA, 265 bp, Homo sapiens
  source 1..265: mol_type = other DNA
catgggcgtcgtggccatcatgaacattttatggcccaatttgggggcctagaaggaaagttactgctgccccaggaccctctagaaagtctggcagaggtaatggcctaaggccagcctcatggagagcggcctgtgcacccgagccggcgcccctagccctcccgggctcagcgtccctgcagctgccgggagaggaggagacagggcggctgcctgtgggtgccgcggaccttcggggcgggccagggaggcgggaccgctc

SEQ ID NO: 13495 - DNA, 427 bp, Homo sapiens
  source 1..427: mol_type = other DNA
ggagtgcagtggccacaccaagttggccagactgtgctgggatttcaggcatgagccaccatgcccaggtgagaaattgctttaaaaaaaatgaatataagcctggattaacaagcattattaaaattgagtcagacttcctcaatgagggtgccctcctggtggggctgctcagcggggcaggtgctgggcctgctggagcagccctcgtgggtcaggtctcccaggaagcatcttgaaatatctgtttgcagggcaaccaagagggtctgaggaagcctccggccgggcccctcctccctgaagatctacacagcagatccccagcagaagcaggaggatggtggttgtgggtcctctcggccgccgcagctgtgagcctagcacctgatcagagttgcaaattagaaaaaaggaggtgtttcgc

SEQ ID NO: 13496 - DNA, 320 bp, Homo sapiens
  source 1..320: mol_type = other DNA
agtgatcactgcagggctaattatcccctgtggtcctcacagcctcgaggagcccctctgagatctttagagagtccactgggccccaccccttccctgatccatggcccagaaatggtctctgggcagtgagctggggcaataggagggctcacctcgctctgtcttgccagacagctacctttgaacacaccgaggctgagcacagctcacaaacctgagtttatctcttgtgctatgagaagaatgcagcaaaacatgtattttctgtttagaaatcttaatattggcaaatcataaatgcccacctgagcgattct

SEQ ID NO: 13497 - DNA, 563 bp, Homo sapiens
  source 1..563: mol_type = other DNA
gccaggcactctagagccagcctggcccacctgggccaccttctgcgctcctggaggcatgcctaagccagccgcactgggcttctgctgccctttgccagctccacaggaataggcatgggatgtctgaggcctgacaccacacccaaccctttggtggctgcctgggcagggggcccggatcacagctctgggcctgctgcaatggtgggccctgcagacagaccccagggctttccatcctgtttcccccagccgggggcccctcagtgagaagcacccagacctcagtgtgcctcagacggcctggcccagtgagagacaggcggccgaatccggcaccctgacgtgcaacgccccggagtagcaacactttccgctcagccggctgccttggcccgctgggtatttggtctccccaagggcccccgcccacagcccccggccggacctcggccccagtccaacgtgtgggcgtggtctgtaagttgcatggaaccgcccctgggcgggcgtggagggcggggcctccccgcccctcacccaggcccaggcccaggccc

SEQ ID NO: 13498 - DNA, 568 bp, Homo sapiens
  source 1..568: mol_type = other DNA
gcatcactgggcgctggtccctgtggcgtactggacgcccaccggccttttgccccaggcctggccctgtactccccagggccggagcggggaggtggactgagccggccggcgggccacctggatcccgactccgccactcaacgcggcagggcccggaagggcgggcccaagacgggcagggctccgggcaggagcgggcgcctccagggaggcgcgcggcggtcgtagctgaggccgccttgagggcgggacttggacgcgggcagggctcgagcggggttaaaggccgctgcgacggcgttatagacgccggcgggaccggggcccagcgaggggagggactctgggcccctcgcggcgtcttaactgacgctgggaggggcgggagtccggtggcgcccgcccacgcccgcagtcgcccgcccacgcccgcagtcgcatggcagagcaggaaggggcggggctcagggcccctggaggcgcggaggccgacgacgactccggccgacgcggcaaggctccaggatcctcgcagcggcctatgagtccccgaggctacacagcc

SEQ ID NO: 13499 - DNA, 646 bp, Homo sapiens
  source 1..646: mol_type = other DNA
ggagcggggaggtggactgagccggccggcgggccacctggatcccgactccgccactcaacgcggcagggcccggaagggcgggcccaagacgggcagggctccgggcaggagcgggcgcctccagggaggcgcgcggcggtcgtagctgaggccgccttgagggcgggacttggacgcgggcagggctcgagcggggttaaaggccgctgcgacggcgttatagacgccggcgggaccggggcccagcgaggggagggactctgggcccctcgcggcgtcttaactgacgctgggaggggcgggagtccggtggcgcccgcccacgcccgcagtcgcccgcccacgcccgcagtcgcatggcagagcaggaaggggcggggctcagggcccctggaggcgcggaggccgacgacgactccggccgacgcggcaaggctccaggatcctcgcagcggcctatgagtccccgaggctacacagccccggggggctggcctagccaaaaggggcgggcgagcacggcccgcgggcggcgttcgctggagctggtggaccgggcggctgaccgaggggcggacgcgcggcggggcagaccgctggggactgcgggcggcgctgtgtccgtcgccatgacaggtgggca

SEQ ID NO: 13500 - DNA, 625 bp, Homo sapiens
  source 1..625: mol_type = other DNA
ggcaagcgcaatcctgctgccctgcctgtcccggtggcagcctgactggacagagcctggggtggaaatagagtggccatactgccgcaagctgactatgctgtggtcaggacctggcctcccagggtggccgccacatgctctcgacccccgggcccgcctagcatctggccagggctctgggcactgtgctgcccccagcccaccccctgccacaggtggcacagatgggcccatgagtcaggaagccctgtgtcagcgtggcccgcaatcaggggaaccccggactctctgcgatctgcggttcccagggcgaaccccgcctgggaaaaacccagcgtgggcgccagcggcaacgcccgctcgctttcatgcagtttgcctggtggccagggaaagcgcagcgcagggtcctctggggccatcggcgtcgcgccccctcccttgtggggccccgcgggaccgtctcaggcccgaggggttggggtcgccccaaactgcgcgctctcagcgtacagcctccaggccccgggcccgccccgggtggaggcggagtctggggcagcagctcgccgccgggcgggccgggggcgggccgggggcgggcgcgcagctggagcctgcg

SEQ ID NO: 13501 - DNA, 837 bp, Homo sapiens
  source 1..837: mol_type = other DNA
agccctgcggggcgttccaaaggaaccgcgggtgggagcccaggtagccggcccgcaggtggccgcgcgcgcctgccagtcagccagcccgtccgcagccaggtgggcgtgccaggcccagccccctgcgccggtccggggcggggcgaacggagccccgccctccccgcgcgccgggtcggagccggtgcgggagcggagccgcgcgaagccggcaggagcacgcgggagcgcggccccgcagtggcccggcccgagagagcagcgcgcaggagctggagcggcgccacggcccccaccccagcgcggacctcgcccggaactcggaccccgtcctcgaagcgtgatctctcccgcctcgcacgccctggccgccgggccgcgggcatggacggcgtccgctcgccctgtgagtgccgagcctcccctcaacgccgctcgccgcctttgtgtgcgcgccgcggcgctgcagccccctccccgcgcgcccctcccgcgccccgggcccgcgtcctttgtggagccgccgccgggccccgggacagcctagcagaaccctcctgggccagggctgggcagggcgcgagatccctctgccggcctccggggccctcagggacaccctagcaggtcctctctcccagggttccagggacaccacaggcccgtccctctccgcagcctggggctgagcagggcacggacccctcctccccaacccctttcccagggcccccagagacggcccccgcaggctctctccgcggccggggctgggcaggttgcgggcttatccggcggcctgggcaggtgcggcagggccggcgctcacgcggg

SEQ ID NO: 13502 - DNA, 831 bp, Homo sapiens
  source 1..831: mol_type = other DNA
ttgcagcccggcccggccaggctatcccgggcaagggctgggggaactcgctgcccccagcgccgccacggccgggcgacattctgcgccctgggaagggggataggggtgcggcgcggccccggtccccggcccgcccggatccccggcctcaccttgacgtggaagcggatgagcgccatgcagacgggcggcaggaaccagcttgacccactcgtgcagccgggccttctcgagcgcgccgttgaagaagatcgatgttgccgccgaagcaggccttggccagcgccgccaggtagccaagcgttccactggccgccgctgaggcggtgcaggcagttgtcggcgtccaccagcaggcgcagcggggtctgcgggggccgctgccgcccgccgcccaccaggctgccccgggccagcttctgcagctccaccggcaccacggcgctcgggcagtgcttctcgatgtagtcctggaagccctgcacgcccatggcggcggcgggggcgcgggcgcgggtgcgggcggggggcggcggggccggggtggggccgtggcgcgcgggcgggctggcgggcgggggcggcggcctctaggggggactggggcgggtcgggggcgcgctcatggccgccgcggccgccatgtgctgccgcctcccagggccatgtctggggagggacctgccgccgccgccgctgccgccgctgcgaggccgaggccgaggccgaggctgagggccggggcggggcgggcgggcggcgctgacgtagcggacccgcccggcgcggacgccgcccaggcccgccggctagcaggcggaagaggcg

SEQ ID NO: 13503 - DNA, 749 bp, Homo sapiens
  source 1..749: mol_type = other DNA
ttttgaaaatgttttatgcaagcctaatatacatacagtatcaatttagaagcagttacgacagagctttggaacagaatttacgtaaacgacctccttgtactgcaaaggcgcacgtttcagtctagccattgcgcagtggtaacgcaggctttcccacgctgcaacagctcaagacagtctctttgtttggccatgtcatttgtcataggtgtaaaagggatgagcacctgccgcggtctcgcgctccttcctgctctttccaagaagccaggcgcggccggccagcatcccgctctcccggaccccgcagtcagtgtgggcagcaggcccagagtgggccgacggcggcgttagaaaggcggcgtcccgacgaacagaggagcaggcgagctcttccccaggacctgctcgcggcttcccttcgcccgagaaccaccgggcggaggcggcggcctctctggccctgccgggaacagggcgcaggggaggggagcggcggccgaccggcctgaggcgggcgaacggcctctggcctccaggcgctgcctgctccggctcagaagcctcccggatcccgtcccggcccaactccgggcctccgcctccgccgccgcctccgggagccccgagccgcgtcccgccggcgccgcctcttccgcctgctagccggcgggcctgggcggcgtccgcgccgggcgggtccgctacgtcagcgccgcccgcccgccccgccccggccctcagcc

SEQ ID NO: 13504 - DNA, 341 bp, Homo sapiens
  source 1..341: mol_type = other DNA
cctcttctcaagctgagtttagaaaatagataacggttgctgagaaatttctagtagctaaatctcttaggcacttttcaaataattgagttattacaatattcattttgtgcaattcgcactataatatgaccctaggtcaaatctagtttcctacactgacacattggtctgaattctgagcacctactaggtagaattaaaaagaactcaacagttctttaaagatacagtgaccatatgcatacatactgattctaatcctaagtatccctgaggaatggcagctgtgtgtctgccaggcgcaggggccaatcgggactctgccggccgcctcgggt

SEQ ID NO: 13505 - DNA, 806 bp, Homo sapiens
  source 1..806: mol_type = other DNA
tgtttggccatgtcatttgtcataggtgtaaaagggatgagcacctgccgcggtctcgcgctccttcctgctctttccaagaagccaggcgcggccggccagcatcccgctctcccggaccccgcagtcagtgtgggcagcaggcccagagtgggccgacggcggcgttagaaaggcggcgtcccgacgaacagaggagcaggcgagctcttccccaggacctgctcgcggcttcccttcgcccgagaaccaccgggcggaggcggcggcctctctggccctgccgggaacagggcgcaggggaggggagcggcggccgaccggcctgaggcgggcgaacggcctctggcctccaggcgctgcctgctccggctcagaagcctcccggatcccgtcccggcccaactccgggcctccgcctccgccgccgcctccgggagccccgagccgcgtcccgccggcgccgcctcttccgcctgctagccggcgggcctgggcggcgtccgcgccgggcgggtccgctacgtcagcgccgcccgcccgccccgccccggccctcagcctcggcctcggcctcggcctcgcagcggcggcagcggcggcggcggcaggtccctccccagacatggccctgggaggcggcagcacatggcggccgcggcggccatgagcgcgcccccgacccgccccagtcccccctagaggccgccgcccccgcccgccagcccgcccgcgcgccacggccccaccccggccccgccgccccccgcccgcacccgcgcccgcgcccccgccgccgccatggg

SEQ ID NO: 13506 - DNA, 633 bp, Homo sapiens
  source 1..633: mol_type = other DNA
acacatgtagctactcagtttttaaattaaacttatgtgaatgaaagaaacagcaaatattacaaaattattatttaaagcatatatatcaatgaacttcatagacattgaggtcataaatgcattgttgtgctctgagtataattaaataaaatttgttgcatgatatcttgagatgtatcttgatgctgtaagatccctgagacagattaattttggcaacaatcttagctgccaaaggccacagagtcatttgtcaatttgccatggaagaacttagcaaagaaaatttgaccattatattttcaggaatcagttctttagtttgcatgtaggtaattgaaaattttcaattatattgcatgtgcaactctctaaataaaagttgcgagttcaaagactttggaaccttggttttggattaaacataaaatgatgtagattttattttgattctttgagcatatgctttggccacagcctgccaaatgaactcttcctaaacatctttatttaggcaagttgttaagcagttgatttggaatggaattgcaatgtcattaactggagataatacagtatatttctgtgagtgtattgtaaattcaacatgaaaaatgtgcaatgttattc

SEQ ID NO: 13507 - DNA, 413 bp, Homo sapiens
  source 1..413: mol_type = other DNA
caggctgttctttcccagtgcccagtgctttgggcactgccctgagtattgagccgcctgcggtggagcaaacggccccttggcagctgcaggtgggcgctgctaggagactgagccaggtttcctgtccggagattctggaattccgagcaggggtggcccacatttcccagcaggcagggatgtggcccctgcccagcgcggatgccccaaggatgcagcgctggcgaggcagggacgcgtgcaagtgaccgctcctccccaccgtgggggctcagttccctggacacgggggccagggttcccatactcctcgccccttaggtcacgggcctggggggctcaaatgccagggagctctctcttgacagagctgaccagcccggccccttaggtcacgggcctggggggct

SEQ ID NO: 13508 - DNA, 539 bp, Homo sapiens
  source 1..539: mol_type = other DNA
ggcagggatgtggcccctgcccagcgcggatgccccaaggatgcagcgctggcgaggcagggacgcgtgcaagtgaccgctcctccccaccgtgggggctcagttccctggacacgggggccagggttcccatactcctcgccccttaggtcacgggcctggggggctcaaatgccagggagctctctcttgacagagctgaccagcccggccccttaggtcacgggcctggggggctcaaatgccagggaacagagctgaccagcccgtgccagcgcactcccggcccgggcttctgtcctcttcctctggggctgagcatcagggaagtccgcgggatcctgcgagggaggcggcagtggccgaggaggaggaacacccccaccgtggtgggggtcagaagtttgcttgcttcgcgcccgcggacccctgggtctaccttcagccttgggggcgcagggtccccccggccgtcagggttccccagcccgccttcccggcggcgggagcggcggcccaggccggcgggcggaggcggc

SEQ ID NO: 13509 - DNA, 559 bp, Homo sapiens
  source 1..559: mol_type = other DNA
tgccgctcctccccaccgtgggggctcagttccctggacacgggggccagggttcccatactcctcgccccttaggtcacgggcctggggggctcaaatgccagggagctctctcttgacagagctgaccagcccggccccttaggtcacgggcctggggggctcaaatgccagggaacagagctgaccagcccgtgccagcgcactcccggcccgggcttctgtcctcttcctctggggctgagcatcagggaagtccgcgggatcctgcgagggaggcggcagtggccgaggaggaggaacacccccaccgtggtgggggtcagaagtttgcttgcttcgcgcccgcggacccctgggtctaccttcagccttgggggcgcagggtccccccggccgtcagggttccccagcccgccttcccggcggcgggagcggcggcccaggccggcgggcggaggcggcgccacccggggcgctgacgtagaggccgctcggcggccgggggtcccttcggtggggccgcggctccccgcccgccgcccccgcgcgtccagtc

SEQ ID NO: 13510 - DNA, 227 bp, Homo sapiens
  source 1..227: mol_type = other DNA
agcctacagtcttttctctcagggcaggtgggaggggtgcacaggtgccgctaccgctctgccccttcacccttgccgggttggcggtgttgagcccgggactggaagaccacctccttcccagctgaggagcgcggcctccctccggctcagcctaggggttgggggcggcggcgcggggcggggcggggcggggcggtgacgcggggctggccgggcaagaggcg

SEQ ID NO: 13511 - DNA, 852 bp, Homo sapiens
  source 1..852: mol_type = other DNA
tgcggcgaagcccaggcgcccgtggcctgaggtcgcttccacccacgagaggcctggcagtgcgcctgcactggggatgctcactcggggtccccgggctggaggccgaacaccctccccgggcggcccgcgggcacgaggcctggtttctgtgaggcctggagcttgcaccctccgcctcccgcctggagggctccgagagacggtcccagaacctgcgctcccagagcagcttcccggggctgcttcgatgccggaggaggctcggggcgcccccgcggttcagctcgctgtctcccgccaagcccggcccgcgaccccgcggccgccacacgtacccaggtggctgtggaagggccgcgccgccagcagcgcctgcacgccgaacttcagcagctcgcccgccgcggcagcggcggctgcgggcgcggcgcccttgggcccgggtggctccgtgagcggtgcggccggtggtccgcgcagccctcgggcgggccgaagcgcgcggcgcccggctcccccggccgctgcatcgcggcgcccactgctgcgcccgcggtttggcggcggcggcggcgacggcttggctccggcgcggggcccgcgcggggctctaggccggcccgcagctcggggcggcgcgcgggcgccggctcatgccccctcccccgccggccggccgggcggaggcgcagggcgcgggcggggcgcgcggggctcggccggtcgaacccgggactgcgccccctccccacgccgccgcgcctcttgcccggccagccccgcgtcaccgccccgccccgccccgccccgcgccgccgcccccaacccctaggctgagccggagggagg

SEQ ID NO: 13512 - DNA, 459 bp, Homo sapiens
  source 1..459: mol_type = other DNA
ttctgcacatgcaggggaaggacttacttctactgagagatgcagcagattgctagttgcttaatcaaattcaacagtttccagctctgagaggtcatgatactaaattcgagggttttgtgtgggacttccagaaaggccctttctaaaataaggatgtgatggctggagctccaactaccattttggcccataaggcaaattgaacgaccttaggtaccttcctcccactttcttttatgggagaggggaaaagccaatctgggggttcctgttacacgcaggcaaaaaccacctggggccgcgacgaaccacctggggccgcgacgccgtaagaggcgcccggagaggcggccagtcgctgggttccgcgccggggagcgcttgcagccagctccgccgcttcaggcctccattggccagcacacgtcacgtgcggcgtgtggcggctgacattgg

SEQ ID NO: 13513 - DNA, 628 bp, Homo sapiens
  source 1..628: mol_type = other DNA
tattcaggcattgtaatggtttaaatggatctactacaagatttttatatgcttaagaagatctaggtaatgttagctttcatggaaatattttctcatttagaacttaatgtgttacttttataccttataaagactaattcaactcttaggtggaaaagattctaggaatttaggaattaaattgcctatttaattagtaagaagtttgcagtataattgtcttttaaaaataacattgttttcttctcaaagtaatatgtattgtcaaatttagaaaatatcagtagagaataaaataatccaccctgttaatattttagtttatttatatgtgtacttattttatatatgtgtatgtgtgtgtttcttttataaaaatgagatatgttctcttttgtagcttgtaatttttaatctaataatatatggtaagtaagtagctttttactctcatgattgtttttaaacagaattttttttttctagaacagggaccagaagaatactattaataaattactgtacagaagtttctttgcagagcttttcagctaactcttcagaaagttctacggctaatcattcttcagaatgatctactgttaatgtgcaaatatatttgact

SEQ ID NO: 13514 - DNA, 634 bp, Homo sapiens
  source 1..634: mol_type = other DNA
caaaagtttttgagaggctataactgtccttgggtttttatattctgaaaatgaacacatgaagttaaatgtcttctgataatatatcacctctaaaaatgtctttatttgttctatccaagtatttctttaatagttttaccaagaaaaaatagaagtggttttggttatgaaaaattggatgatattttaataatcttgtaaggtgtccagcatatcccactttattacaattaacttttttctgcactgtagaaaggtaatttttttcaaaatatccagagacaggttgtgaacagaataacagaatttaagccttttaacatgtatgtaaaaggcagtttttgcatcaggaagacagttttctaaattcactacagtattttggggagtaattggttagatattttaagtgcatttgagaaacaaaatttagtaatcaatatatttaaaatttatattattcttccctatatttgaacaatttgtccaaaatgcaatctgttcatattggattttgcctgtcgccatggaaaccagtcagccaatctgaatggctcttagatcatacagaacgatgcaatgctccctgctctcagtgaaagttcctcactgagtgagtggggctgactct

SEQ ID NO: 13515 - DNA, 136 bp, Homo sapiens
  source 1..136: mol_type = other DNA
ccagaccagcctgggctggagtacagagccaccgcgcccggccgcgagattcccagctaatgatcacatgtaacatctttttaaaaaaaaaaaaaattagaagttagattttacagcattctccagggcatccacg

SEQ ID NO: 13516 - DNA, 456 bp, Homo sapiens
  source 1..456: mol_type = other DNA
aaaattcttaaatgaaatgactttaattcaattaaaattactaatcctgttaatagaaataattttattcttttttctattgatgtttgtaaaaagattttttttttttgtgagacagagcctcactctgtcgcccaggatggagtgcagtgacgctatctcggctcactgcaaacctcaggtgaaccagccgcctccaccgtatttcagtattaggtgcatatctttcaaaataaataaacatctacaagatattaatcatgtgtcaagaataaaaagtgtagtatattattttcttcttagagaaccatagaaaaactgaaatgacgtacttcccgcgcgccgcgaagactcaggcgcgggactctcgaggcgggagctgaggtgcggggcggggcctcctgcccggcgccggcctgtggggaggcggggcggggcacagtctcttaaccgtgc

SEQ ID NO: 13517 - DNA, 464 bp, Homo sapiens
  source 1..464: mol_type = other DNA
caaagtactgagcacctactatactaggtacatctcattgcagccactctataagatggatgcttcacggtggggtttaataactttctcaaatcagcttgggactcacagccaggtctggctggccccgccaccagccctagcagcagtgattttcctttttaacaagcaatttttgttacaaaagtggacatccagagatattgacaaaataacacccaggaactgtgctaggaatataatagttttcttccggatctggatctctactgtggatatccactggtcatacatgtgacctacgtcccagataaggaacctgcgctccgcctcgggagagccaggccctgcagtcaaactagcctggaataagagggtttcaggagaaagcagctccatgtttctgggcagcagactgctgcggctccctggcagctgccacagtccccgaggccagagggagt

SEQ ID NO: 13518 - DNA, 468 bp, Homo sapiens
  source 1..468: mol_type = other DNA
gcttatgtaacaaactaatctattgtttatatatttatttttactgtttctctgtgaaaacgtacactcgaaaagggcaggagttttctgtttggatcaggctccacccctgtgttcagcacagctctcagcgaccgttttccgggaaacttccgggcgaaattcaaatactcaatagctctcgaattctaggaatcttgagaagaggcctggattaaaacggggactctgtgtctcctagcggggacagaagggctaaagccaggccatgtggactggctgccaagttacttatctcccgagtcccgctccacagtgcgggtggagggcaccgcagggaggatccccgaccttgtctgaagatccaagcaggcggagccgcggtctggtccgcggggtaggcggggcgcaagagtgttcccgggggcggggggccgacccgcgtctaaaggtttccgcgattcaccc

SEQ ID NO: 13519 - DNA, 339 bp, Homo sapiens
  source 1..339: mol_type = other DNA
tgaactccagatacataaatctgtctatttgacattgccttggatgtctagaaggcatttcaaactagtttctcaggcctcaaaccttagaatcatccgagactcctgtctctcacatatttcagtctgatcttcacacagtagccgcagtatgaagacacagggtagaccagggcctgtgcactggctctcccggtgaggtttctcagagaagcttttactgagggcttatgtaacaaactaatctattgtttatatatttatttttactgtttctctgtgaaaacgtacactcgaaaagggcaggagttttctgtttggatcaggctccacccctgt

SEQ ID NO: 13520 - DNA, 327 bp, Homo sapiens
  source 1..327: mol_type = other DNA
gtggcgcgatctcggctcactgcaggctccgccccccggggttggcctcccgagtagctgggactctcaactagaaaagagggcttgcctggcacacggaataaaattgcacatctgtatttcagtaactttttttaaattttatttgaaacaggtcttaagcttcataaagattttgcaattaggaagggcaactctaagctgctcgcgccctcctatgaccgcggcagctccgcgcctgcgcagatctcccccgggcggtctcgcccgggcaatgcggccccgggcgcgtgtggatgacgtcacccggcgcgtgccggggtagcc

SEQ ID NO: 13521 - DNA, 381 bp, Homo sapiens
  source 1..381: mol_type = other DNA
gctggagtacagtgacacaatcactataggcgtgcctgggctcaagtgatcgctggaattacgagccagacacacaagtctctctctctctatcagtaaatgcatgctaataacaaaattctttcttatcagcaaaaagatatgccaggttacagtggaatcttgtattcaaagtgttaattaaaaataactatcaacaaaagttctacacttagttaagtggtctaatacagacattttcaaacatacaactgttaaaagagtttgttacaataattactaaagataaacttaagtaaaaaggaaattgtggcagattgtattttccaaaaatggccataacaatatcagatggagtctaatagaaaaggccatgcagtt

SEQ ID NO: 13522 - DNA, 654 bp, Homo sapiens
  source 1..654: mol_type = other DNA
ctaatgccattgtcataaatgggagtttggagaaaattttattaatattcgttgaactgatttgaaccccgaccaaacactgtatggaactaatgtacggtaggaaatcattaactgttagaaaatcttattttagaggttttaccccgttgacaaagcctcaacttcagaatatggaagcccttctccgcgggcgctgctgcaaccctgctcccgccggggcttccgcgcgaaaccgggaacactggagtccgctcgcctagaacccgccccagccgggcccacttccgccagagccctggccgcgcccgccccgccccacggacccgagattcgtcggaattttcccgcgacgccgcgggagcgcgcggggccgctagccaggcccccactgctgacacgtgtgcgcgcgcgcggctccactgccgggcgaccgcgactgcccaaactgctgaagcagctcccgcgaggaccacccggtaagcggcaggccgcagaacgcagcgagggcggaggcttccctcgggggtctggccgacacgtcagcggcgagagcgggtgggccaggcgcgccttgcggtgggcgagaggggttcccgccggcgcagggctgtggctaaggctgcgggcggtgccagcccgcggggcggggcc

SEQ ID NO: 13523 - DNA, 445 bp, Homo sapiens
  source 1..445: mol_type = other DNA
ctgtcgccaggctggagtgcagtggcgcgatctcggctcacattgatttaagacattttaaagcttaagtcgtcagctaatgccattgtcataaatgggagtttggagaaaattttattaatattcgttgaactgatttgaaccccgaccaaacactgtatggaactaatgtacggtaggaaatcattaactgttagaaaatcttattttagaggttttaccccgttgacaaagcctcaacttcagaatatggaagcccttctccgcgggcgctgctgcaaccctgctcccgccggggcttccgcgcgaaaccgggaacactggagtccgctcgcctagaacccgccccagccgggcccacttccgccagagccctggccgcgcccgccccgccccacggacccgagattcgtcggaattttcccgcgacgccgcgggagcgcgc

SEQ ID NO: 13524 - DNA, 535 bp, Homo sapiens
  source 1..535: mol_type = other DNA
ggaaaagttgtaaacaaattgccaccttaaattcgcggtgcgggcgagcacccagacgggggcccgccggggccgcggccagcgccggggaaatgccgcgccggggagcagcctgcgccggcctgagcccttcccctgttttttacgtttaaccagaaaggaagggagaggagggaaagatccatgtggctgccctcttccgatcgtaagttgcagctggcgaaatgcgtcgggagtgaactccggcggccgcgctcaccacgtggatcccgctcgcccctagcgcccgtccccgagggtgatgccagtgccccaagtcgctcagggatcccgcgggtgggggcgccctgatgtccccgaggtgcagctcccacgctgcggcccggcgccccccatgacgctcagatccgccggggctgcagtctcgagggcgagtccgtgtgccgcggccacccgcgcccccacggctgttgggggctcaccgggcgggtgcgcgcaagcgggcgtgggcgcgcgggccgcgactccccggcgc

SEQ ID NO: 13525 - DNA, 472 bp, Homo sapiens
  source 1..472: mol_type = other DNA
agcctccgtccccgcggcggcggcggcggcggcggcaacatggcctcggctggtaacgccgccgagccccaggaccgcggcggcggcggcagcggctgtatcggtgccccgggacggccggctggaggcgggaggcgcagacggacgggggggctgcgccgtgctgccgcgccggaccgggactatctgcaccggcccagctactgcgacgccgccttcgctctggttgaaaaattcaaaccctccctctggtcctgggaggaaagggtgtgtgtgcgtgtgtgtgtgtgtatacacacgccctccctggtgtgccttttccggagcactggaaagccgtccacggcggaccacctcaagggcggccgcggcactgtcctgccccgtgcctgaaatctctgctcccttaaaaaattattctcggaaaaagggaaaagttgtaaacaaattgccaccttaaattcgcggtgcg

SEQ ID NO: 13526 - DNA, 505 bp, Homo sapiens
  source 1..505: mol_type = other DNA
agcccagaatgaagtgagaagagtctggctttatttcaagaccagctagtcagctcttcagagctcataatgtggcccatttaaagtgtgtgtgaaacaacattgtagcgggggcgctcccgaatagaacgcttcagtcttgagcgagagccaaggccgcctggcacttggtttccaagggacgccaccttggtctctttcagaagaattccccgggagctccccgcccctctggcggcccgtaggcctgtcacagcttttccgcgcttccgtgggaatgcgagcagtcctctgggaaccccccacttcccggaccgctgaggatgctaaaaggagcttccttgcttccccacacctcccccgaccggcgttgggacaagatggccaaagccgcgggagcgcgcggagacccccagcccggcggccccccgcaaacacggccgcggggggcggggagagggtggctaggctcgcgggagctcgccgggcagggcgcctcccagga

SEQ ID NO: 13527 - DNA, 492 bp, Homo sapiens
  source 1..492: mol_type = other DNA
cttaaagttattgcctgctggtaagcaaacaagtcatattttaaatgaagcattttatgaacacatactactagtttttagtatctgccatagaattgagatctatttgcaaacagccatattgttttcttaagacactactgtaggcgtttatctcctaatttccggaattcgtgaatatattagcttacgagtgcagcccgggtgacacccaggtattctgatctacagaaccgtgagataataaatgcattgtctgtcagatgataaatttgtgctgtttcaagctacaaagacaggccctgtcaggtatttcactcaatccatgaaataccttagcgtgggcggcgctgccctgaagatgctcccgggctcagtgcagacggctcagcgttctctcgcgttcaacgaaccgccagaaacgtcagatggtacggaggaaaacactttacactttaacagtatttttacgtttattattaaactcactat

SEQ ID NO: 13528 - DNA, 516 bp, Homo sapiens
  source 1..516: mol_type = other DNA
gagtgcagcccgggtgacacccaggtattctgatctacagaaccgtgagataataaatgcattgtctgtcagatgataaatttgtgctgtttcaagctacaaagacaggccctgtcaggtatttcactcaatccatgaaataccttagcgtgggcggcgctgccctgaagatgctcccgggctcagtgcagacggctcagcgttctctcgcgttcaacgaaccgccagaaacgtcagatggtacggaggaaaacactttacactttaacagtatttttacgtttattattaaactcactatcacttggcccccgtggctgtcccggggagctctccaaggaaggactggttcctgaagttcctggggtgctgcaccaccacggaagccgcgaccgcggggacgctctctgccaggcctgcgaggcccttctactggcctcagagggaagagacgatttcgttctcgcgagatcccaatgacaattcgggagcccgttctcgcgggattttcaccgg

SEQ ID NO: 13529 - DNA, 284 bp, Homo sapiens
  source 1..284: mol_type = other DNA
atttatttatttatttatttatttatttatttatttatgacagactcacccaggctggagtgcaatgctgtgatctcagctcaatgcaaggccaggctggtcttggcccaggatcctcattttaacagaagcttggtcgagactctgtcactcaagaggctgagtgccactgcactccagcctgggtgtgagctgagaaagtgtcacaagacccttaaactttatcaattacataaaaggttctggggttagtagtcagaaaaaaatatttttaaagaccacaa

SEQ ID NO: 13530 - DNA, 382 bp, Homo sapiens
  source 1..382: mol_type = other DNA
tggctccttttcattcaaatttcaactaaaaatgccacctcttcatggaattccttcctgaactgaagcattcccggctactcaaacacatcattcaatagtgcttcagaatctcactctgtcacccaggctggagtgcaatggcgtgatcttggctcactgcaacccaaaatgttggggagagaccctctgtggtcactattaacttcctaatgccttcaagaggggaagtgctaaatgtatgaataattgccttggattctgcatcctttttaactttcccaaagccttattcaaaggcctgtgagtcagaggattatgtaaagaagttactttaatctagatgcccctgacttgatggaacacgtccagtgactcctgg

SEQ ID NO: 13531 - DNA, 265 bp, Homo sapiens
  source 1..265: mol_type = other DNA
agaaggatatgaaaaatgaaaatgaatgtgtacagttggaatgtaatttaatttatataatatgacctgtaaattccttattttcaattatcttgtctgtataagttattatttgcgaaatttaaaaagggattattctgaaaggcaaattaatttttttaccagcatcctacagacacaaggttgtgactttgaaccttaacttctccaaacttcagtttccttatctgtggaatgaatccagcaatagctgctgcttctgatg

SEQ ID NO: 13532 - DNA, 573 bp, Homo sapiens
  source 1..573: mol_type = other DNA
caaattctagtagccattgctagttgcaataatttaaggacaaatggtttattcatttaaaagtagtattccctaagaacttaatgagggattttttaaaagttgtaattttaccatagacaaataatgcatgtttgtgtaaacctgtttcctgaaccactgtccatgtatacatacaggatagaattctgacgcagtaattataatatcagaagaaattaatttttatattgttggtataaaatttttcataaggatatttagtctgatatccaaaaagttgattcttattgaattttatcataatctttgaataccaccagcaggagcgcttctgtattttgtcccagtatctctctagtgagaacagagaaatcagtttgtaattagattaagaaaactgcttaagaaataatgtaaatttagtctgacttagaaacacttttagtgccaagcattgtctgctggattttagctataaaaatgctgatgtctattttcaatttgtttaaaaaatataatcatatttcaatgtttatttgtgtatttattacaggaagcagtattcactca

SEQ ID NO: 13533 - DNA, 272 bp, Homo sapiens
  source 1..272: mol_type = other DNA
ttcatattttttaaagactctgtccttcaactgccactcctagatatttatttaagagaaatgaagacaaccaatggatacacaatttgtgatactattcatctagaaaagatgtgtacacttcattgtatgtaaattatacactaaacaaaaacttactgaagcgtttctttccaggaaagcctggaggaagagtccagcgcgcagggtcctcccgcgccggcctcgggcgctcgcagggggcgggtcgggacctgggattgcgccgggct

SEQ ID NO: 13534 - DNA, 714 bp, Homo sapiens
  source 1..714: mol_type = other DNA
cgggcagaggacgttggggctccgcgcgtcccggcgcgagtactaggacgcggccggggcaggtgggggccgagcaaagtagggcgctgccccgactcccggagcagccgctcggtagagcggggtcgccggggtggggagatccccgagtgtctactctcgcccggctcttgtggcctccgcgccgcgagcggcccgcagggacttcggaggccccctttccacagatggggaaccggaggcccacaatcggcccggaggagtcagggcggtgctgacagggcgcacgccgggtgcccatcaggacctcgggcagcagagactccagccgccgggcgggtggtgggaccgagggcggggcgggcggcggggccccagccctttaaactccctgcgcgcgggaaccgcggcccaacggcgggcggggccgagcggggcgcgcgcctccaccgcccaacgatccctggcccggactaaccacgcggagggacggcggggcggggcggcaggcgggtgtgtccgggcgagtggagacgccgcgcgctccactggagtttcgaacgctgtggtgggaaggacccgcgcgcagacccggccccgccccggccggctggaaagaaggccaggcctggccattggctcgcgccgcctgtcactcgccggtgcggccagcgggcagcggcctcgcggtgactggttccgcccaggcgcgac

SEQ ID NO: 13535 - DNA, 247 bp, Homo sapiens
  source 1..247: mol_type = other DNA
aacagaagggggggagatcccttctcaatcccttgaaaaactttcccagaatacttctcagatctgtttcctaagccaattactggcaaggaattggaatcaggtgcaatgaataatgtatgattaatcaagaggggccctcttcccctgggagccaatggaggaagtccactgaattaatgattcccgttaaagtagtgtcttccagtggtaactaatactatagccaggaaaataagagtcaccg

SEQ ID NO: 13536 - DNA, 440 bp, Homo sapiens
  source 1..440: mol_type = other DNA
ggcagttaactgcggaactaaatttggggccgtgaaatcttaacaccatggacgtttgtttaaaggccctccaaaatgacagttttttccaggaagatagggcattattttaatccagtagaaaatgtcgacacctcagtatacacagcaatgagtgtataaacttactgacggtatattgtggttccacggaagtttcatcgggtccttaagaagccctttgtttaaatagttttacttaagttctgaaatcaactctactttaaatctatatagcagccatggcaaaagtccctttctcttggcgcgaattacaaggaaattcaagaaatactttaagatatatatatgccaaaaccgagtacctgcctgtagaaaggccccgtctccgtgacgtcacgccgcattggccaatgaaggcctcagtctgcgggccccga

SEQ ID NO: 13537 - DNA, 355 bp, Homo sapiens
  source 1..355: mol_type = other DNA
ctgaattaatgattcccgttaaagtagtgtcttccagtggtaactaatactatagccaggaaaataagagtcaccgagactcagatctgtgacaacacggatgcgcaatatgtagctgttgcacggctaaatgtatacgagaccccaccgcttcgtcggcgccgcctggaccagccagtagctccgcccctgggccccgcccctccctgctgagcgaacggggcggggcccagaggtcgcgtgacgtgacagcagcctccaggcgcgccgtgtcggaaagggggcgcacccgcgcgcgctgactggctgtctggcgcagcggggcggacggcggcggcgccgcgggggcgggcgc

SEQ ID NO: 13538 - DNA, 304 bp, Homo sapiens
  source 1..304: mol_type = other DNA
aaattttgtaaacagagcacttaatgtgtgctcaaaagccagaggatgcagcatccccctttcctgcactttgtggtaaaggatgtactttcttctttatttttattatttatttttttaaaaaacggagatgttacaggcccggcctgtgtgtttacaaaacgtgggcctggccctagcccaccttagggcgcgggcggctttctagagctgagtcagaaccgcccgtggggttcactccgacagctcccaggcccgcgccgcgccgcggaaaccgtgacttgcccgcgcccaacctctgcgc

SEQ ID NO: 13539 - DNA, 419 bp, Homo sapiens
  source 1..419: mol_type = other DNA
tctaagttaaaaggcacacttgtaacattacagtcccaattttccctttatcaactttatattataaaattttccaacacatagtcaataagcatgtccatattctagaagtagatattcttaacattttgccatacttcccatttctaattattttttaaaaagaacttacaaacgggctagtcccagctacttggtcctaaatacttacatagacatctctttatgaataagcaagattacgccacaattaattaataattctaatttccagtccgtatacaaatttctgcatttgctgttatgtcatcaagtctaacccacaacctctggggctctgacagaacccgggctccagttttattacgccataacgtagtcttgcatgttatgggttaccgcgcagcaacggatttttc

SEQ ID NO: 13540 - DNA, 381 bp, Homo sapiens
  source 1..381: mol_type = other DNA
tttactttgacaaagttgacaaagaatctagttttcttttgatcattaatgtgcagaattgatatgccatatatatttattaaagtgattcaaatttctaggtatatatatatcatgaacatttacatttttggttataattttattttagattttattttaattagacaacagttttgctcctagagtacaaaattctcctgcctcagccacctgagtagctgggattacaggcccagactggtcttgaactcctgacaaagtattattctgttttgggggcagtacaatgaattagagctaatgcatttagaaaatatgaattacaggtaattgagggatcagattataaaactaacctttgctttggtttccactcat

SEQ ID NO: 13541 - DNA, 382 bp, Homo sapiens
  source 1..382: mol_type = other DNA
gttctcactcataagtgggagctaagctatgatgtatactgctgaaacctaagataattaacattaaatttaaatatgttgaatcaataaccaaaagcttttctcttcgacccgccttagaaccctcacgcctgggggcgccaggacagggctccaggttgaaaatgtataaaattgtaaagtaaattcaaagttatatcatttcaatgctaaatacttcagtagtgatccctttttttaaaaaaaaaatttctacaaaattcttaattttttttcacagttcacaaaagtaatggtactttttttcaatatttgcaattcccatttaagttttaacctttaacttccgccgcgcagcactctgggatggggctcctgggct

SEQ ID NO: 13542 - DNA, 418 bp, Homo sapiens
  source 1..418: mol_type = other DNA
aaaattcttaaatgaaatgactttaattcaattaaaattactaatcctgttaatagaaataattttattcttttttctattgatgtttgtaaaaagttttgtgagacagagcctcactctgtcgcccaggatggagtgcagtgacgctatctcggctcactgcaaacctcaggtgaaccagccgcctcgatatttcagtattaggtgcatatctttcaaaataaataaacataaaaagccaggctacacattctgcaagatattaatcatgtcattgctattatattattttcttcttggagaaccatagaaaaacttcgggtcgaaatgacgtacttcccgcgcgccgcgaagactcaggcgcggaggcgggagctgaggtgcggggtggggcctccaaccgtgcagcccgcccctg

SEQ ID NO: 13543 - DNA, 306 bp, Homo sapiens
  source 1..306: mol_type = other DNA
atttccaccactctcagactgggcgtaccttctacaaaagaaaaatttttaaagcaatttatttcaccacaaagaaggaagctggtgtccggtctcggactggttcaaactctatagcccttgagggaggcgcctccccctcctccgcgcagcccccgggcgcccggcccagcttcccgcagccagggtgtagaggtaggcgcgcccagacctgagacgggttgggactgggctgcgtcacgcgcgggctctaagcgcccggggccccgcccagtggccggcacagccaatcgcagcgcgggaagg

SEQ ID NO: 13544 - DNA, 462 bp, Homo sapiens
  source 1..462: mol_type = other DNA
gggccaggcgcgtctccccaggaaccagaaggcctttagctctattagttggaatccaggcgccatccaggcccctctgttccctgaagtagcttattttatttattttttatttatttatttatttattaaggagtggtgcagtggcgcgatctcggctcactgcaaccttagctgggacccgtctcggactcccaaagtgctgggattacaggcgtgagccacggcgcccggcctggagcttgtgttcgcccttaaccgctaagctcctgaggggtaacttggcccgggcctccataaccatggctgctaggggcggggactgggagcgcgggtcccgggactgggagcgcgggtcccaggccagggtgcgggctgggaagactcggtcctccactgccccagcaggccacgcgcccgcgcgtagcctcccgccccgctagcagcacgctgcgtggctgc

SEQ ID NO: 13545 - DNA, 422 bp, Homo sapiens
  source 1..422: mol_type = other DNA
gcctgctatttatagccatataatttttaaaaagaaagaaatgggaaaatagtttccaagtaattcctggacattacctattcagctaaaatgaatctaatctttgttaaataaaggactgaagaatgagaataaaagggttttatactcaccatttcttaatttctgattctagtctggacagaacaatcactcattctagagcatttattagcagttgtaacatatcactgccaatctcatgagctctcaacctcttttaaaatgagaaagagatggtttcttccagagtctttcagcttctaaggcaaacactagtttcactacgccacgtggggcgctcccattgctaagagcaatctcccctccctgggaagaaaagcgtgggcggggccggggcagtccctcccctccgcgttgcc

SEQ ID NO: 13546 - DNA, 523 bp, Homo sapiens
  source 1..523: mol_type = other DNA
atgagaataaaagggttttatactcaccatttcttaatttctgattctagtctggacagaacaatcactcattctagagcatttattagcagttgtaacatatcactgccaatctcatgagctctcaacctcttttaaaatgagaaagagatggtttcttccagagtctttcagcttctaaggcaaacactagtttcactacgccacgtggggcgctcccattgctaagagcaatctcccctccctgggaagaaaagcgtgggcggggccggggcagtccctcccctccgcgttgcctgggcgtccagctgcagttggctggaccggccctggctgccttgagaggtgctttctgcaggcggggacgcggccaggccggacgcaaggcctccctccaatctaccgggctcagggggacggcctaggcgcctaattagcgtgacctgaatcaggattctcctccctgtgtcccatggagggtggattagggtcccggatgcgaattctgcgccgcattagagtt

SEQ ID NO: 13547 - DNA, 629 bp, Homo sapiens
  source 1..629: mol_type = other DNA
tcagtaaatgcataatttatcaagctgtacattttaaacgttcagtttattgtatgtcttatacatggcagtcaagctgtaataaaataccggttgaataagcagcaggttctcagtaaatgcataatttatcaagctgtacattttaaacgttcagtttattgtatgtcttatacatggcagtcaagctgtaataaaataccggttgaataagcagcaggttctcagtaaatgcatatccaatgtgcagaataaataagtattcacttattaggtgttcaataactttagagtgaatgaataaatttgacagatatttattaggcactatcctaggctctgggaatagaacaaaaatccttgtgctcacagagctttaattttagaaagcataagtaaaatacatatagtgtgctagagactgtgtccaccgtctaactgctccagatgttgagaaggagccaccctcggctcgctcggcccgcgcgtacctgcgtccaccaggaggcgctcccgcacccgccccgcaggcgtcttccgccgccggccggtgcgtgggcacgcgcagaaaccgctaggtggcgcggtttcccttcccacgcgcggacgccggcgtgggccgacgcggc

SEQ ID NO: 13548 - DNA, 633 bp, Homo sapiens
  source 1..633: mol_type = other DNA
tgtacattttaaacgttcagtttattgtatgtcttatacatggcagtcaagctgtaataaaataccggttgaataagcagcaggttctcagtaaatgcatatccaatgtgcagaataaataagtattcacttattaggtgttcaataactttagagtgaatgaataaatttgacagatatttattaggcactatcctaggctctgggaatagaacaaaaatccttgtgctcacagagctttaattttagaaagcataagtaaaatacatatagtgtgctagagactgtgtccaccgtctaactgctccagatgttgagaaggagccaccctcggctcgctcggcccgcgcgtacctgcgtccaccaggaggcgctcccgcacccgccccgcaggcgtcttccgccgccggccggtgcgtgggcacgcgcagaaaccgctaggtggcgcggtttcccttcccacgcgcggacgccggcgtgggccgacgcggccggagcgcccgcgcgtgcgcagagccgaggccaggctgccctcgaagcggggcggggcgaagcggggcggggccgagcagggcggggcgggggcttgaggtgattcccaagccgcggggcggctccggtggtgcggggacc

SEQ ID NO: 13549 - DNA, 817 bp, Homo sapiens
  source 1..817: mol_type = other DNA
tgtatgttcttatatgttcgattcacaacaaaaatgttttaaaataatctgaaatattagatcactgcttatttttaaatgtatggcatataccccttgaaaagagcgttctcattgtgaggactttagagaaattcattttcttgagaaacaaaatttggttaatgagtgtttctcattaataatctatacatcaggattaagagctgattttattaaggtctaccctaccaaaagcttttaataatccaaaataagacgttttcctatttctatataaattcctttgcatgagacatttgtttattaaaacacttaaaattgtatttggaataaaccacctaaagtggtttgttctgaaaaaaaaaaaaaaaaaaaaaagccttttaagaacttgggtctttttgttgtggtcatttaaaatcagtattttagacactccactcgctctcagtgtagagagaatgtattcagagcccacctggccgcgctgctgggaaacggacggagcggcgcttcaatcagaggtgaaggtgcagcagctgcttagctgggggacttcagattctcaaaatcttaaattctaaggtaccagcggggaagcggaggagacccaggcaggggcccgcgctcgctcggctgcagcccgactcccctgcgctcccggcccagggccgcgtcccgacggggaagtgcgctgcgcccgggcgcccccgagtggagggggggggaagggagccggcggcgggcggggcggggcgcggtgacagccgagccgggcccgcccctggctcccacccccgagcccacagctccc

SEQ ID NO: 13550 - DNA, 556 bp, Homo sapiens
  source 1..556: mol_type = other DNA
ggtgcagctttgaaggttaaaacgagacaggtgtgcttgagaccaagggtctacccatggggttcacggctttctagaaggcggctccccgcacgttcccggggagaagagctaagacgccgagcctcggctcccaaccgggagcggcctccgtggccgggccgcaggcactcaccgtcgttctcgtcgctgtgccgccgccgcgacatgctgccctccggtgcgccgcggaaccgagaggccaggcggtaactgtctggccgctggccgacgcaaggacagctgcaaggcgcgcggatgggccggcacgcaggcgcactagctcgccacggccccggaagcgcaggagaggccgccgggtggggctaggcgctgcgacagccggcgtgaggaagctcagtgggcttggccggggccacgcagaaagtgccggcctcagagcccccgggccgcggtcgtcgtacgcctgaaggcgggtcgtgccggcggccgctctagtctccgcctccgctcaggccggccggcggcccttgcgccgacgccaggagacttccgg

SEQ ID NO: 13551 - DNA, 394 bp, Homo sapiens
  source 1..394: mol_type = other DNA
gcagtaacacgatctgattctggatttgtgtcaatcatttgttccttcctaagcaaccagccggcaagcccggagccgcacgctcgcgtcagggccggcctttccataccaaggggcggcacgtgcggcaccgcctcccgcccaggccccaccccgcatgccgagcttggcctcccacttttcccaaggcggcaaaagccggaaagtgggagtagatgagcacatacccgccagacgtcaccaagctccggaagtctcctggcgtcggcgcaagggccgccggccggcctgagcggaggcggagactagagcggccgccggcacgacccgccttcaggcgtacgacgaccgcggcccgggggctctgaggccggcactttctgcgtggccccgg

SEQ ID NO: 13552 - DNA, 494 bp, Homo sapiens
  source 1..494: mol_type = other DNA
caatcatttgttccttcctaagcaaccagccggcaagcccggagccgcacgctcgcgtcagggccggcctttccataccaaggggcggcacgtgcggcaccgcctcccgcccaggccccaccccgcatgccgagcttggcctcccacttttcccaaggcggcaaaagccggaaagtgggagtagatgagcacatacccgccagacgtcaccaagctccggaagtctcctggcgtcggcgcaagggccgccggccggcctgagcggaggcggagactagagcggccgccggcacgacccgccttcaggcgtacgacgaccgcggcccgggggctctgaggccggcactttctgcgtggccccggccaagcccactgagcttcctcacgccggctgtcgcagcgcctagccccacccggcggcctctcctgcgcttccggggccgtggcgagctagtgcgcctgcgtgccggcccatccgcgcgccttgcagctgt

SEQ ID NO: 13553 - DNA, 332 bp, Homo sapiens
  source 1..332: mol_type = other DNA
caaacactaggctcagctcctaggctcaagcggatccgcccgcgtcggcgcagtaacacgatctgattctggatttgtgtcaatcatttgttccttcctaagcaaccagccggcaagcccggagccgcacgctcgcgtcagggccggcctttccataccaaggggcggcacgtgcggcaccgcctcccgcccaggccccaccccgcatgccgagcttggcctcccacttttcccaaggcggcaaaagccggaaagtgggagtagatgagcacatacccgccagacgtcaccaagctccggaagtctcctggcgtcggcgcaagggccgccgg

SEQ ID NO: 13554 - DNA, 469 bp, Homo sapiens
  source 1..469: mol_type = other DNA
tgaattgtgtttctgaaaggttaaccattgaacattagtgggaaactcctaaatggtacatgtagtaattagaagttaatgttttctggtttcaattaagcattatttgtaacaaagggaaagcatacatttttgagtcaggatatttggcccagatccaaatattccatgggaaagatattatgcatatcttggagcaagtcctaaagcactactactaattatcctcattttaccactgaagaaaaactctggttaaatagaccaggtcgtgagatatgatctcagcacggacccttctcccggatgattaggcgggtactccgtgtccgcgcatacccagactccgcccagcgcccgggcaggccaccccgagccccttaactgcgcaggcgctctcactcagaaaggccgctgggtgcggggagcgcagaggcggtgcagggcggctggctcgcctcggcgtgca

SEQ ID NO: 13555 - DNA, 354 bp, Homo sapiens
  source 1..354: mol_type = other DNA
aatttctcccagaaagagctatcattgcaaggacaactggtcattgcatgggtattcttgttagctcttagcttctcagagctgtccagaatgcacatggcatgttgactcttaataagacttatttggggttgtttctgacaaagcataacttatattatggaaaaatttcccaccacccagggataattttctggagtgcagtggcgcgatcacggttcactgcagtcctgggtagctgggaccacaggtgcctgagaatcgtataggttaatctacccagggttcgaagcccccgcgcgcacatttcctgggttcgcgggacctcgccggcgaggccactgcgcatgcgtc

SEQ ID NO: 13556 - DNA, 375 bp, Homo sapiens
  source 1..375: mol_type = other DNA
caaactcacttcaattcaatctgaatccagaacaattcaacttaatttctgggatataatgtggtgatattttcattaagaagtaattttttatctcaaaattgctgtgaaattctaatttggttctttatgtctatttcttaactaagttaacagcatacacagcaaaactgtacattattttgcaacagattaaggtgaaaccatgtaagattaatatatatcacactttctagaaacttttatatctattattttatttacccattttgcaaatccctgtagcaacctatgctaggggttgctagcacctgtgcagtgtgataaaacttttttttttaagtgttagatgtttttgatattttaaaaaagcat

SEQ ID NO: 13557 - DNA, 395 bp, Homo sapiens
  source 1..395: mol_type = other DNA
ataaagaaacatgcacacatatgtttattgctccatcaatgatagattggattaagaaaatgtggcacatatatgccatggaatcgtcctttatgtatacctatgtaacaaacctgcacgttgtgcacatgtaccctagaacttaaagtatttatatatatatgtatatatatgtatggtaagatgtatatatatatatatatatgtatatatatgtatggtaagatgtatatatatatatatatatatatatatataaagatgtgcaaaaaagttatgtccctaaatgagatactgcatataaagtgtcagctacccattatgatgactaaagtctcatcatatcattgtcatcgttgtcatcatcatcatcatcaaaggctttgtgattaagg

SEQ ID NO: 13558 - DNA, 323 bp, Homo sapiens
  source 1..323: mol_type = other DNA
attacaggcatgagccaccgtgcctggtaaactcagtctgtcatttacctatgaaaacaacagttcagttcctcacttaaatgtcaaattgagattctctgagctcagtgtggtgtggattgcctgagctcagagccaagattgcaccactgcactccagcctaggtgacagagcagactcaggatctagcctaaagcattttaagttcagcctaaaggtttctctgtacatcgtgaacacacctgtgccaattactgagtttttgactgtttgaactgtgttcaaataagacaaatgctgagctgtaaccaatccagttgtt

SEQ ID NO: 13559 - DNA, 609 bp, Homo sapiens
  source 1..609: mol_type = other DNA
ggaccctttgggccagaccatgacaaaggctgcctgccaggtttattagaaatttccttctctagctaaaatgaaaccgagggaggatgctcggctgctctgtggcttagcaagcgaccccagctgccctgccagggccggtcggccgcgattccgtcccgacgggggggatcctcggcggcactacggacgccagtctgccaaggaggcagcctgttggccccagactgtgtggcaggcaaagcgcctccgcgggcgtcgggccgcccccgtgagcctccccggggacccccgcagccggactgcaagcgaacctcccagcccgggccgcaagcccagctccgggcgcgacgacgtggggccggaggtacagcgcggcgggggccggggggcggggaagcccccccacccacgagaaggagagagggaggaagtcgctcctctattcgggctgcgccccgccgcgagtctccccgccccgccttggtgcagccgcggccgccgagccgagcagcgccgcgcggggccgagtggagccgagcagctgccgcgccgcgtcgccggtttaagcgcagtgcaggccgcggccgggggcggcggtagtgagcc

SEQ ID NO: 13560 - DNA, 379 bp, Homo sapiens
  source 1..379: mol_type = other DNA
accaggctggagtgcagtggtgtgatctgggctcactgcacagcctctcgagtagctgggattcccaggtggagcctggggctgggagggtattgtgatttctattttatttttttgcttcagagagaaacaaaaataacgctggcgcgctctccccatgctcctgagagcaggacatagactatgccctgcgcaggcagccgtccgcctcctgcagggaatgcttgctcctgggtgcacgcacaggagagggccgcggagcttcctcgacccgccccgccgcccttcccgcgggaggccccgcccccgccccccgccccgattggctgtcgggagagaggcggggccctgcccggcgaccgcgggctgacgtggcggg

SEQ ID NO: 13561 - DNA, 264 bp, Homo sapiens
  source 1..264: mol_type = other DNA
ttaattcttgtaaccaagtattattattttaaaacgagtagttccagctactcgggtgagcagagatggcgccactgcactccagccgaaataaactcaattggagaatctcgtgggaccacctcccggcctgggcgggcagagggagcaccctgctggtcggaggatgctccgaggcccgacgctgctcccggcgggctgtcatcctcctaggggtcggccggccggcctggagccgccccgcccacggccgaggtttcggtt

SEQ ID NO: 13562 - DNA, 615 bp, Homo sapiens
  source 1..615: mol_type = other DNA
ccatgactagccgggtgattaacctaggtacttaatatctctgtgcctcagctcttttgtgttaaatagtacccaaaggtagggcctccccattgtctagtgtcctcagggctctccagccagcgaggctggcagcagcgcccccggctggtcccgagagaaggaagggcgtcctcctcggttcccagcggcgctcccggctcctctcctccctgcggacggggaagcctcggtacgactgctcggggaaaggagcgcttccctggccgggctcggcgcgcgcactgtacccggccgggatcgtcacgggggaaactgaggctccgggaggtcaggttcctcatcccacaccacgcagcgagggcacggcgcgacgtggggcccgcggctctgcctgtccccagcctccgcctggtggccggcagcccgccccaatcactgcggcgtgtgcgcgcctgttcccagcacgtgtgcgcgccccgagacccgccccggggagccaggagcgcggtcggggtcgtggggcggacccgcggggcgggcaaaagggcggaccttgggccaggcccccgccccgccctccggccccgcccgccgggctgcagggggaggcgg

SEQ ID NO: 13563 - DNA, 553 bp, Homo sapiens
  source 1..553: mol_type = other DNA
cagttgcggtctcagctactcggactgcagtgagctctgatcgcgccactgcactccagcctgggtgacagagccaatgggtttccgcagcgcagcggccgcgcctgggcgccccaagcgaggccactgctgtcggccgtccgcggcgtcactgaagacagctccggagccgcgctgcccgggcgacgccggaagatgggcctcccagcggtcttcctttcagccaatggccgcgagatgcgccgtccgagggtgccccgcgcggcacagggagggaacgaaagcactatcttcagggaagtgtagctagggacaggcttctctgcccgcggttaacctaactcagtgccaccacgccctgaagccagggagcacggctgccctcagtaaagatggttgcagggagccgactgagcgctgcgggggcgtggcctggcggtggaggggcgtggccagccgccgtaaggcgcgcgcaccgcacccggtcccgactctgtggcttcctgggggcgggttcgccgtcggccccgcccccgcccaggtgtcctttggg

SEQ ID NO: 13564 - DNA, 493 bp, Homo sapiens
  source 1..493: mol_type = other DNA
tgagcaagttagtcaaaccctaaattcttttacttatttacaaaacagttgcggtctcagctactcggactgcagtgagctctgatcgcgccactgcactccagcctgggtgacagagccaatgggtttccgcagcgcagcggccgcgcctgggcgccccaagcgaggccactgctgtcggccgtccgcggcgtcactgaagacagctccggagccgcgctgcccgggcgacgccggaagatgggcctcccagcggtcttcctttcagccaatggccgcgagatgcgccgtccgagggtgccccgcgcggcacagggagggaacgaaagcactatcttcagggaagtgtagctagggacaggcttctctgcccgcggttaacctaactcagtgccaccacgccctgaagccagggagcacggctgccctcagtaaagatggttgcagggagccgactgagcgctgcgggggcgtggcctggcggtggaggggc

SEQ ID NO: 13565 - DNA, 305 bp, Homo sapiens
  source 1..305: mol_type = other DNA
caagtgaacataaatttcattagcttcactcagtattgcagagtgggaatctgaaaattatgcaaatagactctgcaattgggctccgcaaccctaatggagaaatgagcaagttagtcaaaccctaaattcttttacttatttacaaaacagttgcggtctcagctactcggactgcagtgagctctgatcgcgccactgcactccagcctgggtgacagagccaatgggtttccgcagcgcagcggccgcgcctgggcgccccaagcgaggccactgctgtcggccgtccgcggcgtcactga

SEQ ID NO: 13566 - DNA, 499 bp, Homo sapiens
  source 1..499: mol_type = other DNA
tttggctaagattggccagtgcgacctggcagagagagggccaagtccaggggcgcgcggccccgccctggcctgaggatagtgctcccaccccgggagacttctagggcggggcccatcaagaatgcacgtaaggttgggaccccagctttgcttgccctaaaggccgggcagcctggcaccaacgggcgttcgagcacccgtgggcgtcttcagcgacccccgggactcggtcaggggctcgtgggcggcagatgcctctgggacgccttctgcaggtgctacaggcagcgctcggcggagcggcggcggccactgcgtgtgccagcgcgcggtcccggttcccagatcgctgtccccgggcgctctggtgcctggaggtcagcggtcggcgggcagcggcagctggcgcagcggagggccgggggcgcgtgtgtgcgtgtgctgggaaggtggccctccccgcggccgccgcagcgccagcgcctccccctccccc

SEQ ID NO: 13567 - DNA, 700 bp, Homo sapiens
  source 1..700: mol_type = other DNA
ggccagtgcgactggcagagagagggccaagtccaggggcgcgcggccccgccctggcctgaggatagtgctcccaccccgggagacttctagggcggggcccatcaagaatgcacgtaaggttgggaccccagctttgcttgccctaaaggccgggcagcctggcaccaacgggcgttcgagcacccgtgggcgtcttcagcgacccccgggactcggtcaggggctcgtgggcggcagatgcctctgggacgccttctgcaggtgctacaggcagcgctcggcggagcggcggcggccactgcgtgtgccagcgcgcggtcccggttcccagatcgctgtccccgggcgctctggtgcctggaggtcagcggtcggcgggcagcggcagctggcgcagcggagggccgggggcgcgtgtgtgcgtgtgctgggaaggtggccctccccgcggccgccgcagcgccagcgcctccccctcccccggcgcgcacggctcgtccccgtccctggaggcggcccgagccgcccctgagcagcctcgcgccctcccccggccgagctccaggggctgccgcctagcagctcccggcgggagagcggttcagagcgcgcacgggggcgggcggaggcggcccggtgcggggcggccgcgctggagagaggcgcgcgcggagacgccggcccccctctccgcgtt

SEQ ID NO: 13568 - DNA, 463 bp, Homo sapiens
  source 1..463: mol_type = other DNA
tagaatatgatggaatactacggaatactatgcactcacttataagtgggagctaaacattgagtaccctttaatctataataatagttgaaataaaagtttagccccagcagcctggcccagcaatccgttcgttccttaattcagccagcggagcccgcagctgcggactcagacccgggcccagggccctgaccacagcgtgaagaggggatggcgtggccgctcccacctctgccctgacaggagtttctggagccccgggacaggagggaacacgcgggtctgcggcgggcgctcctctgagcgtccctggactcccgaatacgggcactggaggtgcgcagccccggccctagcgcgctcccggcacacagcaggcgcgcggccctagccccggcgcgctcccggcacacagtaggcgcgcggcgcgggcgggtggccggaagggggcgcctgcggg

SEQ ID NO: 13569 - DNA, 218 bp, Homo sapiens
  source 1..218: mol_type = other DNA
ttcaaaatacttaacacaattctaattatctttttaatatttgtctaacgcagaggctgcaggcatcctgagtatacaggcctagcctcagaggtcacagagctatcacggggaaatgagccaccccgggggctgcgcttgggctggcgcgggcgcgcaggtggggcgggccgggggcggggcggcacggcggttccgggatccgggtcctggcctcc

SEQ ID NO: 13570 - DNA, 278 bp, Homo sapiens
  source 1..278: mol_type = other DNA
ccagggatcatgaggtattaaatgagataacacagctaaagcatttaccaagtaagcattagttgcttaacttggcaaggagccacggcccactgtggctgctcaaccgcctcactcccactgagggctttcggaggcagagcctggttctctcatcacagggcctggtgtgatgcctcacccaagatggtccagtacattaaaaacttttattgcatctaggagctcagtgcagcttgggactttgggacatacgctccacctctctgagcctcagt

SEQ ID NO: 13571 - DNA, 395 bp, Homo sapiens
  source 1..395: mol_type = other DNA
gctcaaccgcctcactcccactgagggctttcggaggcagagcctggttctctcatcacagggcctggtgtgatgcctcacccaagatggtccagtacattaaaaacttttattgcatctaggagctcagtgcagcttgggactttgggacatacgctccacctctctgagcctcagtgaggattccctcagcggctgtgaaagagtgctttcttgcgggtcagccccgacaggacagactgagggagcccatcccgcttgccccaacgaacgcgggcgcggggctttccaggcagccgcgggtggggcgtggggaggcggccggggcggccggtatcccccgggcgtgagtgcgcagcgcgcgggggagcgcagggcgcggccgggtgactcgg

SEQ ID NO: 13572 - DNA, 513 bp, Homo sapiens
  source 1..513: mol_type = other DNA
ggaattcagaatgaaaacgtagagtttatttgggttttattatacagcagtgtcactgctccccctccgccccgcgggagctgggtgctaagaagggggaacccctcctttgaggggttggggtggggatcctccctttccaacctggatcgggaaggggtttgatccccatcctggatctgtgctgggcgtcgaacggccacagcctttttccgaaagagactacccggccctccggggctagcggctgagcggtgctggggctggcagaccccgcccccacgcggcctctcggagccgggagccgatcgggccggggctggggtctggcggcccagcccccggggagcgtggggcgtggccagaaaccggcgctcgcggctgcggattggctgcctggcgggcccgcaggcggggctcccggctgggtcccgcttggcagctcgcggcggcggggaggcggggccggcgggagcccggcagccaatggacgcgcgtcctccgagcaagggc

SEQ ID NO: 13573 - DNA, 523 bp, Homo sapiens
  source 1..523: mol_type = other DNA
gaagggggaacccctcctttgaggggttggggtggggatcctccctttccaacctggatcgggaaggggtttgatccccatcctggatctgtgctgggcgtcgaacggccacagcctttttccgaaagagactacccggccctccggggctagcggctgagcggtgctggggctggcagaccccgcccccacgcggcctctcggagccgggagccgatcgggccggggctggggtctggcggcccagcccccggggagcgtggggcgtggccagaaaccggcgctcgcggctgcggattggctgcctggcgggcccgcaggcggggctcccggctgggtcccgcttggcagctcgcggcggcggggaggcggggccggcgggagcccggcagccaatggacgcgcgtcctccgagcaagggccggagcgaggccgccgcggcggctagtggggtgaggcagcggcgcggccgggccgggccgggccacaggcggtggcggcgggaccatggaggcggcggtcg

SEQ ID NO: 13574 - DNA, 376 bp, Homo sapiens
  source 1..376: mol_type = other DNA
gagacaccagtttaatgacatcggttttctcaaatccttttttaagagtagtgccctaaactgagcaacgagaacctctgccggacagtggatcccgccgcccgggcggccactgctttgccaccgcggcaggcctgccccagaaccccggcctagacacccacacccgaggctggggggcagctggcgagactgactcaggccccgcccccggacttgttgaccccagggacgcctgggtcgtgtagacagtctgctacagacaacttagttacataaccggggtcagacaagatattttctcaggcagttactaatgtggcctaactgacgcacgtacggcagggcggggtcggcccgcagtggccagctggga

SEQ ID NO: 13575 - DNA, 728 bp, Homo sapiens
  source 1..728: mol_type = other DNA
ctggatgaaaacttcctggaggatggaaccaatctgcaactttaaatgggcccacactaaagttagagacgatctttgcgaaccgcagacagggaaggtctggtcatgcccgcggccgccctccacggcgaggtccgcactcgcgcagccggccccgcggccgcctcacctggtcgcacactaccacgtcgaactcctcgtcggcgaggaacagcacgtagatgcgcacgtaggcgcagacggcggcgccgcggccgccccagcccaggcctcgcggcagccagtccccggcacagcgcaccggtagctcgcggctctcggcgaaacagtggcccgggtcgtagtgcgctgtccagatcttcacgctacacccgcgcgcctgcagcgccagcgccgcgtcccaccagccgctcagcgccgcccacgcccaggtctgggtggaggaacagcaccgacggcttgggaaccgagtcccgttcccggccctgctcctccgccatggccctggagccgcaactgcaccccgcaccctgatgggggtcctgcgcaagctccgcgctcgtagctcccagctggccactgcgggccgaccccgccctgccgtacgtgcgtcagttaggccacattagtaactgcctgagaaaatatcttgtctgaccccggttatgtaactaagttgtctgtagcagactgtctacacgacccaggcgtccctggggtcaacaagt

SEQ ID NO: 13576 - DNA, 413 bp, Homo sapiens
  source 1..413: mol_type = other DNA
accacatgaccaaatattttctcctgtccaaaaattcatttctgaaaggataaattttgttttcatcaagaaatttacacttaaatttatcatttccaggaagaaattgctatctacaaccatcaaaaagtgaaagtgctagttgagagttccatttctgaccctgccggggaggaggaattcagacccgctcagctgttcaacacgtgtgtgtttgttttacacacagacctgtgtgaaacacgcacccagtaaatggtcttcgggctggtgccagacgccttctgcaccggctgccaggtcactggagctggtcggaagactcgccctggctccgtgcctcggggcagcctcggaggcgcgccagcagcactcctccgagcctgacagctgggcggtcccgcctgacccgt

SEQ ID NO: 13577 - DNA, 545 bp, Homo sapiens
  source 1..545: mol_type = other DNA
tatctacaaccatcaaaaagtgaaagtgctagttgagagttccatttctgaccctgccggggaggaggaattcagacccgctcagctgttcaacacgtgtgtgtttgttttacacacagacctgtgtgaaacacgcacccagtaaatggtcttcgggctggtgccagacgccttctgcaccggctgccaggtcactggagctggtcggaagactcgccctggctccgtgcctcggggcagcctcggaggcgcgccagcagcactcctccgagcctgacagctgggcggtcccgcctgacccgtgggcaggccgctgcaccctcccgcagacgcacgccctggcgagcggttccgctgcaaaaagagaagcccccaggccggggccggccgtgcggcggagtttccattgtgcggccgtgcgactggccgaggaacgcgcgcgcgcgcgcgcgcacacgaacacacacaccctccctcgcacacgcggaaccggctgggccaggggagggagcgcattccaggcactctatggagaggccgctagg

SEQ ID NO: 13578 - DNA, 532 bp, Homo sapiens
  source 1..532: mol_type = other DNA
ccggggaggagtcagacccgctcagctgttcaacacgtgtgtgtttgttttacacacagacctgtgtgaaacacgcacccagtaaatggtcttcgggctggtgccagacgccttctgcaccggctgccaggtcactggagctggtcggaagactcgccctggctccgtgcctcggggcagcctcggaggcgcgccagcagcactcctccgagcctgacagctgggcggtcccgcctgacccgtgggcaggccgctgcaccctcccgcagacgcacgccctggcgagcggttccgctgcaaaaagagaagcccccaggccggggccggccgtgcggcggagtttccattgtgcggccgtgcgactggccgaggaacgcgcgcgcgcgcgcgcgcacacgaacacacacaccctccctcgcacacgcggaaccggctgggccaggggagggagcgcattccaggcactctatggagaggccgctagggagcgagcgaacgcgcagccgggagagcggagtctcctgcctcccgc

SEQ ID NO: 13579 - DNA, 528 bp, Homo sapiens
  source 1..528: mol_type = other DNA
aagaaaatccaaattgcttggtagatttttttagaaattgtctttcaaggctttttaaaggatctagaactcagtttccttaactgtggtttgaacatcctgatcacttctgagacaatgccattagtgaatacattctaagcacgtcatctgaatattcacagacatctttttaaaagggacctgcttgttcatgtggttgcagctggtctaactggaataacaggacacccagttggagttccagctctgccaaccccagagtcataattcgggataaagactagccctccaccagtttttggaggaaaccacaatttgctgagctttaatttttacacctgttgcaattaagatggcactcctgccctgtccacttcacagggcttaacgtaaatcaatatcacttttgaaaaaggctttcgctgttctcagcagcgtccctcacctgtgcgcccccagcgcccggcctgggggccctgcggggcgggggcgggggcgggggcggggcccaaccctgcccacccc

SEQ ID NO: 13580 - DNA, 332 bp, Homo sapiens
  source 1..332: mol_type = other DNA
acagtgtgcctcctgggtactaagcagagatcgcgtgggctcctggacctcactgagttagacaatcagggataagtcattgactcattcaactgaggcgatggaggctcaggccacagcctaggccaggaaccaaggcggtgcggaccgaatgatctgagcctccctcctccaggactgacgtcccgggggcggctccaggaggcgcaacccggaccgggccgcccctcctgccgggccggtacactacagccaggtcagaccaaaaggccgcccgaggctttcggccgcaccaggaccccgcgcgcagaggactcagtggaccggggccg

SEQ ID NO: 13581 - DNA, 378 bp, Homo sapiens
  source 1..378: mol_type = other DNA
agctttaaacagaatatacaaatatttatgtggtgatgtggccatattgccagaattcccacccaatataatgagggtcaatatcttgacacaaatttgaatcaaggtctgaattttagtttatttctttacttaacttcagaaattaatttctcacttcattttagtagcattgaccaagacttccaggctctagatactaggtttgcatacccaccaagttacgggccggactccggggacctcgcgctgtcctccctccggttcccacagagcagggggcttccggcggggtaccctcctctgtgggcggggcctaccgctcccgctcccgcctccccggttgcgcgcggctgcgggctgcgatcacgtgagcac

SEQ ID NO: 13582 - DNA, 304 bp, Homo sapiens
  source 1..304: mol_type = other DNA
tgagaggtcgacctcacactcttcccaaatggagagggtgggaaaaacccccggacttcggggagaaggggaagctcctacgccgtgactacgttctcaggcctcggggactccgcgcctggaagccgacaggcgtgttccccctgggcgtccgtgacagggacaggcgctggcggctggggctccgggagccgacggcagcggaggattctccaggcagcggcacctcgtcctctcgacccgggctccagcggcgaacacccggcggccccggtccactgagtcctctgcgcgcggggtcctg

SEQ ID NO: 13583 - DNA, 397 bp, Homo sapiens
  source 1..397: mol_type = other DNA
tttgtacatagtgaaaacctagatcagtttttactttaatgattcattcagctgctgtggaaaactttttggcagttcctggaaaagttaaacataggaacaggtactcaaatatgtgtacaggcatgttcagagatgaataaacaaattataatatacacatacaatgggatattctgatccacgcctcaacatggatgaatcttaaatacaggcatattgtatggttgcatttatatgaaatacccattgaatgtaataaatgccaccaaatcgttcgcttttaagtggtttatgttatgcgaatttcacctcaaaaaaaaaaaaagttaaaaagccttctctgcctttctccaaattgagctgttgtgcatgcatttacacacgcattaattcc

SEQ ID NO: 13584 - DNA, 496 bp, Homo sapiens
  source 1..496: mol_type = other DNA
gcatattgtatggttgcatttatatgaaatacccattgaatgtaataaatgccaccaaatcgttcgcttttaagtggtttatgttatgcgaatttcacctcaaaaaaaaaaaaagttaaaaagccttctctgcctttctccaaattgagctgttgtgcatgcatttacacacgcattaattccgacaggtcctgggctccagtgagcacagtcgctctcctagttctgataaacaaagggcctatttcagtcgggggacctggactgtaaaaatgtattcttttgttgttcatagaaataaaacagtttttcggcttcaggagctcctctgcaaaggtgcggacgggcaggtgggcgggggggcaccccgcgccccgccccagtcccctggaggccggcggccgcagctcggggaagtggggactggcgcggggccgcgctcccgccctcctcggcggcgccgacggaccggcaggcggcgggcggtccgcgaggg

SEQ ID NO: 13585 - DNA, 531 bp, Homo sapiens
  source 1..531: mol_type = other DNA
cattgaatgtaataaatgccaccaaatcgttcgcttttaagtggtttatgttatgcgaatttcacctcaaaaaaaaaaaaagttaaaaagccttctctgcctttctccaaattgagctgttgtgcatgcatttacacacgcattaattccgacaggtcctgggctccagtgagcacagtcgctctcctagttctgataaacaaagggcctatttcagtcgggggacctggactgtaaaaatgtattcttttgttgttcatagaaataaaacagtttttcggcttcaggagctcctctgcaaaggtgcggacgggcaggtgggcgggggggcaccccgcgccccgccccagtcccctggaggccggcggccgcagctcggggaagtggggactggcgcggggccgcgctcccgccctcctcggcggcgccgacggaccggcaggcggcgggcggtccgcgagggggcggcggcgtccgggctttgtggccgcggcgcgcgcggcggggcctggccggccgggggcgcgccgc

SEQ ID NO: 13586 - DNA, 316 bp, Homo sapiens
  source 1..316: mol_type = other DNA
ctttcaaggaacagcatttacatggctctccagggaagggctaacacctgtgaccaggaaacagcaatagcactcttgcaaagattacatatacgtgctgagttgggcatatttcagtttagaatatcaacataaaaaggtctctgattcttgataaaaatggtttctaaaaccccttatcattatttcttaagaaaaaattgcttttgatttgtgggtttttaaaatgtaatgaaggaccctgtcatttgaaataggaatctttgaacatatgttttctgctactgtttttcagaatcatttgctgtttcaaata

SEQ ID NO: 13587 - DNA, 677 bp, Homo sapiens
  source 1..677: mol_type = other DNA
aagtggtttatgttatgcgaatttcacctcaaaaaaaaaaaaagttaaaaagccttctctgcctttctccaaattgagctgttgtgcatgcatttacacacgcattaattccgacaggtcctgggctccagtgagcacagtcgctctcctagttctgataaacaaagggcctatttcagtcgggggacctggactgtaaaaatgtattcttttgttgttcatagaaataaaacagtttttcggcttcaggagctcctctgcaaaggtgcggacgggcaggtgggcgggggggcaccccgcgccccgccccagtcccctggaggccggcggccgcagctcggggaagtggggactggcgcggggccgcgctcccgccctcctcggcggcgccgacggaccggcaggcggcgggcggtccgcgagggggcggcggcgtccgggctttgtggccgcggcgcgcgcggcggggcctggccggccgggggcgcgccgccgccgccgccgccgcccggcgttcgggagcccgcggccctcccggccgccctgcttgcgagaggagcccaggccgcccgccctcgcgcctcgccggcccctcccccggtcgccgcggctgccgcgccgccgctgcaggtaggaggctccccttccgggcgggccgcagccgggcgggggcgggg

SEQ ID NO: 13588 - DNA, 289 bp, Homo sapiens
  source 1..289: mol_type = other DNA
caggcacctgtaatcccagctactcaggaggctgaggcaggagaattgcctgagcacccgtttcaaaaaaaaaatgttcaacttttctttttttgctgttatataccagatagtacatttctaaatattctccagagtcctgaatatcatgtactgtatttccattgcttcaaacttccttttacaggatagctagcggccaggagatacttctcagaattctcctgagtacccacgtcctagggaaggagaagatcgccagcatgctgccggagcagctctacttcct

SEQ ID NO: 13589 - DNA, 349 bp, Homo sapiens
  source 1..349: mol_type = other DNA
catttcttaattttatgaatcaaattgatcagtttttcaatgagacttaaaaatgtggtaggaaggactgggagtcatttcgacttttgtaaaactattttcactcacttgtatgtgatggctagaaaactattatagatatatctgctacggtgcagcctaccgccgaggggtggccccaaccccggcccccgcgcccctgctcccctggaggcggcgccggccgcggccgggggcggagctgtcggcgcgggagctgggggtgtgcgcggggcggggtcgcagccacccctcccgccggcggctccgtcacgcgcccctcaccgggcgggccggggtctttgtgacg

SEQ ID NO: 13590 - DNA, 585 bp, Homo sapiens
  source 1..585: mol_type = other DNA
gttaatctaggactctattccccatacaaagtatatgaaaattgcattgtagtgattttcacagcttcaagcactaaccttgaagcttaatttgatgcttaatgttatgaccacagaattctggttggtagagtcaacttaattcagtccattaaaagttttaagtctagtaagattttgaatctctttaattctgtgtacacaaatgctccatattatttattgtatgaaattcagattcactgttcttttgtagttaaaatagtttgcctagaatgaataatgatcacccaaaatttattctgcataccaaaataattaagataatttttatctcatttaattaatattactgttaattctcattagccttaaaagtaacttactagaaaaataacctaaaatgttaaataagaaatagtaagattgctaccttaaggccttagaaggcaaaatggaaaaattccacagatttacctttggaaattatgttaagtcctgaaattttttctgtttggggaatactgagcatttgtcttacagaaataaaaagccaaatatatatgtcaaacaatttttttcttt

SEQ ID NO: 13591 - DNA, 338 bp, Homo sapiens
  source 1..338: mol_type = other DNA
ttttgaaaaattttctttttgagaaatttcttcaactttatgaatttttagagcactttacttttataaagattgcagacgttattagttggtattctatctattgaaagagtgagattttcttttctatcaatcattcaggactcatggatttttcttttattcatttgtagtcaatgagttttttaaaaatcacctgagatcagacctaattccagctactctggaggctgagacacaagaatctctcaaacccgagaggcggttgcagtactgtccagcctagagaaactacctactttgaaagattggaatggatgtgttcatgaattgtcttt

SEQ ID NO: 13592 - DNA, 327 bp, Homo sapiens
  source 1..327: mol_type = other DNA
agattaatctccgtgctatagaacggacttgagcattgcatttagaatggcttcagtcattaataaccaaggttttttcacaaggcttggtccatgatgttacagtaatgcagcctctttgcataatcattcagtttcgacctaacttcaggtagctgagctcctgtcaattagctgccagctgaatcccagtccaatcttagaagacaaatgataatttgttacctataaaggcacttatactgaaaatattttatggatatctcttttttggttcaaaatgcagatccccatccaaatctcaattcgaattgtatctccccatga

SEQ ID NO: 13593 - DNA, 698 bp, Homo sapiens
  source 1..698: mol_type = other DNA
aaaatatttataagatataattattcctccctttgaaaaaatagtcctaataatttgaacaaatatgttagtaatgatggaacagatcaatgaaaagatattgtgaaaataggctgtttaacaaacagattggaataaagcctattctaccagttaaactactttaatacacattcatttttaaagaaaatgtttgttttaacataaataaacaaatcgtatcagtgtttgtgaataaaatacaaaaatgattgttaatgattggtgctcttaaaaaaatttatccagacgtatatccaaatttgtcctgtagtaatagattaatattcatagattgttggtgtttaaagatctgagtagaatgtattcagctgtttaacatgtagtttagatattcaaaagtatgcatgtagaatttaaagaatatgttaaaaattattaattttaatattttgtttggaaaagcatgttataatataatgttttcactataaccaaattttttgatattggtgtttcagtatatttaatatgtgaaattagtagaaaaagcagatttcggttcagaattcccctttactgttacaaatactgattgaaattatctaaaggcaaaagctttacccaacatttggagtttgctttagtgaacttttttaaaaagctttactcacatatgggtatttgtagttataaat

SEQ ID NO: 13594 - DNA, 363 bp, Homo sapiens
  source 1..363: mol_type = other DNA
gtagaaatctctttacagggagtttcctgcttgggatgtcttttcttctgtaggaaagaaaaatagaagctcttgaatggatcctaaccattctgttttgctcacagaacaatctgatccaagactgtgccatagcaggggcaaggggacaatgaacccattgttccttcttaaatagggcaaatatctcttccattgacctgcagctgtggttcccagcggtctccaaggatgggtggggatcccaccactggcttccagctctgcatgcgccgcggagtccccgcgcagggcgcacctttgcggcggggtttccccgctgccttctgggaaccccgcggagcgactgccgctggacgcaat

SEQ ID NO: 13595 - DNA, 350 bp, Homo sapiens
  source 1..350: mol_type = other DNA
aatagaagctcttgaatggatcctaaccattctgttttgctcacagaacaatctgatccaagactgtgccatagcaggggcaaggggacaatgaacccattgttccttcttaaatagggcaaatatctcttccattgacctgcagctgtggttcccagcggtctccaaggatgggtggggatcccaccactggcttccagctctgcatgcgccgcggagtccccgcgcagggcgcacctttgcggcggggtttccccgctgccttctgggaaccccgcggagcgactgccgctggacgcaattgctctgtctgggctctggagccagagctgagtctctcttgagcatgc

SEQ ID NO: 13596 - DNA, 614 bp, Homo sapiens
  source 1..614: mol_type = other DNA
aatggttgtccattttaaaatgatggttatccaatcaattcaatgtgttttctacatatagattcctttcttattgtagaaaataacatcctaaaatataatggtgaaataacacatgtagtatgggtatgattttataacagaaaatatccaattttaattgaaaaaaattaagttgcctaaaacttaaatactgtgatttataaagcacataatattaaatttgatcagagaaacttttaattgacaagtgtttaaagtttcattcgaagacattaaaattaatgtctgaccttttaaaaagtacagctggccattcaaatacaagctttaagagcagatatctgaaatgtgtagtattgtagagaataaaaaatgtactggatttttaaaactctggactggaaatttcattaaagcttaaaatctttacttcattgtattaagaagaatcaaaactaactaatctcctaatacaattatattttcagttcaaggcagggaagatgtgttctaataaaatatttaatgacaatcagctaagtgaatgtcttataagttaaatgaaatgtgttatgcctttactgttttatgtttgggtcacacacagaaca

SEQ ID NO: 13597 - DNA, 348 bp, Homo sapiens
  source 1..348: mol_type = other DNA
attgtgaagatttcattttaatatggacatgtatcagttcccaaaactaatacttttataatttcttatctgaacataaactgtgaagatttcatggacatttatcacttcccaaataatactcttagtaattgtatctgactgtacaaattgattgcaaaacgtgtgtttgaacaatatgaaactgactgcctgtggggtcaggcagaatagagccatatttttcttcttgcgagatatcgctaaattcttcttgtagcaaggaatattaaatattaagaccctaggaaaagaattgcattcccagggggaggtctataaacggccactctgggagtgtccctcagg

SEQ ID NO: 13598 - DNA, 702 bp, Homo sapiens
  source 1..702: mol_type = other DNA
gtccaattgctttccaaagtggtggtaccaagtgagtctgagtgattcacttcctaaccaacatttttggaatttttaattgttgccaaccttttaggtatgaaatacacaccatgattttaatttgcatttctttgataatgagattaagccttttcccataagcttatgtcatattcacctgagatttttagacattacttttttaggaatattttatgtatcccagttaataattcttaatcagttgtatcaagtcttgcaaggtagtagcttaatagttttcaagttttttatggagtattctgatcagacttccttaaaattaagttgaatttaagtttcctttaagtttgcactttttaaatgctctatcacctcaaaaaagatccagtacttttatggagatagtccttttattgttgatagttgaggaggattagtagatttggtcctccccaaattctgaaagtggggcttgagtattttattactcattactgtgatcacttttcttgttgtctcaggatgagtattttattgcagaagaaaaatatgccctaataaggggtcaaacaacttctataaagaaaattattaaaataatgtgagtaaaatgtacatttattgggttcaataactgttaaaaattaataggaaactagagcaagaggtatgtggtgacctagcacttaagttagc

SEQ ID NO: 13599 - DNA, 166 bp, Homo sapiens
  source 1..166: mol_type = other DNA
gcagtacttcattactgaaccttgcttgtggttaagctgtttgcagacaacatgcttgcttaataaataaatgaatgagtgatcaggctgagactgtccacatgaagactcttcatcttcgatgagatccacgggcctgagcgcagccttcagccagcacctcacg

SEQ ID NO: 13600 - DNA, 500 bp, Homo sapiens
  source 1..500: mol_type = other DNA
ataatatttttattaaatttgggtttcatacttaggaaagttgatggctttcaatcactttaattctagtttttaaccaaatttgaagacaaaagtgacaatgatttttaaaaacagaatgttttgaattttatttccaatttggacaaaattcacacatgggaaattcaaggattcagaatcaatttcttttattgaaagattatttaaatttaactataaattatagaataaattgttggaattgactactaatgatatactgaagataaataatgaaaatatagcattgattacctaatttggaaataataattcttgaatgcctactgcgtgaaattgagatcccactttacagagaaccaaaaacccgtcaccaagttcatgtgttttgtaagtgttacagctacactaatttaatggaccctagagctccatcattgaatggagggtacattcctagccaatcagaggtgttgaataaacacctccctactagg

SEQ ID NO: 13601 - DNA, 430 bp, Homo sapiens
  source 1..430: mol_type = other DNA
attctgccactgaatgcatcctaataagagaatgcattgcaaacatctcttttgggaaaataaatggataacaccattttttcttttcatttgagttgtcctatctttggcaagtgaaagctgaaaagcagaattttcacatataaatcaaatttccccatttccctcctggcaaggggtaagaaactcttagcccatacatgctttctaattagttaagaattggatttcaagccctaaaagttatgaacaatggttgtgaattatgacatattccagcattttggctatcctcagagccagtctgaggactctgactgggttgtctaaacaaattaatttttaaaagtaaggaatgtttccctatggaaagggcactctcacatcatgtgatgggtgagctctagtcattctgtgagaggaactccag

SEQ ID NO: 13602 - DNA, 293 bp, Homo sapiens
  source 1..293: mol_type = other DNA
tcaattcaaggcactgcttcacctggagaactcacaaatgagagagacttattttctcaggccgatttatcaagtctctctagaaaaagaaattgttcgcgaaccgcaccccaatgcactagtggggagttccttgcaaggccgagacaaccgggatccccgggggggtgcttacttaccttcgactccggcggggggctcggggaagccatctccagcctctggtgaggcctacccgatccctggctgggtctggccagtgcctgcctcggcccccagacggtccgtgaggt

SEQ ID NO: 13603 - DNA, 387 bp, Homo sapiens
  source 1..387: mol_type = other DNA
aggaagttaatatctagtatcaattttacttacacaagaagaaatcatatgagcatttactggctttaatgctttatccgtaaatagtagcagccatagacaatatgtaaatgatgactatgttgcagtaaaactttgtttacgatcatcaaattttgaattcatataattttcgtagccctgaaatattcttccatttttaaccatgaaatattgcaaaaaacattcttactgtacaagaacaggcacccgtacaattgtgttttctcatgaagcgtttacacgcattgagagatatcgttccattggtgtgaataagtctctatgtacacaccacaaaagaaacaggcttcctgtttgcgtgaaagccgctttgggggccgcggt

SEQ ID NO: 13604 - DNA, 571 bp, Homo sapiens
  source 1..571: mol_type = other DNA
ttttcattagctttttgcaataaatctaaaatgtccattttagaatcttgtaatctcttagaagcttctatctgtcaattaaaatatgcatccaattctgtcttcctaattcaggaaacctgggtttcaagagatgaacaatcttctccatttggaatgttccacatatggctattgtaattctgaattatctttggtaaaaaaaaaatgccacttttgtaagcttctggagccataattttcatatgtgaaaaagataggcttactgcaaagtggagtactcagtcctttagatagtaggatcccatttttacattgaaacttgggtctctcagagctgagataaatcctaacataggagtctttttgtaggtgacaggtggcagctttttggtgcccaacccaatgcccaccagccaagttgtggcttggctctgagcttaccttagcccattagaataaaagtaaaaatttctgaaaacttgtgaaaggtggagtcaccttctggaagtaactgccatttactgcaattgctctcagttacctttaaaactaaagctcatgacttcca

SEQ ID NO: 13605 - DNA, 416 bp, Homo sapiens
  source 1..416: mol_type = other DNA
ttctttttttcccaagatgcctaaattctattttttaaaaaagatatagcgatcattcttcattaataggttagattaattaccgtcctatcattaaaacgcatttagtttaactgaatggaaaatagcagtttgtcataaacttaaaaaaaaaaatcaatgcttaattagcttaaaatagactagtttttccctggacaatttcttgttcccaaaaaagcacaagggcagactcctgcttacgcattagaatctagtggaacgcttttttaaaaaagcttttgtccaggccaagtattctaagggcggagattgacgggaccgtcagccaatcggccgtctgaaagggtcccgcgcttgcccagcgttgctagggaggcggcgcttgctcaagccgtacttccgcccggcggggt

SEQ ID NO: 13606 - DNA, 355 bp, Homo sapiens
  source 1..355: mol_type = other DNA
ttctttggtgcagaccttcccccaaggtattttgtgttcttgagacctgtgtcatcttgaaaaaaattcaatcccggcttcccctcccagggaatcgtggaaaacatactatatcaatgccttgatgtgtcaccttgtttcatccttacactaggtctgtaaagcaagtatacagaagcacatattgcctgtgaagcactgtgcttctgggataatctcctttggggtttactttctcagagaaaaaaaaaaaagaaaaaaagagaaggggcagcccagctttccacctctgcctctcgaccagggcccccgggagccctctccccccatggcccaaccgtccgggcacgagccc

SEQ ID NO: 13607 - DNA, 462 bp, Homo sapiens
  source 1..462: mol_type = other DNA
taaaacatgatggaaactttagctcatgaatcaaatttgccaatttagcagtgggataaaataaaattaatctactgtatatgtctagtttcagattattcaaatcatggaggaaaagattacacgttgacttcactgtattaccatacaaatgaaataacttagtctgttgactgcattttaaactctaaaagtattttgaaactctttaatttcttgaactgaaaaaattgctttgaattcactttgttttaattctgagaacctaaaaacagggattctttaaaaaaaagataaaaatgtgtaaataattcttactttaataccgaatttcagatccctcaggtgcgactctgaattcagaattctcaccggcttccaggggcgcgggatgtgccactcgggagcgcagccaagcgacaggcaggcgccagggctcagcaacaggcgccggctcggagc

SEQ ID NO: 13608 - DNA, 502 bp, Homo sapiens
  source 1..502: mol_type = other DNA
aaaaaattgctttgaattcactttgttttaattctgagaacctaaaaacagggattctttaaaaaaaagataaaaatgtgtaaataattcttactttaataccgaatttcagatccctcaggtgcgactctgaattcagaattctcaccggcttccaggggcgcgggatgtgccactcgggagcgcagccaagcgacaggcaggcgccagggctcagcaacaggcgccggctcggagcagagccaccctttgctggccagtcgcgttgctcctccgaggaagcaagcggcgcgcaccccgggcgtgaactcatccaggcgagagcgcgtcgctcctctgtcagccggctgcttctcatcccggccgcctcgcggggccggacgcagtgcccgaggcgccctgcagatggggcgggcagggaacgggcgctccagctgcgggtgacaggcgccggcccgcccgcctgcctgctcagcgcagtgaccgggcgggcagaggatgc

SEQ ID NO: 13609 - DNA, 416 bp, Homo sapiens
  source 1..416: mol_type = other DNA
tgactgcattgccattccagggccaagaaagcaactaaatgtgtccctcaaaatgcacattttgaaatcctaactcccgaactgacggttttagcaagggcctctgcctgacagagccttcagaaatgtgaagaataaacttctgtggttcataaactacccagtctaggatattttgttatggaacaaaatgagttaagcccttcctaactcttaagtatcaacgtgcttggaaacgtgagcaatcgttttttctagaacaatacatactaataataggatcggctaataatactagattctatgcatgaagcctagtatttaaaagcatgcaatctggagctagaccgcctgggaacaaatcccagcttactaaactcatttgtaaaactggattttaaaaagccccttgcaag

SEQ ID NO: 13610 - DNA, 338 bp, Homo sapiens
  source 1..338: mol_type = other DNA
tactagattctatgcatgaagcctagtatttaaaagcatgcaatctggagctagaccgcctgggaacaaatcccagcttactaaactcatttgtaaaactggattttaaaaagccccttgcaaggtccgaggccagtacggggcggagccaggacgcgggccagagtcccccgaaggacggtgcctctctggccccaaggattctgaagcttgccagcaccgcagactggagaaggcggagtctgcagtgtgccaagcgcgaggacccggggccgaggccgtagtgcccaggcccctgccggggagtccccggagctaccgagtgtaggggaaaaatt

SEQ ID NO: 13611 - DNA, 757 bp, Homo sapiens
  source 1..757: mol_type = other DNA
tttaattaagaatgacccagtcattatttagattttaatgtatgatgatagagtcaatgcattagagattaatattttcaaaagccactatagactataaaatgctcaacaaaatattatagaattagacattatactttacttattaaactatcacttttcaggaaaacttcagtagatattctcattaagtcagatagtgaagtaatcagatcacagaaatataatttatcattgtgtaagatcagctagaaactttgagtcaaactactaatatttctgtagtttaccccttatagaagcttatatttaataaaattatttcttaagacaaaaaatagctaagatattttaaaaagagctaaataagagcaacatgtttaaatgcctctctatatagtactagtattcatttattagtggggtaagattatgagtttaataaaaatgtactaactcatatatttataagtttaaaaagcatatagctttgtttaaaatattctatgtatgagaaaacaatatgtaaagttatgcattgatttaacaaataaatgtttagacttaccttttttccatatcagtcaataaattacaattacatgaaaaaaataaaacaaatattttattaaagtgtaaaatcaattgattacttttaaaactcctagctagatttagtcagtaataagtgaaagtaaatattaatcttagaattttagagaacataaaaacacaagtgactccttttgttttaccc

SEQ ID NO: 13612 - DNA, 299 bp, Homo sapiens
  source 1..299: mol_type = other DNA
ggtccgaggccagtacggggcggagccaggacgcgggccagagtcccccgaaggacggtgcctctctggccccaaggattctgaagcttgccagcaccgcagactggagaaggcggagtctgcagtgtgccaagcgcgaggacccggggccgaggccgtagtgcccaggcccctgccggggagtccccggagctaccgagtgtaggggaaaaattgcgtcaagcccctggcctgaggcagcggtgaggcgtgtgcgtgagcacggccggttgggccgggccagacttcctggcgggagg

SEQ ID NO: 13613 - DNA, 362 bp, Homo sapiens
  source 1..362: mol_type = other DNA
gaaataactaattttaaaaagtctcccttccttgatgtaagcaatattacattaatgtttacaataatgtaattattagcaagaataatgtaaacattaatatagattactgtaaattaatagtgtaattaattactgtaaattaacataagcattattcatctatgagacataaatcctcatctgccacattaaatgaaacagcttgaaatgttgaaggtggttactaacactcccgactagaccagggtatgaaaatttaatctaaatcttaattaggagccttctaagatctctaacgtcacctctaacgtttggggtaagacgggacccgccgcgcctcccgcgccggggtggagctg

SEQ ID NO: 13614 - DNA, 625 bp, Homo sapiens
  source 1..625: mol_type = other DNA
gctgacttaaagaaactattacctcaatccagttttaaataaaggtcagattagaaaagcataaacttatttaaatgttattttacttccaactttgtagtgtatttaggttacaaaaaatttacaaagtcctaaataaaatagttctgtccaaagtgtacaatacttttcaagtatttacctggatatttaggaaaaataaaaccatctctttaggtttgtcttttttcctccaaaattcaaagatatcactttgctttgctgttcctgttaaaaatggaaacttatagaaagaatgaaaatatagattggaaaattcttcttttattcttttattttctaaaagcatagacttttgcagctcaaaattctatatcattatacattctcaacagttttttaacaaatgttatagattaaaaatatttcagataatagttataatagcttccagttctttttctttgtcatctgtatgattaagcataacaactcactcttaaaagagagtgcaaatataataaacatgtctacataatatgtatgcatgttgtagatagtgaaagactattcactgagaaacgtgattggatattgcttgaatgttttctgaaaaattcttttt

SEQ ID NO: 13615 - DNA, 269 bp, Homo sapiens
  source 1..269: mol_type = other DNA
gagccaagatcatgccactgcaccccagcctagagagtctctgggactgggaggactagaccagaggtcggctgttttgctcttacagaacgatctagtttcaaactatctatgtttaacttgctcatggaaaattaaatctttattaggagcccgtcccagctactgaggcgacatcgcgccagtgcactccagcctggtgggcaggaacgatcccagcctaactgcgggacctgtcgcgcctcccgcgccggggtggagctgacccc

SEQ ID NO: 13616 - DNA, 397 bp, Homo sapiens
  source 1..397: mol_type = other DNA
ataattttacacgactgcaattctctgaatgtatacaaactaaatacaagtcctgtgtttttatcacagggaggctgatcaatataatgaaattatcaatttatgaagagaaggtaagatgttcctctcgggtcctctgagggacctggggagctcaggctgggaatctccaagctagagctctctccactggtgcccttggctgccgggaacgtggactagagagtctgcggcgcagccccgagcccagcgcttcccgcgcgtcttaggccggcgggcccgggcgggggaaggggacgcagaccgcggaccacctccccccaactccctagatgtgtcgtgggcggctgaacgtcgcccgtttaaggggcgggccccggcagtaacctctgcgctc

SEQ ID NO: 13617 - DNA, 609 bp, Homo sapiens
  source 1..609: mol_type = other DNA
cgactcgtttggaattgtaaatttcttgaaggtagttaccacgtctactctaacttgttgctacttccttgagtcttactgatttagcaacaggaacttggtaagtcccagtactagtcactggaacgtagtgtgcagtaagtatttttaatatgaataaattaatgtccccttattgttttttgtagactatcctgtataagaaagtttagcttagtttccacatcagcaaaatggggacagtagcaacagatgcttgtttcttccttctccaggaaaggtttcttgtgtacgctttcctctggagaaggagaagtcccgcttgcctcctagatccggaagcaatccggcttggctgcctcagaccgcgttgccctccagcctcgaggcagagagctgcctcggtgccacagcttaagcccggcgccgcgcagcctctgacacgcgcggaagggcccggccttgttctggctgccgccgccctgccaccagcacggcgctgcactgggggcggggagtcgacgcgcgcggcgctgagcgggaggcggggggacagagggaggcgccgccgccgccgccgcccgcccctttccgctggggagcagctgc

SEQ ID NO: 13618 - DNA, 416 bp, Homo sapiens
  source 1..416: mol_type = other DNA
tcccagctactcatgaggctgaggcacgagaattcctggaacccgggaggcagaggttgcagtgagccaagatggcaccactgcactccagcctcggtgacagaaaaaaaaaaagagaatgactataatttattcactactaattatgtaccatacgttattattatttctctcattttacagatgaaacaagctcaggcagactggtccccgggaaaagccctccgcaccggccggctgctggatgcccagacgggcggcgctccccaccctccacggctacttcccgggagcagtcagccgctgcgcgcaggcgcggtgcgctcctcagcccctcccttctgcgggccgccccctggcaaccgcggcgtgactacggcgcgcgcggtctgggcgcggacgggtggggccgggcg

SEQ ID NO: 13619 - DNA, 238 bp, Homo sapiens
  source 1..238: mol_type = other DNA
ttccacagtaaattttttctattgagagatcttcaaactcaaaagattctttctattaagtccattaaattattcttaatttatggttccatgagagccctcagaatattataattaataattccagacatctgtagcaccataaactatgattaaatagtttctcttaagggaacagaaactctgatgtatttcaaaatacttccttttctcctccccctgctgtggaagcataagg

SEQ ID NO: 13620 - DNA, 381 bp, Homo sapiens
  source 1..381: mol_type = other DNA
tcataacctgtaggaagtgaggaagattttttcttccttttctttctgtactgatagaattaaaaacaaagcttagaaaacaaatatatgatgggagtattttccgttttgtagaaataaattataattacagtaactggtttagtgaattatggttttcaaaaatttataagaagattaatatcttcgagaccagcctgggcaagatggtgaggacgccctcccccccacccctacaaaattgtatccagggagttatgctcagctgctgcctccagttcatcttccgctgtcgaaagcgtttcagaacttaaactcggctggaccgtgggaacgtcccagccagcctccgccgctcagcacttgacggcggcttttgcg

SEQ ID NO: 13621 - DNA, 382 bp, Homo sapiens
  source 1..382: mol_type = other DNA
cattttaaaggcttcagcttaactcagtgaaatggagatgtgttttcatagcatcattctggatgatgttggtcactgaaataaccaatattagtgctgggcacctgcccagtacagtgaatgttaaatttgaaatacttaggttttaaaaatgcagatttcccccatcctgaaaaatcctagtttcctgggtctgggagcatgctgaactccaggtggaggctcactggggcttcataagcggctcccccagcccaggtgggtggcaggacccccttaccgcccccctcccttgctccctttccagggcacaagagagagttggggagtccccgtcgggaaggggcccccgggccccgcgagacaaagggcctataaaggc

SEQ ID NO: 13622 - DNA, 239 bp, Homo sapiens
  source 1..239: mol_type = other DNA
ctgagcttagattgatcaagaatttaacagctcacttaacttttaaagtccagctcatttttataaaaaatcacagtgtgactatgttaggtgaatgacatcaatttacagaaataatctccaggtcctgcactgcgcccaggcaagagccggctggagccgcggggaacccgctcgccccgcccacccgcctagcgccggtgagcctgcggctcccgcgaagcgcggccccgccccct

SEQ ID NO: 13623 - DNA, 339 bp, Homo sapiens
  source 1..339: mol_type = other DNA
gagtgtgtatgccagtcacctatgataagggagaagaaagtccagacgagacttccctcacaacgttggctgtgtaggaaaccaaattttttgtattttaattaacaaatttaaacattaaccctcctattagttacttaaatgccacgtttactaaggtttttacgaaaatcttcatatttatacagttttatcatttgaaaaattgtcccaaataaaaacaagaaaaaaaaaaagcccattccccttatgtttaacccgtttgtgagaaaagttaattgaatttgcttctaaaccagaagaccgagtgtgtcttctcaagaagggcggggccattcc

SEQ ID NO: 13624 - DNA, 206 bp, Homo sapiens
  source 1..206: mol_type = other DNA
acaaaagaaactttaattaaggtctctttctggatgtccaactccaagatccaagaacttcaagaaccactcctttgcaaattcaaggtgtgaaagcttcatccatgacaccttatcattaagagcgctgattgttactttccgagcctttagatgatcagctcaaaacatttcacaagttaggaaaccgaagctttgagcttttc

SEQ ID NO: 13625 - DNA, 344 bp, Homo sapiens
  source 1..344: mol_type = other DNA
aactttaattaagatgtccaactccaagatccaagaacttcaagaaccactcctttgcaaattcaaggtgtgaaagcttcatccatgacaccttatcattaagagcgctgattgttactttccgagcctttagatgatcagctcaaaacatttcacaagttaggaaaccgaagctttgagcttttcggaccctctggggctcgggctcggcgcctcgggcggcgggagcgctatgagctgccgggcagggtcctcaccgggggcttcctctgcgggccagggctgccgggcgccaccgggacgcgagcgcgcacgcctcggcccggcggccgcgctcctcgcac

SEQ ID NO: 13626 - DNA, 309 bp, Homo sapiens
  source 1..309: mol_type = other DNA
gaaccactcctttgcaaattcaaggtgtgaaagcttcatccatgacaccttatcattaagagcgctgattgttactttccgagcctttagatgatcagctcaaaacatttcacaagttaggaaaccgaagctttgagcttttcggaccctctggggctcgggctcggcgcctcgggcggcgggagcgctatgagctgccgggcagggtcctcaccgggggcttcctctgcgggccagggctgccgggcgccaccgggacgcgagcgcgcacgcctcggcccggcggccgcgctcctcgcaccgacaaag

SEQ ID NO: 13627 - DNA, 267 bp, Homo sapiens
  source 1..267: mol_type = other DNA
ggaccctctggggctcgggctcggcgcctcgggcggcgggagcgctatgagctgccgggcagggtcctcaccgggggcttcctctgcgggccagggctgccgggcgccaccgggacgcgagcgcgcacgcctcggcccggcggccgcgctcctcgcaccgacaaagggggggagggggaacagcagcagcagcctcagcatctcctccagcttctccttctgtctccccctggttgctcattattcagagagagacacagatatctc

SEQ ID NO: 13628 - DNA, 253 bp, Homo sapiens
  source 1..253: mol_type = other DNA
acaaagggggggagggggaacagcagcagcagcctcagcatctcctccagcttctccttctgtctccccctggttgctcattattcagagagagacacagatatctcaggtcatctgcagctgcagcgagtctgaggagccgaggaaggcagggaagatggcgatcctccattgctgagagaacccgaagcacctcccggcgccgggacgcttcttctgtaagttaccacctcggacaaacgcgctcattcat

SEQ ID NO: 13629 - DNA, 453 bp, Homo sapiens
  source 1..453: mol_type = other DNA
tgcacctgcaatgtgccaggcatgttcatgggtgaacacagcaaaatctttgccaactctgataactcggggctagatggggaaacactggacagttctaccccgaggtgtgacagaacccccagggctgagccccgcagcaagcgccccgcgggtgctggcccccagactgcgggtctccacgaagcgcttcccgggctacacattgcgtaacttcggcagccgggcggagcctgcacagaggcggagccgcggcagccggacaggagcccttgccgcccacggaacgcgcctgcgtaatccgggtccaggccgccgacattccaggaccgccttccgccccgcccccaattctggggcggagtcctcggccgcgccggcgcaaagcgtcgccgcaccccacgcctgcgcgcttcgcccgcccggccccatccccccaggtttttcgcgtgg

SEQ ID NO: 13630 - DNA, 667 bp, Homo sapiens
  source 1..667: mol_type = other DNA
aactctgtaactcggggctagatggggaaacactggacagttctaccccgaggtgtgacagaacccccagggctgagccccgcagcaagcgccccgcgggtgctggcccccagactgcgggtctccacgaagcgcttcccgggctacacattgcgtaacttcggcagccgggcggagcctgcacagaggcggagccgcggcagccggacaggagcccttgccgcccacggaacgcgcctgcgtaatccgggtccaggccgccgacattccaggaccgccttccgccccgcccccaattctggggcggagtcctcggccgcgccggcgcaaagcgtcgccgcaccccacgcctgcgcgcttcgcccgcccggccccatccccccaggtttttcgcgtgggggagggggcaccgagtcacgatgatggcggccaccatcctgctcgcgccttctgcagactccgtggctggcgctcggcgcgtgaggaagcacggcggcccgagttcgcggggaaggccgcagtcgcggaggcagcggcgcggtccggggcacgggctgggggagaggccgctccgctgggcgaatgtgacaagcccccacccccaccgccttcctccccagagcgcgaggagcgcgggcgaccccggggccccgccaggccacagacc

SEQ ID NO: 13631 - DNA, 775 bp, Homo sapiens
  source 1..775: mol_type = other DNA
cgccccgcccccaattctggggcggagtcctcggccgcgccggcgcaaagcgtcgccgcaccccacgcctgcgcgcttcgcccgcccggccccatccccccaggtttttcgcgtgggggagggggcaccgagtcacgatgatggcggccaccatcctgctcgcgccttctgcagactccgtggctggcgctcggcgcgtgaggaagcacggcggcccgagttcgcggggaaggccgcagtcgcggaggcagcggcgcggtccggggcacgggctgggggagaggccgctccgctgggcgaatgtgacaagcccccacccccaccgccttcctccccagagcgcgaggagcgcgggcgaccccggggccccgccaggccacagaccccgcccagcggccagcacccggcgcaggcccggcagccgagctgcgcggcggcaccatgcaggtcaccctgaagaccctccagcagcagacggtatgcgcgcgggccgggggcaggggcagccgcgtgcgggccgcggggagcgccaggagctcgtggggccgggcggcgcgctccagcgggggaagccccggagggcgcgatgagggccctgggtcctggtgccggccctggcggcgtacagcggagccgatccaggcctggtggcagatggcgtggagcgcacgcccgcgggcctgggcctaggagctcgtgctagcggggccggaaggtccaggccgtctcagccgtagagccagggagacgtaggcgtcgccactacccctgtgtg

SEQ ID NO: 13632 - DNA, 582 bp, Homo sapiens
  source 1..582: mol_type = other DNA
tcctcgcgccccgcgctggggcggacgccgccgccgccgccgacaccactgccgccggcgtcagctcggctccagcccgccagctgcctggctggcgtcacggcccggcccagccccgcccgcgcccctctgccatagcaacgcgcgccggcggccggcagtttcgtctgcgggcgcgcggggagcagaggcggtggcgggcggcggcggcaccgggagccgccgagtgaccctcccccgcccccacccgcccgtggcccgcgcccatggccgcgcgcgctccacaagtccgcgccttgcgccgccgaccagttcgcagctccgcgccacggcagccagtctcacctggcggcaccgcccgcccaccgccccggccacagcccctgcgcccacggcagcactcgaggcgaccgcgacagtggtgggggacgtacaacttttctaagaacttttgtatacaaaggaactttttaaaaaagacgcttccaagttatataaggtgccccagctgcttcgggctgccgaggaccttctgggcccccacattaatgaggtaggtgaggcgcgcgcgccggaacgacg

SEQ ID NO: 13633 - DNA, 206 bp, Homo sapiens
  source 1..206: mol_type = other DNA
ctattcttcccccaaatgacagttcccactatttggggacagaccatttctattcattgattattgctaagtcagcgttattatcaaccccctgcaagcaagctgggctggaggggcagcaggcatccctgggctgtcgcgcctcccagcgcccccgatggagcaggtgtgcagcccgcactccagtccccggcccgcagcaggca

SEQ ID NO: 13634 - DNA, 570 bp, Homo sapiens
  source 1..570: mol_type = other DNA
cacagtgccacccctcagcagaagggcccgcgaggaaccgtgcgaggtcaggccgagcgccggcaccgccaccggcactggcgctgagcgacggtcacgcggataatcgcgctcttctccagcgcgcagacagcgcggcaagcgcgtatgctagcaggggtgcggacgcgtgaccgtgccgcccgctgaccccaccagtcttcgcgggcttcgaacccagggagccgacaatggcggtgagtacggccctggtcgcgcagcgaccgaacctgcgcccggttcctcgcgccccgcgctggggcggacgccgccgccgccgccgacaccactgccgccggcgtcagctcggctccagcccgccagctgcctggctggcgtcacggcccggcccagccccgcccgcgcccctctgccatagcaacgcgcgccggcggccggcagtttcgtctgcgggcgcgcggggagcagaggcggtggcgggcggcggcggcaccgggagccgccgagtgaccctcccccgcccccacccgcccgtggcccgcgcccatggccgcgcgcgctccacaagtc

SEQ ID NO: 13635 - DNA, 352 bp, Homo sapiens
  source 1..352: mol_type = other DNA
ctattcttcccccaaatgacagttcccactatttggggacagaccatttctattcattgattattgctaagtcagcgttattatcaaccccctgcaagcaagctgggctggaggggcagcaggcatccctgggctgtcgcgcctcccagcgcccccgatggagcaggtgtgcagcccgcactccagtccccggcccgcagcaggcagaggaggctccgggtctccttcacccggacaccgccggcggagaggtccactcccgtgggtgcgtccggcctcgcctccccagccacgcgcagccggctacccagcacagtccgcacccagagtcggctccgaattgcgcacgcgt

SEQ ID NO: 13636 - DNA, 487 bp, Homo sapiens
  source 1..487: mol_type = other DNA
aaggtaaatgtatagattcttcttcttctgatcatttaaataattttatgtaagtgagcccctcaatccctccaggcaccctagagctcgcactgcaatcgccggccccagaatgcgccctgacaggtctttgcaaatgccattccgaagtccagtgtcaacatagtctacacagccagtgcgactcaccaccggctccgcggcttcgggctcggtagccatggcgacctccggcgccgccacccccgccctccgggaccccagcgcttcctccgcgcagcccggactgggcgtgctcttccggcgcacagcgcgtgtcgtgcgcacgcgcgctgctctcaggtcgctttggggttcgaacaggggacgcggccaatgtagctcctctacctagcctacaaagaaggccggccgccgtaagtgaccagaagcgggcccggcctcgccccctccgcctggtgtcccgcgccgcactcccagtgctgcg

SEQ ID NO: 13637 - DNA, 433 bp, Homo sapiens
  source 1..433: mol_type = other DNA
aaatgacagttcccactatttggggacagaccatttctattcattgattattgctaagtcagcgttattatcaaccccctgcaagcaagctgggctggaggggcagcaggcatccctgggctgtcgcgcctcccagcgcccccgatggagcaggtgtgcagcccgcactccagtccccggcccgcagcaggcagaggaggctccgggtctccttcacccggacaccgccggcggagaggtccactcccgtgggtgcgtccggcctcgcctccccagccacgcgcagccggctacccagcacagtccgcacccagagtcggctccgaattgcgcacgcgtgcctccaaggatggaggcgccctccagggggctgcgcagcgactcaatgggtgcgtcaactaggcagccgcagcactgggagtgcggcgcggga

SEQ ID NO: 13638 - DNA, 529 bp, Homo sapiens
  source 1..529: mol_type = other DNA
catttaaataattttatagtgagcccctcaatccctccaggcaccctagagctcgcactgcaatcgccggccccagaatgcgccctgacaggtctttgcaaatgccattccgaagtccagtgtcaacatagtctacacagccagtgcgactcaccaccggctccgcggcttcgggctcggtagccatggcgacctccggcgccgccacccccgccctccgggaccccagcgcttcctccgcgcagcccggactgggcgtgctcttccggcgcacagcgcgtgtcgtgcgcacgcgcgctgctctcaggtcgctttggggttcgaacaggggacgcggccaatgtagctcctctacctagcctacaaagaaggccggccgccgtaagtgaccagaagcgggcccggcctcgccccctccgcctggtgtcccgcgccgcactcccagtgctgcggctgcctagttgacgcacccattgagtcgctgcgcagccccctggagggcgcctccatccttggaggcacgcgtgcg

SEQ ID NO: 13639 - DNA, 429 bp, Homo sapiens
  source 1..429: mol_type = other DNA
tatttttgctaggaaaatgcaatgatcagtcatgggtgaactaggacaggttggtcaccctatgtttggccaacagaaaatatgctacaatatatattttttaaactgagtataaccattatcactaaggtaaatgtatagattcttcttcttctgatcatttaaataattttatgtaagtgagcccctcaatccctccaggcaccctagagctcgcactgcaatcgccggccccagaatgcgccctgacaggtctttgcaaatgccattccgaagtccagtgtcaacatagtctacacagccagtgcgactcaccaccggctccgcggcttcgggctcggtagccatggcgacctccggcgccgccacccccgccctccgggaccccagcgcttcctccgcgcagcccggactgggcgtgctcttccg

SEQ ID NO: 13640 - DNA, 563 bp, Homo sapiens
  source 1..563: mol_type = other DNA
cagcgttattatcaaccccctgcaagcaagctgggctggaggggcagcaggcatccctgggctgtcgcgcctcccagcgcccccgatggagcaggtgtgcagcccgcactccagtccccggcccgcagcaggcagaggaggctccgggtctccttcacccggacaccgccggcggagaggtccactcccgtgggtgcgtccggcctcgcctccccagccacgcgcagccggctacccagcacagtccgcacccagagtcggctccgaattgcgcacgcgtgcctccaaggatggaggcgccctccagggggctgcgcagcgactcaatgggtgcgtcaactaggcagccgcagcactgggagtgcggcgcgggacaccaggcggagggggcgaggccgggcccgcttctggtcacttacggcggccggccttctttgtaggctaggtagaggagctacattggccgcgtcccctgttcgaaccccaaagcgacctgagagcagcgcgcgtgcgcacgacacgcgctgtgcgccggaagagcacgcccagtccgggctgcgcgg

SEQ ID NO: 13641 - DNA, 455 bp, Homo sapiens
  source 1..455: mol_type = other DNA
ccgcccccatcgtggggctctgtgcgagctcagagtgtgagttgtcagaaatacacacttggtgttttcatgcaatgaacagttatgaagaaacctctgtgcctggcaaaacttcgaaaaatagttttaagaagtagtgttgaacagttttcatgtttcttttaaatttcttttgaataagtctaaacagtagtgtgatccattaatgattgcattatcaaatgttagctcaaagtgtttgtgagaaatacagacattaccactggaattcccgtcccaggggaaaggcccctccgacttgattctgccatctcctcgccaccctggcgagaaggtgcctggaacccatgggagcccacaccaggctggactgcgcgggcggggcagagggcggagccctgggggggcgggcccctgggggcggggtctcggttggcgcgagtgtcctgtcgccg

SEQ ID NO: 13642 - DNA, 348 bp, Homo sapiens
  source 1..348: mol_type = other DNA
ctattattattatcacaagtctcaaaaagaaacagtggcagtttgagacttttgcacaaacagttgtcaacagcggctgcaaattacaggcttaaggaacgtttgaaaaatgccaagagttcttcctcaggccaaatactatggtagataaaagtatagcctttggagttggtaaaatgaggataataacagccacttagaatagggcctgttatatggtaatctctatttaaaatccaaacactttaaaaatatctgttaaataaatcagtaaaacagaatcggggcattggttctttaaaagtactcccccacggtatttgttagcaggaccttgcggctcccatt

SEQ ID NO: 13643 - DNA, 435 bp, Homo sapiens
  source 1..435: mol_type = other DNA
agcttcagtttcctcctctacaatggggtgataaatagtagtgttattcttcccagagcctcagatctacttatctcaatactggacctgagatcttgaggaaaggtatgtggaatgagtccactggactggaatgactaaaaaagtccttccagctctgagatcttaaattgacagaacttaagtagcaaggacctccttttccagaagaggaaacagtgctattttttcatgggggaaaatctccggggcaacgcttcccagagggcacgcggccggtgcaaaggggcactcggcgcctccagggctctgggcgccggaaacacgtgtgtgctcacctacgtgtacacacgtgagcacacctacagcagcagggggcgctcgggccggcagggggcagcacagacccggcttgcaattacccggcgcagcccc

SEQ ID NO: 13644 - DNA, 174 bp, Homo sapiens
  source 1..174: mol_type = other DNA
tcaagttccttctgtgatgatccaagaaataataggtctagcaagtgctttatgtaaaccaaaaagtgccggcacggcagcactattgaacgtgcattgggatctcctgggaattttgatgaaatgaaccgaggcgggggtgcgggaggctccgcggctgcgcgggcgcgtgct

SEQ ID NO: 13645 - DNA, 410 bp, Homo sapiens
  source 1..410: mol_type = other DNA
acttatcactttctaatataatgcatagtttgctaatttgctactgggggacagaatttttgtctatttgttccccacgcgagaaaaacaataaatatttgctgaaaatggataaatcactgttgtcagcgggacctcagctccttgccttccctaggcatgaaatcactgagggcctggcacacagtaggtgcccagtcatggctgtggaacgaatggctgcatgcatgcgcgagggaactcaggacctgcccggagctcggcggagagccccggtgcccctaggagatgcgtcggggcgcgccagcccggggcgggggcgggagaacaccgcaggccagcccggacgcccgccccccgcccggcgcgcgggcccgtcgcggccagcccggccggcgggaaccgcccgc

SEQ ID NO: 13646 - DNA, 370 bp, Homo sapiens
  source 1..370: mol_type = other DNA
gcgcgccgggcggggggcgggcgtccgggctggcctgcggtgttctcccgcccccgccccgggctggcgcgccccgacgcatctcctaggggcaccggggctctccgccgagctccgggcaggtcctgagttccctcgcgcatgcatgcagccattcgttccacagccatgactgggcacctactgtgtgccaggccctcagtgatttcatgcctagggaaggcaaggagctgaggtcccgctgacaacagtgatttatccattttcagcaaatatttattgtttttctcgcgtggggaacaaatagacaaaaattctgtcccccagtagcaaattagcaaactatgcattatattagaaagtgataagt

SEQ ID NO: 13647 - DNA, 438 bp, Homo sapiens
  source 1..438: mol_type = other DNA
ctgcaggagcacctgggaaaagcctgaagctgtcccatctactctgtattgtagcaggtgcaggacacctggatacaaccaggtccctgctctggaaaccgttaggggccggggtagtcaatatagctattgttttcaaatagttcttcggcgccgcattaagcccactgggggctccttgctgcttgcagaggccagacgcttcttgcaacttctaagcggcgagagctgccccaggctccgcgccgcgccgccagtcccaggggagccgccggcgcacctggcgcctagggcgcacggcactgcgcgctggtgggcacctcacccgacgccagctgccagcgcgctccctgggagctgagagagcctgagcattcactttcaaccctccaggggaggagggggtgcgggtggggaggggagacggctcccagctcc

SEQ ID NO: 13648 - DNA, 670 bp, Homo sapiens
  source 1..670: mol_type = other DNA
tgttttagtaaagaataggtgaaatattttagtgagtagatcctacttttcctttcagatgcaatgaacagaagaccctgaaaggatttcatagaggaaactgattgcctgagatttcacagctaacacattgtgaaatctaggccacatatcgcctcaccagaagggtggcctctctggacttggtcatcttaagcatgtgggccacttgggcaaggcagcccttcccaaattgtactcaagcgtctggcttgagccagaaggtgccctggtggccccagccccctctccactggcatctgcccggtggaggcgccactgcgctctgcctccgccccagcaagcgcgtgtccacgcgggcgcgccacgccagccgtgcgccccagcggctcgccgtgcgcccgcgccccaggtgcccactggctcgcgcgccctccgtctgcgccttggagacccgcggcggcgatcgctcggagccgccttggaccgcggcctcgggtccatcacactccaggggcggagcgaggcaccgagacgtcagggcggagaactagcgccgggctagcgcgccctcccggcggctgccggcgtcccacgtcctcggctggcgcggccggcggcggcggcgaccgggagatgcagtgagcggcggcgctggggcgcagccagg

SEQ ID NO: 13649 - DNA, 714 bp, Homo sapiens
  source 1..714: mol_type = other DNA
gaggaaactgattgcctgagatttcacagctaacacattgtgaaatctaggccacatatcgcctcaccagaagggtggcctctctggacttggtcatcttaagcatgtgggccacttgggcaaggcagcccttcccaaattgtactcaagcgtctggcttgagccagaaggtgccctggtggccccagccccctctccactggcatctgcccggtggaggcgccactgcgctctgcctccgccccagcaagcgcgtgtccacgcgggcgcgccacgccagccgtgcgccccagcggctcgccgtgcgcccgcgccccaggtgcccactggctcgcgcgccctccgtctgcgccttggagacccgcggcggcgatcgctcggagccgccttggaccgcggcctcgggtccatcacactccaggggcggagcgaggcaccgagacgtcagggcggagaactagcgccgggctagcgcgccctcccggcggctgccggcgtcccacgtcctcggctggcgcggccggcggcggcggcgaccgggagatgcagtgagcggcggcgctggggcgcagccaggcggccgggagggcgggggccagaggctgagcccgggcgagcccgccgtgcgcacagctctgcccgccgcccctggagcggatccccagccgtccctgggcgttctcccgggttctagcaaagccccccggggtgccc

SEQ ID NO: 13650 - DNA, 421 bp, Homo sapiens
  source 1..421: mol_type = other DNA
ccattacctgggtcaggcccacatacccttcttttgtatcaacaaaatgtgcatgttccttatgtaaaaggtggtataagttctatctttgacattacccaattataaaatgcagtaaacataaaaacaattttctttttgatttatttacaaaagtggtctttccaaaacagttttactagtttaactcattttatctgaactccagcttatcatgtgtgataaataaacatgcatctgagtttatgtaattcagccaagaaatattttttgaacattttctatgttatagatatatttgtcagtctcgaataatttatgaataaactattgaatatatactatgtttgtatagtttgtagtaccttactaactgagatcatacttgcacaatctgacctattttttaaaaagattactc

SEQ ID NO: 13651 - DNA, 386 bp, Homo sapiens
  source 1..386: mol_type = other DNA
acagacctttctgttctcatgaatcacattcatatgatgtttattgtccacattggagaattatagtggaaatgcaaggaaaatatatccctttacaaccagcttctaggcattacctagaagtaaaattatgaccaaataacattgagcacttactctgtgccaggtattgttaatccactccacaactaagtggtttggatgcagttattagtggcagcaaatataacccatttcatttgcattgtttggtatacaaatgtctgtgattttgatcaaataaatctcacccagaatttcccactgtcttattctatggtatttgcagtttgtaacaaattaacactgcacagaacagcagcctggctgagtgaggagaatttctc

SEQ ID NO: 13652 - DNA, 473 bp, Homo sapiens
  source 1..473: mol_type = other DNA
ttatagtggaaatgcaaggaaaatatatccctttacaaccagcttctaggcattacctagaagtaaaattatgaccaaataacattgagcacttactctgtgccaggtattgttaatccactccacaactaagtggtttggatgcagttattagtggcagcaaatataacccatttcatttgcattgtttggtatacaaatgtctgtgattttgatcaaataaatctcacccagaatttcccactgtcttattctatggtatttgcagtttgtaacaaattaacactgcacagaacagcagcctggctgagtgaggagaatttctcccagagcctacagcagacatgttaggagaatgctgctgcttgcaacacacccagagacggtggggcaggtgacactgcgtgtgtgcccggtgtgctgctgctgctgctttctgccttaaaatttctggagctctgtctctttatttt

SEQ ID NO: 13653 - DNA, 368 bp, Homo sapiens
  source 1..368: mol_type = other DNA
agaaaaaacaaaatcttgtgtcttgccggttgattttaaaagtgacgacacattcttagttatttccagtagatatattgagaacacagaaaaatctggagtcatatctattggattcactttaaagccccaaatgagtctcaatatgaggcctgaactacctgtaatcccaacactgggaattgcacgaagaagacgaagagttcatcccagcctcttctccaccctgtctctataagatataggatttagacaatggatcctaaccaggactacacttctgataggtatagagctataggtcatcatcagctccctttacaagtcacatgggattgtaatctgagtcagctgaatgacttggctca

SEQ ID NO: 13654 - DNA, 268 bp, Homo sapiens
  source 1..268: mol_type = other DNA
attttcaaagggtcattaacattatttaaatattcatgtggctggccacccgccagccccagtctgcggatcagctgcgctctgacaccgggccaccggctgccactacacggagggcagttccccgcctgagtgggaactcagcggctcctggcatttgagcgcacacaggttccacatacgctcatgcgcacatatgtgtacaccaacacacacgaaggggcgggccccaggagcaggcgggcggggctccccgccctccagcgcg

SEQ ID NO: 13655 - DNA, 532 bp, Homo sapiens
  source 1..532: mol_type = other DNA
tctactcaaggcaaatgcacatctgttttctcactcatctcagacttcagatgtagccacttaaaacatatcttacaagggccattaaataacataaaaagtgcttgtgaaatgatatgtctggtctcaatgatattaaatatgtatttctgagaagatgacaatggaatgaaataaaatattaactttttttctgattggagtaatgaatattttttattggtgagcatttgttatcacacatgcatgtacacaggctgtcctgaaaagtctgtctaactggagatttctccagggtctttatacccctgggatatcaattccctgcttgtcccagggcccacctctgaattgccgagaatagctgattcaccctgctcagccttgagcgtgacaggagcaggccgggcctgctctggctgggaatgccgctgccctccagctccggccagccagggaggggccaggcctctccgaaggaggttaagtcctgagggagggcccacggtgacatcacagtcttccgtcagga

SEQ ID NO: 13656 - DNA, 454 bp, Homo sapiens
  source 1..454: mol_type = other DNA
ttatcactttctcctctcaagttgataaagagaaaggaagaaagaagaagtcggtttatgttcataattaacatccatgcactggctttgcgacttccttcaacccaggaagcgtctttggtgcttgggagaccaagaaaccaagaaatttgaaagcattttaatggactatttattaaagtgccaaaagagaaaggacttttttggtgactcaattgtctggtttggggccaatctacaatctaactgagaccagcctctgcccaggctggtgcagcctacatggcacagcatcagagggtgttgcattaactccattttctccagcagccataaaatgaatggcgttttatttcagactcctacatttaattatttttaattgagaacaactcatgatcacaattcataaaatccatattttaagacaatagttctcacaaaaatctattct

SEQ ID NO: 13657 - DNA, 356 bp, Homo sapiens
  source 1..356: mol_type = other DNA
ccagaaagccttaattatttgtgagttacttccttagaattaacatttctcttagaaacttgaaatgagttttaccatcattaaatgtactgagtgaataaaattacatgtattaccataaaaatgttttccttcatcttggtggagaattactattcaccataattttcattcttacttgtaagagcagatgttcataggtataaacccaactttaagcaataatatttgacagtttctcagacttgtttgccaagcattctgagctaagtttataatctgaagattcatatcatcacattctcccacccctggggccttcaaaggcttggtgtgcgggtcacagctggaaccgc

SEQ ID NO: 13658 - DNA, 289 bp, Homo sapiens
  source 1..289: mol_type = other DNA
acagagtgagactccctttttgcaagccaaagaataccagagattgctagcccagaactctgagacaataatgtttgttgtttattcgttatggcagccctagcaaaactaacaagattctgtagacatattgaggggtagggctggcccgaggccaagattcccctgggctctgtcccatggcagggtgtggccgcggggcacacatccagaggcaagggtgtttgaactactgcaaacccaaccggcaggtttgctgaaaagtggccactgtgtgagcagagcgcga

SEQ ID NO: 13659 - DNA, 559 bp, Homo sapiens
  source 1..559: mol_type = other DNA
gacttctgttccaggagtctgcctctgttagaagaatctcacacaagtgtgagaactatctatggagtgtttactatgtgccaagattccgttctacagaaggaaacacttcaggaggtcaggacctttccagggtcacaactgcgtaactaagttgcagagctaaaccgctgtgtcaagctggagcagcgagatacttcccggtcaccgttactcagcacgggcgtggcggccctggaatccagccctgcctgggcggtccccatctcggcgcatccccaggtgacccgggagggaccttgtgtctctgggggtgactgtccgtctccccgcctcccaccgtcacgcgcagtgctgatccccacttccagctggagtgcgagctgggcttggggttacaggagccgaagccctggagctccgccccacgcttgcgccagccccgccccgatcccggctcgcaggctccaggggcggggcgtggccggggcgcagcgacgggcgcggaggtccggccgggcgcgcgcgcccccgccacacgcacgccgggcgtgccagt

SEQ ID NO: 13660 - DNA, 605 bp, Homo sapiens
  source 1..605: mol_type = other DNA
aaaccatatcaatacataatacttctacgtatttatggggtacatgtgatattttgttacatgcatacttcaaatacctctacagaggcagccactgtctccatctgtatatagaaaaacagaaagaaggattttgctatttttgttttattatagaaagaacattggccatggtcatgttcagaatttttctgacatcagttctgaaaatggcaaatcaagtgcaggggtcagcaaactgctgctgttctttgtacaatggtttttacattttttaaaggttgcaaaaacataaggaacatgcaacaaaactgtatgaggcccataaaatagtatctgttcccttagagaaaacatttgccttgatctagagcataaaagtgacatttctttactctctaaataattagagcaaaataacaaagttcagggaatttatgactcatgaaatcaaacttacaggaaactcattattatagggttaagactttagtatttttctcaacagcaaaatcttcaaattcttaagtgaaaatctcatctatttaatattatctgcaatgacatgtttaatgatgtcatagagaagttatccatgtattcca

SEQ ID NO: 13661 - DNA, 218 bp, Homo sapiens
  source 1..218: mol_type = other DNA
tttctgtcctcagagaaggcttctctgtaattacatatattttgtatgttaatatatgggtattcaaaaaatatttgttaaaatcaaatcatttgatctgagggggcccttaagggcttaatctgttcaaaggatgctttctcggtatctggatccatctccagtgaggaagcgggagatttttcttgactgccccctttccttcaaaggggtagaga

SEQ ID NO: 13662 - DNA, 254 bp, Homo sapiens
  source 1..254: mol_type = other DNA
tgcaccttgctttggaaaaaccaccccaggtagcaacttgtttcaaagcagatatatgccagggatcttatctgttgaaatagatcctttctgtcctcagagaaggcttctctgtaattacatatattttgtatgttaatatatgggtattcaaaaaatatttgttaaaatcaaatcatttgatctgagggggcccttaagggcttaatctgttcaaaggatgctttctcggtatctggatccatctccagtga

SEQ ID NO: 13663 - DNA, 431 bp, Homo sapiens
  source 1..431: mol_type = other DNA
tccctagtcacaagtcaatactaagagatttggctagtgacaaggaaatttttcatgttagaattcttgtaatttagaactggactactgttctcccatattcaggaggccatgaaccaaccagtagattgtttattgtgcttgctgatttatgaaaaaacttctttgtacagagaatgtgtctccctgaaattcatatgttaattcataagggctccgccctcatgaatgagattaggggccttataaaagagaccctacagtcggtgtgtatttgcttgagctcaggagttttgtgtctactattaataaatattttaaaaaattagccagaatcacttgagcctcttagggcctctccagccttcagatctgtaagaaagaaatgtttgttgtttaagccacccagtctgtggtagctttcatagcag

SEQ ID NO: 13664 - DNA, 145 bp, Homo sapiens
  source 1..145: mol_type = other DNA
cgcctgctgtagtggcagtgcctgtagtcctagctactctgaaagttgcagtgagctatgattaccccattgcactccagcctggcaggtttaaatatatttttatgtgatgatgagcccctaaaggcttagacccagatttctg

SEQ ID NO: 13665 - DNA, 290 bp, Homo sapiens
  source 1..290: mol_type = other DNA
gcttgccgggcacgccaatagatttggttggattaaaaaatacttttatataatataattaccaatttagtaactatgcataatttgtaagaaattataacactgaagttaagttttttgtaaatataatggtaagaattattactgcactaggctcttttaaaactgaagagtttaaaagaaagattttaaattagaagtttgcaagaatcattctcccagtcctattattagtattaagtgcatttaactaacctagtgccaactaatgcttctcattacaacatgga

SEQ ID NO: 13666 - DNA, 325 bp, Homo sapiens
  source 1..325: mol_type = other DNA
gatgatcaagtgtgtttgctcagctaagcataattggtaagccagaggtctgtgattcagagtctgcagtgtacacttggaaaatgcgaagttttttaagagaggtatggttatttgaaccaaactaaacatcattaaaatacacagggaggtagaatgtcacctagttctttattgccccaaatgcaaaattatgaataataatcagcattgtaagtatattaaggttgcatttttttcttgatacttgtctgatttgaggataaaaacacaaaaattcttgagctgggagctcaggtcaaggtgatccttgcagtctgacttc

SEQ ID NO: 13667 - DNA, 645 bp, Homo sapiens
  source 1..645: mol_type = other DNA
cagggcgccacgaggccacatttccggggttcgtgccggggcgtccaccggagtcctgccagctgtccggcgctggggtaagcgcaggaggggcgggggtgggacccgagctggcggccacgggtctcccgctgcgggtgtgtcgactcgggcccccagccccggccctgccaccaccgtgggctgtcgagccacgctgggggcgccacacaagagaggaggctggcgtcggcgctgctcctctggcccccccctcctcctgccagcgcgccaaagccgggcagtaggggccgactggcggctgacgctccctgagtggcgactccgtctccagccccgctgcggagcgcgggccggatctggggcggccagggcccggagccgcggagccctccccgccgcccggccgagcacgggaccccggcggggtgggcgcagggggcggccccgctctgggcgactgccgaggggcgggcggagggccgggctcggctggcggtggggcgggggccgccgggactgggcgcgcggcctgaagccagcccgggggcggcaggagagggacgcgcggcggcagcgagcgcaggtaagggggccggcgcggcgtgtggggacggcgccccctgggcgcgaagccagaggccg

SEQ ID NO: 13668 - DNA, 250 bp, Homo sapiens
  source 1..250: mol_type = other DNA
tgacctttcacggttacctggtggccccatcgactaaaattgatagtttacacttgcaaagctacactgtcgcagcctccagtgcagggcggcgctgggagaaacccacgaggccacatttccggggttcgtgccggggcgtccaccggagtcctgccagctgtccggcgctggggtaagcgcaggaggggcgggggtgggacccgagctggcggccacgggtctcccgctgcgggtgtgtcgactcggg

SEQ ID NO: 13669 - DNA, 230 bp, Homo sapiens
  source 1..230: mol_type = other DNA
gcaaagttatttaaagtggatttttaaaaaagatttgaatgattttttttaaaaaaaagattagaaccattgtttttaaaaggaaacagctttagatagtaaattatttacagccaggacgaggtgacctttccacggttacctggtggccccatcgactaaaattgatagtttacacttgcaaagctacactgtcgcagcctccagtgcagggcggcgctgggagaaac

SEQ ID NO: 13670 - DNA, 378 bp, Homo sapiens
  source 1..378: mol_type = other DNA
caatataatatttcttatagtttggtatcaacccgtggtttgtattcatgggtatacatatctatacacatttctgcatgccgtacacaaacataagtagcattgtgcatgaacatattagcactgtgcatgtactaaaatttcaattttttcacatagtaggttataaaataaatcatatattgcaaagttatttaaagtggatttttaaaaaagatttgaatgattttttttaaaaaaaagattagaaccattgtttttaaaaggaaacagctttagatagtaaattatttacagccaggacgaggtgacctttccacggttacctggtggccccatcgactaaaattgatagtttacacttgcaaagctacactg

SEQ ID NO: 13671 - DNA, 486 bp, Homo sapiens
  source 1..486: mol_type = other DNA
ttgctgaacatacatatatatttaaaaattttaaaactttttaagagacagggcctggctgttgcccaggctggagtgcagtggcacggcagctcactgcagcgagccactgtggctaagaatatctttacctctgctgaagtcatttgaagaaacaaataacattcaagaaaatttatcaaggtattctttgttcctcccaaatatattattttactttgataaaagacaacttggaaccatataaactggtaccattattccattttacagatgagaaaagtagctcatttggattaatctagatgctgaactgaattctgtattgtatttctggatgtacatacctacatttaattttagagttatcgatctaaagctggctgcagaagctgtctcatttagacaggtccacgcttgtcaggaagacaggtctgtccatgaagtgttttatagcaaataacttactgttgaatacacatgtct

SEQ ID NO: 13672 - DNA, 317 bp, Homo sapiens
  source 1..317: mol_type = other DNA
tgagtgcctgccatgggccaagtcctgttccaggacctaataaaaatacttactcttctgaaattagtattctactccatcaggccttgtaggccgagtaaactttgacgtttttaaaacaagattaatatgtgtttaactcaagttgtggcattaattatggcttgcattaaatgcatcggtaaggcctctgagcctctggcgcagcaataattctgccgcttcccagtgaccatgcgcaacaggcaggtgggagcagcgcggactttcggaaagctgcacgagcgcgttcggggagtccggttcagcgcctctgc

SEQ ID NO: 13673 - DNA, 577 bp, Homo sapiens
  source 1..577: mol_type = other DNA
ctcaaaataattaaaattaaataaataaattaaagacattgaatcttcacaatgactggaagttaggcattcttcttatccccatcttgcagatggctgcaggcttcgaacctgcagaagccaggtcaaggggcaagagtgctcactcctgcctgggggagtctgggactggggacagacaggcagggtgtctgcaccgcagccctgggcgaaagcttgcactgcgggcaagcggcagggctgacggggagcccagggatcggagccagcaccgggggcttattagggctgcggccgccccaggccctgcctttggacccctgcttggcagatgccacggttggttcccccacggggcatatttccgccgggctccaacttaggaccccaggcggaggtccagtttcctatctacacgcacacacacgggcgcgcgggcgcgcacgcacacacacgcacacatgcacacatacgcgcgcgcacatgcacataggcacatcggggccgggctctcaccctaaagaagcagccccgccctggggtggccccaccctctcttgggacctgtcataagtcg

SEQ ID NO: 13674 - DNA, 557 bp, Homo sapiens
  source 1..557: mol_type = other DNA
agaagccaggtcaaggggcaagagtgctcactcctgcctgggggagtctgggactggggacagacaggcagggtgtctgcaccgcagccctgggcgaaagcttgcactgcgggcaagcggcagggctgacggggagcccagggatcggagccagcaccgggggcttattagggctgcggccgccccaggccctgcctttggacccctgcttggcagatgccacggttggttcccccacggggcatatttccgccgggctccaacttaggaccccaggcggaggtccagtttcctatctacacgcacacacacgggcgcgcgggcgcgcacgcacacacacgcacacatgcacacatacgcgcgcgcacatgcacataggcacatcggggccgggctctcaccctaaagaagcagccccgccctggggtggccccaccctctcttgggacctgtcataagtcggaccccgggcgcccggctgcgcagtcccagccgccttccccaggcggaggaggtttgctcttagacctcctcggaggatcttgggagccgacgtc

SEQ ID NO: 13675 - DNA, 528 bp, Homo sapiens
  source 1..528: mol_type = other DNA
aggagttcaaggctgcaatgagctatgatgcccaccattgcactccagcctggctcaaaataattaaaattaaataaataaattaaagacattgaatcttcacaatgactggaagttaggcattcttcttatccccatcttgcagatggctgcaggcttcgaacctgcagaagccaggtcaaggggcaagagtgctcactcctgcctgggggagtctgggactggggacagacaggcagggtgtctgcaccgcagccctgggcgaaagcttgcactgcgggcaagcggcagggctgacggggagcccagggatcggagccagcaccgggggcttattagggctgcggccgccccaggccctgcctttggacccctgcttggcagatgccacggttggttcccccacggggcatatttccgccgggctccaacttaggaccccaggcggaggtccagtttcctatctacacgcacacacacgggcgcgcgggcgcgcacgcacacacacgcacacatgcacacatacgc

SEQ ID NO: 13676 - DNA, 350 bp, Homo sapiens
  source 1..350: mol_type = other DNA
attttttgaggcaaagtttttcatgttgccatatagtcccatgcaatattttggacatacttatactaaaaaattattatctgaaattcaaacattttggaaggatcgcttgatccttccagcaggttgtcccgggaacgcgcagccccactactatgaattcagggtccctacctagtacacaggcagcgggcttggctggcttcacactgtggaaggtaaagcgctccgcacagcccgccctccctaccaacgggttgcgaaggaagtagttgctgtagccgcgccctgtgcgcctgcgcggaggcgtcggctgctgacgtgtagctggggccagacgggactagccg

SEQ ID NO: 13677 - DNA, 465 bp, Homo sapiens
  source 1..465: mol_type = other DNA
ttttacttttttgttttaaacaatctaatactgtagtaacttttaaaaaaatattcttaatagattgctactattgcagggtattatttgtatattcattcagttaatcaggactgacaaatgctttatggttgaatacatttatgaagtaagttaatgttcaaaggtagagttcaaccatatttgagtctcgcatcagaatagttttttaaacaaattctctttctctagtaagtaggttgctgtttaaaaaaaaagaaaaaaaattttttaaagtgatcgggtcactgactgcagccttacaaagtaagatctttgagatccctatttttaattgtcaccgagactctatcattcctttaatttagatgaatttgggtaatgaaaatgactcattgttctctgttaattattctagtttttcagctggtggaatagctacaataagggctacctagcgcccaa

SEQ ID NO: 13678 - DNA, 340 bp, Homo sapiens
  source 1..340: mol_type = other DNA
agagccccaaaattattatttgggtaattgaattcactagtttaaagtccctggacttttcagttacacaagccaatatattaccttttgcaatattcagtttaagtgagttctgacaaatataaataatgacgtattaatgatacaaaaattttaaatatagtaacgatcccagttttgtaaaacacttattaaaaaatgctgaggtgggaggatcacctgagcccaggagttcactactcaggaggcagagtgagaaacgctgaatttaattttattctgtatgtttcacaaagaggattttatccatctccgtgaaacagtaacagggtcatttaga

SEQ ID NO: 13679 - DNA, 431 bp, Homo sapiens
  source 1..431: mol_type = other DNA
caaaaattttaaatatagtaacgatcccagttttgtaaaacacttattaaaaaatgctgaggtgggaggatcacctgagcccaggagttcactactcaggaggcagagtgagaaacgctgaatttaattttattctgtatgtttcacaaagaggattttatccatctccgtgaaacagtaacagggtcatttagactaggggcgccagcttcgctggaggacgccgcgctctgcgggtccccgcctcggttccaggcccagctgcaggtgccacccaggtttcaggcgctgaggagcggagagcactgccagctcgctggggtccccgctgtctctggcaagcggctccgcgccgggtgggctggggcggcggggcgggcgcagctgcttccccgccccggggcggcacccgcgctcggggctggcggctc

SEQ ID NO: 13680 - DNA, 499 bp, Homo sapiens
  source 1..499: mol_type = other DNA
tctaaactctggataaaatattactgtagatgtgagatgtacttaaaatctagcttattttacaaattgtcacaaaatagaagaataaagattttcttctaggtttttgacctgaaaaccaggtagatgacagtgccatttcctaaaatagggaaaggctattaggcatctaaatggatcattaagaaggcaattggttacattaatcttgagcacagctgctcaggacagtaagttcttaagaataagctggccagaacagcctactacgtcctttgatctcagaacatcaaacccgttcttcagctgctgtgcaagtgtggcatatgaagacttcatttgccctgggcagcgttcacaatgaatcctaggcttctggttatattctgtctcaccatactcaaacaagttggtaatcggtatacagtgaacctgcttctcaagctagagcttcaaattggagttttcaatatgtaaattacacataaacctgtgaaaa

SEQ ID NO: 13681 - DNA, 578 bp, Homo sapiens
  source 1..578: mol_type = other DNA
atggtgcgatctcagctcaccaaagcgatctagtagctgggattacaggtgcccgccacatcaggtgatccacccacctcggcctcccaaagtgttgggattacaggtgaatactaaagtaccctattaaatgatgactagttaattttataaagaaatcttactaaagtgaactttaggaatgccttcaagcacaaagtgatgaatgactgccttcaagtctcaagaaaacacttttccctaacttttagatcacagatattagaattttaaatagtaataactgcttgttttttttgtgcaagtacttttatacataagataaacaaaaacccataagtgagttactaatttctatacctggaatatcatgtatgtttcatttactggatgtttacattttaggaaggaaaatagttttgtttatttaaacaactgaatacttataaactgttgttcctggaagttatttattccataaaaaatttgttcttttgtcatgaatttataattcctaaatgaagaccagaaattaatcaactgatgtcttgatttttctaaatgggaagattgcttta

SEQ ID NO: 13682 - DNA, 447 bp, Homo sapiens
  source 1..447: mol_type = other DNA
tttgtaacttttacaaagatatttaatttaaaattgattttaataaaaggtagacttcaatgttaggtgaatatctttaaaactgattattgtcaaacattaaatagtaacttaagaaaataaagtgacttatccactgacatttcacaattagtatttgaacaatcaaacccatgtgttagtaaagtaaataaatgcatgttacttcttgcaatcttctgggaaggagtttaatgccaagccgtttcatggaaagaaagaataattattcctcataccctgccgcgttttgcccggcactcccaaagaagtccggactgccgaggacctcggcgctgcccaggctgcagcctcaggctgtgcccactcgcggacggaagtgcccggagcccaaggggcggggcctggtctggccaatggcacagagtgcaggctcagtggtcacgt

SEQ ID NO: 13683 - DNA, 487 bp, Homo sapiens
  source 1..487: mol_type = other DNA
ggtaagaggttcttcccattggcatggacctacagaatgctcagccctctccaaggacaaggatttctctgctcatcatagatctgtatagctgaagattctattagcagaaaaaagatgaaaaaattatttcctcaagtttcttactagctactgattttaaatgaaatataagagcttgtttgttaaaggtgtgtaaacactggtgttcttacgtgaataaacataaactactgtgagaatgagtcatatcctcaaatacttttctttttggtgaccaataaatctctcatgattctcatgaaagaatcttaacagacaccataggtaaggtagtagaaataactttcaactggagacagaactttccagttggagcttgtgtcatcctggagagctttagtttccttactattagtaaagcataataataccagaaccaaataaactttgccacgttcttaacacacgtgaaagagtgtttgta

SEQ ID NO: 13684 - DNA, 703 bp, Homo sapiens
  source 1..703: mol_type = other DNA
ttaaaattaggacaaatacttagttaccttactacgtacaattaaaattttctagtagctagccaaagtatttaaaaagagaaattaacttaataatttacctaatttaatgtagtatgtccaaaatattaccttttcaacatgcaatcaatataaaatttactaaggcacatgcggctacttagggaatttcaatatcaactgattctttaattctgaatttgagaatttctttttataatataaggcgcttagagatctgtgaggcgcatggaggcatcccttgcgcccaggaacgtggcctggagggcctggctgctccgagcagtagcagtgcccggcggggaggctgcagacgcggcgttggaagtctagacaagctccggcagctgcccggaacccgtgtctttttctggggcacccaggaacagcagggcacagggtcccgagctgccaccgacaccgagggagcccggcccagggctgcagcgctttccgcctaggtgggcggcagcgggagcgaggagccggaggaagcccggcctgcgtcctgcgggcagcaggacacgatctccccggcgcgctctcgccggcgccgcagcgggcgcgcgggcgacagggtgggcgtggaccgatgggggcaccgcccctgggagaggcgggcgccgcggttccgggggcgggacgcgccgaggagtggggc

SEQ ID NO: 13685 - DNA, 260 bp, Homo sapiens
  source 1..260: mol_type = other DNA
ctcccaaagtgttgtgtgtcagtgatgaagtcattcactgcttgaaactgtgacagctgctggcatcagcgccctcagagcagcggggactgatgccagccccttcccggtgaccaggtgtcacctggtcaagtgggaacgggcgtgtcctaagcccaggccccgacaagaggaaggacccgcgctctgcggcctcccggggaccccgcagcgccccccgcttccctcggcggcgccggaagccgccggctggtcccctc

SEQ ID NO: 13686 - DNA, 786 bp, Homo sapiens
  source 1..786: mol_type = other DNA
tttaattctgaatttgagaatttctttttataatataaggcgcttagagatctgtgaggcgcatggaggcatcccttgcgcccaggaacgtggcctggagggcctggctgctccgagcagtagcagtgcccggcggggaggctgcagacgcggcgttggaagtctagacaagctccggcagctgcccggaacccgtgtctttttctggggcacccaggaacagcagggcacagggtcccgagctgccaccgacaccgagggagcccggcccagggctgcagcgctttccgcctaggtgggcggcagcgggagcgaggagccggaggaagcccggcctgcgtcctgcgggcagcaggacacgatctccccggcgcgctctcgccggcgccgcagcgggcgcgcgggcgacagggtgggcgtggaccgatgggggcaccgcccctgggagaggcgggcgccgcggttccgggggcgggacgcgccgaggagtggggcgcgagccggcggagctgcggcggtggagctgctcggccgggagcccggcggcgagacggagaggcggcggaggtgcccgcgcgcagggtctggtgggcggccgcgaggctcgggagaggcgaaccggagcgcgggaccgcggtcgccccgaccagagccgggagaccgcagcacccgcagccgcccgcgagcgcgccgaagacagcgcgcaggcgagagcgcgcgggcgggggcgcgcaggccctgcccgccccttccgtccccaccccccgcaccgggcgcccaccctgt

SEQ ID NO: 13687 - DNA, 199 bp, Homo sapiens
  source 1..199: mol_type = other DNA
cgcctcagctttccgagtagctgggattacaggtgctgacctcaagtgatccacccgcctcgacctcccaaagtgttgtgtgtcagtgatgaagtcattcactgcttgaaactgtgacagctgctggcatcagcgccctcagagcagcggggactgatgccagccccttcccggtgaccaggtgtcacctggtcaagtg

SEQ ID NO: 13688 - DNA, 621 bp, Homo sapiens
  source 1..621: mol_type = other DNA
aaaaagtactcaatttctcactaaaaagggaaaaaagcaagcgtgttgtcactcgttatattatatatatactttttgctcagaccagagtctttgtatatgtattttcatctgaaaaaagggaataatgagtaaacttttaaaaaatgctgggaatatagccattccatgtttgtacaatgaatttttcatataaattcaatactaattgtagggctggtgtcggtcccagcggtcgactccagcgccgggctgccagaggctggtccctggacgtgtcatctacagcctcgcgcccccatagcttttcctgccggcagagggaggcattcaaacctggcaggcccggtctgcgaagccggaaggcccgcggggccgcgggagggcgggcggggtgcgcggcggagcgggaagcacaaggcgcgcgctcccgcgaacgcaggagggaggctgggggcgcgcgcgcgcgccgggccgaggggccgagaggcgggggaccgcgggaagagggcgccccagagctgagccggaggccggctgccagcggggcgagggtgggcgcgagcgcaggggcgggccccgagggagaaggcgggggcgcggcggtggcgggagcgtgcc

SEQ ID NO: 13689 - DNA, 462 bp, Homo sapiens
  source 1..462: mol_type = other DNA
tattttatagtgcttgaattttccaaaatgagcatttatgctgatgtagctaaaaaaagggttaaggaaatttcatcaacagaatatatcccaaatatattctacatttccatctggcaatgtttacaaatgcaacttaatatttagatttaatatacaaaacaaaatgtatttgacattttgctacctatttgaaaagttgtatgtcaaaaatatacataaacggactgaagaatccattcaacagataaaaagtactcaatttctcactaaaaagggaaaaaagcaagcgtgttgtcactcgttatattatatatatactttttgctcagaccagagtctttgtatatgtattttcatctgaaaaaagggaataatgagtaaacttttaaaaaatgctgggaatatagccattccatgtttgtacaatgaatttttcatataaattcaatactaattgta

SEQ ID NO: 13690 - DNA, 483 bp, Homo sapiens
  source 1..483: mol_type = other DNA
ataagccatctccaggctagtttctttaactactttagctcatcagagtagctgaaatgtcagaattgatctcatttcactcattccagaagtagaaacttctgcaagttcagctttgcagagagctctgttccattcggcgggagagtggaaacgcgacgctggccgacttcagccacaaaggcaatttctgcccagggctagcgttcctaagaggctctcggagggcccaagctcagggctcagtcaccctcccagctcggagccggcgctggaacacagccgtagcggctgacgctgcccagacgctaggcgccgacaggagggggcggggcggagctgtgcctcaaagcgcctgcgcggagagcctgcaatcagggaccaggctgggcgcaggaggcccactgcatacgcaggcgcactcggcgatcccggcttttccgcgcgcagttcccgcacaggcatcggggggggcaggggcgg

SEQ ID NO: 13691 - DNA, 600 bp, Homo sapiens
  source 1..600: mol_type = other DNA
agccagactgtccggaatgaatccaggctccctatgtgatgttgaaaaaatttcttaatttctctgtttccttatcataaaatggcaatgttaatagtgtagagttcttaggattaaataaattaatattcgctaagtactcagtgcaaactgtgggcacacagcaagtagaccaagcctggtagcacctagcaagtccacatccctgggcggagaggtaactctactggaaatcacacacctcacggatggtgtaggttctgtctgctccttgcgtttcagtggaggtgcacagagctccggggggcatcggggaccgcgggcccaggacgtagggagcagtgctgtacacttccttcgtgcgcgcggaggatggattgctccaacctctcggtccagcgcgccggccgccgcgtgcgaacgtgtgtgcggcaggaggccagcaacgactgcgagctcggtgcgtgccgtaggaggtgtcgttacacacttcctgtgggtctcgccgaccacggcgcgtttccggtgccggctggagcccggggtccgagcccccgccccgctcgccggccccgccccggcccgcccgcgccccgcccc

SEQ ID NO: 13692 - DNA, 459 bp, Homo sapiens
  source 1..459: mol_type = other DNA
tcataaacattttactcttgagcaaacatcaattattaaaaacatatgttcaaattcattatccattctatttaattaaatgcttgtcaccataaaaaatatttttttaaattaaaaagagtgcaatttgaacacatgtcaatatacgattaccttttaattcaaatgtgtagcagcaggtgatcccactagtggcaacttggtgttctgcgatgtggcacatccacttcttaaatgcagattattgcactgtaataaaaatcctccatattcagtgctttcattgtgtataattatgtaaactgtagacaaaaaatattcctgaatagtttcgcccctcctccgaggcccagccgaggtggactcgcaccgtcgcaagaccggccactggcagccccgccccgggccacgccgacgggcggtggccgttgggtcccggcgggaggcggggtttccgct

SEQ ID NO: 13693 - DNA, 556 bp, Homo sapiens
  source 1..556: mol_type = other DNA
ggctgaccatggaacaggtcatgctctgtggttgcagaggaggtctcagcccagcccaggggagtgggcacttgattcaagtgggctcaccccttgccgtctctcccttggccctggggtttggggcaggagccttctagacaaggcccaggcactaacaggactcttctctaagaggcctttggcttggagaagagcctggacctggcggctcgcctatagcacatgggcccctgttgcattaaatccttcctgggatgggagaatggaaacgctccctgagccagtcctggggagcttccttccagcccctgccccggtggtggggggtccgcagagatccgcgggaggtccgggcacgcacgcctggctgtggggaaattcggccccgtcaggcggccgcgctcacaggagcagcgtgacccgtcggccccgggggtgctggcgccaggagccagcactcgcggtgcgctcccccgcgcctggcttctcgccagtcctactctgcctgaggtggcgagggcagggtggactggcctgagcactggtcactcgg

SEQ ID NO: 13694 - DNA, 367 bp, Homo sapiens
  source 1..367: mol_type = other DNA
caatccatttatactttgttatttcgaaatgtacaactaaattattattggatatatacacctgtatttttaaaactgcacatattcaatgaatgcaattaatgcatgaaatggcgcattaaggaattatttctccaagtgcttgattattctggtgaaatatcttcaccaaaccctttcttattgttcttatactatatatgaaaagatttatcgtatatctcaaagattaacgtcctctccctataaaataatgttattttcggaaaagcaattccaaattctgtaaaatatcttccggcagggtcagtcctgtagtgcgtaacggaactcggttccggctggcgcgcccgtgcgctattaccga

SEQ ID NO: 13695 - DNA, 634 bp, Homo sapiens
  source 1..634: mol_type = other DNA
ctgcactgccaggttacatgataatttaacatgtatgttttcatttaatccctatgacatagattttattattattttcattttactgaccagaaaactgaggttcagatgtaagctatttgcctacggtcccatactgtccttagtaaggtttctctgaagagcctctttactcataggctgattagcaaagggttcctaaatatgcttaagaatcaataaccattaaatagtttactaccctagtaatcaaagaaaaacaaaattacacgggtgtattccttttggcttatcagattggaaaatatttttctaaaaagaaaaatgtaattatcttgtaatgactacactaaaaatctagggcataattgacttaatttactccaaatgtgttgcttcggtagtttattacaatgagcaataaacattgcaggtggtccctctcgctcgcgactccgggaacgccaagcctcagcccttgggaacctggggcgaggcgcctgggtctcggccagggggcgcgcccgaggacgccgaagtagggcgcgtgtggggaccacaactcccaggcgcccgcgcgccgcctcgcccggaccacgtgatccgtgcggccagggtagctatcgcggcggcg

SEQ ID NO: 13696 - DNA, 257 bp, Homo sapiens
  source 1..257: mol_type = other DNA
agaaaaggaaacaaacattgattgcatctttactacgcctggtttagagatgagaaagtggtaaccaaattataggatataattaatacggttataaaatgttaccctggagtctagactagcaccttgtttcagggagatgtctagtcactttagtcctcagtactgaaacaatgcagcctaacagtttaaggaacagtgacgatcacagagcctcagagaggttccttaccctgtgaggggacggacggagtcac

SEQ ID NO: 13697 - DNA, 355 bp, Homo sapiens
  source 1..355: mol_type = other DNA
agtccctgtccggtgaggactcataatccaattcattctgcctgagcattcccatttcaccggagaaattgccgccaagagagatgccgggtcccactcacccgccgctcggcgagaggaaatcggtgtcgtcctcgtcccccgcagttgcggggaggaagctgggtattcccagagtcccagggcctgtcaccgccgacgtcgtaaaatgccgcggcggcgtgctgctttccggcagggcgaactccagcacggtctgctcgcgcgggcacgagcgccgagtgacgtcaggcctctccagcccgcagcggggcggagcttcacagccccttgcagggatcctcggcctcggtgg

SEQ ID NO: 13698 - DNA, 440 bp, Homo sapiens
  source 1..440: mol_type = other DNA
actctagaatagtcactctgtaagggcacacagtgcttaagggctgataaggttcttgttcacccactagctctctccctatctgtaaattctgagattacgaggaggccgggatgaaatccatggcctctgagctctctggaccaggcaccgagcaccccggcccaaggtcactctggctatgccactgcaggggccgggccgaagccccagccttccgcggagctgaggaaagcggcgaggaaggtccttgtcccgctgggaaatccaccgaggccgaggatccctgcaaggggctgtgaagctccgccccgctgcgggctggagaggcctgacgtcactcggcgctcgtgcccgcgcgagcagaccgtgctggagttcgccctgccggaaagcagcacgccgccgcggcattttacgacgtcggcggtgacaggccc

SEQ ID NO: 13699 - DNA, 564 bp, Homo sapiens
  source 1..564: mol_type = other DNA
gactaggaatcaggaaatctgaattcctgtaccttgatctcaagtttaaagtaagcatttttgtttatttgttttgcttaagtatacaacttttagaatactcataaaatatattgtccagggaagcagcaattttaataattattttcaaattatcagcaattttgcaacagagatgacagtctttatatacgagtatacccatactaatctgtaatgatgcatgcattttaaaattagtagtttaaagttataaccaagttatatcaggcataatgataggaatatgaattaaatgcaggttctaggggatctataacattccgttcactcagtcactgaaagcagacttaattagttggttaactgaggaatcatacagataatagttatatgcataacattttaacgaacacataaacattcttttgccattcttttaacataaggcctcagccttttttataagtaaagctttattagaacacatctaaaatgtttacagaaagagctgctacgttatctatggtatttttaacatggaatgaatacttaaagtcactt

SEQ ID NO: 13700 - DNA, 311 bp, Homo sapiens
  source 1..311: mol_type = other DNA
tccctcactttggtattaataaaactagtgattacaacattacaagtgtatacatttcaaacgtctgccaaaggcataaaccttggccaacggtggtccgctgtgtaggacaccgctgagtcccgcagcccttagcgctccctgccagagtgagctgggatcccgggctctgctcgcgaggaagccatgctgggctctggagccgcgaggccccagcgaaacgcgcgcccagcagaggggaagtgcgtcactgacaggaagtgcgtcactgacaatgggccaagaggggtcaccgcccccggagcggcgct

SEQ ID NO: 13701 - DNA, 427 bp, Homo sapiens
  source 1..427: mol_type = other DNA
ctaaatcaaagatctgcattaaactaaggtttaatcttggcaatttaccggacttcaccagaggatgaagctcaccctgagtttcacagtcctgtttcctctgtaattgaaaggacaaattccctcactttggtattaataaaactagtgattacaacattacaagtgtatacatttcaaacgtctgccaaaggcataaaccttggccaacggtggtccgctgtgtaggacaccgctgagtcccgcagcccttagcgctccctgccagagtgagctgggatcccgggctctgctcgcgaggaagccatgctgggctctggagccgcgaggccccagcgaaacgcgcgcccagcagaggggaagtgcgtcactgacaggaagtgcgtcactgacaatgggccaagaggggtcaccgcccccggagcgg

SEQ ID NO: 13702 - DNA, 396 bp, Homo sapiens
  source 1..396: mol_type = other DNA
gctgttgtaggaagtcaataacgtaatacagagtaagctcttggaatattatttggcatttaataaatgttcaataaataacatctattattgctgtaattgttatcttactctcaatctgatacaaaatcaggccgaagctcctccgccgggtctcggaccatggaggagaacagtcctcgtcccctagctccaggcctgtacctcggagcccaggcaagggtttctatggtaacatggtcctcggctccaagagacgtaaacgcccccgtacgcccggggggcacagcggaccccggaagcccttgactcgctccagagttcagccccgagccgcgcgagtcgactcacagcgccgctccgggggcggtgacccctcttggcccattgtcagtg

SEQ ID NO: 13703 - DNA, 396 bp, Homo sapiens
  source 1..396: mol_type = other DNA
acctgagatctgtagtcccagctacttgggaggcaatcgcttgaacctaaatgttggctaggatccctgccattgattcattctctagtctggtagcaatgcgaccgcagctgtaaaaactgtgtttctacaactgtcttcccatttggatctcaagaaggtactttaaaagatgacctttattaagtgctttctccatagctattacaaaggtacagcggagtcctgggcacaagcgtcctctcctctggacctgatcacgaagagagtagcgccgggcgctcagttcccgtcccagctttaggcgaacggaactgcggttcggcggcctgcgagcccgccctagcaacgtgcgcctgctgctaggggcggaggcgcgggagggctcggaggctg

SEQ ID NO: 13704 - DNA, 592 bp, Homo sapiens
  source 1..592: mol_type = other DNA
cagacagactagactggatccccagcagagggctcaatctgggctcagacttataagacctaaacagctcaggaacatgtcatattttgttttcttcgaaataaaaaggcattactttttttcaatgctagtttaaaaagaaaactcaaatattcaaattcaaaaagtttggatgtaaatactttgggaaaatcagcctaatacagatatttctcactgggcctcaatgttcaatttaaaaaattattaattatagtaaccttaagtccaatctcatagctaccaattagtaactgtgacccttggcaagccacttaacttccataaaaatgggatcctaatagtactttcctcgcactgttagaatctcagcagagccttgcttgaagctaggcatctaagcttgcaaagctctcagcgaaagcctggcacttaataagttcctacggtcacagtaatatttggagttttatgtttgttgtagaacaaatacgcatacaatcgcgatttcattcaacctgctgccccgggcgggataggaggcgcagctgcggggcgcgctggcgcaccgggagggccgggggcggggtca

SEQ ID NO: 13705 - DNA, 211 bp, Homo sapiens
  source 1..211: mol_type = other DNA
tttcaccgtgttagcgaggtgggcggatcacctgaggtcaggagttcacaaaaattagttgggtgtggtggcacacacctgtatcccagctattgcagtgggctatcgcgccactgcactccagcctttccaactgaaagcagaggggctgggccttgcccaggttcaggcttcgggatggtagggaggggcggcccgcgcgatccccgcc

SEQ ID NO: 13706 - DNA, 294 bp, Homo sapiens
  source 1..294: mol_type = other DNA
agggctctggctcctgacggcgcatcgtgagacagagtctcactctgtcacccaggtgtacagtggtgcgatctccgcccggcagggctttttcgatttctaaaaccgcgggtttggggctaccttttctccccacctccagggctcgggaaaggcgaagtccaggagcccggagctgccgtcggcagcgtgagctggggcggcggtcctaggggccttggccgcggccgaccccttgggtcccctgtagggcgtccacggctccgggccggttcctgggcccaggacccacct

SEQ ID NO: 13707 - DNA, 448 bp, Homo sapiens
  source 1..448: mol_type = other DNA
ggtcttgaactcctgacctcaagagatccgccccttggctagtgtcctctacatttgaaagtcaacttttcagacctttgatcggatctatcattgtacctatcataggtctgaaagacttggagttttcctacaaattttctctaaatggacttagctaatgccaagtttgccctaggctgggcaaaggctgtaaccgcctccgaggccggctcacacccagggaccctcccaagcggttcgtggcctccctcctgcagttcgctgcacaagcgcagggcccggagcggggacgggcgggccctccaggccctcgacacacccaattggccaggcctcgttgcgtgtgggcggggccgcggctggagcggaggagccccccagaagaccgccttcagggggcgtggcctggacgtggagggggcggaccgtggggaagctgcttccg

SEQ ID NO: 13708 - DNA, 448 bp, Homo sapiens
  source 1..448: mol_type = other DNA
attacattgtacaattggacctgaggtcaggcaagaccagcgcctgtagtcccagctactcgggaggctgctgcggtgagctgagatcccatcactgcactccagcttgacagatctgaggtggtgcccaccgaaggctcagggcctggtgaacaggtcacacaggatgaccatcttctatgtggtttagaagacaagaggctcgttaccttccagagcttaccgctggaactccatctcttccatggctgagagcacatcactggcctttcattgcaaagttgttagcactgagagaagagaaaggctgtcagactccctcttgtttcttacatgtatggattttggtgtgacagggataagtccttcccttctctgcacaaaaaagctaaagcaaagtgattttgttgtgttattttgctgagaacacaatcgttggggtttgtag

SEQ ID NO: 13709 - DNA, 348 bp, Homo sapiens
  source 1..348: mol_type = other DNA
tgcaaaaccttgagaatggttttaactggaaaaaattgaacaatttaactgaaaaataaatacaattttaacacggtttgtttttgaaagcgaatgtgacgttgcattcttcatacagtgaaaaggctgcttctaacactcagtcttagtaccatcaaaccgcttaggcttgcggcgcggtgagattaacggacccggcgggcccagagcctgcctcgggtcctactcccacgcgctgcgcccggccgcgccgtcacccagcagcggcgcagggcacccaaaaccactgcggcttcaaaatccggatgcgccggtatttgagggcgctcagagcactgtgggacactg

SEQ ID NO: 13710 - DNA, 346 bp, Homo sapiens
  source 1..346: mol_type = other DNA
atttctacgaacttaatataaaaataacttaaaaacccgggcgcggtgactggcgcctgtaatgatcgagaccatcttgcacggtgagtgagccgaaatcggcgccatgcaaaaccttgagaatggttttaactggaaaaaattgaacaatttaactgaaaaataaatacaattttaacacggtttgtttttgaaagcgaatgtgacgttgcattcttcatacagtgaaaaggctgcttctaacactcagtcttagtaccatcaaaccgcttaggcttgcggcgcggtgagattaacggacccggcgggcccagagcctgcctcgggtcctactcccacgcgctgc

SEQ ID NO: 13711 - DNA, 459 bp, Homo sapiens
  source 1..459: mol_type = other DNA
cttacatgtatggattttggtgtgacagggataagtccttcccttctctgcacaaaaaagctaaagcaaagtgattttgttgtgttattttgctgagaacacaatcgttggggtttgtaggctcccagccagccccgctcaccaggatgtggcgtacagcacgaagacgctggcggcgcgggagatggcgctccgggcctccttggagatgttgacaccgtccgggagctgcgaggagaccgggggtgagcaaagctgccgttccagcacctgcttccttgatgatcctggtgatcaccattgccgccgctggggcttaaactccccttcgtccgacagtgtcccacagtgctctgagcgccctcaaataccggcgcatccggattttgaagccgcagtggttttgggtgccctgcgccgctgctgggtgacggcgcggccgggcgcagcgcgtgggag

SEQ ID NO: 13712 - DNA, 256 bp, Homo sapiens
  source 1..256: mol_type = other DNA
catggacaaaggacaaataaattgacttttttttttttttttttgagacagactctttctctgtcacccaggctggagtaccgtggcatgatctcagctcactgcaacagacaagggctggtctaaactgacttttaagtcatgagatgggatgtcagtgcaaacccccccaaggtatccttggattctttaggcgcagggtccctggccctctccccgccgggcccgggggaattttaatataaaactctgaagc

SEQ ID NO: 13713 - DNA, 484 bp, Homo sapiens
  source 1..484: mol_type = other DNA
agtttctctagggggtctctcgggaccccttgaatccgccggaatgggctggcagatgtgtgggacactgccaggctgtccaatggcgtccatagtcggagcataaaggactgagaatggcccagtctcgtgctcctctgggaaccagagaccaaggctgcatgcctctgtatgtccacagagcctggcatgctggcatccagatggcaaggccctctcatcatgggcctcagcaggcacatgagtcagtggctagttcaggttcagccaggaagcctatctgtgaccttacctgggagtcctcatgggatgccttggggccctggccacagattggcccccaggcctgagatggagtgacctcccctgtgctctgggagggcagtgaccaggctggccttgactttgggcccttagcacagggcccgccccaggctaacgctctggctcaggatggcaaagtttgcttttcgagctttgggcc

SEQ ID NO: 13714 - DNA, 485 bp, Homo sapiens
  source 1..485: mol_type = other DNA
cagcaccagagaacagctctgtgctggcacagcagcatcttgcagtcaactagttttcagtcctggctatacagacaactgtcctcacaagctgctggtgaggattcagtgaattaatgcaggcagagctctgggacagggcctggcacgctggaactggagctggggaccctctcctcccagtccaggaactctcattatagccaatattactgtaacaggatgttcagctggctgtctccgggggaggaagcccctgcagagtttagcattcaaagattcagctgtgtgctgggaagggactgaagctgccaccccccaccctgggggcagtcgcattctggaagtcagcgtgtgctggctgcaggagcctgggttcagttgcagcctcccactgggacaggaacagcgtcggggtgggagggagcggctgccagcaggccggctggaggcggctttgcgctgccccagcctgggagccctca

SEQ ID NO: 13715 - DNA, 295 bp, Homo sapiens
  source 1..295: mol_type = other DNA
ccctgttcatacagacctgcctgggagcacagaaagaaccatgagctctgggccctgttcgccagcatctgctgatgtgggatgcacccaggtgcggggcctcaggcagcactccactctgaggtccccaaacacttgtgtgtatactcaaatagtcctgtgagtccagtatgatatcactgggcttcccctctgaaggtgccctctgggggcagtacccctgcctgagtggcacttctgactgacagtcaccactgggacaggcctgggccccaccctggaatgcggcccgctc

SEQ ID NO: 13716 - DNA, 485 bp, Homo sapiens
  source 1..485: mol_type = other DNA
agctgggatttgaacccaagactagctccagagcctgggatcagcctcccctgcagggccattttaagcttgaatagcatcagaagtataaatgcttcaaacttaccaaacccccttgaaagtttaattattaaatttcttttgcacgtgtgatttttgaataatcaatttttcattttaaatttattatcacaacattaaataattaaactttaaaatggtgtttttgtaagtttataggacttgtacttctgaagttattcaggcttaaaactacgaggccggctggcaggagccattctctgggaggtgccctgtacagcatttaactcctttctcctagccagtcctgccaccccggtggtgggcagtgcctccccctgctgccatggtaacgaggaggccagtgggactggcttcctgccggggcggccccagaggctgtcccttggggccagaaggaatttttttttgagtcccagccc

SEQ ID NO: 13717 - DNA, 385 bp, Homo sapiens
  source 1..385: mol_type = other DNA
atggattctggtcaacccaccacaaacactcagctcttactctatgctgggtactgtcctagcgcattaatgctaggagctaggaactattattatccccacaaggtcacacagcagtgagtgccactgtaggctgcctgacctgtggcacgtgtaaagtgcctggtacacagccagcacatagcaggtgctcagtcggagacaggatacctgggttctggtcttggctctgcccatagacttccctgaggtctctggcaagtcaagaaatgggcccaatcaggcttgacctgctggctcacagagctgtgaggtccagatgggggcggagcccaatcctggtgctccagggcaggcttggggctgtaattggccccagctgagc

SEQ ID NO: 13718 - DNA, 578 bp, Homo sapiens
  source 1..578: mol_type = other DNA
aatttctcaaagacagtttttcaaacttttatttagaaatacatatatatattttaatttggcaacggctcctcaagtatttattttaaaaatcagtctggctggggggctagagtccccttaaccactcttgtcgttcaaacttttattttattacattagtttttttgggaatattcccagaaaacttttatttcaaaaatcaatctggtttttttttttttccagcgtgaaaatgacatttccggcgcggcgcccgcggcactggggctggcggacgggagggcgggcgcgcccctggaccggccggctttgtgtgccacgcggaggccggcagcgcggaggccgaggccgaggccccgagctcgcgggccgcacggcgaggccggcccgggggcgggcagggcggcggggggcggcggcggccccgcgaggggcggctcggcggcagcggctgccgcggcgcggccggtgcgggccgggggtgggggcgagggccggcgccccccccgcgcgcccccagcgcccccgcccccccggcctgagcggggcgggcggaggagggagcggcggcggcg

SEQ ID NO: 13719 - DNA, 382 bp, Homo sapiens
  source 1..382: mol_type = other DNA
gataccggtcattggatttaaatcaggttcatggattctggtcaacccaccacaaacactcagctcttactctatgctgggtactgtcctagcgcattaatgctaggagctaggaactattattatccccacaaggtcacacagcagtgagtgccactgtaggctgcctgacctgtggcacgtgtaaagtgcctggtacacagccagcacatagcaggtgctcagtcggagacaggatacctgggttctggtcttggctctgcccatagacttccctgaggtctctggcaagtcaagaaatgggcccaatcaggcttgacctgctggctcacagagctgtgaggtccagatgggggcggagcccaatcctggtgctccaggg

SEQ ID NO: 13720 - DNA, 385 bp, Homo sapiens
  source 1..385: mol_type = other DNA
ccgacgggtaagcagatcttcagacaggttcgaggagggactcgcgcggagcctggagcaagggccagaggggctaccatctgcccttctgtcggaccccagggtacgtcccatgagcgcggccgagctgcgtcgagggcagcagagcgtgctgcactgctcagggacccggactctgccccaggcaccccggagtggtcctctcccaggtgccccgccctatgcccagccctccgccagggtgcgccgcgccaacccctgcgagtgccccgccccttctgagtgcccgcccacccaaggtgcccgccccccccctccaggggtgctcgcccaccgagtgcccgagcgccctaccctcagggtgccccgccctcctccagagtgc

SEQ ID NO: 13721 - DNA, 408 bp, Homo sapiens
  source 1..408: mol_type = other DNA
ccccagacacactgtgagctgggaagggtcaggggtgcatggggttcctctgccctggtgcccagcatgaccaggagagggttaattaccagatgcttggaaacctgttctcaggtcagctcagagaaccactccttgggccctgagctgagctgcttatccccaactgggcacaaaggaggccggtctgggtggtcccacgggttcctcttgtgaagcaagggatcctcagactccagaaccccctagctaggggtcccctagcttgggagagactttctccaccgcaggggtgaggaagggtaaatctttaacgagctagccctgggcagcccgacgggtaagcagatcttcagacaggttcgaggagggactcgcgcggagcctggagcaagggccagaggggct

SEQ ID NO: 13722 - DNA, 334 bp, Homo sapiens
  source 1..334: mol_type = other DNA
tccccagacacactgtgagctgggaagggtcaggggtgcatggggttcctctgccctggtgcccagcatgaccaggagagggttaattaccagatgcttggaaacctgttctcaggtcagctcagagaaccactccttgggccctgagctgagctgcttatccccaactgggcacaaaggaggccggtctgggtggtcccacgggttcctcttgtgaagcaagggatcctcagactccagaaccccctagctaggggtcccctagcttgggagagactttctccaccgcaggggtgaggaagggtaaatctttaacgagctagccctgggcagc

SEQ ID NO: 13723 - DNA, 193 bp, Homo sapiens
  source 1..193: mol_type = other DNA
gtccacccggggtgtgtgcattgtcccagaatgggcgggggccaaggagggcgctccgagtctgggagcgcaaacacctctcagaacggtgatcaaatcaccgtgaagccctgggcagccccttcctcccagctgaggctgtacccttggctccggccggcagggggcagcagggggcagcagagggcggccg

SEQ ID NO: 13724 - DNA, 666 bp, Homo sapiens
  source 1..666: mol_type = other DNA
tccacattgcctgtgccccttagggggtagggggtggggtgggctggagcaggccctgactgcgtcctctcccgtggacatcctccagcggctgggcctcagctggacgaaggccgggagccctgcacccccgggagtagcgggcccggctccaggctcccacgggcaccgtcattcctgccgccttgggcacagagctggcactggtgctgagcctctgctcccaccctgtccgcagccagaaacgcaagctgcagctgggcctgcagttcctccccaagacggtcgtccacctcgggtcccggcgctcagtggccttcgacctcgacatgcacgacgggcgctggcaccacctggccctcgagctccgaggccgcacagtcactctggtgactgcctgcgggcagcgccgggtgcctgtcctgctgccttcccagggatgggggctccttcctctttgggaagatgaacccgcatgcggctgacacgtaccagtccccactggtccgacctcgccctgctaggcctggaccacaccagccctggggtcactgccagcaggcaggggacccagggggactgtggcacccgccacgcccacccagcatatggcggtgggaggcccagccccccgctgctacctgccaagctgtcagccagtaacgc

SEQ ID NO: 13725 - DNA, 493 bp, Homo sapiens
  source 1..493: mol_type = other DNA
cagcttgaaggcagtcaggcagaaggaattcgctcgtactcagcctgtttgttctattcaggccttcaactgattggatgaagcccagccacattggggagggccatctgttggccaaatatctgggcaccctgtggcccagtcaaggtgatattaaccatcacactcctcagcccagaggtaaaggtagcactttgcatttgggaacggtaagtgttgggccctggagcagagccatccaggaggcagctgcctgcgctgcgaggaaaggagagaggtctgcactgcactcagagctctggaggcatcagcagtttctgctaggcctggacactctcggcctggtctccaatcccaggtgggccagtgaggatgctggagctgggccagctcattcccagcaggggctcccaatctcctgttgcacaactgagtgtcaggaaacagtcaggtggacttcccaggctgggccaactccaggggaaagcccagg

SEQ ID NO: 13726 - DNA, 298 bp, Homo sapiens
  source 1..298: mol_type = other DNA
tcccagcgactcaggccattgcactccagcctggggaaaaaaaaaaaaatgaatactttctgaaagtatttattcatacaaataaagccttgaagtgctgggcactgccaagctgcctgctcaggtatatttactggaaatagacattcaacttggagctgggttggggccccaatgaactttggctctgacacagctgcacactcagtggaactgaatctgagattcctctgcgggaggcctctctaggaaatgcagcccttggccttgggcatttcccaagtgctgtgtcacagac

SEQ ID NO: 13727 - DNA, 285 bp, Homo sapiens
  source 1..285: mol_type = other DNA
cccagcgactcgggaggctgaggcaagaggccattgcactccagcctggaaaaaagaatactttctgaaagtatttattcatacaaataaacccttgaagtgctgggcactggaagcaagctgcctgctcgtatatttactggaaatagacattcaacttggactgggttggggccccaatgaactttggctctgacatagctcagttgagattcctctgcgggaggcctctctaggaaatgcagcccttggccttgggcatttcccaagtgctgtgtcacagac

SEQ ID NO: 13728 - DNA, 245 bp, Homo sapiens
  source 1..245: mol_type = other DNA
tgataccatgatggccttcagggagggcttcctggagtcaccttggaggagctaaacggtcagccagatctacagggcctgaaggcctctggccacaactaatcagagttctgtctggctagtcaggtagatgctgcttgttaagtgcctgctggcactcagtaagaaactaagactgagatacccaagtggctgactcacgcccccgctccacaggagttaactgggggtggggagatgtcact

SEQ ID NO: 13729 - DNA, 404 bp, Homo sapiens
  source 1..404: mol_type = other DNA
tgtctgatgcccagagactgactctgttggcctggggtgagccccaggcttcagtgccacctggcctgggacacggaccatgtctctgctagagtggagagcaggggactggcctgtcttcggccctgccatattgaccatcaggatcgatctgttcccaacatctggtgaacccttggagggttcaggaatcaccacggtctccctgagattcctgagctctcaccgtgcacatgggccctgaggcctatcagggcctgggctgagatgatcccaagcccaggacgtcagtcctttcctgggcagcgctgactgcggagggcttgcaaggggttaagctcctccagctcttgctcggctgggcgcttcctgccgaggcgaggcggcctcaaccacggcagggg

SEQ ID NO: 13730 - DNA, 494 bp, Homo sapiens
  source 1..494: mol_type = other DNA
cgcccagctcaccatgccaggcgaactcctgacctcaggtgatgcagaccgggcctcgatctccgggtctgcggtggggctgattgcaggcacgcggcccggtgattggtgcgctcccagaggccccgccccccccgggccgccccctgctgtcgcgggcgggcctcagggataaaggagccaccgccccgccccgcgcccggattggaggccttttccaggaaaccacccgcgctcggcggccgccagcaggtgagactcggggaggggctcgcggggcgtccggggtggtccctgtccctcccagtttctccgtcgggagagccagtgggctccgttccactgggacttttccacgtggaaaccccacgcgcacggggaacgcatcaccgctccgggaatgggagggagccctggacgggcggtatgggccccagtccaaaccgtgccggccgcggggttcctccaccctccggctcccttggcggggcctc

SEQ ID NO: 13731 - DNA, 371 bp, Homo sapiens
  source 1..371: mol_type = other DNA
tgagttggacaccgtgcatccttcaaggtgtgtgtcaaggtatgatgtctgtgctgcactcacagctttgtgatcaagaaaagtttattattactgttactactgtcgcccaggctggagtgcagtgacgcaatcttggctcacccaagtagctgggacgcccagctcaccatgccaggcgaactcctgacctcaggtgatgcagaccgggcctcgatctccgggtctgcggtggggctgattgcaggcacgcggcccggtgattggtgcgctcccagaggccccgccccccccgggccgccccctgctgtcgcgggcgggcctcagggataaaggagccaccgccccgccccgcgcccggattggaggcc

SEQ ID NO: 13732 - DNA, 391 bp, Homo sapiens
  source 1..391: mol_type = other DNA
ggacagagtggcacagctttttcagtaactccgctttttttttttttttaatactttaaaacaggaatgtatattctgcagacatggcccttgcctttgtgaggcttaaaagctagtgcaggtgatagtaacaaatacttgagcaaatttcttatgagcattaaaagagataaaatctctccacttggaaaatggggccactggactttctgccatttgttaattgagaaatataacctcatgacaacaggcatttaatcatgctttttaaaggacagcccaggctcctttgcgtacaagaagtgaagagtttgggtctgcagagaaatcagggggttggactgttctgtaaacccccactccccgccagcgcaggtgttttgaactccag

SEQ ID NO: 13733 - DNA, 305 bp, Homo sapiens
  source 1..305: mol_type = other DNA
catggcacaggtggcctctttgtaacaaagggccttccttgcatgccctaatatcaggagattatctttgatttcccagcctctaaaactgtgagacataaatttctgttgtttataagctacctagtctatggcgacatcatcatcatcatcatcatcatcatcatcatcatcatcatcatcatcattatggacataatcattaacacatcattaacttgtttaaccttgcttccctttactatataataataataggtaacattggggaattcttattattatagtaaacattatgatagtat

SEQ ID NO: 13734 - DNA, 462 bp, Homo sapiens
  source 1..462: mol_type = other DNA
gaataaaagcacaggattttacttaaatcttatttacgaccgactccagggcacacctgggtgtatctagaagagatttttctccaagccacttcaaatatgtatatttttaatttctattttgagattgtagatccaaatgcagttctaagaaatagttgacacgatggcaaccaggacattgacattgaaggggtccagcctgatccatccctgccacggagttgactccggcagacagcagattgtgaattagctagccggctaatcggcactcgctgcgaccgccgaagagcgctgtttctgagccccgctcccggctctgccggcggggtaggggacgcgggggctcctcccacccctaccgccgcgtttcaccccgtctccaggcaacggccaggcgcaccgggcgggacgtcatttcctgaggggggcggggcccgggccgggctggcaacgaga

SEQ ID NO: 13735 - DNA, 215 bp, Homo sapiens
  source 1..215: mol_type = other DNA
ggcgcgcgcctggtctcacctgaagtgatcggattacaggctcgtgagccactgcgcctttattttaattaagatcacagcaggctttcatcaaatatttatgggaaacagtccatttgacttgagggcagtactgcgcagtagactgcacaggcgcagtcgaggagctccgctcctgtcagctgatgctacgctgtgcggtcacgtgacaacgg

SEQ ID NO: 13736 - DNA, 348 bp, Homo sapiens
  source 1..348: mol_type = other DNA
tgttgtttttaatggcaaaaaaacgcaataacttttgcgcaaacctaatattaatatgccaaggtactttggccttcctttgtgtaaacgcacacacgcacaggtacatatgtgcaaggttagtgttttcctcaggggaaaggttacttacttttaaccgtagaccctttgaaattatgtgtctggtagctgtgaacatttcacacacactatctcattcacacgacctcatgaagtagctataattatctgctttttacagaaaacactttgggaggccaagcaagggaacccgtgccccaagatgccgtgcacgtggtcggctccgcgcggaggctccttccggcg

SEQ ID NO: 13737 - DNA, 255 bp, Homo sapiens
  source 1..255: mol_type = other DNA
actgtcgttatccccacttacatgtaaggaaacggttacttttagctattacaggaaacagcctattttgcaacaaatggaaccttccacgcagtctgaaaggctacctgtagaattatatctgcctcaggagtctcctgctgtgggccaggtgaggaggagaaggcccccccggagccaggcttgggttcctggctccatggctggtagcatagcctcccaacgcggttttttctcctgtaaaataggaaaatc

SEQ ID NO: 13738 - DNA, 235 bp, Homo sapiens
  source 1..235: mol_type = other DNA
atgaagccacatgtaactcctgtgcattgcaaaagattgatatttccagattcctgctttctgacagtcctttggagaaatatctcctggagttattacactgcagtccgagggatccggcctccctgagacccagcaaggactcattatccaggcctcgctaagagcttcttgaactaaacgcagaagttgctttgtgtgtgcgcacgcatgcacacacacacacacacacaca

SEQ ID NO: 13739 - DNA, 436 bp, Homo sapiens
  source 1..436: mol_type = other DNA
cttatgtgtaaaatgagaatgatagctttattgtcacaaaatttatctcaggattgaataattttattgatgtatttaacttagagcagtgattggcacaaagtaagcacttaataaatataatcttttattacatgttgtggtgattaaacaatggtcaatgcagactggaaatactgatttagaactaggtcatcttcctagctcctctgtcttcatccttggatgacctaggacactttgcaaagagctgatgcaaatgtgatttccgtttcccaatcttgcagggaacaggtatattttaatttgccccgactttcctaacttccttctgtaaacgaaggaaggagcacatgagcatctgtatataaatatgcttgggaagactgagtgattaagtcacccactgtgagagctggtcttctatttaatgggg

SEQ ID NO: 13740 - DNA, 281 bp, Homo sapiens
  source 1..281: mol_type = other DNA
gtgaagattgcttttctttaaagaaagggcctgccctgcaggcagggctgatgtgagcgtcccgcacgatccccctgggttatctctccgctggcccagagaaacctgaaaccccccaggcttttgaagccaggaactgggctcagtccctgtactcgctccgaggtgccactgagcagctgctgcccagagcccaggcgagccctggtcccatttccagcttgaccaagtacaagaggggagccagggctgcggatcctactccctcttgctaagccagc

SEQ ID NO: 13741 - DNA, 430 bp, Homo sapiens
  source 1..430: mol_type = other DNA
aattagctttatggagcaaataaatatattttccatattcaaatatggctgtgatttctacacaaatggtgttaacaatctaatacagcataaaacattgtttaaatatcatcatacgtaatataaacacttcccaggtgtattcccttggtaaagtttcattataaacgtcagttttcttgtgtaaaaaagagacacttgtgtctatcctacttactggttacaaggatataataaaaattgttcataacttaataagggagggttgcgttttgaattacatttaatgcttcattttagtgaagtgattgcttttctttaaagaaagggcctgccctgcaggcagggctgatgtgagcgtcccgcacgatccccctgggttatctctccgctggcccagagaaacctgaaaccccccaggcttttgaag

SEQ ID NO: 13742 - DNA, 474 bp, Homo sapiens
  source 1..474: mol_type = other DNA
aatgaaagctgagaatctgaaaatttccttatctcactatcacagtctgaaaattattatatgggatgtactttctatacttaaattaaatttccccatggaggcagcattgttataaaccagaagtcaagttcatatcgacttatatagctctgtctccataagtcagaaacaggaaaaattaacttgttcttcagcaatctagagaatgttaaatctggaatgaacttcagatatcatctgaggacaattaaatgttgacttttacatcaatttggattaaatatttgtgattgcttacaatttcagaggggagagaggggcacaggtgatctgctcttgcccccctatgaattattgccaggatgggtagaattacatatgttttattcaacatttggtggtcattgtaaatttggtaacatttgcaactggaaaatttggggatgtttcttaatttgagtatggtcttag

SEQ ID NO: 13743 - DNA, 254 bp, Homo sapiens
  source 1..254: mol_type = other DNA
tttattagtaatagaatccagggtggtgaacttctccatatgttcacccatgttaagatgcccaatggcacatgccattgtgcaatatgtaattcataaatatttggtgaatgaatcaaacttgttttagatatccaataaatgttgctcattttatcaaagctataattcacatgccttaaaattcaccttttttgaaatgtacaactgagtgatttgtaatatattcacagagttgtgcaatcttaacaact

SEQ ID NO: 13744 - DNA, 469 bp, Homo sapiens
  source 1..469: mol_type = other DNA
aaatttattcttggccagggccctagcatatgtctaatgttggctcacacagtgtttctaggaatgtctgaaaactccaaggttgagatataacatactgtttaataacagagatgctgaaatcaaactggtatgaatttacaggaccttaagtaagttgtgtacctttttcaagtttcctcatctgtaagaaggaggacaataataattcctatcttgtatgttattgtcagaatttaatgagttaacaaatatatgtaatatatatgttttatatatatatacacattttggtttagtgtttggcatatagttaagtacaaaataaatattagctattgatattaattttggtcattttctattgctgccgcacaacatgaaacttagtggtctgaaacaacacagactcacagttctggagatcagatgtgtaacattctagaggttgtggccaagcaattccgaa

SEQ ID NO: 13745 - DNA, 498 bp, Homo sapiens
  source 1..498: mol_type = other DNA
gttttgacttattaaacacttggacaaaataaaagaagatctgttttgcaagaagaaaaaaatatattacatgtatgtcccagtaaatggtcagatccttacctgtgactttaacaatttcagaggacctgaattgcttaagttgaaaacattaggcaaattaatatttttctctcattttcttcttataaaattaaaataatttctaatgaccaacagagtattttaaagagtattcattcgagacccagttgtactaggactacagcttctgaaaggcagatgtcctggacagtgcctttcttctattttcttctgatgattccataagaactttggaaaaaaaaatctaagaatcaagtttcaagactctttatgtgctgagaagagacagatttttctcctgccatcagaaataataataataaaacaggaatgtgtgtgaatttcattaaattgttactttaagattgtctccttaaaaaaaaaaaaaaaaaa

SEQ ID NO: 13746 - DNA, 352 bp, Homo sapiens
  source 1..352: mol_type = other DNA
attttaaagagtaatcgagacccagttgtactaggactacagcttctgaaaggcagatgtcctggacagtgcctttcttctattttcttctgatgattccataagaactttggaaaaaaaaatctaagaatcaagtttcaagactctttatgtgctgagaagagacagatttttctcctgccatcagaaataataataataaaacaggaatgtgtgtgaatttcattaaattgttactttaagattgtctccttaaaaaaaaaaaaaaaaaacctctccaaactgattgattagtattagcatacgctttccccctctttcctttcattttgagaagaaggagggaggggag

SEQ ID NO: 13747 - DNA, 172 bp, Homo sapiens
  source 1..172: mol_type = other DNA
ggggccagggccattcgggcgcggccgctgcacgccggcacgttcccccgcctggccgctgagccacggcccacgactccggccgcggtccccagccgacgagtccaccgccggcagcccacccgcctgctgcgcacgcgccgttgagctgccgggcgcactgagccccgcc

SEQ ID NO: 13748 - DNA, 410 bp, Homo sapiens
  source 1..410: mol_type = other DNA
ggaatttcaactaagctgtacagtatagtcacggccccaaactacttcagggactgcaggtcgtggccagccagtcctgtatcggtttgggttcccgggtaccttcagtctgcagggacaggggctgcagagtgtactccccaagtctgcctctgctgtcccagctgagtaggcaaaacattcctttacagagcaatgtgttcatggataaagcactgcccttcctagggagtcccggttctcgacttcatttttccgttggcccatttctcagatggaaaaagaggctatctcagaggaaagctcacccctgcagggccgccttgccccgcgcgcttggggccagctgcacgacaagccccagcatgctggggaggcggggctcagtgcgcccggcagctcaacggcgc

SEQ ID NO: 13749 - DNA, 374 bp, Homo sapiens
  source 1..374: mol_type = other DNA
ctagctcaacttgagtcttctaccagctgctccaagctgggagggcggcagctagggggccagaacagcccgtccattagcaattagtgctagcacaaggaagtcttggctatccagggggctccctatccccaagaaggcggggccttgagcaaggctgggccaaggcgcgcccccaggtgcagcctctgggttgagccgaaggtggggggcccgagggggccctaacgaggccgggcggagcctccgaaacgctcggggtctgcggggggagccggagatcggggacgggcggctgggccccgggaggcggcgcgggggggcggtccagggccgatcgggaggcggagcccggagctgggggctgctggcga

SEQ ID NO: 13750 - DNA, 341 bp, Homo sapiens
  source 1..341: mol_type = other DNA
gatacatactgtatgattccacttcgtagtcattattaatgaatagtggtgatgattgtacaaaaatatgaacataattaatgccactaaattgtacacatacaaatggtcaagataataaattttatgttatgtcatgttatgttatgtgattttaccataatacagaaaatgaaaaaagaaagcttagcggtttacatgacttgaccaatgcctcaaagccatgagtcgagatctgaacttcacattctgaaatcccagacgaaatagtgtttccacagctgaaacaaagggctattttaatagaacctgattgttttcctaaattcacagatgactat

SEQ ID NO: 13751 - DNA, 299 bp, Homo sapiens
  source 1..299: mol_type = other DNA
gaacataattaatgccactaaattgtacacatacaaatggtcaagataataaattttatgttatgtcatgttatgttatgtgattttaccataatacagaaaatgaaaaaagaaagcttagcggtttacatgacttgaccaatgcctcaaagccatgagtcgagatctgaacttcacattctgaaatcccagacgaaatagtgtttccacagctgaaacaaagggctattttaatagaacctgattgttttcctaaattcacagatgactatgataaaagccaactatgtgacaaaaga

SEQ ID NO: 13752 - DNA, 297 bp, Homo sapiens
  source 1..297: mol_type = other DNA
gtccagtctcgaagtcttgaaaatggctggcaattctttccaggaaaacttccttccagatatcttccaactggagcagttttagtagtcttaaatcttactcagaatgactacaccttcagataagcagggcatgcctgtgctgagggctgcataaagtatggtagaggtgaaaacatctatgatgcctttgttatctactcgccattgctgccaacatcatccatgaaggtttccgttttctcattgtcctgcagaaggtggagaagaccctgctcaggcagcaggtggagctgt

SEQ ID NO: 13753 - DNA, 471 bp, Homo sapiens
  source 1..471: mol_type = other DNA
tgattgaatacaatttaaattctacttgatgactgcagtcgtcaaggggctcctgatgcaagatgccccttccattttaagtctgtattctcgagcatgttcctgatatatttttatttttatatattttcatttttttacgtcttgcctataagctaatatcataaataaggttgtttaagacgtgcttcaaatatccatattaaccactatttttcaaggaagtatggaaaacactttgtcgatgtcattccaaagttattgcctactaagtaatgactgtcatgaaagcagcattgaaataatttgtttaaagggggcactcttttaaacgggaagaaaatttccgcttcctggacctcaggaggtcaccttttcttgattcacctcatgaaatgagttgcagaagtttatttttttcagaatctctttagggagacacagatggctgggatattgagaataaagaag

SEQ ID NO: 13754 - DNA, 214 bp, Homo sapiens
  source 1..214: mol_type = other DNA
tgcattgctgatttggtttaaatcagaagggaagcaaagtaaacaaaagcagccccagcctgcattcaggctgattgccgaagggcaccaggattccgggtttgcgcgtatgcgcggtccctttggatgctcgtgcgcatgaggcgccgtcgccggctaagtccctcccccggcgtagcccggcctccgccgctccccgcccggagaccgcggc

SEQ ID NO: 13755 - DNA, 430 bp, Homo sapiens
  source 1..430: mol_type = other DNA
gcaactgcctgaggtcacacagcaagtatgtgggagagctgggttttgaaccctttttccctaacacagacactgcctgcatgatttagataagaacatacagttgttttttttttttttttcccaactgaatcaccttggagatacagaaaatgtactttagaattgttcagtcattatcttcttcttgaagctgtaaatattgatctgatttttcaaaaccaaaaatacagttcttacagagttgagtcttttccattggaaatgccaaaaatggctggcaaatgtatttattactgattctctccatgtatagtacaattcagggctggagaagaagtcataaatatttatattttaatccaatttcctttcaaaatgttcccaattgtattgaaaaattgcatcaaatgcatttaatttgacaagg

SEQ ID NO: 13756 - DNA, 296 bp, Homo sapiens
  source 1..296: mol_type = other DNA
gattgagaccatcctggcatcgggccactgcactccagcctggagctgcagaaagacattgtcaatacttaattactttgggagagttttgagtcctaatggtaataaaagagaatgagttatttgcttcaaactaagtctgcagttatctgagtttcaacttaaggtcaaatcccaaagttttggggtcattattctagaaacacgaggttaggaactttgaggattccacaaaaaatggcagccggcctttttttgctggcgccagccggtcggcttcactgcgtgcgcctccg

SEQ ID NO: 13757 - DNA, 217 bp, Homo sapiens
  source 1..217: mol_type = other DNA
tccccatctctaaaaaggggcctaataataggataatagatgtaaggcccaggcgttggacacgtctattacggtacgaaaggaacctccgttctaggaccgtgagggccgcgcggcacgcgttcagcttcccgggacgctccaccacccacctccgggcggggaccggaagtgcagccgcttccgccgggagccgcggagctgagggacgcgcgga

SEQ ID NO: 13758 - DNA, 425 bp, Homo sapiens
  source 1..425: mol_type = other DNA
cagcttagagcagatgggcgaccaactctcctcttgctctgtcgcccaggctggagtgcaggggactccgccgcggcctcccaaagcgctgggattacagctgcttctccttggtggactgatcaacaccaacaaggcggggctcctggagaatattcatccagtcgaggcctcctcttgacaggtggctggcccaggatcaagattcccctccaggccaccgctccacctggggaggcctcagccgcggccgtagccgcggtggcctccataacggctgcagtcgtccccgcctagttggagcctcgaggacgccgacgaggctgtttccccaccctcgccgctgggcaaggccacgtaaagactgagggagccgcaaccactggctacagttgacacggtcaggaaagcgccccgggaactgg

SEQ ID NO: 13759 - DNA, 616 bp, Homo sapiens
  source 1..616: mol_type = other DNA
ggctgtgcgggtgtgcctcctccagtggggcagaccagagactcccatcacagagtctgagctccaactttggagaccctctgccactgtccttggccagagcctcagtttcctcaacaaatgatgctttactattaaaaaagaaaatccatgtaaatacatgttggtaattgttgcctatcaacggattaatgagaaaaagctccttgcttttcttggcagcacagccgcgtgctgactcgcgtggtccacccggacctggtggttgactggggccctcgtctccccccagaaaggcggcgcgctgaagaagggcgccatcgccaggacgctgcaggccgtgaagatggtgctgtcctaccagcccgaggagctcgagtgggactcgccccatcgcaccaaccagcagcaatgctactgctactgcggcgggcccgaggcagggggtcagggccccccgggcggcagggcaggtctcgaccgcccatagggagcgagcctggcgtgtcagccaaggcggggaccttgagcgggcggggcctcgaggggcgggcctggagtgtcagccgcgggggtggggcctcgggggcgggactgacctgagggcggggcctcg

SEQ ID NO: 13760 - DNA, 348 bp, Homo sapiens
  source 1..348: mol_type = other DNA
gtattttaaaaatttcggaacaacatgcgttgcgccagggtccgccggtgcctgcgcgcagagagcggcgctgcctggcgtctccgtgtgcgccgcggtgtggccgctcctcggcggggggcccgggtcctggctagtggccgcggaggatgcgcgcccgcggggcgggcgggggcgggcgggggctggcggcgctgcggagcccggcggccgcgggctccaatggcgaggccggcgcggcccccgctaattaaaaagatggcgccccgcgcccggggggccccttcctgagcgccccggcccctcccgcggcgcccccgccccgccccgcccccgccgagaccccga

SEQ ID NO: 13761 - DNA, 533 bp, Homo sapiens
  source 1..533: mol_type = other DNA
gaggctgtgtgcctttggacttctctgaccctatatacagctgcagaagaattccttgcaggttgctgtaaggggaaactgttgcccagcacacagtacacattcggtgcacttttcctgcaaatgtggatctacatcccacttggatgctgagaccagccacctgaccggagcatgtagccacccccaggcaagatagggtgttgcaacttcttttttacagatggagtcatcagaacccactgtgaggaagtgacttctccttgaaattttggactgtctcaacaccctggggatttccaccaggaaggtgagcacccccactgagaattccaggctgctcagaggtgccagggaacacagaccagggaccagctgtggccccctcctccgatgtgcccagggaagtgggggaagccagcggcagcctgcgtttctgagagtctgtgacacgggtcattgctctcttgctttttctcactctaaaaaaaaaaaaaaatgactgctgctgtgactcagctgtgacgttgaac

SEQ ID NO: 13762 - DNA, 494 bp, Homo sapiens
  source 1..494: mol_type = other DNA
gaggttgcagttgggccattgcactccagcctgggatctgacagagaaggaataaaggtgtagcttttaatctaaaattctaccccaacacaagttccataactattttgattaatatattcttaaggatttagctgtgtgtgtgtttagacgaaaacagaaacggttccttaaaatatccagtttgtaaaagcacagtgccttgaaccacttagtactatcattttgatcaagtactatcaagtactatcacttgattgctccaacccaataagcttgggcgagcctggcactgctagcgcaggtgctgcaccagatgccaggagccccgcaagcggaggagctgcgtacacgcgtgtcagttaactgggcgcacagtgcccgtggcgccgcagacccggccctcatcgctcgccccgccccgcggcggtctggggagcagcagccccgggccccggccctgccttgccggtttccgccggtgcggctgcgtc

SEQ ID NO: 13763 - DNA, 506 bp, Homo sapiens
  source 1..506: mol_type = other DNA
atagtcgaaagagactctgtcaaaaaaaaaaaaaaagtataaagataaaattttagtatattgtgaattaattactagactcaattgagctcttatattaaaattattaaaatcctcactgaaaagtataacatgtgttttctttaaaagaaagatattctatatctgaataaagacaaactttggtatatgccttaataaatattggagaatatctattctccaatacttagagaatgagatgagacagaccaaggaacaattccctagacctccttcaccaaaaaaagatcatcttgtgagccctgtggccccttctaaaatcatttcagtgtgaaactcccagtgcagatggaaaggccaaagcaatgggcttactggtttctagctttttagggtccctttatttgtattaataaaaataaattccctgggtgtaagttcctgtaaagtattaataattaaccagattatctgaattcttcaagttcagtttatttaaaagg

SEQ ID NO: 13764 - DNA, 292 bp, Homo sapiens
  source 1..292: mol_type = other DNA
ctgggatacttttataattatcaggaaaactgtttctaaaagtgttatatatctgctaaattctttaaaatatctgttgaatgcatgtcgtgaacgccgtgctcatgggcaagccccagatgaagcctgtgcaagtgcttcttgctttaactcccttgtagcaatcagaggaacatcctctgcctaggatcgacagctggagcccaggctgcgtccggtgctgataagaacactcgcggaggccggggaggcgctgcgccggtgcctcaggccgtcctcggacacaggccct

SEQ ID NO: 13765 - DNA, 370 bp, Homo sapiens
  source 1..370: mol_type = other DNA
tcactttttaaatggggatgataacctcatacaagttattttaaattctaaatgaggttaattgattcgcaattatttggacaaatgagcagacctggttaagttacattgaggcttcaacccaagttttctcccctcagctcaggtggcaggacccacaaccttctgggcggcccacaccacgcccggtccgggccttcccgcctttgccgccggcccccactgctcgggccggatgccggggaacgggctcggccaggtctgacgctcaccgctctttcccggggcccagcggcgccgaggggccgcgcgcgcgtggtcggggctagtctcagccacgcccctctccctctccggtactgttggaagg

SEQ ID NO: 13766 - DNA, 407 bp, Homo sapiens
  source 1..407: mol_type = other DNA
tctagactataagctacaagagagcagaggttttgtctgttgttctataaacaataaatatttgttgactgaaggactgtactaaacacttagacaataccaaatttaaatcctcaaagatttagctgtataggatcagaattattaacctgatttacaaatggcaatgtacctgaacagtaacgaaacagcctgagttcaaattctgattttccactttcactttttaaatggggatgataacctcatacaagttattttaaattctaaatgaggttaattgattcgcaattatttggacaaatgagcagacctggttaagttacattgaggcttcaacccaagttttctcccctcagctcaggtggcaggacccacaaccttctgggcggcccacaccacgcccg

SEQ ID NO: 13767 - DNA, 645 bp, Homo sapiens
  source 1..645: mol_type = other DNA
tttgaagttagctaaaatgaaacatacaaaccagatttgaatttcctttttaattttattaaaattactaatagttcttaagtttgcacatcccattttaggctacaaaatgtgagcctgagatgcctgcatatttttctatagatataggtagacttttatttaattaatttttatgtaatcagatgaagtatctttctgaatagccaatagaatttaaaagtaaaagcttcactttgatgagatattatagaaagcaacatattaagtgcccacaatgtgtcatacattgtgctgcatttttctttcaatttgcagaggatgaaaatgtgatatagaaatattaagtgaattgcccctaagttattgttttagaaagaggtggagcccttgcttatgctacggtctaaagagattattttaaaattagctcagaactaagcctaggcaggttttcagcaaatataagcatttaactaggtttcaaattcacagactattttagttataaaattattcatagaagcacaagagcaaacataatgaagatttgtattgcttttctctattgggaaatgtcctattggaagcaaaaggtaactgttcgctagagggaggcctgcccgcagaggctgctggtgattg

SEQ ID NO: 13768 - DNA, 576 bp, Homo sapiens
  source 1..576: mol_type = other DNA
ttcttttaaagtcagaagaaaaaaatgaactttcaggtcagagaaaatattttgttatataatattgatacgtcatgtttatatcaatgcagttgtaaaatatgttaaatatttatacatatatttaacttacatgtgtgtgaaatatatgtgtgtgtgtaattagacaaattgtgaaaaatatcacatttctctcaccctgagggtcacttcctatcttggagttgaccaacctgagcctcagtttctccatggatacaatggggggtatatacgaagcatacagcggtatatacagtaaatgcccccataaatacacgttgaatgaatgcagtaaatgcatgcttagcatggtggctttaaaaattgttcaaacctgcgcagtagctcccccaagaggcgaggacacgcgactgcgcttgcgcatacgcgctttccaccttccctccgggcgcgagcgcccgtggggcgggcctcagcggcggcgcgacaactgaggaaggggcgtggctagcgggctggcctcagccaccctcttccggctccgccagctgcgcgccgagggtgacaggaaac

SEQ ID NO: 13769 - DNA, 405 bp, Homo sapiens
  source 1..405: mol_type = other DNA
tgcaccaggactgctatcgtctcaaatgcatatgagatgttgttgaaatcaacaaagtattacatttggccccatgaagcggcaattcaggatgcccatttgatagacatgtgagctcgcttgcccaaagttggggttccaaaccaggccttagaaggccttccgtgggagggaatctccccctctccagggctgctttggccccagcccagctcaggagctgccctgggtctcctcttcctccaggggaaaggcgaggggtccccctggacgaaggcgagcttggagccacccgcccagcagccgacgggagggcctggcgctcctcccccacccgcctgcccggccgccccgccccgagggcggctcccgcccgcgccctgcccaccccggccgcgcgcacca

SEQ ID NO: 13770 - DNA, 528 bp, Homo sapiens
  source 1..528: mol_type = other DNA
taacccaatgactctagtgggcaaactctgtcttcccccaggggatgtacaaacatgtgactttacgttttgatcaaaataagacttttaaaaaacaaacactttttaaaaagaccaggagctgagcgttctgccccgcccctctgccggcttcacctgcccacgggagccgggtcccctgccctgctgcggcgcatgctgcctggtgggggttctgcccaggcccactacggcctggaaaagctttcaaaaattggggggctcgcgtgcgtcgcaggaggctcagctgggctcgccgccgctcgtgcctgcgcccatttagtgtgcacacagctagcgcccgccgtatgtcaggcctggtgctgggtctccgccccggagctggggtgcaggggctgccgcgccctgtcgggtcgatccgggtgggaacccagatgtctccaagatccgagacagatccccgccccgcgccctccctggggggcggtccccggcttgggcgggatgggcgggcggctacttaaggtc

SEQ ID NO: 13771 - DNA, 317 bp, Homo sapiens
  source 1..317: mol_type = other DNA
ctccagcctgcggaatggccaccttgcaggctgtaaccccttacaagaaataaagtctcctgggattacaggcgcgcgccacacgcccggctacaccatgttggccaagctggtctcgaacaaccgcggcgtgatctgccggccctctcagctcaggctgacctcagcgccctcagccgtgcagggccccggcctcatacccacagccttgggggctctcgcccctcaggccacgcccctcaggactgcggcagtcgcgcctcctcgatcctgggcgttgattggccaactctcacgagggcgggacctcgattggg

SEQ ID NO: 13772 - DNA, 370 bp, Homo sapiens
  source 1..370: mol_type = other DNA
ctcctccaggcaggcctggagtcatcccgggggcactccaggaggcgagctccaagaagccaggcactgtgcctcgctccctgctgcaaactcagcaccgggcacggtgtctggtgcagactagatgctcaaaaaacatttagtgactaactgaatggatggatgagtcaatttctgcatcccccacactgcgggaaatgtctgggggtttgggcactgggggtaaacagagcagaccccccaacccctcccctggggggctgggctccccgcttccgcaaaccccctgggccccagagccggcttccagatgctaagcccgtctcacagcatcacgggcagccaggcagccaggctcctgcttgcagga

SEQ ID NO: 13773 - DNA, 466 bp, Homo sapiens
  source 1..466: mol_type = other DNA
taagcagtgaacaggccactgcactccgaaaagaaaagaaaaaaaaactgttgaattgttttttactactagtccactacagtgatttgtgtatataatcctctactggaaggaagcgaccgtgtagattcagattagccagtcagcatttaccattatctgtaattattttatcacttatttgtttattggcaatacatctccaactggattataaactccataagagcaaggatcttgacattttaaatattcttattcctatgtttaaaactggcagacacacacatataagtatatatggaatgaatgcatcttagctttggaaaaaattactcgggcaagtttgtgaaagtgcctggcacaaggtgtttcgcagaagcaaaaagccgtctttttccggatccggagtctaggggtgggcggagccgaatcgaagccccaccccgctggcagggcaatacgc

SEQ ID NO: 13774 - DNA, 364 bp, Homo sapiens
  source 1..364: mol_type = other DNA
acagcactaactacattgtactgttaattactgaaatgatatctcttgaataaacgaatgctttaaatgggtcctgttaccaaacaccttcccaagtagatgaggcgactcccaaagctgcggaggggacctccggggggactggggaggggggcccgggtcccaggatccgcggagcccaaggggggctaggcccaggcccgagaagccgcagcccatccccggcatgacggctgcagccccgaccccgacgagaagccctcagccgcgtttcgaccgccgagtgccacacggcgcctgcgcatgcgcatccggcaacacgcaggcgtattgccctgccagcggggtggggcttcgattcggc

SEQ ID NO: 13775 - DNA, 682 bp, Homo sapiens
  source 1..682: mol_type = other DNA
aatcttgaagcttttaatggggatactcagcagcgggcccctccctgagctgagcactagggatcccgtcccgggttccggggaggggccccaccctgacatcaagctaagtggccagggcactgccaggcgcaggccagccggcgcctcagccgaccacgcgcccgctctcatcggtaccaccgagggctggagagcagcgacctcgccaatccccgacggggtgctcagggaggtgagcggggcggccggccctggcggtccccgggggtctccgcccctccgcagccccgccctcccggtactccccctcgccccggcgcccggggggctcgggcagcctcggccgcggtcggcgcggctcggctcggcgtcgccaaggcaacagcggcttagggggcgggggcgacgtggcgggcggggtgggctgggccgcgctgcgcgggccgggccgtcggcgctcggtcggcgggcgggcggcgcgggccgcgagctgctggggccgagcccgagcccggcccgccctcggccgcgcggccgcccagcaagggtgcgggtcccgcgcgggtcccggcccgccgccgccgcgctaaccccgcagccgccgcctcaagggctccatcaagcgcaccaagagccagcccaagctggatccgccacatcctgccggggttccggagcg

SEQ ID NO: 13776 - DNA, 288 bp, Homo sapiens
  source 1..288: mol_type = other DNA
agcgcgcgcgcgagcggaggaatttctcaaaaagcgtgatagcgccgatgcgccgggggttgtgccggcgcagcgctgagaatcccgacgcggggccggtacccggcgcgccgaggggctggagggtgtcgccgcgcgtgtcaggcgggcgggcgggcgggtgctcaccgcgctaaaaaattcgatttttaattactaccattaaaaaatcaaatttgcaattctttggtcactgattgacacaagggaactaattcaaattgcgaagggctttaaatgcccactaca

SEQ ID NO: 13777 - DNA, 201 bp, Homo sapiens
  source 1..201: mol_type = other DNA
agactctaaccattctcattgtcagtagaaccctagagaagacaatcccttccaagagatgatgtgaacaggtaatcacttacattagtgtgtacacaaatcggaatctatctccgcagggggaggggattggtcacgcatgactcatcttgaaccgagcggggctccagcggcagggcggccgccgttgcagctggaggg

SEQ ID NO: 13778 - DNA, 267 bp, Homo sapiens
  source 1..267: mol_type = other DNA
gacattctgattttctcatgtctaaaatcaggaataataccaatagctattaatatttattaccacgaaaaggtaccatgttttactgagcatcctctcgatagaaaagctttcaattcaatgtattacttagtcttaaataagacaaaatgctttgcgtttcagctgagctgcaataactctggaagccaagcggtggggtcatgcctggaaccctggcttcccgatcaggacaatccggggcggggcctgagatgcagtcctgcg

SEQ ID NO: 13779 - DNA, 370 bp, Homo sapiens
  source 1..370: mol_type = other DNA
gagatctggattccagtatgctgacttgtgacttgtaccaagtagattttgtttcaaccataaaatgaaggggtcagatcaggttttcattctttccaactataaagcttggtttaaaacagtcgttttgccactgggtggcacagagcctaggtctgaatttaagcatgggagataataatatctactcacctttagcctcagccttaaaggtcaagctggactcgaacgggtcggggacggtagtctggtcccctgaggtcccccagaggtccctgagtaagggtctctggcacccagacctcgtgcgacggcggcgaccgcagctgcgcggacgtcgtgacgtcacgaagccaggaggcggcgcagg

SEQ ID NO: 13780 - DNA, 515 bp, Homo sapiens
  source 1..515: mol_type = other DNA
cattaattattcctaaccctaagaaatgagtacaattattcccattttatagttgaagaaatcaaggagcagaaatattcaggaatatttagtcattggcttccaggtcttcctgacggcaaagcccatgttattcattccattgtgttggatcaaaattttaggatgggatttaaacagcttccaggtatttgatactaattgttcttaatttttacccaacattactggcagaagctatcaatgatatatttgtcagtgagctctagttctataccatggaagacctcaaacctcaatcatgctttagactcacattaaagggcatcctaattggtaatcagtgcataaggaaccaaataaaattttaattaaatgctgtcgtgtggggtttaattagcatcattaaagttttagtctgctgcatatttcttcattctgtaaaatgaggcaaataatattttcttctagaaaaggattagagataatgtatttaaattgtctagtacttagct

SEQ ID NO: 13781 - DNA, 244 bp, Homo sapiens
  source 1..244: mol_type = other DNA
ccctgtaaatgctagggggcggccggtcccggcaccctgagagccccagggccctccaaccctagggcagctggcttttgtcccaggggagggaggggcttcccacaggtttcacctgctctcctgccggctttccccactgtggggcccacaggatggcagccctggaatctgagttcagagatctttgaaaaaaaaccaccctctgggatggtttttgctatgggggcggagcccagcccat

SEQ ID NO: 13782 - DNA, 210 bp, Homo sapiens
  source 1..210: mol_type = other DNA
cagccctggaatctgagttcagagatctttgaaaaaaaaccaccctctgggatggtttttgctatgggggcggagcccagcccatccatcagcaggccaggctgggagtgcgttagacccattttacagaaggggactctgagacccctgtgccaccaggcatcagaaacgtcaaggatcttgggtaaagccgctttatgccttggccgg

SEQ ID NO: 13783 - DNA, 409 bp, Homo sapiens
  source 1..409: mol_type = other DNA
tcctcccgcctcagcctcctgcgtagctgggactacaggcgcgcgccatcctggctggctggcggacggcaggagaatctcttgaacaggttgcagtgagccgagatcgcgtcactgctccgtcaaaaaaatatatatatatattttaatctatgccctgtcgtcgaatggcttcggaaacttcgaagggaagtgaatacatttttcttttctttctcaggctggggtgcagtggcgcgatctcggcctggtcttgaactcatgaccttaagtggcctcggcctcctaaagtgctggcattacaggcgtgaattcacttttttgttgtgcagattaaaaccaaaacaaagcaattaggtgggagtagcggcttccgtccgccacgacgcaggaaggccgcctcattggt

SEQ ID NO: 13784 - DNA, 516 bp, Homo sapiens
  source 1..516: mol_type = other DNA
acaaggggtacattgtatcactttgctaattaaatgaaatgtaaataaaactaaaatatttaaaattaaatatcacctaaacacatactaagtagtttataaatgttaattctgatattctgtttcatctataaattataaactgtaagaataattcttaccttagttcgctgtgtaaaaagcttcaacaaatatttgagatatgatgccagaatttgtgcttaaattttttatctctttgtctagaaacagagttttctctttaataaagaagtgagatgtggatgcctgccaaatacatgttttctgtgacacagatgtatcagattctgctcaatagggagttaagacactcgctcaaaccagcggtgcagggaatttcccatcaatcgggctcccttgtcacgtgatctcccgggcttgcgtaatctcgcgttaagtggggagtaacttctcgcgagagctagatcgggatccctccaggtccgcctccgtggtgaggaggaggaggaggag

SEQ ID NO: 13785 - DNA, 249 bp, Homo sapiens
  source 1..249: mol_type = other DNA
tcccagcttactcgggactgccgctgcactccgtgaagctagatccagaggttggggccatctcctgatcctttcaagttgtaggtggccgtaaccgaacctcaaacccctcgctcaacccggtaatcccagcattcgggcggatctcctgagagtgagccgaaatcgcgccattgcactccacgtctcagaatgtccttccggggcgcctagagggccccagtaaagaataaagctggttggcaccgg

SEQ ID NO: 13786 - DNA, 248 bp, Homo sapiens
  source 1..248: mol_type = other DNA
tcccagcttactcgggactgccgctgcactccgtgaagctagatccagaggttggggccatctcctgatcctttcaagttgtaggtggccgtaaccgaacctcaaacccctcgctcaacccggtaatcccagcattcgggcggatctcctgagagtgagccgaaatcgcgccattgcactccacgtctcagaatgtccttccggggcgcctagagggccccagtaaagaataaagctggttggcaccg

SEQ ID NO: 13787 - DNA, 397 bp, Homo sapiens
  source 1..397: mol_type = other DNA
gagctgtagtgtatagttgtaaataactacaagagttcaagaccatcaagttttacacttacaaatgattaaagtaataaacattacgcatgttttagatcctcaagttttcatgaacttgagatcattaaaaggtcaagagtttgccctaggaagaactcgagagctttctgctcttcgagcggaccgtctaggcccagctacagaagagccgctgagacgggggtcccgagcagcgggtccctgcgaggcgcacagggcctgagccacagacgcttacgagctaaggcacctcggggtagtaggcagtgaagctagtgcccagagtacggtgccctccgtctgcgcccctccgagcttggcggagaggacccggccagggctgcccttccggccc

SEQ ID NO: 13788 - DNA, 383 bp, Homo sapiens
  source 1..383: mol_type = other DNA
cagctactcaggaggctgagggtctctttaaaaataagacttaactagcactttaataatcattgtttttgttcccattgtacattcattgaggacagggactttaaactttcacctttgaatgatttttaaataaaaatctcatctttgagtcacaatctgatttaaatgcctttaggcagcgaagttttgacttctagactggattctgtaactaaagctaaattactttataaaagcaggtgaattttattacactgtgaagtactgattttcaaacaggaccagccagtgcacttcgcgcaggcgcacagtcctgaggcgggctggcccatggggctcggagaagaggaagctccgcctcgcttcccggtattgggcca

SEQ ID NO: 13789 - DNA, 394 bp, Homo sapiens
  source 1..394: mol_type = other DNA
tgagctgtagtgtatagttgtaaataactacaagagttcaagaccatcaagttttacacttacaaatgattaaagtaataaacattacgcatgttttagatcctcaagttttcatgaacttgagatcattaaaaggtcaagagtttgccctaggaagaactcgagagctttctgctcttcgagcggaccgtctaggcccagctacagaagagccgctgagacgggggtcccgagcagcgggtccctgcgaggcgcacagggcctgagccacagacgcttacgagctaaggcacctcggggtagtaggcagtgaagctagtgcccagagtacggtgccctccgtctgcgcccctccgagcttggcggagaggacccggccagggctgcccttccg

SEQ ID NO: 13790 - DNA, 477 bp, Homo sapiens
  source 1..477: mol_type = other DNA
agagtgagactccgtctcaaaaaaaaaagaagtttttgttttttattcagtatataaaggaaagcctcctttgtagttttaacaaggaatttttgaatacagttttcagaaaatagtttaaattgtatctttgtaaaaacactggtttgctaaggttctgacataggctgcccataatgttatctttgtaatttcaatataatcaggtatcagtagacttctcaagcatgtggaataaatgaatacaacacacttttttttttttttaaaagagatagggttttgttcagtcaagtagctaggactgcaggcactcactgtgtggcccaagctgttatcaaaacactcttaaataatctttgtttgggagtctcactctcccaggctggagtgtggcggcacgatatcagctcactgcatcctcccaggctggagtgcagtggcgtgatctcggctcactgcaaccgagtagctggg

SEQ ID NO: 13791 - DNA, 525 bp, Homo sapiens
  source 1..525: mol_type = other DNA
gatactttcaattaatccttctaaataaagatactaaaattacacattttcatagcacactctgttagctgaaaattgtcatcatttatgacattaccaggaaaaccacaatataatatgatacagtttgcattgttttaaataggcagaagcaagattgtatattctaagatacaaaggcttatttgtaccatgaaacttcctgtaatatccatgcctgagtagaagaaggtacatttacttttctatcttctgtttgtattcttgtttactgctcagcaaattagaagcaagaaatgcaatactttatttttctcttgaaaaagtgatcttaaagtttcttggccaatattcagtgaatcatgagagacaaaattaatggtgaatagccttctagctagaacttcttgtgcagctgaatcacttaaaggaagttaacatacttcctttctttaatattgaaatactgcaggcatagcaagccattcccacactgtgcagtctggagtgtgtgcacgtacaggc

SEQ ID NO: 13792 - DNA, 267 bp, Homo sapiens
  source 1..267: mol_type = other DNA
aagagctcctcctgtccaccccaacaagaggccagctggagatcgctggagttgcaaacccgtggtgcaggggtgaggtgccctgcagggagctgatcctggctccggaggggctgcagcttcccagcagagacagggtctgggaggcgactggactcgaaggcctgggcttgggagacctggtgagacgagagtcctgaacagccccctctccaaggacatctcccaggtcagccccacaggctagggggcttgcctctgtccaca

SEQ ID NO: 13793 - DNA, 636 bp, Homo sapiens
  source 1..636: mol_type = other DNA
tatacagcagggactgtatactggcaagcagaatgctgggcaccaagaattcttccccagcgccgcccctggcacagaggtctgaccctaaattggaattattgtcccagttttcctgatgaggaaactgaggctcgttcttggtaacttggccaaggtcacacagccagcaagtaggtgggcggtggcacaagtcaaagcctactggcctgcccctctacctcgggaggcagtgggcatcccgcactggggtgcggggcccggggaaggcggctagccgccgcggctcggcgcagctcccaggttcggaagttacgaagtttccgtctccgctccgccgcagttacgccgctagcgcagcggggctcaggtgctgcagcgattacgtaagcgtccgctggcaggtgcataaggccgccggcggcgagtgctccctgcgcgctcccaggtgcgcacttggcgcaggcggcggcacagcaaggcggcggcgggcgctggccggcgctctcaggtgcggcaggacgcgcgtggagggggcgcgcggcgaacgagggggcgggctttccgttccccagcagccgcggggcccgccccctggcctggccaatgggcgcgctcgacggtgtcacgtgctcg

SEQ ID NO: 13794 - DNA, 324 bp, Homo sapiens
  source 1..324: mol_type = other DNA
tcgctggagttgcaaacccgtggtgcaggggtgaggtgccctgcagggagctgatcctggctccggaggggctgcagcttcccagcagagacagggtctgggaggcgactggactcgaaggcctgggcttgggagacctggtgagacgagagtcctgaacagccccctctccaaggacatctcccaggtcagccccacaggctagggggcttgcctctgtccacaggagggacgaggggggtgcggagccagccaggccgccctcccgttctcacagcagccgagcagagcgcagagcgggctgccatggcgctggccaggcct

SEQ ID NO: 13795 - DNA, 393 bp, Homo sapiens
  source 1..393: mol_type = other DNA
ggtggctaatggttcctttatgatccctctggccctagaggggcgggagggcagagctgagccaccacgtgggtccacgaagcccccaggtggctttcctgtagccggaacttacgccagagtcctccggggcccgcgccctgggagacgtgcgggtgaccgcgctcccgccccgcccccaccggccacggccccgcccccgcgagcggcttcccagcagccccagcgggcagcggcggcggcagcgcgggcgggaggggcggaggcggagggggcggcgcgcgccgggcacgcgcgccggcgaccatggcgttcgccgggctggagcgacccctggaggcggcggcggcggcgagggagcgagcctcgagcgggcgggccccagcctgaggg

SEQ ID NO: 13796 - DNA, 312 bp, Homo sapiens
  source 1..312: mol_type = other DNA
tcctctttgtaaattagggagatgaacacagaaatactgtgtggtggctaatggttcctttatgatccctctggccctagaggggcgggagggcagagctgagccaccacgtgggtccacgaagcccccaggtggctttcctgtagccggaacttacgccagagtcctccggggcccgcgccctgggagacgtgcgggtgaccgcgctcccgccccgcccccaccggccacggccccgcccccgcgagcggcttcccagcagccccagcgggcagcggcggcggcagcgcgggcgggaggggcggaggcgga

SEQ ID NO: 13797 - DNA, 431 bp, Homo sapiens
  source 1..431: mol_type = other DNA
ataatttgctaagtgcctactatgagctaggattcgaaccctggcctttctgatgctcgcccccactcttccaggctggggagagaccgggaagcgctgtgggccctagcgggcttggagcgtggatatgctggctggcccccctctctgccgggtacccaggaggcttgcacggccgcctgcagcccgctgtgcagagcccgggccgacggccggccgaaggctcttgcaactctgccacaggcctgccttcccgggcctcccaggcgggtgcctgaggccgcggctccaggccgaggggagaccgcagtgagacgagcatccccttgttcgtatcttcccgccttcccggagcacgcgctgccagggcctggggcgccgagcggccaatggcacggcggcaggacgtgatgtcaggcgcggctgtaggc

SEQ ID NO: 13798 - DNA, 651 bp, Homo sapiens
  source 1..651: mol_type = other DNA
cgggcggggacggccggggggaccggccggtgacagccacggagcggggggcgggggacgccgagcgctagcgggcgcgggacggcggcgggcggggtggggaggccggggacgcgggggacgcgggggacgccgcgccgccccctcccggcgctcgccgccgcccccgcccccgcccccggccgcacgcgcccgcagcctaatgaccgcagccagcccgcgccgcggcccgcgcccactccaggcggccggcagctggcaacgcggggcgagcggggagccgcgcgccgcagcccgggtggccgctcccggcgcccggctggccctgattgatttgtcagccgaggcaagaaaaacggcccctctgatccgcgcgcccagtcctcggctccccgggcgccgggcctccctcccgcgcgcctagcccggctccgggccggccccgcaggctggagcaccccgcccgcctcaggagggagccctccgccctccggcccgggccccggcgcccctccccggccccgcgcgccgcgcacctcctccggctcggcccggcccgcccgagggccctggggctgccaacggccccctcacccccgctgggcaccgtgcccgcgccccacccccgccccccgccccccggccctggcc

SEQ ID NO: 13799 - DNA, 513 bp, Homo sapiens
  source 1..513: mol_type = other DNA
gagctaggattcgaaccctggcctttctgatgctcgcccccactcttccaggctggggagagaccgggaagcgctgtgggccctagcgggcttggagcgtggatatgctggctggcccccctctctgccgggtacccaggaggcttgcacggccgcctgcagcccgctgtgcagagcccgggccgacggccggccgaaggctcttgcaactctgccacaggcctgccttcccgggcctcccaggcgggtgcctgaggccgcggctccaggccgaggggagaccgcagtgagacgagcatccccttgttcgtatcttcccgccttcccggagcacgcgctgccagggcctggggcgccgagcggccaatggcacggcggcaggacgtgatgtcaggcgcggctgtaggcgcggaggcttgcgctggcgcggactgcagagccggggctgggctaggcgcgcgcttggagagcattgcgcgcggctgggcccgcggccggcggctcctcctccca

SEQ ID NO: 13800 - DNA, 346 bp, Homo sapiens
  source 1..346: mol_type = other DNA
gactttgaacaaaagaatttgctttttattgttgatcatagctcactgcagctgctaactcctatgctcagagaccctcccgcctcagcgtcccgagtagctgggactgcaggcaggcactgtgcccagtacagtgctgcgcccaagcaggcagtcagtgtccctggctccagccctcctggggtgcagcacagcccagccaggagcggccgctctcggtgcggtggtctcaggggctcttgctggtcccccgggggccacaggaagtgggagctccactttgagggcagggggcagggccttcccctcatcggaatacttcagtgcctgcattcagctggacatg

SEQ ID NO: 13801 - DNA, 438 bp, Homo sapiens
  source 1..438: mol_type = other DNA
gtgcccagtacagtgctgcgcccaagcaggcagtcagtgtccctggctccagccctcctggggtgcagcacagcccagccaggagcggccgctctcggtgcggtggtctcaggggctcttgctggtcccccgggggccacaggaagtgggagctccactttgagggcagggggcagggccttcccctcatcggaatacttcagtgcctgcattcagctggacatggttggctgactcgccggcctgcgccctgtgagtctgggcctcagtcttccccctcggccgagcggatcggccgcagaactcggcggagtcgaggggtccaggcccaggaaggacgccgccggggcgccccccgcccctcaagcttgcgtggcggcagcgcgcacgagcgctgggggcggcgcggccccgcggcggggaggggcgggcgcgcgg

SEQ ID NO: 13802 - DNA, 676 bp, Homo sapiens
  source 1..676: mol_type = other DNA
tggtctcaggggctcttgctggtcccccgggggccacaggaagtgggagctccactttgagggcagggggcagggccttcccctcatcggaatacttcagtgcctgcattcagctggacatggttggctgactcgccggcctgcgccctgtgagtctgggcctcagtcttccccctcggccgagcggatcggccgcagaactcggcggagtcgaggggtccaggcccaggaaggacgccgccggggcgccccccgcccctcaagcttgcgtggcggcagcgcgcacgagcgctgggggcggcgcggccccgcggcggggaggggcgggcgcgcgggcgcgcgggcccgcgcaggcggtggcggcggcggcggaaccgagctgacgggcgtgcggccgctgcgccgcaaactcgtgtgggacgcaccgctccagccgcccgcgggccagcgcaccggtcccccagcggcagccgagcccgcccgcgcgccggtgagtcgcctggggctggggccgggccggtggggccccgcggcccggagaagggcgggggccgggcggcggggccgtcacccccagccgggccgagggcgggcgcgcgcccacggctccgcgggggagagcgggaggcgggcgcgagtgtggccgcgcggggctgagcgtgtcggcggccgggcg

SEQ ID NO: 13803 - DNA, 132 bp, Homo sapiens
  source 1..132: mol_type = other DNA
aactcacgagtgttgccatggcaaagaggataatacttccaaaggatctcactgtggtccatcttgggtctgtctgtctctgaagcaccgcagaaccggacatcagcccccgttgccagcgacgccggaagt

SEQ ID NO: 13804 - DNA, 569 bp, Homo sapiens
  source 1..569: mol_type = other DNA
cctctgaggacagagactttgccctacaggaacaggatatttcagagcccatctgggcccagagattggatggggacgtcgtctagggaggcctagccttctagataagggccctggttcaacctggggccactatagccaccacttggcctcagaggcagtctcccatcgactgggaacatcagcagcccacagcagatgaggaccaccgtggcatgcacgcaccaggtgtccaggccgccccccctcttcttccacctgatggaagaggaaaaagaggtggaaaggccgcctagtcaagtcgccatggccttgcctccgcactggcctgtcctgactctactccaatgtccgggctgggccagaccatgccaggccaggccccagggtcccacccggtttctaacaagcggggctgcctacccgcctctgtggggtccctgcctctgggctcccacagcgggcctggaacagccagctggccaaggcctctgcagtgccttggggggtattttttttcttttaggagaagaagaaaaaatagaccgtgggggcagagaccaattggg

SEQ ID NO: 13805 - DNA, 496 bp, Homo sapiens
  source 1..496: mol_type = other DNA
tttcccgatggggtcgccgaagacggacaccccggcgggcctagtgaccggtggccgcgcgccacctggtggccgcagcgggtggattcggccgggagccgctgcaaaattcgggattttgcttccggaaagctccccttttacagatagggaaactgagaggtttcaagacacctggggtcaagagcctagggctttctttaatcccacccatctgttctaaaactttagtctttgccgcccacccaaaagtctttcgagttatctccggtccaatttgtcccgcagcggcagggagaggcccacgtgagtaccttcaagccccgcctccagggccccgcccacagggctgggctgatccacctcctcgcaaagactcattgttggggtggggggttttgcccttcagttggtgcggtcggcgtggccggcctcgctgagcggactccaacttccagcgtgccccgcagggccttgcgcggcagcggcgtgtgac

SEQ ID NO: 13806 - DNA, 320 bp, Homo sapiens
  source 1..320: mol_type = other DNA
gatacagtgagctgtattcgcaacacagtggtgcacacctgtagtttggctgtagtgagctgggatcgcaccacgagcgcaagggctcacgtgccctgggaacatccgagaggagcccacgcgcctcgccctggccccgttgctcctgccggctgcgatcgagacccaccctggcgcgcgggcagggatgcccttgggagagccgcccgacgacggggaggccccgcgaacggcgggcggggcggggcggggtgccccctccgccctagctccgcccctggcggcgctggaagacccgcggggctggcagcagggtgcag

SEQ ID NO: 13807 - DNA, 598 bp, Homo sapiens
  source 1..598: mol_type = other DNA
tgtaccaggagttgcggacctcaacatctgctgagaggtccctggagttcatggcaggtggtcccagtccactcctactggctgagtggctctgagcaagtcctcccagctctccgggtgagtttcttcacctgtaaattaacaattcctggcagctcctgggcaactgccccgcccctggaggacagagctggctactgtccccagcgctctcctgggacctcagtactggccactcctggacggattggctcctgagggggccctcttgggcacccctggagtccgagacaggctcgttgctcccctgtatcaaagaggtgcagggaccccttgcagttcgcagtccgcagggcgcggggccgggctctgggccgcgcggtgcgtgtggctggcgcgccctctagtggccgctctgcctgccgtgttgccccgcgcgagagctgccctagagtggacgcgcagccgctggcgcgggaagtcccttctcccagcccgccgcggtcccgcctgctgcggctccacctccgccgaactgcaagcggtctggcctgcctgtcagtcctcgtggcttcgcagggaccccaccatggccgca

SEQ ID NO: 13808 - DNA, 468 bp, Homo sapiens
  source 1..468: mol_type = other DNA
cggagagcgcgccatgccttccagccagggtgacagagcgaggggccaggcgtggtggctcacgcctgtaatccggcgaggggatcacctgagctgtgtaatcccagctactcagctactcgggaggctggggcagggcgacactgcactccagcctggcaccctgggcgacagatttgcagttccatatactgcctccccagaacctttatggagttggatgggagatctgtagctgccgcccacgttgggcctcggtttccccaacgcgcgcctacaccgtgacgccgacctcgctatcaggggtgccgtgaatgaggcgagcactacaaggcggggctccggccctaccaggcggggcgggcagtaccacggcgttcctcgggggcgggggagatgaggcggagccggggctcccccgctgcggcgccattggccgcgcccgccgccacccggcagtagttgcgg

SEQ ID NO: 13809 - DNA, 484 bp, Homo sapiens
  source 1..484: mol_type = other DNA
ctcgccacggtgcccaggctggtctggaagccctggtctcaagagatcctcccacctcggtcttccgagtagctgggaccacagaagcgcgcgccgcaacttccttcctaagcagaaaggagatccaatatagtgagctgccaccagagtttctggagttcccgggtcacacggtggcaaggcagctgcctagggtgcggcgggaccgggcggcgcgggggggcgcctggccaagcagtgcagccccggccgggtttgtagccagcacagcacagcggggcctgtggcaccgactgggtccgagaggcctcggagactcagtcatcatctgtggctctggccgctcgctgtggcgaactgggctgagggagcgcccggctgggcacccgagaactccagccgttccgggccgccaaggccgcgcacgggcgcatgcgcgcgtcggaccaaccccctccccccaccgcgcagtcacttccggcgc

SEQ ID NO: 13810 - DNA, 370 bp, Homo sapiens
  source 1..370: mol_type = other DNA
aagaattttataatacgttaatgagctgagtcttattttgaagggtaactatgcttatgaaaggcagttttgcatgcctgtttgtcaaaaaatacagtacaatttattttaaaattgattaattggtgtagaagatcaaatttgtccaggcctttcaaaatggaacacgtctgatttttctttcatggtaattaaaaaaaaatcttactttcttaaaagcctgcacccaagctagtgagctttcaaaccatgctttgttgcctcactgtctcacctgctagaacctctgggtgggcagcgcgggatgtgacgggccgagcgtccaatcggaggcgcggaggaggcgggccccgcggcaagcctggcagag

SEQ ID NO: 13811 - DNA, 663 bp, Homo sapiens
  source 1..663: mol_type = other DNA
cattccaactactgacttttattaaaaagagtactattagatgaaaatagttttcacactattatataaaaagacccattttacttaccctaaggctaagatcaattaacagaacccctgggggcacctcagagttccccatctcagattctgagaatttggtttctgcctctccagccaggcctctcctgccaggacggtggccacagggccatctccctctcctggcgtggccaaggtgactgctacacacgtggggtcgcagaatccctcgagtcacaacgtcttcaacgtctaaacgtattaactcctttaagagggtcacctctgtgtacaggcggcctcctcgtactaagtgtggtggcgttcaaggctccgagacacaggcgcctcccgcgccactccctttcttctccaagaagcctgcccggcactcgagaagtagagccgcgagccttctcccgggggcccagccccccagtaccggcagggatcaccccgggagcacgcgcccggccccgctgaggccaggggctcctcggaggcgcgggaaagccggggaaccagcggccaggctccgccccgcccctgacggcgcttccggatccggcgggtgccggaagtgggcgggcggcggcggctgcgcgcggaggcggtggagga

SEQ ID NO: 13812 - DNA, 493 bp, Homo sapiens
  source 1..493: mol_type = other DNA
tgcctcagcctccagagtagctgggaccactgtagctacagatagaatagagatctttgtctattttgttcacgaagtactgcaagcgccttgagctgtacctggcacatctttgtagtaccaggtactgttctcggtgctggagtcactggaagcatgcttaagcttaagccatttttcaactatcaatcgttacgaagattaaaaggaaaaatatcatttgtatcgcatttagcatcagaaatgctttaataatattcgcctttcaggctggaagactggggcctgacatctctgccacaggaacaaaccagtgagtggctaggaccacctactccgctgttttgcctcggaaaagcctcgccggctgccggcgggctctcttggggcctgcagtcggggttcagccagagggggcgccgggcgtaccgacgaaacgggtcgcgctttaacggcgctgcgcaggcgccactcacgggccggacgtgacgca

SEQ ID NO: 13813 - DNA, 352 bp, Homo sapiens
  source 1..352: mol_type = other DNA
agcacctgccataattacaaatggcaattatggaatgaatcagctgttgtggcgggcgcctgtagtcccagctactcgggaggcttgcagtgagccgagattgcgccactgcagtccgcagtcccgcctgggcgacagagcgagactctcaggcatctgagttatcccgtccgggagggagggacccagggaaggcccaccccacttggttggcgtccactcccggtctgggggacccctccaccgccagcccaggaagtcagcgccgggccctcggggcggagcagggaagagggagcggttggcccggacgctcttccgggtcctgggaggagggcccggacctaagccc

SEQ ID NO: 13814 - DNA, 360 bp, Homo sapiens
  source 1..360: mol_type = other DNA
ttcccctttgccccaagcgcaatgtggagaggcccccaataccggtagtggccgtgaagggcagcatctaagctgcgactggtctactcagagactggaggaagctgggaagagaaagctgcttcccgcttcccccggggggtcactcctgctggacctactccgaccccctagggccgggagtgaaggcgggacttgtgcggttaccagcggaccaatggaccagttatctaccattggtgaacgttagaaagggggccgcttcgaatcggcggcggccagcttggtggcctgggccaatgaacggcctccaacgagcagggccttcaccaatcggcggcctccacgacggggctgggg

SEQ ID NO: 13815 - DNA, 376 bp, Homo sapiens
  source 1..376: mol_type = other DNA
ctcaggtgatacatactttttaaaagaaaagtctcaacatgattttatcagtttttgttagtctattctatttctaaaagaagatggagtttagatattcactaccatttacatattctggtatatagtatagtgcagtgagctgtgattgcaccactgcactccagggatcaaattcattaaagacatctctttgtgatgaaaatcccaagggatttttagttcgtaatgagttaaataggaatcacaacaaaatgttttcggcattctacttctcatagaagttaaatcctctatcttttcaaaggaaggcagactcttgccatggaaagaacatgtttgtcaggcttgggttaaaatcttttgatctgagagc

SEQ ID NO: 13816 - DNA, 488 bp, Homo sapiens
  source 1..488: mol_type = other DNA
aggctggtctcgaatcaagtgatctggcctggccccatggcatatttattaataagtttaaaattgggcaggggtccctcagggctgaaattcaaccttagacttccccaatgggagaaccttcctccgtgagagaggaagggagcagcatgacatctcctggaaacctcccagcagggcttgaggaagattattgtcacctccatattacagatattataataagagaaataactaacattgactgcatgtttactaagcaatatactctaaagttgaaactatgtcacatcctaggacacacagcaagttataagagctggcatttgaacccaggtctttctcagagaggctgagctttctccgtggagtccaggcacctgcactggagaagcggcgcgcatgcgcccggcctccctcccggccccgccccgcgggaagctacccgtccccagccagaggctccttcccggtcggggacttccgga

SEQ ID NO: 13817 - DNA, 477 bp, Homo sapiens
  source 1..477: mol_type = other DNA
ggaattcctgcctgggcaacagttgcactagtgacctttaagcaggtatcttccaattttaaggtttctagactgttcaactcagctaacttgacctctgaatatatgagttatggtgttacaaaaattattagacagttcatttattgacttacctaaaataactgcatggtgaagtttatgaggggccggcagcggtggctcacgcctgtaatcagttccagctaactgcactccagcctgggcgacagagccagacacagaaagcataaaacgctacgtccagcattactgcaggcggaaaccagggcccaggcctggtgaacagccttccggaagacgattccggacccggagacagcctcagggggcagctgacctagggctgcctaaggcggaagtgggagcccctagccgcccgggcggaactacagctcccagaggcccccgcggcgctgcgcacgcgcgctggcgtgg

SEQ ID NO: 13818 - DNA, 558 bp, Homo sapiens
  source 1..558: mol_type = other DNA
ctaaacaaacgtatctttgtaatgaagagctcgtttttgcagcttgcagagtgtgtaaagtgttgtaaaccttgaaattagtcctggactgaaggcacttcccctttcaatggaaagttcccaccttaactggtcacccattgagggacagcacaagaccccggtgctggcgccaacgctgagctgcgccctctcggttaccatggcgaccgcaggcggggcgaggcccccactcgccgcttccccgcctcgctctaagcgctttgcgattggcccgggacgagcggcctggtacccagagggcaccacctcctgctcacgagcaggagtcggggtgcgggcacaccgtttgtgggccggcccggtctatcccggggggctacggcacactccggagccagagggaacgggccgggccccgggggcggtgccggcggcggcggcgggaggcgcagagcccaatgagcgcgcgcaccgccccgggggcggggtctgaggagcgctcccccgcccttgccagcccccgtccctccccccggcgcggggccgcagtgagtg

SEQ ID NO: 13819 - DNA, 623 bp, Homo sapiens
  source 1..623: mol_type = other DNA
ttcccaccttaactggtcacccattgagggacagcacaagaccccggtgctggcgccaacgctgagctgcgccctctcggttaccatggcgaccgcaggcggggcgaggcccccactcgccgcttccccgcctcgctctaagcgctttgcgattggcccgggacgagcggcctggtacccagagggcaccacctcctgctcacgagcaggagtcggggtgcgggcacaccgtttgtgggccggcccggtctatcccggggggctacggcacactccggagccagagggaacgggccgggccccgggggcggtgccggcggcggcggcgggaggcgcagagcccaatgagcgcgcgcaccgccccgggggcggggtctgaggagcgctcccccgcccttgccagcccccgtccctccccccggcgcggggccgcagtgagtgagtggcactggcagcctgtcaatccctcggcccagcggccttccagcccggtccgcggcggctgctggctgggtgcgcggctccggcggcggcggcggcgacttctcccgccctatccatcggctgtccgcccggcgcgcggcccgccggggccctcctccgggctcagcgcccccgccgcc

SEQ ID NO: 13820 - DNA, 862 bp, Homo sapiens
  source 1..862: mol_type = other DNA
gggccggcccggtctatcccggggggctacggcacactccggagccagagggaacgggccgggccccgggggcggtgccggcggcggcggcgggaggcgcagagcccaatgagcgcgcgcaccgccccgggggcggggtctgaggagcgctcccccgcccttgccagcccccgtccctccccccggcgcggggccgcagtgagtgagtggcactggcagcctgtcaatccctcggcccagcggccttccagcccggtccgcggcggctgctggctgggtgcgcggctccggcggcggcggcggcgacttctcccgccctatccatcggctgtccgcccggcgcgcggcccgccggggccctcctccgggctcagcgcccccgccgcctccccgcggcccgcccgcaggcctcctcctccgccgccgcccgccgccgccgccgctgcctcccccggggccgccggggctcggatcccgcctggccgaggcggcggcggcggccgaggagggcagtgcgcaggctggcgcggggggcggcgggcgtcccggcaactcggcgggcgctgaggagcaagttgcgcggggccgcccggcggggcgcgcggcggcgaggaggcggcgcggcggccgcgtgagggcagcgggcgccgccgcctccgcctccgccaccgccgcggagcccggcgcttccgcccgccgcttctcctcagcctcggcggcggcggaagccggagccgggcgcccgtcctcatcgcctcagccgcgggccctgccggccgggccgccccctccccgcgcgggcggggagcgcgcggccgcctccccctccccctccccctccctcgtcgccgccgccgccgcc

SEQ ID NO: 13821 - DNA, 207 bp, Homo sapiens
  source 1..207: mol_type = other DNA
ttagagagatcgtttctgtcccaccaagcccacggaaaggcactggtcctttcattgaccatttactgagcatcgtttgttacaggctggagtgcagcggcgtgatctcggctcacctgggattacaggcgcgcctgtactgcgcaggcgcccgctaccccccggaagcactgtcagtttcggggggcgggaccgggaagcgtttcc

SEQ ID NO: 13822 - DNA, 823 bp, Homo sapiens
  source 1..823: mol_type = other DNA
caccgccgcggagcccggcgcttccgcccgccgcttctcctcagcctcggcggcggcggaagccggagccgggcgcccgtcctcatcgcctcagccgcgggccctgccggccgggccgccccctccccgcgcgggcggggagcgcgcggccgcctccccctccccctccccctccctcgtcgccgccgccgccgccgccgcctcagccttcgcctcagccgccgcccgctcccgcccgcgcgcggcgggatggacgatcaatccaggatgctgcagactctggccggggtgaacctggctggccactcggtgcaggggggcatggccctgccgcctcccccgcacggccacgaaggggcggacggcgacggcaggaagcaggacatcggcgacatcctccagccaggcgggagccgggcccgcggccgagtcgaggcccggggtggcgcccggggctagggccgcagcccccggcggggaactttctccgaaagccggccgcccgccccggcctcggggggacttgcccgcgccccccgaagcgggcgggagtcggcaaagggctcgggacggactcggtgcggcgcggattccgtggcgtccaacctcccgccccgaccccgtgcgggccgcgccgccgggaagtgtaactttctcctccggcggggagtcccggcgccggctcccgcggccgcgggacgacctcgcgatgcgggcggccacccgggcccggcgcggggcgatgggcggttccctggcgggtccgggtgcggacggccaagttctcggagagggagggccgccttgcaaactttgccgagct

SEQ ID NO: 13823 - DNA, 544 bp, Homo sapiens
  source 1..544: mol_type = other DNA
gaaggcgcagagtccgcctttccggactcctgcaaaaacttcttctagatgcttgcctgaggctggccccatcatctaactaatataagagaattgctaggcaactgagctcaccttaggtgagctgggttcagtcctgggggcttccagggatctgcagccgagcggaagaccggtcttgcctgggggcggggaccatcgatgccccaggctctagaggccgtgggctcccgggggcctgaggctggactggggtcgccggcgggctcggggaggcccgggtgggcgcaccggggccctgcctgcggctgacgggtggggaggcggggtgccggccggggcggcggcgcgggctcgggacgccagggctccctctccctcctcccgcccgagccagcctcgggcgccgggcgcctcccccgatcctgaaccagcgccagcgccgggaggcccggagcccggcccgccgccgcggcccgcggagggagccgccgccgccactgccgttgtcgccgccgccgccaggccgcgccccgcccctccg

SEQ ID NO: 13824 - DNA, 302 bp, Homo sapiens
  source 1..302: mol_type = other DNA
ggccgttgtgtagagacagggttttaccatactgcccagactggtctcaaacttctgagcccaagcaattcgcccacctcggcctcccaaagtgcccttgcattccaggaagagatcccaccctgacctaatagaatgagtcagtgttttagaaaagtttgagaaggattggtgtcagttcttctttaaatgttttaggatcttttctttattgagtcaatgtccttgatttcattgtggttagaaaaatactttgtatttttaaaaagactcagtcttgttaagtgtattaagactcgttt

SEQ ID NO: 13825 - DNA, 484 bp, Homo sapiens
  source 1..484: mol_type = other DNA
atgaaagcagctcctagtttatttttattacaaagccagaaaaaggaaaggaaaacgctgggtgaggctcccactcccacccaacggtttgaagactggggtgtccccaagggtctggaaatgcacattttttgttgctctttcaccactgctgaagtacagtgacacgatgtgcaccaagcctggctaagttttaaaaatttaaatggggccgtgatcctcccaaagtgctgggattacaggcggcttgctgccttcagctgccctgccaggagcagctcgggtgcgtggcatgcgcctgagggctgggctgggggcaggccccccagtgctgggggggtcgagggtcctgggctctctcccacccgttcgattccgggagcccctgaaacgcgccccactgcaccgcccttctcccgccagcagggggcgccgaggagagcgcgggctgaaggcagagccgacgccgcttcccggagtcggg

SEQ ID NO: 13826 - DNA, 623 bp, Homo sapiens
  source 1..623: mol_type = other DNA
gctgggtgaggctcccactcccacccaacggtttgaagactggggtgtccccaagggtctggaaatgcacattttttgttgctctttcaccactgctgaagtacagtgacacgatgtgcaccaagcctggctaagttttaaaaatttaaatggggccgtgatcctcccaaagtgctgggattacaggcggcttgctgccttcagctgccctgccaggagcagctcgggtgcgtggcatgcgcctgagggctgggctgggggcaggccccccagtgctgggggggtcgagggtcctgggctctctcccacccgttcgattccgggagcccctgaaacgcgccccactgcaccgcccttctcccgccagcagggggcgccgaggagagcgcgggctgaaggcagagccgacgccgcttcccggagtcgggactccggggtccagaccaaggctgccgctagcccgcggcgaggctctgggacgacaaccgggcgggactcaggaccccgggccctggctagaggtccgccgcgcaacgccaccacccgggttggcgcctgcccggaagcgcgggcgtccagggggcggggccgggaagcgcttccgggggcggggggcgcgggct

SEQ ID NO: 13827 - DNA, 526 bp, Homo sapiens
  source 1..526: mol_type = other DNA
cttaatacaaacttctcccagaggtcttttaagacacaggtggtttaacttcttttcctttcataagctttgggaagcataataaccaatcattccatattcattcatattactgcaaaattactttgaagattgtcagaatgatgttctatttgtccaagaatctcatagtacctcctgtctgtgggaggcagaacggagacctcaccgtgcctggcacagagtaaagatgtgggagcagagagacaggatccgggctcattccccagtgtgcctacctcccagctgtgaagaatgggcaccaaaaccatttttgttgaaaacgataaatcccaggtagggatttacgggcggcgggccgggtgtgctggcagcgcagcatccctgcgggcggggagggcgtctgcagatgagctcggaggccgaggcccgggaggaccgcggatgcagcggctgcgcactggtacgaccagccggccgaccgcccctacaacgagctggttggggggcttgccgcgcgccgatt

SEQ ID NO: 13828 - DNA, 524 bp, Homo sapiens
  source 1..524: mol_type = other DNA
tgggagcaggagacccttgatccacccatctccagagtcctaagctcagttcaaggaggcgtccttgacactgtgccaagctcgctgcagcgtagattactagtatgaagtgaattaatcaaagccactcaggtgtgatggggagaggcgctctgggctgagctgccccgcccgccagcctggggctcagtggggcagtgcccaacgaggcatccagggggaggacccgctgcctgctgctcgcacgcggctgcacgcacagcaacccattccctgagtcaaaggggaagcgctccgcctcgcagcacgcgggagctgcctgagagggcgggccagggagcagagctggccaggctgcccgtgccaagagggggcctgccgaggccgccaaagcgggctgggcgggaggggccaggccagctggggccggagctcgtgtgacatcaccgggcggcccgcctctgtctggggctgaggggaggcccggagcctttctggggcagagaagcgcctgcagccaacca

SEQ ID NO: 13829 - DNA, 297 bp, Homo sapiens
  source 1..297: mol_type = other DNA
gttcaagcagaggggcaccccgcagggtgcccggcagcaggcctgtcctcctgcactgtcccaggctgccagtgctgtcacagagccatgcgtgggagcaggagacccttgatccacccatctccagagtcctaagctcagttcaaggaggcgtccttgacactgtgccaagctcgctgcagcgtagattactagtatgaagtgaattaatcaaagccactcaggtgtgatggggagaggcgctctgggctgagctgccccgcccgccagcctggggctcagtggggcagtgcccaa

SEQ ID NO: 13830 - DNA, 581 bp, Homo sapiens
  source 1..581: mol_type = other DNA
gatttttgggtagaaaatcattacaaaaggttaaatttctcatataagattaattcagccatctctgtgaagaatgccattagactcaacagtgttggcagagagtcagttctctggttgctcagagtcagtctaatttagaaaatgcaacctaccttttaaggaaggatgaaaaggtactaaatgcacctttctttgcatgttagatcccaaatgttttgaatatagtaaacatgttattcctatataattttattttctatgttatcgtagagttatttgcatgacatattagaatcaaacttattaaaactgtttatattttgtggactaaatatactaactaataagatttgtgccttttgagtgtgcaactgtgcattcaggatgaaaacgtagtaacaattttgcccttgttttaattactcttcaacaacatgtgatttttgaaatctgatttaaaaagctgaattttttcatattgccacataaaaatcctaaattacttaaaatatagcattaaataatgctggttatttttatgttgcatatttgggacaaagagctctcttaaatgaaag

SEQ ID NO: 13831 - DNA, 547 bp, Homo sapiens
  source 1..547: mol_type = other DNA
actggtgagatccaacagtgcctcatcaactcccaagtgagtgacacttaagagggggagtggacagatctgtcacacatacggcgtgggggaccccacctaccactggtcctcagcacctggagacttcggtgcacagggccacgcctccgccgccagcagcccagcgggagcgtctgaccagtctcgccctccgagaggagagagaggcggcccaggacggtctgcttagaggctctctcccctgcagagctgggcccaggcatgcggagcaggaactgcagacccgaccgggcaggacaggtgctctcgggctgaggcccacgtgcttcgccttcgccccgcctctaccctcattggttgaagccagattgagaggaaacctgccagctcagttctgaggctccaattgggtggttgttccgccccacctgtaccttggaccgctccgccctaggggcggttccagcgcgggttccgatcccccgtcccccaccccccgccgcccattggctgcgagaggccggtgcgggccgcactcgcaggg

SEQ ID NO: 13832 - DNA, 633 bp, Homo sapiens
  source 1..633: mol_type = other DNA
ctccaagtgagtgacacttaagagggggagtggacagatctgtcacacatacggcgtgggggaccccacctaccactggtcctcagcacctggagacttcggtgcacagggccacgcctccgccgccagcagcccagcgggagcgtctgaccagtctcgccctccgagaggagagagaggcggcccaggacggtctgcttagaggctctctcccctgcagagctgggcccaggcatgcggagcaggaactgcagacccgaccgggcaggacaggtgctctcgggctgaggcccacgtgcttcgccttcgccccgcctctaccctcattggttgaagccagattgagaggaaacctgccagctcagttctgaggctccaattgggtggttgttccgccccacctgtaccttggaccgctccgccctaggggcggttccagcgcgggttccgatcccccgtcccccaccccccgccgcccattggctgcgagaggccggtgcgggccgcactcgcagggcccgtggcggttcaggcgccagagctggccgatcggcgttggccgccgacatgacgcccgaggacccagaggaaacccagccgcttctggggcctcctggcggcaggtgagctccg

SEQ ID NO: 13833 - DNA, 227 bp, Homo sapiens
  source 1..227: mol_type = other DNA
gccaatcccattaagattcgaaaaattgcttaagaagtaatttccaaagggctcgagggaaagtccattgaaacagcagggaagcccttaagccggcagtacaatccctgagcgtgtgtgtatcgcggcgacttctggaagtccggtgtggccgccgcggggcatgtgcgcatgaccggaagtggcgccaatcaggcgcgtccctctggcgctggagccaggacctg

SEQ ID NO: 13834 - DNA, 380 bp, Homo sapiens
  source 1..380: mol_type = other DNA
caccccacctgcctgcaaggatggggaatggtttgaaaacagccctcccccatccctctccgacgtccagcctagatgcggggggagggccacacccagagggatcccccacgttgggacccgcgggtgcacccgagggcaggccgatcactcggagggcttggtcacggactcggggccgcagaccacccggcacgggccgggcggagccggagtctggtgaagtctgaggctctcggactactgttttgataactcggacccctcaggggaccggagccacccttctcaccgcggtgccctgcttgccagccgtcagcctcaggcgcctgcggcgtctctggaaggccgggcagtgacgacagttctcgcgatagccg

SEQ ID NO: 13835 - DNA, 535 bp, Homo sapiens
  source 1..535: mol_type = other DNA
cttcctaaggtacctagtacttgaagccacgagggcacctctggcacaggcgtgactccacggggcagaagtggcaccgacttcacctccggtgcacctcaggtatactggcgagccacagaccctctgcctcttctcgaaacagcacagagcgcgaggcgggccacccgctcctccctcgggtgtgggcagctccgaaactcacaccggggaggcgtggagagagccccgtcgcccgctaacccaggccatggggcgaaacgcccggagacaagccttaccctagggcgtgcgggctcccaagccgcccagaaaggctgaggcttggccggggcggcgcaacaccgggaaggtctctgggaggcagcggctttaagagccccataggggaaaacgcgcggcagggccgagggatgctccatcccgcagccccggccacagcacgcaccgactttgatctcgttggggtcgaacttcggcttgctcctccgagcggctatcgcgagaactgtcgtcactgcccggccttccagag

SEQ ID NO: 13836 - DNA, 337 bp, Homo sapiens
  source 1..337: mol_type = other DNA
cggctatcgcgagaactgtcgtcactgcccggccttccagagacgccgcaggcgcctgaggctgacggctggcaagcagggcaccgcggtgagaagggtggctccggtcccctgaggggtccgagttatcaaaacagtagtccgagagcctcagacttcaccagactccggctccgcccggcccgtgccgggtggtctgcggccccgagtccgtgaccaagccctccgagtgatcggcctgccctcgggtgcacccgcgggtcccaacgtgggggatccctctgggtgtggccctccccccgcatctaggctggacgtcggagagggatgggggagg

SEQ ID NO: 13837 - DNA, 325 bp, Homo sapiens
  source 1..325: mol_type = other DNA
aggggcttgacatacatgaagtcgctggatcggattcacagacactgtgcaggccctgggcaggcagtgagcacctggctctgagtccaggctgcaatccaggctgtacagccagttaataagcatctacttcttcactttatttatttaattttctgagacagagactccctctgtcacccaggctggagtgcagtggcatgatcttgtggctgggattacccaggctggtctcgaactcctgggctcaagtcctacagatgagccaccacacccggcgtgtttcttcactttaaaaagaggtttggtcatgatgtagttgagc

SEQ ID NO: 13838 - DNA, 402 bp, Homo sapiens
  source 1..402: mol_type = other DNA
ggattgagatctggggatcccactggttaacctgactgtctcccctgccgcgacccacccatgcccagccccataggctggtgcctgtcggtcaaactgtaaagtgctctgagcctgaggcaagcccgcctggcactggggcgggggtgccttcgggcccgagccttccccaccccctttgtgcaagggaacttcctgagcgccgaattccggccccgcgattcttttcccgcgcgggcaaggttggggaggggagggggtgacactcaggctggagtcccccagagcacccccagggcggggcggtcccggcgtccaccgcccctgtgccccgcccgccggaggcagcggagggggcggggcatacggggcgggccctgacgcggcgggcgcagggccgcc

SEQ ID NO: 13839 - DNA, 436 bp, Homo sapiens
  source 1..436: mol_type = other DNA
cccctaggaggcctcctcactcagggctccctgcacaaatgcgttgggtgatgggggctgaatccagcccacactgcacttgccaagccagctggggccctggcacaagacagtcccagccggtgtgggaaggcccggtcctcgtaacctcctgcccaggaaactgtgctctcaggagcgcaggagccagctcttctcctgggcactcaccgtactcaggaaatatgttctgaattcaggattatcctcattctccaggctggggtggaggtgccccacccgggagcccgggcgcagcctcaccgcaggctgtcagagggttgcgagggcccaatcggcactgtcatcctgcccaggctctgagtcaccagctggtgaggggcagctgcagcccagcaggtggggcctgaaaccccgcctggctggccttagagga

SEQ ID NO: 13840 - DNA, 357 bp, Homo sapiens
  source 1..357: mol_type = other DNA
atcccagctactcagagaatcgcttcgccattgcagtccagccggggtgacaagagtgtgtagtgccttaagccgctatgatcattccgctgcactccagcctgaccgtgtgccttgtgtcctggggacttgtgcacaagtcaagggaccggaactggcccagttcctgacgagccagtgccggacagtcactcccagttcctctaaggccagccaggcggggtttcaggccccacctgctgggctgcagctgcccctcaccagctggtgactcagagcctgggcaggatgacagtgccgattgggccctcgcaaccctctgacagcctgcggtgaggctgcgcccgggctcccggg

SEQ ID NO: 13841 - DNA, 535 bp, Homo sapiens
  source 1..535: mol_type = other DNA
gctttagtcccacagtatatcgtatcagatttggggcttagaaacttctaaactctgagcgcccataagcaagatgagattctgccttgtacatggtgaacattagctaacggatgctacgctacttggtttttaccggaaaatggagattaaaaataatgcccataggtatgaacaagaactcagtgttggtgaatgcacgaatgcaggtacccagcgacaggggcgctgctagagaggtcggtagcctgtggccagggatcccagcaccgacgggaaagaggaggcctgggtaccctgcgccccgggcgcgcgcggcgcgtgaggtgagggggagggcgcggctccgcaccagccagcggccgcctggcgcccagccgcatctcggggggcggggttgagcctccgggccgcagtgcgattggcggaggcgagtgggtgacgccaacggccggcgcgaggccccgcccccggcttgccccgcccccgcgcgcgccggcggcggggcagcctcgctctggctcgcgccgcgccc

SEQ ID NO: 13842 - DNA, 441 bp, Homo sapiens
  source 1..441: mol_type = other DNA
gtggtcaaggtcagggatcaggtccagctcaggcctggtcccaagtctcaggccttgggggtcctacagtcccttgggtaaccttcaggaccctcaggtgaggtcaccagccttacaaggatctttcacatgcctggttcttggcatggcggccagggccttccggccccttccaggaggaccccgaggcctctgccaactacctcgcggccctggccctgacgttgctaggcaccatcacccccgggaaccaagctttttgagccggagggactacagcggggaaaggacttgccagattttcgccgcaagtcagggggacactgtgacgccgcgctactgaaggcgcctgggttcccggactcggccaccgcctcgccgcttccgcccctcagaagcatggcggccacgtagcccggcggacgccaaacagttggcaac

SEQ ID NO: 13843 - DNA, 373 bp, Homo sapiens
  source 1..373: mol_type = other DNA
cgcgccagctgccccagcaccgccatgcccacgctgtgtcgcgtgccgggcagtccgggattccccaggccagccacctgcgggcggcaccagggcaagaagtttggagccgggaccgggagcccctccccggggggtcagccgctgtccggcgcccaaaaagccgcccggccgttgccaactgtttggcgtccgccgggctacgtggccgccatgcttctgaggggcggaagcggcgaggcggtggccgagtccgggaacccaggcgccttcagtagcgcggcgtcacagtgtccccctgacttgcggcgaaaatctggcaagtcctttccccgctgtagtccctccggctcaaaaagcttggttcccgggg

SEQ ID NO: 13844 - DNA, 408 bp, Homo sapiens
  source 1..408: mol_type = other DNA
gttcccttagctggaggcctagggagcctgcgcgctgaacctcaaacgtctggagtcctttgcaagagaggctgataacatgcaaccacgcactacggctctggttgctattaagatgtggcagtcctgtttaatacacaacggaatgttgatgatcatgtattgaccactttctgaccagacagcagatactattaccatattataaggtatgcacagagtaagtgctcaccaaaagctgttagtgagggcacttttgtcagaaacgctttgcaaggtagttaccgtggccatggaaacgcggcccgccgtcccggattggacggttcgcgggttccccctggaggccaccttctggtcctgctgcggaacgacgggcgggtgcacgccgggagttgcagttcccgg

SEQ ID NO: 13845 - DNA, 238 bp, Homo sapiens
  source 1..238: mol_type = other DNA
tcagtggtgatttagacaaagtcaacacttgataattaagtcaataaataaatatgaagtggccatttcaggcagaaattcggcagggtggctgtcgggtaccagcaggccacacagggccttgtgggttctggcataatcatggtaccgtctttactctcacaaaggaatgtaagcttagggagcccgagggaaggctcctctgctccactggagacacgagggtggccccactttg

SEQ ID NO: 13846 - DNA, 159 bp, Homo sapiens
  source 1..159: mol_type = other DNA
tcggcagggtggctgtcgggtaccagcaggccacacagggccttgtgggttctggcataatcatggtaccgtctttactctcacaaaggaatgtaagcttagggagcccgagggaaggctcctctgctccactggagacacgagggtggccccactttg

SEQ ID NO: 13847 - DNA, 225 bp, Homo sapiens
  source 1..225: mol_type = other DNA
cacagcctctgtctctgagcctgatcagtgatccagtccagattctggggtcctggggcgttctaagacaccccaaggcaggagcctggcccctcccacccagggaagccgagtttcgcgggagcggggcgggggggcgtggcctaccccaggctgcgcggagagctgcccgagcgtccttccctggtctacaggtcagtctccgcccccggagtccggcactga

SEQ ID NO: 13848 - DNA, 225 bp, Homo sapiens; identical to SEQ ID NO: 13847
  source 1..225: mol_type = other DNA

SEQ ID NO: 13849 - DNA, 577 bp, Homo sapiens
  source 1..577: mol_type = other DNA
ggattggcagccctgggtcttgggccccgcccccagccccagcagctgctgacaccctttgcagatgctcatctcggtctgcccacctgagcatgcacacatggcaagtttgtagggcccagtctgggccagcaacaggcaccgattctgtgccaggccctacacccatggctgaacccgatgaagtgggcactgcgagtacccccggttcacagggagggtggaacttgggtctggggggcccagagtccacaggcctgaccacagcactctcccatctgcagctgccagtccctctcctgggtacagaggctgagaagcaactgcctgatggccaggccccctgacagctgttggcaggtccccagcggcccccagcccactgggctccgttcccagagcctgcggcctgctccttagaccttccaggtcccaggggcttgcggtctggcccctgcccctgctgctgaggccaaggaggcggcccacaggggctggggctaggagaggccccagcccccgccccctgcggagagggtggggagggtggagctgggagaggcacctcaactttgat

SEQ ID NO: 13850 - DNA, 844 bp, Homo sapiens
  source 1..844: mol_type = other DNA
cctgcctcccggagagccagaccccagcgatagaaggcccgggcgttgcttgctcgtcgccgctagtgccgccgcgccccctggcggccgtcggttgccatgtcaacggagggccgggggaggcggaggcgggggccgttctctcctcccagggccggaggacgctccctccgcgcctcccgccttcgcctctgtgggggcactccgagccggggaggaaggggctttccgctgcagccgacaaactgaggcacgcggcagggcgcccgcagccaggtgccgagcgcggggccccacctccgaaggcggaggaggggccgcgggcggtgacgcgccgagggcggccggcggacagcgagcgggcgggcggtggcggcggcggcaggtgcggccgcggagaggaggaggggagggcgaggccgggcacctccccctttataagtctcgccccctcgcccggccgccccgggcccgggtccggccagggagctcccaggccgcggctcgggggctgaccccccgcccgccgccccgcgcagcccggcggaggcggcgccgtcggaggaggaggagcagggcactgcggctggccccggatcgggcgccagagcggcagcagcttcggcagcagcggcggcccgggcccatgcagcgggacgcgccaccccgagccccagctccggcgccccggctccccgcgcccccgatcggggccgccgctagtagtggcggcggcggaggcgggggcagcggcggcggcggcggaggcgcctctgcagctccggctccccctggcctctcgggaactacaagtcccagggggcctggcggtgcggggtcggcg

SEQ ID NO: 13851 - DNA, 458 bp, Homo sapiens
  source 1..458: mol_type = other DNA
gaccgagcctcactctgtcaccaggagtgcagtggtctgatctcagctcactgcaacctcaagtgattctctagcctcagcctcccaagtagctgggactagagccactacactcggcctggtgaagtgtgtggccctgggcagctcctctgagcccagagacgccagccctaaggtgggcaggatcccagcgctaccatctggatttctgtcctcatctgcaaaatgggatcagtgagctcaggccctgaaagttcccctcggtgggggctccctgatgcgtcccacccaccagccttggagagggtgggatgggagggtggggtgcttggggagacaagcctagagcctgggccctcccaccccgtggcactccggttggcaggcggcctggcccagccccttctctaaggaagcgcatttcctgcctccctgggccggccgggctggatgagcca

SEQ ID NO: 13852 - DNA, 297 bp, Homo sapiens
  source 1..297: mol_type = other DNA
ccaaagtgttgggattacaaggcgtgagcgtccagtctcttgattatttttatgcagtcattaaactatatacatgcatatgtatagagaaagtttcaatgcttgcttatttcgaaatcaaacaatttctcataaatattttctcccaatggaaactccatcaatcatttgaagggctgccttttatatgctagagcagctgtttagaggtgtccacctcggggcagagactgcgctaagggaggggacgccccggagcgtacgcctgcccctcaccaggatggtgcacgcggaatt

SEQ ID NO: 13853 - DNA, 220 bp, Homo sapiens
  source 1..220: mol_type = other DNA
gccagagaaaatcctgcaaattgcgtgtggaggcgggggcagtggcccaggccccttacttaccttcacactgactcagcctgtggcttggccaagcctgagaagcctgtggagagaaaggcctgggctgcctgcacagggatgggggtccttgctggcagcttccctctggccctggggagcgttgtcaaggtgtctgggcagacgctggccctgcgcc

SEQ ID NO: 13854 - DNA, 400 bp, Homo sapiens
  source 1..400: mol_type = other DNA
agcttagcacagtgagtgctcattatgggagctattaagggctatccacagccttctgaatgtcccgggcaactccaggggagggcgggttccagtcccagaggagctcgaagggtccctcgaggagtcccaggtgggtctcggccagggcctctgggcaggctctgagggcgggcttggggactgtggccagcaaagcccctgagtcgatgcttttgcggaaagagccgctcttctctgagcctcaacagccacctgggggtccacggtgcggggcacacggtgccgggtgcggtgtcgccgcgcacccgggctcgggctcggtcccgccccgcttcccggtccctggccctccctgccttcgggaacgccggctcccggcatgccgcgcgctgacagc

SEQ ID NO: 13855 - DNA, 365 bp, Homo sapiens
  source 1..365: mol_type = other DNA
gccagagtttatttattaataataactattagtagtagcatcatatgaaataagaactgttattcttcccattaattaaatgagaaaaactgaggagtaagaggggccaggctccagtgctcacagccctcaccaccccaggaggggctgaaagggcaaggaccctgccagcgctcaccttgaaggggccagaaaagggtcttctgtgggccacccagcctgtgggacctcaggagggtcagaggagaagcagcctccgcccagccgctaggccagggaccatcttctggccaatcaaggcttgctggagtgtctcccagccaatcagggccttgaggaggatgtatcctccagccaatcagggc

SEQ ID NO: 13856 - DNA, 345 bp, Homo sapiens
  source 1..345: mol_type = other DNA
tggagtgcagcactggcgattctcctgcctcagcctccggagtagctgggacaacccaggctggtttcacagatgaggaaactgaggcggcttgctcgaggccgtctgaccatggccttctcagagcaggatggacccctgggcgccttgaatgccaaggtctcagggcagatggggccaccccaggattctggactcctgtcttttgctctaacggtctgtgagggcaagaacaagccggcagggcctggactagataggagtctgggcctccctgactggcagtgaggggcacgaagccgagctccggatgaggggcgctcccacggggagggggcggggcct

SEQ ID NO: 13857 - DNA, 309 bp, Homo sapiens
  source 1..309: mol_type = other DNA
gtagccagtagtcccgggggctctgggtgacccggcataggggctgagacaggtggacccaggagggccctggagtcaaggcctgacttgttttgtcatttgtaaaaggttaaaattgtccccaccgacagtggactatccccatggcttaggacatacacttgacatgtgggctggccctgccctttggcaggaagcccgtgtccaaggcccagtggttctgatgggatttgaacatcccctgggaaaaggctgacccagcccttgggcccaggacacagaggctcctctaacctggccctacgatgc

SEQ ID NO: 13858 - DNA, 437 bp, Homo sapiens
  source 1..437: mol_type = other DNA
aatggcgtgatctcggctcaccgcaagcccgagtagctgggacctcaggtgatgcacgtgccttaacttaagcagtcccctagcaatggctacttaagaattacaagaaggaacatcttaagttttcccagctctgtgattaacttgaatctgagggtgaaccctaagtttgcccaggtgactacaggggaggccctctgtggggagcccaggtagaaactccactgagtgcaagcacagcgtgctccggaactcagtttcgtggtcaccccgggctgcccagtggggtgaccgaggcgctcaccaggcggcggcacccgggtccgcctcccctttcccttccccgcccgcgccgcccgtgggcggagccacccgcggccccgaggctccgcccacctcccaggcctgggccgggccgtgacggcggcgctaggacc

SEQ ID NO: 13859 - DNA, 360 bp, Homo sapiens
  source 1..360: mol_type = other DNA
gccgtgatccaccgcgcccggcacctgggcccacattggggccccagcccagccccttccccagcaggtcagggctcctctggggggctggtcccttcactgctctggcccaggaaactgaccagtgggagggaaatttctccacccgggtcaaatggcaagttaaattagccattaaatctggcttggggtcagaagtctgacaccagtgtggccaggttgctgtgagctgagatcatgccactgcactccaggcaaaacaggaaggcagagggcagccctgggtggctgctgtgaggagtctagtctggctcaggccttactttcgtcatctgtaaagtgagaaaaaactcagaggag

SEQ ID NO: 13860 - DNA, 576 bp, Homo sapiens
  source 1..576: mol_type = other DNA
ctttctgccaccagcctggcgcttgaaggcagttgcctctgagatcccaagggactgggttcgaatcctggctgtgacaggatgttaacagactcaggtgactgtcacactgacataatcataataaaataatcatattgaaaataactcatgtattcgttgtttatctgaattatgcagcaatgaaatggagacactcaagtccggacagccaggccgccactgcctggtggccccccagcctcgcccaggcaggagcctgctggtcagactccgccccggctctgaagccccgcccccggccctgaggccccgcccctagctggaggcctcgccgccagccattcacgtcccgccccgtcccggccgcgcagagccctccccaggtcgcgcaggccgcgctcgtaggatccgcctgcggcgcgcaggccccgcccccggcgcgcgagtctccgcccctcctcgccggccccggccccggccccgccccctgcctctggccgcgcggatcagcttccagcccagtcggcccggcccgggggccatggagctccgagcggcggatcgcgagcctcc

SEQ ID NO: 13861 - DNA, 529 bp, Homo sapiens
  source 1..529: mol_type = other DNA
tgcagtgagccaggatggcaccactgcactccagcctaggcaacagagagagactctgtctcctttctgccaccagcctggcgcttgaaggcagttgcctctgagatcccaagggactgggttcgaatcctggctgtgacaggatgttaacagactcaggtgactgtcacactgacataatcataataaaataatcatattgaaaataactcatgtattcgttgtttatctgaattatgcagcaatgaaatggagacactcaagtccggacagccaggccgccactgcctggtggccccccagcctcgcccaggcaggagcctgctggtcagactccgccccggctctgaagccccgcccccggccctgaggccccgcccctagctggaggcctcgccgccagccattcacgtcccgccccgtcccggccgcgcagagccctccccaggtcgcgcaggccgcgctcgtaggatccgcctgcggcgcgcaggccccgcccccggcgcgcgagtctccgcccctcctcgcc

SEQ ID NO: 13862 - DNA, 452 bp, Homo sapiens
  source 1..452: mol_type = other DNA
ttccctgaggaacgtggcgtcccagtgagacctggctccagaggaagggccttccaagaccggggaggggcctgtggggtcccggtccgaacccgggaggccgggcgatggtgaggagggcgcctcctctccaccaaatcatgcgggctagggacagaccctcccccgcccaccctaggctggaaagtgaacgttcagtagggcacccggtttccgtgtcggcttcaagcctcacttttcccatctgaaaaatggaacttcgccccgggacgtggccatgaaggccagggagtctgggtccccaactcggtcccattccctagagagattcgggcagatatgcaaagaagaggaggcggttcctgctcgtctccgacgaggtgggcccgagcaggcctggggactacgactcccggcgtgctccgcagtccaaagccggaagagcgtggacc

SEQ ID NO: 13863 - DNA, 325 bp, Homo sapiens
  source 1..325: mol_type = other DNA
aagtgctgggattacaggcgtgccaccgcgcccggcctctgtgaacggatctgaatccaattcccgtgtgccctgaacactgcagtagagacttgcaggcagcagtggttcgaggctctggggcctcctagaccctttgcagagggaaccggagatgtcagaggtcccaagggcctgttcagaccctgaactcctgctgacccggcagctcccgacagcacggccttgtttcccagggaacaatgcatctgtgtcacggacaacaatgtcctttaggcgcactggccccggtgcacgccgggacgtggcacaaagggtgacccgg

SEQ ID NO: 13864 - DNA, 459 bp, Homo sapiens
  source 1..459: mol_type = other DNA
cttgcaggaagggtgtggtcaccctgaccctcctgtcccgacactccagaggaggctcttcctcccctgcagggcttcgagctgggcacgctggccggccccgcctttgcctggctgcgccgctccctgggcctggcggaggaggactatcaggctgccctgggccccggcggcccctacctgcacaagagcaaggccagcttcttcctgtcgtgagcttgcggcagggtggtacccctggctgggagggcagaattcccagtggcgggccctaatctgggagggtcgggtgggagccgctccagccaggcctgggcagcttcttcctgaagacccaggggcgccgagaggtgcaggctctgctcgcccacctgccccgctacgtgcagcacctgcagcggcacccgcactcgctgctggcgcggttgctggcatcgggtcgggatccggaccagccaa

SEQ ID NO: 13865 - DNA, 487 bp, Homo sapiens
  source 1..487: mol_type = other DNA
ggcaggggctccgggcgcgggcgggagcgggggcggcgggccggcggtgaccgcgcgggaggcaagccaggcgctctgcagctgggagcgcgggctcggagacgccggcaagctggcggaaggggcggcttccgggagccccgcccctccgcgccccgcttcgccggccacgcccgggcgcaccgaaggcgagcctgtctaaggacagcccacgcgccacggactacccggatcaatggggtgggcggggtcacccggctccgcctggggccgattcaaactgaggttaattgacccatgggtgggttttggtaatctaactccctaaaccaccaataaaatagctgaatttaacggcttaatagtcgtaatactgacaattgaacgacagaatgattttccaatggagtgctctttagctgagcgacaggaaggccggttttcccggagaaagaggggaagtgggcggatctccgcacacctcggc

SEQ ID NO: 13866 - DNA, 453 bp, Homo sapiens
  source 1..453: mol_type = other DNA
cgcaaagtgcgtagggcccagccccgaccggcccggccgctgccagccagcagcgtaatggctgccgaggtgtgcggagatccgcccacttcccctctttctccgggaaaaccggccttcctgtcgctcagctaaagagcactccattggaaaatcattctgtcgttcaattgtcagtattacgactattaagccgttaaattcagctattttattggtggtttagggagttagattaccaaaacccacccatgggtcaattaacctcagtttgaatcggccccaggcggagccgggtgaccccgcccaccccattgatccgggtagtccgtggcgcgtgggctgtccttagacaggctcgccttcggtgcgcccgggcgtggccggcgaagcggggcgcggaggggcggggctcccggaagccgccccttccgccagcttgccggcgtctcc

SEQ ID NO: 13867 - DNA, 374 bp, Homo sapiens
  source 1..374: mol_type = other DNA
tttttaaaatcaggaccagcctggtcaacatggtgaaggtgcctgtaatcccaggtacttgcgttgagccaagagcgacccactgcgctccagcctggatgacagagcgagactccatctcaatcaatctatctgttagtaaactaagaaacaaatgaccatagattaattcctttttatttatgacagtctgtgacttggtccctgcccccaggcagctcatcttctggagggagacgcagcacaaggaaaaatgtttctagaatgctcttaccagctcagagtggattctgtaagctgagccacctccctgcagaattgccgggcttcatgcaggcaatcagctgcctgtgctgcagtgagaatgcagactg

SEQ ID NO: 13868 - DNA, 493 bp, Homo sapiens
  source 1..493: mol_type = other DNA
tttacatttaaaaagcttctgtattgaacagcaaagttctagctgtggctcctacgtgttgggtctcatgtgaggcctcgactgaccccagattgtcagctcctgggcactctggggctcctaggtgaagggcagaatggcctggaagaggtttcaatgcaatctgcaggttccctggagcaggagccagcagggcagctcccctgtgggatacatgggcccataggggggtccactttccagggtggctaggcacctggctctcggccacctgaactgggcccgtttgcagtggcaatccctgattttttggttgggaatgatttactaaaaggaaggctctgtacctggtacccaggcaggcagaacgcactccaagagttaactgcagggagggagcgcttttttcttttttcaattaagtaaaagggcaggcagctgaggccaggcttgtcttatgcaagtttcccgggaccggcagcatttagggaac

SEQ ID NO: 13869 - DNA, 648 bp, Homo sapiens
  source 1..648: mol_type = other DNA
cccgaagccgtggtccccgctggggactgacactgcgggctcggtcgcggcggagcagcagagccgggactcagagctcccccctcgccccgctgcgagtcccgccccctctcgggcgccgggcggggccatcccggggctgtccgcggagacgcctatgcggtggaggctccgggcttcagctagggcgggggagcccagcagaaggaccgagcagcctggcaccccacttggaaatctcggggtcggcgggccggccgcttcgcgtggcaacacctggtgccgggtcgggtcgtttccggggctttcagtggccggaagtcgcggcgcctgtactgacgtacgtgttacagacggccacgccgccctttaggcggtcaaggtggggcgaggagacgttcgcccccctgcagtcggccgggtcactacccaagagcctttggaggcggaagcatggaacggtctgcaaacgttcccgagcgggcctctgcggctctggcgggcgtttcgaacttgggcgccgggcacacgcccagtcccgagagcgctgagggttcccttagcgtcgccctcaccccggccaacccgcggggcgccagagtcctggccctttaaacgccgcgcgtgcctcggcgtcttcgtttcgcg

SEQ ID NO: 13870 - DNA, 97 bp, Homo sapiens
  source 1..97: mol_type = other DNA
ttttacagatgagaaagctgaggcataaaatgcttaagcaatttgcccaggcccaggcagcatttggcagctgtccaaccagacatgtttgggtatt

SEQ ID NO: 13871 - DNA, 496 bp, Homo sapiens
  source 1..496: mol_type = other DNA
ccatcgctgcctcccgaggatgccagccaggcccccctgctggacaaggctgggaccagccatctcggagttccaagtgacctcaaggataaggccagatccttgcactgtcagtgatgtagcctcagcactcaacccatgtgccctgtgtggggtctcttcccactgcactcacaggagaggaagggtccctcaggggtccactggggtcccctcctgcaaagaggggcaaggggctgtctcaaggcccctggagcacatgcaggtcctggactggggctcctgggagggccatgattctgggctcggaaacagcacatgatctgttggaaggaggcattcgtgtggggaggggaccacagggcacataccccaccctgggatccagctgagcaggggggtcagagatgacagctcttccggctgaggtgcagcactccgggaatgtcttgccaagtgtttccgcaggagttgctggcaattgcctcacattcgg

SEQ ID NO: 13872 - DNA, 430 bp, Homo sapiens
  source 1..430: mol_type = other DNA
ccacctcggcctcccgtagcgctgggatttggagtccagcctgattcccacccacaggttgtatcctctccactggggagaggcaaagaggaaggagacccttcgtgactctcagcgaggctgtggaaacctttgctgggcctgtagtcccagctcctgggaggcagagatcaccccactgcattccagcctggaagacagggccagaggaaaccccgttttcgatttcgccaacgcggaggggccgaagcagcagatgggcttggacggtctcccgccgctcctcccgtactcctgggcttttccaggggcagccccgtggtggccccgcccagcgcccgggagaggggcgaggccgggggcgttccggctggggagcgggagctgcgggattccggcttcaggggcggggcaccggcctctgggcgga

SEQ ID NO: 13873 - DNA, 528 bp, Homo sapiens
  source 1..528: mol_type = other DNA
tccccctcgatgccccgcgggatggctgacccttccgggcggcagacggacctggtctccgagcctccccttcgcgatgcggaggacgcgggacagagggtatgagccgcccaggaccccctcgcacctgctagcgccccgcagccgccccccagcgtgacttgtgcactgggcgggctcgggtggcgcggccggaggcgcctggacctcccgtcccccagagggcgctgccccggccggccccgcccgcatttgggccttacgagcccacaggccccggagtagcagcggggaggccgggagcccgcgggccggagccgcccggccgaggcgtgggggctgcggggccggcccatccgtgggggcggcggctgggtcgtggggctccgcctgcgagctggctgtgtctgcggaggagccgtcccacggagctcaggaccacggtgaccgggttggacgggtgccgatgttattgacacccgggcagctgtgaagctcctcagcagtctctgcgggctgtggctgcgg

SEQ ID NO: 13874 - DNA, 521 bp, Homo sapiens
  source 1..521: mol_type = other DNA
aataaaagaattactacttagtagaagggagcagggctctgttttccggagtgcagtggcgcgatctcagctcactgcagcctctggtcttgatcctccagcctcggcctcccagagtactgagattacaggcggaagcgcccggcccctagggctgaaaagacttggagggggactctccctccacccctccgtgggccctgacggactgtaagaccttggcgcctctcaccgcagccccgcgcggggccccaggatcgcaggaccgcggcggccgcagggatccccctcgatgccccgcgggatggctgacccttccgggcggcagacggacctggtctccgagcctccccttcgcgatgcggaggacgcgggacagagggtatgagccgcccaggaccccctcgcacctgctagcgccccgcagccgccccccagcgtgacttgtgcactgggcgggctcgggtggcgcggccggaggcgcctggacctcccgtcccccagagggcgctgccccggcc

SEQ ID NO: 13875 - DNA, 359 bp, Homo sapiens
  source 1..359: mol_type = other DNA
ccatcctgatgggttggagcaaagacttccactctctagagggccctccaggtgtcagggccttcaaatgtcacttctgcagagagatctatgagggcagaggcctctaggacagggcctggcttctagcaggtacctagtaaatatttgttgaattcatgttccaactttctccttctagaaacaaggaaactgactcatctcggagttctgacctctgaggtcaggaggctgtgacctcagaggaagcccaggcctggtagccccggacggcgcctgcgcacggcggccggcccgcagcgccgcgggctccccctagcggcgtccgggagcggtgctcgctccgatccccgaggggc

SEQ ID NO: 13876 - DNA, 292 bp, Homo sapiens
  source 1..292: mol_type = other DNA
ttggacccacagcccgctgtgaggacgtcctcgcccacctcctgagccctggggtccgaggcccccggatcagggggttcacggagagcgacctctcaggtgcaccgggccaggaactctgacccggaggcgcgcgcacccagaaagccggccccgcccctctcccgaggtgggcggggacagcggttgcgtgcgcagcttttgttgtgacgccacaggtccctctggccacgccgctcattgaccaatgggctttgaacagctgcgcggtgtgccgggatcgcgctgatgt

SEQ ID NO: 13877 - DNA, 562 bp, Homo sapiens
  source 1..562: mol_type = other DNA
ggggattgtgacgtcactacattccactcctacgcgacgtccaagtcgccgctccgcgatgggggaggggaccgcagggccaggacccaggtccttggagacccgagaccaaagaaccccgggtctggagcggggggccccgggagtcacgggcccaaagtcactggggtcctaggtccttggagacgccagcccaaagagcccagggaggtcgagcggggagccccgggagcaccagcccaaagtcacccgggggcgactggcgagggcgggggagcccggacgcgccgtggggagcccagcccggtgtgcctcaggagtggcagagactctggccatggtccgctgggtcggggggccgcgacccggtgccgacgggagggaggcggggttggggccacatcagcgcgatcccggcacaccgcgcagctgttcaaagcccattggtcaatgagcggcgtggccagagggacctgtggcgtcacaacaaaagctgcgcacgcaaccgctgtccccgcccacctcgggagaggggcggggccggctttctgggtgcgcgcgc

SEQ ID NO: 13878 - DNA, 441 bp, Homo sapiens
  source 1..441: mol_type = other DNA
ctatttagtctagatgttcaatatgggattcagattcagattcagtaatctgcaaaccaggtttgggtaccccgacctaggctatgttccagttacccacaggaaacggctccaagccgcccccacgggggcgaggcgcgggcggccttaccgtggcggtaggggttatagagcgccatcgccgcggagccggcggccaacagccctttctgcagcggggaggtggatagcgggccggcgccgtcgctcctagcccggaggggcatttcaggtcagaggagccgggcgccctcaggctccttcccgcctgcgcccagaacccggcgccacttgcctgccgcaggccgctgtaggcccgggagcccgcagagccgacggaggacagggcgcagcagagtcgccatggcagcgggcgtccgcggaggatgggccgctggcctt

SEQ ID NO: 13879 - DNA, 332 bp, Homo sapiens
  source 1..332: mol_type = other DNA
tcaagggcctggcacaggaatctgagcactgggacactgactcggctcagggatttcctgggaagtgacacacaggatcctgcttaaatctgccttacccagtggctccttctcttcgctgccttccatggggcccagcaagaaatatatacacacatacatacaaatatatgtacatataaaatattttttaagagacaggaggctgaagtgcaatggcgccatcatagctcaagcgatcctcttgttctgtccaaaccagactctactgagtcagtttccccctgtgcttccattttagccccgggggcttatagaccccgccaggcccc

SEQ ID NO: 13880 - DNA, 228 bp, Homo sapiens
  source 1..228: mol_type = other DNA
gctccttctcttcgctgccttccatggggcccagcaagaaatatatacacacatacatacaaatatatgtacatataaaatattttttaagagacaggaggctgaagtgcaatggcgccatcatagctcaagcgatcctcttgttctgtccaaaccagactctactgagtcagtttccccctgtgcttccattttagccccgggggcttatagaccccgccaggcccc

SEQ ID NO: 13881 - DNA, 109 bp, Homo sapiens
  source 1..109: mol_type = other DNA
aagcgatcctcttgttctgtccaaaccagactctactgagtcagtttccccctgtgcttccattttagccccgggggcttatagaccccgccaggccccaaggccagcg

SEQ ID NO: 13882 - DNA, 443 bp, Homo sapiens
  source 1..443: mol_type = other DNA
ggttactccgagaatctggccactcacaaatataggttactgatttgtacaccataaaggatttctcgtagtcacctagacaccaggtttatggctgtgtcgcagcaaatgtgacttacgaaccttatattcgactctggtgggactcgcgccacagagccggctgcggaacccggccgccccgctcacctcgcctgaaaccgccctcttagcgagcttgaactcggccggggcccgagagcgtgctccgggatccgggcgctggggacagcagggaggaagggccggggtgaagcccgcctgtctcctcgcggactcgggggtctcctcggctgggtggggccgcgcggcgtggactacaactcccagcgtgccgcgcggcggcgccgcccgaagccgttgcgcgagcagggcgggctggggccgagcggcgtcaggcgcgc

SEQ ID NO: 13883 - DNA, 612 bp, Homo sapiens
  source 1..612: mol_type = other DNA
gattataggcgtgagccactataatagcgcctagcctgtttttgttagtaggaataacagtacttcccagaactcaaaaatctatagaatgttctagcaaacatttattgagcatttactatgtgccgttgactttctagtaggatattataaactgatcggtacttatgaatcatctatttagtctagatgttccaatatgggattcagattcagattcagtaatctgcaaaccaggtttgggtaccccgacctaggctatgttccagttacccacaggaaacggctccaagccgcccccacgggggcgaggcgcgggcggccttaccgtggcggtaggggttatagagcgccatcgccgcggagccggcggccaacagccctttctgcagcggggaggtggatagcgggccggcgccgtcgctcctagcccggaggggcatttcaggtcagaggagccgggcgccctcaggctccttcccgcctgcgcccagaacccggcgccacttgcctgccgcaggccgctgtaggcccgggagcccgcagagccgacggaggacagggcgcagcagagtcgccatggcagcgggcgtccgcggaggatgggccgct

SEQ ID NO: 13884 - DNA, 551 bp, Homo sapiens
  source 1..551: mol_type = other DNA
ctggccaacaaatataggttactgatttgtacaccataaaggatttctcgtagtcacctagacaccaggtttatggctgtgtcgcagcaaatgtgacttacgaaccttatattcgactctggtgggactcgcgccacagagccggctgcggaacccggccgccccgctcacctcgcctgaaaccgccctcttagcgagcttgaactcggccggggcccgagagcgtgctccgggatccgggcgctggggacagcagggaggaagggccggggtgaagcccgcctgtctcctcgcggactcgggggtctcctcggctgggtggggccgcgcggcgtggactacaactcccagcgtgccgcgcggcggcgccgcccgaagccgttgcgcgagcagggcgggctggggccgagcggcgtcaggcgcgctggggctgcgctgcgccgccggctctgtggcttgccggcttcggggaaggtgcggcaggcggtgctgcggcctggcacagcaaggagcgcggcgggcggggccgggcggcgggcggggctggcggg

SEQ ID NO: 13885 - DNA, 71 bp, Homo sapiens
  source 1..71: mol_type = other DNA
tttcgcgagggggagggggagatcagggacaagcagggctccttttccagggagctgcccctgtctcgctc

SEQ ID NO: 13886 - DNA, 200 bp, Homo sapiens
  source 1..200: mol_type = other DNA
ggcagggatgaaagtcaggctccctaacttcctggatagcgagtcgcggagtcatttataattccatcccaccctgggtctctgagcccagtcggtgaaagcagcgccggtgagaagctggatccctgggcaccgcctcttccgtccgcggcacccggagacgcccggaaatttgcgggcgcgccggaagttgaggggag

SEQ ID NO: 13887 - DNA, 482 bp, Homo sapiens
  source 1..482: mol_type = other DNA
tgagggaaagggacctgtctgaggttggtgacagacacccagtgttccctcccagcagggtcctaaggaccccggcggtgctccaggggagccaacatcccgggtcgcagtgagcagctccgtggtgctgtagtgcagtggcgcgatctcggctcactgcaagtagctggggccgggattacaggcgtgagctaccacgcccggcctggctgtgctctcttaaagagcggaccgccgcgggaggacgcgcccagctcagggggactccctctgcgccccccacgctgggtctccggcccacgcgtggcccggctggtctgcggagctagcgccagggccgccagagggcgcccggggcggaggatggggcgggaggtggtggccgagtgggcgccgcccctctgggtctgcggctcaggtcgaagagtcggctgcgtgggccggggaatccggattccgggggttcaacgcccaggggttcc

SEQ ID NO: 13888 - DNA, 306 bp, Homo sapiens
  source 1..306: mol_type = other DNA
ctatcagacgctgcatagtctggtcctgctgacttttggccctgtaacacttcaagggactgcagtgatgatgcttcatagaatatgcagtattctcttgtacctgcatgtggtacctgtgtacctactgcagctgccccaggaggaccgggacctcctttctatcaattattcaacagcaaattcagtatgcagtatactgcttgcaggtgaaacacttgtgtgaccctggtcactgtcaagggactgtggcccagttggtccagattccagggcggcattatgagccacgtgacagacctcccc

SEQ ID NO: 13889 - DNA, 630 bp, Homo sapiens
  source 1..630: mol_type = other DNA
ctgtagtgcagtggcgcgatctcggctcactgcaagtagctggggccgggattacaggcgtgagctaccacgcccggcctggctgtgctctcttaaagagcggaccgccgcgggaggacgcgcccagctcagggggactccctctgcgccccccacgctgggtctccggcccacgcgtggcccggctggtctgcggagctagcgccagggccgccagagggcgcccggggcggaggatggggcgggaggtggtggccgagtgggcgccgcccctctgggtctgcggctcaggtcgaagagtcggctgcgtgggccggggaatccggattccgggggttcaacgcccaggggttccatgagcccctgttctcggacgcccggccggccccgacgcactcgtcccggcccctccgccgtcgcccctccggggtccagccgggcggggctgctccagggtcgcggctggcgcgggtccccgggccctggccctccggtgccccgggccaaggagagaaacgcacaggggtggggagcaggatcccactctgagggtgcactgccccgccctctccgggtctgcctcggccccgcccgggccccaggccccgccccctcccctcggccggcccg

SEQ ID NO: 13890 - DNA, 330 bp, Homo sapiens
  source 1..330: mol_type = other DNA
ccagtagtcccagttactcgggaggctgcggtgagccgagatcgcgccactgcactccagccatgccgaccctttctcctgttgggggaatgcgcagaagccgactccatctccgcataactagccgagggaaccgtacgaaaggccttgaatggggggcgagacccggccaggcccgctggacgcgtagcacgtctccttggtgacgggacgcgtggcccggaagtgggcggcccttctggcggggcggggcatcgacgctaggggctgggcctcgatggcgaaacccaagcggctcccgggggggtttgaactggccacggaagcggg

SEQ ID NO: 13891 - DNA, 561 bp, Homo sapiens
  source 1..561: mol_type = other DNA
gcggtgagccgagatcgcgccactgcactccagccatgccgaccctttctcctgttgggggaatgcgcagaagccgactccatctccgcataactagccgagggaaccgtacgaaaggccttgaatggggggcgagacccggccaggcccgctggacgcgtagcacgtctccttggtgacgggacgcgtggcccggaagtgggcggcccttctggcggggcggggcatcgacgctaggggctgggcctcgatggcgaaacccaagcggctcccgggggggtttgaactggccacggaagcggggaggagccgctgccagagccagactgcatccgccgcggcgtctccatggcactcaacgacttcataaggcggcgtttctgggcgcagccgtgtcgctcctggtgagaggccgccggcaggcgggatccagcgccctccggggcaccgcgggcgagaccgtcgccttcgcacccccggcgcggtcgaccccgcggggccgtcgggtcctgggttccccgccgcgttgcgctccccccttgtcagaacctgggcccccgc

SEQ ID NO: 13892 - DNA, 718 bp, Homo sapiens
  source 1..718: mol_type = other DNA
gcgtagcacgtctccttggtgacgggacgcgtggcccggaagtgggcggcccttctggcggggcggggcatcgacgctaggggctgggcctcgatggcgaaacccaagcggctcccgggggggtttgaactggccacggaagcggggaggagccgctgccagagccagactgcatccgccgcggcgtctccatggcactcaacgacttcataaggcggcgtttctgggcgcagccgtgtcgctcctggtgagaggccgccggcaggcgggatccagcgccctccggggcaccgcgggcgagaccgtcgccttcgcacccccggcgcggtcgaccccgcggggccgtcgggtcctgggttccccgccgcgttgcgctccccccttgtcagaacctgggcccccgccccgcccaccggcgcggggcctctcctcctcccgctaacgggcggtcggccgccctctgccgcccgcgggcagggcggcagaaaccggtaccctcctgcctgctggtgggtggccgtcctccgccgacagaggctctccctcgctctgctgcccgtcggcggcatcgccacgccctccgtaggcagcgctgtcccccgggcaccgtctccggcttgccagggccctcgcccggcgggggggggtcccgcccgccccctcccagcccggcttccctcgcggcggggcgcccggggcccgtgcaacctccgcgcct

SEQ ID NO: 13893 - DNA, 407 bp, Homo sapiens
  source 1..407: mol_type = other DNA
gcgcgtgtagtcccagctacacggggagctgcagtgagagatcgagccactgtactccagcctgggggacagagcaagactctgcaataaccgcaagtctgcaggaaaaaacttgcagctggcttcaaggcactctgcatcaccataacactgctgtgaacattcatggacaagtttttatatatacataggtttcatttctttggcgtattttatatatatatatatatttacctaggagaattgctgggtcaaatggtaattgtttaaccttttgggattgggagcggtggttacctctgcggaacgtgccccgacagccaagccctgcgcgcaggcgcactggtgggagggcgggaacgcgggagcgtcgccggggcgtgcaggcgttaggggcggggctgtgc

SEQ ID NO: 13894 - DNA, 482 bp, Homo sapiens
  source 1..482: mol_type = other DNA
tcataaaattattgcaaagttaattgtgccagaaagaaccttaatgtcttgtttatgaaatagatgtagcctattccactggcgacctgtgagaaagcttttgttgcaggaatgtaagaaattattatttaattagtcgactcgtttttccggccggggcgcgcagcatccccagccagactgccccgcccttctccgcagtcctggaagagctcccagggcggagtggtgcgatgcagacgactgtccgcagggcgggcggtggcggggcgtgaggcgggagcgtctctaccgccagggcgtaggcagtgacctcactgccgctcggccctttccgccgggcggtcgggcggcgagccggcgggagcaccgccccctttgctccgccggcgcgctcccccacccctcgcgcagcgccggggcgcttcccccggcgctcgcgcccgcccgccgcgggagcgcgcgtagccgcttataaaaga

SEQ ID NO: 13895 - DNA, 434 bp, Homo sapiens
  source 1..434: mol_type = other DNA
ttaaaacatttttagaacgacataatatagtatgcaattctttcacattatttagttatttgcttttaatttcgatttaataagcatgtggaatatttttcatcatcattctattgagacagagactgaggagacagcctgttcgaggttctcggatctgctggaagaatcagctgctcagccagatctgcgctcccaggcccagacctcgcgggccggccacggccgcaggctgccgccctctagagcgcgcctactctctctggccgagaagaatcgttacttttctttcttccaggtcttgcaggaggcgctgcgaccaatctggcgccgtcagcctcacattccccgttttccgctcatggcggcgtaggggcggaggtcgcgcctgagtgcgtccgcacgagagggcggaaccgtctccatggcaaccc

SEQ ID NO: 13896 - DNA, 315 bp, Homo sapiens
  source 1..315: mol_type = other DNA
tcccagctactcaggaggctgaggtgggaggatcacctgagcctgggaatactatgtcttgagcctcagagctcccaggctggagtgcagtgttgcgatctcagctcactgcaagcctcgtgagtagctgggactacaggtgcccaccgtcaaccttgtcttaaaaaaaaaaaaaagtctttttttgagacagggtcccgctctgtcgcctaggctggagtgcagtgcttgtatccctttctgaaacaagtgaagaatgaataaatactccattgattgggaaatctttttttcaacattaatctatcccttcaa

SEQ ID NO: 13897 - DNA, 195 bp, Homo sapiens
  source 1..195: mol_type = other DNA
gtcaaccttgtcttaaaaaaaaaaaaaagtctttttttgagacagggtcccgctctgtcgcctaggctggagtgcagtgcttgtatccctttctgaaacaagtgaagaatgaataaatactccattgattgggaaatctttttttcaacattaatctatcccttcaaatatcccttccaggcagggcggaagccg

SEQ ID NO: 13898 - DNA, 269 bp, Homo sapiens
  source 1..269: mol_type = other DNA
atgctcccaggaagctcactggaaggaaaaatgcactctagagcactgatgatgtgctaagagaaaacaagcacaagttgttttatgtggctcacccagcatgtggaggaaaagggactgagacccctgaggtaggactcctcctggccctgggcctacctctaagtttaatggggggaatgactctgggactcctaactcccaagtgttggggctcacagccccgagaagggtaccaccttgagggaggcctccaggtggggagtctc

SEQ ID NO: 13899 - DNA, 368 bp, Homo sapiens
  source 1..368: mol_type = other DNA
acctcctggaggacgctcctccacgaagtgctgacacaacctcctgtaaacgcaggatgccaggacgggctgaatggcccgccatagactaggcagtgacccggctatttcaccaggtgtaaatggcttttctcccgtttttagggtaaagccctaaaaagtgcacgggctgaaccagcaagctcagtctgagtaattgtaatttatcataattttgggtgaggatttactttggagggcagtggcaggatctcggctcactgcaacctcctgagtagctgggattacgctggtctcactaatatctaggaggaggcggccagctccaccggctgcacccggctgggcgacccggcaaccttcagggg

SEQ ID NO: 13900 - DNA, 505 bp, Homo sapiens
  source 1..505: mol_type = other DNA
gtaatttatcataattttgggtgaggatttactttggagggcagtggcaggatctcggctcactgcaacctcctgagtagctgggattacgctggtctcactaatatctaggaggaggcggccagctccaccggctgcacccggctgggcgacccggcaaccttcagggggcgctccctaactggccggctcccgcgggcgcgcggcggggaaggccagaggacctgggcgcgggcgatgtgcctcctgagcgtccaaaccgggggtgaggcgcggtcacgcccagcgggaaccgcaggcgccgaagcccgggtactgggcccagaatcccgcggaattttggatccgagggaggcgctggggcgcgggacctcgggcgtggggtcccgggcgctggatcggcgcggacgggaggcggcgctggtcccgcgggccagcgggtctcgggagggggcgcccgatcccgcgtctccggcgccgcttcccgggaagtttcaagtttgaa

SEQ ID NO: 13901 - DNA, 701 bp, Homo sapiens
  source 1..701: mol_type = other DNA
ccgcattacttgaaaagtattatttaaacaaaatgctttggccttagtggttcagaactttttggggctgcgtgccatgcgctgctgaaactggcacttaacgctcagtatgattcttgcgggcgctgggcaccgcggtaacctttatcatttcataacagaaacgggttcagttggactaaaacccaggaatggccctgcgcgcggattacacagcctggggcttcgcacacgagcccgagtttgagtccgatcggcagttccccatctggcatccagaatggggtgccccctgctttctccacgaagtggaaggcgccgagaggccgggcggaattcggggcccccatacgaggccgggcctgcactttcggggtggtgggcgccccgctcccggtgccccgcggagcagggaagccgctcgctcaccacgtgacgcgccggccgggggcacccgcgcctccgtgcgacgccccgcccaccggcctgccgcgcgccagtgtcctgggtcgggccggagagggggggggaggggacgcggcgcggggggcggccgtgcgtcgccgcgcgccttcctcccacctctcggggccctgtgtctccgcgccgcgactccgccccctcatcccgccgcccaggccaatggcgccgcggcgcgagcctccccggccggaggcggagcatccgcgcggggcctggcg

SEQ ID NO: 13902 - DNA, 344 bp, Homo sapiens
  source 1..344: mol_type = other DNA
atcacatgggatgggaagtcgattccccaaccaaaaaaaggatgcctccggtgaggaaagtccgcctgtaggtggtggctcaacaccttaggaggaagacactattaccttgagactggatcttcgaagcgcccagggagctacgcgcatgcgcgaggctgcgagggcgcagcggagcgcgggggaggtgcgcgcgcgctccggcgcttttgagggagttaccagctgcgcgcgcgccggccccaccctcagcctcttcaggcacctgttggcttgagggtccattcggccgcagatgccatccaataggcagccagtccccgggcggcggcgttcccctccct

SEQ ID NO: 13903 - DNA, 406 bp, Homo sapiens
  source 1..406: mol_type = other DNA
gctgagggccattgcccgccagcctgaaatgtaggggccgaggtcgccgcccaatttcccatttggaagctcggttgacacgcgagtgtgagccacccgtggagaacgctgttcaacagggcgctggatggagggggctggcgcccagttgggctcaggtgaaccgcagcgccagggcgggcaccgatcctagggtcccacgaacaggcccctcggaggccagggagagccctgaatgacgcgggtggcctggggggggcatcccgcggcttcctccaccggcgtaacgtgccgggcccggggaaaggagccgcccgccggtccccggaaccttctgccgccgccgcccgcgttagccgcgggacgggtcgggggaacccgatcgctggctaaggggcggccccgg

SEQ ID NO: 13904 - DNA, 71 bp, Homo sapiens
  source 1..71: mol_type = other DNA
ccaggctgctgggctcaagcctcagcctcgacaacctagttcttggctgagggccattgcccgccagcctg

SEQ ID NO: 13905 - DNA, 315 bp, Homo sapiens
  source 1..315: mol_type = other DNA
ctgttctaatttttacatcttttgtaaagaaggtaagctgggattacaggcgcctgccacccccaaagcactggaatttacagggatgagccactgctggtatagtttttataaaaaaaaaaaaagttgggccgacagtttagcaggggaggccgagactcctgtaacaatcatgcagtagttaattacagggcccgcagggtcggcggcgctggggctcccggcccgcgattgccacgcccacccccgctcaacccggccggccgtagcctcccgccggaggcttttgcgcagagccccgcgtccctggggggc

SEQ ID NO: 13906 - DNA, 275 bp, Homo sapiens
  source 1..275: mol_type = other DNA
aaagtgtaatactctgtgttccagccagcagccagcatcagccgtctgcatctgcttgaacctgcagtgagccgagatcacgccattgcactcgagtctgggcgacctagggccagctggggccctgtgcactaggagctcactctccgagccgagctccctgcgcaggcgcagaggagagagtgtctcccaccccacgaccagcagggggcctgcgaggcgggtgcggagccgaggcgacgatgccacgcccctcataccggcgtcttaaatgc

SEQ ID NO: 13907 - DNA, 249 bp, Homo sapiens
  source 1..249: mol_type = other DNA
gcttgattgctgtcccagcttcttgccaggagctaggcgtggtgctgcgcacctgtggttccagctgggaggatcccttgagcccaggagctcaagcctgcagtgagctagaattgctccactgcccctgtctcaaaaaaaattatttttaaacaagtgaactactcagaggtctgagtgttgtatttcccaactcagaggggtacccctgcagcccgtcgggcgcccaggccacgcccctgggcgata

SEQ ID NO: 13908 - DNA, 351 bp, Homo sapiens
  source 1..351: mol_type = other DNA
tgttccagccagcagccagcatcagccgtctgcatctgcttgaacctgcagtgagccgagatcacgccattgcactcgagtctgggcgacctagggccagctggggccctgtgcactaggagctcactctccgagccgagctccctgcgcaggcgcagaggagagagtgtctcccaccccacgaccagcagggggcctgcgaggcgggtgcggagccgaggcgacgatgccacgcccctcataccggcgtcttaaatgcgagaaaggacgccggggacacccggttgggctctgctgctcccaagagccctgtgccctcgttggatcccgcgacgcggctcctttaagagc

SEQ ID NO: 13909 - DNA, 567 bp, Homo sapiens
  source 1..567: mol_type = other DNA
agctcagtttgctgggtatccagctcacctagggctgcaccaggcctggaggactgggacagggtctgggttcttagattccggaccggagcctagccggggatcctgcccccaagtcagggcactgcccccatcgcacaggggtgcctgggagggggctcgcgcgccgcggagccggcgagaaggtggtgccccggagactccgggcactggggagcccagaggtaggccgaacaccgcgggaggtccccagggggccggcccggagacagagccccagatgccccgggcgccccgggccgggcagctggccgagggcgtggggtttcgagaggtgacagctcgcgcccctttcccacctgggctcgccgcgcccggccgcccggcaggcagccccaggccccggccgctccgtcccgccgccggccgcagcgctgctccggcgcctccgccccggaagtgacgtcaccgccgggcgcgaacgcggcggccagggcgtcgccatctctcgcctccgcgctagcgccctgctgcttcggggcggaagtagcggagccgggctcggcc

SEQ ID NO: 13910 - DNA, 511 bp, Homo sapiens
  source 1..511: mol_type = other DNA
gacctcggttcaccccgctgggagctcagtttgctgggtatccagctcacctagggctgcaccaggcctggaggactgggacagggtctgggttcttagattccggaccggagcctagccggggatcctgcccccaagtcagggcactgcccccatcgcacaggggtgcctgggagggggctcgcgcgccgcggagccggcgagaaggtggtgccccggagactccgggcactggggagcccagaggtaggccgaacaccgcgggaggtccccagggggccggcccggagacagagccccagatgccccgggcgccccgggccgggcagctggccgagggcgtggggtttcgagaggtgacagctcgcgcccctttcccacctgggctcgccgcgcccggccgcccggcaggcagccccaggccccggccgctccgtcccgccgccggccgcagcgctgctccggcgcctccgccccggaagtgacgtcaccgccgggcgcgaacgcggcg

SEQ ID NO: 13911 - DNA, 283 bp, Homo sapiens
  source 1..283: mol_type = other DNA
taacctaaggtatcttagaagtcacgcagagttggagtctggggacccaattccaaccccagatctcgtggggcgagcagcacgcgcagttgattcccgcgggcgccagcctcggcacctgaccttggggaagtggcgctccgacacagtgtccctttaagggggccgagcccggctccgctacttccgccccgaagcagcagggcgctagcgcggaggcgagagatggcgacgccctggccgccgcgttcgcgcccggcggtgacgtcacttccggggcgga

SEQ ID NO: 13912 - DNA, 249 bp, Homo sapiens
  source 1..249: mol_type = other DNA
tcttacagcctgtctgtctgccaggttgtctgctccaaagggaagaggtccttgggaacttcgggctcccccagttccgcaggaggcggctgacctcggttcaccccgctgggagctcagtttgctgggtatccagctcacctagggctgcaccaggcctggaggactgggacagggtctgggttcttagattccggaccggagcctagccggggatcctgcccccaagtcagggcactgcccccatcg

SEQ ID NO: 13913 - DNA, 373 bp, Homo sapiens
  source 1..373: mol_type = other DNA
catttggtgaacaacttgttcaccagttggtaggcacttactcagcgccaggcctggtgccaagctctttatcagctgcgaaaacagtctgcttcactgagtctctctacaagccttctgtgggggctcccaggggaatggctggcccagtccgaggggacctcttactgctcccccctgccccccggacggcctggaccaagcagcagctctcgaggccaaggctcttgagggctgagcagtgtccccatgcacaccagttttcagagccagcgagtggccctgccagctgctgagcagggcaggagtgagtgccgtggcatgatctcggctcactgcaacgagtaactgggaccgagtctcgctctgttgg

SEQ ID NO: 13914 - DNA, 374 bp, Homo sapiens
  source 1..374: mol_type = other DNA
gtctcgctctgttggttctcctgcctcagcctcgcgagcagctgggactacaggtgccccaccgcgcgcgcctctccaaagtgctgggattacaggcccgagccgccgcacccggcctgcaggtgttgttctgacccccagcccgacttgagatgccaagtatcttgggcctgagggtgggtaacaggaagcatctctctctcaatcctcccaggaccgagagggtttcacccattacctggagaaggggggtgccgcacatcccccagattctatccagattgaggcctcaagcggcgcctggactgggactcagcccagctgcttggcctgcccggcacctggtaagcagggaagggttaagtcctcccagg

SEQ ID NO: 13915 - DNA, 409 bp, Homo sapiens
  source 1..409: mol_type = other DNA
acttgggactccccaccccctagggagagggacaaatggtccgggcccctgtggctcactttgtgcccaccccagtgcagagaggtgcgtgcttgctcgactacccagcgtccaagaggttgccctcggggtcatctgagggcagaagcagcatgttttcctgcaggctgatccagatcaccctgtttccctagccactgctcaatgttgggcggccctttttcttatgaaaagggaaaaccagtggactggcacaggacagagggcttctgcctgatcctgcaaagacctcgggaggggaggcccttcctaaggcttgccaaggccaccctggaaggaggagggcccatgtcccttcctgctctggggagggggtgtctctgccaggggccctggtcctcatccatgg

SEQ ID NO: 13916 - DNA, 434 bp, Homo sapiens
  source 1..434: mol_type = other DNA
gaagcagcatgttttcctgcaggctgatccagatcaccctgtttccctagccactgctcaatgttgggcggccctttttcttatgaaaagggaaaaccagtggactggcacaggacagagggcttctgcctgatcctgcaaagacctcgggaggggaggcccttcctaaggcttgccaaggccaccctggaaggaggagggcccatgtcccttcctgctctggggagggggtgtctctgccaggggccctggtcctcatccatgggaggcctctggcaccacctggagcccggacgacagtcccctggaggctgggaacagtgaccctgcaggctccagcaggctctcgcagggcaggagccctcgcccctcccgggtgaagctgtgggctgtaaacaccagtgccttgctcagcctcctggttgcaacaggga

SEQ ID NO: 13917 - DNA, 520 bp, Homo sapiens
  source 1..520: mol_type = other DNA
gcctcaccaggggtgaagcagcggagaaggacttccaggacttcgatcagccaagcccaagatgacacaagtgttggttggcactgggcgagtgatgccgagcgccagccactgccatgccagtggctgccaccacaatggaacgggttcccagcagtctggcaccgctttccctgctgtagcagccggtcccacttgtattggagcctgcactgcgagggccaccaccgatccactcagcggagccccaggccccggggccggagatgggcactctcgggtcatagacctggggcttcacggaggccggggcgactacggacgccctagacttcgggcccctcagccttctccctccgttctccagcagcgaggagggaactccaccgcaggtcacttctgcggcctgggagctggcgcccggccaccccccacagccatcttggcaccgccccgcggcaacgtcacgtgacgaaatccccgcccacgctccgggtccgggggcgagcggtcacgtggg

SEQ ID NO: 13918 - DNA, 488 bp, Homo sapiens
  source 1..488: mol_type = other DNA
ccactgccatgccagtggctgccaccacaatggaacgggttcccagcagtctggcaccgctttccctgctgtagcagccggtcccacttgtattggagcctgcactgcgagggccaccaccgatccactcagcggagccccaggccccggggccggagatgggcactctcgggtcatagacctggggcttcacggaggccggggcgactacggacgccctagacttcgggcccctcagccttctccctccgttctccagcagcgaggagggaactccaccgcaggtcacttctgcggcctgggagctggcgcccggccaccccccacagccatcttggcaccgccccgcggcaacgtcacgtgacgaaatccccgcccacgctccgggtccgggggcgagcggtcacgtgggcgagcgggcgcgcgaagatggcggcggccgccggcgggccgtgggccaaccccggctggatggacgggcaccgaga

SEQ ID NO: 13919 - DNA, 354 bp, Homo sapiens
  source 1..354: mol_type = other DNA
ggttcaagtgattctcctgagtagctggccctaggggatccgcccgcttcggcctcccaaagtgctaggattacaggcctatgcctggccgagtctgattattaataaaactgcatttgggccagcttggacaatatggtgaacagagtgagactccgttcgcctgtaatcccagcacctgtaattccagctactcgggaggctgaggctcgagaatcacttgaacctgggaggcggaggttgcagtcagccaagttggtgccactgcactccagcctgggtgatagagtgagactctgtctcaaaaaaaaaaaaaaatactgcatttgtataattaccttgttcttttccaga

SEQ ID NO: 13920 - DNA, 463 bp, Homo sapiens
  source 1..463: mol_type = other DNA
ctactcagtcacttagtgactttgggagactgaggcaggcagattgcctgggctgcagtgagccgagatcgcgccactgcactccagcctggcagagcaagactaaaaaaaagtattgcatatttcaaaattgctaaaagagtacatttgaaatgttctaacgtgaggtgatggatatgtcaattaacttgatttcatcattccacaatttcattgtaggccgtaaatatatatttatcaattaaaacttttgaaaagcattggtaagacaaataatatgtaattatcacatgtgttccagttttaataattttagtaaaaggaaaaaaagaggggcccaatccgcggcggcaggcgcatgggggcagcagcgagcactgcccagcagcgagccctgcccagcacaacctgctctggccgcgccaaggcctcgcggcaccgccccgcccctctggctccgacc

SEQ ID NO: 13921 - DNA, 438 bp, Homo sapiens
  source 1..438: mol_type = other DNA
gagtgcaatgggtggatctcagctcactgcaacctctgcgttcaagagattctcccaggttggccaggctggtctcgaactcctgacgctaggattacaggcgtgagccaccgcgcccggcctcatccctatttgaggggtaagctctagagagcaggtcggcctgatctcaatcctggtatttagtgtaagacccagataggtggccagaactgaagaccccttgactccagctctcagagagacactgtctagcggcgagacctggctcagcctgctttggcgtactccaagaaagctcgcgcttcaaccgcactaggaagcttggtcacatgacccgcctaattggccagaggctgcggcggccctgagagactcagcgatgctcgagggtgggggcttggcgctaggccacgcccccgggcggccggtttggtt

SEQ ID NO: 13922 - DNA, 432 bp, Homo sapiens
  source 1..432: mol_type = other DNA
aggggtaagctctagagagcaggtcggcctgatctcaatcctggtatttagtgtaagacccagataggtggccagaactgaagaccccttgactccagctctcagagagacactgtctagcggcgagacctggctcagcctgctttggcgtactccaagaaagctcgcgcttcaaccgcactaggaagcttggtcacatgacccgcctaattggccagaggctgcggcggccctgagagactcagcgatgctcgagggtgggggcttggcgctaggccacgcccccgggcggccggtttggttgcgcagccgccggggaaggagacgctgcccttccgcagcgatggcatcccgggtgagtatcggccccggccgagcccccaaggcgggcgggcagcgcggcagggccgggacttgagtgtccgggcccaa

SEQ ID NO: 13923 - DNA, 384 bp, Homo sapiens
  source 1..384: mol_type = other DNA
gtgactgaatcaataaatctttattaaatgaatgaaaggaggaaggagtccttaactgtagctaagcttccactcttaagtatcaattaagcttgtttagggcgcctactgcgcgccccgccccacacacttttgacaaaaagtggggcagagggaaataagccccctctgctctctggtctgtaactgaaagctcttcgagcacgcgctatcggacgcgcaggtccccaagacccccacaagctgaggcagcctcaccttcttacctgcgctcgccccagattgggcgccagctggggcggctcgttggctcccaggggccccgctctctgattcgccgctcgggccagcccccacggcctgcacgctgaatggctgcgccgc

SEQ ID NO: 13924 - DNA, 425 bp, Homo sapiens
  source 1..425: mol_type = other DNA
ctacccgaccccggcccggcctggccccgccggccttacctggcggcggctgccgctcgccctcagccatcttgctccggccaggagccgacccggatgcgcgaagacggccgccatgtcggtgcggggcgctcagggagcaagcctattaacggccggcgcgcggcggacgcgcggaaccgggcgacggccatgtcagtgcggggcgcgcggggcgcatgcgcgccaacggccgccaagcgctaggaccgctcacggccgcccgaacgtcgggcgccgcgactgccacgattgtggacagttgtgttttcctatcactctaagagttaggctggggagagacagctggacggtgacctcctccttcctccttcccgcccccgactcgcagccagcctactgcgacccgctaccgggcgacgccc

SEQ ID NO: 13925 - DNA, 484 bp, Homo sapiens
  source 1..484: mol_type = other DNA
gaccatggggctgccacctgccagttctccccaccccatcagctggaggccgggtcgaacagcggccgcaggacgcggtctccgttcccggacgcaaccgcacggcccgcccaggccgtccagggccctcaggcccgggatccgccgcactcaccacggtcctggcagcgaaggctaacatcttcgctgcccgtccgcggacacgcagtccacacaccgggcaaagtccgcgccgccgccgccgcggctggggtcggtgggtccttgccttcgggccaaggtcgctgagttacagccgccagccggtagaggcagccccgcgcccaccctctgggccgagcgggctgcgggaaggcacccggggaggaggactcgcgaggcggggcctgggccggtagcgggccccgggcgggcaacggtgcccgggaggtgggcgtcgcccggtagcgggtcgcagtaggctggctgcgagtcgggggcggga

SEQ ID NO: 13926 - DNA, 620 bp, Homo sapiens
  source 1..620: mol_type = other DNA
gcaaccgcacggcccgcccaggccgtccagggccctcaggcccgggatccgccgcactcaccacggtcctggcagcgaaggctaacatcttcgctgcccgtccgcggacacgcagtccacacaccgggcaaagtccgcgccgccgccgccgcggctggggtcggtgggtccttgccttcgggccaaggtcgctgagttacagccgccagccggtagaggcagccccgcgcccaccctctgggccgagcgggctgcgggaaggcacccggggaggaggactcgcgaggcggggcctgggccggtagcgggccccgggcgggcaacggtgcccgggaggtgggcgtcgcccggtagcgggtcgcagtaggctggctgcgagtcgggggcgggaaggaggaaggaggaggtcaccgtccagctgtctctccccagcctaactcttagagtgataggaaaacacaactgtccacaatcgtggcagtcgcggcgcccgacgttcgggcggccgtgagcggtcctagcgcttggcggccgttggcgcgcatgcgccccgcgcgccccgcactgacatggccgtcgcccggttccgcgcgtccgccgcgcgccggccgttaataggc

SEQ ID NO: 13927 - DNA, 477 bp, Homo sapiens
  source 1..477: mol_type = other DNA
gtcgctgagttacagccgccagccggtagaggcagccccgcgcccaccctctgggccgagcgggctgcgggaaggcacccggggaggaggactcgcgaggcggggcctgggccggtagcgggccccgggcgggcaacggtgcccgggaggtgggcgtcgcccggtagcgggtcgcagtaggctggctgcgagtcgggggcgggaaggaggaaggaggaggtcaccgtccagctgtctctccccagcctaactcttagagtgataggaaaacacaactgtccacaatcgtggcagtcgcggcgcccgacgttcgggcggccgtgagcggtcctagcgcttggcggccgttggcgcgcatgcgccccgcgcgccccgcactgacatggccgtcgcccggttccgcgcgtccgccgcgcgccggccgttaataggcttgctccctgagcgccccgcaccgacatggcggccgtcttcgcg

SEQ ID NO: 13928 - DNA, 440 bp, Homo sapiens
  source 1..440: mol_type = other DNA
cccggcggctggccaggcctctgggtccctgtcggtattctaactaggaggcatgccaggcctggcctccaggatttttgttggtataaacaccccaaaagcttttccaaagtttgggacccaggcatggtgttcaacagtagaccctcccaggagccggggtggctgcagcaagggcccatcttgccacgtggccgctggttgctgtcctagctcactggggacctggggagatcaggcagccctttcagggtctcatgccaagactgccctgatacccgtgggcatcctaggtgagggaccccaccttgcagggcctctacagcctctgtaaatgcagccctggcgcctttaagagcccagggcaggcaggaaaagaatttcagtttcaatctggcttctgacaggaaggcgctgtgcagagcctccccacccccgcc

SEQ ID NO: 13929 - DNA, 354 bp, Homo sapiens
  source 1..354: mol_type = other DNA
gtgaaactggttacacagctccatgctccctgagctttcctgggcctggaagtgtgcacagggctggagcctgcagccccggcccctgtaggctcggggtgcctggctgccctcctggaggagaacaaggcccccagggaccagagtgggctttgtcaaatgacaggttttttttgacttaaatcttaaaagttttgtcagggtcaccaggtggcagcccatggctctctagaaaagtagattcagcctctttgcagagtcttccttctgcagcatgggtctggggtacagagccctgttcccctgtaaaggcgtccctctgacgaacttcatgctggctgcagaatctttctc

SEQ ID NO: 13930 - DNA, 421 bp, Homo sapiens
  source 1..421: mol_type = other DNA
gggctgcttaacagatgaccagagcctaggcagctccgaagtgtattcctcccaggctgcaggctggcagtccgagatcagggtgctggcatggtcaggttcccgtgagggccctcctctggcctcttgcggtatccgcacaaggaggaaggggcaagacaaaaccaggctggagtgcagtggcatgatctcgtcactgctggccaggctggtctcaaggccacccacctcccaaagtgctgggattacgggcgtgagtcacagcgcccggcctcgggcctcttttataagggcggtgagctgaatgagccgcctgcagaatggcaatcggcccgtggggcagctgccatccctggagccccacttggggctggcctgcatctacaccaccaggctcctgcctggagccagcgccgtcgtg

SEQ ID NO: 13931 - DNA, 166 bp, Homo sapiens
  source 1..166: mol_type = other DNA
cggtgtcccagctactttgcactccagcctgggtgacagagtgagactccatctcacttttattaggttttactatatgttgaatatttccaggttaaaattcctccaggcttaagcaggggtgaagggtgaatggcactgcccatgagtttaaagaccagggaga

SEQ ID NO: 13932 - DNA, 500 bp, Homo sapiens
  source 1..500: mol_type = other DNA
caggctgattgcgaactcctgagctcaggcaagagacagagtctcaaatgatctgtgtcagcatgagctcatgtttagcttaatataagtacagatggttacctatagaaatatttatagatatgtgtgtgtttcatagtatacacacacatttctttgtcagctgagactgcctgaaagaaatgacatcttggattattattattattattttaggctggagtgcagtggcatgatctcagctcactgcaacccaagtagctgggaccatgcatggcaaattttggtttggggtggaagttctacttccagagccacccagcctaagcctcccagatctggaaagggtaggcctggctgccctggtcagagtcccagtgccccaggtggctgcggccagggcatccagggcacaatagcccaggcctcagtgcccactgctactcagatgcccaggggtgacaccaggcagggatgatgggctctacagcctgcctgta

SEQ ID NO: 13933 - DNA, 556 bp, Homo sapiens
  source 1..556: mol_type = other DNA
gacagagtgagaccctgtctcgagaccagcctgagcgcctgtaatcccagctactcgggaggctgaggcaggagaatcgctcgtgccattgcactccagcctggggctagcagccgtcctggccaggtgctccccgggacggaggggacgtgcgagtaccctggtcctcatcattccccgggtggtgacagaggtggcccagcccctcttcagggaaggcgagggccagcccgaaccggaaggctctcaggggcgcccagggccagtggggcagcggcagggccgagcacgaccggcggaactcggacggcgcccagcggtcgcgggcgggatcgcagggcgaagccgagccgggccgggccctggcaggaaggggcggacccgcctgagtctcggatctggcttgctccgctggggccgcccactggacatcgcccgagtcggcctggcggtcgtgccccaggacgcgccgaggtcctccgagcccgcagggggcgctgtcgccatatggcccaccctgagtcggcgcgggcaggaagtacgagggtcacttccg

SEQ ID NO: 13934 - DNA, 474 bp, Homo sapiens
  source 1..474: mol_type = other DNA
ggcttgttttgctcatttcagtgggaatcccatggcactgccgagactgcagcctctcccaaaagtcaatttagtcaagttaagcctcgcttgaggccaggagttcaagatcagcctgagcaacagggtgagaccccgtctctaattttttttttttaaagaagtcaaattaggcccccacttcggacagaggcgggcggatcacttgaagtcaggagttcgagaccagcctggcttagctgggtgtggtagctcacgcctgtagtcccaggtactctggagaatcgctggaacctaggcagaggttgcggtgagccgagatcgcgccactgcactccagcctgcttgactatctcaaaaaaaaaaaaaaaaaaatttaaattatttttcaaaagaagttaagttaaatctgagcgagggggtggagccagccatgggcccgcccctaaacgcctgacgttggcggacaaaggc

SEQ ID NO: 13935 - DNA, 333 bp, Homo sapiens
  source 1..333: mol_type = other DNA
gccctctgtatactctggtcacccagataaactaggagagggctccttcagcctgccatggcaaagtcatgccattgtggctggggcgcatggcgtggttctcatgcccaccacctaccctgaccctgcggaggtgggcaggaggcagcgataatcaccacgtgcagaggtcccagctttgaaacagatttgaaagtgtgggctccagagccagggactgggtccgggacacccggagactctctgcttcttggcttcacaggagaagggggccctgctgccgctgccgtggggcggggcgtgggcggtgctggctgcaggaaggctctcccc

SEQ ID NO: 13936 - DNA, 421 bp, Homo sapiens
  source 1..421: mol_type = other DNA
aaaataaaaataaataataataataaataataaataaaaataatggtcttttccaatcttttctgtgctttcattgaaaaacaaaactgaaacaagagcggtctgcctctctcagcgcctgcctctccgcttggttttccttggggaagggcctggggcctgcgtacaccccaggagcctgaggatgcgctgcctcacagagctctgtcggccagcgcgggcgggcggggctggggggctcgtcgccttcgtctctgggccgccccctccacctgcggaggcgattgtaaagggaaggggggaatccctctgccatcacctcccacctcccactccctaaaaagtgggtggggagggtgaagggaggacaccccttccccgcccccagcgccagcagccggggtgggggcgggcgaggcgc

SEQ ID NO: 13937 - DNA, 307 bp, Homo sapiens
  source 1..307: mol_type = other DNA
agataagaaaaaaatataagaaagtttaaaaaaattttttttggcttttttttgttttctggagtgcagtgagcctcccgagtagctgggactacaggcgccgccgccgcgcccgggggcgtcaggtgatccgcccgggcgcccggccaaaaaaaaaaaatttttttttttttttttagatattttgcaatggcgtgggctcggcctccaaaatttttttaaaactcaccaacatggccgcccccaagggagtgggcgggtctgcggggcggaagtgacgcacgagaggaagtccgtcctgccgctt

SEQ ID NO: 13938 - DNA, 392 bp, Homo sapiens
  source 1..392: mol_type = other DNA
cccagctgctcaggaggctgttgcagtgagctgagatcatgccactgacactgtcattaacatagttaacgtggttgaataaactacactttagttaatatgacaacagtgcatcgttaattttaacaaatgtagcacactaataatgtaagattttagtaatattttctgtaaatctgttctaaaaaataacgtccgttattattattattattattattattatttgcggggagcagtcttgctctgtctcccaggctggagtgcagtggtgagatctcggctcactgccctccccagtagctagggctacaggcctgacctcaggtgatccgcccgctttgtaccgaacaaagatggcggccgccggcgtcgggaggagggctgccctg

SEQ ID NO: 13939 - DNA, 673 bp, Homo sapiens
  source 1..673: mol_type = other DNA
actgttacttaaggggttcttaaaagtcctagaagccattatttatgcatttaggtatttcctaaggtttgctgataccagtttttcaaataaactttatcctcacccaggggggtggccggcaagcaccgaggaggagtccccagacgcgcctctcctcgcggagaagctgggccgcagagaagtggtcatcttttgttccgaaagaaaaaaacggaggggggcggccccggttctggagaagccacgagcccccagggagctcagagtggggtggtgctggggcccagaggcccccctgggcgccgaccggaggaggggagaggggcggcggcggccgggggggtcccgggctccgctcaccgggccgctgcgtctggcgtacctggcgaagccaggccctgtcagcccggagccgggctggggtcgccaatgctcagaggcccggcccacagaagcagccggtggcggcccggaactcacctgcactcgcaactgcgccgccgccgcctgtcagtcaagcgcgccccctctgaggcgacgcgcagggttgtggggccgtctggcgacgccccacctccttccctctgccgtccaatcggaagaggctgggcgtggccacgcggactgtgcgtgccgggggcggggccagacggggcaggcgctctgaccg

SEQ ID NO: 13940 - DNA, 454 bp, Homo sapiens
  source 1..454: mol_type = other DNA
agagatatttgtgacagcgacccggacgcggatgtgtctgtcgtccccgccgcctccgtctcttccagttttaatctttaaaaagaagaagaagccagcacagtggtccagaggacgaccttgtgcctagacccaccgggagtcagagccactgcgcagagcttggggcggtggcctcaccccttgagcctcaatttctgctgactccgagtcgccccggcggcgacggaaaatcttccggacgaccggcatggtgacaacggccgagttgtacagccgccgcgcctctgcgcagcggcccaggctgcttccggcgcgcggcagagcggtcagagcgcctgccccgtctggccccgcccccggcacgcacagtccgcgtggccacgcccagcctcttccgattggacggcagagggaaggaggtggggcgtcgccagacggccccacaaccctg

SEQ ID NO: 13941 - DNA, 618 bp, Homo sapiens
  source 1..618: mol_type = other DNA
ggaattccaaacattttccatagcttgtcaggaacatttgtgcagacctttgggagtccgtctgctgataaaatgatgggtttacccccacccctgatcctcaccgccgggcagtgcgcttccagaggtggagcaattgtccgcctccgcccggccagcacgtgcgggaggctggaaatcactggtttcagagattggaaatcactgggtgcacgcgaggccgtcgcgcttgcctccgccagcctgcgggactctcgggcttccctcgggcggtgggaaaagagcctcccgggctgactctgctcggcgcgcatggctgccggggagcgatctcagaccgcggcggagcatcggtgatcccagggcctgccgcgttccaaggcaagcgctagtactcagggggagtcctagggatccgggtcccgccgtccctcacacctccctccgcgtccttccggaccccagggcgacgcggacccggccgggggagcccgggggagggggccgggccggggtggggcgggcgcgcgtgcgcgagctgtcagaccggccccgcccctcccctcccgcccctcccccgctctccgggtgtagggcgggcgggcgctgcggcggccg

SEQ ID NO: 13942 - DNA, 442 bp, Homo sapiens
  source 1..442: mol_type = other DNA
tggacaatttcccagataccaccttagggttacaaagcaagatccagagtatcattctaggtttatcacaccttaatgctggctttactgttttaagcaagatttgaaattccttctctagagtctcgctccagagagcgccctggctaaggttccaagtaccttcaaactcccgccccgtgccggtcagcccgaagacgccacctgtcagtgaaaggccgcagccagggccagtggctcagaggtccccaatgggccaaagaacccggggagtggcctcggcctccgccccccggcccggccttggccaggtgatggacgcggcccaggccaggctcggccagcaactgcagcgggagcagccggaggcccgcggccagcctaggaccgcgggaggcgggggagccgacgggcgccagagcggccaccgcttcctctcccg

SEQ ID NO: 13943 - DNA, 376 bp, Homo sapiens
  source 1..376: mol_type = other DNA
ttctagttactgcagtgccattgcactccagcctggaaagaagttcctataatttctgaaagaagcaaagaaagtttccatgtaaagtaggaataatgataatacattgttccggctcaatcaatcgtattattgcaaccattgggaatttttagatattttcctccgagtcaacgctcagtgaaatcagttcaatcagtggccccccgaccctgagatcaggggtccccggagcccaaggtcgcttccaaagctcagcgaggcggaggtgcggcccggggcggccgatcgaagggccccgaggtgggccagggtcagcggagctagccgccgagccccgctccccgggcccttccggcggctgcgccctttcacc

SEQ ID NO: 13944 - DNA, 719 bp, Homo sapiens
  source 1..719: mol_type = other DNA
cagcctcggctcagagaaacagctctgagcagctctgacctgtcactccagcaggcgctggtgggcaggggcccagctcctcggcgaggggcctctcctggcctgccccgtgggccctgcccttctcccaggtcccctgtgcctgcagccgtgcgcaagcccgcaagccggggaactctccctcgggcatgcaggcctccccgcctctgaccctgggtttggaggtctcctgcccccaggccgagagtagcgcatcccgcacagccccctgcccgccctgcgagggctggggcactcctgtcccgtgggccgccgtgtccccggcaccccatgaatgtctccgggccgggacctggcctcaatcttccgggccctccccgccgcggcgggggccggagcgccagggctggattcggggagggggtggcgggggtggctgccccgccctggggccgcgttgagccgaggggacgcccctccggctggctggcgaggccggggtccagctggcggaggccgcggccaggcgggtgcggggcgggaggtggcgccgggcgctgagtggcggctccgggtccacccctggcgcgcgggtgcgggcgggaggggggaggccagggacgaccgcggccacaccgcgccggcgccggcgcccagcccaggcagccccgcgccgcggcgcccggaccgcccgggcctgcccagcggccgccccacgc

SEQ ID NO: 13945 - DNA, 623 bp, Homo sapiens
  source 1..623: mol_type = other DNA
cccaggttcagagccggctgaggaccgggagtcctcccagtgctcactgaagctgcccagacaggagtctgggcaggtgccaggctctgagaagacaggccagcaatcagccctggcctaagggatgaaagccgggccttcccgcgccggctcacctcgggggctctgggggctgcagaaggcccaggctgccggcaccggcacgaagctccctgcgccagtggaacttttatcccccgcgaagcgtttaaattgcttccccagggccaggactcgaaggacggctgcggccaccctccgcccctgagacatgggtcgcagccactgccgccctccttggcgcctccagcccgcgggccagggccaggaaccgcgagccgcctgcgcccccgccggcgcgcccctgggagggtgagccggcgccgggcccaggcccggacctggtgggaggcggggggaggggacgaggcctggggaggcgggccccgcccatctgcaggtggctgtgaacgctgagcggctccaggcgggggccgggcccgggggcggggtctgtggcgcgcgtccccgccacgtgtccccggtcaccggccctgcccccgggccctgtgcttataacctgg

SEQ ID NO: 13946 - DNA, 756 bp, Homo sapiens
  source 1..756: mol_type = other DNA
aggacggctgcggccaccctccgcccctgagacatgggtcgcagccactgccgccctccttggcgcctccagcccgcgggccagggccaggaaccgcgagccgcctgcgcccccgccggcgcgcccctgggagggtgagccggcgccgggcccaggcccggacctggtgggaggcggggggaggggacgaggcctggggaggcgggccccgcccatctgcaggtggctgtgaacgctgagcggctccaggcgggggccgggcccgggggcggggtctgtggcgcgcgtccccgccacgtgtccccggtcaccggccctgcccccgggccctgtgcttataacctgggatgggcacccctgccagtcctgctctgccgcctgccaccgctgcccgagcccggtaaggagccctcggcccctctcgagcacccgcttcccgggcccagaggaggaggcgtagaagacgcccgccccggggcccgcggaggcagagggcggaccccgatcgccactcgccggggactgggaccgaggcaggagggaagctcaaacgcctggcaccggattccaggtttctggagcgtgggggacgcggcgggggcgcgagtccccgggggcgcgagtccccgggtccgaagagcggctcgtgaagcccccacatggagacctggggagtccggagcgtgtgggggggctcccgattctctctcggagtccagcccctctggggcttcctggacagatgggcatggtggc

SEQ ID NO: 13947 - DNA, 324 bp, Homo sapiens
  source 1..324: mol_type = other DNA
gtccaactccttatcataatagggcttggttacttgtttgctcacttataagaagagccaatgaattctagcactaagaacttccattaaagttaccaagaagcctcctgcaatacagttgtgcctgggggcatcaccagacaaccccagagtccctctgaggccagacggtcctggaccaaatcccgcccgggaagggaagggtcgcgaccggaccctggagacccacggctgcctggcgatctgagcccaccccggcgctgccgtccgatcggtcgaaggtcacgtgccctgagagcgtcccggctttcccttccgccggaa

SEQ ID NO: 13948 - DNA, 333 bp, Homo sapiens
  source 1..333: mol_type = other DNA
cagctgatgccaatgatttcattatggggagttaccatcagcgcctggcacacagagagcgctcaactcgctgtgtaacatttttaacttgtttccaaaagaaatattggagtaaattagcttgttcaaaggagtccgatgatgttgagccagcacccacggggcggccgcaatagaacgtgagattttattttccttgccaatagtagacatggcagctcgtgttgccaattgtaaacatggcctctaggccgtgagttctcattggcagcccttccccgcccctccgaacgcggcctggagttgtggagtcggatatcgcagctcccgact

SEQ ID NO: 13949 - DNA, 522 bp, Homo sapiens
  source 1..522: mol_type = other DNA
ctagagtgcaatggtgccatctcgcctcatgggattaccggcgtgagccaccgcgcccggcccgctagagggcttgaaaggcatcaaaaaccttggtttctaggagcgagccaaattttctcccttagagactgaaggcgcgccggggagacgcggtccggcctacgctaggccggcaagaatctaccaggtcccaggagggcggggccgagccccagaagtcggggcccgggccaggagtcttggtgcaggcggactcgggcgcgtgccatgggaccacaactcccggcacgcaccgcggactgcgccgaacacggttggctgggagatccaaccctactgctcccaccggccaatgggacaatggcaatgaggaggcggtaaaaggtcgtgccgggccgggctttcgcagggagccgggaggggcggcggtgtcccgggaaagcggctcttggggcatccgggtcccctcgaggcgggctccggacgtcgccgtgggcggggccgagggcggggcctggc

SEQ ID NO: 13950 - DNA, 666 bp, Homo sapiens
  source 1..666: mol_type = other DNA
ccggcgtgagccaccgcgcccggcccgctagagggcttgaaaggcatcaaaaaccttggtttctaggagcgagccaaattttctcccttagagactgaaggcgcgccggggagacgcggtccggcctacgctaggccggcaagaatctaccaggtcccaggagggcggggccgagccccagaagtcggggcccgggccaggagtcttggtgcaggcggactcgggcgcgtgccatgggaccacaactcccggcacgcaccgcggactgcgccgaacacggttggctgggagatccaaccctactgctcccaccggccaatgggacaatggcaatgaggaggcggtaaaaggtcgtgccgggccgggctttcgcagggagccgggaggggcggcggtgtcccgggaaagcggctcttggggcatccgggtcccctcgaggcgggctccggacgtcgccgtgggcggggccgagggcggggcctggcctcgttgtggagcctgagcagcgctggagccggagccggttcccgggtcctgcggctgaggagcccctccgctgtccacggcccctaccggcggggggcggctgggtccctcggcggagctcgggagccgggggagggggtgtctcgggcagagacccccgggcttggggcagctgaggcg

SEQ ID NO: 13951 - DNA, 523 bp, Homo sapiens
  source 1..523: mol_type = other DNA
cggggcggcggtgtcccgggaaagcggctcttggggcatccgggtcccctcgaggcgggctccggacgtcgccgtgggcggggccgagggcggggcctggcctcgttgtggagcctgagcagcgctggagccggagccggttcccgggtcctgcggctgaggagcccctccgctgtccacggcccctaccggcggggggcggctgggtccctcggcggagctcgggagccgggggagggggtgtctcgggcagagacccccgggcttggggcagctgaggcggccgggcctcctctacacggggcccgccttccgctgtctgggccgcgagagtccttcgtcccttacagccccgccccggctttgggacactgcgggtgtttcccccagcttgggacaccccgttttctgaggcgtggaagagcgtcgccccggagtaagctgcccgtgccgcgcccctggtgctgtcaaggggtctccccttcccccaaggtggccaggccttttaaaaagcggacttaaa

SEQ ID NO: 13952 - DNA, 624 bp, Homo sapiens
  source 1..624: mol_type = other DNA
ccatttatgaaagaaataaatgaaataaattccttttcctgtcatgaggggaacttacctgattttgtctgtggtcagtccaaacaagagtttaaaataattgaatgaaatggattttaaacccgtggcactcggccacgtgcctccgaaaattctcattgtagggactaagtcctctcactctgaactcacacccttcgcagcctgacctcatatcctggtctggatgtgcggcctcaccgtgggtgccagctctgacttcctccccagacaccctaatcacaggacgcgcgttctgcagaggaatatgcattttcaccgggtttgcctggcaccgcgtactgggaaactcgacgccccaggccgcggtggagttgcgcgcggcttctaaagtggagtggagcaggcctgcaccctccccgccggggctgggacggcgcttccaggcggagaaagacctccgcgggccgcgcgcggccttccccctgcgaggatcgccattgggccgggctcggcctcgggaacgccaggggcccctgggtgcggacgggcgcggccaggcgcaggcggcggcggggcgggggcgggcctggcgggcgccctctccgggccctttgttaacag

SEQ ID NO: 13953 - DNA, 406 bp, Homo sapiens
  source 1..406: mol_type = other DNA
ttttgagacagggcctggctctgtcacccaggctggagtgcaatgatcacagctccctgtagcctcaacctcctgggctcaggcacatacgcatgccatcacccgcgtctcatcaattaaataaataaccctaggacgactaagatgtcttcaagattacatgagagaaggtttttgcaaaggacttggcacaaactcgtcaccttgataggagcaagtgggccaccagcccgcgctggctgcgaaggcgggagcggcaccaggatccagggcgcaggcgcagggacctcacggccacgccactactcagcccgagctggccaatggggagcggcggccggaagaacgcgcggcttcgctaggttccgcggcttcctctgaccaagcttgacgtcaccaaagcgcg

SEQ ID NO: 13954 - DNA, 460 bp, Homo sapiens
  source 1..460: mol_type = other DNA
cagtgagccgagatcaagccgctgcactccagctctgggcaacagagcaggggccattcctagcgctgcctgccctggacagcgcctgtctatgcctgtggcccagcatcattatgaggagtgctccatggtcaccctggcctggaaatgggaatgccaagtctctcttttattaacaagacacgaattcattccaattgatttgacgggccactgttgtcacagcagccgcactgccccaaaggcagcagtgatgtttgagcgccgactccccgacggcacttggtcctcatggagttcatgctaagatccgcagagaggaggggtgcggccgccccgcgctttgcactttcctccagcagaggggtcggccggcgggctcagcgtcccgcataatagccgctttgaagcccgcggagcagcggagggaggggtgtgtcggccgcccgcgccgttcctc

SEQ ID NO: 13955 - DNA, 667 bp, Homo sapiens
  source 1..667: mol_type = other DNA
ttacctccgggccgctccgggcggattatcctggcacaaatcccctcccggcggaggagaaggcgggggctgggaccacgcggggcgcgccggggagcgcgggcgatcggccgggagcgcggccgagcgcggagcggctggtactcgcgaccacagcgccggcggctgtggcagtggtggggacccccatttcgcccacgggccgcccgggcaagggggcgtcgtgtgggctttccgaccgcgggcgcgagggcacgggtctgcggacgcggactgggacgcccaccggccaggctcacgcgtcggggtccggcgcagggaggtccccgggggctggagaccccacagctgggcgcacttgccccgggacctggacccagacctcgggggcccgcagggggcgcaccccaccgaaactgcccccggcgcagcctgggtcttggggcgagccctgcgtcctgagccgggagggagccggaaggagcgccgcgccactccccggagacgccgaaccggccggcgggggcgccctcggggcccgccccgcgcatggtgatgcagaggcgccgccggggggctctcaggcccctccgggagccagcaggagccgggccgcccgcggctgtttgctgccctccggccggccgcgttcgccggggaggcgccg

SEQ ID NO: 13956 - DNA, 507 bp, Homo sapiens
  source 1..507: mol_type = other DNA
ttgaaaagtgaaagacagctaatgaagaatttctagaaaattagtatgcccttctagacttctgaaatttttaggttagtttgaaaatgatagagcaataggagaaaaacctccctttaaattcttttcctaaaatggagcaatagtattatctttttcttccctaaacgctatttcttccactaaaaggaattaaaaattctgttgtctcagagtatataatgagtcgatattatgagattttatggcttcacgtaacttctcctacactcaagcataattattcttaatttagttttcacagtaaccatgagtgttttgaccagacactttgtccaagtgtcattgcccaaaccaatcaagcaaattctgttagaaattgaacttcatacattagcagcctgcataatcttaatcatacagtcattctgactttctctgtaatcccaaagctattccttgcagaaggaagccattattgcataagccagagttgtattctagaat

SEQ ID NO: 13957 - DNA, 520 bp, Homo sapiens
  source 1..520: mol_type = other DNA
gcttgggaggctgaggcaggagaattgcttgctgcactccagcctgggcgacagagcgagactctgtctctaaataaataaataaataaagttattatagcaatcatgttttacatctgtaattttaaaaaaagaacacgattatttgttaaatgccaacaaaatctgtggaaaatgcagaaatgtatatagagccttaaagtcactactcagaaatatttagcttatgaacctatttctcttttggatttttgtccttcagcatagattaatttcaaataattataaagctacattatatatagttttatttacttttgtggggagggggcttagcctcacattataagcattttcccataccattgaaatatataagagtgtacttttaaaactgtacatttaaactatactagaattattttgatatattttctgtaaaggagaagcatgtggtgctaagcagcacctcacaggctgagctcagggaattatacactggaacagtgtttctgtcttt

SEQ ID NO: 13958 - DNA, 440 bp, Homo sapiens
  source 1..440: mol_type = other DNA
ctatgacatgggaatatgagtcttctctcataggcttgtgatgatagaataatggtagccgtcaataccatagctatgaatcgtaatactaataatgtcttatgcattatgaccggaaaggggtcaacctgagtctggggctgcaagtgagctgtgattgcaccactgcactccagctggggcaacagagtggtggagggaccgctgggtgccaccctgtcctgctgggatgacgctgagaatggctgcctccaggagggaaggcctcattttatgatgtggtcacagcttctaagacctgaagctggttgccagagcagtgttgggaatgtccctgttgaccacgtggcctcttcctgaatgaggaggaggcttcctctctgtaaccggaaggcggcctcccccatctgctgggccctggcggaggcaagggcggggtg

SEQ ID NO: 13959 - DNA, 395 bp, Homo sapiens
  source 1..395: mol_type = other DNA
tagccatcgatgcttactcataaccattttgagcatcagtctgtacctatttattattgatgataatcaataccctcattgcattatccccgacatctcagggaatcagtgcctggcccggcggacgtgtccggtccacactgtgggcaggtgccccaagcctaacttgccctataagccatgtatgcggcaccatggccctcagtggagagtgacgctctcactgagtgcaggcccgggttctagtgaaggaagcctccctggaggacttcactgggccccctaggggaggcgctggaccagctctctcgccaggctcagcctgccccctgtcccagttaggcaggtcagggatgcagacatgccctacgcctcccccaacagttggggagaga

SEQ ID NO: 13960 - DNA, 850 bp, Homo sapiens
  source 1..850: mol_type = other DNA
ccccggcagcggcgagcgcgcccgacgcgtggggacccggggctgctcgcggctggagaggacgcggcggagcgggggcactatgccctccgagggccgagggaccccagccgggaaaggggtgcccgccggatccgacggcactggtgggtggccctgcgcccagggagccggagggaccctggcgctggcggcgcggcggtggggacagagcagggcaagtgctcgccgccccctgcagcggcagccgctcgccccccaccccgcccgtccgggacggtatcagcggagatgtcacgggcgttcgctggtgcgcgcggtcgtgcggccgccactgacggggcgggcgcggggggcgggggccaccgcctccggggagaccgcccagagctgcgccgtcagctccgcagcccgcgcccagcgcacacgcgtcgccgcccccgcgcgccccccgcagcaaagttcggcttaactttgaggctggccttccacctcccaccaggtcctcggcggccgcggcgaagcaggcggcggcggccggagcgcagccccgggaccctgcacggcggccggcagcgacagcggcgaagggacgcggcgcccctgcgtggggacgtccggcccgcgcccgcgagtgggcgccgacggggacccgcgccgcgctcccccgtcaccggcgagcggccggagccctgagctcgcctcctggaagccgcgggtcggcgctcgccccgagggcgccgggacctcggccgggtgattcgaccgcgccgggcgggtgcgggtgcggggcccggaggtcaggcttctgccgcgagggtggcgcggccgcgcggggacagagcctgtc

SEQ ID NO: 13961 - DNA, 526 bp, Homo sapiens
  source 1..526: mol_type = other DNA
aggcccaatcagccctaaaagggctgtggagacttcgggttcccacaggtggtccagatgggagcagggatacacatccggaatcctcagctgggccctctgggtcgtccccttgggccccatgcagccacacgggcctcctgggcctcctgcaaggcaggctgtccccgaatgggaacacctgtgatgtgagcttttcgcagtgcgcccagcactgacacactgccaggcgctcggaaactatttacgggttgcctggttccaggtagtggaggcaacctccaagctccggtggaaatcagagctcacggagtgactgtgatgcactgaagctgaattcaagactgatttaagtgatgctgtcagtgacgtcgttcaggaccaggtccaagctgcccggcagctggggcaggcaggcctgacttgcaggggtctggggtaagcccaggtcccacctctgccccttcagaggccaaggccactgcagagtccagagggatgagccattggccgatttaaatagccc

SEQ ID NO: 13962 - DNA, 531 bp, Homo sapiens
  source 1..531: mol_type = other DNA
tccccttgggccccatgcagccacacgggcctcctgggcctcctgcaaggcaggctgtccccgaatgggaacacctgtgatgtgagcttttcgcagtgcgcccagcactgacacactgccaggcgctcggaaactatttacgggttgcctggttccaggtagtggaggcaacctccaagctccggtggaaatcagagctcacggagtgactgtgatgcactgaagctgaattcaagactgatttaagtgatgctgtcagtgacgtcgttcaggaccaggtccaagctgcccggcagctggggcaggcaggcctgacttgcaggggtctggggtaagcccaggtcccacctctgccccttcagaggccaaggccactgcagagtccagagggatgagccattggccgatttaaatagcccaggcccgaggcagccaggccgcagctgtggactcctcacctcccggaggctctgctggtgcaggccccgcattggagggctcgattggctgcccggctggcactgacgtccc

SEQ ID NO: 13963 - DNA, 404 bp, Homo sapiens
  source 1..404: mol_type = other DNA
tgagacaaaccacgtgctttagcatagggcatggcccgcagctggtgcttttatagttggttaggtgtctaaaaaagtaagtattagttttcattttgtaaaaatgggacaaagtacccatattgtgcaacaaccttgcttttgaaatgaaaaaagtattatttctgcttcctttccgttcatataccgtatacatattttaacaaaatagggggagggggcggagatccgggctcgctcccccgtcactgcccgggcgcccttcccccgggcccaggccgggcccatgcccttcccaggcccctggccccagccctcgcccggcccccgggccgatcccaaggccgccgctcccgggaggcgcggcagggggcgctgcgcgggcccaggttgcgggcggcgag

SEQ ID NO: 13964 - DNA, 453 bp, Homo sapiens
  source 1..453: mol_type = other DNA
atgatagaaccaatcttggttttttttaccgctttctcctgggctgaaggaagtcacttgctgccagagacaggccagatggcactgccgggcaagccagggacagctgcagctggctgggacgtggcagttttctttaaaattatcttcatagttttaaaaaacaaatagcaaatctgtttggaattaatacacagtgttttatgacccttactgctgaattcttttgaaatgggaagtcaaaaagatttacagtttttctgtatcaagcgtatatttcttttgttactaaaaatgtgatggagaaataaaaagtgggaagccttgaaactggggcagtttatagtcacagtagagtgtttatctcaagagggttttctgagaatctccctaggggtccactagcagatcctaaacacctgggagtttgaaactgtgacacttaaactgtga

SEQ ID NO: 13965 - DNA, 369 bp, Homo sapiens
  source 1..369: mol_type = other DNA
aagtgctggggttacaggcgtgagccaccgcccccggccctaggtccgtaggagcgcccgcgggcgtgggggcacgtgcctgtggtctcagctgaggctgcagcaagccgtggtcctgccactgtactccagcagaccagcctggatggtgcttcaatctcagctactcgggaggctgaggcaggagaatcgatcgcgccattgcggcgcgcccggcagaacgccgttgtgcagatcttccgctttttaaaacaagagaggggaggtcgccgcgtttcacacctgcctctcctccgggaccggcgccctcgcccgctgcgcacgcgcgtcaccctctcccagtgcgcacgcgcgctgctgcccgtctgg

SEQ ID NO: 13966 - DNA, 545 bp, Homo sapiens
  source 1..545: mol_type = other DNA
tatatgaaaagcatgctctgccccccaggctggagtgcagtggcactagctgggacctgtcacgttctctgtgccaggcacggagcgggggggcggcagggatggaacccggcacatgggcctctgcctccttggcgcgctgtaggcgcgagcctaaagtcatcaggcgacagcccccgccacgttccggggcgccccgacggctccagcagcgggtggggtgggaggcgtccggacagtccggaggcctcgatggccaagaggagcctgggctggagggggccaggcccgggggcggccgggggagggcccgggactggcgcagaggcagcgcgaggcacggacgaaggcgcagccccagcctcggggtgcggaacgggcaccttcccttgtagccggctcgaggcccgggcgcccctgccagccagctttcggcgcaatgggacgcgggcgctcctggtgtgccggcctcgggccctgcaccctcacgcatgcgcggcccccccccccccggtggactacaactcccggcgtgccccgcgcgc

SEQ ID NO: 13967 - DNA, 227 bp, Homo sapiens
  source 1..227: mol_type = other DNA
tccacacacctggactgaaataaatgaaatcttttcatccacctctaccaagaatatgtgattgatttcattcccttcttttcttctagagcactttctccagcaaaattgttcccaaagaaacacagcaccatttctcctgcggagaaaagtggtattaaaagtatttggacataaaattcatcttgcaagccatttcctccctggggccaagattcctcaggctt

SEQ ID NO: 13968 - DNA, 507 bp, Homo sapiens
  source 1..507: mol_type = other DNA
ctccattccccggctggagcctctgggctggcaggaggtgctatgaggccactcccaggccctggtgtgggtcacacctgtaatcccagcactttggtcgagatcgcgccactgctctccagcctggtgctgcatctctggtttgggggacaggctcccagccagcagagcttgtttggagcctctggcccacagccacgtcctggggtggaaaaaggccaggctcttgggcaaccgaggaccctgggttggagctgtcagtcccaggtctggagctggtgactctggtcccacagcagaggaatgcggagtcccaggcggggtcggccccacaccccaggccccaggccccggcgtggggactccggctcggcagggggcgctgcgtctcgcgcgtcgcgcgggaggctcgggcggctccgggcccacagggggcgctgtggcggcgcggcgggcgcccggcaggtggcgctgtggccgtggccgcggccgaggcccggcgggcgg

SEQ ID NO: 13969 - DNA, 326 bp, Homo sapiens
  source 1..326: mol_type = other DNA
tgttcactgtaaaaagtggagtcacacagaggtagcatatgtcagaattttcttgcttaagcctgaagaatttttcattgtattcttcttaattaataagcatcttactttgagattaaatgaatcaattattctaataatggcaattttctaatggaaagaagaaactttcctttttccctatgattccccagagtgcaagtttggggaaatgcgggacttccccaagttgagaaaaatcactttccgctcaaggggaaaccctttttcgaaagtgctttctgggtagccccgcgcgaactgcatttcccagaggtcttcggaga

SEQ ID NO: 13970 - DNA, 577 bp, Homo sapiens
  source 1..577: mol_type = other DNA
gtgctggctgctcaaggctgcagtgagcccaccccaggaggcaggagtgtccgaaaaccacatgtgcttctggaagatgtggaaactctcccagaagccctgggaggcaggctggcaggaaacctcctggggatcagagagcccagggctgccggatatgcggtggcctctgcccggggctgctgctaccggagccctcccacacctgcctcccatgcttgcaggggagggagacagagagcagaggggccttctgggtgcttggctgtggggggtgggggaactgactcacttggcccccctccctcgtgccgatggggcagcccccacacccatgggcgctggcaccccggcaggcccccgggttttggaagaggaagctgcagcccggctgcgcctgaccggagccggctgaggatgcgctctgggcgcagggacccgctggcccccgggccgggaggcgatgtttaggcagcgaccccccagaggctgccggggccaccctggccacgggcccgccgggacgcccctgctcgccgcgcccctccccgggccgtggcgcgtcccccgagccgcg

SEQ ID NO: 13971 - DNA, 599 bp, Homo sapiens
  source 1..599: mol_type = other DNA
gctggagtgcagtggtgcgatctcggctcacttctcctgagtagctgggatgacctcaggtgatccacccgcgcccggcctctggtctctgaactccgggctcaagcgagcctcccgcctgggcctcccaaagtggtgctgctgtgttgcgcatcgcgcgcattgttcgcaagacctaaggtctccctttcttgtaatataaaggatatacacatattcctccgaaattacacgtttatgtaatttacatttcaggtctttaaaggaaatctaaagagaaaaattactagcgggtaagggctgaccccacccgcagcagagctcatcccggagccgccccacccgcaggaagccccgggcggggccgaggtcaaggttccgcggcaaactctccccgtccaccctgacggggactcgggattggtcgggccccagctgcccggacgtgacgccagcgcccggcgtgggcggtgcaccgcggccgctcttcccatgccccgccccctggggggcaccagaaagcagcggccggggcggggcctgcggccggccgactcagcgcgggggcggggcctacctcgcggcaacagctggttggt

SEQ ID NO: 13972 - DNA, 558 bp, Homo sapiens
  source 1..558: mol_type = other DNA
ccctcccacacctgcctcccatgcttgcaggggagggagacagagagcagaggggccttctgggtgcttggctgtggggggtgggggaactgactcacttggcccccctccctcgtgccgatggggcagcccccacacccatgggcgctggcaccccggcaggcccccgggttttggaagaggaagctgcagcccggctgcgcctgaccggagccggctgaggatgcgctctgggcgcagggacccgctggcccccgggccgggaggcgatgtttaggcagcgaccccccagaggctgccggggccaccctggccacgggcccgccgggacgcccctgctcgccgcgcccctccccgggccgtggcgcgtcccccgagccgcgcggagtgcaggggggcagtgaagcgcccgccatctggcccgcgccgcgccggggggatgccccggctccccgacgagacgccgcgaagcccacccgggccgggggctgcccggcgcccgagcgcgggtcctccccgggccgcccaggggggccaaaaagttttagcggcgacctc

SEQ ID NO: 13973 - DNA, 480 bp, Homo sapiens
  source 1..480: mol_type = other DNA
agaagtttgtaatttgtacttatttattcattccaaataagtattaattttcatttctaattttatatttacaaagtctatctcaacaattcctgaatgcaccttgaatcaatgagtctcaggacataacattgagtgtaaaaagcaatttgcagaaaaatacatcctccataattccatatacagagttaaaaagcatgtaaaatttatatgttgttcacagacaaaaaatcaagttaccttcatggcacttttctccattaaaaaaaatgataaaaattatattttatggccgggtgtcccagctactcgggagccgagatggcgcccctgcactccagcctgggcgacactcgtctcaaaaaaaaaaaaaaattatattttatgactgtggtggtattgtgttggtatattagtgttatatgataaaacaaaatatgttcaaaatatttgacaggatgctgctccttagacggttaa

SEQ ID NO: 13974 - DNA, 307 bp, Homo sapiens
  source 1..307: mol_type = other DNA
tttaaaataaacgccacaggaaccattgttgtcacatttccatataggaataaaatggaattcagaaacattcccacgaaattttcagagactcctccctggtgaatgaacagtctcaaaaggaggaaaaagaggaaaaaagatttccagcatctcatttcttctcctttgaaaaaatccagaatctgtgaccttgtggataaagaaaatattaacaacacaccaaagcattttagaaaggatgttgatgttgtttgtgttcaagggacaccctgcctcagtcagaatcccaccaggaggagtcctg

SEQ ID NO: 13975 - DNA, 295 bp, Homo sapiens
  source 1..295: mol_type = other DNA
agttactgtaaacccaggtttctcatccacaaggtggggctaattgagaaaacttgttgcctatatcgtatatgttcactatccaaaaaggttaaacgttctccaaagctcctgctaactctaaactaccctgtgggttcactgtgtggattcacttagaactcagttcaaatgttacaagataatctgaaattatcttagttgattgttcctggagttcaccaaaaaccaaggcctagcggcagccgtgttaccatggcagcgtgacgccgagggggccggaaggcgacgcact

SEQ ID NO: 13976 - DNA, 315 bp, Homo sapiens
  source 1..315: mol_type = other DNA
ccagactgtgggaccacaggtgtgtgccagcacaccaggcttcccaaagcaatgggattacatgggtgagttgggaacattccaagagggtgacttgctcctgtatcctctgttggcgtcccgtcgccaaggagacgggccggcaacgcggggcccaggagacgccctgaggatcccgcggggctcctgcattgctccggggctctttgcgatgaggggccggcgcgagcggggcgcgcctggctccggaggggtcctggcatctgagtttccccctcaggatcccggtggtgcggcccgggccgcccggcaggc

SEQ ID NO: 13977 - DNA, 186 bp, Homo sapiens
  source 1..186: mol_type = other DNA
gccccccaagaggtgcccatgggagaggcccggtctcgtcacttcccaggaagctcgacgcgcgcgcgcacacatttagtccctttctgctgctggaggaagaaaaacgggcccaccgcagcgcagtcggctcggcccctcattaggtctcttttaatcaaactggtgggcgacaagttcattttt

SEQ ID NO: 13978 - DNA, 300 bp, Homo sapiens
  source 1..300: mol_type = other DNA
accgcgcccggccgcggcttggcaaatacatttcagaaatacactggttttgtcctataggtaaatttaaacattttctagttgacggttgagtttgtctaaacacctttcaagtctttagtggccttagagacaacagacagatctagctatgttaatagagattctttagctttgcaaagccatttcaaaatgtggcaaagaaacatgtttaggggtaatattttaactttcttctatagtgggacttgcgccggaacttcaggtcctacgcaggagccagctcctccaggcgcatcc

SEQ ID NO: 13979 - DNA, 643 bp, Homo sapiens
  source 1..643: mol_type = other DNA
accaggtcctggcccgggttgtgcacgtcgcagatgagctccagcacagcgatgctgcgggccgtggacacagacacgcggtggtcctcggaccaagccagcggttccaggcccggccggctcccgccgagtcaccatgaggcggaatgcagcgctgggccccggggccgcgtccgctgctggctccttccccccagacggcgcaggcccgtcgtccgcgggccccacccgggcctggtcggccgtgtggtgcagaggtcggacgccctggcgctccacgcagtcgcgcgaccacctcccggaccgccgccgccacccccagcgccctccgcggcggttttctcccctcaggccccgagcgccgccgagccaagaaggaccccgccgttgccaggcaacgcggccctaccaggtggaaggacagcgagcggggagccccgaggacccccttttccctgcccagctccagagcctgttagggagcaactctcggccggggctgccaccaggcgggggcacgcgcggtagtcttgtccctacccgcccggtgccgccgtccccggctcccctcgggacgagtccgtacagctggagccgttccggacccggaaggggcggtggcgcagggtcctcgcgcgtccca

SEQ ID NO: 13980 - DNA, 415 bp, Homo sapiens
  source 1..415: mol_type = other DNA
ttcaagtctttagtggccttagagacaacagacagatctagctatgttaatagagattctttagctttgcaaagccatttcaaaatgtggcaaagaaacatgtttaggggtaatattttaactttcttctatagtgggacttgcgccggaacttcaggtcctacgcaggagccagctcctccaggcgcatccctgcgggtggtgtcggttagagacacgtgtttcggcgcaacttgtcccgaagcggctgcagctcgcggcgcgcccacagccgggccgcgggtggggacggagctgaagccgggtcagaactcacccgactcgcctgggctgggggacgtctggagaaggcggctgtgcagcagcgagcccggtgcgcagactgctgggcccgggaccccacgtgggacgcgcg

SEQ ID NO: 13981 - DNA, 567 bp, Homo sapiens
  source 1..567: mol_type = other DNA
gtaacccgctccatgtgcgggcccgacggaggggcgaaggaggggttcctgggactcaactccgggaagccccctgggtgtgtacctgtgtttgcggcgggaaacataaccctggctgcttaataaatccccagcgctcggtttcccctgggcaccaggtcctggcccgggttgtgcacgtcgcagatgagctccagcacagcgatgctgcgggccgtggacacagacacgcggtggtcctcggaccaagccagcggttccaggcccggccggctcccgccgagtcaccatgaggcggaatgcagcgctgggccccggggccgcgtccgctgctggctccttccccccagacggcgcaggcccgtcgtccgcgggccccacccgggcctggtcggccgtgtggtgcagaggtcggacgccctggcgctccacgcagtcgcgcgaccacctcccggaccgccgccgccacccccagcgccctccgcggcggttttctcccctcaggccccgagcgccgccgagccaagaaggaccccgccgttgccaggcaacgcggccctaccaggt

SEQ ID NO: 13982 - DNA, 544 bp, Homo sapiens
  source 1..544: mol_type = other DNA
tgggacttgcgccggaacttcaggtcctacgcaggagccagctcctccaggcgcatccctgcgggtggtgtcggttagagacacgtgtttcggcgcaacttgtcccgaagcggctgcagctcgcggcgcgcccacagccgggccgcgggtggggacggagctgaagccgggtcagaactcacccgactcgcctgggctgggggacgtctggagaaggcggctgtgcagcagcgagcccggtgcgcagactgctgggcccgggaccccacgtgggacgcgcgaggaccctgcgccaccgccccttccgggtccggaacggctccagctgtacggactcgtcccgaggggagccggggacggcggcaccgggcgggtagggacaagactaccgcgcgtgcccccgcctggtggcagccccggccgagagttgctccctaacaggctctggagctgggcagggaaaagggggtcctcggggctccccgctcgctgtccttccacctggtagggccgcgttgcctggcaacggcggggtccttcttgg

SEQ ID NO: 13983 - DNA, 448 bp, Homo sapiens
  source 1..448: mol_type = other DNA
tccagtttctgacccagaggccggggtggggtccgagtgggcccacccacactcatcccagcgctcttcgctccacggagcacccagggggccgcgggcgtgattgttaccgccggtgccatagcaatggagttgggctgaggatttccacccgatcctcgattcccgcgtctgttttaaagatggctgacagaaccagaagcaggttctgcctcccgtcccctcggagggccgacttgccccttctgggtttcgtcgggggtctcagatacgaggaggcccagctggaagccacctgagggtgtcccccgcttgcccgagccgcagagcgcgtcagccggggaggtcggggcgggggcgacccgcgcgaccgaggatcgggtatctgggcccggcgcggagcctgcagggcggggccgcggcgcgtgctgatgacgcagtcggcgcg

SEQ ID NO: 13984 - DNA, 557 bp, Homo sapiens
  source 1..557: mol_type = other DNA
tccatgccatgcccctggggatggggtgtaccctgatctgaaaactgagctccagcttccccttgcctctcagaacctttgagtggctgagagttcttccctggggccctggcggggacggggcctcgcccaaagtcacacggtgagctgggggcccagtcaggcctggagcctgctgctgtcccagaggcggccctctctgaggaacctcttgcaacctggcatttcacaggtggggaaacccggtggcccccttcctccccctgggtccgcctgaggcaaacccgggcaggaccaggagcgtccccagctcgagggccccctcggggtcacggcgacacacgaatcgtacatcccgagttgggctgcttcgtgggcgcgcgactcggccccagctgcgggtcccggccgcgcacccgacgtcgcagtggaggctcccgagccgccgccagcgtcgcgacgggcaggggtgtccggctccccgtactggcgtctcggctcgccgctccctagtaaccgcgtcgctagggccgccgcgccgactgcgtcatcagcac

SEQ ID NO: 13985 - DNA, 270 bp, Homo sapiens
  source 1..270: mol_type = other DNA
cttcttcaagaggctatgatcatctcatctgtaaaatgggaatgaaggtgcctatttcttgttggaacgattaaatgagatactactactaatagtagccccatatattgtgcttgaagctggggcccattttccctctccataaggtacagagactccagtttctgacccagaggccggggtggggtccgagtgggcccacccacactcatcccagcgctcttcgctccacggagcacccagggggccgcgggcgtgattgttaccgcc

SEQ ID NO: 13986 - DNA, 642 bp, Homo sapiens
  source 1..642: mol_type = other DNA
cttcctccccctgggtccgcctgaggcaaacccgggcaggaccaggagcgtccccagctcgagggccccctcggggtcacggcgacacacgaatcgtacatcccgagttgggctgcttcgtgggcgcgcgactcggccccagctgcgggtcccggccgcgcacccgacgtcgcagtggaggctcccgagccgccgccagcgtcgcgacgggcaggggtgtccggctccccgtactggcgtctcggctcgccgctccctagtaaccgcgtcgctagggccgccgcgccgactgcgtcatcagcacgcgccgcggccccgccctgcaggctccgcgccgggcccagatacccgatcctcggtcgcgcgggtcgcccccgccccgacctccccggctgacgcgctctgcggctcgggcaagcgggggacaccctcaggtggcttccagctgggcctcctcgtatctgagacccccgacgaaacccagaaggggcaagtcggccctccgaggggacgggaggcagaacctgcttctggttctgtcagccatctttaaaacagacgcgggaatcgaggatcgggtggaaatcctcagcccaactccattgctatggcaccggcggtaacaatcacgcccgcggcccc

SEQ ID NO: 13987 - DNA, 389 bp, Homo sapiens
  source 1..389: mol_type = other DNA
gcctcgcaataaaggccacctatctagtgagtgagcatttactagggacttaaagccttgtttcagcaggaaacgaataagggggggtcccccgcaatcccggaggcgcaggaaggagggctgccctggcccgcagctttccgccccttcccactctgaggccgcccacagagagaccctcggagggcgccacggggggcaggggcagggcgctccaaccacacccaggcgccgccagccagtcacgtgaccgcccgccccgccccctcgggctctcgcgtgtgagtggaagattccggcggggctgccgagcgcggccgtctatccttcctttcgagaaggaggggaggtccggagggtcgtggcggaggccgccgtcggccttggcc

SEQ ID NO: 13988 - DNA, 449 bp, Homo sapiens
  source 1..449: mol_type = other DNA
gttattattttttttttggcaaagaaaaacattgatgtagattagagaactgtcatttccgctaaaaagctttgcttagcaggtagaccagaaaatttaaaaatcatgtgtcagcataggatatgaatgttgaggaacccatggatgctctttacagcagtttgacttctccaagtgcaccctttaaaatgtaccacctgttgctggatcttttggggaagaattttgaccaaagaatgcattagttgtctattgctgtggcaattaattctgaaatgtagagttattagaaacgggcgtcatcccaaggcttgacaggggttccatagggcagctcacaatatggcgacagggtctgtcataacttaggcagtcactaggtagtctcagtgagtgtctaaggaagttactgctcacacccattgcttccaatgcttagcacacaaacg

SEQ ID NO: 13989 - DNA, 336 bp, Homo sapiens
  source 1..336: mol_type = other DNA
cagaggcccccactggcctgccaccagagggcagcacacacgggctctggcctgaggccatatctgggggaaatgcaaatttgatgtctcttctgagatatgacctctgcaaggacagaccggcgggtactaggggcattgcaccagcctggctctcacaagcctcagggtgctgaacttaaaatcgagttttataagttagagctttttctaactttaatttttaaaatttaataatttagccatcaagatgttattcaaaatttccagcgaaattctgaatttctctgcagagagaaagcggaattcgaagtcttttgacacaaataatcagat

SEQ ID NO: 13990 - DNA, 369 bp, Homo sapiens
  source 1..369: mol_type = other DNA
tggcaggcgcctgtaatcccagcagtgagccgagaaagcgccactgcattctagcctgggattcgggctggcactgggaagcagccagcccgacgggtggacccttttcgggggctttgcagcagccctgggcgcctaccggacagacgccgtgctggcgaacgccggatgcccgcgttcggccccgagccggcgcttcggggcttggaggcggggcgatggttacagcacagttcccccgccgaggccccccgcaagcgccgttggaaacctagtcccgagggggctggcgggccggaagtctgcctctggcccgcccccgaggtgcgaagctggaggagaaggtgggacctagcttcctccggactt

SEQ ID NO: 13991 - DNA, 420 bp, Homo sapiens
  source 1..420: mol_type = other DNA
cagccagcccgacgggtggacccttttcgggggctttgcagcagccctgggcgcctaccggacagacgccgtgctggcgaacgccggatgcccgcgttcggccccgagccggcgcttcggggcttggaggcggggcgatggttacagcacagttcccccgccgaggccccccgcaagcgccgttggaaacctagtcccgagggggctggcgggccggaagtctgcctctggcccgcccccgaggtgcgaagctggaggagaaggtgggacctagcttcctccggacttctcgctggctagtcgcttaattttaaataaaaagtcgaggacacgttttcccgaagacatgggccctcccatgggccatttgctccctggaggccctcggagcccggaacgattccttcgcggaacaaggac

SEQ ID NO: 13992 - DNA, 471 bp, Homo sapiens
  source 1..471: mol_type = other DNA
tgggcagccagcactgcagtatgggcaggacggggtgaccctctgccagctcaggccaagctaggttttgtgaggacctcagcagagtctacagtccttgtatgggtaggggtatcctgcagggcccccaggagcatccctgatcatgaaggtcaagcacggagccagctccacccatcttctgagggcatcctcccagggtctggctggctggtagccaagcacttatggaccagagtggcccaggccagctgggcgccttcctcccacccattggtcaggctgacctgtggaccatctctggaaccgccaaggagcagtgccaacgggcatggcatggtgccctgcctgcccccgggcgccacccattccctgacaccttcccaggtgtgggtcactgccacctgtgcccatgggcaccccagagcacccactgtgaccactgcagttctctcatgcccacaggcactg

SEQ ID NO: 13993 - DNA, 477 bp, Homo sapiens
  source 1..477: mol_type = other DNA
ggccttggctcagtgggccctgatctaggggcccctggcaagaggtggggtgagcctctgctctcacattgcctcacccctcaatagtgagtgctcagtgggcaggctgcaccccacgctctgagagaggcagctcaccactgagccagggacctgcagatgcccggcaggaggaccgatccctcatggagtttacattcactgaccaggggcctccttcagccaagggggcttgggccggggcaggtggccttcagatggacaggggccggctcaggagcccagcctggctcaggggagcccaggcctctgactctgctcaagcagctggtggcctacgtgcagctcaacatgccaggctcagacctggagcgccgtgcccaccttctcctggcccagctggagcactcgggtctggtgctgggtcaggggcccagatgagccgaaaggcacaggaaaggctggcagctctgtcac

SEQ ID NO: 13994 - DNA, 378 bp, Homo sapiens
  source 1..378: mol_type = other DNA
tttcttttcaaaggaacaacttttcttttcctgtcagtggaagggccagacctcccctggcgggggcggtggcggtcaggagcccggcacaatgcccgcagacttccaggatggctcctgggcctctgagggtgcgcaggaggcaggaggccagggtcccgtccacagcatgctggacagtctacagcactgtctgccaggcctacctgggctggggcactgactgggcggttaatgaccctgggccaggccagtatggctaagtgacctaggccagcctgccaggtgggggaagtctgtctcctaagacaacggcctttcccctcacgtgatgatggtcagggaactgggaactcccattgcccaatgtggctgtct

SEQ ID NO: 13995 - DNA, 424 bp, Homo sapiens
  source 1..424: mol_type = other DNA
ctgagcagatggtttaaacaggtctccccgactgtgtgacagggtggcccaagcatgcatggctctcagtgttgggcctgcatccttccccaccacccggctggcagaagagggccccccgggggtggaagcagggctgggccagctgctggcctgccagctcacggaggagccgcttgggtccagcaggcacgatggtgctcagccaggacctgggtgctgtgccctgcacgagatctcagagccactgccggtgacttgtgcctcccagctggtccaccaacggccttcacaggaggcagtctgggacccctgaggaggcctttcttttcaaaggaacaacttttcttttcctgtcagtggaagggccagacctcccctggcgggggcggtggcggtcaggagcccggcacaatgcccgcag

SEQ ID NO: 13996 - DNA, 596 bp, Homo sapiens
  source 1..596: mol_type = other DNA
tgtgcctgtaatcccagatacctggaatcacttgaaccgggagtagaggttatagtgagccgaggtcgcaccactgcactccagccagggaagccttccgcctctggcctgtgtggtggtttccaggcccccgacacagggggaatgaagctaggctagcttggggcagcctctccactcgtcctcggctggcccatggcctggtacaagcgggaattcctggtcctgcctgtcacagcagcaggtatgacagccacgcgggtgacaccaggcccaggcactcgggtgctccactccactagggcacgcaggcgacgagcacactggcagagggcctcccgcagggcccactccccacctggctctcgccccaccatggcccgggaagcaggccaggtttgtgccaggcctgccgtgcccaggggtgaccgccaggagaagggccgtcgcccgtcgtgccgctctccaaagcccgacaccttggctggcacctctgccagcaccggccaccaccgaggtagggcaaccagtgcctctgccggggaggggctgggtgggtcaccgccgagccccaggcatgggagttgctttcccag

SEQ ID NO: 13997 - DNA, 264 bp, Homo sapiens
  source 1..264: mol_type = other DNA
agaaaaggccacgcagccatgtgctctgcgtgccccaaaaaggtagggccccactcaattgcactgacagggtcactgaacacatggtcagcctctccaaactccgcctgagcctgtagtcaggtgcaggtgctagccggtcctccgggagactccaggctcccggtcccgccccgggtctgacctcggcgagggcggggccgcgggcgcgcgcacgcacgcgtccctcggactctcgccccgccccccagcctgacatcagca

SEQ ID NO: 13998 - DNA, 345 bp, Homo sapiens
  source 1..345: mol_type = other DNA
cacctattagccaagtggctgagtgtggtatgcgcctgtagtcccagctacccaggtgtgccactgcactccatgtgcctgtaatcccagatacctggaatcacttgaaccgggagtagaggttatagtgagccgaggtcgcaccactgcactccagccagggaagccttccgcctctggcctgtgtggtggtttccaggcccccgacacagggggaatgaagctaggctagcttggggcagcctctccactcgtcctcggctggcccatggcctggtacaagcgggaattcctggtcctgcctgtcacagcagcaggtatgacagccacgcgggtgacaccagg

SEQ ID NO: 13999 - DNA, 296 bp, Homo sapiens
  source 1..296: mol_type = other DNA
cccggactgccatctggaccttgctgccagggatggagtcaggctatggcactcctggcacaggggcagctgcctggcaccgggaaatgatcattatgagccgagcccatccctaaatcattggcccagggttccagagtccctggggatcagaatttcgtggcctgactttcccaggggacagggccttggagcctggcacactgccgagtcctgagacccttcagggcccccctgcctgagagtctccaccctgagggtggcagagctcccaggccctgaactgtctgctcagc

SEQ ID NO: 14000 - DNA, 464 bp, Homo sapiens
  source 1..464: mol_type = other DNA
acagggtcccagcagcgtcaagtctgtgccttggcactgacacgctgtgtgacatcaggctcagttttctcagttttacaacagagatgatgactgtggcctcatctttctggcagacctgcctgccaggtgggctgcacagtgacaggtgtcagtgatgcccccgtccctgggagtctcctagtcagagccaaagaggggtgcagcctccaggggcaggatctgtctcctgagcagagccggctgggcctgaaacggggcctcaggttcccagaagccagggggaggggagctggagtgtccccccagctggacaccgagtctggccagcagctccgaaagaggagcaaaagccaggcctcggcctctgctatctgcttcctggacgcgaggagtcactgctctggctctgagtcacagctcctagcgcacacccagccagggcctgcccctacctagaaagg

SEQ ID NO: 14001 - DNA, 465 bp, Homo sapiens
  source 1..465: mol_type = other DNA
catctgaatatgacgaacatacagatttttacgaacatctgaatatgaggtggatattcacttctcctgggcccaggccatgccggggcggggggtggggtcagcttcctgagtgctgggtggctcaggccatgctgtctctgaaggttctaggagaggatacttccttgcatcttccaacctcgtggctgccgttatcataaggatagcagtcattggattaaggcccaccctaattttccaaataagatctcattcacgggtaccagagatctttttgtggtgatccccctcccaaaggccgggtacccgcgtgcctacggggactaggggacaggaacccagcccccagccagggggtgtgggggcgtgagcggagcccgcctgctcctcagcttggcgcgctctggcggcagcaccagcaggtggcgctgtgccctcccgtgcggccgcccagcccggcgc

SEQ ID NO: 14002 - DNA, 379 bp, Homo sapiens
  source 1..379: mol_type = other DNA
cccagctcttaatcccagctactcaggaggctgaggcaagaattgctgcgccattgcactccagcctccccatcttacaccagctgaagctgcagctggaccttgtggtcccgggggaaggggagacctgactttctccctgcccaggctgagttcgctgtcacctcgggtcccccagctcccagccatccgccgagccgagtccagcaggtggcatcggggtgctgggcgtgacgccggcgcgccgactcagcggcccccgcctggctggggcgaggttggccctaggtcctagcggggtggggcgccacgtgagatcggccgcacatggcgctgggagcgtggcgcgtgcgcgcggcgaagcggagtgacgtgcacg

SEQ ID NO: 14003 - DNA, 591 bp, Homo sapiens
  source 1..591: mol_type = other DNA
taatcccagctactcaggaggctgaggcaagaattgctgcgccattgcactccagcctccccatcttacaccagctgaagctgcagctggaccttgtggtcccgggggaaggggagacctgactttctccctgcccaggctgagttcgctgtcacctcgggtcccccagctcccagccatccgccgagccgagtccagcaggtggcatcggggtgctgggcgtgacgccggcgcgccgactcagcggcccccgcctggctggggcgaggttggccctaggtcctagcggggtggggcgccacgtgagatcggccgcacatggcgctgggagcgtggcgcgtgcgcgcggcgaagcggagtgacgtgcacgcgctgtctgcggtcccgcgcaggccccgtgtgcgcgcccggccttggacaacaggcccggctgccccgcggggggaacacccgcgtcggcccgcgggagggaggcctgagcgcgcccccgagcgcgtccccgagctcacgcggcggggcgcgcccctcgcacctgcgggcgggctggggcggggccgcggctgtccccgcccacccgggcccgagcccggg

SEQ ID NO: 14004 - DNA, 432 bp, Homo sapiens
  source 1..432: mol_type = other DNA
cagctcccagggccggtgccaggctcctgcagactgagcacccctgaggggcctgggaggctgtgcccaggcaccaggcagggctggggctgctaggagaggtttctgcggacctctggtgagctgcaagagggtctctcctggggtcccagagtcccgaggctccggggggagccccctcgctgggtaggggcgcctggctcagaggcccagcaagctgcgtccagctggttctccctttggccccggacctgcggttctcggccccccgagctgggcctgctgcaccggcggctagcggaagccaggcccaggggtcagctcaggcgctcggtcccccgggatcctgctcccaggccgcagggaaggggctctgggaccgcaggggcggggcctgcggtaggtgggcggggctgcggcgccctctttccc

SEQ ID NO: 14005 - DNA, 406 bp, Homo sapiens
  source 1..406: mol_type = other DNA
atgaggccagcagagccaggtgcccaagggacctcagcccgtgttctgaggacagcacagccaggctccggtacggagtgaagcggggtcggggagcctcatatggcccgaggaggccgtattcctctgcccctaggaagcgggactcagctggcagcagcccctgctcagcagggagatggccagttccccagaggacttgcccagggtcccagccgtggccctgggagggtgcaggggatcccgaggctgtgggccctgcctctgtggcttggggtgcagatggacaccaccagtcctctgggctcatctgagtgggcactccccctcccggatgcaggactggttgccaccatggggaggggtgcaccgtgccacgtgctcccaggacactggccagggggct

SEQ ID NO: 14006 - DNA, 464 bp, Homo sapiens
  source 1..464: mol_type = other DNA
ggctgctaggagaggtttctgcggacctctggtgagctgcaagagggtctctcctggggtcccagagtcccgaggctccggggggagccccctcgctgggtaggggcgcctggctcagaggcccagcaagctgcgtccagctggttctccctttggccccggacctgcggttctcggccccccgagctgggcctgctgcaccggcggctagcggaagccaggcccaggggtcagctcaggcgctcggtcccccgggatcctgctcccaggccgcagggaaggggctctgggaccgcaggggcggggcctgcggtaggtgggcggggctgcggcgccctctttcccgcccgcggccccgctgcctgccctgctccaggctccacctgcgccgccgatcgcccgggtatcgcgggggcccaggccagctgagtccgttttccgcgccggggtggcgcccctccaac

SEQ ID NO: 14007 - DNA, 733 bp, Homo sapiens
  source 1..733: mol_type = other DNA
ttcgggaggtaactcctccgcagcggggcgcgctctcccactgcagccgccgccgccctctcctgagcttcctcgagcggacgccaggcaagggcgggggtcgtagcggggcggagcggggctttgtccacggaccgcgcgaagaggcctcagggcccggcgcgggcgccggagggggactcgctcgcaggggggttcctcagtctgcgggacgcagagctccgtggggccgcgagccggggccggggaagcgactctgcctagggggacgtcgcgggcgcggggcacagggtcctgcggggctggagggctacaggctgcggcgcgcgcgagccggaaggccggggatcgtgggttctggggccgcagcttcacgggttcgtctcccccgcctccccgggggagcaggatgtcagggggtcgcccccgcccgggagacagggtgtcaaggggcccccggggacggggcttcaggggcacccggagccgctcggccccagggcgggatgcggggacagggccccaaggtaccagggccacgaggggcgcgcgggtcccttggggatgcgcgcgaggaggcgccgtcccttcctagcaggggtccctggggacccgcggccgcctcccgcgcccctctgtcccctcccgtgttcggcctcgggaagtcggggcggcgggcggcgcgggccgggagggggcgcctcgggctcaccccgccccagggccgccgggc

SEQ ID NO: 14008 - DNA, 308 bp, Homo sapiens
  source 1..308: mol_type = other DNA
agaggttgcagtgagctgagatctcaccactgcactccagccaaaaaaaaaagttaatagaatcgcatggcatttttccttaggtgtcagcgtctctgagaacagccttggtgaacacctgctaggaacacagatgtgcacatgtctcttcccctttcaattccttgggtgtatacacaaaagcaggatttcatacggtaataatatttttatttttatttttattgtcccaagtagctggggttacagactcgagccaccacggccaccgcgcccggcctcgtacggtattcgggaggtaactcctc

SEQ ID NO: 14009 - DNA, 488 bp, Homo sapiens
  source 1..488: mol_type = other DNA
ataaagaccacatcttgtgttaaaaatcgcagtgtcacctgaggtcagaccagtcccagctactcggagatcttgccactgcactccagcctgggcgacagagggagactccgtcaccggggtgggggatcagagcaaaagccactgcccagggggtcttccttgaacgagaacacatctgtgtgtgtgacacactgcttgtgtcccctaggactgaacctagggcctgccacgtgccaggcgctcagtctgtgtccgcctgagacctgaggccccccaaggacggaatgaatgtactgctggtcattcattcatttcgcccctacaggcactgaggccaggccccgggggtgccctgctgcaccgactccgggcggagattggctgtcctcggcccgcaatgctgtgcgccccgccccgcgcgccgcttccggcggagtcaggcttgcgagcgcgcgggctggcggctcggcgttcgtttgagagtc

SEQ ID NO: 14010 - DNA, 405 bp, Homo sapiens
  source 1..405: mol_type = other DNA
gggccccagagccactaggacttccttgggaagcccgttagcccagggtgggtcccgccaggacagtagggaaacactgccttcctggccagccaggtggaagaaagacccgaggcagtgttgggcaggccgggtctcccatcccgggttcttgccctgagccacatatgtctgtgccatgggcccgtgtgacagctgctgcccacgcatgtggtgggactcattcctaattctgccgttgtaatgagacttgattaaaaccgagcagcagctcctcagctctgcctggacagcctggcccatccccagtattcagtgaatggacctgctgccatcattgcacatccaggcacctgtgcctactgctaccagagccggtgggagcacagttcgtccacaggaagt

SEQ ID NO: 14011 - DNA, 404 bp, Homo sapiens
  source 1..404: mol_type = other DNA
ggccagggtggagggcacggcctgggctgtcccctcagtggtcttcttcccccgagaaggagcagaaggagccttggaggagggctgggcagagagccacccatgcccgtcctgcagtggccagaaagagggtagcccttcctgctaactcaggagttcctaaggtcaggaaccattggattccttcgctgcccagctggcagccatgtccccggggcaggaggcaaaatgtgtacacctgcataattggactggaggccagtcctgcaggagtggaagccagaggctgacgagaggggagggcctgccctgcagaactgacagaggaagctgaggctcctagagaggccatcccttgcccagcatcagccgccctggttctgatggccacaggtccgagccgg

SEQ ID NO: 14012 - DNA, 487 bp, Homo sapiens
  source 1..487: mol_type = other DNA
ccaatgccaaaattcaaacacttctttcctttcggctgggcagaaagaaaacgtcagttaaaccgccgcctccactcgcttcgtcgggggtagggctcagctggcgagcagctttctggagacaccccggactcatgactcctctgagtcgcggccccacaggctctagaagcaacaggggcgggctcagaactcgtcgctcacaaggcctctggagcggcccccagcaagcccgagagacgctagggctccgagccccgcactgcggtgctccaggcctgcgacacccagccctgcgacaccgggaacgcattccgctctcggccgcccgggggccacaccaagtggggctctaatccacctcggtgtctccgtgccacaccgagtggggctctcctagcgccaggaggagcaggaggccctccgaggccgcgcctggaggaggatggcagcggcagccggaacctggctatagtgccacggttta

SEQ ID NO: 14013 - DNA, 416 bp, Homo sapiens
  source 1..416: mol_type = other DNA
gcgtgatggcaggcgcctgtaatcccagctactcgggaggctgaggcaggagaatcgcttcaggtcgcagtgagccgagatcgcgccactgcactccaaggggggtaattccactccctcgcccggtgcgccgggacaaggggctcaagttccgcgccgcgcctctcggcctctgccctccagccgcactggacggcctcggcgctggagttgcctggccctggggccgggcctttgcgcgcggtgctcagggagggcccggggccccctaggttcggagtctggcgcacgaccgagcgcccgcacaccagacgccgcgtccgccgggtcggcctagggcggggtggtcaagtgcctctgcgacccgcacccccgccgcgccgcggtccgaaaacctagtcagccgccgcagtaaa

SEQ ID NO: 14014 - DNA, 574 bp, Homo sapiens
  source 1..574: mol_type = other DNA
gagttcatgcaagaggatggctccacctggagcaacaccaagaggcctcgccgctgggaccgcaggtgattccagcacccgggcgcccacctgggtcccagggctcccaactctgaaagagtaggggctgcagcactggcggagtccagcggaggggctgtcctaattgccctgggcctccccgcgccgccgcggaccacctacgggttcttggtgctgggcacgatgtgcggctcgaactctgcgaccagccgctggtactttttgccgcgggtgtagacctggagctccggcaggcggcagggcagctcgtgacctgtcaggatgcacctcacctgcggacgcgtgggcgggcaggacgtcaggagggccagggctccgctccctggtgccccctcctgcgctgcgaaccttgcgggcgtccgtctggagccgcaggctcgggtgctcccgcagaaacgcccgcacgtcgcccggcaactcgctcatggccgacgcgcccgcggagcagcccggcggaagccgctcgcagaacctggagccgggggcggggctctgggcgggactcagcggc

SEQ ID NO: 14015 - DNA, 558 bp, Homo sapiens
  source 1..558: mol_type = other DNA
caccaagaggcctcgccgctgggaccgcaggtgattccagcacccgggcgcccacctgggtcccagggctcccaactctgaaagagtaggggctgcagcactggcggagtccagcggaggggctgtcctaattgccctgggcctccccgcgccgccgcggaccacctacgggttcttggtgctgggcacgatgtgcggctcgaactctgcgaccagccgctggtactttttgccgcgggtgtagacctggagctccggcaggcggcagggcagctcgtgacctgtcaggatgcacctcacctgcggacgcgtgggcgggcaggacgtcaggagggccagggctccgctccctggtgccccctcctgcgctgcgaaccttgcgggcgtccgtctggagccgcaggctcgggtgctcccgcagaaacgcccgcacgtcgcccggcaactcgctcatggccgacgcgcccgcggagcagcccggcggaagccgctcgcagaacctggagccgggggcggggctctgggcgggactcagcggcgccccggatgcagatgctt

SEQ ID NO: 14016 - DNA, 624 bp, Homo sapiens
  source 1..624: mol_type = other DNA
agctacagttactaagtagcttagtcaggcactaagagctctcttaacagctttccatttttacaactcatcgtaaatgtaaagagctcagaggatgagttccatccgctgaaaagcaccaggttttttttttttataaaaaggcaggcctggggcaggcttgcacagcactctacacacggcaaaacagccctgtgctgcacactgagccctgggctttcagcctgggctggccacccattagctggatgggacgttcggaagtaactctcgagccttctctgtactcgcgttgtgaggacaaagcgctcgcgcagggcagacagcaggtggctctgcccaggcgcctggatcacagcccggcctgcagccctcacctgggcgcggggagaccctgaggacgctcctccaggcggcgctggccggggcctgcggacacggacgggcgggctgagctccgggacccctccccgcgccccgcaccccgcagccccagctgcaacgcagccaccgccgccatcgcacccggccccgcgggcgcttccgggacgcaggaagcatctgcatccggggcgccgctgagtcccgcccagagccccgcccccggctccaggttctgcgagc

SEQ ID NO: 14017 - DNA, 737 bp, Homo sapiens
  source 1..737: mol_type = other DNA
taacatttaataaagtgtatatatcatgtatagaagcatttaattaaacatttacttttattttgcgtgaattttttaggtctcaaacattttcacagacccacgctcgggatgttcccgggggtcctgcctcggtggacccaagcgcacaagggcacccaggaggtcaccgttggaggccccccgggttcaacctaggagctgcaggccgacactggccagggcgcgggcccctcgccgccctcggtcggaaccgccggccgtagctccagggttgcgaccgttaccccacggagctcccgcctccccgcagggatgggctctccgggggaccctgggcctcgctccccctgcgtggggcgcctgcgattggaccctggcccaagcaagcgaccgcgtacgggcgagcgtccacccctggccccaccccgcgtgggtcagtgggacccgcgggatcctccccgcccgaacggcgccctcgaggcactcaggcgtccctcccgcgcgctggccccagacccccaggtccccgcccccttaaaagggacgcgttccgccgggccgggagggaccgcagggcctgcgcgcggcgggcggggcctccagcgtgagaggcgtggcgtcgagcgcggcgggcggcgtggcccctttaagacgcaccggggcgggcccgggcggcgcgcggcccctttaaggcttggcctacgtggcagccgctggagccgcagccgacgcgg

SEQ ID NO: 14018 - DNA, 864 bp, Homo sapiens
  source 1..864: mol_type = other DNA
ctgtagctggggcgcacgccagcgcgccccctttcctctgggaggacccccggcccccgttcgtccccgagctcccagcccgcctccgggagccccggggaccccccagcagctccaaacgccgaggcgctccccgcgagcctcagacccgccaacgccaggactcgcgccgccggcccgggaagaaacccccacagcccgcgccccgggctggctggagggtgggggcggctagccaggcagggcgccgaggcccgggctccgggagcggcccagcgggcaggggagactgggcccggaggccgggtttggggctgtccagccgggacagagggcccgggcgggggggtccccctgtgggaacaaggagtcagggggcggcccgggcctggcgccctgcgctgggaggccgactccggagcggcccgggcggcctgggtcgggaccggggccgggggaggagcccgcaggccgcacctggtcggcgaagtcctcggccgtgcccatcaggtcgttctggcccatggcgacggcgggaggctcggctcggctcgctcgctcgctcgctggctctcgcccgtcggcgcccgcacccgctgcggcctccacaggaagtgcccggcggccggcctcgctccgcgtcggctgcggctccagcggctgccacgtaggccaagccttaaaggggccgcgcgccgcccgggcccgccccggtgcgtcttaaaggggccacgccgcccgccgcgctcgacgccacgcctctcacgctggaggccccgcccgccgcgcgcaggccctgcggtccctcccggcccggcggaacgcgtcccttttaagggggcggggacctgggggtctggggcc

SEQ ID NO: 14019 - DNA, 318 bp, Homo sapiens
  source 1..318: mol_type = other DNA
caggtgtgagtcactcttttctttttaattagaaaatacactcattattcaagacaagtgtaatgagtgctaacattttaattatgaaggtaacacgttcattattaggcacgtaacacctgcctggggatcattttaatcaacagctgcagtttacagtctgtctactgccaaatggctcattcctcagccatcagcgactgtgtcctgactgtaacttatgaacacgtcacctccagctgcggtccaccccacgtgggtggccagcccaggctggaggcagtagtgcaatcacagctcactgcagcctcaaagagc

SEQ ID NO: 14020 - DNA, 409 bp, Homo sapiens
  source 1..409: mol_type = other DNA
ctacatatacaacatgtgtgcacagagcctggcctgtttcaggggctcagtgaaacatttgttggctgaaggaatgaatgaccagggcctgtcctccacaaggtgaatccccctgctggtcatcagcgcctgcttctgcgactctcctcatcaggcgcaggcacagagtagggcacagcctctcatctgtcagatgggagcggggaccccgcgaggtccttctccagattagatggcttaggcctcctctaagggggtgggcgtgcacatccggagagctgtctggtgtgcaggactgggctgcaggttaccctgaactgcaaccatcttagagcaaggcccagcttgcagcaggaggagctgcaggccgcccaccctagccacggcccctgccctggcaggaagccca

SEQ ID NO: 14021 - DNA, 345 bp, Homo sapiens
  source 1..345: mol_type = other DNA
tctcggcagacagcccggcgccgcgccctgggcctggttaaagatcaatccttgacctaaccggttatgttatctatagatttcagacattgtatggaaaagcattgtgaaaatcttagggttgtaagcccttaaaagggacaggaactcctcccggagtccaggacgcaggcgagcgacctagcccggctctcactccggatcttggggaggtcctcggcttgccccagtcaaactcgaggtcgatgaccccggatgccgctggctaaggcggcggcccaagtcccgtgcgggtgaaccgcccaggctgcgcggaaccagaggcagggatccggtttccagccg

SEQ ID NO: 14022 - DNA, 491 bp, Homo sapiens
  source 1..491: mol_type = other DNA
gccaggctgagatggagttcagcgagggcttcctgaaggctcaggccagcctgcggggccagtactggaccctccaatcatgggtaccggagatgcaggaccctgagggtcattgaacatttgttccgtgtctggccagccactttagagtcttctccaatgtccaaaaggctagggggttggaggtggggactctggaaaagcagcccccatttccataaataaaacatgcaggctgaccggcgtttttttcttataagctgtccagacctggcttgaaaacccatcccatggcaaggcagggattcgctggccgcggttggcatccaggaagaaaatccaatcaggcccacccctggtgtgaggctctgaccggcgtgggagcaagtcgccgcatgcggcagcctgcgggtccggcatgagggtcccgctcactatgttaatgagcacccgcctcccttcgggcgcgcctcgccgcagcctgacaaggc

SEQ ID NO: 14023 - DNA, 545 bp, Homo sapiens
  source 1..545: mol_type = other DNA
ttattgttctattatggttgtatttcaatcataataaaagggaattctaacttttaaaaatgctttaccatgttaatagctaaaattgattccgtcctcttcccgaaaagaggttatttctaccaccagagcctggggtggaggatacagtggagctccccgattccctggtgccagggagagccagggcagaggtggccctgagacgccccctgcctcggtttccaccccgcgggagcgagtacgacaggggctgcgcgcattgccgcagtcacgcctgcaagagccgggccgggtgagccgcttccggcgctccgcgggggccccggacgatccagcaggggctccgccctgggacccccatcctgtcttggggcgtgaccttcgggggcgcacgcggtgccggccgcgcccggggaagccgggtccgcatccgagcatcaggacagcctgcggccgccccattggccggcgtgtctctgcagggccgtcccacagccaatagcggccaaggggcggagcctggccggtgccctcggagctgc

SEQ ID NO: 14024 - DNA, 478 bp, Homo sapiens
  source 1..478: mol_type = other DNA
caccgcaggtggccctgtgactaggagttgcctgcccgagggtcccggggagagaaacactcaggagcgctggcatcccagcctggcctcacagctctgggcccgtaggacaagctggacagagggcagacggtattatcgctttcactacctgaaggaactcacaagtttcttccagcagggaggacagagggaaggagaagtgtcttcccggcactgctgtgggcccaggacatctgctgctaggtgcccagccttgctttaggaaagcctcacaaagtctggggcccgccgggagtttcccaggggggctctgctgcgctcccctctgtgccctgactcagcaggaacagaggcttgagctccaggcctggcctgccaggggctgccaagttggtgctggacatctgcagaatccctgagcctctctgccctggccctggctgctctagccatctggtcagcaggccacgggcac

SEQ ID NO: 14025 - DNA, 662 bp, Homo sapiens
  source 1..662: mol_type = other DNA
aggagaagtgtcttcccggcactgctgtgggcccaggacatctgctgctaggtgcccagccttgctttaggaaagcctcacaaagtctggggcccgccgggagtttcccaggggggctctgctgcgctcccctctgtgccctgactcagcaggaacagaggcttgagctccaggcctggcctgccaggggctgccaagttggtgctggacatctgcagaatccctgagcctctctgccctggccctggctgctctagccatctggtcagcaggccacgggcacgggagctctgaggctcgtgacctggggcacggtcgtcccggaagttcagcctttcccccgcaggagccccagggacagggcccgctctggaggcagaagccggacaggcggggctggggctttgccaccgccagcctccccggtaacctcaggccagcggctgctccgtctggacacccgacatgtggcccccagttctggacccgggaagaaggcctccctgctcgccgctcctgggccgccgccgccggcagcagccaacaggcagctgggccggcctggccgggctccagaggcgctgtgcgccaggccggccggcgcgggcgggggagcggcctggtgggtgttcctccccgtctgcctgacagctataaaggcg

SEQ ID NO: 14026 - DNA, 503 bp, Homo sapiens
  source 1..503: mol_type = other DNA
gctgccctcagtctacttgtgggagaggacggtgagactgaccctcgggcccacggggagaagcagggctgcggccagctgccctgagaggcttcaaattcaggccagatctgctctgggcagacaggggagcaggcctgtcactcaccctctgatgctctcgcgccttctggagcagcagtggtaccagctgtctaaacacagggactatttggagattgaacggctctgctcgctaggccaggcctgcagtggctacgggcctatccttcactggtcagcctggagcagctcctcgtgtgggtagaggcgacgcagaccccatcccactggggactgggccagacagcctgtgaggcagtcagctggtgcctggccagagggtgtctgattcagagccatctcagaagctgatgacgtccatgtgtcattagtgccaattagacagcagagcggaaaattggattccccgctagacaaatgaggaccagggcataaatggc

SEQ ID NO: 14027 - DNA, 494 bp, Homo sapiens
  source 1..494: mol_type = other DNA
taagaacacaatgatttgattggtattaattacagcaggcagctggcatcattcaattaacagcatctgggaaggggtaacttgccccagcccagagtcaggctgcagcatccggtctgcctcctactgctgtccccaacagtcaatggaggctggacagtagccagtggcttgggggcatctccccaaacaccagaggggtctgggatccctggggacccaggccttctcactcgcctctgaaggcagtgaggggcatgtgctgagatgacctcaccaaaggagcctccctgcagtggacgggcccctggcccaagctgcatagctccttctgggcgcggggagctcgggcggctccagcaggcaggtggtgcctgggtctactgcagcaacaaccctgctctgccgccctcagagggagctgcccacagggctggcctagccccaactaagctggcggtgggcggtacgctccgcccagatcctgggcggag

SEQ ID NO: 14028 - DNA, 282 bp, Homo sapiens
  source 1..282: mol_type = other DNA
ttttcttgagtgcactaaacatagatatccttgatgaacatagatgcaacaatccagctgggcgcggtggctcacacctgtaatcctaaaccagcttggccattcatggtcaaaccccggtgagccgagatcgtgccaccgcacccgtgatcaagtagatttttggtggcagccccaggaaatttactcagggaaatttacaaaccagcccgagatcgtacaggaccctgtcttggcctagagctgtgactactagtccctggggggagcgggaccggcccc

SEQ ID NO: 14029 - DNA, 889 bp, Homo sapiens
  source 1..889: mol_type = other DNA
cctatgggcccccggccagggcggaggacaggaagagggctctgggagtcctgggcccgtgtgccttcagcctcagcctcgggtatcccgccggggcggcttgatgggccaagggggctcagtaagcttcggcccagcccggtgccctctcccgagtctgtcgttaccgaacggccatgcgagggcgcccacctccacggaggaccaaaggcacccggggggacgcccggccatcactccacgggcgaggtcgctcccccagggagaagggctccccaaagtccgagcgcccttggagaaagtcggccggacctgggcctgcgccgcaacccccgcccaccgcaactttcgcgggcggtagcggggcaggaaggacacggggaggtgccaggcgagtgctccggccccgcccctgccccgcccggccgtggccgcgccccctgcgcccccagcgccccggagccgtggagccgccgagccgccgagtcgtcgagtcgcagcgccgggcgtggggactgcgggtggggcgaacaaagcggcggcgacgcgggcggcccaggcccgggacgcgcggagcgagcgaccccgccgggcctttgtctcgggcggggcaggagccgcggcggccgcggggcgccccgagcgcagaatgcggcgcccggcggcgcggattggggagcgctgcggcgactggctgcgtggagcccggcccggggcccgcaggcacttgcgtgtgtgaagcggggagatccggcgcgctgcccgttgcccgccccgcggccgcacgtgggcgggagcggcggcccgagagcacggcggcgcagcgggggacctggggcagcccgcgcgaagccccgccccggccctgagccccgcgcgcgcgcgggcg

SEQ ID NO: 14030 - DNA, 451 bp, Homo sapiens
  source 1..451: mol_type = other DNA
gcatttcaggcagtggagctgctgctcaacttggaacacacctggggaccccaggggcttggggtgggtgcagcccacacaaggaaactcgaccttgcagttggcaggttcagacacaacgtgtaaccaccttaagttacagctggattaaagtaatctcagctactcgggaggctgagccatgaacctttcaagatacagaaaaagggccaggggtggccctctcccggaatctcaggctgggaacctggtatctagttcccgcccctcactgggtccccaggcagagctgggagcacccctaactcttcgccagctctggggacttggcgcccccagcaacagcgaacttgggcgcccgcgccccagcaagtcgggtgggggcacggagggcgcggcagagcgcggctcctccccgggcggggccgacctgcccgcgcgcaccgacgcc

SEQ ID NO: 14031 - DNA, 808 bp, Homo sapiens
  source 1..808: mol_type = other DNA
tgaacctttcaagatacagaaaaagggccaggggtggccctctcccggaatctcaggctgggaacctggtatctagttcccgcccctcactgggtccccaggcagagctgggagcacccctaactcttcgccagctctggggacttggcgcccccagcaacagcgaacttgggcgcccgcgccccagcaagtcgggtgggggcacggagggcgcggcagagcgcggctcctccccgggcggggccgacctgcccgcgcgcaccgacgccccgccccccgccccgcgcgcgcgctcccgccaggctaattaggcgcgcggtttgtttacaacacgggctcccggcaggtgcgcgccgccccgcccgtgcgcggccggggttcgagggtggctcccgcgggcctcggggtgcccggacgggggctgcggtgctggctgcgtgcccgcttcatccgtcctggggcaccggaaaatccgccgccaggcgctgtccccgacacggggtgaggagagccgtgcgggcccgggcggggaacggcccacggggtcccagcgttgttgccctgccgggcgggcgccgagccccgcccccgcgcgccccccgggccaggcccgctctcggccgggtcggcggggcgggcgggggcccccggggcggggcgcggcgccggcggggccgggacatgtagtccgcgcgcccgcggcctcccctgggcggccccggcgcgggcccggccgcggactacgactcccgccaggcgccgcggcgcagcgcatgagccctgctcggctccggcgcgtctattatgc

SEQ ID NO: 14032 - DNA, 739 bp, Homo sapiens
  source 1..739: mol_type = other DNA
ttcccatttttaattggagaataagggaggcctagctgaggggatagggaggccatgcctacctcagaggaccgggcctcagcttctccttaagcccctgagtcctcctctggggaccacccccttgtacctggaggtgaaaatgcccgcccaggagggaagggctggccccgggagagcccgctgcgaagtgattgcgcactgcggagcgggcgcgggtgactccagagcggccctgccagtccgcggggctggcggggagcaggttcgtgcaccgcgggctctgtgcatgcagaggcgggaagagcccccagcccggcagccggccccgcgggaaggcgcagcccgggcttccgaaccctgtgaacgcgcaggttcctggtcttccagatgggcaggaatcgtcctgcccgcccggggtgggaggccacatgggggcactgcgcccgggcgcggccccaggtgctttccgaaggggcctggtcgcccggggaggtgccccggcccgaatcgactccggagacaacgccgggcgacgccacctgcgcaggtcccggagggccgctggtgtctgtgtacagggttattatacttcttaaagcttttaagcgggaagcgcgcgccccgtgctgtccctttaaagcgttgggccggcccgaggcattctggccgctgcccgtagcgctcctccgagaggccggctttgtgagctcgccccgccccccggacaccgccctcg

SEQ ID NO: 14033 - DNA, 755 bp, Homo sapiens
  source 1..755: mol_type = other DNA
cgttttcaaacaaatcgtgaatttaaaagtcagcgggcagcgcctgcccagcctggtgcgcgggtcgatgaggaggcgaagcgcgcacccctcctcgttcccggtgggggggtagcgtccggaagacgaaaccttccccggacgaggagcttgtcctctgccgttggggcacatcgcctttccccacgtgtccgccgcggcggggtgcgaggtatgggtgccgcggccatcccgcccggctctgcgcttgcctggcccgggccggggtcccctcgcggccaccgcccggccgctttgtgtggccgcgcagacaatggcccggccgctgggctcccggcccggctctccgcctcctccgggcccttgcgcgcaagtgtgtgtgtgcgcggtgtgtggcgggcccggggagggagttctgctcccgcccccgcccccgccccgccgcctcctcgcggctcccgggaacccctggcggaggcgaactcgcaagtgcacggcgctctcaactcggcggccgggcgggcggcgatcgcggggcggcggcggcggaggggggcgcgctccgggcggggctgggcgggcggggcgcgggccgagcggtggcggcggcgctgcgccgagtcagcgcccgtcgcgggccccccgccacccccccgccggcgccgcagcgccgcggtcggagcggggcgcgggcgcgcggcggcgggggcgcgggccgggcgcgcgcggcggcggcgcgcagacacaacgttgca

SEQ ID NO: 14034 - DNA, 567 bp, Homo sapiens
  source 1..567: mol_type = other DNA
agggaggccaggcctggggaagctggagggagagacgcccacctaccacccagagactggcgggcctcctgctggaggagaccccgagggggggccccagctcttctccgagagcagccgatcaggaatgccttctccctgcgccagctgtcagtccaagcacatggaggtcccgggagctcttgggtctccacccagaagaggagcaaagaaaaagttaggcggggtaaactgcaactttctttttaacctgcactggttcttggagcatggccaggtgcgggcacctggggtgggaacagtggggggaccagggtgggcccctgggctccgaggccgccccaggcccgcccgcctaccggctctcagagaaagaacagggggccgcgcccgccccacgtccgctccgccccgggccagccccttcctcgctgcgacgcccgctgtccccaccccctcgcccgcggcgcccagtgggaggcgggggctggcctcgccgagcccagcgccgggctctgatttgctgcgggcgttggggatcgacagcctccgcggctgccttccagg

SEQ ID NO: 14035 - DNA, 437 bp, Homo sapiens
  source 1..437: mol_type = other DNA
ggcatcccgatggcagcaggtggcagggtgcgggcagccatcctacaggtgggatgtctggcctcagggctcagggggttccctgggccctaggagtgcaggaaacatcaccctggcagcctgcctggacctcaagcctcctgaggagagtcccaagtctgctcatgatgtggtgagggttactgtgtaaggcccacaccagtggcccatgaccagccgtgacatctgctcaccgctgaacaaaggtgggaggatgggcctgggctctttgcccaaggccacaagcaagtcagcctgttccctggaaggagaccgtccccctgcagggatgacagtcgccatgggatccccaaggggccctggagatgatctcgcacctcctgctggcgtcaccaagcccgcggagaggctggcttctctagccctataagagggca

SEQ ID NO: 14036 - DNA, 296 bp, Homo sapiens
  source 1..296: mol_type = other DNA
gtcgagagtcgttgtggtgcccagagagcctggacacaaggtcctgtgtctcctggagccttgagtttggaaacccaaatgtccacagcgtggcctggctaagcatgattcaagaattgagtccaatgctggctctactagtggagtgacttcaatatgatggaaatagtatttgggacataacaagtgctcaacatttttttccttaagtgcctgatgacggacaaaccctttcagcaaaaccttccttatcccccaaggttaaggtcaaggtgcaaagccgatgcttagagccg

SEQ ID NO: 14037 - DNA, 306 bp, Homo sapiens
  source 1..306: mol_type = other DNA
cgcacctgcctgtaaggggccctgtggtcctggcacgtgcctataagaggccctgaaccaggaacctaagaggagctacgggcagagccaagggggttctggaagtccccggccctggtgggagagctcctctcttaggttcctggcacatgccctgtctggggacagcagggctgcgtgccaggtgaccagggttctaaccctggccctgtccaggggcccaggtccccagcgcgggcaacccctctgtccccattcccgggacctggagcccgcgagggctcaggccggccaggatggagttct

SEQ ID NO: 14038 - DNA, 444 bp, Homo sapiens
  source 1..444: mol_type = other DNA
ctgaaccaggaacctaagaggagctacgggcagagccaagggggttctggaagtccccggccctggtgggagagctcctctcttaggttcctggcacatgccctgtctggggacagcagggctgcgtgccaggtgaccagggttctaaccctggccctgtccaggggcccaggtccccagcgcgggcaacccctctgtccccattcccgggacctggagcccgcgagggctcaggccggccaggatggagttctccccgccggccgccgccctcctccccgggagagagcgaggcgcgcgggtccctctgcgccacccccgcccccgccgcagcccagcgcgcgttcgtgctccgcagggcgcgcctctctccgccaatgccaggcgcgcgggggagccgaggcgaggagagaggagggcgcagctcccgcccagcccagccct

SEQ ID NO: 14039 - DNA, 601 bp, Homo sapiens
  source 1..601: mol_type = other DNA
gagggagctgctgtctcccccgaagcccagggccccccagcagccggagggtgagcccagccatggctcctcctgagctccacctctccgccagcgagttgcactggggtgaaactcctggaagaggagtctcttgtgagacttctcagaccccccacatggggagcatggcctggcccagagcccgtgtggaccacggccgagaagaccctggcagcctctcacccggccccactgccaggaagcctccagcaagcacataattcctcctgaaagtatgtgacatttcttcttcagaggcggcagcccgggagccaggttgccggggccttggagcaatgcagcccgacctcgtccctctgcggagacgcctccatgccggcagggccgggagcgttcctcgtaacaggccacagagtgggaggcaccctgagacccgcgctgagcatgggagtggccaggccgcgtcctcccgggggccagcctggagcctgccccaccctgcttgccgacaggattatcctggctgagccgaggtccgggcgcactcacccgcagtctcccccacacgtggatggcctctgaactcgtgtgctcgtgc

SEQ ID NO: 14040 - DNA, 502 bp, Homo sapiens
  source 1..502: mol_type = other DNA
aattccttacggtaacaagctcttagggcaagaggacaggcaagcgggcatgcccgctcaccagtgggtggacggcaggctggccccgcatggatttgcccgcaggaaatgctcagagccgctctaaggaggcatcatgaaagctgttcaccacagcactgttttaaaaactgtgaagttattaattagatcatctccccaaagtttggtaatgaaagagtattatttcatgagaaaaaaaaaattgctttttgaaaaaattcacgaaggcattaaaacaattctttaatgggtttcgcttcccaggctggcatgactagttttgatcctatcaaatctctgacactttctagacagcgtgtggatcagggcccagggggcttacagaagcagcgcggtgcccctgcgcaccatctgccccttccacgagtgggcgctgagggaggatccagtcgggtctgcccgttccccgccgcccggggatgctgagcacacccgggcc

SEQ ID NO: 14041 - DNA, 827 bp, Homo sapiens
  source 1..827: mol_type = other DNA
tccccagggtcccgcaagcgcgcgctcacccgcgccgagtattcggggcagcgcggccgaggatgtcgccatggctgggacgcggggcagagcgaggtctccctccaggccaggccgagcggcctccccttccgtcgccatccgcgcggggccgcagtgccgcctacaggcccggaggagccacagcgctgtccccaggcggctgggacctccctgcgggggcggggcacgcgaggggtcagggcccggggtcctgggcttgagagtctcgggcggggagtggagccacggtcctcgccctgcagctcgccccgccctgctaatgggaccggccagcccgggaggcccctgacccttggggaagcccgctgggcgatggggaccctcgcctcccgccaatccaaaactgtttgtaatatttaaacgatatttggcttaggagaatttcataaagttagccagatctcgtgctggagcatccctggagtacattggacagcaaaagtccaatcgttgcctgccgagtggactgcagtgcttaaaccccgtcacccggctggcggggtcccaggccctggggtttctttcgcccgggagtccacgccctgatgctggggtggcccggtccccccgcgggtggctgggggcctggggctgcctcacacgacggtcccagcagggaatctctcgccgtcccgaccttcccggcccttggggagtcgcccggcaggttccggacccacccgcagaggaacccggcccacgcgcggcgcctttaaggcccctccgctcgctccccagtcacgtgacctggccgtcgcttggca

SEQ ID NO: 14042 - DNA, 794 bp, Homo sapiens
  source 1..794: mol_type = other DNA
cctatcaaatctctgacactttctagacacgtgtggatcagggcccagggggcttacagaagcagcgcggtgcccctgcgcaccatctgccccttccacgagtgggcgctgagggaggatccagtcgggtctgcccgttccccgccgcccggggatgctgagcacacccgggccgcggcctcaaggtccggggcagttcctagaaactgttccctcccccgaacctggcggcaggtgtgctcgaggagccgccgccccgggcaggtcgtgcgtccactccccgccgcaagctcgggtggggcagccgcggggacacgcgggggccgcccccgaccccggcccaaggctgtggggctggaggggcgggcgggccggtctcagcccggagccccgcgtgaacttcggggaggaactcggttggcgccggggccccgcacgctcccttcccgcggctccgagcgtcccggcgaccccgcgccccctgcgcgccccccggaggtggccgcggtacgggaggcgggcagcacggggctcggcccggcccaagcgccttcgccccgcaccccgcggagggggccgcgtccgaaccgggcggggcggggcgggggcgtccccggggcgcgggcgcggcggcaggtgggcgcgctctcgcgggcgggggtccggccgggccgcgcgcctcccccggaactcggccgtgccattgcccagccacgggcacggcttccggagtgcggccgccgccgccaccgtccggtaggtcgcggggagggggcggcttgggggggtcgccc

SEQ ID NO: 14043 - DNA, 454 bp, Homo sapiens
  source 1..454: mol_type = other DNA
tgtcaggagcggaggcttggcctccagaccctgccacccagagggtccctctgcctctgagcacctgtcagtaggacagtcatctcaatgcgagaatgctgcaatgccctgtggcagctcagagctggctgagtctagctgctgtgctcacgccccgcagcggagtgaggctctagggagcacggtcgccgctcactggcgggcgatgacagcgcgggccccggatgctatcgagcagtggacgccaggaccaggcgggccccagcttcctcacggaaccaccccgggttgttgaacctgcccggcaggtccgcgtcctctccggcggggccgtggccttgggcgccacaggctccgcgcacgctctggggcattcctcagactcggcggcgtcctgttgccaagcgacggccaggtcacgtgactggggagcgagcggaggggccttaaaggc

SEQ ID NO: 14044 - DNA, 682 bp, Homo sapiens
  source 1..682: mol_type = other DNA
gcccagtgcccccaggtcacttgggcccgcctgggcgagctcggggctccgggcctcggtggtccagtgacacccccctagggagcgaagcctgtgctaaccaccctatccatggtgaggcggtggcctcagcccgctgtgctacgtcaggcaggaccgagcggcgagcccagcggagcgcgcagtttcgaccgcgtgcagcgcccaggcccctctagggttcgcatcccccgcggctgccggcccacccaactcggctgggcgcccagcttccaagcgtcctgcggctcggccgagcaggccggggggtcgccttcccgagaaagcccaaccagcgcgacggggcccgggcacctggggggaagtagatagaggtcctggcgccgagtacgggcccctccgcgtccctaacgggtcccctccgcgtcccgccccgggtccccagggtcccgcaagcgcgcgctcacccgcgccgagtattcggggcagcgcggccgaggatgtcgccatggctgggacgcggggcagagcgaggtctccctccaggccaggccgagcggcctccccttccgtcgccatccgcgcggggccgcagtgccgcctacaggcccggaggagccacagcgctgtccccaggcggctgggacctccctgcgggggcggggcacgcgaggggtcaggg

SEQ ID NO: 14045 - DNA, 831 bp, Homo sapiens
  source 1..831: mol_type = other DNA
ggaaccaccccgggttgttgaacctgcccggcaggtccgcgtcctctccggcggggccgtggccttgggcgccacaggctccgcgcacgctctggggcattcctcagactcggcggcgtcctgttgccaagcgacggccaggtcacgtgactggggagcgagcggaggggccttaaaggcgccgcgcgtgggccgggttcctctgcgggtgggtccggaacctgccgggcgactccccaagggccgggaaggtcgggacggcgagagattccctgctgggaccgtcgtgtgaggcagccccaggcccccagccacccgcggggggaccgggccaccccagcatcagggcgtggactcccgggcgaaagaaaccccagggcctgggaccccgccagccgggtgacggggtttaagcactgcagtccactcggcaggcaacgattggacttttgctgtccaatgtactccagggatgctccagcacgagatctggctaactttatgaaattctcctaagccaaatatcgtttaaatattacaaacagttttggattggcgggaggcgagggtccccatcgcccagcgggcttccccaagggtcaggggcctcccgggctggccggtcccattagcagggcggggcgagctgcagggcgaggaccgtggctccactccccgcccgagactctcaagcccaggaccccgggccctgacccctcgcgtgccccgcccccgcagggaggtcccagccgcctggggacagcgctgtggctcctccgggcctgtaggcggcactgcggccccgcgcggatggcgacggaaggggaggcc

SEQ ID NO: 14046 - DNA, 673 bp, Homo sapiens
  source 1..673: mol_type = other DNA
tcagatgggggtgtcacctacctgtgccgacagccagctttgtgtcccagatggtccttgacattgaagaaagagtgcttgcagggaggaggagcgacgctgcgtctcccaccggtggcagcagagacaggcagagcgcagcccgcccacccctgctccctgccttctgtgacaccgaggtggggagccgggagcccagcagctggagccaggttctgatcccgaccttgctcctgggtaagcctggtcgaacctggtcaaccccgtcccttggtcttacttggaagacagaggagaaaaagagaggggcccagcgggttgctcaggtctttctctcaggtggccagccaggcccagtgcccccaggtcacttgggcccgcctgggcgagctcggggctccgggcctcggtggtccagtgacacccccctagggagcgaagcctgtgctaaccaccctatccatggtgaggcggtggcctcagcccgctgtgctacgtcaggcaggaccgagcggcgagcccagcggagcgcgcagtttcgaccgcgtgcagcgcccaggcccctctagggttcgcatcccccgcggctgccggcccacccaactcggctgggcgcccagcttccaagcgtcctgcggctcggccgagcaggccggggggtcgccttcccgag

SEQ ID NO: 14047 - DNA, 444 bp, Homo sapiens
  source 1..444: mol_type = other DNA
ccaggcttctgctctgcagtgatgcagagcatgtcacagataaagtcatcctttccaaggacgttctttctggagtcagggaacttgggacttggagctgacaggcccctgcctctgccgtgtgtgtgcgtttgtgcatgtatatatgtacacacatgcatacacacacacacacctgtcttggtcttctgtctgtctctctgtgtgtggagcagagagggtcgttactgcacaccttgctcaggacagtggacaccgtctgcacacgggatcgtgttcacacaggagggtcccgcagagatgcaggaagctcagctgagccgcccacctggggggcatctgttacggctgcacacgtccccaggaggcctgctctggacctggtcctgtccaagtgattgtgccaggtccctgggggaccctgagcccagcggtataaagggc

SEQ ID NO: 14048 - DNA, 508 bp, Homo sapiens
  source 1..508: mol_type = other DNA
gcggagcgagctcagccacctctgagcacaggctggcaggtggctcttgatgctcatgccacccatttatctaaagggatgagatagagtgaatgtatattccactctaccacttgtatttaacagggaacagcacagccaggctccggtacggagtgaagcggggtggggcaggggtccctcatatggcccgaggaggcctatactgaccttgaaccacacaatagtgcccttctctgcccctagcgggactcagctggcagcagcctgctcagcagggagatggccagttccccagaggacttgcccagggtcccagccgtggccctgggagggctcaggggtgagggtccgagccgtgggccctccctcagtcctccgggctcatccaagtgggcgcatttggatgaattgctgttcacactccccctcccggatgcaggactggttgccaccatggggaggggtgcaccgtgccacgtgctcccaggacactggccagggggct

SEQ ID NO: 14049 - DNA, 218 bp, Homo sapiens
  source 1..218: mol_type = other DNA
tgattctttatatgatatggatttttcccacaagagattttgcagggcaatttcaaggcatggcaaggaaatatattttgaggttaaatatttttttccttggctcatgatattatgccaggatgagaatccatgatctgtagggcatgactccccagatcccttgttctcactaggttgaagcttctgcccatttagcatcaatggctgtgacacag

SEQ ID NO: 14050 - DNA, 423 bp, Homo sapiens
  source 1..423: mol_type = other DNA
gattacaaatcctgaatttccagtttcggggtggacacccgtgtcttgcctcaggactcaagttccctgtgggaaaaagtacacaatatagactgtaggatttccacccagtcttgcctgtgagtcagagagaaacagtgctaacaggcagtgtgcacctgtccgtggtgcagtcagtcacccactggcatgatgtctgtggcatcctggggcagccatggggctctcaggccctctgcctgccccacaggccatacccctgccctggacacagctgtcctcagtgctggcctctgactcccgccgctgccagcctggacccgacccaggcccctcccgcctgaggccctgcacacagaggaggttcccgcgtggacgcagggaagagcctcccattgccccagtggaggaagctgcccaggg

SEQ ID NO: 14051 - DNA, 362 bp, Homo sapiens
  source 1..362: mol_type = other DNA
caatcgggtcagtttagactgtgcagtctgactgatgcaggcagcacccttctgcagaagtaaatgtgctgagaaattttctgcaagcatttttttctaacaatatagtttcctgacttggccaaatctgaatgagaattcaaaagagaaaaaaaaaacattcacttgatttctctgtgtgcttcctttcttaaaaaattattcttttatctcccaaaaaggggaagcccttttgccatctttggtaccaagtgaaaaaaatgtctacatacctgaggtttgtcatctcacagatagctctctcacctgcggagagagaggtggtcagactaggcatgccatttgcatagtgcacaaagaag

SEQ ID NO: 14052 - DNA, 485 bp, Homo sapiens
  source 1..485: mol_type = other DNA
ttccctgagggccccccgcaacctccgtgaaagaggaagggtctccacctccctgtactgggggactcaagcccagcgcagggcggctcctggagttcagagcaaacacctggcgccggagctttctgaagcaggacccccgcgatcccccctggttctgggcgacccagatgtggatggtgaccctaccctgaggcgcagcgtctgggcgactggggagcaggcgggtacccttccccctccctgtgtccctgggtcccccaggcctgggctaaacaactcagcccagcccgcccactcccaccaggggctgggctcctaagggcagagcccgaggcagggccacctgggctggggccccttcccctggcgtcctgcgggggcatagagtgggtggaccccccgagtccctttccagcaccttctttgcaggaacgcgggtcacgtgggccccgggctggctgcgctgcctgcggaaggggccg

SEQ ID NO: 14053 - DNA, 664 bp, Homo sapiens
  source 1..664: mol_type = other DNA
tcagcctgctgcctcctggagaaacggccaaagtacatggcatgcgccctccaagacctggccctccccctggccctcgtgggcacagtcctggcttagtgaggggcctggtccaccccgcagttctccagagctctgtgtgaggctgagccagggtgaccacgggaaagggggcccgcagggggaccctctgcttccttaagttggggcccctccccacccgtctaaaggtgctgtgtgtgcccgtctgggtgagagcacagggcggggtgcagtcatccccctcccccaggccaagcccaggatgtggcgcccacccacagatgccgcagcctgcggggggtgtgggggcgggtgctgacggtccctgggcgcagcggctggacgctggcggtccgagcagcgcatgtgccctgctgcccgccaaggacccagagccccctgagcccccgcccaccacggagccctcccaggggtgtagggcccggtggcggcgcgctgctcagagggccgcggcgggagcggatcgccctccctaccccgcacccccgtcccagcctgggccagagccgccgcgggtcccggcgcggccggcagggggcgcgcgcggacagacgcctgcacccgaccctggaactggcgtcttttcctcgctaatctgcga

SEQ ID NO: 14054 - DNA, 738 bp, Homo sapiens
  source 1..738: mol_type = other DNA
gcccagcgcgggccccgacgcaggctccaggggaacgaagtcagcgtcccttccgggggatgcgccggcggggccgcacctgtttctgcctcaggggtccaaacgcccaccttccctgcaccgggacgggggtctggagactggcacgtccacctggtgcccgtctgctgggctgtcgcctgccgaggtcgccgccggccacacccacgaggtccccagggcgccggcggcgagacctcggccggccagggggccgggctgtggctgaggtggcagctgcgggctcggcaggatccccgccgccgaccctgcctacgccgcgctccacaccgcgggccttagagcctgaggaaagcaacggggcaggcgcggaccagggcgggtcctactgcgcctgcggaagcgggcggggaggggcgggtcgacgctcactgcgcctgcggaaaggggcggggcaggcacaggcctgcgggtgccacctactgcgcctgcggaaaggggcggggcgggcgcgggctggcgggcggtgcctactgcgcctgcggaggcggtgcctactgcgcctgtgcgaggccccggcggtgagcgcgctcccgctccttggccaccgcctcagccgctgtcgccgccgccgccgctcacccgggaccgcgcacgcgctgccaccgcccccggcccgctcccgcccccgcgcccgcccccgcccccggcccgcgccctcctgccgccgcctctttg

SEQ ID NO: 14055 - DNA, 749 bp, Homo sapiens
  source 1..749: mol_type = other DNA
taaactcacttatcaaggctcttcgctaaaactggatttttcaggagcctgcttaagtttggccaagcaaagactctttgtcacagggcggcttccctctgggtgccccgcaaacctaggcttcgcaggaacagtgactctctgatctgcgtgtgaattagaaagacctaggcttgttaaagccaagttctttggagagcctccgttctacagcagtgcagtgcaaaagcaatttaaaattctatcttaaaaaggttaaaagaaacaggtgaaattaattttaatgacatatttttcttaactcaatagatacaaaatattatttcaacatgtaatcaatatgaaaacattatcgagatgaacccatgaggtcccacgtggtgagtgccccgggtgggaaccgcctgcagctcggggaggaacgaagctaccagagaactacagctcccggcatgctccgggcgcgccccgtgacgcacttcctttgcggtggccacagcgcgcccccggcggcgggagcgaggcgcctgtccgcatctcccggcatgcgccagacgcgcccgtgacgcacttccggtgcggccgcgacggcgcgcccccggcggctgctgcggcggcgggagcgaggcgaccgctgaggccgcggagagtgacggcggcccggccgacgggagccggggcggggcggcggcccagcgaaggagcgcgcgggcggtctggccccgccccctccccgcccgccttcccgg

SEQ ID NO: 14056 - DNA, 607 bp, Homo sapiens
  source 1..607: mol_type = other DNA
ggagagaggtcaggctcaactcccaattaaactcacttatcaaggctcttcgctaaaactggatttttcaggagcctgcttaagtttggccaagcaaagactctttgtcacagggcggcttccctctgggtgccccgcaaacctaggcttcgcaggaacagtgactctctgatctgcgtgtgaattagaaagacctaggcttgttaaagccaagttctttggagagcctccgttctacagcagtgcagtgcaaaagcaatttaaaattctatcttaaaaaggttaaaagaaacaggtgaaattaattttaatgacatatttttcttaactcaatagatacaaaatattatttcaacatgtaatcaatatgaaaacattatcgagatgaacccatgaggtcccacgtggtgagtgccccgggtgggaaccgcctgcagctcggggaggaacgaagctaccagagaactacagctcccggcatgctccgggcgcgccccgtgacgcacttcctttgcggtggccacagcgcgcccccggcggcgggagcgaggcgcctgtccgcatctcccggcatgcgccagacgcgcccgtgacgcacttccggtgc

SEQ ID NO: 14057 - DNA, 602 bp, Homo sapiens
  source 1..602: mol_type = other DNA
ggttcagctctgccagctctgcagactgtttggaatagtttaaatgctttgggtaattcatatgcaaaactgcaccataaatttctccactactgtacagtatttactgtttttaaagccggggctgggagctggcatttacttcggctcccaaatcaaaggcggctattcattcccgagccgccggaacgttcgtctgcaccggcggtgcgctgcccgggagggccggcctgggtgcagctgagctgcggccgcgagcccagcgcccaggcgctctgccctccgctgcattcgcggagcagctgggcaggcgggctgcgtgcggggagcctgtcctgccaggcggagcgggcagtgccggccggcggccgcagcggctgaaggtaggtcttcccgaccggccggcaacttctccgcagcgggggcactgcgggccgcccccggcgcgcgtccacctgcccagctcccggcgcggtggctccgccccggcgcctctgcggccgcccgcactttcctcccgtgggacacagcggcctttgtgcggccctgcggagttgggctggcgccttctgggccgcccccgccccctccggagtccgcac

SEQ ID NO: 14058 - DNA, 790 bp, Homo sapiens
  source 1..790: mol_type = other DNA
cctgcaaggacccttgagcgtgctaggctggcttagcctctgaggaccactgcagcctgtcctgacctcaggccccaggttagggggcagctgaggaaaactgcacctctgtcctcaggaggtgccggaatgactgtcaacgccccagtgcgcccggatcacaccaggcctgaaggcagcgccaggcccagtccaggcagcttgcagttcccgggccgcagggacgggcgccggagccccgcagacgttcgcccaagggcgctcacggcccgcctgagcgtccagggcggctgcggatgcgcgcacttcccccgcccggatcccggaggctgcaccgtgcggacgcgactgccgcgggcagggcgcgcgccgggggcggggtaggggggcccgggggctctcccgggcttagcgagtccggccgaggccggggcccggggagggcggagggcggcgctccaggtcctttcccgacccggccgccgagctccgtcctctgcgccgcggcgtccggctcccgccgggtgtcccgcgcagggtcgaccgccggcagctccggaaggaggacgcgcgaggggcgaggagctgccgcctcccctccccagcgctcggggttccccacgccccgccggcccccactggggaccctcccggcccccggaccccagccccgaccccgggagcccacctggctgccagtgcgcgcgcgcgcgcggccggcgcgctgtccctttaacggcccgcgggcacctcccccgccgccgccccgcccccgccgcggtgcggccgc

SEQ ID NO: 14059 - DNA, 762 bp, Homo sapiens
  source 1..762: mol_type = other DNA
ggggggcggcgggggggcggccctggggctgctgctgggcctgctcgtgctccggggctgtccctacttcggctgccgacgtcgccgccggcccaccgggcctcgcagctacacacccgatccgtgccgcccgggtccgcgtggcgtcagccgcccccacccttccccgccctcctggagcctggggggcgccctcattcccgccgccgccctgtcctcccagccccaggccgcgcaggaggccttcgcacacggccccgcgaggaccagacctgctcccggtccctgggccgcccacccccgccgggaaagcggcttcctccggggcccggccccaccccagcgacggcagcagcgcgccgggtcgcagacacctcagtccggggccaggaccacggtcaagccctctgctggggccaaaggactgctccacggaagcgcgcctgcgcactgcctctccacgggatgcggtagcgcgtgcgcggaggcgcggcccaggaacggcaacaccgagggcgttcggggggcgctggactgctcgcagcgtgcgcacgcacgcacgcacgcacgccctcgggaagcgacgagtccgggacgcccagcgcgggcccggagcagggggcgtgaggccgccctacggtggccgtcgagggacggcgctacggctcccacgctaggccaaacgcctccggcggccgcgcccgagagccccttcacctgcagggcgaccccagccggcgacgcgtgcagccgccttgccag

SEQ ID NO: 14060 - DNA, 728 bp, Homo sapiens
  source 1..728: mol_type = other DNA
tggccatgtgccagccctcagggcggccctggtccaaaggacaggggcccaggagccagctcgccgtcccgggaggcctgcagccaatgacgggcctggtgggcaggagggcccagcccccttgttccagtgccttgaatttgaagggccacccactttacggtcgccccaggggctgctgacccggggggcggcgggggggcggccctggggctgctgctgggcctgctcgtgctccggggctgtccctacttcggctgccgacgtcgccgccggcccaccgggcctcgcagctacacacccgatccgtgccgcccgggtccgcgtggcgtcagccgcccccacccttccccgccctcctggagcctggggggcgccctcattcccgccgccgccctgtcctcccagccccaggccgcgcaggaggccttcgcacacggccccgcgaggaccagacctgctcccggtccctgggccgcccacccccgccgggaaagcggcttcctccggggcccggccccaccccagcgacggcagcagcgcgccgggtcgcagacacctcagtccggggccaggaccacggtcaagccctctgctggggccaaaggactgctccacggaagcgcgcctgcgcactgcctctccacgggatgcggtagcgcgtgcgcggaggcgcggcccaggaacggcaacaccgagggcgttcggggggcgctggactgctcgca

SEQ ID NO: 14061 - DNA, 726 bp, Homo sapiens
  source 1..726: mol_type = other DNA
gagagggacctgcaggatggcatcagcccctgcactgccagggcacccctgcctttgccaagtcctgtgctgccgagggccacccactgctgtgttcttccccgggtggctgcccagggctggtgctggcccagggccctctgggcaggggtgggtgcgtccctctgcctgcaaggacaggtgggttctggagagctcacctgtgtctggggcttccccagctcggcccctcacgacccgaggtcttggctgcgtgtccaggacacagagcctgcctccctgagccgtccggggccgcagttccaggggtggagcccagaagccgcatctgggatcggtccggcaccttgcggttccggtacgcagcttcgggttgagctcccgccgaccatctgctgctcccgaggccaaacctcagcggcgggaggaccctgctgccttctctggcgtgtgctccagctcaggcctctgcctctgggccgctccggcgcaggaagctgcggggccgggacgaacgctggcgggaagccctgacctgggccctcccttaccggtgcccgccctcgggccgggcacgcggggcggcctctgggcaccgcaggtcccggcgcaaaggcgctcagagtccgcagtggcccgggctggtctccgcgacccccggccccgccccgccccgcggccccgccccccggccgctccgccctccgctcggccagaggctccggg

SEQ ID NO: 14062 - DNA, 633 bp, Homo sapiens
  source 1..633: mol_type = other DNA
gagatgcagcctgagggcacctcagaggacccccagccagtgggggcagggcagtggtcaacagtcttgcctgtggctggttggcacctccctggccaggctgtgcagaggctggcagtaactggcaccgagcagacaccagcctgggtgtgtactgggcgattccttcaggccctgcctatgcccaaggtcttgagtcctcagcagtgctcaggggactgcaggtgcctctcctcctggcagcccggaggggtgcgggctgagctcctcccagaagttgtgagccctgggctgacgcatggggctgccccggggcacggcctgggcactgccttccagaggctgcacgccagaagggtagggtcagtgtcctcctgccctgcggctggacgacccgcttgctgcgaaactcggcgaatcccagcgcctcagcagggcctggagcttagggaggagcgggcacggccaccctgggtctcagaggggtgagggcgggggctgccttgagtgcggcccaacccagccagggagggaggcgcgcccgacacggggcagaggcggggggaccggggcggggccccgggaggtgggcgggcgcgcgggcggggcgggcagcgggcgcctccttcagca

SEQ ID NO: 14063 - DNA, 708 bp, Homo sapiens
  source 1..708: mol_type = other DNA
caagggcctggagtctcctgacaccaccggaaggcccaggatgctgtcgggggcaggacagaacccggggaggccggctgtgggcctcgctggctgcggagaaccccccaagccatcgggagctgagggtgggtggaggggaagccacgtcacaccggggctggggtcccgggaccccgggtgggcacagcctactgtgccacctgcatcctccctaagcctgcacagtgcccaggaggaaggaaggggcaggctgcatccccattccgggggagcggaatgtggccacccagggtctcagaggtggggggcatccccacggcctgcgccccatggcccaaggcagaagcggcctcagcagcccctccccacgtgggtgaggctgcggggctcaccaggcggcctgtcccagaggccagtgtggctgcactgtgacccagggacccccgcgggccctcagaagtccccaggggaccagcagcaaggccaggcccaggccctctcccctgcattccctggggtggggtgggctggggcccacaccccctcccccctcccccctccccggggactgcccgcctcacggcgcccctccccccgcgtccgccccgccccccgcagagggaggcacgcggcggtggccgcccggtccgcgccccctccccgcgcgggcggcggtgacatcacggccacggcggcgggaggggc

SEQ ID NO: 14064 - DNA, 388 bp, Homo sapiens
  source 1..388: mol_type = other DNA
ccgggcaggggctgccagcgccggtcgggaggtggacggggcttggaaccatcacaaacacccttcagccctggggcccggaccaggccctgtgaggctgggtcacggggtggacctgcttcagctgggccccttggggggccacaggagaccacgccctccagcctccctgtgtggactgaggcccagggctcacacagcagacaccggtgagggctgtgtagggcatcgggaggcttcccgggatgtctgggaagtgttccaggccaaggctggggaggctggcccagggcaggtgacgggcctggcagtcggcgggtgccgagggtgagtgacagacacccgacacccgacacccgacacccgacacccgacacccgacacccac

SEQ ID NO: 14065 - DNA, 524 bp, Homo sapiens
  source 1..524: mol_type = other DNA
tgctcctgccccctatgtgccagagggaagaatcccagctccaagggccaggtaccaccaagcacctggcatgctggtctcactgtcctgcccaggacctcccggccaggcaaggcccggaccaggctcccggcaccagcagccagggcccaggccacaccccaagccttgctgtgggccagcctttataggaaattctcatttaacaaggttcccccagggaggccagggtacttctgggtggccttctggcccagccctggggtacaggcaaccagcccaggttgtcagcgatgatatggtggttctggcagccggggcaggtcacaatgaccacgccttggtgatagcttggaggacctagtcccgcagacctggctgggacagggtagctggtgaggctgtgagggccgccacgcccctcccgggaagacccgcccctctaggggtagccaccctctccagagaaggcccgcgacgccctctcccgggaaggccccgccccagggacggctccacccctc

SEQ ID NO: 14066 - DNA, 717 bp, Homo sapiens
  source 1..717: mol_type = other DNA
ggtgctgtttcaccatgtaacacacaatacatgcatgcattgtattagtgttagaaaacacagctgcgcgctcggacactcgcgcgcagccccgcggccgtccctcctcgctgcggcccgcggtgtcctcggggtgcgagctgcacgtggacgcagggccccctcaggccgccagggggcggcatagcgcagcgcgcccccgacccggacttccgcccggcgcccacttccaagatggcggcggggcggggccggggcagggcggacggagccggcgagcgggatgctgcggactgcgctgcgcggcgcgccgaggttgctgagtcgcgtgcagccccgggcgccctgcctgaggcggctgtggggccgcggggcccgtccagaggtcgcggggaggcggcgggcctgggcctggggctggcggcgctcaagctccgagcaggggccggggcccgcggcggctctggggcgcgtggaggcggcgcactaccagctcgtctacacctgcaaggtaggcgcgcggcgggacggggacagacccgtatctgacgctacacggcctgcggggagaagcggcccgccggggatccgggaggcgaccccgaggggtggagccgtccctggggcggggccttcccgggagagggcgtcgcgggccttctctggagagggtggctacccctagaggggcgggtcttcccgggaggggcgtggcgg

SEQ ID NO: 14067 - DNA, 653 bp, Homo sapiens
  source 1..653: mol_type = other DNA
gcttggcgctgagctgaggctgtctgggctcctcgcctcccaaccagtctgcagttacaggggccggacgggttccctcaggggagccggccggagcccgagccttcccccttctccaggacgcaggcctgagcagcggggagccgcccgagaaggagcggcggcgcctcaaagagttttgagaactaccgcaggtaggcgggcggcccccaggcttctccaaaacgggctggggagcggcagccgggtcgcgcctgagacacctgtcttcccgcagcagcgcaggccccgaccagggcacacccaccggcccggcctcctgccacccgggggtgccgacgccctggggcgcagacttccccgagccgtgaaaggcccagccggactgccgggcattggggccgtttgtgggtgctgtttcaccatgtaacacacaatacatgcatgcattgtattagtgttagaaaacacagctgcgcgctcggacactcgcgcgcagccccgcggccgtccctcctcgctgcggcccgcggtgtcctcggggtgcgagctgcacgtggacgcagggccccctcaggccgccagggggcggcatagcgcagcgcgcccccgacccggacttccgcccggcgcccacttccaagatggcggcg

SEQ ID NO: 14068 - DNA, 539 bp, Homo sapiens
  source 1..539: mol_type = other DNA
tgtccgcacagaggcctgagggctggaggcccgcctgggggttcccaagcctgcagggatgaggctctggcagcccacacgctgaagtgcacagttcagggcagactctgctgtccgggggaccccggcctcagtcctcacatgcatcctggtggagagcagggatgcctcactggaagggactggtggccgatgccatggcccctggcaggctgctgtggcctcctgggctccataaggtgggctgcagcccttcggccatgccgtgtggctgtgtgcccccctgcacatgccctgccccgctgtcctgagatgctggcgagggcgccagaagcctgtgaccaggtcaaagtggctgggtgcgggctggccttgtccagccccctggcaggtgccagggctgggcctctggggcatccccaggacccccagcccccggccaggctgggagggctgggagcagctttcctctggagggcagcggacttccacttccgtctgcctcttggggcctcctgggctgggcgaatcgtccccct

SEQ ID NO: 14069 - DNA, 647 bp, Homo sapiens
  source 1..647: mol_type = other DNA
tttgatagtaagaagtttaaactgccttctgcctccagatttcaagcccgatgcagggactgaaacgaggcgctcgaggagcccccagccgcctggttttggcctcacctgggcctagccctttgccacaaaagcccacccaccccaggctggagtggaggccccctcaactggctgggcccaggatgtctttgcagcaccgatacttagaagctctcaggagccaggaactgtaggcccctgacttaggggagggccccggggcagctctccaggccaggagaccccagagggtgtgtttgtgtggtgcgggcccccaccctctggcctcagtgcacgtgcctggagatcggcctggcctcggcgatcctgagcatgcagggcaggctggggaaaaagcctttcacgtaggccgaaggtcacagccagtaagggccggtcttccggatcgtgaccaggtggccgggtgcctgtcccgcgtccacccgcgcccctccagagcgcgcggaggcggcccccagggcggccgcgcgagggcagcatcgagccgttcgcctctctagtcccggcaggccgcagcggccgtcccggcgtgccccgcgcctcaggaggcgggacttccggcgcgcggcgctcttgttctgcag

SEQ ID NO: 14070 - DNA, 538 bp, Homo sapiens
  source 1..538: mol_type = other DNA
cggctcactgcagccttgtcctcccatctcagcctcctgagtagctgggaccacaggcgtttgccactgcaccaaatagagacagggtctaggctcctgcctcaggctcctaaggattataggcatgagccacggcgcctggccaaggtttattttaaactttaggcaaaaagccactggagcagcagtgctgtgagagccgctccctgcacgcctgcctggtggctacaggtccaggcctgaggctgccgctgcctcccctctgtgcctgtatctttttgtagtcctcttaaaagtagccacagaaattaacaactcgggtttttctttcggtggttcagcaggtggagcagaacctggagctgatgcaggagcgctcctgagaaagtgctgttgtcctcagcagccggtgcagcctgcccttgggagctggcccacgaggggggccagagcacagacactgcacgatgagcccttcccaggggtggtctggggctgtgaagggccacagccaggttgggtgccctcctgctccctg

SEQ ID NO: 14071 - DNA, 313 bp, Homo sapiens
  source 1..313: mol_type = other DNA
ggaggctccgcacccctgaaacggcgctcgttgtgtggggaggggcgacgcctgtgctgtcggaacaagagcctggaccctggtgtcagaaccctgcgggtctaacagagctgggcccccaccggctcagcctcctgaaggagcacgcggtaggggactgcgtccccgggctcgaggcgcaaagcaaggcagggcccccgtcgcctcggggacaccagtgtcccgaagtgcgagcccgtcccacgggcgccatgtcacctgtgactcgagccgcccccgccccaggccgaagcctggttcgcctttggctctc

SEQ ID NO: 14072 - DNA, 655 bp, Homo sapiens
  source 1..655: mol_type = other DNA
acccagcagcacttctgcttgacgaaccagatctggccactgcccggctgtggaggcagccccacgaggaaagcgggcgggctcctgtgctccccgggcactaaccatcctgtactggaactgtctgtcttgggggaggtctccccgcaaccagactgtgagctcctagcaggggactccgcctttgaattccgagtgcctggcacgcagtgagcgctctgcctcgtgctgcagcggaggtgccacacgtggcgcgggaactggaagcgtccccggggccggcgccctcgtctctcacccggaagccagcaccgctgcgtgccggggcggccgccgcccacctggaccgctggactcggcccctgccccgctcaccgtcgggaatggcgaggctccgggctcgggacagcggggtggcgcccgggcggcgctggtagcccgacatcgccgccggcccggcggggcacgacctgcctagcccggcagcggcggctccatggccccggctccgcccgtgccgcggcccgcgtcgcccgcccccgtcgcccgcccccgtcgcccgccgctcggccgcccccgcgcctccgagcctctcgccgctgcttccgctccgagcaccgaaagcgcgtgcctgaacgccttgggccgtcggcga

SEQ ID NO: 14073 - DNA, 168 bp, Homo sapiens
  source 1..168: mol_type = other DNA
gacaacaaacctgtgatgacctgttaggtgcggttctacagactttggaacagggcttattaacagtaactcactctaagtgcagtttgtacacataaagcggaggctccgcacccctgaaacggcgctcgttgtgtggggaggggcgacgcctgtgctgtcggaaca

SEQ ID NO: 14074 - DNA, 607 bp, Homo sapiens
  source 1..607: mol_type = other DNA
ttctcccctgggggacgttgaacacagtttctttgagtagctcctggtggactcaaccctgttcaactcagagacgggcctcctctcactgatgcaaagctttaaggcttctcaaactcttcgtattcttgtcaagtctaaagagactgaagaaaagatttaaatactaataaaaatcagtagataatttctgtaggttctacaaactgtttggtgttttaaatttaagtgtagaaattgtagaatgtggaattacgtgtcccgctggatccatttgtccttgtcacttggagaaaggccagtccctgtgacggggcagccctctctgtccctcaagaagcttcctccaggtttcctaaatgagaattgttacattgcaaattgttgaataaaatattttgcgcaggtgtccgcaggcctcggcgctgtcctggaccgcacccaggtcctctccggggacctgcacctgcctcgctgggacctgccggactgcggggctgccgggttgggaggggcgtgggagacccgtccgggtccggtgcggcgcagtcctccggccgccaggggccgctgtgggcggggccggggcgcggggcggggaccgggc

SEQ ID NO: 14075 - DNA, 480 bp, Homo sapiens
  source 1..480: mol_type = other DNA
ggctccgcgcggtggccgggccgcccctccctgcccgggcctctgtgcagagcgaagggccccaggacgctggccagggactggcggcagccatcgaccaacttccggcgccgctcggtgcccgcggccacgccgtaaccaggcaaccagcgcgcaggcgcagtcggccctccgcgtcccgcagctccggccgctcccggcgcatgcgcggccgccgccgcctgccctccagcctcccggaagaatgcgaggagcgcgcccgcgtcagggccccgcgcttctcagctgggcggagttgctggcatcggtcctgcagactgcagacgtactgggacggccccggcgcgcctggccgggcaggtggcgaggggcggggccgccgggcggggccacgggcggcgtctgggccgacgagccgaggggcggggccaggggcggggcgcgcgctgatgtcgtaagccggacacgtcggcggcgcgg

SEQ ID NO: 14076 - DNA, 879 bp, Homo sapiens
  source 1..879: mol_type = other DNA
gagcagattggccctggtgccacgtcagccggactgaagctctccctgcaccgcctgcggccctgctggcgtggcacaccccctccctcaccagccgccggcccagctggggacaagggtggctcccacccagggaggacctcagccgctgctgggagctcagcctcccgcgatgccatcgggcgggcacccccaccacggcgcctgccctctggaaggagcagcagaggaaggccgcggctcttccctgcccttgccaggcaggtgtgcaggtgagtgggcccggcatggctggccgcttcctcaaccgctgagggcacagaggatagtgcccacctgttccctgcgatcttccgcgggagggcgtggatgctgcctggcctggccgtggcaggcacaggagcgcctacccgcctcacccctccgctgggtcgctctggccgcccgagcgcccgggcccactcgccaccgacgtgcactcagccaaggctgggaccccagcgcccctgtggggctggcggccgggggaaccgagtaggccgcacctccccgggaggacagcagggctggggccagggtgggcctgggagggcccggcgcagcaaaggcgcagggcggagcttggggacgaggagcccgcgcgtcccccttgcgagtcggcggacacccggctccgcgcggtggccgggccgcccctccctgcccgggcctctgtgcagagcgaagggccccaggacgctggccagggactggcggcagccatcgaccaacttccggcgccgctcggtgcccgcggccacgccgtaaccaggcaaccagcgcgcaggcgcagtcggccctccgcgtcccgcagctccggccgctcccggcgcatgcgcg

SEQ ID NO: 14077 - DNA, 464 bp, Homo sapiens
  source 1..464: mol_type = other DNA
agggaagtggtgacacttgtgtccagcctccaggtgggccaccaccggcgggacacctcccagcactgggtggaggcctctgctggctcgcagtcagtcttaggcttgctctatcttagagatgaagacctgaagcgtctcaggggcaggctgggccttcaacggaagggtctatggcccaggtgtagggtgcaggaaccctccactccacgctgagagctgtctccgtgcactgcaggtgatgtggtgattccctgaggtccagagaccttgcatctcccatagcttagtgcccaccccggtgggaccacagggtttcggaggaccctagagggtcgagccctgggctcctggctcttgggttctttgaactcgcgagcggcaaaaggcgaggcctccttccgcggagggtgggggcagcggggctggggctgggccctaccacgtgctccctagtcaggaat

SEQ ID NO: 14078 - DNA, 461 bp, Homo sapiens
  source 1..461: mol_type = other DNA
tccctagggataaaaaataagattttcttcaccttcctaactgctggcaggggacctgagaactgcagggcattccctggcttcctgcccctcctgggactggggaccccccagggacagcctaagcatttatcttcacgtctgctgggggctcccagggatgctcccatcacctgctgccagcagtggggcatgccggtcccctggggtgtggccaaggggctgtgtctcctgcccgggctgccggcccaccaacgggtgacacgcccggcgcagtgggggactccgcacttcttccaggtccgggtccctgccctgtggagcgcgcacccgggcaggggcatggagcgtggtggcgccttaggaggaggtcacacaacccctccgcgaaactccctgagcactgggtgtgaagggcagcggcgcccagcaagggccatggactcctccacgccatcagc

SEQ ID NO: 14079 - DNA, 806 bp, Homo sapiens
  source 1..806: mol_type = other DNA
ggccaccttaggcaggcggcgcccgggcaggagcgtgtcgacgcgggtcccccttgggggagcggggcacaatccgtccgcgaggcactggtcccggctgctccctcggggcgcccggagtcccctgcccagaggccgcggcgcccccatccctcgcggtcaagtgctcgggcaatcacggccagggatgtctggcggcgatcgatcctctggacgcctaaagccgcggccacggggccctcgggagggagtgaagccgctgggctaggggcgcacacacggctaggccactctcccagagccctgccccgggcccggggtcccccaacgtggcctcagctgctccccgcccggcccagcgcacggtgcacacggctgtccgcggcctcgagttgtcgccgagcgcggcaaccgccagagccggatccttccgcagccccggctcaaacttttggcctctgaaaactttcaaacgacccacgccgcgccgccgggtccctcctccccggagaggctgggctcgggacgcgcggctcagctcggggaggcgggaccggcgggggtggggccgggcggggcggggccggcgggggcggagcgcacctcgactctgagcctcactagtgcctcggccgcgggagggagcgcaagggcgcggggcgcggggcgcgggcgcgggcgcgagcgcagcgaaggaacgagccgggcgcggagccgggcccgggggcctgcgagagcacagcgccgccagccagccggggaagagagggcgggaccgtccgccgccgccccgggaccgtacgccg

SEQ ID NO: 14080 - DNA, 519 bp, Homo sapiens
  source 1..519: mol_type = other DNA
gccctgctctcctggggttccaggcgtgcgcccacctttgccacagtggctcgctcggcctgaggctcccactgccgtgtgaacatgacagagcaccccctgtgatcacccaggccgcagcctgctgccagcccagagcacccctgtgaagtggggctgagggcattgggcctgcttgcccatctccagggcaggggctcacagcctaggggagagagcttggactccatgggcctcagggacccacggaacaggctgttcgtggctggtccctgccttggcctggggcccctccaagctcccgtgctgtgtcacacacatctgggggtgtcctgggggagggcccagcatccttggcccaaagatgcagcagctcccttcgccagccacacgtgagcatggcctgtgaacccacggtcctgggagggccctgggcttgcgtcctcctgatggcccaggggacggcttccccacccctgggcagtttgtccaggggctgggaagggcccatcccaatcc

SEQ ID NO: 14081 - DNA, 776 bp, Homo sapiens
  source 1..776: mol_type = other DNA
ttgctccgaggggcgcccacgcgggttgacacagggcgctggctcccggggtctgaggggctgctgaattgggctggcccgagccccacgtgccgcgcccgcagtaacagctgtaacaattgttgtgtgagccccatcttataaatttggaaccagggacctctggtggactgtgctgaactcagcagtgacccagtgaccccggtgagggtgcctgagagagggccaggtgggggccggcgcaggggcccccaacctaacacgctaaggctaggaggcaggcctgggctctgccatgtggtctcagaggagatctgcggtggggacggtcatgatgcccactgcctgcgaggctgcaggacccagctcagtgctaacctgcgccgggcgcctaccgcgcggccccccagcggctgagatgggcgtcccggggtggttttcagcctggggggcttgaaagctagcaaagggcccgcagccccgtcagtgtgggcgccctgggcggcctctcctggctcctggcggccgggcttggtcgtgcgtccccagcgaccgcgcagcgagcgccctgccgcggggactcgggccccaggattcccggagggggtgctggcgggccgcggctcagaggcgcgtttgcgtcagccccgggttccagcagagtcactgcccgcccgggggcagctcgtccgccgcggggcctcagtttccccgtctgcgcaatgggggcggggcggggccgccaggtggggcggggccgggggcggggcggggcg

SEQ ID NO: 14082 - DNA, 607 bp, Homo sapiens
  source 1..607: mol_type = other DNA
aatgttcagggaaatgttttaacagctcaactctgcatctgaaaaaaggggccgtgctcccctgctgacccgttagagcgcagggcggccagcactcccgcgtgggggccgggccaggtgactgctgcccttgtcccagctgcaccttgccctgccacgctggccgtgctgccaagcggatgtggcccccggagcgtccctggtgacaaggctacttctggcacccagggtggggcaacccagccccgcccagacacacgccccagttggcctgcgcgcccccacgagtctccccgcaggggggctttctgccaggtggccactggtcactcgggggcggttccggcggccctttgcgtggccaccggcctggcacgggcgcatccccgctggttttcgcgcgcgggagcctgtggctgccccggcagcggggggagggggcaccgggcggggcaggaggcccagaccatggggggcagcgccagagcccgagccaccggcaagccatgatgggggggtcccctgggaccgcgggccgggtgacccagggcgggggacagtgtcggggcggggcgccgcacctagcccttccctgccgcgcgctccc

SEQ ID NO: 14083 - DNA, 757 bp, Homo sapiens
  source 1..757: mol_type = other DNA
ccagtctcattctagatattaaaaattaaaaccaaaatgtaaataagtctcaaaacttaataataaagaaacaacgtgatttttattaatggtcaaaaacttgaatgtgtgttaaccgcccgggatgcggagcagctggaagcgccggcggccgcggggagggagcgagtcttggcagctgctggctgcgccccacagttgttggctcatcccgcaccccacgcggaggcgaaggaagtgtcctcccggcgagtggccaaggcgcggggtctcagccaggagggaagggtcggaccccggggcgggctgcaggctcggccagcccagggctccgcgcgtctgaccccatcctgaggacccaggggaaggaccagccctggctctgcggcctcgaaccgggggcgcgcgtggggagccctgaaccccgcagcctgcgtagcgcacggggcctctctccagcgtgggaagagcccccgagacgcccaggagcccgacaggcgcgcccccggccccggctccgcctcccggcccatcccgcgcgcccccagcccctcccgcagcaccgttgcatgaggggcggggtctgcgggtgggcggggcctcggtgcccgccccctcctcagccgagccgggggtcgaaggcgggccgcgcgccaagccccgcccccgcgcgcctccgccgcgaccctcccccgcgcgcccccgccgcgccgccgtcggccgacagaaaggcgcgcgccctcgcctttaacgcggg

SEQ ID NO: 14084 - DNA, 643 bp, Homo sapiens
  source 1..643: mol_type = other DNA
caggctggcggctgctggcgctggtgctggtgctggtgctagtgctggctgcagggtcccaggtgcaggagtggtaccccagggagtcccacgccctcaactggaacaaggtgagccatgtgccactggtccctgagccgggcgccggctctggagctggagcaggctcctgcacagtctcccggcagccgcccaggagcagggctaccagcagttccaggcacgggcgctgcccacctggcctctcccactgcagcctccagcacaggggccccgcaagttgcagggcaaaggcagggagcctcgagggcccgggcacctgctgagtgagccgtggcagcactcattggcacggcggtgcccagggcgctaagtacccagcccccaggaggccatgtgggaaggagccggggcctctgaggtagggggcctcccacctgctggcgcccacagcccagccctttgctgcctggggtccctgaccagccgggcacctgcttctctgcagccctgctccagtggccagggcttagtggccgggaccgaggcggcacctgggcggagctgggactccggctcacagctgggtgggaacctcgggggtggggacagcccccggtggcagctcctgtccccgcccaca

SEQ ID NO: 14085 - DNA, 688 bp, Homo sapiens
  source 1..688: mol_type = other DNA
ctcagacacccaaactcaggcccgggctcagaggcgggggctggtcagaggagccgagctccaccaggaccgcagctggggtgccagatggctggtggggctcagagcagcccctgactccccaggctcaggcttctctgggctggggttgtgtctcttgcctgggcaggggcagggaccccagacacctgagcctgcaggtcctcctgtgcgctgcctgccgtcctgggagaagcacaggccatcagatgccttgacctgcaaggctgggcatgcacacgcatgcacatgtgagcacacacccacacatgcacaccgggcacacagccccggcccgcccttcggcacctgctcaggtgcttggtgccaggccctcaagaaggtggtgggggctgtgtgtgtggctgccgcgcagagctcaccatgtccacatctgccccagaagggccacgaccagccctttgcctgtcacctgggaggtctaggatgagggccagggcgagtctcaggggcacacacagtgaccccaggccgggcactgagggcaggagggtcctggggcctcagaggggcctctgtctgccagggcagcccaggccagcagtgaccaccaggtggggcagtgccggcttcccgggtagcagagcccaaggccacacctgttgcctccctctctcccgacacaggc

SEQ ID NO: 14086 - DNA, 470 bp, Homo sapiens
  source 1..470: mol_type = other DNA
gagtcgcgggcgaatctccgagaacaggtttccgggcatcggccactgctggctggcctggcctggactcctgagcctctcctctcaccgggccccggggtcttgaccctgagtgggtgacaggctttgagaatccctgtgagtctgacggccacggcctcacccaggccgttcttccctgcagcatccccaggccccctgcgggcagggacggagggctgactccgctcccgagagccaggaggccctggacagaggattggaaccttgttcccaggtctacaggtacagggctgggctggtgtgacccagccgctcctcgttcacacctgggacaggctggggcagtgcttgtctgtctgtccgtcagtgtctgaaagccccttgatgctggcaccaggggggaggggggctctcacttgaattggcccctctgtccctgtggccagcatcagctcagcggcccctgg

SEQ ID NO: 14087 - DNA, 490 bp, Homo sapiens
  source 1..490: mol_type = other DNA
ggtcatggacgctgttggccagactggccttgtggcctcaggcaggcgcacccgaccacatgcatggctggtggcggcgtgctgtggggcggccgtgctacacaggggacacctacagggcagccgggctgtgggggtagccgtgctggggcaggagtcggtgcccgcctcccttcacagaagagtggcctgctgggtggcgtggtgggtgtctaccccctggcaggctggcgacagagcccaggcctgaaccactgagccaggtacggggcccagagagaagaacctgcccttccccctgcacctgcgcctgcagggtatgggcaggggccccactgcaccccccgggccaggcctggcctcagggcgagctgggaccaaggggctccaggctgaggtggcagctcccacgctggggactgaccacttagggagcgccggccccttcccccgagtcggagtcgcgggcgaatctccgagaacaggtttc

SEQ ID NO: 14088 - DNA, 534 bp, Homo sapiens
  source 1..534: mol_type = other DNA
ggccctgctgcgtgggtacagggcaggtggccagggctgcagcataaggcggcccttgcacccttccagagggtgcaggccacggcactgggggaggaccctcccggctgcctcccagtgggcttcaggggctcagatagaccctgccgagcacctctgtcctctgctcccggactggggctgcagagagctctcaaggggccttgggaggcacaaggttctgggggtgggccaggccacaaagctttttcaaaaggctttcagggactttttatatttaatgattgaaacaaaagatatccaaaaccgcgttcctgagaaccacgcctcctgccgggcctggcagcggacagcagtctccctgcttcccaggctgggcgagggagagcgtgggatccacacactccagaccctctcctggctgtgcagctggtctgatctgggctcagaggctgccactgctcagtgctcccctgggtaattgcaggaggccaggagggttcctggcagttagtgccacccacctaaacgggt

SEQ ID NO: 14089 - DNA, 619 bp, Homo sapiens
  source 1..619: mol_type = other DNA
gacgcccttgggcagaggactggcagtgctggcctccctggcaggactcccgcccctgaccagaggggtctgggcgtgctccgaggccaccccagtgtccctgggtgctctgtggggacacagagaggtcacttgggaggttcctgcctctgccagactgcggcgccttcctgcagggccagcccagccctgtccggtcccgtccggtccctggcctgcttgctggaagcccagctgggggctaggcctctctcacagtgtgggggcacaagctctgccctggacactctgccagtgtgaccctaccccccatgttggggagggggcctagccaggccctggcccagcccagccagacagagtgtggacagccaggcaaggcaggacaagtctctgctgtggcttggcagtggccccgtgactggtgacatagtctggcaggcctaggggacaaatcctcagcccgggtgcatcaggccagagcctggctgtctggagccctccaggaaatgaccccctgggctgggggacaagtctcagagccgaagtgccttccgcttccatctgctccgcccaggagcaggtgcacccaggtggtggcctgggctataaagctggc

SEQ ID NO: 14090 - DNA, 390 bp, Homo sapiens
  source 1..390: mol_type = other DNA
ccctgtgaagacggcccggccactggggctgtgctgggcacacaggccccggtgccggggggggagctgggttgtggccaggggactgccagccagcctgagcgctccaagatcaggaaactggcctggcccagcctggcattgtgccactgcactccaaacttatccaaggctgcacagccaggaagaggccaggcgggctgcaagcctgggtgatcaggctccagggccgggctccacactgcccccgggtggtgatgcctggtgcagcagaggccctccccactgtcactgtcactctggtcgctggcgctgtgcctccggcctccggagctctgactgccggctctggtccgttgccctcatgtggggtgggggtcaccgagcccc

SEQ ID NO: 14091 - DNA, 646 bp, Homo sapiens
  source 1..646: mol_type = other DNA
ggactttatcgatgaaaaagtagtaaatagttatttgtagttacaccagtgaatactagtggaattgtttgggctgattttagtttctcttaatcaaaattactagatgatagaattcaagaacttgtacatgttattacttggttatttgaaagtaaagactctttgtcatgcaaaacaaatgaggctcagctactaagctgctggttacagaaccactttgctaaacagtgattttatacatccccactccgtggtggcttatgagaaattcaatccctgattgtaaggcccggccggggggaggagcgcacgctctcagccacgccccgcccggtgcccgccttcgccccgcccagtcgtcgccggaggtcacagggcccaagctcctagaggcgtggccaggccccaggccccacccctctcccctctggcccctccgcctgcacccggcaggacccgcagtctcaggccccgcccccaggtcgcgtctccaaagccccctccgcctgctgccgcgcggacccgccctcaggcgccgtctcctaggccccgccccctccgcctgttccagcgcgggccggtccctaggcctcgcccccagatccgggccctgcccctccgtccgtgcgcaggcctgtcccgc

SEQ ID NO: 14092 - DNA, 292 bp, Homo sapiens
  source 1..292: mol_type = other DNA
tgcagtgacgcgatctcagctcacttagcaccatgttgaccagactggtcttgaactcctgacctcaggtgaccgagcctccacacctggccagtgttgttatggccgcctgagcctactaaggcaaaggctgcctggtgctccaggtactcccctctaagggaagggtggagtgtgagctgccggtgctgcagacccaccgcccggcagagctcctaagcctcgagcagctgccaggagactggccctgcaattccagggttgcccaggcactgagaatcctggctctcat

SEQ ID NO: 14093 - DNA, 330 bp, Homo sapiens
  source 1..330: mol_type = other DNA
ctcctggcctaggacttttagctgcccactccctgacagagctgggagagagcccttcagacagctgctgctgggcagtggagcggtgtcccccaggacagggcttggccatggagggggcatccccctggaccctggggcctggggcctccctgatgcaagcctcccccaggggattccaggccaggcccttggccggccacgctggccctcctgcgcagcaacatccgccgcggggcccaggactgggctttggcccgcccctcccctctgcctggcgagcagggcaggagctgaggagggcgggcctggatccagggggcatgtgag

SEQ ID NO: 14094 - DNA, 646 bp, Homo sapiens
  source 1..646: mol_type = other DNA
ggccacgctggccctcctgcgcagcaacatccgccgcggggcccaggactgggctttggcccgcccctcccctctgcctggcgagcagggcaggagctgaggagggcgggcctggatccagggggcatgtgaggacctgtgccctgggctccagtcaccccagcatccggtgggcaggtttcccaccacccaacccgagggcttggcatctgtgagcccacatcctgcagcaggggccccctctggctctccggccagctaggggacacccaggcgcctccgaacttggatggccaggatgggccagcggctgcgggtgcgcaaagggcccgctctagctcagccgccgccgctccgcagtatgaccctccaaggcctgcggctttgcgactggcgcactgccgcagcaccatggaggtaaccaggcaggaggggcctcgagacccaaccctccccaccccgccgacgagggacggagcaggtgcccagccccaggttccctgtggggttgccacgagcctccacccgcccgcctgctggcgggctccatggcggccccctacgcaaccacgagtgggcggtgcccttcccgacccaggtggtgcgggagaagctgcgcaagtacgtcttcgaccgtactgatcca

SEQ ID NO: 14095 - DNA, 721 bp, Homo sapiens
  source 1..721: mol_type = other DNA
ctgtgccctgggctccagtcaccccagcatccggtgggcaggtttcccaccacccaacccgagggcttggcatctgtgagcccacatcctgcagcaggggccccctctggctctccggccagctaggggacacccaggcgcctccgaacttggatggccaggatgggccagcggctgcgggtgcgcaaagggcccgctctagctcagccgccgccgctccgcagtatgaccctccaaggcctgcggctttgcgactggcgcactgccgcagcaccatggaggtaaccaggcaggaggggcctcgagacccaaccctccccaccccgccgacgagggacggagcaggtgcccagccccaggttccctgtggggttgccacgagcctccacccgcccgcctgctggcgggctccatggcggccccctacgcaaccacgagtgggcggtgcccttcccgacccaggtggtgcgggagaagctgcgcaagtacgtcttcgaccgtactgatccacctggtgcggcggcgcgggcagaagctggagagcatgcagctggagctggacagcctgcggagccagcccgacgccagcaaggaggagctgcggctgctgcaggtggagcacgggaggggcggggccaccggggggcgggacttgcgggtcccctggggagggctcacgggaggggcggggctaagagagcacgaccctctccggagaacc

SEQ ID NO: 14096 - DNA, 558 bp, Homo sapiens
  source 1..558: mol_type = other DNA
cctgcagggcgacacaaaggtgagggacaccctggagtcctcgactctgatggagaagtacaacacacaggccccggaactggggcccgggctgcaggcgggtggctggaacacaggtcggggtggcgccggctcccatcccaccgggacatcctggagggacagcggggctacagggtgcatcagttgtacctgcaggtgccatggtgaaggcctgggccggagcttccactgggggttcagcgtgagccgctgcgaatgggctgggctgagtcctcccggcacgctggggctgtccctggggcaaggcacctggcccgggtcggtggagggcgggggcgagaggcgggtcgggcggctgcgcctagctgggctagccccgtgtgcgagccgccgcctccgcccgcagagctacgtcccttcgcgcgccgagccttgttctgcgtaaggaggcagcccgggcccggaactgcgcgccagaaccgcgtgcgcatgcgccgaccgcgcgcgccgcgcccccgcggccctcgcggcgccccgtagccgcgcacccctccc

SEQ ID NO: 14097 - DNA, 603 bp, Homo sapiens
  source 1..603: mol_type = other DNA
tgccatggtgaaggcctgggccggagcttccactgggggttcagcgtgagccgctgcgaatgggctgggctgagtcctcccggcacgctggggctgtccctggggcaaggcacctggcccgggtcggtggagggcgggggcgagaggcgggtcgggcggctgcgcctagctgggctagccccgtgtgcgagccgccgcctccgcccgcagagctacgtcccttcgcgcgccgagccttgttctgcgtaaggaggcagcccgggcccggaactgcgcgccagaaccgcgtgcgcatgcgccgaccgcgcgcgccgcgcccccgcggccctcgcggcgccccgtagccgcgcacccctcccgtcccgccgagccggcgccaagatggcggcgctgactcctggagagcggtcgcgccggaggccgcgggggccggagcggagcagccgcggctgaggttcccgagtcgccgctcggggctgcgctccgccgccgggaccccggcctctggccgcgccggctccggcctccgggggggccggggccgccgggacatggtgccagtcgcaccccttccccgccgccgctgagctcgccggccgcgcc

SEQ ID NO: 14098 - DNA, 626 bp, Homo sapiens
  source 1..626: mol_type = other DNA
tgttgccatgagaaccctgcagggcaggcatggccaagctggaggctcctctgcctgggagccttgtggccccagggtgttgggcagtcactgcagtccctgagcaggtgctgtggcccacagcaagcttagcctggccccttagcccacagcccatgaggtcagggccgggttcaggcagtaggtcctgcccttcagagccaagggcatttcccaggcccaatgccttggggaggggctaccaggcaggtatggcaggtcacgtgcaggccttcccaggctggcagggaccggatcatcctggggacacaagaggctgcaggggccatctggccccaggtacccgccggccagtggggcacagagtagcccatctgctcctgcctcgcccgacaggaccaggccagggttcgggccccgggtgacactggcgggactggcaggctgctccgggccacaagactcctgcttagacactgaggtctgtgtcttgggggtgctgcagggaccctgtgctctgcacagccccaaattggagccagtgcagctcatgatccccagctccacggtgcagcccccactgggtgcggcccctttaagtacagccccatcaggggcagcactga

SEQ ID NO: 14099 - DNA, 595 bp, Homo sapiens
  source 1..595: mol_type = other DNA
cgccaccgccgggcacggcgggcctggatcaggacggcgaggcgggccggcgcgcgcgcgaggtggccttcatccacatccagcgcgagctgcggctgcgcggcgtcttcctgcgccacgagttcccgcgcgtctacgagcagcgagttcgtcgaggcggaccggcgcaccggccgccccttcatgtgcatgatcatggccgcctccgagccgcgcgcgctcgactgggtggccagcgccaacctgctggacgacatcatgtgaggcgccgggcccaccaggcctagcccaggcgctggcccgaaccctgccctgcccactcaggccccgcccggcccacccagggccgcccccgagccccgccagggccccactcgccctcggtgctccccgctgggaggcggggtgggcctgaggaccgccgagctctgccttcactcggaggggtcactactgcacagaccccacccgtagagatccggtccccgtcggtccgcggggctctcgctggagcctcccgactccgggaccctcgtccgtgtgcgcgagcgcgtcccgccgaggcggtgggcagggcggacggtgcgcagtgcgt

SEQ ID NO: 14100 - DNA, 622 bp, Homo sapiens
  source 1..622: mol_type = other DNA
gaccctcgtccgtgtgcgcgagcgcgtcccgccgaggcggtgggcagggcggacggtgcgcagtgcgttcccgctggtcggagccctccagccgctgcagtctgggccctgcaggagctgggaaaaaccgcagggaggtcttcaggccgatatgcaagtctcccagccgaaggggcaggggacctgaacaggggagcacctgggcctggccagagctggcgttcccagggaagcccacccgagggggcttgacctgtcccgagaggtccccgcacacccgctctggccgcacgccgtactgcgggcgtggaggcgcaagcccggcggcccggcctccacctgtcccccaagtgcaccctggtccgcgcccagagctctctggagggtgggggaggccaaacgcaagggccctcctggagtccccagccctacttcggagccaggggagggggcaccaagtgagagaaattgggcacccccgcccgcgcgtctgcaccggccaggcgtcccgcttgcccacccgccgccgcgccccgcgccccccagggcctctgcattcggccccacccctgagggccggccgggaacgcccctggaccggaataatttccagggggcaaga

SEQ ID NO: 14101 - DNA, 593 bp, Homo sapiens
  source 1..593: mol_type = other DNA
cctccagccgctgcagtctgggccctgcaggagctgggaaaaaccgcagggaggtcttcaggccgatatgcaagtctcccagccgaaggggcaggggacctgaacaggggagcacctgggcctggccagagctggcgttcccagggaagcccacccgagggggcttgacctgtcccgagaggtccccgcacacccgctctggccgcacgccgtactgcgggcgtggaggcgcaagcccggcggcccggcctccacctgtcccccaagtgcaccctggtccgcgcccagagctctctggagggtgggggaggccaaacgcaagggccctcctggagtccccagccctacttcggagccaggggagggggcaccaagtgagagaaattgggcacccccgcccgcgcgtctgcaccggccaggcgtcccgcttgcccacccgccgccgcgccccgcgccccccagggcctctgcattcggccccacccctgagggccggccgggaacgcccctggaccggaataatttccagggggcaagagctttcgaaccatagaacttgaatgtagcggctgccgttgcctccttgtaccggt

SEQ ID NO: 14102 - DNA, 509 bp, Homo sapiens
  source 1..509: mol_type = other DNA
gtgcaccctggtccgcgcccagagctctctggagggtgggggaggccaaacgcaagggccctcctggagtccccagccctacttcggagccaggggagggggcaccaagtgagagaaattgggcacccccgcccgcgcgtctgcaccggccaggcgtcccgcttgcccacccgccgccgcgccccgcgccccccagggcctctgcattcggccccacccctgagggccggccgggaacgcccctggaccggaataatttccagggggcaagagctttcgaaccatagaacttgaatgtagcggctgccgttgcctccttgtaccggtgggacaggaggtcagggctggcaagtccctcaggcctcccccagcctcgcgggccgctgccccgttccaagggtgccaccggaccccgctggagaggaacttctccgttggcgtttcctttaagcggggctggcggagccgcaaggcggcacgcagagcccgcctcccgcagtacaagcggc

SEQ ID NO: 14103 - DNA, 464 bp, Homo sapiens
  source 1..464: mol_type = other DNA
gggacaggaggtcagggctggcaagtccctcaggcctcccccagcctcgcgggccgctgccccgttccaagggtgccaccggaccccgctggagaggaacttctccgttggcgtttcctttaagcggggctggcggagccgcaaggcggcacgcagagcccgcctcccgcagtacaagcggcccccgggtcgggtgggaggaggcgctctcattcctgatgtggacatcgactccgacggcgtcttcaatccgagtccactcggctccccgctccggggctccggctgcagagagcaggcgggacctgcgggcatgccaggggcacgcctggcgaggcgggggcggggctggcggggcgggggcggggctgcgggccgtagcggactgcgctctgctccgagtcctgcccccaggctgaggtcctgggcgggaagggcgtgacacggcctgacaccctccccag

SEQ ID NO: 14104 - DNA, 575 bp, Homo sapiens
  source 1..575: mol_type = other DNA
catggactctggaggcccctcccaggtccctcttgcacccggcagggctgtgggcaggacacgggttcaggccttgccctgggaagccccatacacagtgggactccatggggtggtgcaggggcaccctgggggccagggctggttgtacacagggcacccccacagaccgggacactgaggctcagtgacacaagctccgttctgggctcctagggaccctgtgttccccacggctgagaacgcagggaccagctctggtgcacgtgctggactcctgcagctgctggactggttgagtcctgaccttggccagcaccacgctattgccagaggcacagtgagaggccacggcggcctctgcccgccccacactgccgagcagagtcctggtggggtgcctgggtccctccccattccagtgggagcctccccttcaccaggcagggcagggcagggtggaagagcgcaggtgggagctgaccctgggtcagaggccccctcctggggccactttcatgcttggcaccgtcagcactgggtggggccgggccgaggggccctccacttaacag

SEQ ID NO: 14105 - DNA, 465 bp, Homo sapiens
  source 1..465: mol_type = other DNA
ccccgctggagaggaacttctccgttggcgtttcctttaagcggggctggcggagccgcaaggcggcacgcagagcccgcctcccgcagtacaagcggcccccgggtcgggtgggaggaggcgctctcattcctgatgtggacatcgactccgacggcgtcttcaatccgagtccactcggctccccgctccggggctccggctgcagagagcaggcgggacctgcgggcatgccaggggcacgcctggcgaggcgggggcggggctggcggggcgggggcggggctgcgggccgtagcggactgcgctctgctccgagtcctgcccccaggctgaggtcctgggcgggaagggcgtgacacggcctgacaccctccccagtgggagttcctcccgcggcctccaagggcggccagggcacgtcctgaggccgccctccctgagtgtctgggcggcgggcgcatc

SEQ ID NO: 14106 - DNA, 486 bp, Homo sapiens
  source 1..486: mol_type = other DNA
tagctctgcggatcacgagatcaggagatcgagaccagtcccaggtactccggagtgagccgagatcgcgccacggcacccagcctgggcgatacgtttcgggccccacggccctggtcctcgagcgcaggtcccagccgcgcagggggggcggccgcacggctagagcggagaccccgcgccccctccgcccgcgtggcccggccggggtgcggggcccggggaggcacgggggctgcgcgtcggggcgcagccgccgcccgcgtgtgctcggaggccgcggggcccgggctccggggtcctcccgacctgcagccccagcggctaccgcgcctcgccaggccaggccaggccccgacgtcgccttccctacgtcgccggcgcccggccacgacgtccctcagatggccccgagcacgggaagtgcccgccccccgcgtgcagccagccaatgggacgccgaaagcggggaggtgccgaggggac

SEQ ID NO: 14107 - DNA, 334 bp, Homo sapiens
  source 1..334: mol_type = other DNA
cgggggcagagacatggctcactccagcctcagccactcaggtagctggggctacaggcgtgcacaactcccgagctcaagtgatgtgtgtccttcccagttcacagagctggcacggatgctgctgtgtgacagcacaagttcatgtgcttgagggtctcctggccacagccagccccaggcttgccctggacaggcgggcagggattgccctgggggagcccccctggggagctgatgaggagggagcctctgtgccccgtgcactggcctgagggggtgaggccagggctggggctgctgcaggggactctggcccggagctgcggctgcc

SEQ ID NO: 14108 - DNA, 633 bp, Homo sapiens
  source 1..633: mol_type = other DNA
cccccagccgccatgactagtgggttccaggggcaccacggggcctgccaggactgctggggccacactcggctcatggccgtgactgcgaggaaggcccgggcccaggactgacaacttcctggtacggctgcgggaacacacagaccaggtcctgccagttcgcgtcctgctccaagactgcactgtgaaggtgaggacggccaggtgtcctgcacaccccacccagctctgccgcagcacggaggtcccaggacccaggcgttccaaccaggtggtggaggtgacagcagcctccctgcatccgagggtcccacacacagccgcctgcttcaggggcaggctcctgacagtggctggaaggggtccctgctccctggtggcctcgcctcatggctgtgtagtagcaggcccccgccccgcgacctggccaggcggatctggagcaacgacctgaccatctcgctgctgcacagcgcggacatacacccagttctcccagttcaacaaggacgactgctggcctcgggggtgttcctggggccgcacaactcctcatccggcgagattgctgtcatcagcctaggtgagcacgggcggcgggttgaccctgcccccgccccacgccgacag

SEQ ID NO: 14109 - DNA, 592 bp, Homo sapiens
  source 1..592: mol_type = other DNA
gtcgggagttcaagaccagcctggcgccgggcgtgatggcgggcgcctgtagtcccagctactcgggaggctgaggcaggagaatcgcttttgcagtgagtcgagatcgcgccactgaactccagcctacaccggccatgtcgggcggccgtcaccactgtccgaggcgccgctctgcgcccggcaccgggggaggcggagggacccgcaggtgtcgggtaggtgcggccgccccgccagggccccgcgtcccgcgcgcgacgcgcgcctcgtgggaaccggtgtcgcccggcttgggctcccggctcacctctcgggtgtgcggcaggggtctccgccccggggccacgggaggggaagcaagggcctcgctgtctcgccgcacctggggaagggacccccaacgccccggcgcgctctttgaggaaaaagacgccgtctcagcgccgaccaatcggcgcacgctgcggctcctgcgggctcgctggttggctccggcgtcagtccgtcaggcgcgctcggagcggggcgtcccatgtccgtccgtcaggcgcacgcggcggagcggcggcggcggcggcggcgttggggg

SEQ ID NO: 14110 - DNA, 434 bp, Homo sapiens
  source 1..434: mol_type = other DNA
agggcactgtgggagggcccctcacgccggcgtggcctctgaggcttctggcccagcgagccagctgccaggagcagcgccacttcctggcagggccctggcaccatgtcctatgtacaaagtccgagttgacctcatggccaacgtcacggggttcatgaagccacttgctcagggcccggcaacagggagcgccggaggcgggtcccgaaccagcgttcgttgagcgcccacgaccgccgcccgctggccacaaggggcgctgttcccaatgcgcccgagtgcgcgcaggcgcacaaagccggccaggccgccggagcccaaggcgcaggcgcacgaggggcggatgcgggctacccgcgcgctctgccttcctcggccatcgatgcctcggggctcgtggcgtcgggcctggcgggctccccgttgggcgg

SEQ ID NO: 14111 - DNA, 779 bp, Homo sapiens
  source 1..779: mol_type = other DNA
aggacccggcagctccgggcgggccgggccggcccctctccgccgcgtcatcccccggcctcctgcggccggcagcgggcgcccctcagcccgccagggcccggaccgccgcacgcgaggcacggggacaccaggcgccgtccggggacgggcttccgccgagaggaagctcggggcggccaggcagtggcctccgccctgcggccctggagcagctctgcccggcgggctcggggcggacggcggggacgagcgcacgggcggcctcggggctcctgcactcgcccaaggcgggcggggacgacaaggcgggacccccgagggccgcaggcgcactcaccacggccgcctccgcccgctgcgccgcccccgccctgcgcgacccggacccgcttccgctgccgcagccgctcggaccgccgcccccgcccaacggggagcccgccaggcccgacgccacgagccccgaggcatcgatggccgaggaaggcagagcgcgcgggtagcccgcatccgcccctcgtgcgcctgcgccttgggctccggcggcctggccggctttgtgcgcctgcgcgcactcgggcgcattgggaacagcgccccttgtggccagcgggcggcggtcgtgggcgctcaacgaacgctggttcgggacccgcctccggcgctccctgttgccgggccctgagcaagtggcttcatgaaccccgtgacgttggccatgaggtcaactcggactttgtacataggacatggtgccagggccctgccaggaagtg

SEQ ID NO: 14112 - DNA, 536 bp, Homo sapiens
  source 1..536: mol_type = other DNA
ggctggatagctgggacccagctaacttttaaatttatgtcaaactcctgggcttgagagatccggcaggaccagcatggggtgcccactcccattagtggggcttcccagccctgcccctccctctgggcagagactgctgcctgggtgctctgcaggccccaggggcccctccctggtcctgttcttgctccagggccacggcccacgctgcggttcaggcggtaggggggcggctggcaggcccaggccctgcagggggaatgcccgggtttggccacagctgggccctgtacgctgtctgcctgggacgcaacggcaggctgcgtggggcctctgaacccccagcatggggcacgaggtggaaggtggacctgggggcccctcctaccccacctggctggaacccaagagaccgcaggtgggtgggtgggacctgaggagagcccacaccaagcctgccctgggcaccacctctcctgccagtcctgaggagggaggcagaggggcacacccccttgggaggggcacctgct

SEQ ID NO: 14113 - DNA, 639 bp, Homo sapiens
  source 1..639: mol_type = other DNA
cctgccagggaggcccaccacatgtgcctgcctgtgacggcctgtgacagggccccagccagggccaacgagctggaggggcccaagagctgggtgcagcgctggggtaacaggacagccccacggggtgctcccgagtctggaccagactcggggtggggaggcccagactcggggcaagggatagggcctgtgctcaagcccaaaggtgccccaggctgaaatgggcacccaggggtcactatcagagccccaacagctggccatgggggaagccatgcccagcaaacctggccctcgggaccctgcgggccagatcaagtttcgggtcctggcccccagtgggaagtcaccagaggcctcggaggcgggcatggctgaggaacacagcccctgccctatcagggccgctgggttggtgggccctgccagcaggacaaggtccctgccagctctgtctctgggaccagtgggcaggggcctctgcctcacccccacgctgcctcagctggggcagcaggcccaggcctcttgcataagcgccctgtgggggacgaggctgcagctgtgcctggccaccccatcccccagtgggctgtccccgggccctgggtggaggccaagcctggcccataaata

SEQ ID NO: 14114 - DNA, 534 bp, Homo sapiens
  source 1..534: mol_type = other DNA
tctcccctcggtgtacctccctggggctgcaccctaaagcgtcagggccaggggggtggagacctgcactgccggccaaacaccaaagccaggctggcctccccgccctgttgcgggcaggtctggaatttgagccctgccctgagcggggagggccctgcctgactgctccgtagctgggaaggggcggctcccccaggtgggatcaccctcccgatgccctggtgctgcagatggggaagccggctgggcctgctcacccacacccactggctttctgggctgggagcccacggtggaggtggtcctgacccagagccgcctggctcccagcacactcagtaccgggtgggcggatctccgtgcacaccagactcaagttcacaccctcaggctcagacaccccggggccgggctggcgttgctcaggcagctggttctgcgcgctgggcagcttcatctgcccgcctaggtggctccacggggcgggcccctcggccagggagggcggggcgcacagggagacttaaagag

SEQ ID NO: 14115 - DNA, 443 bp, Homo sapiens
  source 1..443: mol_type = other DNA
tgtctgttgatcgatatccagcagaagccttcttccctggagatcgcagagtctcgctctggccagactggtctcgtcaggcaatctgcccgaacttcttacgattagagttaggaagtatccgcagagccacggggaacctggactcggctggggctgctcgcgggcgcgagggccagagcccgggatcgcgccgtggagcccacgaccggcgaggccagcgctgggggcagggcctctggatccctgacccaggacgccctgctccggcccgccccgcgcggcctctagtcgcctgaagcccgcgcgggtaccgggtccgcgcggcccggcctgtgcctttagccccgagcccgcgactggcctgcacccggctccggaagtcgttcttccgcgcaggagccctgagcccgcacagccccgcctcccggcgcccaagcccc

SEQ ID NO: 14116 - DNA, 511 bp, Homo sapiens
  source 1..511: mol_type = other DNA
ctgtgtcctccagagaagcatcaggctgggctgactggggcagcacggggagaggggcccgtaccaaggccctgggagcaggagagcagtgccacctcagctgccctgtccaggctggtgaggcaccacaccgcctgggggaggtgtggccaggccaatcctgtgggcaccccaggtctctgggtggaatctcccctcggtgtacctccctggggctgcaccctaaagcgtcagggccaggggggtggagacctgcactgccggccaaacaccaaagccaggctggcctccccgccctgttgcgggcaggtctggaatttgagccctgccctgagcggggagggccctgcctgactgctccgtagctgggaaggggcggctcccccaggtgggatcaccctcccgatgccctggtgctgcagatggggaagccggctgggcctgctcacccacacccactggctttctgggctgggagcccacggtggaggtggtcctgacccagagccgc

SEQ ID NO: 14117 - DNA, 408 bp, Homo sapiens
  source 1..408: mol_type = other DNA
tcccgagtagctgggattacaggtgcctgccctcggcctcccagactgctgggattacagcccatataaggtcacattctgaggcactaggggttaggaagcctaagaatttaaatccctgcagtgggcatgcatgggggtggtggccgtgccacggagccacgccacgccacgccacgccacgcagtggggcagccagcgaaaccggccgggtgtgcctgtagttccagcatgaggtggagaccagcctgggcaacatggctgtttctagtaaataaatgaattgattaaaccataaaaaaggggggtgttggatggccactgccgctccacagtccacagcccacgcccacagaacgcagtggggccgctgcagcggtgaagtgttaaagacacattgcctgccag

SEQ ID NO: 14118 - DNA, 436 bp, Homo sapiens
  source 1..436: mol_type = other DNA
gtgtgtgggcctggcagcagctgagcctgccacccatccccaggtggacatcaagacagggcgttcagtggtgctgacatcacacaggtgagggcgcccccaccccctctttgtgcccacagcatggaggagtgcgaggcgctgtgcacgcggctggccatcatggtgaacggtcgcctgcggtgcctgggcagcatccagcaccccggtgagccggggcagggccaggggtgggctggggcgggcccggggggggcggccaggcagcggggcctggggctctggctgggcggcgcagggctccgggccaccggcctgtcccactgcggttcttcaaccgcaacttcccgccatgctcaaggtgcgccgtcccgggcaggggctacggggtgggggggcgctgccaggcctctgacctccccccctgcaggagcgg

SEQ ID NO: 14119 - DNA, 420 bp, Homo sapiens
  source 1..420: mol_type = other DNA
cctgcgctggctgcagcaggtgccaagggtgcccgcgagggggtgtggggagcccctctctgcccggctcggcaggcgcaggtccccctctgagccgcccctccaccccaagtatgtagcagagctgcggctgcaccccgaggcactgaacctgtcactggatgagctgccgccggccctgagacaggacaacttctcgctgcccagtggcatggccctcctgcagcagctggataccattgaccctgcggctggggtgagcggtggggcctccgagccaacccacgacaccccctgcctcgcacatgcccacggcgggctccagcgatgccccgggcttccccgacgaggagagcattgggtggatcttccagacccggaaggacggctcgctcccgccctggcggcctgggcccaata

SEQ ID NO: 14120 - DNA, 455 bp, Homo sapiens
  source 1..455: mol_type = other DNA
ggttgaagcttcagtgagccgtgatcacaagaggcctggccaggctgaaatcgcccatctcccaggcccgcaggctggagggtgtctggggtgacagtgctggggaggcactggggatgcggctgcagccagggagccacgggtggtgctgaccagggccccaacaggctaagcccccggggctggggcacagggcttgtccctaccccaggtaggggtgggcaggttgagggcaggaagcccccctcacccatggctgtggcttgtgggtcctgccctgacccagccctgtggactgagcagagagggaagctgatccctcactcactagcccccattcacaggggggaaactgagtctgggaagcgccgtcagagccacccatggggtcagcctgtcctctgaggccacgcggaggaactgccccacctcccggggcgccccagcaggtgcca

SEQ ID NO: 14121 - DNA, 441 bp, Homo sapiens
  source 1..441: mol_type = other DNA
cctgagttccctcaccttaggggcacccggctgccgtgatttgagaatctcgtctggccctcggggaggcccaagctggggacagctagtccctgagcccaagtgacagagcctcccctccctcgtgctgctgcagggcacggccccacccggaggctgcgaggcttgggggtcctggccgcctgtggctgctggggtcagcccctcggggtaccccggcaccccagccccactgaccagcgagcctgctggccagcgccgacgccgtggtcttccaccaccgcgagctgcagacccggcggtcccacctgcccctggcccagcggccgcgagggcagccctgggtgtgggcctccatggagtctcctagcctctttgtgccctatggccgcctggagccccactgggggccctcgccaccgctgccagccaagagcaggg

SEQ ID NO: 14122 - DNA, 384 bp, Homo sapiens
  source 1..384: mol_type = other DNA
aggagccacctggctgcagcgcccaggcctgggctcagggtgcctgcacctgggccttctctgccctgggccaagcctgcccgtggacatctctgggcctctctggagaccagtggccccaggactagcaagtccccgagatggggcctgagttccctcaccttaggggcacccggctgccgtgatttgagaatctcgtctggccctcggggaggcccaagctggggacagctagtccctgagcccaagtgacagagcctcccctccctcgtgctgctgcagggcacggccccacccggaggctgcgaggcttgggggtcctggccgcctgtggctgctggggtcagcccctcggggtaccccggcaccccagccccactgacc

SEQ ID NO: 14123 - DNA, 489 bp, Homo sapiens
  source 1..489: mol_type = other DNA
accccgcagggccatcccagcctggctggcacccaacgtgggctgggaacctggcctccaggctccaggccctggcttagagggagcggggagtctggacttcaggctggatcccttcctcttcctggagcgggtgctggcccccaacccgcttgcgctccttccctttccagcctggaaagcccctctgctgcaggctggaggaagggaccctgggcccagcctatagtcagcggtccgggaccaggcccttgcaggcacgcgctgggctcctgtgggaactaagggccccaggacagacctcctctccgggcatctgggttccaggagccacctggctgcagcgcccaggcctgggctcagggtgcctgcacctgggccttctctgccctgggccaagcctgcccgtggacatctctgggcctctctggagaccagtggccccaggactagcaagtccccgagatggggcctgagttccctcacctt

SEQ ID NO: 14124 - DNA, 452 bp, Homo sapiens
  source 1..452: mol_type = other DNA
ggcacccataatcccagctacttcacttgatcctgacttcctgggattcattgagatctccaggacgtctgggtctggccacgcctgggaccacacaaggtccctggggctcagggtgaccccgcagggccatcccagcctggctggcacccaacgtgggctgggaacctggcctccaggctccaggccctggcttagagggagcggggagtctggacttcaggctggatcccttcctcttcctggagcgggtgctggcccccaacccgcttgcgctccttccctttccagcctggaaagcccctctgctgcaggctggaggaagggaccctgggcccagcctatagtcagcggtccgggaccaggcccttgcaggcacgcgctgggctcctgtgggaactaagggccccaggacagacctcctctccgggcatctgggttccaggagccac

SEQ ID NO: 14125 - DNA, 228 bp, Homo sapiens
  source 1..228: mol_type = other DNA
gaggcaggccccctctgtcctcattcccagcatcccagcattttgggaggccaaaaaattttaaaaaattatccaggaaacttgtggatcacctgaagtcagaggcacccataatcccagctacttcacttgatcctgacttcctgggattcattgagatctccaggacgtctgggtctggccacgcctgggaccacacaaggtccctggggctcagggtgaccccgc

SEQ ID NO: 14126 - DNA, 549 bp, Homo sapiens
  source 1..549: mol_type = other DNA
aggtcaggagttcaagcagctgctacagtgggccgaaatggcaccactgcactccaggctaggcgacagagacgctgtcacctggggaccctgaacaccttggacagctcccagctccggtcctcagtggctccggatcactcttgccccctggtggcctcactgagcgcggccgccgcggctccagccaaagctgcagtcggggccggggccagtgggggtgcccctgcctctgtgggcacacctcctgtgcacctgcccagctcgtgagcacctgtctgcgtgcgcccggcgctcctgtgtctctgtgcgctcgcgaggaggcccacacaggtcctctgccccatcgcgggtgcgggtgaggggctcggagtccgcgcatcctgcaccggccccagagaccgcaggtgccgagacagcagggggagggggcgcagtctggagccgccctcccgccccctcaggtggagcgcgcaggcgcagtctccgcgtgcgcgcctcgccggcgcctccatcccggatccttgctgcagcgtcagcgccgccgcc

SEQ ID NO: 14127 - DNA, 711 bp, Homo sapiens
  source 1..711: mol_type = other DNA
gtctggggccagctgcgcttcgcctgccccagccgtccccaccccaagcttggcctggggaccctcggccacgtagaggccccctggggaagcctcctctggcctccgcagcccaagcctctgttcccctcaggccgagggggcagcaggcgcggctgaggccctgggctccttcacctcagtacagggcccaggtgaggtggatgggtcagctgcgtgtctctggagctgacctgcgctggctcagcgccgcaggctggcggatccttgctggccgggagggcatcccgcaggccagcctggtcctcaccagccctgggagttggcgctcagggccctgctccacactcctgagtccccagcccgggccccgcgtggctccgcagccgagcgagtctggcctcctttcccgggcccgggaaaagcgcggctctccagcacaggaccctccgagccagcctcgcgccaggtctcctgcctccacggccgggggatccccttgctgacatagccgcggggcgcccgggctcagacccgggagccggggggcggtgctggtgactcagccgcgcccgcgtctctcacctgcgcgggccggacggcggaagcttgggagcggaggcgaaacctgtccgcccgtgggcgtggccggtgatgggcgggcccgcccggcctcccgcccctcgtcccgccccggggcccctaccccgc

SEQ ID NO: 14128 - DNA, 556 bp, Homo sapiens
  source 1..556: mol_type = other DNA
cagagggccaaggcaagtctcggattgggtgtctggggagggtgtttgcaccctgaacacctccggccagccctgagatgggctcccagggctagaacccaggctaaggcctggtctcacctcccatgtggacagaccaaccctgttctgcagcaggcaggccaggccagactgtcccgagggagtgggaagcgcccagctggctggagcctacgatcctcttggggccctcctggtggaagagaagggggccgcagggtcacctgtgcttgcgatctttggagggggtgcccccccccattcttaccccacgatacctggaggtagggtgccaggccccgccccttggagaggtggccggggcagccagccacagctggatccgagaaagcgcctggccgcggcaggaggttggagcaggagctgggggatccggttccgcctgcccagggcctccgcgcgcctcccagggccacctcagcctatcagagagcagatgggacgggctcggccaatggccgcggcgcatgttaatgagggctgacgccgcgaggag

SEQ ID NO: 14129 - DNA, 429 bp, Homo sapiens
  source 1..429: mol_type = other DNA
gggcaggctggtctcgaattcctgaccccacttaggactcccaaagtgctgctctggtcagccccaagccgcgggatggcatcccggaacctggtctggttccagcctccgctgggacagaacctagctttcccctgcggggctgcccacgccagctggcgcgacccagagggtcctgggatctctcggggcggggcgcggagggcccgggggccagggccagacaccggagcgggtccaggcaggctggagagatggggctgggccctgtctcgagtctcggaccggacgtgggcgggctccagggcagggcgcgggaccgggcgggatggggcggggcggggcggggcggggcggggcgcccggggcccgccccactggggggtctacaccgcccgcccggtctcgtgacgctggtcagtggcgcgg

SEQ ID NO: 14130 - DNA, 651 bp, Homo sapiens
  source 1..651: mol_type = other DNA
agcggattcgcccaagggcagggcctgggaaacccaggcagggagggcctcgggcggccacggacgccgcgctgaccaccgagttcgagggctgggagccgggtctgaaagccccgacccgcctatggcgcggggactgtgggtccagccggccgattggccgcctcgctcggcgccggtccaggcgcagcgctcgggccccggggaccgtgagatgcggcgcagccagcttagctcggggtagcagccaccccagcccgggtgccgcccggcctggtccgcgacttcgggagggtccggtccttcccccggcccccacgcctgggtgaggccctgggcttcttgccggtgaccacgcggccagggtgggcaccagcccaggacggcgcccaagggcagcccagctccatccccgcgccgcgggttccggaaccgaggcgcgggacgctgggactctctgccaacatggcggccccgcccgggcgcctccccgggtccctagtgtcgccccgttgctacagctacgctcgtagcacacctgggcaggcgctgccgacgcatgcgcaggacgcagccccgtacgctggagcgcagcggagacaggcgcgggcgcactggccgcatagagacgcagcgcacgcgcagtcgcgt

SEQ ID NO: 14131 - DNA, 709 bp, Homo sapiens
  source 1..709: mol_type = other DNA
ccatggggggggtcttctccgctcagccccacacaggatgggcagggcagggtcatgcgctgtgctgcccctgcacctgttctgggcctggctagcggcccatgtacatcacccactccctgaactggacgctggggaaaggtgacttcttccatcctctgggtgctccccagggaggaggccccagctcccagcagaggcctctggtccccccttgtccctgcagggctgtgtgggcacactgggtgccagtcggaagggcaggtggcgattcccagctcttgggagctacccggccacatcccggccctgcccgcccgctgcgaggccccgccccgccaagcccctctccctcccgcccttagggcagcagaacggcccccactctcccggccctgccttggagtggggcacctgccaggagcaagtgctggggaggtggcgggcgcagcagggactcgccctagcgcagctccggatggggccgcggtaggaggagcgtggggcgggaggccgcggagatggcccgggggccctctgcttccccgcgccgtgcccgggaaggacccctgggcagcggccgcggggcgcggggtgttggggggcacagccccggcgcggcgctgaagcagcgacggtctccgtggggaccgcgggcgcccgaaacacgtggggcctggagggaggagcgcgccctggcggccccgtg

SEQ ID NO: 14132 - DNA, 730 bp, Homo sapiens
  source 1..730: mol_type = other DNA
gggggagccctccaatcgcccaaggggcagggggcagcctggcaggggagaacacaggcctccggcggccacggacgccgctttcgcgcgcaggaagcgcagtcatctcaagctgacctccaaggctaccaggtttgagggctggagccgagtctgaaagccccgacccgcctatggcgcggggactgtgggtccagccggccgcttggccccctcgctcggcgccggtccaggcgcagcgctcgggccccggcgacggtgagatgcggcgcggccagcttagctcggggtaggggccaccccagcctcgccccagccggccgggtccgcgacctcgggagggtccggtccttccctcggcccccgcgacgccgcgcccgggtgaggccctgggcttcttgccggtgaccacgcggccagggtggcccccagcccaggacggctaccaagggcggcccagccccatccccgcgccgcgggtcccggaaccgaagagctgggagcgggcgctccctgacaacatggcggcggcgcccgggcgcctccccgggtcccgggtgtctgcgtctccccgcgaggccgtgggcaaagccggtgccgtccgacgaggtgctggaggacctccaaggcccgccctgttgccgtggcgactgcgcgcggggtagacgcaggcgccgcaagccgtgagctctcagtgcaggcgcataggctgcggggttgaggcgcattg

SEQ ID NO: 14133 - DNA, 615 bp, Homo sapiens
  source 1..615: mol_type = other DNA
gcagaatcctcagttgctattggaaatggtgacatcactggcaggggcggagcttcagccatccttcaagttagggaggggcacgcacactccaggggggctctcgcggaaggcctggctgccctccctattcctcttagcccgaggaggggggtcccaagttacatggccacgcagatggggcctcggggaaccttgaagggagcgccccccagagccatggcttagggcctcccccacccctgagctccagtctgcaagagtcaggagccgaaatatcgctgactgtgggtgacgactcttgcgcgcacacacacatacaacgggcacgacgcgttcggtcctattaaaaggcacgcaagggtgcgggcaggcccctgtcccaggacaggcacgcgctcacacgcacacgcgcgctccccggctcacgcgcgctccgacacacacgctcacgcgaacgcaggcgcacgctctggcgcgggaggcgcccccttcgcctccgtgttgggaagcgggggcggcgggaggggcaggagacgttggccccgctcgcgtttctgcagctgctgcagtcgccgcagcgtccggaccggaaccagcgccgtccgcggagcc

SEQ ID NO: 14134 - DNA, 843 bp, Homo sapiens
  source 1..843: mol_type = other DNA
ctgggcgggtgcaggtgggcggtgtcctgctgctcaggtcagggctcggcgggcgcccggtggtggacaagcgctgtggccggcgccggtgccgggcgttggctgtttgccctgcccccgccccaagcgtggatccagccgtgggacaggaactgcctgagctcgggccagcgccgcaggaacgggctccgcggacgacgggctccagggacgcacaggcagcgggcctcccaccgcgggtgccgggggcgggggggctgcccccatgcggggcccttcctggtcgcggcctcggccgctgctgctgctgttgctgctgctgtcgccttggcctgtctgggcccaggtgtcggccacggcctcgccctcggggtccctgggcgccccggactgccccgaggtgtgcacgtgcgtgccgggaggcctggccagctgctcggcactctcgctgcccgccgtgcccccgggcctgagcctgcgcctgcgcgcgctgctgctggaccacaaccgcgtccgtgcgctgccgccaggtgccttcgcgggagcgggcgcgctacagcgcctggacctgcgcgagaacgggctgcactcggtgcatgtggcctgggcgcgctgcagctgctggacctgagcgccaaccagctggaagcactggcaccagggactttcgcgccgctgcgcgcgctgcgcaacctctcattggccggcaaccggctggcgcgcctggagcccgcggcgctaggcgcgctcccgctgctgcgctcactcagcctgcaggacaacgagctggcggcactcgcgccggggctgctgggccgcctgcccgctctagacgcgctgcac

SEQ ID NO: 14135 - DNA, 735 bp, Homo sapiens
  source 1..735: mol_type = other DNA
tgggtttaacagcaggacttgggctgatacccctgccccactgcactggtctgtacctctatcccaggagagtcctgggggggaggggtggggcaggcacgcctctcctgcctcgggtgtgctgtctccctcacccaggccctatccagcatgggaatgggaccatccctgcgtgggggccactccgcatcagccgtgagctgggcgggtgcaggtgggcggtgtcctgctgctcaggtcagggctcggcgggcgcccggtggtggacaagcgctgtggccggcgccggtgccgggcgttggctgtttgccctgcccccgccccaagcgtggatccagccgtgggacaggaactgcctgagctcgggccagcgccgcaggaacgggctccgcggacgacgggctccagggacgcacaggcagcgggcctcccaccgcgggtgccgggggcgggggggctgcccccatgcggggcccttcctggtcgcggcctcggccgctgctgctgctgttgctgctgctgtcgccttggcctgtctgggcccaggtgtcggccacggcctcgccctcggggtccctgggcgccccggactgccccgaggtgtgcacgtgcgtgccgggaggcctggccagctgctcggcactctcgctgcccgccgtgcccccgggcctgagcctgcgcctgcgcgcgctgctgctggaccacaaccgcgtccgtgcgctgccgccaggtgcc

SEQ ID NO: 14136 - DNA, 530 bp, Homo sapiens
  source 1..530: mol_type = other DNA
cccatggaggcttcttcagaggagccgccaccacccccgcccctaccacctgagtagagggctgagggcagctgggggcactgtcctccctgcaggccctcctgagggcagctgggggagggccctcacacccctcacggctgcatcatggggggtgcacgcgcgtgcccaggtgggtttaacagcaggacttgggctgatacccctgccccactgcactggtctgtacctctatcccaggagagtcctgggggggaggggtggggcaggcacgcctctcctgcctcgggtgtgctgtctccctcacccaggccctatccagcatgggaatgggaccatccctgcgtgggggccactccgcatcagccgtgagctgggcgggtgcaggtgggcggtgtcctgctgctcaggtcagggctcggcgggcgcccggtggtggacaagcgctgtggccggcgccggtgccgggcgttggctgtttgccctgcccccgccccaagcgtggatccagccgtgggacaggaactgcc

SEQ ID NO: 14137 - DNA, 744 bp, Homo sapiens
  source 1..744: mol_type = other DNA
tgggcctggccacgctgcccctgcccgaaatgccagcgaggcacagactgcccacagccgggagccccagccggtcctgacgccttgccgtggcaacaccccctgatgctcggcctggcctcccgagctccaccttgaggtaggcggcctccgtctccgcgatggtccgggcgagaggcaatcttgcgtgccaggttctcgttgacgcgggccagcttctctgtcagctgcctgccggcacagctcctcccgcttctggcacagctcctctatgcctgggggccgggaggggcggcgctgtgggcccagggcaggagcgcggcggcggagggcgggcctccttccacccgaggaagccagagtcaggcaccacccccgagcgcccggcgcggggcctgcgagccagcgagggctcgggccacggacacccggcctccggcacggagggctctgctcagccgcgcgatgcccgcagcgaggcgggtccaggggcaccccgctgcgagccgggaacccggccctgcggccctcccgacctccccgtcccggctgcgccgcccagctcgtagttctgcagcgccgcgccctgctgggtcatggtcaacgccgcccggggccccaccaccccaaccgccgcggaagcagcgctgtccgcgcctgcgcacgactcccccacggcgcgccgaactagcgcgtcatcgctgagcgccttgtgcgcgtcatggctgcgcgtgcagacgtgcg

SEQ ID NO: 14138 - DNA, 414 bp, Homo sapiens
  source 1..414: mol_type = other DNA
ggactgcctgcagatcgttctgcagcacctccacgaagccggccgcccggagctcctcttcctttggcgggactgcaccgctggtccgggaagaggggaggctgcaaaaactccgctgccccctgtccgtgctgcccggacgttgggccggcggccccaaagcgcgtacggtcccggaaactccgcgcggggccgcccctctcttccagccccagcgcagccggcggcaccaggccggtgctcacggtgttccaggccactaacaactcctgtccgggccgggagtcgctgtccccctccccgactccgagattcgctcggcgcggcgcgcggcgatgacgcacgtctgcacgcgcagccatgacgcgcacaaggcgctcagcgatgacgcgctagttcggcgcgccgtggggg

SEQ ID NO: 14139 - DNA, 597 bp, Homo sapiens
  source 1..597: mol_type = other DNA
gggcagaagggacttgtcagccgggaggctgtgccctcagggtcatggtatccacacaggggtcggccctatggggcccaccatgcattggagagctctccaagcatgcagggccctgccctggtgagaggctcccacctgggcagccttgctcggggctccagaattggcatttccaagccccgcaggcacctgccggaggtcggaggacccctggtgaaagcagggtccgggccagagtgtggcctgtgcaccgtccacggacacgggtgccttcggtcctggagcagcgcccttcctgcaccgcgctctcagcggacggaacaggcggcctcgggctgcactcggggcgcagggtccaggggccgcgcacccggctacccccagggacgccgggagctgagcggcgcgaggcaccggggtgtgtccggggggccgtccccaatggaggccagctccggtggggtcacttgaggggcccgccctcctcccctgccataggtgggcctcccgcacggggcggggagagcgggctttccccaatggtcggtggcccgggagggggcgtggccgcggcgcccaggctggccgcggcgg

SEQ ID NO: 14140 - DNA, 521 bp, Homo sapiens
  source 1..521: mol_type = other DNA
tggggggcctcctcatgatacattttcgctcttttaagccctgctgaagaaaccatttcaaacaggacgcaagccgagggcctcggctcgaggggcgcggatcatgagcagcttctgctccgccagcttctggcacaacagcatctcgaagacgaacttgagactccggagcaccgccagccgcttctctccatcctggaagaggcgcaccccgggacctagccactgcaccagctcccggagcgagaagagcatcgcgcccgttgagcgcgggccggggcccggccgagcgtgccacccgcggggctgcgtctcctctccccgtggccctcgcccgcgcctgccgccgctgctgcgagcgagaggcagcgagcggccccgccagccccagccctcggccctggcgccggcaatcccccggccccgacccgggactcaaccctggccgcccgtgaacgcccgcctcgatcggacgccatgcccccacagggcgcgtccctagtgcgtcacttccggtcgac

SEQ ID NO: 14141 - DNA, 773 bp, Homo sapiens
  source 1..773: mol_type = other DNA
ggaggtcggggcccacccgccgagggaggtctgggcgctgtcctggtctccacggagctcgcgcactcacggggccgaggcaccaaggcgaccggcgcagagccagcgccgtctccacaacagggcagggcgcgcagctgcgggggaggcctcgcccctccgctcccctcccctgccctccgccccggccctcggggcgcggcgtcccccacgtgctcccctcacgcgaccgcgagggcagtgggcgtgcggcacccgggagcaggaaactccgtggcctctgcggctctgtggagagctcccctccaccgccgctttaaggcatcgcagcctcctcggcctggaggccccgggctcgctccgtgcggaccccgctccagaacccgcccagcgcgcagatgccgtgtcccggcgcaaggccagagagggcgcaactctggacgtggggccgccaccgagcctgcccttcccggctcccgaaaggccccgggctcagagccaagactgcgcttgcccgaggcccgtcgggcccgccctccctcggcgcccccagcgcagctgcccgccgcccgaccggaagcccgcactcgcgcctgcgccccaccccgtccgcgcgccggccgcggcactgcggcggttaccaggacgctgaagcagcgcagccaatagcgccagcctggcggcgtgctcccggcagccagccaattggcagcttgattgacgggggcaaggccaatcaaacgagggagcttgccagcctcgttctggcagcc

SEQ ID NO: 14142 - DNA, 476 bp, Homo sapiens
  source 1..476: mol_type = other DNA
ccagctggcctgcctaggcgagacagagtctcactctgtggcccaggctggagtgcagtggcacgatctcagctcattgcaatctcagcctcccgagtagctgggactcatttttatggttaggaagtccttcctgtacaaaaaaagaacaaaattcaggatttgcttaaaatgtaaatgaagggctggagggagagttcgcacagccctgcaggccgggaagcccctgactcgagccaaggctctgcagctgcaaggcctcctgtcagaggagggggcctggggactcccttagcctcaccctgagactggggctggtggcctcctgggggcagcaagagcccaggccctttcagggacagtcctgggcctcacaatgtgggccctcacagggttagcgaggtggcctggcccaggaggtgcccacaatgctggcccctcacaatggttgcccggtgacaggactcccctcaggg

SEQ ID NO: 14143 - DNA, 479 bp, Homo sapiens
  source 1..479: mol_type = other DNA
ggtagcgaggacatggaagcgccagcccctccccgggtatcctttgcaatcaataccctttacaataaacggagctctcaccctgtgggatctgacaccatctccaggtaagcttggtgtgtggggaacaacccccctccctcaacatttgacttctcaaggagaggatggatgtccagcacaccattcacggccacaagggcttcattagcaaagtacactctgttccctggcagccaggcacaacctgggcaggggccccggagcacaggcgtgaacccctcgcccagaacccgtgtttcatctgtctgcctggcaggcccagtgctgaagggcggaggagggccccaagttggccctgttcacaggccctgccctggtggattctgggccaaggtcagggctgggaccaactggtggtcagctccagagaccacacagtgagggccctggtgcccacacgggctcttgctcacaca

SEQ ID NO: 14144 - DNA, 655 bp, Homo sapiens
  source 1..655: mol_type = other DNA
accagctgggggttggatcaaggcaccctcgccctagggctgaccaacttggccagcggcaagagagctgtggtagccatggccttgggagctggcttgtgggaacaggagctctgctcacggctgcaccaccaggcacccctggtgggagcgatctcctccagctgggctgaggagggagggcttcctggaggaaagaaatttctagagaaaatttcacggcacagcctgcgggagggcggcgggctggagaggcggggaggcccggggagcccacccgcctggtccttcacggctccgcggagctcggtgggcgccacagcctcccggtgcctgggagggcggccgtcgctcgcgctcccgctgcgggcccggtctccgccaggccccggccccctgaaggcgctcagatcttttcacgcggaggaacccacgctcaggagggagtctgcgcctgtgtccggcccctgcggggcagaggggcggggagctcaacccccggcaaaacgtccccgctgcgcgtggctgccgcgagacggctgcgacgacgtccgttcccggagcagacggaccctgagtccgccccccacgccctcacccgccctcttctgccagaaagcccgggcgcgggcgggaccgggtgggcgcatgcgcg

SEQ ID NO: 14145 - DNA, 689 bp, Homo sapiens
  source 1..689: mol_type = other DNA
ggtagccatggccttgggagctggcttgtgggaacaggagctctgctcacggctgcaccaccaggcacccctggtgggagcgatctcctccagctgggctgaggagggagggcttcctggaggaaagaaatttctagagaaaatttcacggcacagcctgcgggagggcggcgggctggagaggcggggaggcccggggagcccacccgcctggtccttcacggctccgcggagctcggtgggcgccacagcctcccggtgcctgggagggcggccgtcgctcgcgctcccgctgcgggcccggtctccgccaggccccggccccctgaaggcgctcagatcttttcacgcggaggaacccacgctcaggagggagtctgcgcctgtgtccggcccctgcggggcagaggggcggggagctcaacccccggcaaaacgtccccgctgcgcgtggctgccgcgagacggctgcgacgacgtccgttcccggagcagacggaccctgagtccgccccccacgccctcacccgccctcttctgccagaaagcccgggcgcgggcgggaccgggtgggcgcatgcgcgctgggctggctgggcggggtctctcgcgccgggtgagggcgctgctcccaggaacctgcgcgcggccccggcggcgtttcccgggggccggttggcgggcggacc

SEQ ID NO: 14146 - DNA, 492 bp, Homo sapiens
  source 1..492: mol_type = other DNA
ggaaccatcaggcccgggctggctgttgcagcactggtgtggctggagcggccaccttgcccctccttggaaggcggcttccaggctgggccagggtaggacctcctttaggcaggccggcagggggaagggcccagagctccagctcctggctcccggcccccctgagccgcacgtgggcctgtcctgggcagggggctccaggctggcccactttggggggcccccgattggggtgtatgcagctcggcagaggaccctgcccgccccctgtgctagggcctggagcccctccccccagctgtaagccctgtgtgtggggtgatgaggtgcaggagcccagggtgggggcacagcatgcagcaggggccctcggcctcaccaggtgtcctgagcctgaccaagccaggagggctctgagcgctccaggggatctgggcaagccggccaggcctcccccctttggcgccagcccaagtcccgcctgggccg

SEQ ID NO: 14147 - DNA, 636 bp, Homo sapiens
  source 1..636: mol_type = other DNA
tttaaaaacggacaggaagccagggcccctgcagggaggcgcccgtcccttctcccggggagggcagggcgggcgcgcgcgcgtcccaccgggagcgcctcctcctcggcgagggagcgaagggcctccgggtcctgtgatgtccgtgctcggaaggcgcggaggagggcaggccctgcgggacagggcggcggggtcgccggggtcggctcagctccccgcggcgtccggctgctcggcggcctccggagcggggccctgcgggagaacgcaccttccccgccccatcggggcctttccccaccccgggagagccggcggcccgcccccggctcactcccagggacgcgcacccggcccggccccgctctgcccccggcgcccagaccgcccacctggcccgcgcggcccggggtcgctcacctgcggggccgggaccgccccacaccgtccacgcccggcgcggaaccttggcccgaccgcagccgctggcccggagggctttatccggcgcaccaaggccagcgcgggcggggcgaggaagccgggcgcacaaagctcccggcggaagtccggccggggcgggggccgaagcgtggccttaccggggaggggcgggcgcctgccgccaggggg

SEQ ID NO: 14148 - DNA, 884 bp, Homo sapiens
  source 1..884: mol_type = other DNA
ggcaccgggctccgtgcagggcctcggccgctgcaccctggcaccctggactcctggcctctgaggaggagactgacccggtctcccggccatgaccacaggcgcaacgctttccccttagggcagggcggtccctcgggcctgacccagcccagcagcttcccccttcccggtgtgagtcaccctcgggccccggcctctcccggtgaccgccgcgccccccagcgcggcctcgcttagctcaggtgcggcccccctgctcggctcccacctgccggggcgttcgctgggtcgggggcggcagggcgaccccgtgacggtcggggaggggcgctgggccctccccaggggctcgaggcggaggcgtcgcccgcaccggcctccccacgccccgctcacccgcagcgcggcctcggggtccccggccagcaggtgcacgcagcccgcgttgaagcacagcctggcgggcggcgccgggacgcccgagaagaggtgcaaggcgcgggcccagtccccacgatccacagcctgcgcgcccaggtgccaggcgcgcaccaggtcccccagagaggccatggcggccggtggcggcgctcgaggaggggccaggatcccgcggaggggccggggccggggccaggcggcggcgcggggctgcggggtctccgaggcgggcagaggtgcgggcgccaagcgccaggtgcaaccccgctgccccgcggcgccccctggcggcaggcgcccgcccctccccggtaaggccacgcttcggcccccgccccggccggacttccgccgggagctttgtgcgcccggcttcctcgccccgcccgcgctggccttggtgcgccggataaagccctccgggccagcggctgcggtcg

SEQ ID NO: 14149 - DNA, 578 bp, Homo sapiens
  source 1..578: mol_type = other DNA
tcacatttttgttaaatgatcaatatattaataaaaccttcttttatgtgtatttttgtttaagggcaccttacttaatatgtattgttttctgcactataccccaagagggtacccagcccggccctggctccgcgcctcccccagccccgccccgcttcagaggcccggaccccgacggcggcggccccgggacccacggcgagcggacgggcgccgcggggctgcaggcgcttccgcccccgccccgggcctggaccttcggggtcacctgactccgacctgcccgggccgggcggcacggggggtaaagtccgggccggggtcaggagcgcggctgcgggccgtggggggcggggtcccggagttctgcccctcgcagctcctcctgcctcccacccccccgggggcggggcgaccctgggcaccgagacagacccgcgggtggcccgggacccgagggcggggcgaccttgggcgctggcctcagcctgcgggccctggagccaggtgcacagcgcatcgcccgaggctgtcaccgccctgccccgcccaccccagctgtcctggacccaggg

SEQ ID NO: 14150 - DNA, 649 bp, Homo sapiens
  source 1..649: mol_type = other DNA
tgctggaagccctgacttccccggggccccaggctgtgttcagccctgcatacagggccctgtgagcccccctgcagtcctgtgaggcccctgaagctctgtgaggccgccctgtgaggccccccgaagccctgtgaggccccccgaagcctgtctcccgggccgaggtccctgtggcaaagatccctgaggctgggcagtccccagtcctcctcaaaggaccccactgctggggcctgagagccctagggcggcaaatgcaggccacgtccagagtctgcatagagctgtggccccccaggaccaggacgggcccctctgtctccagttcccaaactgcacagggagcccttttgtgtaaggggagggagaaccggcctccctgtgatcctgcaggtctgagcagcagatcgtgagggccgagggcccaggactttgcgaccagggggccgctggcctcagtttccccgctctggaggcctggacgagagggcgcggagccaggccgcccggccccgcccccaactcaacccgggcccggacgtcacggtgggcggggccacatgtcctctccgagctctccggggccctgacgtcacggtaggtggggccgaccgcccctctgggcccgcccgggccctgacgtcac

SEQ ID NO: 14151 - DNA, 274 bp, Homo sapiens
  source 1..274: mol_type = other DNA
aggtcggggaggacgcgggccctggactcgagacggccgccgcgttgacgccgcgaccccctccgccgggcgcggctcctctgggcggagccggcaaccgcgcggggaaagcccgggacctgcagccgggagggcccgggctgtctgtgctcccccgcaggccgggcagtggtgtggggggactcgagccctcgcggtgcccaaattaatcaattcttggacccagcacgtccggcttgcgcactgagccctcctgcccggtcacgcaggcgac

SEQ ID NO: 14152 - DNA, 356 bp, Homo sapiens
  source 1..356: mol_type = other DNA
atccagtggtgcctgtagtcccagctacccgggaggctgaggcacaaggcctcaggcaatgcccatgggccaccgctggctgccctcgctgtgaacaatgcccatgggccaccactggctgtctgctgtgacaggcgcgtctaacaagtgctggcagctgtgacaggcaggaggacccttctctgggtccactgggtccaggcatctcccccgagtcatctttctcttcctccatggccagaaacagaaaaaatttcaagtcaaattatgtttcactgaaaggaaaatcctgctgaaaaagtctgttctccaggaagaaaagctgtcttttgagaagtctgctaggagccacctcc

SEQ ID NO: 14153 - DNA, 599 bp, Homo sapiens
  source 1..599: mol_type = other DNA
gtcgcctgcgtgaccgggcaggagggctcagtgcgcaagccggacgtgctgggtccaagaattgattaatttgggcaccgcgagggctcgagtccccccacaccactgcccggcctgcgggggagcacagacagcccgggccctcccggctgcaggtcccgggctttccccgcgcggttgccggctccgcccagaggagccgcgcccggcggagggggtcgcggcgtcaacgcggcggccgtctcgagtccagggcccgcgtcctccccgacctcccgacgccacctcacggcctcagggggactgggctcccgggaaaccgccggccacctggcggacgaaccgggcagtggacgccagggaccaccgcgctgagagccccgccccgcgagccccgccccgcgagccccgccccgcgagccccgccccgcgagccccgccccgcgagccccgccccgcgagccccgcaccgccggccccgcaccgccagccccgcgagccccgccccgccccgcgcgctcctcgcattggccgagtccccgcggccacaccccctaccagattggggccgctattggacgcggcggccgcggccaatc

SEQ ID NO: 14154 - DNA, 747 bp, Homo sapiens
  source 1..747: mol_type = other DNA
agatgagggcaggccgcccctcccccgcccagctagcgcaggaagttcctggggtagagctggaagagctttcccgaaggtaccgtccttgaagtccaggcgccacggcttcgctgaagagctgcgcggccgtcaggggcgtctcctcgctctcaggggcgaggtagctcacgtagggaccatctccttgatctgcacgaacctccagcccgaggtgaggaagccgatgcccttggcgccccggcccttgcggcccctgaagctgcgcgggccccgcttgcttcggtccgcaccccggaccaggcagcgcgccgctgcggccaggacgcccatgccgcgccctgcgggaggagagagcgggtagtcgcggccccgggaacccggccagccccgcccctggccgcgcgcggcgcccgccccaatccgacaagcggccccggctccggcgccaacccggcctcgaccttgctccgcttccgaccgctgcgtcgcagcaagagcggctccgattggccgcggccgccgcgtccaatagcggccccaatctggtagggggtgtggccgcggggactcggccaatgcgaggagcgcgcggggcggggcggggctcgcggggctggcggtgcggggccggcggtgcggggctcgcggggcggggctcgcggggcggggctcgcggggcggggctcgcggggcggggctcgcggggcggggctcgcggggcggggctctcagcgcggtggtccc

SEQ ID NO: 14155 - DNA, 501 bp, Homo sapiens
  source 1..501: mol_type = other DNA
gttctcagcctgggatccggcacaatggcaggttcccagaaccttcggactcgagatgagggcaggccgcccctcccccgcccagctagcgcaggaagttcctggggtagagctggaagagctttcccgaaggtaccgtccttgaagtccaggcgccacggcttcgctgaagagctgcgcggccgtcaggggcgtctcctcgctctcaggggcgaggtagctcacgtagggaccatctccttgatctgcacgaacctccagcccgaggtgaggaagccgatgcccttggcgccccggcccttgcggcccctgaagctgcgcgggccccgcttgcttcggtccgcaccccggaccaggcagcgcgccgctgcggccaggacgcccatgccgcgccctgcgggaggagagagcgggtagtcgcggccccgggaacccggccagccccgcccctggccgcgcgcggcgcccgccccaatccgacaagcggccccggctccggcg

SEQ ID NO: 14156 - DNA, 458 bp, Homo sapiens
  source 1..458: mol_type = other DNA
cctgtagtcccagctactggggaggctttgcagtgaactgagatcgcgccactgcactccagcctcctggtcggagccgtccacctgctgagccgcttctggggaggcggtctctgaggggcagctccgccatggcgggttcacaggaggcaggcagagcgcgcctgcggcctcggggtgctgggcgttgattccggggcaaggcctgtcatggaaactgcagccaaccgggagggcgccacggggtgcgctaccgcagctcgcgtctccaaacctgctttgtggaggagcggcgaagccttcggtctctacggccccgcagggagcagcgcgtctgacgcctgaagcccgccgcggtcagccggccgacagggggcgtgggagcctggcttcccaggggcgtccacggaggccaaggccctgccggatgtcccgccccggcaccccggaaggagtcg

SEQ ID NO: 14157 - DNA, 709 bp, Homo sapiens
  source 1..709: mol_type = other DNA
ctgcagtgagccgagatcgtgccactgcactctagcctgggtgacagagaggagcctgtgcagctcctcaggtgcaggagtcgcccttgaggcagggtgaggcctcctcacgggccgttcgctccaggctgcaggggagccacgctgcccaccacggcgtacccagtccctccctgagcgggtctcggcccgcggagaacccttggaccaggctgctctggaggtcagccgcccccgaggctgaagagccggcggctcggagaaggctgcgcgggaggccgcgccctccgggtcgcgtgggccgggcgtccgctgtctctccagaaacacccgcgtcccgcgcctcgcccgctccccgcccgcccagagggccccgcacgagctcgtccacctcctccttccgcgctcggggccaggacggcggcgggaaacagctcgcagagctccacggacccggcgcgagtactccgcactgcccctctaggcgcggcgccgctgcccgcacaaagctgcgaaactgacgtcggcgcgcgcaggcaccgcccccggcctcgcccctcccccgcgctcgccccgctccccagagcgccggcgcactcgccctcctcctattggttgttgcggggcggcgcgcgccggtcggcgccgtgcgcgcctagccattggccgagcggcggcgggccggggggtgtgtccggggctgcgcccc

SEQ ID NO: 14158 - DNA, 481 bp, Homo sapiens
  source 1..481: mol_type = other DNA
tccgcccaagtgtggctcccttgggcccacaccccatcaggccagcaaggagtccgaggcggggcaggtcctacgcggcggagcatccccgcccaggacgcccgcgcggccccgtgacgtttttccgcgactcggggtgagggagacccctgttctgcccgcagcagagtgcagcggggagaccttcccagtctcagagctcgcctcggccccgcccccagccctgccccccgacggagacgcggcggtgactccctccgtgggggacgcacgggacgcttgcgcctcaagtcccttaagcggcgcccgacgcagcgcagcacctacccagccgggacagggccagggccggggatggatgagcaggggctgggccgggcctccgagcggcagtccgcgggctacggggcggccggggggctgggcggggccgtggggcggggcagggccgggggcggggccgggcctcggagccgggact

SEQ ID NO: 14159 - DNA, 780 bp, Homo sapiens
  source 1..780: mol_type = other DNA
acacggcagcccgagggacccttcagaggcctacgcgcctctgctcggaactgtgcggactgcctccctctcagaaggcgcagcccgcacccggcctcactctgcactcagcgccttgcgagcgagctcaggtccgagagggtcccttgttcccgaaggtctccccgaccccggggccgcctttttggacatgagggcagagctgggagcccaggacaggcccggcccgcggtgggcgctcaaggaccgtgacaggttccctaacgggaggcttctctgagctgagatcccggagccagccccgtgcgtggaaacagcaggtcccgcacccgggctgggggcccccgacagaagcgtccgcgtggcaccaaggccgcgagccgagcgcacccggagggttgggaaggccggggacccggcggggacggggcgggccggcccaggcctggcgcccagctctgggctgcagccccagggctggtggcgcctccgggcggagcgaggggtccgtctggccgagggcacccaggggcggtgcggccggcagagtgggctccggggacggcccgggctggcgctgagcggccgtcgaggacccacaggctcgtccgctcctgggcccggcccagccccggggtgggaggcgcggggcgagggaggcgcagccggaggggccggggcggggcgggggcggccgcggggcggggccggcgcggcagggtgggcggggccggcgcggattggccgggccccgccacgtgaccggccccttatagggcg

SEQ ID NO: 14160 - DNA, 487 bp, Homo sapiens
  source 1..487: mol_type = other DNA
gctacttggtctgcagaaaaggccttgacttgtaccccccaaccggagcgccccccaggttggccgggaaaccctccccagtgggacgtattcccgcctagggacaccccctccagccggagcataccctcggcaggggcattcctcccaaccgagggaaccccgccgcaccctcccgcgccggggacaccccacaggcggctcccgcgccaggccgcggcccagggagtcagccttccgcgcaagccggcgaggtcagaggtcggagccgcggggttctccagctccaggtctcctaccccgcgggcgcgcgttccggttccggccgccgcaggcccggcgcctggggcgccgcacgcctggttccagtgcgcaggcgccgcaccggtcgagctccaacgcgcaggcgcgggcgcaggcgcaggcgcagacgtaggcgatcggccccgccccgactctgggccgcgaggcgcgggcggggcgatgg

SEQ ID NO: 14161 - DNA, 322 bp, Homo sapiens
  source 1..322: mol_type = other DNA
gatgtattttgttacatttatacttaataaattcaattttgggggtgctattataaatggtaattttttttaaatttcaagttcaaattattcctatatattaaatcctactgaacccgggagctggaactcctaaaaagaaaagaaagaaaatcaatttagttttgtctactggccccagagtagctgggattacaggcacgcgccatcatgcctgctaattcccgtcaaggcagaaatttccaaaatctcggcctggaaaaatccagacgctgattttcagagattctccagagctgccgcgagggggcgcccggccctg

SEQ ID NO: 14162 - DNA, 431 bp, Homo sapiens
  source 1..431: mol_type = other DNA
aaattttaaatgaagtataactgggaaaaaaatgtggagttatgctgccacttctttcctaaaaggtaagcttccttttattgatacgaaacagaaccatgcagtcctctattttacagatgaagtaacagactgtttaaaaaggtggttggaattcctggcccaacattcaaaccaggcatggcttgctttctaaatttttagcgatatatatttactcttaaaatgaattacaattattctgtgatgttctttgagataatcaaaaactctctgttctaacagtcttagaaaccagctgtagaagcagattgatatattttatcagaatcacctgcctataataaagtttaatttagaagagaacaattataacactatactgtagtaaaagtttccccgactcccagtgtcttaagagtctcgtctct

SEQ ID NO: 14163 - DNA, 344 bp, Homo sapiens
  source 1..344: mol_type = other DNA
attattctgtgatgttctttgagataatcaaaaactctctgttctaacagtcttagaaaccagctgtagaagcagattgatatattttatcagaatcacctgcctataataaagtttaatttagaagagaacaattataacactatactgtagtaaaagtttccccgactcccagtgtcttaagagtctcgtctctaatctgcgtttgcgcagagatgaaattcgctgttccggaccccgcgagccaggggcaggcaccgggtccacccggggctgagctgcggcggcgcctgacaatgccccctcgcgccccggcctcggcgcccgctcccggctccagcgcg

SEQ ID NO: 14164 - DNA, 530 bp, Homo sapiens
  source 1..530: mol_type = other DNA
tccccgactcccagtgtcttaagagtctcgtctctaatctgcgtttgcgcagagatgaaattcgctgttccggaccccgcgagccaggggcaggcaccgggtccacccggggctgagctgcggcggcgcctgacaatgccccctcgcgccccggcctcggcgcccgctcccggctccagcgcgcctgcacgtagccgcgtgcacggctccggccccgggcgggaggcggccgcgagccgggccggccgcgcgcaagtccggcgccagccgctagagcccccagtgcgcggcccggccgcggggcgcctcgacccgacaccgagggcgggcgggccgaggggccggtggggccgagcggccgccccgcgcgcatcgccatgtgagcggctgccgcggcttcgcggggacccaactttcccgggcggcggcgcccaacttcccgccgcccgctccggccccgcaggcccgcggcgccaggggaagacgcgagtaagtgcgggcggcggtgccctcccggccctcaccccgca

SEQ ID NO: 14165 - DNA, 423 bp, Homo sapiens
  source 1..423: mol_type = other DNA
cgtccacattggacggtggagtccacgtccacagtggacggtgggcgaccacgtccacccgtcctgcacggtagtaagaaagcaatttttcttattggaaaggagaaaactaagtgactgtaaaataatataatttccttaaagcaaaacatcaaattctcgatgaataattaactcaaatgtgttcagagtgctataaaatgaaattaatttatttttagtttaacccaaaatcgatcctctatgtatcctacataaaagacagggtctttctggcagaaaaccattgaagtttttatttgcagtaagagaagcatgccttattatcaaacaggcatggtccccttgtgggggggtgcccgtcacctgcgtccccgtgcgtcacggcgttgccgcatttgccgtttcacatcaacaattcct

SEQ ID NO: 14166 - DNA, 638 bp, Homo sapiens
  source 1..638: mol_type = other DNA
gtttgcgcagagatgaaattcgctgttccggaccccgcgagccaggggcaggcaccgggtccacccggggctgagctgcggcggcgcctgacaatgccccctcgcgccccggcctcggcgcccgctcccggctccagcgcgcctgcacgtagccgcgtgcacggctccggccccgggcgggaggcggccgcgagccgggccggccgcgcgcaagtccggcgccagccgctagagcccccagtgcgcggcccggccgcggggcgcctcgacccgacaccgagggcgggcgggccgaggggccggtggggccgagcggccgccccgcgcgcatcgccatgtgagcggctgccgcggcttcgcggggacccaactttcccgggcggcggcgcccaacttcccgccgcccgctccggccccgcaggcccgcggcgccaggggaagacgcgagtaagtgcgggcggcggtgccctcccggccctcaccccgcacgcggcgacccggccgcctagcctccctcgctcaggcgcgaccgcggcgttctctgagggcgcccctcgagcccggagcccttcgcgcggagccggcggcggggtccgggcgggggggaggcagggaggaggaggaggcggcctgagcgt

SEQ ID NO: 14167 - DNA, 673 bp, Homo sapiens
  source 1..673: mol_type = other DNA
cactggaagcagctggctacggggcttcagcctcgccgaggtggcactgaggcccctggggcctgcagcctgttccgggagggctggagccaggcttttcgggattaggtgacccaaccttgtcttcccatccccacagatggggacactgaccctccaggcaaaggctcagagtcccagccctccaagacccggggcactgcgagttttcgcgcagacgtcaagctgcggctccaggggagccgggtggaccaggctctggggccgggcccgcaggctccgctggacgcgcagagcccaggagccccgccccgccccgcgggccccgagcccccaacccgcccccgagcgcgcccccgggagcgcgcgcttcgccgacgcggccgcgcgcccccccgcgcgctcccgctcctgcgcgtcctcgcgccccgcgcgcgcgcgccctgcccccgcggccccgtgacgcgcgcgcgcagagacgctcccgccgggccggggccgagagcagcagggccgggtccgggtccgcagcgcctgcggggaggggccgagcgcgcgcggggcgggccggggaccgtggggcgcgggggcgcgcgaggcggccgtggcggggccgcgctgaggaggcgccgaggggagggaggtccctgcgcgcccgccgcccgcctcccgc

SEQ ID NO: 14168 - DNA, 305 bp, Homo sapiens
  source 1..305: mol_type = other DNA
atgagcatagctttgctaatctaagaatgattttcaatattggaatttagaagcaggtttgctggagccaggctgcctgggttcaaagcccatgcacttcatgaggctgttgcagaaaaacgagttaatatatagtcagtttaatttaagggaggagcgcaactgttccctgggctctcctaaggcactgcgcggaaggctgcagggaagccgcgagggcctcctcaccacggcccgggatcaagtcccacgcgcgaggccggggtaggggcgtcatccacacccagaggctgggcacgccccgc

SEQ ID NO: 14169 - DNA, 774 bp, Homo sapiens
  source 1..774: mol_type = other DNA
tgccggggccttggtcccagggccggggcctgggtcccgggtggggcgttcggggcagggccggggccttggtcccggggcagggccggggcctgggtccccggtggggccttcggggcagggccggggccttggtcccgggtcagggccggggccttggtcccggcagggccggggccttggtcccggcggggcagggccggggccttggtcccggcggggcagggccggggcctgggtcccgggtgttccgggcagggccgggaccttgatcccagctgtggggtgggagttcggggaagggccagggcgtgtcctgggtggccagggtcggggcctgggtcggggcagggccggggccttggtccagggtctggggacaggctagggccggggtcgccatccgtcctgggcggcgggcaggcggtggcggaggaccagggcccagccctccggaagtcagggcccacacggccccccagcgtcaggcgctccggtcgcgccggggacggcgggcggggcgggcggggcgggcggggcggacgtgcggcgtgcgcggggcggggcgatgtgcgcgcacgcgccaatcgcaaggccgcgagcagggtgtacgcgcggagaggcgcggcggggcgggccgagcgtcgggtgcgcccaatcagcgcgccgcaacaccatgacgtgaggctctcccggggctgagcgccagtccgcgggaccggcgggtgagtgcgcgagggcgcgaggcgcgggtccgcgcgggggcgggacttc

SEQ ID NO: 14170 - DNA, 479 bp, Homo sapiens
  source 1..479: mol_type = other DNA
ctggagccaggctgcctgggttcaaagccatgcacttcatgaggctgttgcagaaaaacgagttaatatatagtcagtttaatttaagggaggagcgcaactgttccctgggctctcctaaggcactgcgcggaaggctgcagggaagccgcgagggcctcctcaccacggcccgggatcaagtcccacgcgcgaggccggggtaggggcgtcatccacacccagaggctgggcacgccccgcacgcgcggcttcctcctcctttgcggggctcgccgcgacccaggacccccagactcccggatcccccggaccctccaaccctggcccagggcgcgtggctgggggcctgaacccgctccagaaacccgcactgaggccctcacacgccctccgtggctgacctccaagccgggcgggtgcgctgtgcgacgcggaaagcgccgtagagacgtacctcaaccgcccgacagtggaag

SEQ ID NO: 14171 - DNA, 483 bp, Homo sapiens
  source 1..483: mol_type = other DNA
aacacattaatctttttatagaatattacccatcactgctgctgtgttatctctcctcatattccctgagagaaccgacagatatggcaaacatttttttgatattggaatatgataggcaagaaattatacagttttttagctcttccaaacacattggtttccaacctaagaatttattcagtaattttagtcacaatgtttattatttctttttaaaatctgggatgatatatacagcaagatcacctgaggtcaggagatggagaccagcctggcctggcgggcgcctgtaatctcagctactcgggatgctgaggcaggagagatcacgccagcactctggtaacttaccctaggtttaaaaactaaaagcattttttaaagtgagattgtgtcaaaacaattttctattatccctcaattgagagggagtgtgttttcttgttaagaatacaaaaatatcagatagggtataaaagg

SEQ ID NO: 14172 - DNA, 469 bp, Homo sapiens
  source 1..469: mol_type = other DNA
cgccttggtcccggtcgagtcccagcggcggaactcggggggaggggggggagtccagccatgcggaggtcgctcccatgggacgccgagcttccggctgcagggcttggcgcccgggcgcacgcgagcctcgagacgtctgacgttaggccgtctgtggtctcgggcaccgcccagtcgcgggacgctgcctctgcggaactgggggtggggcgtgttgacccccttaaaggcgccagagcccgcggtcacggctcaggttcccggtgcttcgcgcgtctgccgttgtcacaggccagggaggtggcaccaccaggcgaagcttggcgagattgtgtcgtcaagcgcgtacgggcgccaattggccgggcgatgtggcgtggactggcgctggcgcgagcgattggctgcgcggcccgggggcggggccagtgggcggtgcgcgccgcagactgtgctcaaagcgggc

SEQ ID NO: 14173 - DNA, 565 bp, Homo sapiens
  source 1..565: mol_type = other DNA
cagctgtagattttcagaattcagattttaaagctaagctgcataatcacaagataaaatgaatacgtctatttatgcgtttaaagaataccatgtagtcttgcacggacgcaggtgtatgcacccgcgtcacacgcgtggactcggcacggggaggccggtgtcgtcacgctcgtggagactcgcaactcttagtctcctgcgactgtgcgcagacgacgatcttttccgctgacaaagaactccgccttccacggggcgcgggcgcccaccacagcccgggaaggcccggcctccctccagttcggggctgtccaggcctccgcgccgagacctcacgggtggctcagacctcgggccagcctccggccacagacaaccgccggtcccggatggcgcccgctttgagcacagtctgcggcgcgcaccgcccactggccccgcccccgggccgcgcagccaatcgctcgcgccagcgccagtccacgccacatcgcccggccaattggcgcccgtacgcgcttgacgacacaatctcgccaagcttcgcctggtggtgccacct

SEQ ID NO: 14174 - DNA, 324 bp, Homo sapiens
  source 1..324: mol_type = other DNA
ctgtgaccaagaagtttgagaactggtgcccaccactaaaagtttaagctgagccaggtggatcacttgaggtcaggagttccagaccgccttggtcccggtcgagtcccagcggcggaactcggggggaggggggggagtccagccatgcggaggtcgctcccatgggacgccgagcttccggctgcagggcttggcgcccgggcgcacgcgagcctcgagacgtctgacgttaggccgtctgtggtctcgggcaccgcccagtcgcgggacgctgcctctgcggaactgggggtggggcgtgttgacccccttaaaggcgcc

SEQ ID NO: 14175 - DNA, 396 bp, Homo sapiens
  source 1..396: mol_type = other DNA
ttatctgtgtgaagccagacatgaaagagatctgtcaacacataaaacaaaatcaaagtctgttttttgtctggaaaagatttttaataaaaatataacttatgttagtgtcgtgtgttttttaagtgaatattttaatatgtttaatttctatgttagtaaatagcagtagtaaacaacaagcttttaggtgtcctcagtacattttaagagagtgcaagcgtcctgtgaccaagaagtttgagaactggtgcccaccactaaaagtttaagctgagccaggtggatcacttgaggtcaggagttccagaccgccttggtcccggtcgagtcccagcggcggaactcggggggaggggggggagtccagccatgcggaggtcgctcccatgggac

SEQ ID NO: 14176 - DNA, 638 bp, Homo sapiens
  source 1..638: mol_type = other DNA
ggagactcgcaactcttagtctcctgcgactgtgcgcagacgacgatcttttccgctgacaaagaactccgccttccacggggcgcgggcgcccaccacagcccgggaaggcccggcctccctccagttcggggctgtccaggcctccgcgccgagacctcacgggtggctcagacctcgggccagcctccggccacagacaaccgccggtcccggatggcgcccgctttgagcacagtctgcggcgcgcaccgcccactggccccgcccccgggccgcgcagccaatcgctcgcgccagcgccagtccacgccacatcgcccggccaattggcgcccgtacgcgcttgacgacacaatctcgccaagcttcgcctggtggtgccacctccctggcctgtgacaacggcagacgcgcgaagcaccgggaacctgagccgtgaccgcgggctctggcgcctttaagggggtcaacacgccccacccccagttccgcagaggcagcgtcccgcgactgggcggtgcccgagaccacagacggcctaacgtcagacgtctcgaggctcgcgtgcgcccgggcgccaagccctgcagccggaagctcggcgtcccatgggagcgacctccgcatggctggac

SEQ ID NO: 14177 - DNA, 504 bp, Homo sapiens
  source 1..504: mol_type = other DNA
tccagaaaaataaaactcaatgtctttgcatactaggtactaaataaaattatgttacttaaatgtcacaacctctaaaagtttaaaaaatgacttctctaaaaactcaaatattttttttgtttttagtgataaagttttattaatatacttaatgcagaaataacttcacttcttttttttttttggtaatctggatcccctaaatagaatgctaaatttgtttcttgtgcaacaaacaagttactggagtgcagaggcgcgatctcggctcactgcaacctacaggcgcgcgccgccacgcccgcaccatgttggccaggctggtctcgacctcctaatctcgtgatcggcctccttgagcttcctttttaaaggaaggagcaggaagaaaaaaaaaatgctttcacgctcttgatttttctagattctaagaaaaaagtttcgcagggaacagctgattctgtttttccttcccagccaatggtgatcaaaagcttcagg

SEQ ID NO: 14178 - DNA, 612 bp, Homo sapiens
  source 1..612: mol_type = other DNA
tggagtgcagaggcgcgatctcggctcactgcaacctacaggcgcgcgccgccacgcccgcaccatgttggccaggctggtctcgacctcctaatctcgtgatcggcctccttgagcttcctttttaaaggaaggagcaggaagaaaaaaaaaatgctttcacgctcttgatttttctagattctaagaaaaaagtttcgcagggaacagctgattctgtttttccttcccagccaatggtgatcaaaagcttcaggggaggagccgaacactgaccgcgccgtccccgccaggctcccgcgcggccggcaccgcggccctgagcgcaggcggccccgggtctcaggcctcaggcggaccgcgccccgggctcgcagccctcccgccccggctgccgggctacggggcagatggactcggagcgccccgccggtgagtagctacgacccccgaggccacctcccgcgaaccgctcggcggcaggagggcgttggcccagcagccgaaggggtcttcagcgcgcccagacccctcggggctgcggggcggaagccggggcgtgacttccggcgccgccgggtgtggggcggaggtagaacccagcggcgcggg

SEQ ID NO: 14179 - DNA, 707 bp, Homo sapiens
  source 1..707: mol_type = other DNA
aaatcaatgactgtttaaattgtaggactaaattgtttgtatataaatattaccttttatattccatttgagttttatgtagatgagcacattactttaatgacctgggagagcggctccccgaaacccccaccagccagatggctgccttttcttgcatgagattaaaagatgtttctcattcatggagatgcttctgaggcaaattaatatcgctggctaaattgcttgtgtttttggaataaaatttaaagagaactttttaaagcaattggtatcacgggttctcggagaagattactctccaggtagattcggtaattaatggaaagatgactccttattaatcatgaaaaaatgttaattaatgaaaagaacaatgattttagagtggaaaccatagaatgttgcttcaagccacccaaatttaaggggaaaaaatgtcagtgctcttggcatttttgcttaaaaacattcacccagagctatatttatttcaaacaaaatggccttgttgttcatctccatttgttaatgtaatttcaacacaataggtcattttgactgctaaggacaaagggagtactaagtatttttccctaaactaaaataaacaaattccatttatagtatttcccagctaatataaagaaaaattcagattcacttttgggacagagtatctttttaaaaaaatctaattctaa

SEQ ID NO: 14180 - DNA, 566 bp, Homo sapiens
  source 1..566: mol_type = other DNA
gtggatttttttaaaaacatgactattgtaattaaaagcttatgtgatttaaatacaagatgcaatgatgattaccagattctattcctctttatattttacataagacttccagggttccataagtataatcttgaaacataggacattcctggaaaaaaaaattgcttaaaactatttcatttggcaacaaaaccttccttttgtgtcattgttccctaaataaagcaacacctttatgcaagatttatcttttgcattggaaacggcaataaatgcccctcaggacgctgtctcctggggaggaagtgcggtctctgcatttctgaaagaggagcagggcgagctgagctgtccgcgaggctgcggcaggaggcctcgtcctcccgggcagggtccctcctggaggctcccccggtctctcccagacgcacccgcgccgcgtccttgttccccgggagcagcctccctccagccgccggtcctgggagagcagagccagaagcagattggatctaattagacgctgctgcagcaaatgtgattggcttcaaagtggctggtag

SEQ ID NO: 14181 - DNA, 517 bp, Homo sapiens
  source 1..517: mol_type = other DNA
aggaaactgaggcatcatagcagtagagttaagatttgaaatcaaatgtcttactctctattcttttttcttatgataaaaattatctggaaatttctaggcacataagcagctgaaaaggttagcagaaatatttgtgtgccatttttatatcaacatgttaatgtgtaatgaattttagagtggatttttttaaaaacatgactattgtaattaaaagcttatgtgatttaaatacaagatgcaatgatgattaccagattctattcctctttatattttacataagacttccagggttccataagtataatcttgaaacataggacattcctggaaaaaaaaattgcttaaaactatttcatttggcaacaaaaccttccttttgtgtcattgttccctaaataaagcaacacctttatgcaagatttatcttttgcattggaaacggcaataaatgcccctcaggacgctgtctcctggggaggaagtgcggtctctgcatttctgaaagagg

SEQ ID NO: 14182 - DNA, 623 bp, Homo sapiens
  source 1..623: mol_type = other DNA
ctttccagcgcccaggccggggcgccgccagggcgtctctgagggtcgcgccccgacttccccccaagggcggggctgggggcccaggagcaccacagcccccatgggcccgggaaatggcagcttcgtcatggcccattcccgacctcaggctgcagaggaaacctgggggcgggggtcgaggaagccgagccccgaggctcccagcgccgccccaggaggaatcttgcgggccactagaagctgtgcgcgcggccgggctcggcccccacaacggcccgagcggccgggcctgccgcgagcctccgcgtccaggtggggtctccgcgcccccattccaggcgctccccgcaactgcggggtttccacccgccccggcgctcgcgcgcccccccgggagatgctcccggcgttcatcccgccccgccctggcgcgccccgcaaacgatgtgaccccggcccgcagcccacccgcgaggctcgcgcacctgcgatgcggccccactagcagggacccgcccacctgtggcgctacccgccgcgcccctcgggccccgcccgtcaccgcccattggcgctggggccgggcgggggcgcgggcggggcggcggttccgagtcagg

SEQ ID NO: 14183 - DNA, 168 bp, Homo sapiens
  source 1..168: mol_type = other DNA
ggggccctggccctgggacctgccatcccagaccccaaggttcaggcctggcggggcagcagaacgcctttggagctcagctcagccctcccagctatcgcagaggacgaggagtggtagctgtcacggcaagccccgccccgcgccctgcgtcgggttaagaggggg

SEQ ID NO: 14184 - DNA, 541 bp, Homo sapiens
  source 1..541: mol_type = other DNA
ctgttaaccttggtgagggctaagatcgccctcctgcgtgctcccctcccccactctggtggcccggaggacagaggggacccgggcggccccgggcgaccgggaagcccccgggacgggggggaaccgggcggccccgggaccggacggccgcccgcagggtgagctgccggaaccggggctcgcgcggcgacagggcccggcttggtgaccgggacgggcccgggactggggacaggcgacgcggcccgccccggctctcccagccccggctcccttagctccggccgcgggcgcagtgcagggctcggccgcgcacctcacagcgcggactcctccggcgcgcggccgcccgcgccttataagcctgcgccaatcagaacgagcagagttcgaattgatggagagtctcggtcacgccaggcggggccgctgtgtgtcgccgcctgcgattggccggagctgacatcatcggcgcgcagcccccgggccgggagccacgggattgggccgcgcacggggcgggcgcggggcgagtcac

SEQ ID NO: 14185 - DNA, 595 bp, Homo sapiens
  source 1..595: mol_type = other DNA
aggcagtaggactcccagagagataagaggggcgtcggaaggctcccttgacccctctttccctccactggccctgggggagcccagtccactcataaggggggtgtccagtccaccccgggcccgaggctgcaagcaaggacgctcccctctacatgcagggctcggcctcccctgcccaggacccccgctgtcctgcaagccccagccgctctgggccaggacccagggagtggaagcacagtggctccctgacggggaaccaaggccaggcacgcttctcccagactgggggcctcggggcacctagagagcggggacccactcccgcgcaccctgtgccccaggggacgcaggactctgcaccctgaccctagagcttgccctaggatggcccggccatggcgaggccctggaacggcctcagtcgcatatgcacccggtgcgagggagagcgcggtgcttccagccttgggactccagctggctctgcggccagtcagtgcccggcgcgcgaccagcagccagtcaggaagccctgcgttcatgcttccttccagccagtcgcaacggcgggtcgccagcgccgcagtag

SEQ ID NO: 14186 - DNA, 615 bp, Homo sapiens
  source 1..615: mol_type = other DNA
ttttatgaaaaagtgaatcatggatcatgcaaattacaatcatgttttaacctgacctccaaagggagaataaagtaaaaattatcccatgcgaggattagttaccagtttttctttatgaataatgtttagcaatattataaagtatatctaatagttatcatattttggcttgttactttttggtagcaattcataaaaatggctggaaaatttgcatgttacaaattgttaataagaaatcttccaataaaaccacatcatattttcttttttatttgatttctcttacaataaatttgctgatgaaaaaagtaatgcattaaaaaattttaactttaatttttaattgagggcaatattttaaagaaatgctcattagtcattcctttaaataaaaatgaaaattagtcatttcaaatgctgcaagactagaggtttctgtaacaatttgttctacaaatctctttgagtaatttatgtctcatatatagagatctggaatagcaggaaattaatgagtgtatcatgaccacataataatttacttatgaattttcttaggtaagaaacggttgaactggatgcaatttttatcacagctccagcagacag

SEQ ID NO: 14187 - DNA, 629 bp, Homo sapiens
  source 1..629: mol_type = other DNA
ccaagatgtgaatcatggatcatgcaaattacaatcttgttttaacctgacctccaaagggagaataaagtaaaaattatcccatgtgaggattattcaccgttaccagtttttctttatgaataatgtttagcaatattataaagtatatctaatagttatcaggtttttggcttgttactttttggtagtaacttataaaactgactggaaaagaccaactgtttgcatgttacaaattatatccaaaagctgttaataagaaatcttccaataaaaccacatcatattttcttttttatttgatttctcttacacaataaatttgctgatgaaaaaaagtcatgcatttaaaaattttaactttaatttttaattgagggcaatattttaaagaaatgctcattagtcattcctttaaataaaaatgaaaattagtcatttcaaatgctgcaagatcacaatttgttctacaaatctctttgagtaatttatgtctcatatatagagatctggaatagcaggaaattaatgagtgtatcatgaccacataataatttacttatgaattttcttaggtaagaaacggttgaactggatgcaatttttatcacagctccagcagacag

SEQ ID NO: 14188 - DNA, 362 bp, Homo sapiens
  source 1..362: mol_type = other DNA
ctcttcagctcagactgctaaaaggaaaaattttaaaaattagctggggcaccattgcacttaaatcttggcaaaatttttgaggttttagatgaaatctcccaggaagcagccctcagagagaacagctgggaaatgtttttctttagacctttaaaggtatcagattctcagttaatctttcttctatccaagagagattctcagagaaagcctgaaatgtgtcaaagaaatttattttagtgcaaaatgtattggttcccttgactctgactccaagttctggaataccaaacgatatggtttggttctgtgtccccaccgaaatatcatgtcaaatttactcttctcataatagaatt

SEQ ID NO: 14189 - DNA, 408 bp, Homo sapiens
  source 1..408: mol_type = other DNA
gatgtatcagaaatcctgaatttccagacagacttctatttgtctccatgggtgcactgcatagtgaagtggtgggagcaaggcttcacccctcaacaatgtactagcagcttgcaactcaagaattttaaatattctgtcaccacatatgttgattatatgttcatattgacaaaatctgctgttgatagtgagtttttcaattcagttatatttttcagctccaaaaatttaaaaaaaaaaatttctgtatcagtgatcatattgtcatttttctatattcattagcaattttagtatacttattgtagttgtgtaagtcttctactattcttataatatactatattttggcttgcatttctgctagacttgctggcttgtttgtttgagcaccaataagtagtg

SEQ ID NO: 14190 - DNA, 694 bp, Homo sapiens
  source 1..694: mol_type = other DNA
ttttggttattatttgaggaaaagtaaatgacaactccaagatgttgataatgtattgtgcaaactacattcatcatacatgagaattattcatccatttatatgtaattaatttccagtttttccttacaaataatgtttaacaagatgacagattatataaaatggttatcagttttttggctagttacttcttgatagtctgtaataaacctggttgaagaacaaatactattaaggcactgcttgcatatattaaatgatgtccaaactccaaaaactgttaataattaacactccaataaaaactacaccagaatttctttttattcagaaatgaatatttctcttacaacgcaaagaaagaaaaatcaaaataaattttctgattgaaaatgtaaaaaggcaaatatttttacagttttaactttaattttttattgaggaccaactatttgaaaaattctcattagtcattcctttaaattatgtgtatgtgagagaaagacgtaagatggttaattatttcaaatgatgcagtatttgttctacaaatccttttgaataatttaatatagagatttagaatagaaaataatactttagatagaaattaatgagtttattataaccatatattataataatttacttaggaattctctttgataagaaacaaatgaactgaatgcaa

SEQ ID NO: 14191 - DNA, 702 bp, Homo sapiens
  source 1..702: mol_type = other DNA
gctggggttacaggcgtccaatgggagaaacaagtaaaattatgccatgtgaggattattcaccaatttattttaattacttttttctttataacatttaataagatcacaaattatataaaatagttatcagctttttgggaagttacttttgctggtttcttataaaactgatggaagatacaaacactattaaagaactgtttgcatgttgcaaatgatgtccaaagtccaaacattgttaataattaatactccaataaacatcatgtcagaatttctgttttcatcaggaatgaatattcctactacaattaaagaagaaacaaaattaatttgttggtgaaaaacgtaaaaagagaaattttctttggttttgtttaatttctttattgagggtcaccactaaaaaaaaatgctcactggtcattcttttgaatactgtctgagagaaagatgtatttcacatctttatagtctaacatgatcaccaatcattctataaacctgttggatgagtttatcagacagacagagagagagattgattgattctgaatagaaaatttcactttagaaaaaaatattttgactatataataatgtatgtaaaaattctctttgataagaaacgagtgaactggattcaattttcctcacagcctgattagccccagggagcagtgcagcactgcctgccca

SEQ ID NO: 14192 - DNA, 178 bp, Homo sapiens
  source 1..178: mol_type = other DNA
gccaggctagtcgctgggattactggcataagccagccctgtatggttaggtacgtgtgcggccagatgacgctgcacggggattttaaaccccttctctgctttcaaagcaggtccaggctctacatttacagaaggaactaagatctctttgcttttatcaatgaagcaagttgct

SEQ ID NO: 14193 - DNA, 221 bp, Homo sapiens
  source 1..221: mol_type = other DNA
gccctgtatggttaggtacgtgtgcggccagatgacgctgcacggggattttaaaccccttctctgctttcaaagcaggtccaggctctacatttacagaaggaactaagatctctttgcttttatcaatgaagcaagttgctgtctgcacggctggttctggttgtattttaaatgaaatctcatcccagcgtagattttatatacacacaggggagggg

SEQ ID NO: 14194 - DNA, 636 bp, Homo sapiens
  source 1..636: mol_type = other DNA
aaataattaatgtatataaggagggtaatttaaaaataaaaaattgttaaagtttttgaaaatataataatttaaaatttatgtgctcttcataacatggcctcaaaataataatgggtaaattcacaattataatgaaaacttttaatacatcttttgaaataattgatacgtaaaatttggactacacaataaatccatttgatttaatagattgattgattgaatgatcggtctatctaaaatattgcatccaacaaatgtagaatgcacattcttttcaacactcatggaatattttcaaaaattgaccatatagtagaatataaaggatatataaggagagaactcagttaagatgtgtgatctgatcttagtgcaattaataaaaaataataacataagtatatattatgtataataatataaaagttcaaaagacaataataataaaatctgtttgctgtatgtattcagggattgtttaaatttatttaagaagatattcacatagtactcatgcaatagaaaaagctactttgctgttgcagaaaattttactcccaaaagggtgatttttaaaagacacatgttcttttcaacatagtttcatctgcagctgtgtacaaacctttt

SEQ ID NO: 14195 - DNA, 346 bp, Homo sapiens
  source 1..346: mol_type = other DNA
tggcaaaagagaagtgtttttttgtttttctcgctctgtcacttttaaagactttgacacatataaagcaatatttaaaatcaaagaaagtgtaatttgtttaacaattttttttttactacaagcaaaggatgaagtcacttcattctgttttaattggaaatatatctcatattggccacgtgcacaataattcagtgtgaatatggccaataaacatgccttgtttacaggtcattagtttgccatttgcctttcctctttccgcgggactccacgtctcctaggaaccgctgcgcgctcactgattggctgatcgctgctcagccgccattttcaaatcccc

SEQ ID NO: 14196 - DNA, 656 bp, Homo sapiens
  source 1..656: mol_type = other DNA
aattttgtgtttaaaaggaaatctgcttcacaatttggagactgtcactggtcactgtcattattgttgttcgagctatatcaagatcagttaattcagtctggaccctgttatattatacacttatatataatatatacacaattacatactatgtatacaatatagagaacagaaatcacctttgttataaaatatctagtacacagataatcaagtttttaaaaagatccagaaaaaatatctacctctgaaatactgaattttaagagaggtaacagaagtgcacctgctgtatttaccctgctagtcttaagaaaaagtgggaactatttaaagacttagataatctattttataattgtgaatatgcttgcacttctgtaaaataaaagcaggtttcctggaaaattaggcttttcttcattatatatgttttcagccctatcgaataagaatttctatttctattcccatgcaataggggatttacttcattttaaatcaggaagagaagtttctgtcctacttgaacccagcttcactctcggcgaaagctgtgtgcccagctctcagttaactgaagtcacgtggtggtggaccccgcccccagggcccggttggctgtggccccgcccccgagccctggggtcggt

SEQ ID NO: 14197 - DNA, 541 bp, Homo sapiens
  source 1..541: mol_type = other DNA
ttgttctctctttttgttgtccaagaaccatgaaaatagtcctcgtatgctgccaggtagtcaaagatgtggactccagacctctaagaccagcttttaagagtctctctccacagtgggtcccccttttataaaaaaagaacagattcccaacaggtatggtgatcatgtgttccagaaacaatttaggtagagtattctatctcgtttctgtgaaccacggccgcagtgcctaggctgcgcaggtcgccctccgttcccgctggagaagcaggtgaggccttcccagcctgggcccagtgcagtcaggccctgcccagcacgtggctgcagctggggcaaaggcccaacgacaggtggccccaagcccggctgcacctggaagctaccccaggagcttctggagaatgtgccgtgtgagccatccccctgcactgagccctggtgggtcagcggtgggggcgcccactgggcactgctccaaactgtcctggcaaccccttctgcccctgggcaggttggcatccagtgtcggggagaa

SEQ ID NO: 14198 - DNA, 448 bp, Homo sapiens
  source 1..448: mol_type = other DNA
ttaggtgtacagtgtttataaagtctacaagagtgtacagtaatgtccagtactgcaaggtccattcgtgagaatgccttacacaggtgtttttctatgtctagatatgcttatacaaatacttaccattgtgttataattgtccacagtattcagtacaataacatatagcatgggtttgtaattgcctaatgaggcattgactatttatcatgggcaagggtaaacctgaatataaatttctagagaaatttccaaaatgtcggaaggcgaccacgtgggccacagccacagcactgtaggtcagccgagagagcgtctcccgacaccacgcgctcgttgggatcggccgcctaatcaggagcgagctgtggccttacgcctgcgcagaggggagacgcgagcgccgcgtggacgctgacctcggtccgcgcctgtctctgaggga

SEQ ID NO: 14199 - DNA, 691 bp, Homo sapiens
  source 1..691: mol_type = other DNA
tgaactttcacaaggttaaaccttctaaacttgggaagctgcaaaataaataaataaaataaaaatcccttactcaattgttgactgggtattattccggaaacaggaaacaggtttttcatttcctaagcagcttagaaattgatttgaacgatttgaaattattatcttgaaagatcaaagaaacagtgattatgaacaccggctctggtggttctctcgagtacacatttgcaatacatacatgtttatacatggacacatgttttgcacacgcttgcacaggacacgcttgcacaggacacatgcacaggatgcatgttttgtacaggacacatgttttgcacatggaaacacatatccatgctttgcaaagggacacagggaagcatgcttacaatggatacaagtttacacacggacgcatgttttgcacaggacatatgcacaggatgcatgttttacaagtgcacaggacacgttttgcaccggacgtattctgtgcacgggggttcacactcctcggcgcgacgggcgaagcggggtgggcagcgacagcggagtccggacccagggacagcgcctccgggaacctcgccaaggcggcgggaactacaactcccggctcggtcgcctcgggacgacgcgcggcccagcgcagactggccccgcccagcggccccgcgcggcc

SEQ ID NO: 14200 - DNA, 526 bp, Homo sapiens
  source 1..526: mol_type = other DNA
cttcattgtctgctgactctgcagatttatcacgtgctgaagaacagtttctaagcttagggcctaaacctttgcatacaagagggttaccttttcaaaagaagccgcttactcttcccggcgggctccgggccccggcaagcccagccccgcgggaggaaccaaggccgccacccccgagaggcagcccggcccgcgctcctcgcccacgtggccgccgcacgcgcccgctcaaagtccaagggcggcgatccggctctgggaccttggaccgagcgagctcccgccccgacggcgggagtcagaacggtggtggccagcagtccccgcccgcggctccgtgcacctccaccccggcccgcgcgccgcctcccgaaccaccgtggcagaggccgcaaggaagccaaaatggcgacgccccgcccttttcctctcgcgagaggcggggaaggaccgggagcgcctgattggcggccctcccggcgcctgcaggccccgccccggctgcggaggctcagtcacagcc

SEQ ID NO: 14201 - DNA, 758 bp, Homo sapiens
  source 1..758: mol_type = other DNA
atgctcagaggaaagcctggcctcctagcagccgaggccacgtccccgcgcttgccccttcagccccgaggacccacacgctgcgccttcctggcctcggggggcagcgcgggggccgctcccgaccgagttcagtgagcgccctggcctcccccgcgcacccccgccgcgccctccacctgcccacggcccggacggccgagcccccacgcccgcgcttgcccgagcccagcctcgcgcccccggggcccccgctgccccaccccgggcccggaccccccgcgcaggaccccggaggttgcggcctcacgcactgtggcgctccggacccggaccccgctgccgccgccgccgggcccgcgccgccggccgctcagcccagcgtcccccggcagcgagctcctcctctggccgggacctggagcccgagacgcccgccgacttcctccgcgagctccgccccgccgcagccccgggaagcgcccgccgccggagccggactgacggcccccgcgaccaatcgggacgcgagaccggagggggcgtgctgacggacggccagcgcaatcggtgggggcgcggccacagctaccgggccacgccccatccgcgcttccgctcgggccggggcggagcgggaaactttcccagagttccttcgagctccccgagtccccgcggagcagcggcggtcgaggggcggggacgggggcggagcccaggaacgccggcccccaggggctggaggctggggcggc

SEQ ID NO: 14202 - DNA, 283 bp, Homo sapiens
  source 1..283: mol_type = other DNA
aaggacctactatcataacacttcatgcatgcatttatgtagttgttatttttgtatcactaatgtctaaaatagcatttaacatcatggagtttaatgaattgactgtagaaaaagcctttcaaatatataaaattatattctagaccataagtagtgcattcctttctttctttaggaaaaacatagaacggactccaagggagtcacaggtgtctcagatgtgacctgaatggggacacaatattttgaggttctgacatttcacaatgattttaaaaaa

SEQ ID NO: 14203 - DNA, 844 bp, Homo sapiens
  source 1..844: mol_type = other DNA
ggcagcccccggccgcctgcagctcctccttcagggcgcgcagccggccctcctgcaccagcctgcagaggcgccgcgggtccccgggctgggccatcgccgcgggtcgggccgggctgcgcggggaggcggcgggcgggacaccggcggccgggcaggcgagtgggactttccgcctctgagccgcacccccggcctagtccgcaggcgggctgccccctcacagccccggcctgccccgcgtgggagaagccgcggttccgggcacggggcggtttttcctcagggacggagcggtccgggatgagcacggaggggcctggggatccgagagcgctggcgtccgccgtcctggagctgcagcggcccgtacgtgattcgggagggagtggggcgcgccgctacaccgcaagtggagggtccgggagggcgcgcacagcctcgcccggcgccgtgcagggtggctcctgaggcagccaggcccaagcgtgacctgccccgcacgcgtcctcagggccgccccagcctccagcccctgggggccggcgttcctgggctccgcccccgtccccgcccctcgaccgccgctgctccgcggggactcggggagctcgaaggaactctgggaaagtttcccgctccgccccggcccgagcggaagcgcggatggggcgtggcccggtagctgtggccgcgcccccaccgattgcgctggccgtccgtcagcacgccccctccggtctcgcgtcccgattggtcgcgggggccgtcagtccggctccggcggcgggcgcttcccggggctgcggcggggcggagctcgcggaggaagtcggcgggcgtc

SEQ ID NO: 14204 - DNA, 675 bp, Homo sapiens
  source 1..675: mol_type = other DNA
tttcgttttcaaagagaatttgcaagtatgtcacaaaagcctcataaacacgttgtgagacttggagatgtctcgtcctgtccaatgtcaccgctagacctgagaacggttctcaggcggctcagaggtgaagcactgtggctcctctcaagatgaggctgcagcaggaattcggcgaagtggcggagctggggccccagcgggcgccgggggccgcgggagccagcaggtggcgggggctgcgctccgcccgggccagagcgcaccaggcaggtgcccgcgcctccgcaccgcggcgacacctccgcgggcacgccggccgctcacaaccgagcgcagggccgcgcagctggaggcgaccagcgccgggcgaggtcaagtgtggagagagtctgctctccgatgactttgcccactctcttcgcagtggggacaccggaccgagtgcacactggaggtcccagagcacgacgagcgcggaggaccgggaggctcccgggcttgcgtgggtaaggtcctgggtccccaccgggcacggcccatgcgtcccggggacaggggtggctgtgcggtgccgcggcggccggcggggctccttccccagcaggggtggggacgctgagtcacggatctgtcaccgctttgccctggcggggcggcaggtcccagagcagc

SEQ ID NO: 14205 - DNA, 367 bp, Homo sapiens
  source 1..367: mol_type = other DNA
ggtgaagtatttaaaaaattctaactatgcaatggctttaagtcttagacaaatttccataataatcagaagagagctctgatcaataaataagcaagactgaattttacaaaataatccaaagttttttgcatgatcctttatgacaatgcactttcaggacccataagccttggggaattatttatgaattctcaggatcctttatttgaatattggaggctgcctgaccagaatcttgtcaggaccggctgactcctgaggacgttacagccctgaggggaggactcagcaccaagaagtgcttgctcaccctaccttcaacggcaggggaatctccctctccttttatgggcgaaaggatttt

SEQ ID NO: 14206 - DNA, 472 bp, Homo sapiens
  source 1..472: mol_type = other DNA
tttccccatttctactttttttttttaaatttaagagacaggaactctggagtgcagtggtgcgatctcagctcactgcaacctccctgacttcaggcgatccactccgaaagttggatttcaggagcggccctaaattcttttatttaacttttaagttcagggttataagtgcaggtttgttataaaggtaaatttcgttttcaaagagaatttgcaagtatgtcacaaaagcctcataaacacgttgtgagacttggagatgtctcgtcctgtccaatgtcaccgctagacctgagaacggttctcaggcggctcagaggtgaagcactgtggctcctctcaagatgaggctgcagcaggaattcggcgaagtggcggagctggggccccagcgggcgccgggggccgcgggagccagcaggtggcgggggctgcgctccgcccgggccagagcgcaccaggcaggtgc

SEQ ID NO: 14207 - DNA, 314 bp, Homo sapiens
  source 1..314: mol_type = other DNA
caggacctccggcttcttgacggggtggaccaggagcttctggaagccgctgggcagctgtcaagaggagtcatttctgccagttatgctaattttgggatattggcctcctctttatgaggatcttggtcatcatgagggggctcctcacacctgtaatcccagtagtcccggctactcagcaggctgaggtggcaggatccttgagcctggaaggttgaggctgcagtcgtgaggaagaaaatacagtatcttgtttattttagtttctaaactaatgaaattatttcataacaagcatacttttttcatgt

SEQ ID NO: 14208 - DNA, 336 bp, Homo sapiens
  source 1..336: mol_type = other DNA
tttgtaactttttaaaatatttccctatatatatatttttttatgcattgggttacccgattatagtaacttaactctatttgacacccaattaattacagatgtaaaaacgacgtcgtttttaaagaccgaggctttaagatcgaggggcctggagggacttcccccacctcccctgggggcgctgccgcgctccccaagccttgtggaatttcgaaaatgccggcggaggggagcgtgcagtgcggtcctcccgcgggcagggggcagtgcggcaaggcgccctcggcgcaggcgcagaggccgaagcaggcgcaggcgcaggcggggcgcagg

SEQ ID NO: 14209 - DNA, 431 bp, Homo sapiens
  source 1..431: mol_type = other DNA
gcccccaacgcgagtttctgccgggcgttctacaaaaacatttagaaaaattatctggggctatgatcgcaccgctgcactccagcctgggcgacagagtgagatcctgtctaaaaagagaaagaaaaaattacacaatttcagtttgttcaatttgagtcagctattccctcaggtctcgtccttcgggaaggacctgtcccgtggagtccacaagacaggcggcagcttcaaggccggcaagttccgcgtctggggggctgcgggccgcccctgcgggaccggggggatctgggcgggacagggcggcccggcccacgccccggcttcccccagcagcccgagggcgcccggagctcacggctggcgccgccccgcgcttcctgcctcgccgcggatcctcctccgcgccgtgacgcgcctcgcccgcc

SEQ ID NO: 14210 - DNA, 526 bp, Homo sapiens
  source 1..526: mol_type = other DNA
ggagtctgcctaataaggggccgcccccaatacaaggttcccagtctttggtgggaggatcagggaagcctcctccccgcgggtcgcccgggtcgtggcgggggatgggcttcagggagcagcctggcccatgtccttacctggactgcgcctgcccctggggctccatggccctaaaggagctgcattggtaggatgcactttaagcagcttcccaagggattcggctgcggggtccacggtctacactgggcaggactgcgtctctgctctcctcccggccagcacagttgaggtgaggcagacgtcccgagggacccttcagcagggctgggcgcgctccaggcccggggcagggcggcgggagctggtgcaccgccgtcgccggcccgcagggggagctcgcaggctgcttcccggctcgcccaccctcctccccacgtggaagggggctgggacccaaggaatgcggcccgccccgaggctgacgtacgcgtctgcggccagcccggactctttaaaagcc

SEQ ID NO: 14211 - DNA, 645 bp, Homo sapiens
  source 1..645: mol_type = other DNA
caaggttcccagtctttggtgggaggatcagggaagcctcctccccgcgggtcgcccgggtcgtggcgggggatgggcttcagggagcagcctggcccatgtccttacctggactgcgcctgcccctggggctccatggccctaaaggagctgcattggtaggatgcactttaagcagcttcccaagggattcggctgcggggtccacggtctacactgggcaggactgcgtctctgctctcctcccggccagcacagttgaggtgaggcagacgtcccgagggacccttcagcagggctgggcgcgctccaggcccggggcagggcggcgggagctggtgcaccgccgtcgccggcccgcagggggagctcgcaggctgcttcccggctcgcccaccctcctccccacgtggaagggggctgggacccaaggaatgcggcccgccccgaggctgacgtacgcgtctgcggccagcccggactctttaaaagccggcggtgcgcggggcatcccagccaagccggcctggtggcgagagcgcggctgtcactgcgcccgagcatcccagagtccgagcggacgagccggccgtgccgggcatccccagcctcgctacagccccgcacaggcgagggtccggaact

SEQ ID NO: 14212 - DNA, 355 bp, Homo sapiens
  source 1..355: mol_type = other DNA
cgggaagaatttccccgctgggatgctggcgaccttagccgggtgggggccgccggcctgggggcgcttcctttctcacctgaacgaaagggggaaagtttttgtattcttggtaaaaaaaaaaaaaaaaaatgcgtgaggaaacatgttttctggagatggtatcctgtccacaggggagcataacccctaagtgaggtttaaccaagcaaagtttgtgcaataaagtatctttgtggtattacaggcgtgtgcactcccccgtgggcatgaagagaggtggagggaagagggagcactccgtgccctcttcctgtccagcatcttttgaccttttcttttgccaaagaaaatt

SEQ ID NO: 14213 - DNA, 613 bp, Homo sapiens
  source 1..613: mol_type = other DNA
agattaatctgatcttaacaaaagtcttaatcaagtacgttttaattatttggtgtcatcattgcaaggaaaccattcagtaagaatattagtaaccagacatataattttctaacctgaatgagaaattagttcagcttccaattgcccaaacaaatgcctggggtaggtcattttaaacagctctttccacccgagagggagacatgtggcctctcgccccttttcctgactctgagaatgtggccggagccggggcgctcctgctccgcctcgccgccctcccggggctgtcctgggccctccggccgccgcctcccgctccagttcgcagctgggcgacccaggggcgggagcctgggcgcgggaccgggggcgcacggcgggggaccgagcgcgcgtccctggctagaggtgccgggtcccgggaggccgggctggcggggaggctggcgagcgccccctggcgggcaccgccttctaggcgcacccgcagtgcgccgggcccgccagccccgccagccccgccagccccgccagccccgccagtccccgcgcagtccccgcgcagtccccgcgcagtcccagcgccaccgggcagcagcggcgccgt

SEQ ID NO: 14214 - DNA, 259 bp, Homo sapiens
  source 1..259: mol_type = other DNA
tttgcagaaatccgccaaaatcggtggccggacactcatccattttaaaaactgaaaataaaggttttgaggtgggaaaaaacccagctgaagtttccacccctaccccaggaagcgctttagcgatggggaaaaaaagaaggaatgggctgtccggttttttttttcggagaagtgcccctggcccggaccagggcaccgaaacgcaactgggtgtgtgtgtcaaagagaaccaccccgaatgtgtgtgtgcgtcttg

SEQ ID NO: 14215 - DNA, 474 bp, Homo sapiens
  source 1..474: mol_type = other DNA
agaggcgctctccagggtcgcggcgaaggagagcggcttctcggcacgtcccaccgtccaggagagggcccgcctgaggacctctgtctgtgccgcgcgtggtcagccccggtcccctcactccagcccgagcggacacctctccttacgaacccacggggacctggaggacctcttggccccctggagaggggtcacacaggcatctctgcgaggccccctagttaagggcgcagcgcgcagccgttgcacctaaggccctgggagctccgcgttcctccccaggcgcccgggacaaagtgcccgagggctccgcagacgtccagccctgcccggggctcacggccgccggggctctccaacggaccgtcgagggccacgacgccgtggcgagcacggctacctggcagctcgcccgggcagccccaccagccctgcccaaggggccattgccctggggattgaatttatctc

SEQ ID NO: 14216 - DNA, 585 bp, Homo sapiens
  source 1..585: mol_type = other DNA
attttgtggacccaggagcaaaattatacggggcataatttggatgaaagaatgtttcgtgcacaatgatctcctgcagaaggaaaccaagcccccgggaagccctgcgctggcaccagggcaagcgcctgtcggctcccgggagctaagcgaggccgcgcggtgagggagcagccgctgtcgccctgcggggccagggccactgggtaggcgcagcgcgggccaagagtgggaggctcagggcaggggatccgcactcggggccattcctgccgcggcgcgccctgcgcttcagcagtgcacagggtggggacccctcgaggacagtggtgcgccgacgggtctctcggcccctccctttccacaggccccgctgtgtggtgaagggacccggggccaaaccgtggagagtgtctggagcccacactccagatttctggacgccgcagtcagtccagcaggttctacctggagccgcctcggggctcaaccgggaggcagcggggtctctgctttcagcgacccacagggcagagagcccagggctccggcttgatgtccccaacagctggggactggaggtgc

SEQ ID NO: 14217 - DNA, 316 bp, Homo sapiens
  source 1..316: mol_type = other DNA
tctactttgctaacaataaatttaaatgttaataactggggtgtacatacaccataaacggtacaaatgtcatgtgtacagcttgataaaattttacataggtatacctggtcctgagcaggccttcaaaggtgagagaacatgcgcttttgtatctgatattttcactcttctaaatagcaatattagttcttttgtttttagcaggggcgtgagggcctggcccctccttctacacggaaatagcatttcgaattgtaatccccggtgaatttccccctctcgtgatagtgagtgagttctcacgagatctcat

SEQ ID NO: 14218 - DNA, 324 bp, Homo sapiens
  source 1..324: mol_type = other DNA
ggctctacagaggagactggtccgtccgtggggccaacacaggtggcccctgctgtgcgcggcgaggcaggcttggaatgccttctccccgaacagagctagcccagcactgggggctggaggcgcggctctggtctgaggccgggaagcggcgccgggtccgggctgggtcggggtccgggctgggacgcggggtgggcggggtccgggctgggtcctccgggctccgggcctgggcggggtccgggctgggaccgcggggtgggcggggtccgggctgggtccgtggggtgggcggggtccgggctgggaccgcggggtggg

SEQ ID NO: 14219 - DNA, 283 bp, Homo sapiens
  source 1..283: mol_type = other DNA
ttgcatccaagaagttacatttcctgtttgttgcaagaaaaatagaatcccattgatctcaccactgcactccaattctgagactctgagcccggctgataggggcagcagtcaacatgcacaatgaattctttgctcagaaaaatcatttagatcaattatctgtaggtctctctgattttaagatcaatagaaatcctctgggtgttcgatccacccatcaagtttgagctccagaacaaatatttgtcccaattttgaacaaagttagagagttttttct

SEQ ID NO: 14220 - DNA, 409 bp, Homo sapiens
  source 1..409: mol_type = other DNA
tcccccaggacctgggggcaatttcatgacctttgctgttgcagcacccagatcgaatcaaagggtcactcttcaggctcccgtcaccttgcaggccctgagactgggggcctggcttgcagtggtcaatttggactcaggccgcagtcccgaggtcccaggtggccctccgacctcagggaaccgggcgggaccttgctccgccggagcccggccctgcgcacacctgcagcccccgctacccggcgcctccgacgggccaggggcccagctaggccctgcgaccccacgctaccattgcggctgcaaggtcagccctgctgaaggtcggtcaggcaggcctcagcgcgcatgcgccgaagctccccagctcgcgctacggcgaggggagtctcgcgaccgttgcaac

SEQ ID NO: 14221 - DNA, 540 bp, Homo sapiens
  source 1..540: mol_type = other DNA
ttccctctttacagataagtaaaggggaatataagttttaaattttgacagtctgatatatccataaaccagataaatccataattttaaccacaatattattctgtgccagcttagctctcctttttcacctgatcccaaaagaggagtgttctcttaagagtcaagtcaagtaagagctgatgactgttactggcattgccctatccccgcccctgtcagaacacaggctgcccgctgggcccgggggctgcggggagggacggctctcgtgcgctgagtagttgactcgcccactgcagacacccggaccccgggagccccagccccgcgccctcagccccgcgtccaggacctgatcctggattgccaggggccctcctgggaagacggggccactccgggcccactcacctcgtcccggcctggcaataaaatccgacttccccatggcgaccacggcagcgatcactagccggaaacggagttgcaacggtcgcgagactcccctcgccgtagcgcgagctggggagcttcggc

SEQ ID NO: 14222 - DNA, 467 bp, Homo sapiens
  source 1..467: mol_type = other DNA
gcgacctgcaggctgaatctagactaaccgtggccaattctgtatttaaaaatcaagatatttatccctaaatccgatttctggggtaggcaaccgttcccaggacactcggcctgcaggcagcttacctgttttttttaaaaaaaaaaaaaaaaaaaaagttttattgatggatttggatttttttaaaaaaactgttaaaatattatcgatcttgatgactgagttttttgaaatgccctattgcgaagggctttgaagggccaccagcgcaggtctgcgtttggcgagcatgactaacgttattagtgctaccaggtgagcgccccagcacctgccgccctgggcgcctcctcccctgcgcgccccacgcccgcttccggccggcttccaggcctcagaggcgatcccgaggaatcgttccgctcccaaggggcggagctttctcatcgccgcgctctatgctg

SEQ ID NO: 14223 - DNA, 284 bp, Homo sapiens
  source 1..284: mol_type = other DNA
actctgctagaaggcagattttccctagaagtcttcttaaaaagaagaggagggtcagagggtagcagcccgtcacccaatgcatgggtttatgcctatggtaatgacctagtcaacacttctgatgacatgtatagtgttaatcccaagccagaagacagcgggctgtgcaggcgccaggggccggtcacatttcaggccgatctgtcacacacccctgatgtgtgcaaaagggggtgaaattcattccctcgcggaagagctccgctctctacagtgagcag

SEQ ID NO: 14224 - DNA, 464 bp, Homo sapiens
  source 1..464: mol_type = other DNA
ccgaccagaggccggggttggggtcgagaccgagttctttctgtccgtctacactgagcgtactcggggaatgagttagagccagtctcttcctccgcagctgcaacagctgaagcgtgttcactctgggggcttgagagcgcagaagcaaatctcaaaataccttgacatgaaacattttgtttttctataatgatgcgtgcctattttttaaaagtctgaaaaagaaaaggggcaggctggctgcaccgggacggaatcgtccaccgcggccactaaagggccagagcgcgcgttccctccgcccccaagccccgcgggcctcgcccaccctgcccgccgcccctccgccggcggccgccctctgcggcgcccctttccggtcagtggaggggcgggaggagggggggatcctgtcccctactcgccagcgccaggctcctcccccccggcgcggatgatgc

SEQ ID NO: 14225 - DNA, 496 bp, Homo sapiens
  source 1..496: mol_type = other DNA
tctttctgtccgtctacactgagcgtactcggggaatgagttagagccagtctcttcctccgcagctgcaacagctgaagcgtgttcactctgggggcttgagagcgcagaagcaaatctcaaaataccttgacatgaaacattttgtttttctataatgatgcgtgcctattttttaaaagtctgaaaaagaaaaggggcaggctggctgcaccgggacggaatcgtccaccgcggccactaaagggccagagcgcgcgttccctccgcccccaagccccgcgggcctcgcccaccctgcccgccgcccctccgccggcggccgccctctgcggcgcccctttccggtcagtggaggggcgggaggagggggggatcctgtcccctactcgccagcgccaggctcctcccccccggcgcggatgatgcgtcgcgccacagctgtctgcgaacactgagctgcctggcgcctgatactttcagaaagaatgcattc

SEQ ID NO: 14226 - DNA, 555 bp, Homo sapiens
  source 1..555: mol_type = other DNA
gggccagagcgcgcgttccctccgcccccaagccccgcgggcctcgcccaccctgcccgccgcccctccgccggcggccgccctctgcggcgcccctttccggtcagtggaggggcgggaggagggggggatcctgtcccctactcgccagcgccaggctcctcccccccggcgcggatgatgcgtcgcgccacagctgtctgcgaacactgagctgcctggcgcctgatactttcagaaagaatgcattcccgagcaggtcgtacccaaccacttgggaggacctaaatcaattttaaaaggacggtcccgggaccggtgtccccgagggagggacttgccctccaagtgggacttccagttgctcagccagccccggctcccgcgagccgggctgcagggacgtccccgagagccctgcgggctccgcggccgtgtccccgcgctcccgtgcgggtctcgggtgcgctgggcgggcgggcggcgcgagttgcaggtgacccgaggagggactccgcctccgagcggctgaggaccccggtgcagaggagcctg

SEQ ID NO: 14227 - DNA, 538 bp, Homo sapiens
  source 1..538: mol_type = other DNA
ctaaaattaaagcggttttctataggagacaccttaggtaaaattggcaatggagaccaagtttatttccattatttttagttatttgcacaatacataaatacgaaaataaacttcttgcatttcgttgtggtggggttgatgggaccttcatcctagaagtggaaaccttactaatcttggtatttccatctctatattcccagaaatttcagtgtttaggaattaaaggaaaactgtcatagtaaaaatagtgttaataattatagatgtttagaaaaagaaaaaaaatacatcatgtactatggtgtatcaattaaaatgaatgggagttacatgcaaatacctcaatgtagaatacctttccactgatgatttttagttgtcaggacaaccaaacagcagacagaatggtcccagcatgcttgttgccttttgagcaaatttaaattactgagtcctttttttatttttctactctgcgacaaactgaaaagattccagtttttttttctctccctgcttctaggataattaa

SEQ ID NO: 14228 - DNA, 396 bp, Homo sapiens
  source 1..396: mol_type = other DNA
tctgcgtagaatttttctaattccaataaacagaagtacaatgtatatttccctggttaactgtacatggaaagcagatttttcttattttagaaaagagcaactcattggtcttgtgcacaggtgcgcacagagttaaaatatttccaaatcctcgatctctatgctatttgaccttgtcactcttcctgaggacaagacaagtttgatagcaaaaggcttttaagaaaaaggtaaatgagttccttggttgttgttttttttgttcccccaatttttaaagatggtaattaggagaagtaacacagtgtattagtgtaataatatgcatagacaacataacttgtcagagaggattatttctatgctctactattcagcatgagaccagtatag

SEQ ID NO: 14229 - DNA, 617 bp, Homo sapiens
  source 1..617: mol_type = other DNA
cttgtgactacactgtgaaaagttccttagaaacgaattagttttccagaacttatgcaaatcacttaaaaattaaactcgccagcttctctgtttcaattcttgttagtaaatcagtcacaaatcttaagtggatatttaagcttcatggccttctaattattgtgttaaatactaggaaatgtagaaaacgtgatttcttgacagaaaaggcagtgccatcgtgcagagacaggtttgtcttccttagggcaccctaaagaagcgaaccctcgggctgctcgcctcccgcggctgggctctgggagcgcggctcgcctgggtggccctaaacctactccgagcggccacggcggcctcttgccagggacccccgggcgggggagcagagccaggcgggccttcgggggcccaggggaccctgagaagtctggccgtgcccgggcggtgagcgcggaggcggcccgccctgtgtccccgcggggcggagccgggttcggggccgcgctctgggccggcgggcccgcaggggttaagcggcggcgggcgccccgcgagctccgcccccgcccgccgcacctggcgctcggcagccggccgccccggcgctggatttc

SEQ ID NO: 14230 - DNA, 306 bp, Homo sapiens
  source 1..306: mol_type = other DNA
caggctgagaagctggagcaatgcaaatgagctgccgagaggcattcagccttgtcacttggcagaaaagacatgtcttcatcatcgtattacttatcagcattctcttccaaatggggattttggaaagctgggagaagaaaaggcagactttctttttttctctcccatgaaatattcaaagggggtcccataaacaatgtgctttttaaaggggacagccaatcagctgcgcagagctgcatagctggaccgctttccagtagcaacaacgtactaatttgatgcacacaagggagagaaatc

SEQ ID NO: 14231 - DNA, 335 bp, Homo sapiens
  source 1..335: mol_type = other DNA
tgggagaagaaaaggcagactttctttttttctctcccatgaaatattcaaagggggtcccataaacaatgtgctttttaaaggggacagccaatcagctgcgcagagctgcatagctggaccgctttccagtagcaacaacgtactaatttgatgcacacaagggagagaaatccagcagacatctagctctgcctttctttcccagccacagccagggtagggctgatatccacgccctgggtgacaggcggcagggcgctgccccgtgctcccccggctctgctcgacagcagcacgcagtgagagcctcgccgccgccgaggagcaactca

SEQ ID NO: 14232 - DNA, 509 bp, Homo sapiens
  source 1..509: mol_type = other DNA
tagttcctggaatcaaggacaggaaagcttcgattgaatcaatcatttaactgtcagctaatatggcaccccttaatgggaggctttggagattaaaactcttgacaatttccacgatgtaaaaaatgacagcagtgtcacctatgtcagtagcaatggcatttgctttgcacttactaccaagcgcgtgccccgaagccccgctttgggtcctgggcttccagcgcccgcttcccgccgaggggctccgggcacctgcagccctgggcgcgcgtccccgaggcgggcgggagcgcgcacggcgggagtgcgggagcggagcgcacgtgccgccgggaaggggccgcgccaatatggcggcggctgcggccgctgcggtgacggttggcggcggccggtgaggcgggcggggccggaggcgcggaggcggggtcccgggcgagccgccctgggaggcgggggccgtttcgcggcaggaggtgtcgcgccggggaacttcctggttcccg

SEQ ID NO: 14233 - DNA, 393 bp, Homo sapiens
  source 1..393: mol_type = other DNA
gttctcaaagtttgggtgctagcaaagagcctcgtgtcagttttcaccagctggaaaagagagatcagtaattctagttcctggaatcaaggacaggaaagcttcgattgaatcaatcatttaactgtcagctaatatggcaccccttaatgggaggctttggagattaaaactcttgacaatttccacgatgtaaaaaatgacagcagtgtcacctatgtcagtagcaatggcatttgctttgcacttactaccaagcgcgtgccccgaagccccgctttgggtcctgggcttccagcgcccgcttcccgccgaggggctccgggcacctgcagccctgggcgcgcgtccccgaggcgggcgggagcgcgcacggcgggagtgcgggagcgg

SEQ ID NO: 14234 - DNA, 317 bp, Homo sapiens
  source 1..317: mol_type = other DNA
gctcggtctataggcgcggacctcaggtggttgggatgggggcccggaaatttaactttattttgtaactcactttccatttccagatacctggaggcagaaacttaaagtgtggacccccacagccaggccccccacgtgctcgccctccaggctcggggcgtttcggttgtcaaacaacccctggagccggcctgcaggtttcaatgcgcgcctttcaccgtgcggggcgcggcggggagcggcgagccgggggcgggcctcgtgggggcggggcggggcgtgccggggcggggaggggcgtgccggggcggggc

SEQ ID NO: 14235 - DNA, 421 bp, Homo sapiens
  source 1..421: mol_type = other DNA
ttctgctctgtaaaatggggttaagaaaccagaaaaccattttaaggattagatgaaataatgtatgtggtgtatgcacattaaatgctaggcctgtaatcccagcaggatcgccacccatctctacaaaaaattttaaaattagctgggtgtggttggtaccagctactcgggaggctgagatgcgagtatcacgcgtgcactccataaaaattagattaaattaatgtggggattttcacggtgctgtcccccaccgaggacccccgggaggcggccgcgaggtcccccagcgcggcggggcccggccctttaagcgccgcgggcgcgcgcagtgcgtgcctaaggagtgcgagttcgggcggcgcgagcgcgcggcggcagtagagcgcgcgcgggtgggcgcgcacagggagagcgc

SEQ ID NO: 14236 - DNA, 376 bp, Homo sapiens
  source 1..376: mol_type = other DNA
ttttttaaaatggtgatttgaagtcttgccactgtaatttttaaaagtttgcttgctagaaccaggtactttctaagaagtgtatggaaaaagccttgattccgaacacctagaagtgcttctggaaatccccccgcaggactttcgatgtcttttagggcattcttaagcccaggagaatcacgtggccgggcttgtcccgcgaagcgcctgcgcctgcgcagctccaattcaggacccctccgctggggccctggaaaagctgttaagtgaatggcactcatatgagctcaagctgagggcatcggcatgccgcagggaagacccccgcccccactctcagcccggccgcgctggtgagtggcgggcgggaggg

SEQ ID NO: 14237 - DNA, 372 bp, Homo sapiens
  source 1..372: mol_type = other DNA
tatgtgtagtgtataaaaaatatatatttttaaatacaggaacatgggcaccaggtggggccccctcaagtcatacccatttttgaaagtcggcctgggttcgcattcagaagaaatgtcgacgctagccattttttttttaaaatgggtgatttgaagtcttgccactgtaatttttaaaagtttgcttgctagaaccaggtactttctaagaagtgtatggaaaaagccttgattccgaacacctagaagtgcttctggaaatccccccgcaggactttcgatgtcttttagggcattcttaagcccaggagaatcacgtggccgggcttgtcccgcgaagcgcctgcgcctgcgcagctccaattcagg

SEQ ID NO: 14238 - DNA, 373 bp, Homo sapiens
  source 1..373: mol_type = other DNA
tggcctcccagagggcctcccagaggctggagtgcaatggcgccagcctcccgagtagctgggaccacagggaggtttctccacgaacccggcctctgttaatgtttcttaagaaaacaaaaaaattaggggtattgattttgtagcttctgtaacagacaccctagactgtgtctatgcggagcaggtgccgccccgcggaacacttacttgccccgccctgcggtggagcagggcggtctcagccgccggaaccgccctggaagcccgccccaatcctgggcgtcgcttcgctgtgagtgccgctgccacggattggcttccagggtccggcccgtcggccaatcaggcgcgggggcgttgtctgggggcg

SEQ ID NO: 14239 - DNA, 418 bp, Homo sapiens
  source 1..418: mol_type = other DNA
taactattaatggcgggcgcctgtagccccagctactcgggaggctgaggcaggagaatggattggttcggtcccgtccgctctcagcggctcagtcccaggcctcggggccagaaccgtgttccccgcgctacttgggcggcgccgagatcgcggcctccccgaagggtgcccaggaggcctgggtcaaccccgcagccttggcctctgcgcggcttccacgccccacggctgcccgcccgagccctgcccccaggcgcgccagccccgcctcccgggtcccgggtcctgggaccgggcccgccctgccccggcgcccgtggtcaccatggcaacgcagcggacgtcggccaacggcccgccctgggggcggggctgggccggtcgggcgcgcgggtcagtctgcgcggggttgggc

SEQ ID NO: 14240 - DNA, 256 bp, Homo sapiens
  source 1..256: mol_type = other DNA
taagtatatatacactgtggaataaatttagctaacaaatgcattgcctaacatagttatttttgtggtgagaacagtatatcgtcattaactatagcctccatgctgtacgacatatccagcagcagtcgctagaaggcctgcgtaccacgcggagtgaagcacatgcttgccgccgctccctcccggaactctgggcgccggccccggaagtgcccgccgagctattttggttcaaagaagtttacaactccgt

SEQ ID NO: 14241 - DNA, 389 bp, Homo sapiens
  source 1..389: mol_type = other DNA
agtggcgcgcgcgcgctctcagctactcgacgccactgcactccaatctgggcacagagtgagactcctctcaaataaataaataaaagcagctagttacttctcattcttttaacgaaacaaacaaaactgaactttgctacaagttcgattcgaattcttccagtcttatgattcgatcatcgcaggaatactgataaaaatctgcgttttttccaggttgggttcggagtagcccagggcgcctggacgcgtgcccagccgcagcctgggagacaccgcgcggctgcacgcaccatggaggcagcagtgtcagccgatgccggtgccacggctcgaaacaccggcgcctctcgcggtgctaaaaggatgggcgcgcaccctccttc

SEQ ID NO: 14242 - DNA, 449 bp, Homo sapiens
  source 1..449: mol_type = other DNA
actatttaagaacttgaaacttttcttatacattttaaccattctaagccatacatatccgatctttattgaatgaaaccatcatataatgaatcagcaattactgaaatgttggctcagaaaatcagttaagtgcaaagcccagattttctatcaacgcctttaaaaaaactgagagatgaaattgtatatattaatacttgccggatgtttttaagtatatatacactgtggaataaatttagctaacaaatgcattgcctaacatagttatttttgtggtgagaacagtatatcgtcattaactatagcctccatgctgtacgacatatccagcagcagtcgctagaaggcctgcgtaccacgcggagtgaagcacatgcttgccgccgctccctcccggaactctgggcgccggccccggaagtgcccgccgagctattttggtt

SEQ ID NO: 14243 - DNA, 296 bp, Homo sapiens
  source 1..296: mol_type = other DNA
ctttgctacaagttcgattcgaattcttccagtcttatgattcgatcatcgcaggaatactgataaaaatctgcgttttttccaggttgggttcggagtagcccagggcgcctggacgcgtgcccagccgcagcctgggagacaccgcgcggctgcacgcaccatggaggcagcagtgtcagccgatgccggtgccacggctcgaaacaccggcgcctctcgcggtgctaaaaggatgggcgcgcaccctccttcacggagttgtaaacttctttgaaccaaaatagctcggcggg

SEQ ID NO: 14244 - DNA, 623 bp, Homo sapiens
  source 1..623: mol_type = other DNA
ccagccgcgggtgggctcctccttcgaggggactgcggggcagacgatcacttctttccactgagtctctgggaggaagccagggcaaccaggccggccaggcccgccggccgctccagcccagcaccagggcgcccgcgcggctgccaaacacccccgggagttttgctcgcaaagggaccacgaggcagctgctggcgcgtcctgcgcgtacccgcccagaggctccccggctcgcgggcagccgccgccgccgcccgcgccttgcccctcgggtcccccgggccacaggccacagcgcgggaaggcgccccgccctcggcgccccgcatccggccgccgcgcacccccgcccgcccggcgcttccgagccacgcagaggcgccccctcccgccggagacgggaaagccccggcgcccccagactgggctccgtttccagctcccggaggggctggggctctcccgcgtgcgccccgcacctgccgggggcccgtacccgccctcgccggggctccagggggcacgacggccgtggcccggcgctcttgggaggggagcgggacatccccgaaggcggcgcgctggaggcggggagcggccggggcgcacggagagggcgg

SEQ ID NO: 14245 - DNA, 644 bp, Homo sapiens
  source 1..644: mol_type = other DNA
tttccactgagtctctgggaggaagccagggcaaccaggccggccaggcccgccggccgctccagcccagcaccagggcgcccgcgcggctgccaaacacccccgggagttttgctcgcaaagggaccacgaggcagctgctggcgcgtcctgcgcgtacccgcccagaggctccccggctcgcgggcagccgccgccgccgcccgcgccttgcccctcgggtcccccgggccacaggccacagcgcgggaaggcgccccgccctcggcgccccgcatccggccgccgcgcacccccgcccgcccggcgcttccgagccacgcagaggcgccccctcccgccggagacgggaaagccccggcgcccccagactgggctccgtttccagctcccggaggggctggggctctcccgcgtgcgccccgcacctgccgggggcccgtacccgccctcgccggggctccagggggcacgacggccgtggcccggcgctcttgggaggggagcgggacatccccgaaggcggcgcgctggaggcggggagcggccggggcgcacggagagggcggaggcggcggcaaaggagccggcgcgcggcggcggcaggaggagggaccgcggccgcggcggcggcggcgagagcg

SEQ ID NO: 14246 - DNA, 619 bp, Homo sapiens
  source 1..619: mol_type = other DNA
atgaaattgcataatttaaatattcacctgaaagttccctcttgtattcccagctacttgggagactgaaggatcacctgagcccaggggaggtcgaggctgcagtgagccctgatggagccactgtactccagctttagagataaagatggaactgtggagtcagtatcctcaggatttacttctgaatgtatttctcaggtgtacaaatgattgctttttggaatcttttatcaaagcttttctaagatcttcattaaataactagcaaatctgagaccacactgaatttcctaatctctgggaatataaagtcagatttggtttctatgtatttttactctgaaatgtagagaaaatgtaaaacaaattaagagtcattctttaatgaatgccttggaccacgtccatcgtggggcgccaggagattgctgggccactgtccccaattcagggctgggtcccggcgtccccgcgttctccgagtccctggtccccgccccagccggcgccgggacccgcccgactccccgcccctcccccgcccacgccccagccgcagggggcagggcgggaggcgggcgcccggcgcgtccagtccccgggacccttttaaagc

SEQ ID NO: 14247 - DNA, 406 bp, Homo sapiens
  source 1..406: mol_type = other DNA
tagcctcaggggcagggtgcttggccctgcagcgctacccgggtactctggatgcacaatgcaacaagagcccaagaagcatcctgcaggctttctgctttttgagtgtattttaaagcaaaaacgagtcagttaactatgtctagatgttaaccttttttcaaaaaacacagatggaggcctccctccgaggatgcctggcattgtgggcggcagcgaccccctgcggctccagcctccagtcacagtgacgccttagagcagtccctgttcacccgggtcccagcctcgaccccgcacggacagcgagggtgggtgggatgggcggggcccgggaaattccccggcgcgggcagggagcggctggctgtcagctgagccgcgctgggcggggtcgccaggccgc

SEQ ID NO: 14248 - DNA, 449 bp, Homo sapiens
  source 1..449: mol_type = other DNA
tttaagtaatagggctgagctcataaatggagcagtaatcatcaggactgtttatcttcagtcttcctaaagtcgattttaattgttctgaaaatgaaagtatgtaaaagctaaatgttattctgcatttagaaactatgttcttagtattatgtacaaacactattttttagaatgtaaatacataaaaattttactgaaaaaaaaatctgtgaaagatatggtctgctgataagttctcggaaatggtggtttcagtgtaaaagatgtcatctaccctttccctcactgcacagatggtgaaggggaagatctgtttggtcccttcccggcaccagggggcgccagacactctattttacctaaaggagactggtgtgccagggccgggattcgctggcgtagccagtcagtgctgccccacagccgcgtgcgtctgacgtcaaggc

SEQ ID NO: 14249 - DNA, 350 bp, Homo sapiens
  source 1..350: mol_type = other DNA
agccaccgtgcccggccgctgtttttaacttttaaatttttattttattaagtgattctcgctttttaatagagacagggggttccaggcatgagccaccgcgggaaggcaatgactttaaagggctctgggacccgcggccccaggaggacccacacgtctgtgtgtcaccctgatgggtattccagtcattatgaccctgaggaccggggccctaacgtccctggagcaggtgccaggacctccttgacacaggccttggtcactggaaccctgactgttaggatgagccttcccagtggaaaggccccgttgctccatctaggagcagccaatggaaagggcagccc

SEQ ID NO: 14250 - DNA, 371 bp, Homo sapiens
  source 1..371: mol_type = other DNA
aacaggctggaatgcagtggccaacactcagctaattccaggctggtctcagctgtcagtcccagcccagccacttgtcactgtgtgacctcggcctggtcactgggcccccgagcttcggtgcggcagggagggtcccgcctgaaggctgcagtgagctatgatcgcgcactgcactccagcctgagagcaagatcttgtttctttttaaaaagaaagaaaataaagcttcagccccgggcggttgcccggcgcgcggactctagcggactagggctccccagcagcccggcccgcgagctggcaccgcccggaatcccgcttacgtccagtccggggcggcgcctggaggcggagccgcccgctgggct

SEQ ID NO: 14251 - DNA, 430 bp, Homo sapiens
  source 1..430: mol_type = other DNA
tctgcatccagcccaggattaaaaccgtgccaacctgccgtgccacgtaaaaacgatatctgaaagtatttggtttattttcatcagcaatgctttagaatctcgaaagatttgcggctgccatgttcgctcgaacattgaagtgttcaagaaactttaggacgtcttcacgaggctcccgtgaactccggttttcaaaaaacctctgcctggcgcccaggcggcttttcctgggctccccaggacgctccgctgcgcactcggggagcggggacagcgccccgcagagcgccgcgcggtcgagcccggccaggtggcggaaacgttcccggcccttgcagcggggcccgggaaaaaggtggcccgggcgccaagggcggctgatcattgccgcgctcggggctgcacggcgcccccgcccccttcccgg

SEQ ID NO: 14252 - DNA, 420 bp, Homo sapiens
  source 1..420: mol_type = other DNA
catttggaaggctttgtaaaggtccaagttgaaaggtccctgccagggaagcagtgtgctagtgatctgggaattttccttccaaaatttttacttattttacatattagtttacaaaagttttcattggggaaaaaaaatatctctgcagctaaaagccactggcatagtagaaggagccaggggccttctgggtttccttaggggaaagaaattaagttatttagtactgcactgagcacatttgcctttgtttacaaaatgaggatatttcatccttggaattagagcatcttgtttcataagttataactagtccttggttttataaatgacaaagaaagccaagagtcatttgaaagtcagatgcttcaaatcttgcttttaatgaaatatctgtgttcttttggtagccagaag

SEQ ID NO: 14253 - DNA, 755 bp, Homo sapiens
  source 1..755: mol_type = other DNA
cggcctcccaaagttctgggattacaggggtgagccaccccgtctggcctcagatatcttttagatgaagtatcacccccacaaaagactttctaaattgaaataattcaattgttcatttttttgttttgtaaagctgactcaacaaaatgatatttcttaccttttttgagtaagaaaaacgaaatgtcaaatattgttcaattatgatttcacaaaaacaatttttaaacgtgcttcaatgacaaacaaatgttagggacttaaaaaatctctgacataatttttctcttcaatttaactttttttcccttgggttggatttaaaaaaaaaaaaggaatttctgattacatctccaatcatgtcactgaaaaatcttgattgctgaacacatgaccaaaaaatgattagttagcttgaggtaaatgttcaattatcaccaagattggtaagcaatctaaagtgaagataaattgacttccaaactgctttaaatttgtagtcgtttaagttcaggaaatttaacagccctttcactctattgttacattgcaaattttgcaagcaagtaacttcagaaaccctaatgtaaatttccagttaataaagatcttgatttaactggccttcgagaggcttttggaactcaaccacgttcacgtaaaccggggaaactacaggcgcgctgccggagggcgccgccagtgggcactcacgcacagctgctttggccaccacaggcgccccgggcttc

SEQ ID NO: 14254 - DNA, 383 bp, Homo sapiens
  source 1..383: mol_type = other DNA
tgaatgtgcaccgtgctccagtaactgttcaaagttctggaacagctgcatcacatagagcaagctttcaaagagctatttaatagtatgtggcaaggatttaggaagatgaggcttccattttcattaaagggtcatgaaccatatgtgcataaaatgcgaatttgctggtttgctagatagatgaggcaccaattttattacactgataagcctcattagaaaattacagcattgatgaagattcttacttgttgttttaatttaaataggtccgtaagaattaactttaaatggatatttgcagttattaatgaaaaatcaaaggtgaaaaaacaggtgttcttcctttcataacaggtgaatgatttgaaagcagcctt

SEQ ID NO: 14255 - DNA, 417 bp, Homo sapiens
  source 1..417: mol_type = other DNA
taaagtggttttattgtgtaatatttggtacatacaaaagaatacatgtaaaacacaagttataaagtaagtaataaaatgaatgtctaactgaaaaccattgaaacaatattgtcatatgtgcatttctaagtaatacattttttacttgtttttgaattttatgaaaaggatgtcactgaaggacacagaaaataattggagtgtattttctctctcctaaattttagatgcataagggaatgtagctagatactgctgtaagatatcccatttgtgagcacactaaagtttttttcatatgtcctcttgtgtggacctgcaggtgcacaagaaaaatttctctaggcatacatagaataatttaaccatgtcataaccaacctttgttttccttattttattgaagaggttaat

SEQ ID NO: 14256 - DNA, 282 bp, Homo sapiens
  source 1..282: mol_type = other DNA
taagcactgtgatgagcaaatactttttatttttaaatttttttagagacagagtcttgctctgtcccccaggctggattgcaggagtgcagtcatagctcccttcagccttaaatctgaagtagctgagactctcaacccccagaagtgctgggaatgcaggtgtgagctctttaaatatgctcgtgaaaactctcatgaaaagatatctaattttcttaagtcttggaaaatgctgcatgataagggaggctccttcaaaattcctaacaggcagccctg

SEQ ID NO: 14257 - DNA, 344 bp, Homo sapiens
  source 1..344: mol_type = other DNA
tggtatgggtggaacccatcaaaggataagttgacagatacgtctcacatatgtttagaaaactctgcatatatatttctgatatgaacaaaaagctttcacagaagcaaagatgaaatttttagtgatggtttctaagggagcaccagaaaatttttcaaaattcttttcttttttctggagtgcagtggcacagtagaaataggtgctgtcacaaaattttctgctaaagaaaaatattagaaaggaagctgcaggaggacaggctgctatagacatttgtcgaatgactatcagatggtagacatttctagaagccatggcttttcactaaggatgaaagc

SEQ ID NO: 14258 - DNA, 426 bp, Homo sapiens
  source 1..426: mol_type = other DNA
aggcagtgtagtttactccaatgtgtttacatttaaacttttgccaaagcccccttagtttaaaagggaggcttcacaaaaaggcctaaacttctctcatctttattgcttattgcagcttttattatagatgctgcgagtactcagcacttctaagaggagctgggatccagagtagttaactgaggggcctcgcaagccccttgtcaggaggatggcctgcctttgatctttaggctgccataacagatgccacagactgggtggcacttgtggaggctagaagtcctagataaggtgccagcagattgggtggcttgcagacaggagaaagaaggagctctggtctcttttcctcttcttataaggacactgatcccatcatgtgggctgcagcctcatgaatggaggaaggcccccgggggc

SEQ ID NO: 14259 - DNA, 439 bp, Homo sapiens
  source 1..439: mol_type = other DNA
actgttttgattcaagtagattgtaatctcaaaaccctttctttcttgcatatttaaatttccaattaccctttgatgaaggtaaatttgtacaattatcttccaagaggaactggcaggatttctatggggacggcctctttgccgggagcccggacacccaggagacgctcttgggtactttgtgtgtgagacagaataccggagctttgtggcttccggggccgccgcgtccagccctcgctcccaccgagtcccggaggccgagcgctgcagccccggctggtgcccctcccggcgcggatgcccggcctttctggatctccgcccgacgcgcgcgagccgtggaaggaaggcgggggcggggctgccagggcggggcgcgttgggggcgtggccttgccgccccgcccctccccgccccgccgcttaattcgga

SEQ ID NO: 14260 - DNA, 706 bp, Homo sapiens
  source 1..706: mol_type = other DNA
tccgggacctagacgttcgggcccagctcagcgcgttctgcggccctgctgtcccagagaccacccacccgcgggaatcctgaggccctgacgtcagcgagaccccttccggcatccagaggccaggacgtccgcagccccgccgtccccgggaccccccgggacacccagcggccccgctgtctccgggacccccccgggcaccctgcagctacgtcgtccctgggacccctccgggcatcccgccgccatgacgccctgggaccccgcgcgtctacatcgccgcgagcctccgccgcggagtagacgactttccggaggaatcgccaggcgcgaggccgggcctgcccggcccttcgctccggagtgtcctcgcggcaacgccactccacgcctaggccggcgacacgccgctctcaagcctgtggatgacccagcgccagagacggccacacaggctgaggtgcagcccaggtgaactccgatggccgccatgaggcagcgggggtcccccggccgcccaacggccccatcaggcaccgcggagcttcacgttcccgccagccccctgcgtccggtcggccgctacagcctcccgcccgcttcacgcgcagtccgcgagtagcttcagcgcgtctctgcgctccgcggaaactgcacagtgcgcacgggagggacgggaaaaggctcctacactccgccccct

SEQ ID NO: 14261 - DNA, 380 bp, Homo sapiens
  source 1..380: mol_type = other DNA
tttgcattagactcaactcaatgctggaagcagcagaatcaatctggcgccagagcttttactgctgaagtttaatattcacagaaggcccggccagggcctgcatttcctaaagccgacagctgctgcgccgcagcgcggggccgccgccatgcaacccctggccgccccccggcctcctggccctgcgtcagcaccgggtgactgggctcgcgcaccacatgctgggccagcagcagggggcggagtgtaggagccttttcccgtccctcccgtgcgcactgtgcagtttccgcggagcgcagagacgcgctgaagctactcgcggactgcgcgtgaagcgggcgggaggctgtagcggccgaccggacgcagggggc

SEQ ID NO: 14262 - DNA, 594 bp, Homo sapiens
  source 1..594: mol_type = other DNA
cgtggcccaggctggagtgcagactgcagtgccagatctcggctcactgctagcctcctgagcagctgggaccatgttagccaggctggtctagaactcctaacctcacctgggattacaggcgtaagccaatgaagacaagtcatttgacattttggcaacggagttcatgattatcgtttcttctgcctccccactgatgagagaaaggccacaagtcccccgcccctccgggacctagacgttcgggcccagctcagcgcgttctgcggccctgctgtcccagagaccacccacccgcgggaatcctgaggccctgacgtcagcgagaccccttccggcatccagaggccaggacgtccgcagccccgccgtccccgggaccccccgggacacccagcggccccgctgtctccgggacccccccgggcaccctgcagctacgtcgtccctgggacccctccgggcatcccgccgccatgacgccctgggaccccgcgcgtctacatcgccgcgagcctccgccgcggagtagacgactttccggaggaatcgccaggcgcgaggccgggcctgcccggcccttcgctccgg

SEQ ID NO: 14263 - DNA, 496 bp, Homo sapiens
  source 1..496: mol_type = other DNA
tgctatctcaatattttaaacttgcaaatttaattaccatttaatttcctcgttttcatagaaagcctataattccatgaagaactgcctcatgttttcagtctgctctgcaaagtcaacaattgaaggctatttgctccgtggcccaggctggagtgcagactgcagtgccagatctcggctcactgctagcctcctgagcagctgggaccatgttagccaggctggtctagaactcctaacctcacctgggattacaggcgtaagccaatgaagacaagtcatttgacattttggcaacggagttcatgattatcgtttcttctgcctccccactgatgagagaaaggccacaagtcccccgcccctccgggacctagacgttcgggcccagctcagcgcgttctgcggccctgctgtcccagagaccacccacccgcgggaatcctgaggccctgacgtcagcgagaccccttccggcatccagaggccagga

SEQ ID NO: 14264 - DNA, 530 bp, Homo sapiens
  source 1..530: mol_type = other DNA
tcatgaactccgttgccaaaatgtcaaatgacttgtcttcattggcttacgcctgtaatcccaggtgaggttaggagttctagaccagcctggctaacatggtcccagctgctcaggaggctagcagtgagccgagatctggcactgcagtctgcactccagcctgggccacggagcaaatagccttcaattgttgactttgcagagcagactgaaaacatgaggcagttcttcatggaattataggctttctatgaaaacgaggaaattaaatggtaattaaatttgcaagtttaaaatattgagatagcagttttaacactggtgcacaaatgcacacgtctgaatacgtctaatgagacctccctcagaaaatgaagaggtactagtccccccatttttgtacttctgaaataatttaaaattacatacattgtaatatatatatatatatattattttttttttcagattgttggattggcagcaaaacaaagtagaataagaaatatttcaaatacagtaatgaa

SEQ ID NO: 14265 - DNA, 281 bp, Homo sapiens
  source 1..281: mol_type = other DNA
aactggtgctctcaagggacccccagctacagcagctccttttcagaggtgcagttgctccctgtcagagcagccccatggccagactgggtgtgtccggggagcccagccggggtagcctccacaccgcagactccagtctcccctccttgaaaaattgcttcagggtagaagtctctccttttctgtgtcctcagaaaaaaacatggatgaaccatttatatccagatagtatgaaaataattgctagttcattttcccaagattctccaccaaatgga

SEQ ID NO: 14266 - DNA, 624 bp, Homo sapiens
  source 1..624: mol_type = other DNA
ggacgccggcgggcgtcgcttcccgcctcccacttgcccgggcgcatgccgcacgcccgtgccccccggacctccaaccggggactgccggggagcggcctcgaagcccgaggccgccacgggagacgcggagggggccgggccgagcgggcggagaggccacgctccacttccgaagtgccccaggctcggacagtgcccacctccgcggcgggagccggccgggcagggaggcgggtcagcggcctggggcgtccgcagcgtgcgtcccggagttggggtcgcggcgggcggggaaccgccacgtcgccatctggctggcccgcgggacggccccgccgcccgggccttgggagcttgcctgggaacagggaaggcgagggggccgcgctccagcctcacctcctcgcgccttggcgcggtctgacgggatagctcagctggcccgacgccccgcccctggccggcccgcgcgggacttgggggccggggcttgttgggggacggaacccgcacggcgtcctgacgtcactggcggccgaccccccgccgcggcggccagcgcgcctgcgccccaaagctaggcccggccccaagcgcgaggagcggggcggggcgagcgcg

SEQ ID NO: 14267 - DNA, 551 bp, Homo sapiens
  source 1..551: mol_type = other DNA
caggtgggaggcccctggagtcgtcctgcagcttcccgccaccaggccgagctcaggagcttggcaacaacatgggaggggagctcgggtccccttacactaccatttacattaaagttgagctgcagtggaccggtggtttccgctgtgccgcacattaggatcagctggggtgcagccgcttccgaagcccggagctctagaggcccacggggctgcggtagctgcggaaccgtacccgacaggcagcgtccccggctccctaggtccccgctgcccgtgctggccgacgtcttcccgagtgaaggcgccaaacgggcctggaagggggcgccggacactgccgaggatccgggagcacgcgcgctcgccccgccccgctcctcgcgcttggggccgggcctagctttggggcgcaggcgcgctggccgccgcggcggggggtcggccgccagtgacgtcaggacgccgtgcgggttccgtcccccaacaagccccggcccccaagtcccgcgcgggccggccaggggcggggcgtcgggccagctgag

SEQ ID NO: 14268 - DNA, 433 bp, Homo sapiens
  source 1..433: mol_type = other DNA
actctggaggctgaggcaggagaatcgcctaaataaaataaagcgaaagtgttctgggttgtttgtgtttaattatactaggaaggagcacaataaatgtcatggtgattatttggtttattgtaatacaataaaggaaatacaataaaaggtttaacaaaccttttcataaagttgctttggttgttaaaaaattttagacctttatgatttattcagtttgtagattatataaacggaagagggaattaatagttcctgaatctaccatgagtcagatacaaactttctcatacaaccctcacggtggctgggtaccagagcaacacctgtgtttgttgggcgggaatgagccttgcactgggcagggctcagggcccatcgcgtgcgggcgcctagaacccgaccggtgcgttcggccgcccaatggcga

SEQ ID NO: 14269 - DNA, 383 bp, Homo sapiens
  source 1..383: mol_type = other DNA
tgccatattctgcaaacatgttgtcgccagcgagcggatcgccaggcgtggcggcgcgtgcctgtagtcccagctactctggaggctgaggcaggagaatcgcctaaataaaataaagcgaaagtgttctgggttgtttgtgtttaattatactaggaaggagcacaataaatgtcatggtgattatttggtttattgtaatacaataaaggaaatacaataaaaggtttaacaaaccttttcataaagttgctttggttgttaaaaaattttagacctttatgatttattcagtttgtagattatataaacggaagagggaattaatagttcctgaatctaccatgagtcagatacaaactttctcatacaaccctcacggt

SEQ ID NO: 14270 - DNA, 358 bp, Homo sapiens
  source 1..358: mol_type = other DNA
tattacatgcaatatactctctcaaaagaattttttttttttgagagtcccaggctggagtacagtggcgcaatcttggccactgagagtcaagtgattctcctcgagtagctgggattctatgccactaaactgagctcaggcaaaaacctaccatgtctttgtacctcgtaaataagcaaatgaatagatcatccattctactcattactaacaaaagacaattctgttattaaaactttaatagagccctattaaagggaagatgaatttattaccagaaagaactggaaaaaattagatactttttttttttttcatttggaagtgacaaatgctcaaaagaattactagtact

SEQ ID NO: 14271 - DNA, 253 bp, Homo sapiens
  source 1..253: mol_type = other DNA
cagcctcccgagtagctgggactcccgccttggcctcccaaagtgctgggattttaatcttcaaaataggggacataataccttaattattcttgtgaataatgcctacatgattgaaaacacgaaaagtcttaataggtattgaaagctttttgctaatattataaggccaggtatcactctttatcatctagatgtctaaaacagcctcttaacttgattttactgtctagtcagtaattttctttggcaa

SEQ ID NO: 14272 - DNA, 348 bp, Homo sapiens
  source 1..348: mol_type = other DNA
ggctgaggcaggagaatcacctgaacctgtgaggcgctggctggagtgagccaggttcgcgccattgcactccagcttaggtcagaagcaacctgccgtccttgcttggagcagccacagtggacactggacgggatattctgtgcagcgggagtctgcagggattccatggcgacgggctcactgggagagccctctccgaacaactggacggtccaagtcctgagcgtctggttacccgggcaaccgcatggtctcgcgatacatacctcgcgcctgcgcactgcccctgtagcgggggtggggggacccggtccggagactccaccccggggcctaaactcgagt

SEQ ID NO: 14273 - DNA, 377 bp, Homo sapiens
  source 1..377: mol_type = other DNA
ttaggtcagaagcaacctgccgtccttgcttggagcagccacagtggacactggacgggatattctgtgcagcgggagtctgcagggattccatggcgacgggctcactgggagagccctctccgaacaactggacggtccaagtcctgagcgtctggttacccgggcaaccgcatggtctcgcgatacatacctcgcgcctgcgcactgcccctgtagcgggggtggggggacccggtccggagactccaccccggggcctaaactcgagtctaaaagattgggcctcttcccctctccggagtgaccgcttcctccccggcccgtcgcgtctgcgaggcgaggccgggaggcgagggctctgcgcacgcgcggcg

SEQ ID NO: 14274 - DNA, 350 bp, Homo sapiens
  source 1..350: mol_type = other DNA
tcatgaccttgactttgggaaagccagggtagcctaccttcgtggacacgtcatttgattttataatgtattagatgccatcccgatgcctactcctgagtgggaaaaacccctgcacgggctgggagcgctcaggatgtcaagtctgcacgtttgcagctttgagagccgagccccaggcagaggcaccgcgcaggcctggatgtacaggactcggccctgtgcagggctggccagggtgagagcccgtggggcagggcggggccggcgggcagggcggggccggcgggctgggcgcggacggcgcgggcggggcggggcggggcgtagcgcccgggctccgactccaa

SEQ ID NO: 14275 - DNA, 514 bp, Homo sapiens
  source 1..514: mol_type = other DNA
cctgtcctgcccagccctgccaggggatgtctgactttggaatagtcttttttctttaataggacagaaagttttaaagcacctagggcctcaaaagagcaggcctactgcaggcacctggtgggggggtcacacccagatacaatgtctcctgggtgacctgggctccgccctgaaaggcaggtctggctcttctgcggggctgcggggatggggcgcgccggggcagtgtcgccgggggtcgggctgggggcgcgacgcagcggcgccgggcgggggcgccctcggcgccgcagccgccaggtggcaccacgggcccggggcctgggcgcgggcagcggcggcggcggcgggcgaggcagggagctggcggagcagcagcagccgccgccgccgccgccgccgcggctcttcggggaaacccggcgcggggcgcgggagggagcggccggggcggcggggccgggccaatcgggcggcgggcccggcgcgcggagccagcgacatggagggg

SEQ ID NO: 14276 - DNA, 300 bp, Homo sapiens
  source 1..300: mol_type = other DNA
agtttgagatttcattgatctatgatagcaccattgagagagagaccctatctcaacaaaaaaaaaccctcgaggctttcttgtatatgatgcatttcaactttaactagtgaacgctgagtcaggctgcagaggtgatgaagtggagcagcgcgctccagccaccagctgggccgcccgggagtccctggctctagaccagccgcgaggaggcgccgcgagagagctggtccctgcccgcggccggaggagggctagagcccctgggccagccccccgagccggctgggcgggcgggcg

SEQ ID NO: 14277 - DNA, 270 bp, Homo sapiens
  source 1..270: mol_type = other DNA
aattacctaagtcatttaatatgcccaagatgcctttaagaaagatttaaataaaatctcaagggctggaccctgaaatcccaggagttcaagaccatgttgaacaacatggtgagacagtttgagatttcattgatctatgatagcaccattgagagagagaccctatctcaacaaaaaaaaaccctcgaggctttcttgtatatgatgcatttcaactttaactagtgaacgctgagtcaggctgcagaggtgatgaagtggagcagc

SEQ ID NO: 14278 - DNA, 293 bp, Homo sapiens
  source 1..293: mol_type = other DNA
caccttctacccccgcagaaagtaaactgtaaaattacctaagtcatttaatatgcccaagatgcctttaagaaagatttaaataaaatctcaagggctggaccctgaaatcccaggagttcaagaccatgttgaacaacatggtgagacagtttgagatttcattgatctatgatagcaccattgagagagagaccctatctcaacaaaaaaaaaccctcgaggctttcttgtatatgatgcatttcaactttaactagtgaacgctgagtcaggctgcagaggtgatgaag

SEQ ID NO: 14279 - DNA, 529 bp, Homo sapiens
  source 1..529: mol_type = other DNA
tccatttattccttacaatatatgaaatgtatgcaatctcccttttagaaagctaggtagatagtaggtaacttgctagtaacattactgcatcccaaagtaatatggtttccaaggagtacagaaaccttacagaaccaaaataaaagcatgtatttttttttaaatcagattttgccctttcgttttaaattcaaagctcgggctaagttttcacatgaactcaatttaactgctagttaatgagtaaaacctaaactttagtctgcagtgtactggagatgaaaatgctgtaacatttacaaacaggttatttctaatgcacattatgccacatttgactttgatttattgaactattgccttatagttctagttttgcaaaattaatattgaaaaatacaagcaatgggcatatgttctaattcctagtgcctgggcctcagagcctccagcttagccttcagaaaggtcagaaatttcacttccggggaggggacttccgggccctcagccttaaggggcggga

SEQ ID NO: 14280 - DNA, 274 bp, Homo sapiens
  source 1..274: mol_type = other DNA
gcaggcggtccatactttattgaacctaagcgaaaaaatggaccgttttcattctgaaggctcccggatcacataaagttacgagtcttttgtcagttgattttcagcaaactttcagaggacgaagactgtggcagctgctccacacatactaagtttatttcagtcacacagttcaagtgctctagcacgcggccccggaccagggtggggcttggcaaggacccacggggcgtgtcctaggactcggtgagggcgtgacctcgggccaggg

SEQ ID NO: 14281 - DNA, 388 bp, Homo sapiens
  source 1..388: mol_type = other DNA
tttttataaagggactaattccatttatgaagcctttaccttcatcagttgatcactgccagttgcaagctgggccgtaggaaggtagccagattcttacattgcaactcggggttttgcaaggcacaaaagcagaagctgcttctttattcacattctgttggttaaagtgattcaccatttccagtactgctttcaattgcagctgtcaatctacttttaatcacaggcctcaaatgaagaaattcatttagaggataagcaaattacagcttcagttttgttcataaacttaagccccttattgctaatttttttgaaagaacaagtttatgctgatttgtccaaggatactcagcaaatatttggaaaatagttcaaagtttaa

SEQ ID NO: 14282 - DNA, 372 bp, Homo sapiens
  source 1..372: mol_type = other DNA
cttatagaactctttccatatgctaggaaaagaccttgcccagcacttgtgcaaaagcttcttgaagtggttatttcttgtacatttagcgactttaagtaaacgcaactcaaccccctcctcccccagaggcggtggacatgttcatttaaaatcattcacaaatgtctaaaaggccctccttctgttaacagtggcattttgaaaaccaccctccaactggggctgctggcaggctctgaaagctgtcggggtccagcaggacctgccagcttggagaatctcactgttcatccatgtgcagagagagaaaaactctctctgagtgggatagcagagcagatgctgcaatgagatgccaaagcggctccc

SEQ ID NO: 14283 - DNA, 447 bp, Homo sapiens
  source 1..447: mol_type = other DNA
agtagaagaaactggtgccaatttttattccatagtataaaatagtctctcaggacagtttctctagaatttaaaatttggttgcttttggaagagaaagcaagagattcctgcgtcatgtttcacaaatgtaaaagttgggtgttttcaaatgacttttaaaatagtagggttttacttgtaggttctagctacaagtaaaaaggctaaaagccaccttagaaacctgtcagatttccagcagggcggaatccccgcctggctcttaatagggcgggaaactgcgtgccccacaaggtccctcagaggcaccttgcgccaagtctactgcgccgaataactagccagcctcttccagacttttaagggcggagcctggccctggagacacgtctggagagctgtgagctggcagcggcgctgtgtgcgcctgcgcggggcgccgag

SEQ ID NO: 14284 - DNA, 475 bp, Homo sapiens
  source 1..475: mol_type = other DNA
tcgaaatgtagaatattttcatcactctcagtggtttctgtagtcccagcacagagtgagtggggaagtaaaaagtacaaattctttgtacattctggatattaacccattttcatatatatatgatttgcaaatattttcacaaacgtttttaattttgatgtattccaatttatgcttttggtatcatactcaagaaatcattgccaaatccaaaatccaaggtcatgaatttttgtcctgtttcagattttttgaaccattgtgagttaattttatagttttagctcttagatttagatctttgaactttgatatctagttttcctacagtttacttttgttgaaacctagttacttcttaagcaaagattgtttaagtaatagataatgattaagttgcgcatcacttaaggtagattttctcacaagttgaagagtactgaagatctaagatcatttacatccctctgga

SEQ ID NO: 14285 - DNA, 254 bp, Homo sapiens
  source 1..254: mol_type = other DNA
gcccaaccaccttgggtacatgttgtcaggaccctgtggggttgtttttacggatctacatgatattcactgtgtattctatgtaggtgtaatataattctggaatcttctctaggggacttaagtgacagaaaagcagcttgtctgaaaaatgatttttttctggcttctaaccagtgttaattcacttggaaaccaaggcagctacagagtggctgccattcattcggccgcgaggccctctgaagccctga

SEQ ID NO: 14286 - DNA, 571 bp, Homo sapiens
  source 1..571: mol_type = other DNA
gagctctgttttattaaagaaagcttcaagatgctgaagtgggaggatcacctgagctcaggaattcaagaaaacctatctctatgaaaaatttttaaaaattagctgggcataaacagagtttgtttaaaaaaaaaggcaaatttgatactttgtgtcctttgaactgagaaaatacatttcattcattctttcagggaaaaaaagtgggactctggagtcagagtccccaaggtaaatttctcagctcctatgcttagtaattatgctaccttggaagagcctcattttcttgatataaaaaatggaggtgataataacagttgtatgtgcatgaaatgagaaatgtatataaaatacataatcgattgtctggcctagagtaaatcctcaataagtgttgatggttggtgatgatttgataaacgatcattttacaaatgaaaatttgctttgatcacttctaaggagaaaagtgatcatagtaatttacaacgcttacatgtatgtaactttcaaaatttcaatcttgcccaggcttgactgtgccttaggaaagggaagtcctggg

SEQ ID NO: 14287 - DNA, 594 bp, Homo sapiens
  source 1..594: mol_type = other DNA
aaatactagtcattatttaataactaaaatggaatgctgaagaattttatgctatgacataaaatgccgtattttttccccaaatatatgaaaaatggaattaaaatctccactgagtgttgctattacaaaaaagaaatcctaaggaaattcattggctcaattgacatttttttctgtgttaaaaatagctgagaagttgtagaaaaattagttaattaaaagagttaactgttgacagaaaaagcaagccacaagccaaggacctgagctggcttctggggtggatttacctgaatcactagtataccttttgtcctaattccagaaatcatgccataagtctcaaaatttggacagtgggttttaattttgtagctggaacagcttgaaaaaggcaatgagtcatgacaaatatttcttttcttctcaatatagaagccttcgatgtgaggcccaggcattgagtaccatgtgtgcgattcacaagccttggcatctgaacaattttttggaaggatccatcaggacaacacgtcgggggtgtactagtgaagtgattagacttaccaggtgattctgagaaccactgtc

SEQ ID NO: 14288 - DNA, 473 bp, Homo sapiens
  source 1..473: mol_type = other DNA
cgctcttgcccagctgtaagttggtagcactgagaactagcagcgcgcgcggagcccgctgagacttggtctaacggtttcgggacagcagggcgcggtgagtcaccgccggtgactaaaactcccgccgtccgaagctggactgagcacatctctccgccaaggcaagtcgatggacagaggcgcgggccggagcagcccccctttccaagcgggcggcgcgcgaggctgcggcgaggcctgagccctgcgttcctgcgctgtgcgcgcccccaccccgccgggtctccccgcctgaccgcagccccgagaccgccgccttggcgtggtgccaccggacccctctggttcagtcccaggcggggaccatgcccagtcccaggccccggagcaggaaggctcgagggcgcccccaccccacccgcccacccgcgcgctccgaccctctttcctaacggggttataaaaacagc

SEQ ID NO: 14289 - DNA, 632 bp, Homo sapiens
  source 1..632: mol_type = other DNA
tgcagctttcagacctgctgccctcggcaggtttcagcgggaagaggggcaatcacggtggccgcacagttctcccgcccggtgattggcagcctgccagaaggggcaggaaactttctgagttttaaggggttctgggcggggctgcgccaccacagccacagccccgctccctggcaggcctccccccggccacatccccaagggcgtggcagctctcgcgggggccgggggggcgttcccctctccctccagccccctcccgaggcccagctacttgcatgggcgcaggatgtcctcggccaggttgtcgcgctccacctcgacgcggggttagctggtccacctgccggcgcagctcccgcatctcctcctcgtagaggtcccccaggcgcgactccttgagctgctcgagctcggccagcaggatcttattctgctgctccaggaagcgcaccttgtcgatgtagttggcgaagcggtcattcagctcctgcagctccaccttctcgtccaccgagtcctgcaggagccgcaccccgggcacgctgctccgcaggcgcacggcagaggagcgcgtggcatacacgccgcccggggacgaggcgtagaggctgcggctggtgctgggg

SEQ ID NO: 14290 - DNA, 522 bp, Homo sapiens
  source 1..522: mol_type = other DNA
ttgcttatttaagagcagtatgcaaacttttcctggaaagtttcaaatggtaaatattttaggggcatggaggttttccaataaaactatttgcaaatacggagttttgaaagtttttgaagtccgggggattcgcgggcactcgggacgccccaaccttcaggtgaccccgcgcggcggcggcggcagcagcagtggcagcggcgaccggagcccgcagcagctccgagcgcctccgggaggacaggcggcgagctcggcgaatcgtcatctgccagccgatcgcggcgctccgcgggccggggccgggagcccggggcgagcccgaacgcggcttcttctccgcccgccgcggagactctgccgggtgggctgcgggcgcccctcgctgccgcctgtgaacgctgtgggtgcgcggggctgcggccacggcggcggtggcggcggcggcgggagccgcgagtcggggccgcccgggctgtgcttcgccccggcagcagcggtggcggcggcgcctgtggc

SEQ ID NO: 14291 - DNA, 515 bp, Homo sapiens
  source 1..515: mol_type = other DNA
tcacgcctgtaatcccagcactttgggaagccaaggagctactcgggaggctgaggcaggagaatctcttgaagtgagccgagatagtgggacggtcttctcactgttggcgaaataggcgtttcttccccagaagctcccagcgctgtggctcaggtgagctcacgaaattgcagtgagctatgttcacgtcactccttacaaaaggccaggcagggcagagccacgccaagttcaggtgcgttccctgtgtccccactaaatgcactcgcagggtgcgcatcgccagggcgcaaggcgtctgggcgtctctctatgaagaggcgcccgcagctagcgaggcgggtgcactttcctcgggagcggaaactacagcgccgcctggaaagcgtgccggggctcgcgggtcctggatccccagtgccagggccaggcgttctggcccccgagtggcgcgcgctcccaaggggcggggcggggcgggggcgtgacgggcggtggccgggggcgtccgc

SEQ ID NO: 14292 - DNA, 458 bp, Homo sapiens
  source 1..458: mol_type = other DNA
tgattactatgtattaatcctgtgttgacatgtcaatattagttactaagtttgttccaagtgggacgcaacatctctagtagatttaaaacttctatcacacagagaataatttttattggttaactaaacttataagtaaaataaataaaccaacattttgggttgctatatcttgggctgtgaaagacatgtcaccaaccatcacagctgctgagtgattgcacggttagtcacgggcgttcagggactcccgggaaggagcctctccgaggtaattaaactgtttaaggaatttccatttccttccagagggaatacaaggttatgcctgaaggaccccgtcctacaactaattccactcttatgtgtgactaattaaaagaggagtcaggcacaggctcggggcagctttgagacaggcagcgccaaggtcgcccagattcccgacaagctcc

SEQ ID NO: 14293 - DNA, 479 bp, Homo sapiens
  source 1..479: mol_type = other DNA
actaagtttgttccaagtgggacgcaacatctctagtagatttaaaacttctatcacacagagaataatttttattggttaactaaacttataagtaaaataaataaaccaacattttgggttgctatatcttgggctgtgaaagacatgtcaccaaccatcacagctgctgagtgattgcacggttagtcacgggcgttcagggactcccgggaaggagcctctccgaggtaattaaactgtttaaggaatttccatttccttccagagggaatacaaggttatgcctgaaggaccccgtcctacaactaattccactcttatgtgtgactaattaaaagaggagtcaggcacaggctcggggcagctttgagacaggcagcgccaaggtcgcccagattcccgacaagctccgcgcgggggcttcctcggctccttgctgttgccgccgccgcagctgctgccgcggttggtggggt

SEQ ID NO: 14294 - DNA, 534 bp, Homo sapiens
  source 1..534: mol_type = other DNA
tctccataaattaaggatgctaaacatacatttaaattttctatttttttaattaattaatttatttattttgagacagagtctcgctctgtcgcccaggctggagtgcagtggcacagtcttggcgagtagctgggactacgtctcgacatttaaattttctgtgtcataagatatactattttctacatattatatctcaatagctatttgattggttgatcatgcaaggtttaagaagtggtccaaaaacaagtttgaaaaattatgtcatttttatgtgtgtatggttttttttggttctagtaaaaaaatgtaaatgtttttaagtgatctttaaatatttaatagtttatcatctctaaatgtactttttgaaatataaattttacaacatgggatataatataacttgaaagtcatgctgttaggattttaattaatgaattatgaacatgttgaatgtcatttgacttgcgattttggtttgctaattatttggatctttgccatatgcaaacatttgggaaatgg

SEQ ID NO: 14295 - DNA, 344 bp, Homo sapiens
  source 1..344: mol_type = other DNA
tgaaagatctagaaacatattttattctaagaaagaattccacttgcctttaaataaagatataccttttgaccaaacaatcagattttcttttaacgattctgttgcctcagcctcctgagtaggctttactgcaatggctttctagagaacgttctagcaaaaggtttctagaactttttcttctgcctggaggaaatgaagctccacggaactttctgttgaaactttccaagaaaatgaaggggatgagcttcaactctgaagttctgctgagggacccctgactcagctgcttcccaggggaagctccgtctcccatctgagcaggccgggagctccca

SEQ ID NO: 14296 - DNA, 357 bp, Homo sapiens
  source 1..357: mol_type = other DNA
acgattctgttgcctcagcctcctgagtaggctttactgcaatggctttctagagaacgttctagcaaaaggtttctagaactttttcttctgcctggaggaaatgaagctccacggaactttctgttgaaactttccaagaaaatgaaggggatgagcttcaactctgaagttctgctgagggacccctgactcagctgcttcccaggggaagctccgtctcccatctgagcaggccgggagctcccatcagaagttagcttacgaagcaaagttgttactttggccaccctcatgtgacaggatgtctcctcagtagaggctttccctaaattcaggagccctttaaaagggagg

SEQ ID NO: 14297 - DNA, 388 bp, Homo sapiens
  source 1..388: mol_type = other DNA
cccactcctttagtcaccactgagtgagtcctgctctagaatcttgattcttagtaaactaaaaaaaagacctgtgttttctgaacattactattttctggagtgcagtggcacgatcttggctcactgcaggccaggctggtctcaaaacttttaaactcaacatgatgttggtcatttagtagaatttattttctctttttcatgaggaccatgaatcacttgtctttataatataaggtgtttccgtcctataacttgtaccacctgttggtactagcaagctttttggctgctgtgcagtttgaaagtctcctacagacccccgctgtgtagaaacagcttgtcattgcaaatcaaatgttgcaggcacaataattgaaggctt

SEQ ID NO: 14298 - DNA, 490 bp, Homo sapiens
  source 1..490: mol_type = other DNA
aagcagagggagccggctccggcctcggccagccccagagagggtcccccacagcgcagcggcgggctgaagggctccagccagggctgctagcaagttgtcatctctcattactatcctagaaaatgaaccactttttcctttagtcatttattcactaataatttgaactaccaccggtgctggtgatcacaatatatgcagctgattaaaagaatttcattccttcaaccaatacttttcatttgaaagcatctcattacgaaagacttcaatcttttaggcttctgcatcttgcaaaacaaatatggttccaaagagcctatcttttcaacaaatctttggtttgagcctggatgaaacagttattacagaatcaactggagaggaaaaaatcttcatctaacactgaagtctttctggttaattcttgatctaaaaagttaaattcatgaaccacactgatttgatttagcaactgaaaactttt

SEQ ID NO: 14299 - DNA, 694 bp, Homo sapiens
  source 1..694: mol_type = other DNA
aaacttcaattatgtttggaaagaagtgctaatttaatttggcaagtggattcccacctagttgacgaggccagctgcagattcaggtgggatcacctgatgagacattagcaagggctttcagctgcccagaagatgttctttgcagacatttggctgccagcaggctttacaaatttaaaactttcagtgtaggatgctctaagggttcctgaggggtggtctggggccatgggaacaggatcaaggccccctgagcgccgggcctggtgtgtgccacggcgacgcgcagcggctgagtcggagcccacgcggcgcgcgcctcccgcgaggaactttcgctcccggagttccctcccctcctggcgaggacctttcccggcgcccgcggctccgatccccgccgcgctgcgcccgctctcccggccccggctgccccgctgagggctcccctctcccaggcaccgcagccgcgcccccgcgtcccgcctcccgagcggctcgcttcgcccgatgccccggccccgtcccgcgcactgagcgcctggcagcagggcgccgagtcccggggcgctgcggggcgctgcgccgagaacggccgggcctgagccctgggcggcccccagagccgatcagagcgcggggaggcgggggcgaggaggaggggacccgccgccgggggctggctgcttcg

SEQ ID NO: 14300 - DNA, 428 bp, Homo sapiens
  source 1..428: mol_type = other DNA
cacctacaattctagctaccaatcaagagttcaaggctgcagtgagccatgattgcaccactgcactaaaatactggtaaagtgttgagaattaattgtcttttattttaatcattaacataccttcttaggtctcaacagaatatggaatgactaaatttggatcaatatctgtgacacactaaagatattgcgtattagaatggctgatatcataccaaatgattcatctctgaaaagggtctttagggaaagatctaaataatagcttacaaagaatattgattatatctaaatcataggtggtatgagatctaatgaattaatgaggtctgagtcggatcattatgtttatttaacatgctttaacccagaaaatgcaggaatccacagtgaattcgagtctagacccaggatgctgctgtcag

SEQ ID NO: 14301 - DNA, 740 bp, Homo sapiens
  source 1..740: mol_type = other DNA
gtggattcccacctagttgacgaggccagctgcagattcaggtgggatcacctgatgagacattagcaagggctttcagctgcccagaagatgttctttgcagacatttggctgccagcaggctttacaaatttaaaactttcagtgtaggatgctctaagggttcctgaggggtggtctggggccatgggaacaggatcaaggccccctgagcgccgggcctggtgtgtgccacggcgacgcgcagcggctgagtcggagcccacgcggcgcgcgcctcccgcgaggaactttcgctcccggagttccctcccctcctggcgaggacctttcccggcgcccgcggctccgatccccgccgcgctgcgcccgctctcccggccccggctgccccgctgagggctcccctctcccaggcaccgcagccgcgcccccgcgtcccgcctcccgagcggctcgcttcgcccgatgccccggccccgtcccgcgcactgagcgcctggcagcagggcgccgagtcccggggcgctgcggggcgctgcgccgagaacggccgggcctgagccctgggcggcccccagagccgatcagagcgcggggaggcgggggcgaggaggaggggacccgccgccgggggctggctgcttcgctccgagccgacttttcgccaatggtccaaagggacatgtccaagtcgcctcccacagcggcggcggcggtggcgcaggagatccagcgtg

SEQ ID NO: 14302 - DNA, 578 bp, Homo sapiens
  source 1..578: mol_type = other DNA
ccacaaaataccattctgttttttattttttccccagtaatttaaaaatgtaaaacacattcttagtttgtaggttatacaacaccaagatctgagattttcagattttttaaaaatatttccaccatgatggatgcaaaatggtaaactgtgatttcagtttgtatttcctgattagaaaggaagtcctgtggagttctatttcctggatagtaatacctatatatatacatatatgtgtgtgttgcaagcatgctctcagaatattgtgtttattatttcaatgtttaatgctgtcttttaatataaagaagtttttaatttacaaaaggtaaatgtctccaagtgatactcatttgactgtgaaaaaaattagattttccatacacactgcgaaaaaagaaagatatcactttcttgtgtgcaaaagagaaaatatttcttcagtgggtgggagtagaaaaatatttttacttttattgcagactttcaagacagtagtttcttttaacacctgttgttctgttctgaagaaaggattctcgagcagggctggagtcctggctgccagctgacgt

SEQ ID NO: 14303 - DNA, 576 bp, Homo sapiens
  source 1..576: mol_type = other DNA
tagccagagtcctagggtagccactgcagccagctgtggttcttaagtattcttaagaacacttttttttttcatttttatttgtacaaaatattctcaaacaaatgcagtttagactacaatgagagcattttgtttatgtcaagaaaacaaagtgtatatttcttaataagtaaacttttaaaatgtaatttcattagtacaggaaattaataactttagtgtctttcaagcagagttgggactcaattattctgtgaattttaactccaactaataaattaaccaagctttgaaatttccttgtaagtatggttataacaattcacactcattttgagctcctttaaactcaacgctttataaagcggtgattacagaaagtcacaagcaataaagaactgtgctatattatgactgatgagcattatttgatttttgctatgcaatattgcatatgatatttactaaaacgatctcatgctttgtttttgagagaaggtttcatctgaaacagaaacaagctgtttacacttcggatgtaaaatggcaatttgacatagacgagcatgccca

SEQ ID NO: 14304 - DNA, 439 bp, Homo sapiens
  source 1..439: mol_type = other DNA
aagtatggttataacaattcacactcattttgagctcctttaaactcaacgctttataaagcggtgattacagaaagtcacaagcaataaagaactgtgctatattatgactgatgagcattatttgatttttgctatgcaatattgcatatgatatttactaaaacgatctcatgctttgtttttgagagaaggtttcatctgaaacagaaacaagctgtttacacttcggatgtaaaatggcaatttgacatagacgagcatgcccagtgtgggagtgcgtcctcctctctccaaagataaggcttgaactttgcacttgcaaatgtcactgcttacaactaatttcttttaacaatttgcacttgtcttctttatttttaaagcaatataaagcactcgagtgtgtgttttcagcccctcctggaatgggaaaata

SEQ ID NO: 14305 - DNA, 492 bp, Homo sapiens
  source 1..492: mol_type = other DNA
ataaacaacttgcaggttgttgtgtgtgtataattcggtgtgaaaattaaagagaaaaaaacaataaaaaaccctttcctatacttatgtgtaaattaccatggtgtgctgcaaaaaacatatgtcaaggtgatagaattattttgactttcctgtacagttataaaatgactcagtgagtttgggaatctatatccttgtctgcttatgatgaaaaaaaagaaaaaaaaatctctaaagaatatgtcaactatgatacaagtagcagttagccttataactaactgtaaacactgtctgtgggttttaagttcttcacaactgaagtcagatctgtatgcctgagagagatcatgtctgcgcccaaattctggcctcatcctctacggtaccgggatgaccatcccgcccgcggggtctgcctacttaacctgaggcaggtgaaagagcctcacgcagggttaggaacctccgggggcgtgaagccggatt

SEQ ID NO: 14306 - DNA, 413 bp, Homo sapiens
  source 1..413: mol_type = other DNA
tcttttaaaattcttcgagttcttgaaccatgcctgacaggcactcagtaagctttaatacctgtagaaacatattggtatttttacacttgatagacaagtagtaagtgcgaatatttgagtttttgcaaaatatcaactaacatcataaagccttccttaagatagttttcaacctcaggtctcaaagatatcttagggaaaatagacatttttcctgttgtttagttctccaccaagagaaatgctggaaaacggtgtttagtgacgagtgtcttgacaccagatgctgagcttccaccacacctcatcgaggcaatgttttctggtagagatgctcatggaaatcactgagccaatagccaggctgacagaatccggcttcacgcccccggaggttcctaaccctgcgt

SEQ ID NO: 14307 - DNA, 301 bp, Homo sapiens
  source 1..301: mol_type = other DNA
cgtgcattgtttggattctgggaccggtgtccccatcggcggcgggaccctctgcctcggattcgagccgccgcgcagctcgccccatcacgagcaccggggcgggccgcggggtccctcggcagcaggtgccgctgcgccgggtcccccaccgcggcgcgggctgcgcggagccgaggagaacccgcctgagatcgcgcagcgagggcactgctaggccgagaagcctcgacccgaccactcagaaggcgccgcgacgaatgtgacgacggcgcacttacggcaacccacgccttcgacg

SEQ ID NO: 14308 - DNA, 475 bp, Homo sapiens
  source 1..475: mol_type = other DNA
cttttcaatgctagaacctaaccatggaaagtggaattgaaaacaattacacagcgaattggcttatgcgtggacttcgatctgggatccacgaacattgttattattatgtgttattattaatcacataactgaaacaggggccgggcgcggtggctgagcctgcaatcccaccaaatcgatcaatcaatcaatgagtacataaatgcataagccaatgaatgaatacgtgaatgaatagattaataaatgaatgccctagcacgcctgcctaaggaaagaaacactcttcacttctgtgagttttctaagagcagcaaacggcggctgctcacttagagaaccagggaagcagctgctagcagcagaccacaaacgttttgaaggaccgcaaattcccagccgctggccgtttgggactctcctaccggaagtacgtcgaaggcgtgggttgccgtaagtgcgccgtcgtcac

SEQ ID NO: 14309 - DNA, 598 bp, Homo sapiens
  source 1..598: mol_type = other DNA
gcggttacactgcagaaattaaaataaaatagttgaaaaagaactttaacattaaagcaatgtatagaacattcaacatcacataatttctataatattcacgctcataagattatgtaattattatgtctgtgtgatctcaacttcaatatattgttcattctgaatatgcatctgatttcacttgtaaaagtaaatcgtgatctacatatatctcataacttccttgggttgaagttatatgatttataaaataataacatccaatgtcccctcaacttttaaaaatctatggttcttaatttatctaagaaaaacaagcaaggtgagttttctatttcataataatggaaaagcattttattttcatagagcaattctaataattgggcctgaaattttgaatatgttttagtgtccacaataatgttctaaattacacaaatgtgattgagtataggaattaagacagaccatttttatgtaatttatatcaagaccataaaggtatgcatctatagttagctagataaagaaccagcgtaattactcaagttaaatattttctaaagtcactcctttgaaagagcaaattaac

SEQ ID NO: 14310 - DNA, 512 bp, Homo sapiens
  source 1..512: mol_type = other DNA
ttaagggaaacctttcttgtttcccatgagagaaaacttagaacacatgcacatttattatgtgattgaagtcgcttaaacaaagccatgtactttgcggtaggcaatgttctatatttattaaatatacagttaactcatccaaagaaattccagcccaggctgtccgggctctagatcctatttatccctttcaaaaatgattaactgtatgcactgaaagctccggtaggaaattcaatgggcctccgctgacactttgcaaagccgcggcggcagcggcggggaccacgctgcggtgcaccaccttccgccaccctcccgcgctgggctggggtcgagggggcttcgcagagtcggtaaccgaaccggctctggtttgctttcactaccagaaccagcctccgcgaaggggcgagctgtggttaaccctttcgtgcccagggagaccccgccagggtcggggcggggcgcgatcgccccccgcagtcgggcgcgaaggcggcccggga

SEQ ID NO: 14311 - DNA, 570 bp, Homo sapiens
  source 1..570: mol_type = other DNA
gaaattccagcccaggctgtccgggctctagatcctatttatccctttcaaaaatgattaactgtatgcactgaaagctccggtaggaaattcaatgggcctccgctgacactttgcaaagccgcggcggcagcggcggggaccacgctgcggtgcaccaccttccgccaccctcccgcgctgggctggggtcgagggggcttcgcagagtcggtaaccgaaccggctctggtttgctttcactaccagaaccagcctccgcgaaggggcgagctgtggttaaccctttcgtgcccagggagaccccgccagggtcggggcggggcgcgatcgccccccgcagtcgggcgcgaaggcggcccgggagccaggtgggtgtggggcgcagttggcggagctgcccagggcgtgcgagcaggctgcgaggatggcgccccggcggcgcggaggtaccgccccgcgctcccccgatagctccccggcctgtcccctctccccgcgctctggggcagccggctgcctggggcgcacggggctggagtggccctctccctccggcagatctggcaa

SEQ ID NO: 14312 - DNA, 661 bp, Homo sapiens
  source 1..661: mol_type = other DNA
ctgaaagctccggtaggaaattcaatgggcctccgctgacactttgcaaagccgcggcggcagcggcggggaccacgctgcggtgcaccaccttccgccaccctcccgcgctgggctggggtcgagggggcttcgcagagtcggtaaccgaaccggctctggtttgctttcactaccagaaccagcctccgcgaaggggcgagctgtggttaaccctttcgtgcccagggagaccccgccagggtcggggcggggcgcgatcgccccccgcagtcgggcgcgaaggcggcccgggagccaggtgggtgtggggcgcagttggcggagctgcccagggcgtgcgagcaggctgcgaggatggcgccccggcggcgcggaggtaccgccccgcgctcccccgatagctccccggcctgtcccctctccccgcgctctggggcagccggctgcctggggcgcacggggctggagtggccctctccctccggcagatctggcaaattgcgagctgccttccctcctcaaagtgtggagaaggagcgcgggggagcgtggcgacggcagcgcctcctccgccaccaaactcctggggctccgcgggggcttggggccacctcctcctgagcccggaggaaccctctcccgataggttccagcgtga

SEQ ID NO: 14313 - DNA, 689 bp, Homo sapiens
  source 1..689: mol_type = other DNA
atgacttggtaaaattaatttaccctaggatttacataaccagattaataaattgtgaaattgacattaaaatatttgttttgagaaatttttttttaaccttggttttacgtaaccaaggacatacactacattataaatattgtgatggtttatttttgactttgtaaaaattgacatgatgagaaagatgatgatgatgatttttgaaacgatgtttccagaattgttaaattatgtatcaacatatgttaactgcaacttctcatgtttaatgatgtttacaattaatacaataccatactcgccagtataatactaacagtcataattaactcagaatagattctttgaagtggttcaaagggcttttcataataaataagtagcctctaatcagctaatataaagtgggtattttttaggatgtgagaagtactggtatgtctgataaaacatataatttaggttgacaaaatgagtttgaatgatccagtgacattccagtgaaagctttatttagacagagcaaggaatctttgagatatcctttttatgctcttttatgaatgaatagaattagtaaaagataaataaattttttcttttggatttcttaaccagtggaaaaaatgttgactttaaaagttcataaaatcaaattttgcttaagaatatgttatttccac

SEQ ID NO: 14314 - DNA, 592 bp, Homo sapiens
  source 1..592: mol_type = other DNA
tttgcggtgttgaattgcaaaacaatacaacgtattcatttattaatcaagagaggctcgactcgggcctaaaatgaccagcggtgagagaaggctctttctcatccaggatccgaggttcccgcggacacgagggagaagcgtcctctcggaagaggcccgtgggagcgggcgcggtgcaaccctcggcccctctgggacgcaggtctccgggttccccgcggatctcccggcccttgggcctgggtgcgtcgctgcgcgcagcagagacggcctccgccctggggctgggtgccgctgtcccctggaggaggagggagggcgcaccctggccccgcactccccgcgacatttgggtgccagggacctggccgccgcccacctgggctccccggcctgcagcggcggtggcgcgaggctcactccccaggccgcacagtcgcacccacggcggtctgcggagctttccgggtcctcccagggtgcccgacgtgcacgttccctgccacttcggtccgggcgcgccggtgggtttggcctgcgcggcggcggcggcgaggcgggggagcgcgagtgactgtgtgagtcaccc

SEQ ID NO: 14315 - DNA, 501 bp, Homo sapiens
  source 1..501: mol_type = other DNA
tcccattttgtagattaaagaattgaggcggctttgaacccaggagtccaataacctgacatcttattaaaaggaagaaacgattcctgttcctttgcggtgttgaattgcaaaacaatacaacgtattcatttattaatcaagagaggctcgactcgggcctaaaatgaccagcggtgagagaaggctctttctcatccaggatccgaggttcccgcggacacgagggagaagcgtcctctcggaagaggcccgtgggagcgggcgcggtgcaaccctcggcccctctgggacgcaggtctccgggttccccgcggatctcccggcccttgggcctgggtgcgtcgctgcgcgcagcagagacggcctccgccctggggctgggtgccgctgtcccctggaggaggagggagggcgcaccctggccccgcactccccgcgacatttgggtgccagggacctggccgccgcccacctgggctccccggcctgcagcggcgg

SEQ ID NO: 14316 - DNA, 345 bp, Homo sapiens
  source 1..345: mol_type = other DNA
ctgagacaaaccctctctgagaatgcccaaacccttgaaagctgcagattttcaaagaagtagggtgtgtcgctgcagctgctgcatcaaacaaaagcaaacagattaaattaatttagccagtacttcaaacacggtaagaaatgtcatttcccagatgattgcaaactcagtttctaacgcactttgttaacagaacagttagcttctttgtcttctcattaacaagattgttattttacctctctaggtaggaagcttaagaaacaaaacattcttggcttctaagaccatttatactgtaaataaatttgattctattggactcggagcccagaaatttgg

SEQ ID NO: 14317 - DNA, 207 bp, Homo sapiens
  source 1..207: mol_type = other DNA
cttcagcatcctgaggagctaggactgcaggctagagatgaggctggagtgcaatggtgcaatattggctcacctggcctgtaattgtgggagaggaagcctctatgtgggctaacttcccccagagcaagcaatctcagagaggctgcagcgcatttgatacctctaagggaggattctcaaaaatgtgtgagtatatttaaaaat

SEQ ID NO: 14318 - DNA, 792 bp, Homo sapiens
  source 1..792: mol_type = other DNA
aatatagcttcacaatcttatattttgagttaataagcctctgcaattatttatgcagtaagaaggaaaaaaattaattattaggagctcaataatcaccaaataaactctgagcttggaggttaaaaataatcttcatgttcaattatacagtatcaattactaatacaactgatgtttcagtaacagataccatcttctatggagatatcttggtattaattaatgactgctttattctcattattcacaaggaaaaataggggtgtgtcacattaaaattaagattatcttagtttatctgggctcttaaacaaagatcattcaaagtaattatactttgaattaatcgaggtatttatctcgttatttttttttgttcaaagacaggaaaataaagatcagaaataagcaaagtttcattttgaagatagaaagcttttgcagtatttcccttgctaaagggaaagacgtgactttgcaaagtcaagtcctttttaaaagactcggatcgaaattcttgctatgcaacaaggattcaagtttgattatgttttaaaagattaattaaaattgaagtgctgcagaggcgtccctggcgccttggggggctttgtaagcgagtcccaagcccgaactgcgggctttcccgagcctgggacgcaactccccgtctcctggagagggaatttggcagggcgcccgcctggccgcctggcatcctgagctggccgccagctctcggggggtggggactgggtgtctggggaacccgctgccgagagagcagct

SEQ ID NO: 14319 - DNA, 596 bp, Homo sapiens
  source 1..596: mol_type = other DNA
cctgagctggggcctggagctgtccccggagcctgctctgccccgcagaccctgcggtctccaggcccggtaggctttttcaggttccgcaggcctggccgaaccggccagatcccgcgttcagcggctcaagccggcgcccgggacccgcgggcctaggcgcgacccccagcagcctgtgaccgaagaggggagcccgggacccctccgcctctccgcagccctctcgggcggggtcccccaggcccgcccggttccccctgccgcactcagccagctgcttttggaggcctgcgagttccaaacacgccttcccattaattaaaacctggaaagcctgaggcagcatctccagaggtccccgcggcactctcggccggcaacggctcccgcgcggggccttggaggccgagcggccaataataaagccatttacaaagaccttgctatttactataaattaggcactctttaagagaccagtgcgtaatttcacacactttgtttgcattgctgcactccaacctccccaaccgagggtggctagaggttcccagggatggggaccacgcgccaaacccagccagccgggccca

SEQ ID NO: 14320 - DNA, 377 bp, Homo sapiens
  source 1..377: mol_type = other DNA
gggcggcccggcgggcgcgaggagccaggtcccgcttcctccggcgcgccggccccgcgcccggcccccgccccccgaggccttccgcgccttcctccagctgcccggcccggcgcacgccccgccgcccgcacgcatttccctccggaaaagatttcctcaggaaacccttaagacatcttgtattaaaagaaaaaaaaagcatgtacattttaaactcgtccttcggacgtacgcctcgggacgccgctgggccaggccaggcgggggaggcgcggcgggggcgtcgagggctctcgggctccgggccggggcgccgctgcgaggaggggaggggcggtggagttgcctgggctttctcagcaccccccccaagg

SEQ ID NO: 14321 - DNA, 461 bp, Homo sapiens
  source 1..461: mol_type = other DNA
ctggagccattcactgctgcagcttcacaagttcgaatttatggatacacaagtatcatttcatattcatgacatcagcaaatcacatcataatcagatttgagcaaggatattaaccagaaaattcgcttttttgttatggaatcatagggtgaaaattaagtcttttaactttgaaaagcttacttttcacttaatttttacactaataaatttcaagtaaacgtctcttttaaagttgttccacaacattttaattcaaaggtagtgttttgtttgtgttttaaaaaaacacatggcacaactgtctaagcagcgcattgctaagtataaacttaaaaaaatttttttttctcaaagacatatctattatttcttggcaaatactatttggtgatgtacacaatggtaaaaaatttgtatttgtaagttttccttttgaaagttactggcagaattag

SEQ ID NO: 14322 - DNA, 503 bp, Homo sapiens
  source 1..503: mol_type = other DNA
gagctcccacttttaaatgacctcacatttccaagtataaatttggagaattttccggatcatcgtattatattgctaattccggataaaccaccattggcgccttggcgttccctctccgagtgcagccctaacacaggcttttgaccttcagcctgcgcggccaactgcaggaagccatgcttcattacacccttcatggaagaggtaggttcccagggcacggagatgatgcccccggggactcccctctcacgcggcccgcgccaccagcgctgcagagggcggccctaacgtccccgcccccgcgtgcgcgcccccgcgcccgttcattccggcctccgcgcgccgccggctcccctcgcgcccacccccagcacacctcggcggcggcgagcggcgcgggggagggggacggggccccggaggtaggccgggggcagccaacaggccgcggcagcgcgcacgcagggctagcctcgcccaggcctcctccctcacgc

SEQ ID NO: 14323 - DNA, 558 bp, Homo sapiens
  source 1..558: mol_type = other DNA
attttccggatcatcgtattatattgctaattccggataaaccaccattggcgccttggcgttccctctccgagtgcagccctaacacaggcttttgaccttcagcctgcgcggccaactgcaggaagccatgcttcattacacccttcatggaagaggtaggttcccagggcacggagatgatgcccccggggactcccctctcacgcggcccgcgccaccagcgctgcagagggcggccctaacgtccccgcccccgcgtgcgcgcccccgcgcccgttcattccggcctccgcgcgccgccggctcccctcgcgcccacccccagcacacctcggcggcggcgagcggcgcgggggagggggacggggccccggaggtaggccgggggcagccaacaggccgcggcagcgcgcacgcagggctagcctcgcccaggcctcctccctcacgccggccgcaggacgggcgcgcacgccagctccgaggaggaagcgcagcccccttcccctccctcgctgcccctggcccagcgggagccccccctccccccagtgc

SEQ ID NO: 14324 - DNA, 474 bp, Homo sapiens
  source 1..474: mol_type = other DNA
atggtgtcattgcactccagctcagttcaactaattgagtgctctcatgtgctatgcattgtgctaagcacacaataataaagtctgtcttttaaaacagaaacatctcaattgaggtctgttttcaaaggaaccccaactggaggtgggctaaggtggataaactacatttctcctccaactatgattgagtcaccattattaactgttaattctaccaggtcattttatggtattatgcctgtaaatcttaattcataattagaagtatactttttgtttctaattaaatgcatggaagccataatcaattaatcaggcttcaaatatgctgcccatgtgggcgcaggtacagctgctccgtgcgcgcccccaggcccagatctggggcgccaggcgtccaggcttccggccacgcccccttcccgcgtaggagacatgatgtcaccggaagcgaggcctgggataggctga

SEQ ID NO: 14325 - DNA, 639 bp, Homo sapiens
  source 1..639: mol_type = other DNA
gttctctaaaccaacttcgtagaaatagagaggaagttaaactttatacagtatttgaatctttaaaggtatgagcatcctaaacagtaatactttactaaggtagctgtttaataaaaacgtatttatgcagattctatagagcaacccatagatgagcacaaaatgtgtatgttggctttatttgcagcggcatataaaattgttaataatcctgtcaaatctgttcatgaataatttattaatccgattgctggagtgcagtgcatacaggaactctatgtatgcgtgcatgtgtacacacccccgagcttcccgcaggattcgcgcagagcgaggagcggggaggacgccgtttgcgggaggcgggggccgggatcccgacaccgtccgcagtctccccggggtctctcagggaaccgagcgcgccgaggccgcccttctcgccaaggctcggcagctcccgcggcctgcgctggacaagcgagagctgccgtaggcggcggctgggggcgcgggacccgcgcgcgggcgcggaggcgggcggggaggccccgcagcccgcgccgccgccagccgccccgagccgcgtgcgcgcgcggccgcatcagctgagcgcgcggcgcgtgtcacgtggtg

SEQ ID NO: 14326 - DNA, 615 bp, Homo sapiens
  source 1..615: mol_type = other DNA
accctgaataaataaggtgttcttttaacgatagccttttctcaggattaaagttaaacacggaggaaacgatgctcctgggtttgtcgcagacccctgcttcggggctccgggggcgggcgcgggcggctgcccggcccgttacctgcgcccgagggctcgcccacagcccgaccctcggccgcccggtcccggcccggcgcggagcccctgcccggagccagccgtcgcccgcgcgcgccccgcctcggccgcccgcgggcggggaagaggccggcgcggccgcgggctggcgggcaggggcgggcgctgttgcgcgagcccaacttgggcgcaggttccgcgccgcggcgccggagcctgggccgcagcccgcggggccggccggggggcggcggccgcgggacgtatgcgccccgggaggaggcgggcggccggtgggctgcgcggcgtgcggggccggagcggcggccgcgcggagcagggcggcgcgtgtggcgctgtggagaaatgtctccgccgccgcggcgcggagcgagggagggggccgggcgcgcggcgcggaggggagggggcggccacgggcgccgcccttaaggaatgaggggagcacgc

SEQ ID NO: 14327 - DNA, 624 bp, Homo sapiens
  source 1..624: mol_type = other DNA
cgcagacccctgcttcggggctccgggggcgggcgcgggcggctgcccggcccgttacctgcgcccgagggctcgcccacagcccgaccctcggccgcccggtcccggcccggcgcggagcccctgcccggagccagccgtcgcccgcgcgcgccccgcctcggccgcccgcgggcggggaagaggccggcgcggccgcgggctggcgggcaggggcgggcgctgttgcgcgagcccaacttgggcgcaggttccgcgccgcggcgccggagcctgggccgcagcccgcggggccggccggggggcggcggccgcgggacgtatgcgccccgggaggaggcgggcggccggtgggctgcgcggcgtgcggggccggagcggcggccgcgcggagcagggcggcgcgtgtggcgctgtggagaaatgtctccgccgccgcggcgcggagcgagggagggggccgggcgcgcggcgcggaggggagggggcggccacgggcgccgcccttaaggaatgaggggagcacgcatcggtgggcgcgggagccccgttccggcttagcagcgcgccccctccgcgcgcgccctcccccgagtgcggagcgggaggaggcggcggcggccg

SEQ ID NO: 14328 - DNA, 506 bp, Homo sapiens
  source 1..506: mol_type = other DNA
atcggtgggcgcgggagccccgttccggcttagcagcgcgccccctccgcgcgcgccctcccccgagtgcggagcgggaggaggcggcggcggccgccggccggaggcggcatgagacgagcgtggcggccgcggctgctcggggccgcgctggttgccccagcggccgcttcaagatggccgctcgcgccggctgctctttccgggtacgtaggaggcgaggcgcccccgggacggggctgggggccggcgggggccgcgcggggctcggggcggccgcgggtggaaggggagccccccccgcgccccggccgcgccgccgggagggcgctgacagcgtgggcgcccggccccgcgccccgcgccgcccgccccgcgcctgccggccccgcgcgccgccctccccgcgcccgcgagcgcgcgcccgccgccgcccgccgactcccgcggcgccgggaccgacccgcagcccgcgccgcgccgccgccgccagcagggctcggcgc

SEQ ID NO: 14329 - DNA, 440 bp, Homo sapiens
  source 1..440: mol_type = other DNA
aggaattaaaaccgcaggtatatcttactgcaagttttggatttccattcaaggaagatttgagaatgtacttcagtgttatttttcaagaatactacacgcatagtttgtccaaataaaacactgggctgtatcgctcatttaatctacaggagacggttcaataaacatctctgcaatttgagccctgacggtttcgggctaagtgcacagttggcaattctcaaaaaatcccttcgtgaaatttctgacctggccgggagttcgcgggcgctgccgcaggctccggggtccccgccgcccaggactgggtccctggtccccgatccccgctccccgctccccagcgctgtggcctcgtggggctgccccgcccccccggcgtcgccgcacccaccccgcccccgcgccggccccgcccccgcggcgcgccgcccctc

SEQ ID NO: 14330 - DNA, 482 bp, Homo sapiens
  source 1..482: mol_type = other DNA
tgcagattcttgaggaagttttataataaattcgccctagtggttggtaaatatccgcgggtctgcagcagccttggggctgctatgatctgagagaccagaagtaatgttagttggatccttttgcatcagtttggtagaactgattccgatcggacagcccagctgtacagtatggccattatttctgtgtcttgcaggattttttatcaagcagaaatgtgtggatgccacaaccataatagaatgtctacatacctggaatttgaaaactgaatgattcctgcaatctgtggaaatgttggtacaaagtggtgaaggcattttaatacttttgttaatatgtattgattgtattacaagcatgcaatatatgtgtttatgaattagcttattaaaacttcacatgttctacttctagtctgtaaaacgtgtattgttcgttacctggagaccagcaagtattgtcctatttgtgatgt

SEQ ID NO: 14331 - DNA, 665 bp, Homo sapiens
  source 1..665: mol_type = other DNA
taaagttgacaactgtcattgaaacaactggtatatagttttcaaagacaagctagtacttcaattttgttaaaagaaacctttttctgttggagatgtcattcatcaacataacgacagggaagacaggacattcatcacatcctttcctactgagtctctgagtcattaaatgctttcaatacagtgtaattaagtgtgtgaacatggttgtcatgctcctccaggaatcttgaaaccaggaatgccaggttcctaaatcagtgttttactgtcagtgcagtgttaaatgtcaatgcaacacttaagttgcattgaagatttctcgggaccgtcgaagctcagacaactccagggctgcaatttactcgtctggctgccctcgaaccaggctcccttggcgcgtggggctctcccggcgcttggtcccgacccgcgccgcaaaggagctccgacctccgggcagtgcagggatactcgacggcgcgcgatgtcccggcggctccgcgagcctggcgcgctgagagccccagcagtccgagtcctcgagctcgggcgtcttcgcgccgccgccccgctcagtgcgcccaggcaccgcggccgtgacgtcacgcccgggactggccgttgcagcaagacggccgcgttccggttccggtaggttg

SEQ ID NO: 14332 - DNA, 470 bp, Homo sapiens
  source 1..470: mol_type = other DNA
agtttccaagaacgggcacggagtgggttggcagtgacagcccagcctattacgtgggagtctccctcttgaatggctccaggaggcccttaagttcatttcagggactgacccggcaatgtgcccgggtccttcccctcggtgctgggaagccctggtctccctatgagcctccctccttcgcctgtcctctccctccttggggagcggcaggggacgcctagccggggtccccaggctcccgctcgcaacccacggcctcctccgcgggcagggagcgaacgcccggaggtcgcccgcgcacagggggcggcccggctgcagcggagccggggcgggaaggcgcagcctaacggtccagctgccgcgccccgcgccccgcacccagtgccccgcccgcggcgccgcagccgcctcccgcctgcccgcccgccccctgcgtcatgacgccggcgcccaacgcggaagcc

SEQ ID NO: 14333 - DNA, 172 bp, Homo sapiens
  source 1..172: mol_type = other DNA
ttttgctaaaggcaatcaaaaaatattttatgaagatggcatttgagctgggcttaattaagtggaaatgagagaatatttcaggtattgcacatgacctgggaaatagaagctactttataaatatttgttgaaaaatgatgggccagaaactgaggctgaactgcctctt

SEQ ID NO: 14334 - DNA, 177 bp, Homo sapiens
  source 1..177: mol_type = other DNA
actttataaatatttgttgaaaaatgatgggccagaaactgaggctgaactgcctcttaggtgctcctcccgcactggccgctgccctcggcgggacaatgggcgccctagcagccccgagcgttcccagggcgcaggcgcggcgcggcgtggcgtcgcctagcaacgaggcacaac

SEQ ID NO: 14335 - DNA, 211 bp, Homo sapiens
  source 1..211: mol_type = other DNA
cttaacatcattaacgattaggttaaaatctctggactttcaagtgaaaacagtatagtagtttcttaaatccacttccaggtatttaccccagagaggaaaaaccgtatatgtctgtacaaagatttgcatccataaatggaatactgctcaggaagcaatgaatgattgttccatgcaaaaacactatgggatgattccatttatggac

SEQ ID NO: 14336 - DNA, 713 bp, Homo sapiens
  source 1..713: mol_type = other DNA
tgcgccggagcagacgattcaatggactccttttgtatagaagaaacgcgccccgctgagctgctctgggggctgcccctcccgtctccccattcctttctccgggccggggagggcaggggaggcagccactgagccgatgtcgctggggacccgcaccaggcaccacagccaggctccagagcggcgctcccagcccccgtgttgctctggaacgcagtgggagtgggcccggatcaccttccaattgcaaactgtgcaaaaggccggagccccgcgcacctcggataagggggtggcggaatgcacccacctggtccctgagggcagcacccgctgccgcggaggaggacgatcgccgcgcgggctccgctctcgccgtctgggccaccggcgcgcaccccttctctggccgcgtgtagacgcggcgcgcggctgccccagtcccagggcggaaggagccggcgctgctcagcgcgcgcgggtacgcagcgggcaccgcgggacgcaggtgcccctggagccgcacgcggggcaggagagcggtgcgaggagccccgggccgcgcgaccccgccttttcctcgccccaggagctcccacgccgcgcctccgggccccctcgccgccggcacaccgcgctctgattggctggcgcgatgggtccctggcacgcgcctatggcgtgccggcccggaagtccgccacagccct

SEQ ID NO: 14337 - DNA, 557 bp, Homo sapiens
  source 1..557: mol_type = other DNA
aataccttttgattatataataaaaattccccaaataaagtctgaagttagagtttgtaattaaaaacctccaaagagtaaaagtaactctttttctcttctctgtctttaaacataatagtagtgataatgctacagagtagacagagaagaggccgggctctgagattgcctgagcagagttagactagcctctgctcgggaggctggatcgcgccactgcaccccagcctgggcgctccggctccaaaaaataataataataataataagagagaggagaaaaaacttatttttctgtagataatatattgaaatgcagatgtagtatagacagttctaaaccagacaatgacattttaaaaataaatttagccagtcgtttacagaaaaacaatgacatactgatattagaataggtgtctcctattagttgacaatgagtgatacataatttaaaactaaggatgacaacagtttcactattaactcttattattgtagaaacctggtaaaattgaattccacactagatggtatagtttaagacttaacgc

SEQ ID NO: 14338 - DNA, 416 bp, Homo sapiens
  source 1..416: mol_type = other DNA
ttttggcccccaagacaatttcagacgactgacctcagacccaggacccaagggcggggccctcttgcatctggaatccagcctacaggggcccaggctagaggcgcccttggcgcaccgaagctggctgccttgctggaacctgccgcgggggtggaggttgaaaggactctgagctctcccgccccgacctggaagcgagcgcccccggctgctcgcggcagcccctcggcgcccgtttgcagggagcgagctctggctcctcacaggatccagacccatccgtccccagccctgcagggcacacgcgcgcgtgcacacgcacgcgcttacactccagccaccccaccctccgcgccgctcctccgcggggtggggggtggtgggggtgacgtaggactgcagtccagaagaga

SEQ ID NO: 14339 - DNA, 498 bp, Homo sapiens
  source 1..498: mol_type = other DNA
tttgtctttttaaattctataatgtaaagcttggcagtgaacctcaagtgttgaacatttaagaaagaatctaaaaatacatgagcccatcatattttatgcattttaaattatgtgaattttaaaagtgtgatttaaatgttagtaaatattagcagaatctcatttgatgtgtgaaatttaagaaaagtaaaatataccaaacttaaaaataatctaaattgtgtaatctagtacaacatgaattataaaaatttttatgcattagactcttctactttaaatcatgaagtagtaataaaaatgtacctgaaaatcaatgccattgaaatggaaatatacttaggagcaccaggcattgtctgtaatcactcactcccagtttataaattcagaaatgtgatactctgggtaaggaaaatgccagcaattttttcaattctagaattaatcctattggataattaagaagcatgtgttctgacaacataattgttc

SEQ ID NO: 14340 - DNA, 240 bp, Homo sapiens
  source 1..240: mol_type = other DNA
atctggaacataggctggccattgttcagcggcaaagtatggtcaccagactctgagatatctgacatagagctaagaactctgccagtttttcaaggactgggtaaagaacaaaataaatatttgtttccaaagaaatgcattttcactgtcgcaagtacgtagaaacttttttttaaaaagtccagattaagtgattaattagtggaaagtgcttacttcaacactcagcatatcaaa

SEQ ID NO: 14341 - DNA, 325 bp, Homo sapiens
  source 1..325: mol_type = other DNA
gaactctgccagtttttcaaggactgggtaaagaacaaaataaatatttgtttccaaagaaatgcattttcactgtcgcaagtacgtagaaacttttttttaaaaagtccagattaagtgattaattagtggaaagtgcttacttcaacactcagcatatcaaatgcagagcctcggtggtttgcagctgggtaggagaggccgtcacctgttgaggcctcccccccacaccccctgccctggcagagcccagcccccagtccccggagagcgcgcctgaggacggacggacgccgcgctggcagttttctcgggcgagtcccag

SEQ ID NO: 14342 - DNA, 475 bp, Homo sapiens
  source 1..475: mol_type = other DNA
cagtggcagctcactgcagcctcagcctccctggctcaagagacacagtctccctaggattacaggcatgagccactgtgcctggccccttgcttttagattgagtcgatagtcagtatttcaaatatctctaaacttacaccgtaagggtgatgatttttgaacagttaacctaacttcattactgtaagcgtttactgattcactcaatcagccatagtgagaatgatacagacaataatcaattaactcaataatcaataatgatacagacatctataatttttacactatggaactcatttatgagtgatatacataatgatatcttttttatataggcaatccagaacatgcttccagttataaagtcttattttttagaagcaagaaaaggtaatatatgcacatctgatatgcaacttccaagtggaggttatgacaacatgagccatattgtatttataaacatcac

SEQ ID NO: 14343 - DNA, 183 bp, Homo sapiens
  source 1..183: mol_type = other DNA
gggcaatgcatagataccagctgtgctgacagcggttgtagccagaggtcaacagggctggttaattaatagacgttttccctctggtgttaaaccaggagaagagcccagacttcaaaagtctggcagcagaaaactgatctcgaaatatattttgtaatattgagaaattgacttatcacg

SEQ ID NO: 14344 - DNA, 716 bp, Homo sapiens
  source 1..716: mol_type = other DNA
gagggcttgtaggtcccgcgacccacggggagggggcaggcgagcaccccgctccggcctccggctaatccagccccagagcctcccctggggaggggaggggaagggaaacagctccgcgcggccacggagcgaggcgcttctgtcacttggcgttcgcgggcgccggagctgggccccggcccggcccggcgaggcgaggggagagtccggcggccgccgccccgccccacgccctcctgcggcggccgagagcccggggccggccggggcaggtcgcggcggtgcctgggagcggccggccgggggcggcggcctcggagcgcggcggcggcggcggcggcggcggcgggcagcgcgggatcgtccggctgcggggtccggctcacgccgggcgggcgggcggggcgcgctgtcccggagccggccagccccgtgcggatccactcgttcagccgagagggcgctgcgctcgcgggccgtggagtgcccggcttgccgcgggctctctcccttcccgccacaggccacccggccgggcgctggctcggggccggagggagcccgcggcgggcgcccggcgggggcggaggggccgcgcccgcgtgtgcggagcaagggcgggcggcacaaaggccggcggtgggcgctggggtccggccggccagccttggaggaggggcgcctggggccgctgagcctgcggcctagcgcgt

SEQ ID NO: 14345 - DNA, 349 bp, Homo sapiens
  source 1..349: mol_type = other DNA
tactcaattgtatctagcactggatactgctacagccactgggctatttagtaaattaccatctgactgaaatacagtccttgtattttattaatttcatggccatattcaacgtcttccctcgaattgaagcggaggatcttccactttaaggaagatgtaacacagcggtggcagctgatcagacacaaaggtgacaaacgctgcctctgactgcaactccccctccagccccgcgaggctcggagccggggagccacctccccggagcggggcggggtgggaggtggccttcacccgggggcggggaagagggcggagggaagcgagctgccggggtctgtgacaa

SEQ ID NO: 14346 - DNA, 530 bp, Homo sapiens
  source 1..530: mol_type = other DNA
cgagctgccggggtctgtgacaagttgtgccgcggctccggagccgctgtgacccggacagagaagcgcagccgcctctccacaggctcagccgctctgcccccttcccaccacaggaagagatttttgctgtgaggcgtgaggggacactcccaaggggtgggggcacaatttgccaagccctgtcgatccctggagtctgcagattccctggacgctgccgttcagcgcttgggagggcttgtaggtcccgcgacccacggggagggggcaggcgagcaccccgctccggcctccggctaatccagccccagagcctcccctggggaggggaggggaagggaaacagctccgcgcggccacggagcgaggcgcttctgtcacttggcgttcgcgggcgccggagctgggccccggcccggcccggcgaggcgaggggagagtccggcggccgccgccccgccccacgccctcctgcggcggccgagagcccggggccggccggggcaggtcgcggcggtgcctgggag

SEQ ID NO: 14347 - DNA, 424 bp, Homo sapiens
  source 1..424: mol_type = other DNA
tgctttagtacaatctgaccagatgttcttgcaaaactggtaaagcagagaatgtgtaaaaatctctccccctcctccgcccagatctgatcactgcatccagctccaggccctgggattcaatcgcgtgcatgctgccgcgggcttcctgctccagagtccccgcggggcttggcggcggggccgggggctgcacgcgaccatccggcagggggcggcggcgacagcggcggccgcaagggacgcgtccggggcccgcgctcagggggagcggtagcggcttggcagctgctccccgcgcccccgcggcctagccaggggagggggcgcagcgccggggccatggatccgcgtcaggccgctgcttcccgccggcgggcccggggcggggcggacccgtccccgtccccgtccccgtccccgt

SEQ ID NO: 14348 - DNA, 435 bp, Homo sapiens
  source 1..435: mol_type = other DNA
aagataataaaatgaattagatttttaaaaactatttactcatcattctgtgccctttataggatgacctatataagtctatgtaggatgttcttgagccaagttacatttttcactgtgaacttgttggattttacgtttaaactaatagcctttctaagggaagaagatttatctaccatttcccttctcatggctaagttttctaaagcatgggtcaagtttgatcatcatcctaatgatagcactttactaggagaaaatgtttaccgcagttgccaagcagatgcctgatttcagggatctctggactccaaggcgctggcgcttagaagagccagccctgctgagcaggaccagggcgccaagtctgaatgactaatatttttccaacctagaacgtcattaaccgattgataactatttcccctttaa

SEQ ID NO: 14349 - DNA, 451 bp, Homo sapiens
  source 1..451: mol_type = other DNA
ggttcctggacagagccgacccggaggaccgcccaaggggcggtcccgggagcaggggcgggagggcgagcgcagcaggcggaggaggccgcgggccccgtgcgcgcactcacacacgtggcgggcagggctgcgcggcgttccgaggagcctcgactcaccaaggaaatctcactgagagacggagcaccgtacctgcagctagctccccggtcccgcccccgcgcagtggactctgcgcctgtgcctgcggcggccagcgtgcctccgctccacgcccttccccgagcggcctcgcgcagggcacggctggtgcgtcctcgtggtctcagccgctcgctccgcccacaccgcgattggggcctgaaaaaccttattggtttttcttttttccccagatacacagaaatagaaaagaggggacatcattttcaccccgttaactttcaac

SEQ ID NO: 14350 - DNA, 373 bp, Homo sapiens
  source 1..373: mol_type = other DNA
tgaatacctagatatttcgaccttttctctaacaagttatccttcatcgaggcaaaaatacattttatttattattaaaaattccagtatatgtatgcttaattaatactgagtattccccattctcctaggaggctggggaagaaaacaccctatttctctccggtgccgtggaaaccgttgaaagttaacggggtgaaaatgatgtcccctcttttctatttctgtgtatctggggaaaaaagaaaaaccaataaggtttttcaggccccaatcgcggtgtgggcggagcgagcggctgagaccacgaggacgcaccagccgtgccctgcgcgaggccgctcggggaagggcgtggagcggaggcacgctg

SEQ ID NO: 14351 - DNA, 534 bp, Homo sapiens
  source 1..534: mol_type = other DNA
tccctcagctaagatgagcctagacaagtatgttttaatcatttctttaactgacaacaagaaagatgatttgataatttaaaatgagcagatgctcatttcacctagaaatgattctccctcttttccaggcaaaaggctggtttccgagtcatccggaacgcgagtgggtgcgaggactcggcaggctgcctcccgcgcccccgccgcccgcgggccgcctcgggttcagcactggacagctccctccccggcccgcagtcggctgattgacagcttgcagccgccctacaagggtttggttgcggccattaaactggctttcctcccccgaggagggagcaggtttgcggccaaacactccggacagacgaacgtcttaaaggacgtcttcgctcctcgggagtcgcggctgcgctcgcggtgcgggtctgggcgcgcgccccgcgcctccgggcgaagcggtcgaggaggaggactatggagcagcgtcttcggcggccgcggcggcagcagcagcagcagcttctgaac

SEQ ID NO: 14352 - DNA, 289 bp, Homo sapiens
  source 1..289: mol_type = other DNA
cttgctgcactacactccagcctgggaccaagctccttgggaggctgagccattgcgccactgcactccagcctggttcctggccctgccaggcctgagtgtggctgatcaaggtacgtgctgttactaacacgttcctccgaacacagcgtcaacaattagtaatgaagacccgctgtgtcaccagctgccggaaagccagctccagaggtgccatcagcccagctcatggccagggcttccttcccagccatgcctgcagacaggctcctgctccagaaaaagtcca

SEQ ID NO: 14353 - DNA, 535 bp, Homo sapiens
  source 1..535: mol_type = other DNA
ccaagtagctgggactacaggggcctgccactgaccttgtgatccggccgcctcgaatttctaaattttaaagctactttaagaggaagggtcttgaatatactgaatgaccttttgaaacagatttttaacatcacattttttccttaagatatgcattgattaggtcttctataattctcatttagataacatgaacgacgataattaacagaatcaaaggatgttttggttgttctggccatcagggtccccccaggtgagccctgtgtgagcctcccgagggtagaagttcttgcctttaaccccaaactccttagcagtctgcaaaagggaactggaccctgggtccgggtccgagaccggggccgggagcagaatttgctccaggcactgggccagtccatgagggctccaggatccaggggccccactcccttctcgccgggctccgggccaaggaagcgcggccggagtcccgggaagcccctcggcagccagccaagggccctgcgaggatgtggatggcgcggat

SEQ ID NO: 14354 - DNA, 607 bp, Homo sapiens
  source 1..607: mol_type = other DNA
tgaccttgtgatccggccgcctcgaatttctaaattttaaagctactttaagaggaagggtcttgaatatactgaatgaccttttgaaacagatttttaacatcacattttttccttaagatatgcattgattaggtcttctataattctcatttagataacatgaacgacgataattaacagaatcaaaggatgttttggttgttctggccatcagggtccccccaggtgagccctgtgtgagcctcccgagggtagaagttcttgcctttaaccccaaactccttagcagtctgcaaaagggaactggaccctgggtccgggtccgagaccggggccgggagcagaatttgctccaggcactgggccagtccatgagggctccaggatccaggggccccactcccttctcgccgggctccgggccaaggaagcgcggccggagtcccgggaagcccctcggcagccagccaagggccctgcgaggatgtggatggcgcggatggcgcggcctccacctgcgggcagtggagagagcggcgaagaatattccccgcgagccgggataaggggccccttcggctcggttgacccagggaccttcggc

SEQ ID NO: 14355 - DNA, 504 bp, Homo sapiens
  source 1..504: mol_type = other DNA
cccagagccccggagctccgaggtgcacttgaagttcatctccactgccagtagctttttgtagaaaggaaatcatcagaacgattctgactttctcctcctttctttattagaaaaagagaaaccgggtcacccgctaccgcgaagattctctgagggggggcattggtttgaagccccttaaaacgagggccctgcaggcgatgccttctttcctactcggatttgtaaagccgagatcagcgggcgctttccagcgtggattcagagcctggacggtgggtcccgcgatctagcccttggctacgcaggaacggtgcgcccccgggtacggcgcggttcagcagaggcgctgaaatgagcccatcagcgggtaggagcccttcccccgccgtcccctccccaggctcgtgaacggcgcctgatgcccgcccggggcgcgagctctcgaggtcgcagtgagaggaaaacggcgcgggaaccccgcttccttccctctgggcc

SEQ ID NO: 14356 - DNA, 551 bp, Homo sapiens
  source 1..551: mol_type = other DNA
aaaggaaatcatcagaacgattctgactttctcctcctttctttattagaaaaagagaaaccgggtcacccgctaccgcgaagattctctgagggggggcattggtttgaagccccttaaaacgagggccctgcaggcgatgccttctttcctactcggatttgtaaagccgagatcagcgggcgctttccagcgtggattcagagcctggacggtgggtcccgcgatctagcccttggctacgcaggaacggtgcgcccccgggtacggcgcggttcagcagaggcgctgaaatgagcccatcagcgggtaggagcccttcccccgccgtcccctccccaggctcgtgaacggcgcctgatgcccgcccggggcgcgagctctcgaggtcgcagtgagaggaaaacggcgcgggaaccccgcttccttccctctgggccctcgccgaggtctcgtctgcccctcgctgacgctggcgcgcagcggctgtggcagcacccgggacagcggccgcccgcacttcccgcctctggctcgcccgaggacgcgct

SEQ ID NO: 14357 - DNA, 459 bp, Homo sapiens
  source 1..459: mol_type = other DNA
ttggtttgaagccccttaaaacgagggccctgcaggcgatgccttctttcctactcggatttgtaaagccgagatcagcgggcgctttccagcgtggattcagagcctggacggtgggtcccgcgatctagcccttggctacgcaggaacggtgcgcccccgggtacggcgcggttcagcagaggcgctgaaatgagcccatcagcgggtaggagcccttcccccgccgtcccctccccaggctcgtgaacggcgcctgatgcccgcccggggcgcgagctctcgaggtcgcagtgagaggaaaacggcgcgggaaccccgcttccttccctctgggccctcgccgaggtctcgtctgcccctcgctgacgctggcgcgcagcggctgtggcagcacccgggacagcggccgcccgcacttcccgcctctggctcgcccgaggacgcgctggcacgcct

SEQ ID NO: 14358 - DNA, 692 bp, Homo sapiens
  source 1..692: mol_type = other DNA
atattaaaaaaaattaggataaataaataataaataaataaatgaaaaatacattttctcttccttatgattttattaataacagggcttactttattataaaaatacagtatttaatatatataaaataatatgagttaatcgactatgttatcagtaaggctgataacaactgcttgatcatcacctgatggtcacctgacattcctggtagggggtgggaggagccctctcctgccctgctcatgtttcaggatgctgcacaattgaaaattgtactactgttgaccagaagccttactgataatattaaacagtcaattaacacatattatgttatatgtatttagataaatactgtatttttacaataaagaaagctaaaaaaactgttattaagaaaatcatgaggagaaaatatattttctatttatttatcgtttatttaccctaattaattacattccttgacatgttaaatattaatttgtttattgtctgctttctaccaactagaatgcaccatgcatgagagcagaaattgtttcctctaactattttcattgttagtttctcattaaataaatgacagaactatttgaaattgcctaattaacacttccctgacatataagcctttgaagacacagctgccgcatttacaaatcataactgattttaacttctgtatt

SEQ ID NO: 14359 - DNA, 376 bp, Homo sapiens
  source 1..376: mol_type = other DNA
tttaccctaattttacattccttgacatgttaaatattaatttgtttattgtctgctttctaccaactagaatgcaccatgcatgagagcagaaattgtttcctctaactattttcattgttagtttctcattaaataaatgacagaactatttgaaattgcctaattaacacttccctgacatataagcctttgaagacacagctgccgcatttacaaatcataactgattttaacttctgtattctgacaggtgctacataagttaaatagatattgctcagacagctgaactccggccgggacgcgcgtgttgccagtccagccctgcaccgcgtcccctgagggcgggctgcaggcggccgggaagccttgc

SEQ ID NO: 14360 - DNA, 513 bp, Homo sapiens
  source 1..513: mol_type = other DNA
tccagcgtggattcagagcctggacggtgggtcccgcgatctagcccttggctacgcaggaacggtgcgcccccgggtacggcgcggttcagcagaggcgctgaaatgagcccatcagcgggtaggagcccttcccccgccgtcccctccccaggctcgtgaacggcgcctgatgcccgcccggggcgcgagctctcgaggtcgcagtgagaggaaaacggcgcgggaaccccgcttccttccctctgggccctcgccgaggtctcgtctgcccctcgctgacgctggcgcgcagcggctgtggcagcacccgggacagcggccgcccgcacttcccgcctctggctcgcccgaggacgcgctggcacgccttgagtccgggctccgaggacccgtagtcccggtctcttttaaagctccccggacccgccctcgccgctcggccccgccggtccccgcgcggtgccctcctcccgccacacgggcacgcacgcgcgcgcagggccaagcccg

SEQ ID NO: 14361 - DNA, 204 bp, Homo sapiens
  source 1..204: mol_type = other DNA
ctgacaggtgctacataagttaaatagatattgctcagacagctgaactccggccgggacgcgcgtgttgccagtccagccctgcaccgcgtcccctgagggcgggctgcaggcggccgggaagccttgcatggttccattcgccaggtccgcgagaaagtaactcccttgcacctcggagcaaagcagctcggacgctgcgtg

SEQ ID NO: 14362 - DNA, 531 bp, Homo sapiens
  source 1..531: mol_type = other DNA
catattaacaatctttactcataaagctttgcatatttttacatactattcttcaagatggaaaaaacaccatcaaactggcttattttcatagatgtctttatatagtctatgatgtcttcattccataaaaaatccacacgatcatgaatcagagaactgcaattacctacttgctggtctattgagtgatttgaggactaagtagatctggccttagagctaaggaaagaaggcctttctaacccataaggggtactaatcctgtacctgggtacacgcaggttcacacccaggtgtcaacaaccctgatcgtggtcggacttgtttctaggaagatctggaacttccttcaagggaagcagcagcggaaaccgtcgcctccggcttaggctgcggagcgggaaccccattctctgagttatgtttctgcctaaacacataaaaggtccccacagggacatttttgctatgactgcaggcgccagtctccctgcacagcttccgggaagaggaggctcgccccgggga

SEQ ID NO: 14363 - DNA, 332 bp, Homo sapiens
  source 1..332: mol_type = other DNA
tctaggctgcagagacccatgattgtgcccctgtactccaggctgggtaacagtgatagtacgctgcttggtaaacagctggcaatcaagaaatgtttgctaaattttaaatgaattgattcagaaagtaaagcctgactcgctttatttctaagaaggcagggaagtaaaaatctagttttgattcactgacatttcctaattaaccaagttctgccaagtttcacatgaaacttggggaaccgatttcacccccagcttccggagctgtgaggaaactccggacttcccccgggcgcatgcgctttggacgggccgcctagcctaggaga

SEQ ID NO: 14364 - DNA, 317 bp, Homo sapiens
  source 1..317: mol_type = other DNA
tcgcaacatggtgagaccctggtagtctcagctactcactcaggaggctgaggtgggagccgtgattgcaccactgcactacagtctaaatgcgttctcatttcttatccgtgcacttgacacatatgccacgatctccgtcttaggggagttttctcggagaagaggctttcagcatctgcttccccacaggcgcgaggcttctcgcagggctcgtcccagtcgccgagatttgcgaggtctgggccttgcacatgcgcatggagcacacttgaccactgggccttcgtgcgcacgcgcgtggaccttgccatctg

SEQ ID NO: 14365 - DNA, 416 bp, Homo sapiens
  source 1..416: mol_type = other DNA
aggctccgcccacgccgcgcgcggccgtgacgtcaccccgccgccgcgccccgccctcgtcacctcccctacgcagacgcggacggagggggcgtcgggaaagccccgacttcgcagccttacactcttcgtgggcggcgaccgcggccccactgacatcattcctcatgagggaggagacgaggctggtgggaagcggtcctcctcccatagttctgactgtacagtattgctagaagatttcataaggaagctggggcacctgtaatcccagctactcgggaggctgaggcaggagaatcgcttgaacccggggagcagaggttgcagtgagccgagatcgcgccactgtaaaggctgttctccccttgcgggaaagaacgcgcaggcacttggccttgtgggcgctcacttgc

SEQ ID NO: 14366 - DNA, 581 bp, Homo sapiens
  source 1..581: mol_type = other DNA
gagtgatttgaggactaagtagatctggccttagagctaaggaaagaaggcctttctaacccataaggggtactaatcctgtacctgggtacacgcaggttcacacccaggtgtcaacaaccctgatcgtggtcggacttgtttctaggaagatctggaacttccttcaagggaagcagcagcggaaaccgtcgcctccggcttaggctgcggagcgggaaccccattctctgagttatgtttctgcctaaacacataaaaggtccccacagggacatttttgctatgactgcaggcgccagtctccctgcacagcttccgggaagaggaggctcgccccggggaaggttacgctcggggtccccagaccaggtctccgcacgcccctgccccgtcgcctcccgggagcggctgcagtccccgttggctgcagacgggcagacacccgaagtgtccgcgccggcagccggaccgcaagcgaggaagagcgaaccgcgctcccgggcctggccgaagcgcttcctgtgccaggtttccggctccgggtcccgggaggaggatcgcgggccagaggcggagcc

SEQ ID NO: 14367 - DNA, 321 bp, Homo sapiens
  source 1..321: mol_type = other DNA
cgtaatgaaaacccttgaaatcatttttctcttcactaccttttgttttacaaaacgatgaggataaattttaactgcaaacagtttacgactcggaaatacacattttagttacttctggtcaaaatgagaaaaaaacttcatccgaaatattataccatgtttgggttaaatttaaattccatttaaaaggaaataaagaaacattacctgctccctttaatgtacaatttgcgcgggccctcagcgaaactgtgcccctctgtccacggcccggcggggaggcgctgaggcaagtgagcgcccacaaggccaagtgcc

SEQ ID NO: 14368 - DNA, 403 bp, Homo sapiens
  source 1..403: mol_type = other DNA
attgcgccactgcactccagcgctgggcagggagaagagagtcaaactttgctgttctcactgggcatctccgaccgctgggctctggaggcttcagcaagccaggccacccagactcctcgctccagcaaccccggggcctgcccaagccggtggggcaggaaggagggccgaagggcctaaccccttccttttcccgcggtgggatccatcgctggacagcatacagcggccccgcagtgaggctccgcccacgccgcgcgcggccgtgacgtcaccccgccgccgcgccccgccctcgtcacctcccctacgcagacgcggacggagggggcgtcgggaaagccccgacttcgcagccttacactcttcgtgggcggcgaccgcggccccactgacatca

SEQ ID NO: 14369 - DNA, 290 bp, Homo sapiens
  source 1..290: mol_type = other DNA
acctaactcgccgggcgcggtggctcacgccagtgaaaccccgtctctactattgcgccactgcactccagcgctgggcagggagaagagagtcaaactttgctgttctcactgggcatctccgaccgctgggctctggaggcttcagcaagccaggccacccagactcctcgctccagcaaccccggggcctgcccaagccggtggggcaggaaggagggccgaagggcctaaccccttccttttcccgcggtgggatccatcgctggacagcatacagcggccccgca

SEQ ID NO: 14370 - DNA, 408 bp, Homo sapiens
  source 1..408: mol_type = other DNA
gcaagtgagcgcccacaaggccaagtgcctgcgcgttctttcccgcaaggggagaacagcctttacagtggcgcgatctcggctcactgcaacctctgctccccgggttcaagcgattctcctgcctcagcctcccgagtagctgggattacaggtgccccagcttccttatgaaatcttctagcaatactgtacagtcagaactatgggaggaggaccgcttcccaccagcctcgtctcctccctcatgaggaatgatgtcagtggggccgcggtcgccgcccacgaagagtgtaaggctgcgaagtcggggctttcccgacgccccctccgtccgcgtctgcgtaggggaggtgacgagggcggggcgcggcggcggggtgacgtcacggccgcgcgcggcgtggg

SEQ ID NO: 14371 - DNA, 370 bp, Homo sapiens
  source 1..370: mol_type = other DNA
aggttcttggctcagggcagcgaaaactgtcgaagacctgcgggccagggactgctgagcacctccactggaaaggctaagtgacttgccctaggtcacataatttaaatggtaaagccaggcgctggggaccgcagagtcagcggggtcgcgtgcagctttgggcccaggtgcagaacccaaccgcgccacccggctgccagagcggacacatcggtccggcctcggtttccccgcgcacaggggatttcctctggggacagacggaccgcgcgcgtccttgccgcggcggcgggtcgggtgggtggttgctgcactgctgctgcggcggcggcggcgccagtgggtcctccggtgactctggggcggg

SEQ ID NO: 14372 - DNA, 563 bp, Homo sapiens
  source 1..563: mol_type = other DNA
gttcttggctcagggcagcgaaaactgtcgaagacctgcgggccagggactgctgagcacctccactggaaaggctaagtgacttgccctaggtcacataatttaaatggtaaagccaggcgctggggaccgcagagtcagcggggtcgcgtgcagctttgggcccaggtgcagaacccaaccgcgccacccggctgccagagcggacacatcggtccggcctcggtttccccgcgcacaggggatttcctctggggacagacggaccgcgcgcgtccttgccgcggcggcgggtcgggtgggtggttgctgcactgctgctgcggcggcggcggcgccagtgggtcctccggtgactctggggcgggcagacggactccggcggaatggggggtgtggctgctccgccagggtccccagggtgggagagcggctccgcggccaccgatgcccggacccccggattcgtggccttagtcacgccccgggggaggaggaaggagccgggccgcttcgatctgtgtggcgcagggcaaaggggaactgacccgcttcgctcccgg

SEQ ID NO: 14373 - DNA, 576 bp, Homo sapiens
  source 1..576: mol_type = other DNA
aatatttattgctcagctaagtatcaaaaaactacatgctaggtaatttcacatactttattggagaaaacgaaatttgtgaactagcggactttgggccaagctaaagaggtttatttatttaaaaaaaaaattgaaacatctataggtcacattgattatttcccattaaaaatgaaaagggttctattaaatccaataagggggaaatgaatattccttcaatttaggtttgttccttttatggaataaagtaataacgcgttagataagtgtcactgctttttagccattcatacattaccatttggaattctttagtatttacaacccaaagttggttctctttgtgtgataattttacaaaatgtcctcttcatttttgaagacaaagaaacgtgaagcctccggagggcgctggagaagccgcagctgcagacaccgcgacaatctcaagacacttaagctggaagcgaatgtggagggattccgccgcacggctgcggcgtccgcgggacagagacgcctccggacgccgctgggacgtgtccggaagcgcggcggaacgggcccgcg

SEQ ID NO: 14374 - DNA, 605 bp, Homo sapiens
  source 1..605: mol_type = other DNA
attgggatatcttttgaaagggcttttccagctatttaacaaattaatttcttaacatttgaaattttatttatatgtagtctttaatcaaatatccattgtatatgacattagctgcaggtataattattgagtgcctgccatgtaccaggcactgtgctaagtattatgaatgaggtttggtaccttcactaagatttacaacttaatgcaggaggcaaggtgtagacatacacttcctgcagtatggggaattagggtgcagagggtgctctccactataacagagggggatcacaccttttatagagcactttggttaacaacatgtcttcacaaaacaataagaagcagatgttctaagaagtgttactgtgtctctcagagatgctggacctaaatttaagataatctgcttcaagcacagtgcttttccccgcagtgcagctgttatgagcagctgccgaaatactgagtcctcccactgactcaaaaggagggttaggttgagacctgcgcttgcgcaggggaggttctgggtcgcgcagccgtggagctacctcaaggcctggggagtccagggcttcggcagcctgaacacccgg

SEQ ID NO: 14375 - DNA, 389 bp, Homo sapiens
  source 1..389: mol_type = other DNA
cgcaaaaatgtaaaccggccttcctttatggtttacattcatatgaaatttgtgattagtctttaaaataatagttttggtatatattttaagtgggccactgccccggctctggccatctttaaaaagggcgaaagttcgctaggaccacagggccttcggcgagagcgcaggcttctgggctgccagaagctctgagcttgcagttgcacctaacgctttcgctacttatatttgcggtaatgttattgggccaccgcgggttggccacctgggctgaacggcgagggcagcctcaccagccctttgtgcctggctttgactgagacaactaggaccccagaagcccagtgacatctaacttccctccagctcgagaggaatacagg

SEQ ID NO: 14376 - DNA, 511 bp, Homo sapiens
  source 1..511: mol_type = other DNA
ttctgggctgccagaagctctgagcttgcagttgcacctaacgctttcgctacttatatttgcggtaatgttattgggccaccgcgggttggccacctgggctgaacggcgagggcagcctcaccagccctttgtgcctggctttgactgagacaactaggaccccagaagcccagtgacatctaacttccctccagctcgagaggaatacaggtctcagcttctggagccggagccgagcgctcccggcagcttgcaaggccggcggatctgggagccgcgcccggctccggaggactcggcgggcccggggctccccggcagcggctcctctgctaggggttaacagcagcccccgcggccgggcgggcgcggacgcttcctctccacccgcccgggaacgtggataccgcgcccgcaggatgttcgccggctgggaccggcagtcaggaaacatgagaaggcctcgctattcctgttcccgggcggcgcgcgccgggctgggtaaata

SEQ ID NO: 14377 - DNA, 252 bp, Homo sapiens
  source 1..252: mol_type = other DNA
gtgccactgcactccagcctgggtgatagagccagactatacctcatatccctacgtgtttgcagaaaggttctgctttgagctgaatccgtataatattatgacaggtgatatcctaacatcattccacatttctttggcatccggaaaagaatccagagatgggggacatgttttcatttatatttgtttttttggagagaaacatgtaagcctcaaatatcctaaaaaaggggtttctaagacaggggc

SEQ ID NO: 14378 - DNA, 438 bp, Homo sapiens
  source 1..438: mol_type = other DNA
cacctaattatgtttaccacaattcttttcattaaactatgttgccttacaaatagtgcaaaggttgtttaatgtacctgcagcagtacataaaatcaaatttgtagcaatttcacttaacacacctgagaactttcacatgaattttctttccgagcgcagtggctcacgcctgtaatccgaggcgggaggatcgctccctatctccggaaaaactttttttaaaaaattagccgtgcagtgagccgtgatcgcgtcactgcactcagactggacgacagctgccccgagcggcgctccccgctccgtgcacgcatctccgctgagggccgccctgacgcacggcctctggccgggactgcacgcgctccttcctgcctcggggcgcagggtgagacttacgtctaaagggcgcccggcgagctcgcagcagcccct

SEQ ID NO: 14379 - DNA, 590 bp, Homo sapiens
  source 1..590: mol_type = other DNA
tgccccgagcggcgctccccgctccgtgcacgcatctccgctgagggccgccctgacgcacggcctctggccgggactgcacgcgctccttcctgcctcggggcgcagggtgagacttacgtctaaagggcgcccggcgagctcgcagcagcccctgccccgcggagggccggtggcgcgcggcgtccggtgaggggcagcggcccgggctcggttccggcttccagcagcggcccgaaggcgccggagcacgctccccgctccccagaacgcagcttccgcggctgcagcccaggcagctcttcgggaagcgtccgcccgtggtctcgccagggggtttccgacctccccgcccgacagcgcaggggcgggggccgcggccggagagctcgcccgagagcaccccctcccgctgcgcctctgggcgcacgcgcagccgctgcagccttcctcttccggaaggcggctccctccctgcgcagcccggagcccctgagatcagcctcgagcaggcgcccgcgagggcggtgttccggacccgcgcggtgcggggaggccggcggaaactgccgaggtttcccgaaggcggc

SEQ ID NO: 14380 - DNA, 685 bp, Homo sapiens
  source 1..685: mol_type = other DNA
ctggccgggactgcacgcgctccttcctgcctcggggcgcagggtgagacttacgtctaaagggcgcccggcgagctcgcagcagcccctgccccgcggagggccggtggcgcgcggcgtccggtgaggggcagcggcccgggctcggttccggcttccagcagcggcccgaaggcgccggagcacgctccccgctccccagaacgcagcttccgcggctgcagcccaggcagctcttcgggaagcgtccgcccgtggtctcgccagggggtttccgacctccccgcccgacagcgcaggggcgggggccgcggccggagagctcgcccgagagcaccccctcccgctgcgcctctgggcgcacgcgcagccgctgcagccttcctcttccggaaggcggctccctccctgcgcagcccggagcccctgagatcagcctcgagcaggcgcccgcgagggcggtgttccggacccgcgcggtgcggggaggccggcggaaactgccgaggtttcccgaaggcggcagcgtccgagttgcccggatgtagttggtggagcggcagcggcggcaccagcggcggcggcggcggcgggaggaggagcaggcggcggcagcagcggcggcggcggggggcagtcgctctccgcggggctgagccggacgcgtcgtcttgcccccctcccc

SEQ ID NO: 14381 - DNA, 591 bp, Homo sapiens
  source 1..591: mol_type = other DNA
ctagagagcaggtttctaacctgatggttgtgttatacagctgaatttgaaaacactgtcttctgatatgtaaaacattggatatgtcaaaaattaaactttactgtacatcatgattgtcttaagatatgtgttagaataaagctaaacgattattttgagcgcattatgcttagttagaaatagtactcacattagtttattttggttagtatttttataccttaaaattgtttcccacaaagtgaaatgctttatttgaatcaaagaattggtaggtttgcaaaaatatgcatgtgcttatttatacatgtgtttgtgtatatcagctgtagagcagaaattgattatagtagtactgaatttctagttttcttttgactatcaaaaaatgattctaaatattctcagccaaatttttttattttttgcagaatcttattgtaacgcttaagcattaggttttttgtctgagaaactttaaagagtaaagcagaattgaaagtggaaattttaattttgtaagttcataaaatttaatgataatacaccaaagtttatgtttaaattagggagtttaaggtttcaatt

SEQ ID NO: 14382 - DNA, 496 bp, Homo sapiens
  source 1..496: mol_type = other DNA
tcctaaaggatccggtagggaagctctggcagattctcaagaagaattttgcaaatgctcagataatgagttttaaccttggaagggcagccccgcgatccctaataaatgaatttactcgtcccgcgtacccgggagaacctagcggatcaacagtcagtctgtctgggggggggcgaaggctgaatgcagaccccagcgctgggccgcctcccccgggctacctgcacaggccggggcattgtcactcgcccctgggggttccagaaaacgcagtgcggccggggaggacgaccacacggaccccctgcgtgtttcggggggcacccaaaagaagccccgcgctggggaacgctgaccacccgaggctgagccgtcagggtctcggaggcgggttcccgagccggtcccggggctgggctcccccggcgcctcgcgaaggtcactgacgcgcaggcctccgcaagggggagcgcgggagacggcagcgcaccag

SEQ ID NO: 14383 - DNA, 631 bp, Homo sapiens
  source 1..631: mol_type = other DNA
cagataatgagttttaaccttggaagggcagccccgcgatccctaataaatgaatttactcgtcccgcgtacccgggagaacctagcggatcaacagtcagtctgtctgggggggggcgaaggctgaatgcagaccccagcgctgggccgcctcccccgggctacctgcacaggccggggcattgtcactcgcccctgggggttccagaaaacgcagtgcggccggggaggacgaccacacggaccccctgcgtgtttcggggggcacccaaaagaagccccgcgctggggaacgctgaccacccgaggctgagccgtcagggtctcggaggcgggttcccgagccggtcccggggctgggctcccccggcgcctcgcgaaggtcactgacgcgcaggcctccgcaagggggagcgcgggagacggcagcgcaccagccgggcgccccagccgggcgccccagacgccggcgccgctcggagccgccgggcaggtcccccagcgctcgcgtctgggcccgccccccgctgcggggcggattgacaggagcccggcggccaatcggacgccgtggggcggggcgaggcggggcggtgcaggccggctcccggcgcggggcgctatttacggc

SEQ ID NO: 14384 - DNA, 768 bp, Homo sapiens
  source 1..768: mol_type = other DNA
tacaagcccatgtgaaaggcaatttggcaaatatctagcaaaattacaaaattataccctttgatccagcaagatattcttgtaaagttacaaatgacatatgtacaaaattactggttgtaatatgtttacaatagaagaataaaataacatcaatatgaaattggctaagtatgctatgttgtatctgtataatgcaatactatatgaacttcaaaatagatttcaacttaaaatataacgattagttaggtgcagccaacaataaacttctacttagatctacatattctaatgagaattcatttcaaatgtgtcactaaatctgaacattgaaataaattagttattgattcacaaagtgttaagccaaatttttcaaaaataataaaatcatgttattacaaaaatattttattaataataatttgactatagcaaatgtgctgttaataaatttttaatgttaatttcacctctatgtcattaattttcaaattttagttttatgtatgttgataatttatgtagcatattagtactgaggtacagaagtatgatttataactcaatgtacatctaaagaggatacatgcttaactttctttattaatggaatttttggccctggcccacctgcctcagaacacaagcatgcaggatgatacagcttttagtgccaagaagtagaattctagcaaggtggtgagaaacaaaggattaagaatttttctttctctaacactctaaagaaatgttcttgagcta

SEQ ID NO: 14385 - DNA, 451 bp, Homo sapiens
  source 1..451: mol_type = other DNA
tgagaaccctgacacccagaggcataccactgggaggccccgcgcagcacacagcttttgctgaattaagactctctgttcttggtaccgacagggacagagacctacaattgtaagtaaacatgtcagtggccttttaatgtttaaaaaaatgcatatggccatttaagtgaggtgagctacctgagtttaagagaaaatatttgtattttcgagaaagtacttccagcacaatgctacagaggttacagaatttgtaaacttgtagagacatttactttttttagcctaaaaaaactaagttagagaaatgtttgctcatccaaatctgtatgctgttgtatttttaatttctctatacaacaagctgaaagacagtcctaattgcatttgaagtagctgctggccaggcctgctgcaacagctgatgggctcctctgaatttccaggg

SEQ ID NO: 14386 - DNA, 409 bp, Homo sapiens
  source 1..409: mol_type = other DNA
gtagaatatcacccatgaaaaaatttctggcttaaaagaaaccctgcttttatttatttaagctccagcctggagtgcagtggtgtaatcacagctcactgcagccttgacaggatcctcctacctcagccacccaagtagctgggaaggcccaagaaacaaaccctgcttttagaatctttttttttataacttctagcaacttccaatcatgggcaggctttgatttcttgattttaaaagagcaagactaactgcctctccagagaagcctgcattggctgctcatcatgatgaggggttttcagagaatttactgattctcttttctgctcagagtggatctgtgcaaataacttttgtttctcaaaaatttggtgtgtgctgtgtcacaaacctcggccccaaa

SEQ ID NO: 14387 - DNA, 668 bp, Homo sapiens
  source 1..668: mol_type = other DNA
cgagagccagcttgggcaggggacggtgccgcaccaccaaggccccgcgctagtgtgcacccccggcccgggcccggcaggtgggcgaggagggcgggcgcagtcgggctctgcagcagtgtgggcgcacccccgggaaggtctcggagatgtcctctttcgctcaggtcctcaggggacagcctgagtcactcgggcgacagagcgagttggacagccacacccccggccgggagagcgatagggcggccctggcctccagcccctgggatcctaaagccccgcatctccggggctgcagcgggggctagcccaagcatcttcccagccctgggaccgggggggcgtgactgccaccacttagtttccaaacaaagtaaaatccttgggccacctccgaggacgcggctggacccgctggccgtggagggggtcggctccgggcgcgacctggggcgtggggacagctctggtgcttcccccgagagtcgtcccagcgtggtccccgcgcactggcccctgttttgggcccagtccgagggtgctcccgcctggtggcccagcagagggcgccagctcccggccgccgcgcgggtcgcaaggggtggggacgcgcgagcctccatcccgagcggggacccgctccccgcgcggtgggaacgaggcgg

SEQ ID NO: 14388 - DNA, 510 bp, Homo sapiens
  source 1..510: mol_type = other DNA
tcatatagtgtctttaggagaaaagaagaacagtcttccagactccaagactgtgagaaaatcaatttctgttgcttaggccacccaatctgtggtcttttagagcaaacaaaaacactcgcttttcttttttgtctgatggtgcatattcaggaggaaaccaagtaacatacttaacaggttgaaatttatctacttatctactgtcgggccccacagtcccgcgactttttcacaggtgcgcgtggccagcaaggacggtctcctttgcaactggcccacaggagactcaaaggggcctctcagggctccagaagcggctgcctccgggcagcagagccggtgagagccagggagccctgagccgctgggcgcgtgcgcgtgggcgcgtccctgggccgggcgcgcgccgagggggtgggtggcgccggccccgccggcctggcgcgcggtccgagccactcagagcgcctggcggccgacacccgggggccctacaattaataccgg

SEQ ID NO: 14389 - DNA, 242 bp, Homo sapiens
  source 1..242: mol_type = other DNA
tttcccaggcacccgagcaagggccactggttatgacacttgaatcaagggcagagctctgactttaaactttgactccaaccacttgaattttaatttgaattgaggcatattggatgtcctcacatagagaggttaaaagcctttccattattttactctgtagctgggattacaggcatgtaatcaagccaccgcgcccgggctctggttcagagtaggtggagcgctccttctatgga

SEQ ID NO: 14390 - DNA, 194 bp, Homo sapiens
  source 1..194: mol_type = other DNA
actttgggtcgtgccactgtactccagcctgattcccagctacaactttttttttctgtctcaaaaaaagggccacactttggggtggattgcttaagcccagcagtttcaggctgcagtgagctatgatcaccacagcactccagtctgtggcagtggtgtgctagtaaatacttaagaatcagctttctgaa

SEQ ID NO: 14391 - DNA, 417 bp, Homo sapiens
  source 1..417: mol_type = other DNA
gcctgggacaccccacctcctgggccgtaggtgggggggggtcgaccttacatggctcctagctctccggagagtttctctagaactctcttccggttacacctggagtaaaagcttgaccgcttcctaatgaggcggtgcctgctggcgggctcccagccgagcgcccaacaaccaggttccgggtcgcggttccaagaagccccgaagcttccccggcttcccgcagcactgctgggagggcacacggcgcctctgtccccaccccagagcgtggggcgcgcggaaaaaggtctggtgactgccctccccgccgccccccgggagcgtgccctcccgccggaccctgggactccagagaagcgccgatcaccaggcccgggggaaaactcgtccccgtcccaggctccgattcgg

SEQ ID NO: 14392 - DNA, 439 bp, Homo sapiens
  source 1..439: mol_type = other DNA
gagagtttctctagaactctcttccggttacacctggagtaaaagcttgaccgcttcctaatgaggcggtgcctgctggcgggctcccagccgagcgcccaacaaccaggttccgggtcgcggttccaagaagccccgaagcttccccggcttcccgcagcactgctgggagggcacacggcgcctctgtccccaccccagagcgtggggcgcgcggaaaaaggtctggtgactgccctccccgccgccccccgggagcgtgccctcccgccggaccctgggactccagagaagcgccgatcaccaggcccgggggaaaactcgtccccgtcccaggctccgattcgggccgcagctcacgtcccgcgccgcctccagctccgcccgggcgcccagagggcaaatgaggggcggcggaatttcccagcgcgggggctct

SEQ ID NO: 14393 - DNA, 508 bp, Homo sapiens
  source 1..508: mol_type = other DNA
cgcttcctaatgaggcggtgcctgctggcgggctcccagccgagcgcccaacaaccaggttccgggtcgcggttccaagaagccccgaagcttccccggcttcccgcagcactgctgggagggcacacggcgcctctgtccccaccccagagcgtggggcgcgcggaaaaaggtctggtgactgccctccccgccgccccccgggagcgtgccctcccgccggaccctgggactccagagaagcgccgatcaccaggcccgggggaaaactcgtccccgtcccaggctccgattcgggccgcagctcacgtcccgcgccgcctccagctccgcccgggcgcccagagggcaaatgaggggcggcggaatttcccagcgcgggggctctggcttaccctgcacagtctctttctgtttacggagagagaggcggtggctggcgtccgctgcgccgcccctgggcaggctcagacgccgtgagtcaggggcagagcagggcggtctgagc

SEQ ID NO: 14394 - DNA, 709 bp, Homo sapiens
  source 1..709: mol_type = other DNA
cccagcaattcaatttccaggaatgtatcctacagatattcttgcaaatgtacaaatgacaaatgtacaagattactaattgtaatatgtttatcatagaagaaaaaaataatggaattggctaaatatgttatatctacacaatgtaatactatataaacttaaaactagatttcaacaagatctttgcattatttgcagatggaatttaataaaatacaataattagttaggtacaactaacaacaaacttatactgagatctacatattccaatgagaattcatttcaaatgtgtcattaaatctgaacacagaaataaatggaccttcaaactagctctttattgagtcacaaagtgttaagccaaatttttaaaaaacaatgaaatcatgttaattatacataaaaattttttatttcttttgttttgacaatattttattaattaacaatataactatagcaaagaaatgtgctgttaattaatttttaatgttaatttcacctctcattcataatttatgtagcatattagtacagaggtacagaagtgtgatttataatttaatatacatctaaagaggatacatgcttaactttattaatggaatttgtaatccaaagaagtagaattctagggtggtgagaaacaaaggactaagaatttttctttctctaacactctaaagaaaggttcttgagctag

SEQ ID NO: 14395 - DNA, 490 bp, Homo sapiens
  source 1..490: mol_type = other DNA
gtgttctatggtacagtagggtgactttagttaataataacatatttcaaaatacaagagaagctttgaatgttctcattaaaaaatgacaagtatcagactgtattccataaatatatacaattattatgtgtcaaaaataaaataaaactttaaaaagatgtcagtttggtcacacacatatttacgtaaacatagtttatcatagtaccataaaggatgtaatcccactcttgcttcaatcatgagaaagtgactgcatgaatcctttggcttgattatctatgtacaatagtttatttagtaagacgaaaatggttataagtgtttgaaaaattgtttgttttagaatatcttagagaaaattggcctctcagaaataattttaccttataatgaactttgcaaattgcttctgcaaaatcactagaataataataagttacaaaaatcaacgttgtaataatatgttactacctaataaaatgcc

SEQ ID NO: 14396 - DNA, 321 bp, Homo sapiens
  source 1..321: mol_type = other DNA
gagacagagaaacactctgcatgtttatccggatcaccgtttgttgggggcccgcgggagccgggagccaggggcgggagccggaaccccgacttcaggctttgagtgaggctttggtagagcagtcgccgccgcaggcgccccggtcggcgaagcccacaggcatgcgggcgcagaggccgtctgcgcctgcgcggggtgtcgagctcgagggcgtggagctcgggggcgtgtctcccgccgcggcgccggggcggggcgagggcggagcctgggggcccagcggcccgcgccccgtggcttgacctccccgactgctgg

SEQ ID NO: 14397 - DNA, 255 bp, Homo sapiens
  source 1..255: mol_type = other DNA
gtaaaagtgaatcttgccattttcaatatacgagagtgtaagaattccacaagccaaatgttaatattttgtcagaactcattgcttctgagagtataaaagagcaaagaggccgggcgcggcggctcacacctgtgatcacgggagatggagaccatcctggccaacagggagacagagaaacactctgcatgtttatccggatcaccgtttgttgggggcccgcgggagccgggagccaggggcgggagccgg

SEQ ID NO: 14398 - DNA, 581 bp, Homo sapiens
  source 1..581: mol_type = other DNA
tgcctgtacttaaaatgatcattaagactaatgattctagttttggcattgaggatgaatgcagatatatagacataatgtatagcaaagaatatttacagtcacatttcatggaccaataaataacgcatttacttctcaaaatgcccaagaaaatgtgggagagaaaatgttcatttatattcaagattaaactttctaactttaaatcatcagacttcagctgtaaatttatttcagttgaaaggtttgaagacattattaatgaatattctaaaattccggaaggtgtttaaaagataattttaacctaataaaaaaatcctacaaaaattataagcataaatttattgagcacctactatgtgttctctatcaataactgctacattgttaatttataactatattacttgaaatacagctcagcttattacctaaatctaaattctacttaatactgaagacgactttcttgatatttgtggttatctgtatggtcttttcagaaatcccaaaacttgtttcagagatcacatctgagcacctaggatcccacggttctacgcgaggtgagacaa

SEQ ID NO: 14399 - DNA, 458 bp, Homo sapiens
  source 1..458: mol_type = other DNA
agcacctaggatcccacggttctacgcgaggtgagacaagcaccgtgtgggtattactcattccgtgaagttcagggggaaaccaggcgtccctggaagggtccgggctgcgcgggtcaggtagcctctctccggtcgccgatcaagggaactccccggggagtccagaccgcgatccctttccttggccccggggtgcggggggcggacacgcgaggcgtgggtagccctgcctccaggaagcaggcaggcggggacctctgggcgctcggaggggcagctccgagggcacagggtacagggagaatcagccagatccctccctgccccgggcagccgcggcgggtgtggccagcgcggaggcaggacgccgccgagcctcgacagcccgtcgccttgttgccgcaaaccgcccggtccctagcaacaaggttccggccgtagagcgagagcctcta

SEQ ID NO: 14400 - DNA, 467 bp, Homo sapiens
  source 1..467: mol_type = other DNA
ttctctatcaataactgctacattgttaatttataactatattacttgaaatacagctcagcttattacctaaatctaaattctacttaatactgaagacgactttcttgatatttgtggttatctgtatggtcttttcagaaatcccaaaacttgtttcagagatcacatctgagcacctaggatcccacggttctacgcgaggtgagacaagcaccgtgtgggtattactcattccgtgaagttcagggggaaaccaggcgtccctggaagggtccgggctgcgcgggtcaggtagcctctctccggtcgccgatcaagggaactccccggggagtccagaccgcgatccctttccttggccccggggtgcggggggcggacacgcgaggcgtgggtagccctgcctccaggaagcaggcaggcggggacctctgggcgctcggaggggcagctccgagggcaca

SEQ ID NO: 14401 - DNA, 418 bp, Homo sapiens
  source 1..418: mol_type = other DNA
aacgccgccgggagccgcgcggatgggggcgagctgggctgttacctgggcttagagaccgggaagcaccacagacagatccccctcccggggcagacgaggtctctgcgccgggacgacggacgcgcggggctgctacttgcaccgcagctgcagtgtttattgatttgtgctgctgtgccaacacacacccagcagcgaaatgtctgcctgtggcgagagggcgagacttgtccgcccgggggcggcgggagcgcagggagagcagcccccgcctgcgccgccccggtaatgggcggcaacggccctgccgccggccgcagcccaggctgaccgtatttttaaaacgacttttaagagaggggcaataaatttagagatcccctctgggatgcgaaacgcgaggttttgtaacctt

SEQ ID NO: 14402 - DNA, 515 bp, Homo sapiens
  source 1..515: mol_type = other DNA
aaaaatcaacaactggttaaggaatgagtagttactgaagtcccagacctagaagccagctctcatttgaaagctgaggaccctgtggcccccgcagggctcgcaccctcagggccctggagcggctctccgcgtcccaggggtctcctcagtcccgagtgtgcacagcgggtcctgccacgtaccctggcgaccccagcaatggactcagtgccccgggtcccttaatttccgggcccgtgaacgactgacccacgcccggccgcagctccaggggccgacgaagggagcgctagggcccacggcagggccgtctttgcccgggctgcaggctcccgcgccggcccgagttcccacaccgtacgctggctgccccctattcggatccccgccgggcgccgcacccgtcccggagacccgcgcccgcccagctcgcccgggccatcacgtgagcctcccgccccgcccccgcgcgtcacgtgagccccgcccccgcgccggcgcgctccgacgtg

SEQ ID NO: 14403 - DNA, 448 bp, Homo sapiens
  source 1..448: mol_type = other DNA
tagaaggcaaagtcaactattggtcttccttggataaagaaatttacctaggccttttataaagaccatctttgtgtgatgggggctgagggctcttccccctcctcaattccttaggaaaatttgaaagagctacccttcattgaacttttttctggaggaataaaatgaaagcaacacttccttttaggaatatagtactttctgtttttaattttaaagctgatttatttaaacaaacgacattaagtagttaaagtgggatggcgggtgggagctgccgccctgcctccccaggaacttctgcgacaggggcagtgcagtaaaatttgaatctgcgaccccgggccaggagtggtggtggaaacagcagcccggccgccgcggcagggtgcgagcgcgcgcaccgattggtcgccgggccgcctggcccactgcgcctgcgcag

SEQ ID NO: 14404 - DNA, 728 bp, Homo sapiens
  source 1..728: mol_type = other DNA
aatgttacaaagtttttcagaatcatgagctagatataaagaactggctttaaattctgaagtagatcttgcttttaacctttgcttcagttactatttaaaaagtaaatatgtgtagatgaaaatgcaggatttaaaaaaatctactttgtagaataggatacctatcatttatattaagcccaatgcgtgggaaacggataaacattataatccaaagttgcattaggacataaaaataactgctgataaaagtttactcaaagtagcatctgcttgaaggcgccgcgggaactaggctgtgcgttcgccccccgcggcagacggcggcgcgcggcgcctctggagcgcccctccgaagccccgtgggggcggccgtggccccggggcagccgctggcgagcaccccagaggtccgagccctccgagccccaggtgcccggggcccgagccccgcctgccactctccccagctgcctttccaaacggcggcgtgctgggcaccgagagcacgacccaagagccggcgcccggtgtccgagcgcccagtccgccctgtccgcccccggacccgcgaagggcgggggcccggagcagcgaggcgcgggaagcgaggccggcgggtgccgggggttggcgggacgcgcgcttcgtgccggcgccggcctcgagcccgcgctccctccccccgcccgcgtgcccgcgccgctgcgcgatgcagtgtgggg

SEQ ID NO: 14405 - DNA, 487 bp, Homo sapiens
  source 1..487: mol_type = other DNA
agtaaatctctagtgattgatgttcttttcaaaacaattttaaaaaactaataatgaccagcacagactcaatggtgtactttcagtactgtatttcctggaggccacacagccattttgtttgtaaggcagagtggtagaattctgtcagccagtaaaggtttttgaaacagtttttttcatttaaccgctaaattcattattttattttactttttgcacacatcgtagttactgtgagtaagaaattatattttttttcccaaggaattaaagatctcggagctaaaggagtcatgaccttcatgagatcaaatcgaaaaaatattttgatggacatcgtttttcaatctgctcaagaaaaacatgataatgctgttttaaaaaaaaaaaaagctgtgcttttaaaagcccagtgtaaaatggcacacacacgatagtgcagactgtagggacactgccctcccagccaatcagcgctcgcctg

SEQ ID NO: 14406 - DNA, 457 bp, Homo sapiens
  source 1..457: mol_type = other DNA
cgagtgatgcactgtcatgaatgacagaacatttctggtacaccagaagatgtgttgttttcactcctagtggtgtgatggagctagcctacaccagctcgctgaaattttcaggaatctcttgtgaggcattcagattttactggaaaattagaaataattagatataatgaattttcagagttttagaaaatagttgaaatctactaagtcaaatctaaacaggcattattaacagttaaattgtatcaattaatattttaaaatattaaaaacattttacttcgttcaacttaaagacaaaattaatatatttcttgaggtcaaattatctaaaaaactctaccttgtaaaattgcatcttaaaagttaattcctagtgtacacttccgtgcgagcttagagtggtaatgaacttctggttttgtagctgaagcccaggctaggccaaatgcct

SEQ ID NO: 14407 - DNA, 536 bp, Homo sapiens
  source 1..536: mol_type = other DNA
acagaacatttctggtacaccagaagatgtgttgttttcactcctagtggtgtgatggagctagcctacaccagctcgctgaaattttcaggaatctcttgtgaggcattcagattttactggaaaattagaaataattagatataatgaattttcagagttttagaaaatagttgaaatctactaagtcaaatctaaacaggcattattaacagttaaattgtatcaattaatattttaaaatattaaaaacattttacttcgttcaacttaaagacaaaattaatatatttcttgaggtcaaattatctaaaaaactctaccttgtaaaattgcatcttaaaagttaattcctagtgtacacttccgtgcgagcttagagtggtaatgaacttctggttttgtagctgaagcccaggctaggccaaatgcctctctcggcgcgcagctcacgctcgcagcgtcagcgacgccggcggcgccaaggcgtcgtggcgtcgggcgcctgggacgtggcttcaacggccccatccggc

SEQ ID NO: 14408 - DNA, 524 bp, Homo sapiens
  source 1..524: mol_type = other DNA
cattctcataatgaatgtttttttttttaagaggtgaaacagaaactgtactccttaggaagaaacttttccttctttcgtgacacccagccccatggagccctgcagggtaggggggctcacggtcccgatttgcctcgggactcagggggcttccgagatgcaggatctcccgggggaacgcgcggggctctagggcgcgtccgactcctcccgcccttcgcagaggaggaaactgaggcacggcgactgtctcaacgcagtcccggccctgccccccgcggcctccctcaggcgcgctcccgcgcatccgcctcctcctagccccgggccgggctgacgcggcgggagaggaatgcgtttccggagggagagggcggcggcggcctcgggagcgggatcagacgcgcagaggaggcggggccgcggctggtttcctgccggggggcggctctgggccgccgagtcccctcctcccgcccctgaggaggaggagccgccgccacccgccgcgcccgacaccc

SEQ ID NO: 14409 - DNA, 514 bp, Homo sapiens
  source 1..514: mol_type = other DNA
cattctcataatgaatgtttttttttttaagaggtgaaacagaaactgtactccttaggaagaaacttttccttctttcgtgacacccagccccatggagccctgcagggtaggggggctcacggtcccgatttgcctcgggactcagggggcttccgagatgcaggatctcccgggggaacgcgcggggctctagggcgcgtccgactcctcccgcccttcgcagaggaggaaactgaggcacggcgactgtctcaacgcagtcccggccctgccccccgcggcctccctcaggcgcgctcccgcgcatccgcctcctcctagccccgggccgggctgacgcggcgggagaggaatgcgtttccggagggagagggcggcggcggcctcgggagcgggatcagacgcgcagaggaggcggggccgcggctggtttcctgccggggggcggctctgggccgccgagtcccctcctcccgcccctgaggaggaggagccgccgccacccgccgcg

SEQ ID NO: 14410 - DNA, 389 bp, Homo sapiens
  source 1..389: mol_type = other DNA
gcgagaagcagccgccacctcccgggcgctccgcactgcgcggcggcgggatctgcgcctgcaggagctgcccagctctccctctaggggtgcagagcgagcacgcgaggtgggctggccagaccctgcggctggcactgacctccgcgccctccgacgcccgcacccacgcgaccggggcgcagactccttcccgcggagatccctgcagggtctctgggaaagctcggagggaaagttgttcctcccagtctcctgtcaggcagttggtgaaactccctgggcggaaacaagccggatttttttcctcgttctcccgcgtctgcctgcggacccggagaagggagaatggagagggggctgccgctcctctgcgccgtgctcgccct

SEQ ID NO: 14411 - DNA, 577 bp, Homo sapiens
  source 1..577: mol_type = other DNA
gcctccgcggcgcgcagagggcacccagccgcgcgccctgatgcgggccagggaggccgcgtggggctgcagcccggcctcgcccgcccaggcggtctgtgctgctcgcccggcttcgcggtgcggctcctcgccctccagctctgggcaggggcgtccaggggtgccccgctgctccccgccacaggtctcaggatggcgcgatgaggagtggcagggggtgaccctgcgttcctcgccgccgagggcgcgggccccgggatttgaagttgcgagaagcagccgccacctcccgggcgctccgcactgcgcggcggcgggatctgcgcctgcaggagctgcccagctctccctctaggggtgcagagcgagcacgcgaggtgggctggccagaccctgcggctggcactgacctccgcgccctccgacgcccgcacccacgcgaccggggcgcagactccttcccgcggagatccctgcagggtctctgggaaagctcggagggaaagttgttcctcccagtctcctgtcaggcagttggtgaaactccctgggcggaaacaagccggattttttt

SEQ ID NO: 14412 - DNA, 724 bp, Homo sapiens
  source 1..724: mol_type = other DNA
cccgccactctttccctccctcgggatgcacagagaaacgggggccgcccgacccctgcacccctccctagcacctgggctcccagacaaggttgggcggggtcgggcggcgattgcccccctgcttggaaggcgcagcacctcccaggtgttccctctgccccagaggaacgggcctccgcggcgcgcagagggcacccagccgcgcgccctgatgcgggccagggaggccgcgtggggctgcagcccggcctcgcccgcccaggcggtctgtgctgctcgcccggcttcgcggtgcggctcctcgccctccagctctgggcaggggcgtccaggggtgccccgctgctccccgccacaggtctcaggatggcgcgatgaggagtggcagggggtgaccctgcgttcctcgccgccgagggcgcgggccccgggatttgaagttgcgagaagcagccgccacctcccgggcgctccgcactgcgcggcggcgggatctgcgcctgcaggagctgcccagctctccctctaggggtgcagagcgagcacgcgaggtgggctggccagaccctgcggctggcactgacctccgcgccctccgacgcccgcacccacgcgaccggggcgcagactccttcccgcggagatccctgcagggtctctgggaaagctcggagggaaagttgttcctcccagtctcctgtcaggcagttggtgaaactcc

SEQ ID NO: 14413 - DNA, 768 bp, Homo sapiens
  source 1..768: mol_type = other DNA
cgtgggcactgacccttctccggggcctgatcggtacttctcggaaaaccctcggggacgggcctggggggcatccagcgggctgggggcacgagccggcgtgcacgttgtctgtggccgggagcggacactgagagggcgcagcgaagagcacccctcccccgccactctttccctccctcgggatgcacagagaaacgggggccgcccgacccctgcacccctccctagcacctgggctcccagacaaggttgggcggggtcgggcggcgattgcccccctgcttggaaggcgcagcacctcccaggtgttccctctgccccagaggaacgggcctccgcggcgcgcagagggcacccagccgcgcgccctgatgcgggccagggaggccgcgtggggctgcagcccggcctcgcccgcccaggcggtctgtgctgctcgcccggcttcgcggtgcggctcctcgccctccagctctgggcaggggcgtccaggggtgccccgctgctccccgccacaggtctcaggatggcgcgatgaggagtggcagggggtgaccctgcgttcctcgccgccgagggcgcgggccccgggatttgaagttgcgagaagcagccgccacctcccgggcgctccgcactgcgcggcggcgggatctgcgcctgcaggagctgcccagctctccctctaggggtgcagagcgagcacgcgaggtgggctggccagaccctgcggctggcactgacctccgcgccctccgacgcccg

SEQ ID NO: 14414 - DNA, 442 bp, Homo sapiens
  source 1..442: mol_type = other DNA
gggcgtctgcgttaagcgccggcacaaaataaatgtatcagaattgcgattttcaggcagaactgccgctgccggccctgcagcagagctagggagcgggcagggcagaaacccagccgagcaagctgcaggctcgagtccccgcgggcggagaggctcgggctggagcctccggggcggtgaggaggggactcaccgcactgacgtggaaggggcgtccccgaggaggggcgacgcagccctgcagggtgctgggcgggcgcctgggccagggctggtgggggcagacggccgcctgcccgtgctggcactggggcgaggggtcccgcgcccccggagggagggaggtcggcccccgagggcggtggcgggggcgcgagctgcggtcctgcgctccgccccgcgcgggtagccggccgcgcctccccctgccgcatgtgcg

SEQ ID NO: 14415 - DNA, 368 bp, Homo sapiens
  source 1..368: mol_type = other DNA
gcactaaggccgggcttttgttcctctgtttttatcagctttaccgtttaaaactccaaggatgtgaagtttctttatcgaaaatacatgtatgtccaagaaattctctgtagataaaagaaaaagagtttgtcagagaggaaaagtagttttgctaatttatttttcatttgcaaatctgttgcaacatattaatcactttttccacacgaagcttggctcccccctccctaccgcccctgtcccgccggggagcggcggcggccttggatgtctttcctcgcggagacaggtgagtgtcggcgcgcgggctccccgggcttcgctccccaccccccgcgtctccggggccggtggcggcggccggc

SEQ ID NO: 14416 - DNA, 318 bp, Homo sapiens
  source 1..318: mol_type = other DNA
aaaggtctcagggatttccagaggtctggggaccacactaatggaaacatactgttggattgaatttcgtatataaaaaccctttactgaaataaaggcactaaggccgggcttttgttcctctgtttttatcagctttaccgtttaaaactccaaggatgtgaagtttctttatcgaaaatacatgtatgtccaagaaattctctgtagataaaagaaaaagagtttgtcagagaggaaaagtagttttgctaatttatttttcatttgcaaatctgttgcaacatattaatcactttttccacacgaagcttggct

SEQ ID NO: 14417 - DNA, 272 bp, Homo sapiens
  source 1..272: mol_type = other DNA
gctctgtcacccagactggagtgcagtggaacgatctcagctcactgcagccttgaactagctgggactaccaccactcctagcctcaggcatgtctgcctcccaaaatgctgggattacaggcgtgagcaagtgttgggattacaggcccgagccagcgggcccagcaagattcagctactcaggaggctgaggccggaggatcgcttgagcctagcccagcctgggcacgcgcggcgcggcacgggcagcttccggtttccagccttgcc

SEQ ID NO: 14418 - DNA, 281 bp, Homo sapiens
  source 1..281: mol_type = other DNA
cctcaggcatgtctgcctcccaaaatgctgggattacaggcgtgagcaagtgttgggattacaggcccgagccagcgggcccagcaagattcagctactcaggaggctgaggccggaggatcgcttgagcctagcccagcctgggcacgcgcggcgcggcacgggcagcttccggtttccagccttgccgcttcactcctgctggcggccggcagggggcggagttttcctcggggcctcccccgggaggccgtcccggcgtgggggaggggaggacgggg

SEQ ID NO: 14419 - DNA, 291 bp, Homo sapiens
  source 1..291: mol_type = other DNA
aagtgttgggattacaggcccgagccagcgggcccagcaagattcagctactcaggaggctgaggccggaggatcgcttgagcctagcccagcctgggcacgcgcggcgcggcacgggcagcttccggtttccagccttgccgcttcactcctgctggcggccggcagggggcggagttttcctcggggcctcccccgggaggccgtcccggcgtgggggaggggaggacggggccggggtcggcagggaggccgcggctaccgcatcacagctgacgtgaggtacgtggg

SEQ ID NO: 14420 - DNA, 492 bp, Homo sapiens
  source 1..492: mol_type = other DNA
ctactaccactcatgatagatccaaggtctttgactcttgagtaagtcataatgaatggtgaatcttagtaaaatgaggcaaagtttctgcaattatgctagcctataggacagagttgtttactaattagaaaacctggcagtgatctctgcccaaacctctctggatgctttagctagggagaggaaaagtgtccagaggcctcatcagccttcaaggcagacaccaggggcttgaaaggtcctggaatttcttcggcctatgttattatgagggcataacagtgactgtgatttttatcagtctagtagaatatcatatgtcacacatttaataaaaataattcactggccaggtacagtggctgcctgtaattttgggaggccaaggtgcccagctactcacagccatagttaagttctatctccaatttctctgaagaagttagagggtagtttatactctggcctaagaaaggcttcactgtactg

SEQ ID NO: 14421 - DNA, 509 bp, Homo sapiens
  source 1..509: mol_type = other DNA
ggaaatgccaatatatggttgaacattcccttataatcactgaattatccaaataaaatttgacatttaaaaaaaatgtacaaatagtaattttgatttatttatgaattttaaaaatcccaaatgtcttttcagggggttttaatctgggaaaataaggtattagattgaatcacatgaaactgctatttttagaaagttcaaatatcagcttcaatctagtagtttactacataatccattggcacagtgaatttttaaaatttaattatctactccctttaagtgaaagtagcaaattctgtatcaccttaggaagagttggattttttgatggtgtagcaaatggctcagcaaataaaaatgtttgactatgaaatatggtattgatacaatcatgtaacttttaatgctaaaagagacattattattattattattattattatttgctagagaaacagatttctatgttggcagtgataggctagtgatgtcattgtgatgtc

SEQ ID NO: 14422 - DNA, 129 bp, Homo sapiens
  source 1..129: mol_type = other DNA
gcaccaaggggctgggggtaaaacattctgccccattaaggacaaatactaagctacaatgatatttttagttcatagtgtttgtcaagaaacctctaagccctgaggagggccatgacctagtgatga

SEQ ID NO: 14423 - DNA, 94 bp, Homo sapiens
  source 1..94: mol_type = other DNA
caggctggagtgcagtggcatagatcatatctggtaggtctggagatttaagcagctgccatctctttattccttaacactttatgatatacta

SEQ ID NO: 14424 - DNA, 854 bp, Homo sapiens
  source 1..854: mol_type = other DNA
gtacgcccagaggctgcggggccccgggcgcctaggctgcgcgggcgaagccccggttatgcacgggtcgccgagaccggctgggcaagcaagagcagccgggccgccccgacgttggctgtgcgactgttgccgcgggggcgggtagggggctcggcgggccgcactcaccgctgcaggttgcagcccggtccgtgtctggccggtaggactccagccgggagtgggcattcctcgacacgcagcacgaggtagtgttcccttcggcgttctcccagtccccgggagcggggcgcgggtggacgcggggcgcgggcggcgggggcgtgtggggaggcccgcccgctcgccgccacgggagggggcggaacggcggccggccgccgggtcagcagcggcggcggcggcggggcctcgccatgggcggcggcggcggcggcggcgacgagcgggcgacggccccggctccccctcggccggcctatccgcggcggaggagcgctcgggtccgcgcgactgcggccgccgcgcctacctcaccccgccgcggccatggcgggcggcgccgcgcaggccgcctcccccccgcgcttccccagttggtgtccgcttccccggcggctgcggcgacggcggccgcctcggcaagaggttccggttcaagccgggggcacgcgtgtccgcgccggacggcgggactagccgacgagcgggcgggcagcgggcgtgggcgcagcccccggactcctcgcggcgcggtgcggcgcggccagggaggatgctggcggccctccctcgccagcggcgcccgccctcgccgcagcccccgccttccctctgccctggaagcagat

SEQ ID NO: 14425 - DNA, 824 bp, Homo sapiens
  source 1..824: mol_type = other DNA
cgcttcagcctgccactgccctccagcctgagaggcaggtgcagcctcagcgccctgggcctgcgtccccgaccgggccctggctgcgctcccgcccgctgcgggccccggggacgcacctcgcatcccgcgctgggccccgttccgtccagcccgggggagtggaggaggcgaggtggggaagggcctccagaaaccgagctcccgacgacgtctcccgcgaccccagtgcccgagagaggagcggcccccgggagcgatcccacaaccgcgcggggctgcgccgccccgaacctccccgcggccgccgatctgcttccagggcagagggaaggcgggggctgcggcgagggcgggcgccgctggcgagggagggccgccagcatcctccctggccgcgccgcaccgcgccgcgaggagtccgggggctgcgcccacgcccgctgcccgcccgctcgtcggctagtcccgccgtccggcgcggacacgcgtgcccccggcttgaaccggaacctcttgccgaggcggccgccgtcgccgcagccgccggggaagcggacaccaactggggaagcgcgggggggaggcggcctgcgcggcgccgcccgccatggccgcggcggggtgaggtaggcgcggcggccgcagtcgcgcggacccgagcgctcctccgccgcggataggccggccgagggggagccggggccgtcgcccgctcgtcgccgccgccgccgccgccgcccatggcgaggccccgccgccgccgccgctgctgacccggcggccggccgccgttccgccccctcccgtggcggcgagcgggc

SEQ ID NO: 14426 - DNA, 281 bp, Homo sapiens
  source 1..281: mol_type = other DNA
tttcatgacagatttaacagacatttattaagtgattgaaatcccacggatatgggttgtcgtacacccgttgggacacccaactgagtttcagatttctgcctgcaccaatgacacaggaattcagaattttcaaggaggaaatgcctttttaatagagaaatttacttggctagttagcagaagttttctttctaaagtagttgctgctattatatcctgaagcatctggctgtcctggtggggacatatgagcgctgccacaggccgggaatatccca

SEQ ID NO: 14427 - DNA, 475 bp, Homo sapiens
  source 1..475: mol_type = other DNA
agttaaacgttaccatgcatgatcgtgaatgaattcaagcatgacagaatcctggttccaagcaggctgttttgcaggagagccttatgatgaccagcatgatatataattgtgagaaatatactgaacaatttatgtgtcagacaccggtttaaatgcttttaggttgcgccagagctgacaggcaccgtctagcgccgcgagtccttccctggactcccaatccctcgcctccggaggcggcgaggagcggcgggtgagccccggagcactgggcgagggccagggggtccccgcgctgccctgaaggcgggcgggcggcggctagacctcggcggtggggagggacccctggcgcctgcggcgacggtgggacgagggcgtctgggaacgcgagttccggggctcccgggggtccgtatgcgtccagtccctgcgcctggcgctcagcgaagtccacgcgcgtgcgtagcgt

SEQ ID NO: 14428 - DNA, 439 bp, Homo sapiens
  source 1..439: mol_type = other DNA
ttaagtctgaataaactctgcagttcagttaatagtacttgtacctatgttattttcttagttttgataaatataccatggtcatgtctcttctgtaaatctgaaattatgagcaaatgaaaagtttaaaaaagtggacaatgacccaggagttgattttttaaatgaaaagttgctcaaacggcttttttttttttaaacatataaacaattttatgtttgggtctcagagaataacagttaaacgttaccatgcatgatcgtgaatgaattcaagcatgacagaatcctggttccaagcaggctgttttgcaggagagccttatgatgaccagcatgatatataattgtgagaaatatactgaacaatttatgtgtcagacaccggtttaaatgcttttaggttgcgccagagctgacaggcaccgtctagcgccgc

SEQ ID NO: 14429 - DNA, 536 bp, Homo sapiens
  source 1..536: mol_type = other DNA
cacatgacaatatatacgtttttttctagatgattctacatgttttaatgtaataaagttattgaccaggaaatatataatttgttttacatatacagccaagtcatccggattagtaccaggacctccctggattactcaaatccagggatgttcaagtctctggtagaaaataacctgtatattttaaattatgtctagattaattgtacacctaacacaatgtaaatactatgtaaatagttttattgtattgtttagggtacatgttcagtaagatagaatttttaagtattttcattcttagatatgcataaggagggatgactatatatattccttagtgaaatgatagtcatgatactctataccattaggttaaaatttgtgtaaattcatgagaaggatgttcacctaacattaagcgcttttgctgaaccagacgtgcagggtgcagctctccggccatcactgagccgctggaggcggccgcgcctcacgacgtcatccaagatggagtcgcagccgggccttct

SEQ ID NO: 14430 - DNA, 536 bp, Homo sapiens; identical to SEQ ID NO: 14429
  source 1..536: mol_type = other DNA

SEQ ID NO: 14431 - DNA, 575 bp, Homo sapiens
  source 1..575: mol_type = other DNA
gtgcgcatatttttatatgtatatatatgtgtgtttatacacatgacaatatatacgtttttttctagatgattctacatgttttaatgtaataaagttattgaccaggaaatatataatttgttttacatatacagccaagtcatccggattagtaccaggacctccctggattactcaaatccagggatgttcaagtctctggtagaaaataacctgtatattttaaattatgtctagattaattgtacacctaacacaatgtaaatactatgtaaatagttttattgtattgtttagggtacatgttcagtaagatagaatttttaagtattttcattcttagatatgcataaggagggatgactatatatattccttagtgaaatgatagtcatgatactctataccattaggttaaaatttgtgtaaattcatgagaaggatgttcacctaacattaagcgcttttgctgaaccagacgtgcagggtgcagctctccggccatcactgagccgctggaggcggccgcgcctcacgacgtcatccaagatggagtcgcagccgggccttct

SEQ ID NO: 14432 - DNA, 522 bp, Homo sapiens
  source 1..522: mol_type = other DNA
cacttgtcaattttcaaaaatttttactcttttagtggtttaaatgtttaagtattgtatacatgtgagattttatcatgtgtgatctatgtatatctctacattccaaattgctcggaatgacatgcctacacattaaagaatactcctactttgaatagagcaatattatatagatagatgtagatagatacagatattccttaggcaattcgttgagaatgcttttgtgaagtacagaatacactcaaagagaaaaaatacataacaaaaatttgttgatattcttttaggaattttgtcttcctaagaaaggtacagatagactaaaagtatttccatttagtcaagcaattttaatgtcacagaggaaatcatacgtgacatttattttcttcaagtcttttaaactgtatggacgagatctatttcctaacatttaaacggaaaatgacacgcagcggtcctttcctcccccgcagtatatccctttggagtgccccggggaaagccagggctgca

SEQ ID NO: 14433 - DNA, 534 bp, Homo sapiens
  source 1..534: mol_type = other DNA
atgtttaagtattgtatacatgtgagattttatcatgtgtgatctatgtatatctctacattccaaattgctcggaatgacatgcctacacattaaagaatactcctactttgaatagagcaatattatatagatagatgtagatagatacagatattccttaggcaattcgttgagaatgcttttgtgaagtacagaatacactcaaagagaaaaaatacataacaaaaatttgttgatattcttttaggaattttgtcttcctaagaaaggtacagatagactaaaagtatttccatttagtcaagcaattttaatgtcacagaggaaatcatacgtgacatttattttcttcaagtcttttaaactgtatggacgagatctatttcctaacatttaaacggaaaatgacacgcagcggtcctttcctcccccgcagtatatccctttggagtgccccggggaaagccagggctgcaggcagttccagcaacgggaaagctgtgcgcgtgggctctgcgcatgcctcgccgc

SEQ ID NO: 14434 - DNA, 438 bp, Homo sapiens
  source 1..438: mol_type = other DNA
ggcaccgtgttacctaggctggtcttgaactcctgacttccgtactcatagcttagctcccacttataagtgagaacctacggtttgtgaactttaaaaagttatcgtgatcaagagatcctgcatactcctgaagaatggaaaatgcatgtttgccatgcaagatgattacgtggtttaacaaataaaatttgaagagcaattccgagttatctggaccagaaaggagcaagtgaagctctccacactggcgcaagtgtaggtggtgctgcggcagcgtcgcggggccacaggaaccgactggagaaattccactcgtgaattctgccaaattgagaaagctgtgtaatttaaatactcataatttatttcagctaacgaataaaactgcagcaatgcggctgaaacctcatgccctttcaaaaggagtggcgcgag

SEQ ID NO: 14435 - DNA, 642 bp, Homo sapiens
  source 1..642: mol_type = other DNA
tactgtatacatgtgaattttatcacgtgtgatctatatatatctctatattccaaattgttaggaatgacatgctctttggaattttgaaatgctgtatttactacacattaaagaatactctcctttgaatagagcaatattatatatatagatagatatagatatttctcaggcattttttcaagctttttaaaacgtataatgtttttacttactctggataaagttgacaatgcttttgtaaagtacacaacaaagagaaaaaatacataaaaaaatttgttgatattcttttaggaattttgtcttcctaagaaaggtacagatagactaaatgtatttccatttagtcaagcaattttaatgtcacaggggaaatcatgtgacatttattcaaagaatcgctgatagtgtcaaagtcttttaaactgtatcaataagatctacttcctaacatttaaagtgaaactgacacacagctggcgtctgtgtctaacctgcacttgctgcacacagctgcagtgcatccctttgggtcgccccgggagagccagggctgcgggcagtgtcctcacgggaaaggtagtttccaggttgggcgccaacagcgccaggctttgagcgtgggctctgcgcatg

SEQ ID NO: 14436 - DNA, 338 bp, Homo sapiens
  source 1..338: mol_type = other DNA
tccaggtaaagcccctttcccgggtttagggagcctccagagtagctgggaggcggagagagaggtaggctccctatgttgcgaattcctgggctcaagcaatctcccaaagtgtagggaagggctttagggcactccccctcatctgtaatctttaaagaggaggagcacggtgactgccgggaggccaggaccaaagcgccaggccgcagagccgccctggccttcggcgagaactcaggcgagcgcggcgcacgctgctccggagtcccaccgcggaagttgaggccgcggattccgaggaacgcactgcgcggacggcgcctgcgtccgcactc

SEQ ID NO: 14437 - DNA, 306 bp, Homo sapiens
  source 1..306: mol_type = other DNA
caggcgtgcgccagcactcctgcttggtggataaagaaaatgtagcacatatgcaccatggactactattcatgagttcatgtcctttgcagggacatggatgaagctggaaatcatccagattgcagcaagcccagctgtggagctgcaggctacagcctccagcatgcagcaggtggctgtcacctaggctagagtgcagtggcaccctctcaagtagctggaactacaaggctagtctcctcgatgagagtaagccttaggctaaccaagaataagcctagaggttttctctcatccaattag

SEQ ID NO: 14438 - DNA, 410 bp, Homo sapiens
  source 1..410: mol_type = other DNA
gacgccggagccagttttgaagcctcctgcctccggccccagcagaggccgcgctcccactgcgcctctcgggcgcagcaagcgctccgcggagagcctggaggcggggcgcccttctctgagtccgcggggtcgcaccccgagccagtcggccaccctgccctctctgtgcagcggaaaggcgcgcaccgggtaggaagagcggctctgcgtaggtgcgcggacccgggctcctgggttccatccccgccgcgcacctcggggtccgcacccggctcctgccgggcccttttcggccgcgccgcgcgtcccgcactgagctcctacacgcgccgcgccccggccgcaccccgcgcagccagagcaagccggccccgcctggcccacccctggaccgctcctccggcgca

SEQ ID NO: 14439 - DNA, 514 bp, Homo sapiens
  source 1..514: mol_type = other DNA
tataatggaagtttgcttcagtctccccgccgctagctgagggccgtggccgctgcacagaggaggcagcgcccgccgcgcatctgccagacgtgcggccacacagcgtcccctcccccgccagcccgcggtgacgcgcccggcacccaccacagccggctctcggcgccgtcgcgccttcgctcgcccgcttaggccgtgctcgcggtggcgtggggaaagggcttctctttccactaacagatgaggaattctgatgcgctcacggctgccggcggcccagcgccaaggggcgctccacagccccgcggcccgaagccctcgactcggctgccacgcaggccccgcggccccgctcggactcccaggatcggcttccgagcgggacagcgctgcagtccacgagtccgggcaggggcgcctccaggccggagcggtttcctgcctcacaaacggtttttgcagtggcggagcttcctgggcggggccgcgggcgcgcggcggcttcatttcc

SEQ ID NO: 14440 - DNA, 349 bp, Homo sapiens
  source 1..349: mol_type = other DNA
tccagtggacgccagaagacctgtgtcctgcggagccttgctctgccacttataggctctgagaccctgcagggtaattttgccagctctgcgggagtccccagagggcctttaaacggagtctcactctgtcagtggcgcgatctgtagctgggaggtctcgatctcctgacctcgtgatcgcgcccgccctctcccccgctccccgcgctctcgcgcccgctccgtgcccgctcggcgctcgctccgcgctcgctcgttcgctcgctcgctcgcgctccccggcgccggctgcggagggagctgctctgcccgcagctggcgcagcgcgggggcggccgcgggtggg

SEQ ID NO: 14441 - DNA, 444 bp, Homo sapiens
  source 1..444: mol_type = other DNA
tagggaggcctggggtcctccacacgcctgtgtggggtgactcaggcctgaggtctgcagagggaggcagcccactcctcagccgggggcgtctatcctcctcctggccccatccctcacctgtgggggaggctaagtgggtgtcagggccctgtcagagggtgagccacccccgggggtgcccatcggccaccaagtgacagcagtggcatggcactgctgagcacagggaggtcagtgcctggctcctggtatcctccgtggtccccaggacacggtccctcttagtcccagctactcgggagcctgaggcaggggcagtgagctgagattgcatcactgcactccagcgcccgcccctccccaacagccctgggtgtggcagggagcctgactccagcctgcgtcatggagccctgggcgtggctgcagggtttaaagagc

SEQ ID NO: 14442 - DNA, 636 bp, Homo sapiens
  source 1..636: mol_type = other DNA
tccagttcatttgaattaagattcagaggtccacaaaattgcgttagttaaaagtttaggaattgcgttaaaaaaattttttttcaaagattttttttcaaaatctttacgtgtgtccatggtcaaatgtacaaaccaaggtacgtccgctagttccattttagaggcggcctcccagagaggggctgtgtgggatcctgcctgggcccagcgcgcgggccacggggccgcacctgcaggcacgcgtttccctggcgggcccggcaatcacgtccggctgccggtcttggatcacgaggcctccgcttcccggactccggaccccgcgcctcctcggggccgacgggccagtccctggcgtggtgagccgccgcgcgggcgccccggccccgccactccagtcccggccgccccttccgccgccccggtcgctcggagacggacgcagacctacgagcgcctcttccagccgcgctcggcccgcgggtccccgagctcccgcctaggcagcgctagcttggcgggccggggagcagcccccaccccaccttgccggctctcgccctcagggccccggaagcccgccaggggccccctcccgctccgccccccgcccggaagctcccgcccgagccc

SEQ ID NO: 14443 - DNA, 599 bp, Homo sapiens
  source 1..599: mol_type = other DNA
gggcctatagtcccagctactcgtcatgccactgcactccagcctgggtgacatgaaactctatgtatacatcaggagctttaataaaaattactagttcatagcacatcttgtttcatgtatatttccactttccacgtaatctgaaacattcaagaaaaatatttgtggctctaaaaagggtcttttaaagaaataaaattacagtataatgacaacaaaatttacaattctgcaatataaaatgtcactgatcatattatcgaaatttccagttcatttgaattaagattcagaggtccacaaaattgcgttagttaaaagtttaggaattgcgttaaaaaaattttttttcaaagattttttttcaaaatctttacgtgtgtccatggtcaaatgtacaaaccaaggtacgtccgctagttccattttagaggcggcctcccagagaggggctgtgtgggatcctgcctgggcccagcgcgcgggccacggggccgcacctgcaggcacgcgtttccctggcgggcccggcaatcacgtccggctgccggtcttggatcacgaggcctccgcttcccggactccggaccccgcgc

SEQ ID NO: 14444 - DNA, 463 bp, Homo sapiens
  source 1..463: mol_type = other DNA
aggggcggccgaagtctccgaggtcgaaggccgcacacccgggacctagcggggaccgggtccccctgggggtggggtatccgaagtccagggccccgtacccggactacctggggactgggcgccctggaccggcactggaccccagcgcccagacagtggtcccacgcggtgagcaccgcgggctggcacggacggccgggtgcgttagtccggccccctggcggggagctggcgactgccggagggctctggcctgcccgatctcttgagcccaggagttcccgacaagcctgggcaacatagactgtctctactgtcccagctactcgggaggctgaggcctgcagtgacagtgattgtgccactgcatctcaaaagaagtaataatagtaataataccccgcgcgctcacgtggctgcaggcgcctggggagttggctccgccctcctcccacgcccg

SEQ ID NO: 14445 - DNA, 346 bp, Homo sapiens
  source 1..346: mol_type = other DNA
cgacctgggtctgagttacattctgagggagacccctttaggcggtctccggagtactcgcagtggcgcgatctcggctcacgcaagcttcccctgcctcagccacccgagtggctgggactacaagcgacagcgcctcgctctgtcgcccaggctggacgcaatggagcagtcacggatcactgcagcctcccagtgtccttcctccagggcctcaggggcagtcagagggatcccgccagccgtgtcggctctgctccgcgcccagccggccaaccggcggctcagctctggcgcgtcacaatgcgccgtcgcggccccgcccccggacgccggacgcagaaac

SEQ ID NO: 14446 - DNA, 347 bp, Homo sapiens
  source 1..347: mol_type = other DNA
ccctcgacctgggtctgagttacattctgagggagacccctttaggcggtctccggagtactcgcagtggcgcgatctcggctcacgcaagcttcccctgcctcagccacccgagtggctgggactacaagcgacagcgcctcgctctgtcgcccaggctggacgcaatggagcagtcacggatcactgcagcctcccagtgtccttcctccagggcctcaggggcagtcagagggatcccgccagccgtgtcggctctgctccgcgcccagccggccaaccggcggctcagctctggcgcgtcacaatgcgccgtcgcggccccgcccccggacgccggacgcaga

SEQ ID NO: 14447 - DNA, 381 bp, Homo sapiens
  source 1..381: mol_type = other DNA
tagaacctccaggaggaactgtttaagagaatacatgtttgttatactactaagtttgtgttaatttgttgtgacagcaattggtagaagagaggtccaggcaacatctctttcctctccaaaataaatctgaaagaaagtttactatattttaatatctgttaaacaaatattcacttcagaatgttttgaaaggtaaagatgaaattatgggtatttacatccttttcccccaatagtattttaacaaatgaaaatcaccttaacaggtattcctaaaataattcttatttgtttgtaataaaaaacgaggaggcgctccgcacagcgcagagttcaggggcccgcgccggaagtgggcgtggttcgcccgcggcgggg

SEQ ID NO: 14448 - DNA, 368 bp, Homo sapiens
  source 1..368: mol_type = other DNA
tgattaatctgcgcaaacagtgctgagagggaagcggactcatctatccgcatatacttaaataagctttgactcagtaagactcagtttgtataaaacacagcagcattgattgggagccatagccacccagcctagggcctggatactttcactgacagctgacagctgattaaacaacttgcacttctttgatctgctctgagataggtgccaacagatcggaaagcttattacctgccggctatatgtgcgagtcaaatgcctgcgcatatggagctgctcctgcttttgaagggatactgcctccaggcgttttgcatgtcagtcataatgtatcaccagaggcctccgcggcctcagccact

SEQ ID NO: 14449 - DNA, 392 bp, Homo sapiens
  source 1..392: mol_type = other DNA
agtgaaattaagttgtttgatttaacaaatctgagtcccagctactttgcagtgaggcgacaccgtgccactgcactcacaggacgactggactgcctgtgttcctgttgctcttcacagaagctccatgaaagcgggcttcgcttttgttcaagaacgagtccctggctcagcgtctgctaccccgatgctgtcaatcagatctgagcggccgtggctccgtcccggctccgcgtccgctgacaggtcaccgctgacggcttgaggtccccgcgccctagggacctgcggggcccgagcgcagggcgcgccagagaactacatttcccacagagctcttgggaagccggggccgccgagacccacggcccggcgggcgggctcgcggggag

SEQ ID NO: 14450 - DNA, 245 bp, Homo sapiens
  source 1..245: mol_type = other DNA
aagaaaactagaagttggtccaatcacagctgtcctttcattctgttcaagcacacatgaagctccttctaggttcatccactgtgtgccacagccttctaagagctggaatatttgcatgcaagtaaaatatggtccacagctcaggaaaaataaaaagccattttcaggtccatgtcagtggctcaattgagatactgcaagatcctgaagtcacatatcaatgaagttcagagtaacaggca

SEQ ID NO: 14451 - DNA, 532 bp, Homo sapiens
  source 1..532: mol_type = other DNA
ctgtcctgtaagtacttaggtttaaaggacttacttacagctaccatttattgagtactgtctgcttgtcagacacgatgcagagaatttcgcggcgtggggcgggtctcattgaatctcccgtcccactccgcggggtgggcctgtgattagcgagccgccggcgccttctggccgtgggcttggagtccgagccacgctgactgcaaagacgggtctcattcccgcagatcgagctctgccggcggctgcgccgcaagccgggcaggtggcgagctcctcggctgccttgggccgccaccgccagcaggccggggccctgtcacaggcgccggcgtcgctcaggctgcggacctcactgcagaccgggccagcggtgcggggcccagcggagccggccggagcgcactgcgcctcgggagcacaggggtgccgccgagggagtcgcgcgtcagagaccccggccacggccagcactcggctccgggcccgcccctcaccgcgcgccccgccccgccccgcctggcaagcg

SEQ ID NO: 14452 - DNA, 318 bp, Homo sapiens
  source 1..318: mol_type = other DNA
ctttataacataaaccttgtgttagatgattttgcccaaccataaactaagtgttctgagcaaagtgcatttttaacttaaaatattttcaatgtctgatgggttcataaccccatttttctatcttatatgagcaaaggggtaaaagatttgggctccttgaaacagctacctttgggtttccccaaggtcacccggttaatcccatgttgggatccgggacagatttgaaaagctttctaatccagaagaataaagcttggaactcatttcaaaagttgtttctactttggtgaggaagggcctggcccactcctt

SEQ ID NO: 14453 - DNA, 355 bp, Homo sapiens
  source 1..355: mol_type = other DNA
tttttaacttaaaatattttcaatgtctgatgggtcataaccccatttttctatcttatatgagcaaaggggtaaaagatttgggctccttgaaacagctacctttgggtttccccaaggtcacccggttaatcccatgttgggatccgggacagatttgaaaagctttctaatccagaagaataaagcttggaactcatttcaaaagttgtttctactttggtgaggaagggcctggcccactccttagcccagccctaatcgccgatctcaggcggctgggctgcgctggggctgagcggctccagcccaggctggggttttaagctgagtgcctggcaagggcacgggctga

SEQ ID NO: 14454 - DNA, 433 bp, Homo sapiens
  source 1..433: mol_type = other DNA
cctcctagagggaagggccagtctgcaggccccttgtgccctgagcatgtctgtccggcgcgccctcaccacaggggctttgcacgtgctgcccctgctgctcttagggaagacgtgcttagtgcattcacagcacacactagcgaccagggtcagaccccgcagaccgcccttggtcccttgcgagcagggtcctaggagcaggcctagggacccagcctcagctgcctccagactggggtcctgtgctgctgatttttcatcaaagttgccaaggacctggcccaacttcggggtggccctggggctacctgtgagggcccagtggaacccctcccttccaagctggcagctgggccaggccccgcccaccaagctgttttcctaagacagccttccgagcatgatagctgctgggaaggtataaaagcag

SEQ ID NO: 14455 - DNA, 537 bp, Homo sapiens
  source 1..537: mol_type = other DNA
ctgcactttctagaagatccatatcagattctaaaatgaaaatgatttaaattgcaaatgttttctgtttggcaaatattcgtccaggaggcagtagaaagactaacttcttattcaccagatcggatttcttaaacaataagcttgaaatagcaaatgctctgggccaccaggcatgcagacaagtgcctgcagtgattgcagcgcctgcgcagcggcccttgttggaagtccaggagtccgcgctaccccgcacgctgcccgcacaccgaacctctcggggctgagtggctgctttctcctcgcgtcccggggcgccctcgggaactcgggagcgcgcggcgagctgaacaatggcctggggacacctggcaggtcgcaggccccaaatctcggaacctaccggcgttcccagagcggggcggacggggcggggacggagagaccggggcggcacctttggccgtgccgggcgagaggcgggggggcgaggggcggggcgaggggcgggcctggccccgagcagctgaagcctgg

SEQ ID NO: 14456 - DNA, 292 bp, Homo sapiens
  source 1..292: mol_type = other DNA
actgatttgcaagacagatatgataatctgtgcttcaagtactttgtaaacaataaggcatcttataaattcattcattcaacagctatttactgagtgtctgttccctgctgagcactgttttcagcactgcagacaagcctttgaaggttttgaacaaatgaatgaatctaactcttgataatgaatatattttaacgatgaagccgacagaatttgtggataaatcacagcattacacatgcaaatgcagctcttaatgcgggagtcttcagcatgcagagctccccag

SEQ ID NO: 14457 - DNA, 513 bp, Homo sapiens
  source 1..513: mol_type = other DNA
cagcccgtcagaccctgcgctgccggcggggctgggagaggcgggccgtgggcgggaacctgggggtcaggccccagccgcgggaagccgcccaggcctcccctagacagccccgcatgtccagatgtgccgtcccgcctgcctcccgcgaccactggccatctctgggcctgggcgcggtctcggcgcccgcctgcccccgccaggagccgcaggtccagccactccaggctgctccaagtaccgcaagtggcactgagatgtgcctagatttgtagggagtccccgcagctccaccccagggcctacaggagcctggccttgggcgaagccgccgaggttgccccagtcccctggctgcagacacctcgctgaggagagacccaggagcgaggcccctgccccgcccgaggcgaggtcccgcccagtcggcgccgcgtgaagagggcgggggcagccgggagcctggagccagaccggggcggggccgggaccggggccagggaccagtgg

SEQ ID NO: 14458 - DNA, 288 bp, Homo sapiens
  source 1..288: mol_type = other DNA
cttgataatgaatatattttaacgatgaagccgacagaatttgtggataaatcacagcattacacatgcaaatgcagctcttaatgcgggagtcttcagcatgcagagctccccagcggtgaacggagcggtctcaaaaatctcaaaatttgtggaaagtatgcagtttctaggtgaggctagagtttggtttcaaaagcctcgtacagctcttgaggtcccggggggggtgggcccgggaccatagagggtcgctccgccactttcctagagcgaccgcggcggcgc

SEQ ID NO: 14459 - DNA, 677 bp, Homo sapiens
  source 1..677: mol_type = other DNA
accatttgttgaaaacagtactctttccccaagaagtgatcttgttgaaaatcagctgactatagatacgtgggtttatttctgggccctaaattctattccattgatatatctattcatattccagtatgacacagtcttgattactttgcaatctggaaatgtgatgaattttatataaattttcagatcagcttgtcaaatttctgtaaagaagtcagctcagtttttgatagagattgctttgactctctatgtcaacttgggaagaattgccattttaacaatattaaatcttctgatccatgaacatggacatccatttccaatttgcaagttagcattagtcaaattgaagccctcattattctgtgtaaagattaatttagttgatataaaagatgtttggaaattatgcaaagaaaataatgtaatatatgatttgtatttttcatgtaaatcttcacataaaaaatggcatggcctgttttatcgtttgtttaactcatttttatcctaaatatgtgtggcattttgttgtggtggtacatatcaaaagactaacttcaatgacagtgaggagggatgtccttcaaaactgtaaaaaatttgagaccctataaatagcccgtcatgggcatgtaccaatgatgtaataatgatgattatatcagaag

SEQ ID NO: 14460 - DNA, 346 bp, Homo sapiens
  source 1..346: mol_type = other DNA
agtagctggaactacaggctggtaatttctttatttacataattcgctatttaataatcccagccagaagaattgcttgagctcagaatcatgccactgcactcctctcaaaaaaaaaaaaaaaaattctgtttcataattacattatctgaaatgatagtgaacttctctatgtatatagtaatttttttattttgaatactgaaattcttttcctgtgtatagagatgacatagttttatcataaagaactgggaaaggactgttacctttacgaggcttttttgattttaaggaacagaaactcacatcagtgttctttaagaataaagtgtttattttcaga

SEQ ID NO: 14461 - DNA, 357 bp, Homo sapiens
  source 1..357: mol_type = other DNA
tggcgcctgtagtcccagctactggtcgtaccactgcactccagcctgggctacagagtgagactccagaatcaaatatttagacgtctgtatgtacacagagatgaatacaacttaaaagtaagaagtcgtataaacctcaaaaccgttattcaggtaagaaagtatccaagtaaaacatccttttgccagacaaaatttccttttccttccaaaacactaatattaataacaagcccagtgggttgtcgcctgggcactgcgaaggaggccgcgcggcggcacccgctgcagcccgcccccagcgcgctgcagtcgccggggcaacgcctccaccactcggccggacacgtgacg

SEQ ID NO: 14462 - DNA, 468 bp, Homo sapiens
  source 1..468: mol_type = other DNA
tttcatattagactggctcctctgagccagaagtcgaggatgacattctttgtcagctgagtaacccacttagtgaaggaggttcatggcttgaagccagttactgtttacaccgcacccaacgctgggatttgagcccagggtgcacagttctcagtaaattgtatgaggactacagaaagttacattttccagatgaggcttaggacaggccggcccaccaggagcgccactctggagaggccaccggatccccggtgggtctcacggagggcggctccggcttcaaccccagcaggccatgcggctgccctccagacgcccgcgtgggcacgagtcaggggtccgaaggccccagggccctggcgccccggcaaccgcccacgtccgggggccaggcctgcccccgcccgcgctgattggagggcagcgaaagcgccgtccaggggcgcggcggcagcggagcgt

SEQ ID NO: 14463 - DNA, 328 bp, Homo sapiens
  source 1..328: mol_type = other DNA
taacttaagtcacttaagctgaatcaggttatttaatgaggtgataacaaatatcacatccttgcaagatatgtagcttcgttttactgaggaaagctcagaaaagttaacagcagcggattttgctgcaagagaagaggcagcaggccaggccttttccttcgcccacagcgcctacgtcgaaggctcccgacccgccgaactggcggccggtgctttggccgatcccgcgccgctgcctcgggccttgggcggcagcgccccccgcccaacccgccggtcggatcacgtgcgggttctgtcacgtgacatcaggtcacgtgaggcc

SEQ ID NO: 14464 - DNA, 225 bp, Homo sapiens
  source 1..225: mol_type = other DNA
gttctggaaaacattttcacaaggcaagatatttatgcctcacaaacaatattactgaatagtatttggaatacatttttctatcttgaaagagcagcctgctccgccggctccgaaaaagccggccaatccccccgccgctgcctaacagcgggtaaccccgcgttgccagcgcctaccccgttaagcgccacacttccgctttgcggcaatgtgcgccccgga

SEQ ID NO: 14465 - DNA, 509 bp, Homo sapiens
  source 1..509: mol_type = other DNA
agaatctgcacaagtgaagttgttttctttagatctccttaagcaaacaggtggtggagtctcctgccattttcctgggaaaaatgcggtcacccactagtggcttagctcagcaaggggccgaggcgaaggacaaagatttttattttccccgaggtggcgctgcctctgtgctgtcccgcctgccctgggacgcaggctggcgaggacggtgggaccctgaactgcacgtgagcgtccttggggtcgaggacgcgcctctgcctgctcggaaagctccgggcgtccgaagcagccggcgaagttgtagcggcgccccagcggggtcgcttggtgcagggttcacagccggggcccgcattcatgctgggaccagcagcgcactgtccccgggccggccccgggcggagagcctcatgagagagatggactgaccggaaagctgccgtcaggcgcttccagcttccggggcgcacattgccgcaaagcggaagtgtggcgcttaacgg

SEQ ID NO: 14466 - DNA, 468 bp, Homo sapiens
  source 1..468: mol_type = other DNA
gtctggccactgcgcctgagcgacagagtcagaccctgtcaaaaagaaaagaaaaaaagaatctgggttctgccatttatttatttactcttgctctgtcgcccgggctggagtgcagtggagcgatctcggctcacgcaaccgcccccaggttcaggcagttctgcctcagcctcccgaatagctgaggctacaacgtgctgggattacaggcgtgagccactgctcccggcctatgtggcaaaggtggaatcatacaacatatggccttttgtgtctcgatattcatttttgcatctgaatgttcaaactaaataatatctaccttccaaatttgccttcaaaaaagcatttgcttcatttaatttcgatttaagggcggggagggagtgtgcgcctgcgctctgcgcctcctagagggcagtcaagggcttctggctgacggagatctcgcgagactgtcagacg

SEQ ID NO: 14467 - DNA, 572 bp, Homo sapiens
  source 1..572: mol_type = other DNA
cataaaatagatgaaagttcctgacatgagttatattttaatagaattccttctttgttgccattgatgtaaattagtacaaaggaccataaaatttagggagaaattttcttatttttgataatgaatgccttgattttgctttactcttaatattaacaaaaacagctttatatgcatagacaacagcaagtattttacattcaaaaaatcgactgaaaggtaatagaattacaacattgtctagatttcatcttgattgcatatgcaggctattaaacattttaattcatgtaattcattatagttcatatataattctcatcaggtgccatccgaggtccttctagctggccttaccctgggggccgggcgggggcagcaggcgtctagcagggaggcccagcctgcaggggggccgcgagcgccagcggggactggcgcaacaatgggcggagttttccgctcctccccgcccttggcttgagcgctccagctcgctagtggcccgggcgaactggagttgcgtggacgcgtgggcgggacgaggcccgggctcggggacctttcgc

SEQ ID NO: 14468 - DNA, 468 bp, Homo sapiens; identical to SEQ ID NO: 14466
  source 1..468: mol_type = other DNA

SEQ ID NO: 14469 - DNA, 280 bp, Homo sapiens
  source 1..280: mol_type = other DNA
tgtccttatcagaagagtgatttctagtctccagaactgtgagcaaataaatttctttagtcaaagtgtggtggcagagaaccatcctagcctgcttgatgcaggaccctaagggcagggtcatctgggccacagacccaggcccggtgggcctggtgggctgacctgtgggcgccttcaggaaacccgcaaagagaagttctctcctcctctgctctttttggagatgtgattgattaataactcataaatcatcttgtaaacactcaatgtgttctca

SEQ ID NO: 14470 - DNA, 453 bp, Homo sapiens
  source 1..453: mol_type = other DNA
tctcagatgatgcagaaggctgtccacagccgctgacgtggggtctcccgccccggtgccactgacccggagtcctgtattcctggtcccagagatgccggtagggctgcccacaggctctgcccacaggagagcccagttgctcctccccctgcctgtgcgacaggcctgtgcttgtggatcctggctggagctgccctcaggcagaggtctgatgagaaggggcctccccctctcagctcctcctctgaggcctctcccctggaggatgaggtggaggcacctggacatgccctggagtgatcagtgctacaggcccagcatcccacaggggtcccggagtgttggggtgatcagacccaacaccagaggggccaccgcaagtgtggaggctgcaaaggccctgagctttgcgagcccatgctgtttattggtgctcaaacaaagtcccaa

SEQ ID NO: 14471 - DNA, 496 bp, Homo sapiens
  source 1..496: mol_type = other DNA
ggaaacgagagccctgccactcctcatgcgatgcaccaggagccagggaagctgctttctagagaagcatctccctgagtggtggtggaggcctctgtctactcctccaggactgccaggggataggagggcaccgctgacctcacagagcctcttgggtgagtgagcatcagctgagtgacaccaggtgactgtgcccccctctgactcaggcaaggcaccaccctgccaccctgtcccatggaggccgcaaactgctctgcagagccagggtctccaggaatggggagggagcagcaggcttggaatcctaggccttgtctccaggtagtacccaggcttgggaagctttggtctcaggggggctggcactcaggccctctgccctaggacagggttacagaagcctcatgctgtcaggggatgctgccaccctagttccagggtggctccgcccactactgggctggggtgagggctttgccccagagcctag

SEQ ID NO: 14472 - DNA, 401 bp, Homo sapiens
  source 1..401: mol_type = other DNA
tgggactacaggtgcccgccacccaccatgttagccaagatggtctcgatctcgtgctgggattacaggactgcacctggcccagaccctggccctctctctttcttctcatgagagaaggtggaatgccttcgaggggctgtggtggctgggcagagccaggcaggagccagagtcagcctggactatggcatgctgtataaggtggctgtgccgcctgccaccttcaaaataatattgcatatacagttgattaaatggcatactccatgtccccagagcaggcctgggcagtgtctgggtggggcctgggagccacaggagacgcccaaagccggcaggcaggtgtagcgctgccctgggagggcttgcacccccacacccaagtgagcggcctgctc

SEQ ID NO: 14473 - DNA, 304 bp, Homo sapiens
  source 1..304: mol_type = other DNA
agcagcccttatctcagctccaaaggagaaagtgaccattctcattgaattctcatgaatgctcccagcctcagggctctcccccagggctgagagccggagcctgtcttgtccagctctggtgcccagcaggagagccaggctccagcctgcctgtatccagggttgaggtgggcgtgcaggcaggctggccttgggggctcaagatgcggctccccagggcgagtgctggggtcccggggcaggcgggcggctggagccctctcgtgggcgggcgcaaggggcaggctgggcgggcgcaggc

SEQ ID NO: 14474 - DNA, 243 bp, Homo sapiens
  source 1..243: mol_type = other DNA
atggtttagtttacctcatgcaaagctgttttgtttataaatcacccagtcttaggtagttctttatagcagtgtgaaaatggactaatacacttccttaatgaactctctcagaaaggattcaggaaatgtaagcttgcaagtttagaaatatccttattctacctttacaaaatatatttccaggagtcctaaaaatatagctgttgttgacaagactgagaatggtgccaggggaagaga

SEQ ID NO: 14475 - DNA, 486 bp, Homo sapiens
  source 1..486: mol_type = other DNA
ccgccggcgcggagacctcaggcagcctggagaagggtgggggcgcgcggacgcagatcccgggccgcggcggggcggtggcaggctccagagtggcacgggcccaggtgagcgaggtctccgcccgccgcccctcccgccgccccggtgccagctgccccgctggcccctccctgtacccggcgcttgctccgcgggccgggccgacggcggcgggcggcgtctcgcgcccaggccaggtcggctctggctccatcttgggccgcggcacctggcacctgtggcggccgcaggagcagcgcttcccccgcctgcgcggccccggcgggcgagagggtgagaggctggctccgcgcgctcccgttggggcggggggcgtggtgggcggcacctcccccttgctgagccgctgcctgcgctcagacccccggcatcctggcccctgcccagcgcccagagcccccggtggccgcatcgcactccccg

SEQ ID NO: 14476 - DNA, 777 bp, Homo sapiens
  source 1..777: mol_type = other DNA
ttcccgcaaggcgcgttcgccagcctggactagtgggcacgggccctgcgtacagaggggacccaggcgacgctggcctccatccgataaccaccgtaacaggggctgggccgcgccgctcctccgctctggccagccaacgttaagttgggctggcgagtgaggagcctgaattggaacccaggagcttctggaacccgctccagaattgcgctctcgaccggtttgtccgctgagagcgaacgggtgcgcgagcgccgcatccctgcccaaggccatcaggcaggcagcgctggggccggggacccgcgcggagactccaccccgggatccgggaaggctcccccgagccggggtcggagctgcggctggaggggcctcgcgggggctcagtcctggccaccaggtgtgaggggtcgggtgcggagccctgtgtcagacgcggcggtgaaggctgtagccctgctctccgggatgggggtggtactctcaccccaccctgccccaagccgcagggagcccctggcgcccctggcgcccgggacccgccctggctggagccctgcggtttccgggagctcacggtcggctctgcgcccctccaccgccgggcctgggcctgggccagggacgggctggggcgggactgcggcctcggggcgctgggtccctgcccctgccgtgcactgcgcggctccccgcgccgcagctgggcaccagcagcaccacggaccgcccctgtgctcgcccgacggcgccccgcggcgctttaagaga

SEQ ID NO: 14477 - DNA, 371 bp, Homo sapiens
  source 1..371: mol_type = other DNA
ctggcgatcccagggcctgggctggcccccggcgtcacgggaccgggaaggcgctgtgccagtggaggtggctcatccccgcacggtcactgccctcgcccgctgttggggtccgcggctgggagactgaaggcctccaaccctatgggggagggctccgggggccaggccaggccaggatcatggagtcagaccaggcctggtatcccagacggccgccggcgcggagacctcaaggcagcctggagaagggtgggggcgcgcggacgcagatcccgggccgcggcggggcggtggcaggctccagagtggcacgggcccaggtgagcgaggtctccgcccgccgcccctcccgccgccccggtgccagc

SEQ ID NO: 14478 - DNA, 512 bp, Homo sapiens
  source 1..512: mol_type = other DNA
cttttacagcctgtgaaactgtgaaactaacaaacctcttttctttataaattacccagcctcaggtattgcttgcgtgggttgcttgcagggtaccttggctgctacagaaagaaaaagtctctgtagagactcactgtcagtgactcacggagcagaaggctggcctcagagcctggacagagggtagctgtcactgcttaactgcagttcagctcacaccttaagataaaaagatttgttttcaggcaattgaatcccaccccagccctctggggcctcattaggggcttagagggcaggggatatgagcatagctcagagagctgttgacattatcagcctcccgcagggaatttacagcggcgtccgcggcgatgggctctcagtgccttggaagaccggtagaggcaggttctgtctctcccggcctggcaagcagagggccgcggcgcagggcagagtgccgcggcgcagggcaaagctccagtgcgcaggctcgcgggcgcagg

SEQ ID NO: 14479 - DNA, 655 bp, Homo sapiens
  source 1..655: mol_type = other DNA
tataacattagttaatgctaagtttcagttagagttaatgaaaataaagatgtatttttttccccatcaagttcccttctgccccagggttaagctgaggggcagtgggccagggacttcttaggaaagctttggaaatgtttttaaaggcaaattgaaagcatgtcttaataaggacctttgatgtgtttcttcaacaactgaaattacatgagctaatttctttacggagtcagcccagagaggatctcacatatcccctctctggtcctcacaggggagctgtcatcttgcaatcacatagccatcgcatgccattgcaggggcaacccagcaggcaggcccccctccaactgccgcccagcccccctcgcagccagggcaggctgcggcgccgacacacaggagccggctgcggggctgggtctcgggctctcggctggggagcggggagcgcgctcgcccacgccccccacactcgcgggcgcacaccccggcgcgcgcacgctgccacacacgggcgcacgcacacggcagccgggccagggacgaccctgtcagctgcagccccagaggtccggggcgcgcagccgggtcccctcgagggcgcagccggccgccccgccccgcccctcgaagcagccgggccgggcgc

SEQ ID NO: 14480 - DNA, 370 bp, Homo sapiens
  source 1..370: mol_type = other DNA
gccaggttggtgtgagctaagaccaccccacaacagaccagtgacacagctgggatgcagggatgtggggagctccccacaggctgcagtgtgttgtggagctccgacagagcaggctgggggaacccagggcttcctcccccagctccagctcaatcaggcctgggctggagagggggcatccagaatgcagccaccaagccacactcgtgatctctaatgctcagcagtgcatcccaccaacagagcagggaggcttgctggcaggttccgattctgcaaggagcaggcctcttctgagccctgatgtgagagagattcttctgaagagccctggcaaggaaaagtatcctaattagggggcatttat

SEQ ID NO: 14481 - DNA, 476 bp, Homo sapiens
  source 1..476: mol_type = other DNA
atctggattccatgtgaagcctgggaccacggagacccaagacttcctgctctccctgcgaactgcaggctgtgggctgagccttcaagaagcaggagtgtgatgtctggaaggtgggctgcgttctgttcccttctcaagctctgaggctgatgccagcctcagactcagcctctgcactgtatgggccaattgtagccccaaggagtttttttgttttttagctatgaaacagaggtaatatctaatacagataacttaccagtaatgagtgcttcctacttactgggtactgggaagaagttacacatattttctcatttaatctacacaataagtaattaaagaacagttctccaaggaggacttgcaagttaataactggactttgcaaggctctaaaataatggcagtgattaatgttatgatatgcagacacaacacagcaagataagatgcaatgtacctggaagcct

SEQ ID NO: 14482 - DNA, 612 bp, Homo sapiens
  source 1..612: mol_type = other DNA
ttggtattattatattttaacatttatgcctaatgattaaacatccattaaaagtatatatcctggatactaatcctttatcaattgctgttttaatcaaagtataagttcttaattttaacgcactgcggagtcgcagaggcggcgggcgctcccggggggagctgggcgattccggcggggggaggtgccgatcgagcggccgccaggctgctgggggaaggagggccaggaggccgtgggggtcctcggcgcagactggagccgcaggcaccgcgcgcagccctcgcccgcatcgccgaggccccgcgggcccaggagcgagaggtcgggcgcccaggaccagagggcgtaggcgagagcaggcaccgcctccaaagaacgccctcgccctcccgcaggcgatggcgcccggccctgaccaagccagctgggggcatctccgcggagctgagccggggaagggccgggcagcccaaccctcccctgccggggccgcccacccgcaagccccgccccgaaggctggagcttccctgggggtgggcgacgccgagaccacgccccgaaggcgggagcggcttgggggcgggatctggccgccctcagggct

SEQ ID NO: 14483 - DNA, 298 bp, Homo sapiens
  source 1..298: mol_type = other DNA
gctccaggatgagcgggatcccgggctggctcccgagccagccgggaccgggcagagccaggcaggagccagagtcagcctggggggactatggcatgctgtataaggtggctgtgccgcctgccaccttcaataatattgcatatgcagttgattaaatggcatactccattccccagagcaggcctgggcagtgtctgggtggggcctgggagccacaggagatgcccaacggcaggcaggtgtggcgctgccctgggcgggcttgcacccccacacccaagtgagcggcctgctc

SEQ ID NO: 14484 - DNA, 229 bp, Homo sapiens
  source 1..229: mol_type = other DNA
tggaggtgacatctgttacttccagtgtattatagactttagctccactaggcagcggctccaggatgagcgggatcccgggctggctcccgagccagccgggaccgggcagagccaggcaggagccagagtcagcctggggggactatggcatgctgtataaggtggctgtgccgcctgccaccttcaataatattgcatatgcagttgattaaatggcatactccat

SEQ ID NO: 14485 - DNA, 459 bp, Homo sapiens
  source 1..459: mol_type = other DNA
ggaaacgagagccctgccactcctcatgcgatgcaccaggagccagggaagctgcttcctagggagaagcatctccctgagtggtggtggaggcctctgtctactcctccaggactgccaggggataggagggcactgctgacctcacagagcctcttgggtgagtgagcatcagctgagcgacaccagggtgcccccctctgactcgggcaagctgctctgcagagccagggtctccaggaatggggagggagcagcaggcttggaatcctaggccttgtctccaggtagtacccaggcttgggaagctttggtctcaggggggctggcactcaggccctctgccctaggacagggttacagaagcctcatgctgtcaggggatgctgccaccctagttccagggtggctccgcccactactgggctggggtgagggcccagagcctagataggcacc

SEQ ID NO: 14486 - DNA, 214 bp, Homo sapiens
  source 1..214: mol_type = other DNA
aaaatctgtagtcagcacacactacttgccagatacacacagccataactctttattgagagtagagctagggcgtgtttacaggtgtatctatattcagacagcaaataaaagttgttcaacttggtttctaaaatctcaggaagtcccattggcactgccacagggtggggcagccaaggcagggcattgtgtgccacatgcctgggctccc

SEQ ID NO: 14487 - DNA, 187 bp, Homo sapiens
  source 1..187: mol_type = other DNA
tggaggtgacatctgttacttccagtgtattatagactttagctccactagatggctggctcccgagccagccggccgggcagagccaggcaggagccagagtcagcctggggggactggcatgctgtataaggtggctgtgccgcctgccaccttaaataatattgcatatgcagttgattaaatg

SEQ ID NO: 14488 - DNA, 444 bp, Homo sapiens
  source 1..444: mol_type = other DNA
ggaaacgagagccctgccactcctcatgcgatgcaccaggagccagggaagctgcttcctagggagaagcatctccctgagtggtggtggaggcctctgtctactcctccaggactgccaggggataggagggcactgctgacctcacagagcctcttgggtgagtgagcatcagctgagtgacaccaggtgagtgcccccctctgactcgggcaagctgctctgcagagccagggtctccaggaatggggagggagcagcaggcttggaatcctaggccttgtctccaggtagtacccaggcttgggaagctttggtctcaggggggctggcactcaggccctctgccctaggacagggttacagaagcctcatgctgtcaggggatgctgccaccctagttccagggtggctccgcccacctactgggctggggtgagggct

SEQ ID NO: 14489 - DNA, 218 bp, Homo sapiens
  source 1..218: mol_type = other DNA
ccatccccatgcttaggtgattatatgaagaatattcataaaaatgattgtgtctgccactggccaaacgtggcactttgcctgggtccaagccatccagagccagatcctggccagcctgccctgctcgatccgtgggaacgcccactgtgtggactgtgagacccagaatcctaagtgggccagtttgaacttggctattggcaatgagctccttc

SEQ ID NO: 14490 - DNA, 384 bp, Homo sapiens
  source 1..384: mol_type = other DNA
acacctcctggaggaccagcttcctcattgggaactctgtgctccatggtgtaaagagccctgcactgggaggggcagcctctaggcctacttttctcacctggaaaggaggtgatagaacctgccctgcccataatagtagaagacttaaaagacttgtgttgctctttggcctccatgggaaaacatactgcttcccttggaggacaagtgggtaaactgaattgagccaaaaggggaacctaggatcttacttatctccctccctgacctttttttgaaataaaaaaaatacatgctggagatataaatatctaagtgacttgaaaatacttccctggctcaaccattctgtgagccaataatagaaaggcttttatatcc

SEQ ID NO: 14491 - DNA, 368 bp, Homo sapiens
  source 1..368: mol_type = other DNA
caaaggatatgtacatttacaaatttgatgaatattaccaaattccctgcagagaagttgcacttatctgtaatctcactattggcatatgagagtactcattttttcgagacagagtctcgctctgtcacccaggctggagtgcagtggcccgatcttggctctcagcctccggagtagctgggacgtgcccggcctcaaattttagtattttattctgtagtcaggcaaaaactcatgttttctttttaaataaatacgtctcagttttgacactgctattgatttaaaggagagatctttctgaatccaagcaccagaaagagtaagaattccttttgggccaagatgctgagcagcaatcccat

SEQ ID NO: 14492 - DNA, 197 bp, Homo sapiens
  source 1..197: mol_type = other DNA
gtccccagtcagccctggctgggtctcccaccccagggccccttgaggcttgagggaggaggcctgccctgcctgcttcatggagttcctcagtgggagagcacctctgaggcagctggatagatgccctggtccttcccaccgtaggaactgagtccccaggactgggggctgcatctcaggggccttggcctaga

SEQ ID NO: 14493 - DNA, 475 bp, Homo sapiens
  source 1..475: mol_type = other DNA
agcaggagctgtagacacagccctgggttctggtgcccttgaaacgctatatatatagcacctgcttcaggagtttgagagttaaatatattgaatgtaaagcaccagcctcagtgcctgacacatagtaggtgcctaataaatgatagctattgttatgattgcatgctgctatttcaccttactaaagaggcataaatagtatccctaacaggcatcttcctgttgggagtctcctgaggagtggggggggggtctcggctaccttctcaccaaagcgctatcccacccgggcttggcagggagtgcggctcccaggcggcggctgaaaggcgcatttcttccagcctcagcaaagtaccctctcccgggccaggaccgcgccccgcgtctctggctggccccgcccctctcggccccgccccgcccccgcgctcagcttggacagccacgcgtgcgcccaggccaggcggag

SEQ ID NO: 14494 - DNA, 405 bp, Homo sapiens
  source 1..405: mol_type = other DNA
tgctgtccagactggagtgcagctgttgtgacaaatgttattttatgcctttggcaaaattctccttttacagagcacaagcaggattgcagcctagtttatatactcagaggaatgagaatttggagtctgagtttcagagacttccagagcttggtggggtgagggctgcccaacccatgccatgtccaggggtgcacttaaacacacctctgattagaaggagaggtgtgcaccagtggtcacacggctagtgcagacctactcttcggctgcacagccagccccaaggggccttgctgcagaaccccgccagaactccagcagctccgtggtcggctggagagtgggcagagtcaggcatctgccggctctccacttctgctttctccaggaaatgagcag

SEQ ID NO: 14495 - DNA, 535 bp, Homo sapiens
  source 1..535: mol_type = other DNA
cagcctagtttatatactcagaggaatgagaatttggagtctgagtttcagagacttccagagcttggtggggtgagggctgcccaacccatgccatgtccaggggtgcacttaaacacacctctgattagaaggagaggtgtgcaccagtggtcacacggctagtgcagacctactcttcggctgcacagccagccccaaggggccttgctgcagaaccccgccagaactccagcagctccgtggtcggctggagagtgggcagagtcaggcatctgccggctctccacttctgctttctccaggaaatgagcagagacccacgatgtggggccgggtcctcttcccccgagcctgaggggctgcagctggggatagggggcccatgtgtctacaggcgctgacggccacccctccaggtaggccaccttgctcttggcccagccaggccagcctagaggtgggcatatgggcgccgcctgtcagcgtggggcctactggctgcctcctgggaggctgactatggggcacagcc

SEQ ID NO: 14496 - DNA, 596 bp, Homo sapiens
  source 1..596: mol_type = other DNA
taaattgaagtcttgtactttccaaaatttttactacttaaatttaattttggatttgaaattacttatttcacttatttgctagttaatttattttctaatttatgactaggtggaaaaatttagagcatttcaatttcttatttctgcatatacattttcaaatttttttccaatgctttatcatctgcataataattttcatacttaatttgttttcctcattttctcaatttctggaaatttaatgtaagaaaaaaactgaaaatattcatgagcaggaaaagcaaagcacaaggcttactgctgtgtgttcattcaggatgcagatttcagaaactacacatcagcatttaatgacatacaatcaagtaagagaatatgattacagggctgtatttttatgtattgtagctactctgatttaacagtggaaaaagtaattaaattcaaataaactttttgccatagacaggggctcgatcctctcccactgactgcaggaatcacagggggtgagccctggggttccctcctcgtggcaggcaagccaggctgtcgggaaattagagtgtcttagagacccaggtctcttg

SEQ ID NO: 14497 - DNA, 340 bp, Homo sapiens
  source 1..340: mol_type = other DNA
ctctcttctcttcagcagagattacagatctgtgtcaggaccctgccgggctcagtctggacaaggcctggctgcccgtgtgtcccagggggacagtgctgcaaagcaaccctcaggctgggatttacctcttcatccctaatagagaagtcatctatttgggctctgcgactctgccacccacccagttctggagggtaggctgctcttagcaagggcagagcccaggctgggacagtgagggtcatcaccttgaaaaggacctgtgctgagccctccagagccatgagcatgtggagttggcctgccacagcctgctgctggaaatgagattcagtct

SEQ ID NO: 14498 - DNA, 528 bp, Homo sapiens
  source 1..528: mol_type = other DNA
aggctcagaccctaagtttagaacagtggcaaagagaccaggcattggctcagagtgacagggctctgttaataatagtaccattttacaggtgcaggaaactgaggcacatggagatgtcccaggcctgaccgcggcggggttagcccaggcctggctgagtttccacatatggcagcagaaggggcttctcccccctcaggctcccgagggtcctgtggagtgagcgcaggaggcccacgaccagcaggtgagtctcaggccagaggttccctggaccttaggaataagtgcatctgtgggcagaggaccgccggtcgcactgcagctgtgtgttctgtgagtgcagaaactcagttttctcatctgggaaatggggctgagcgaaccgatcgcgcggcggctcccgcgcccggtgcgggcctcgggacccagcagccccggccccgcgtggcaggcggcccaaggggcgggccgggggcgggcgcgagcgcgggcccggggcgggctggcggcggccgggccagg

SEQ ID NO: 14499 - DNA, 433 bp, Homo sapiens
  source 1..433: mol_type = other DNA
taaggccttcagcctgctggctgagcctgtaatagtagcacagaaacattaccacccagtaactttatttctggtaggaataccatgtcgagatggtggtagctgtttcatctgctgccagtgtggataaataagcatgtatatttctacttcacaagtttaacaaaatattttgataactgtgtgttaatactactgatttctactatgctattttagtttggatttaaaaatcttattctgagaagggctggactgcagggcagaccggctttgcccacattttgttcccacactctgtggggaagctggtggagtccagaatgacaggggcttccttcagccctgtcttcagagaggctgagaggaactgaacagcctgtccccagagccttgggtcacatggctcattgtgcctgcgctgccagcagcc

SEQ ID NO: 14500 - DNA, 412 bp, Homo sapiens
  source 1..412: mol_type = other DNA
ctaagcattgtgacaacgtgccataaggccttcagcctgctggctgagcctgtaatagtagcacagaaacattaccacccagtaactttatttctggtaggaataccatgtcgagatggtggtagctgtttcatctgctgccagtgtggataaataagcatgtatatttctacttcacaagtttaacaaaatattttgataactgtgtgttaatactactgatttctactatgctattttagtttggatttaaaaatcttattctgagaagggctggactgcagggcagaccggctttgcccacattttgttcccacactctgtggggaagctggtggagtccagaatgacaggggcttccttcagccctgtcttcagagaggctgagaggaactgaacagcctgtccccag

SEQ ID NO: 14501 - DNA, 412 bp, Homo sapiens; identical to SEQ ID NO: 14500
  source 1..412: mol_type = other DNA

SEQ ID NO: 14502 - DNA, 329 bp, Homo sapiens
  source 1..329: mol_type = other DNA
tatttgcagggatatgagcttcaaatttgaacatttctaattaataccaatacagagcagattaaatttgctgcaaaattaagttagtgtctgccctcattgctgaggggtgcagccagtgaagccactgcaagtggtcactttgcctgggccagtcccccggacagatgccagctctgggccatgcagaccctgagcttgggctcagtttttggtctggagccaggatacccgctgtaactgacacagacatagagtctattacctgcaggtgtcagctatgctcaggcttgctggttggagcctccagccaagctctgagggctgcc

SEQ ID NO: 14503 - DNA, 262 bp, Homo sapiens
  source 1..262: mol_type = other DNA
gcagaggctttgagcgctgcacagagcaggacacccagcgggggccagatctccgctttcagcagactatcctagagcccacctcagggttgaagggaggccagcccttcccagaggtgtacctgcagattattctgcctcgaggaatgcgggcggcggtcgtccagagccgatgatgaaacgggctatttctgccccgggacatcagcagggctctgggctctggaagtaaaaatagcagctgaggctgtttgtttaatct

SEQ ID NO: 14504 - DNA, 213 bp, Homo sapiens
  source 1..213: mol_type = other DNA
aacaaatcacccagttaaatgcttaattataattatggtaagtgaagctgcatcattgttaaggagattgatcttcattccttaaaacgcaaaatgttgatatgaacaagtttcctcttggtgcagggcaggaatgggctgctgcagtggcccagtcaggtttctggcgtggactgcagccaggcaaatggcctggcctggacgctgcctcag

SEQ ID NO: 14505 - DNA, 225 bp, Homo sapiens
  source 1..225: mol_type = other DNA
taatatcaccactttgggtgttaagttccaacatatgtatttgaaagtgacacatgcatttaatcaactgagatgatcatatttgtattcctaaggaaggataaatatgacctcatagaatgagttaggaggtgtcaagattttgaaaaaaggtattaattcttcctaaaatattttgtagaattcactagtgaaatttaatccatccaaatgggcagtttcccc

SEQ ID NO: 14506 - DNA, 398 bp, Homo sapiens
  source 1..398: mol_type = other DNA
accaacaaaaacaagttacattgtgggttggtgaggacagcacttcccaggcagtgacccgcagtcactgccctcccagaggacgtcctgcctcgcggccgatccaccttctcctagcaccgatcctgagctgagaagctctgacctctgagatctgagggcactcactccgcccaggtgcgcgcgtggcggagggggaacagagaagcaggacagctctccatccttcccgatacatccagcagggtatttttcgctaggggcgaagcgtccttcgcaagccacccagctgaccggcagcggagacagctttctcgccctgctcgcacgcaagtagaaaggcgctgctgagtaccacgtggagccaggcgcatgcgccacgggcctccccgtgaggg

SEQ ID NO: 14507 - DNA, 413 bp, Homo sapiens
  source 1..413: mol_type = other DNA
tcttctgcagcacgcacttctgctaagggctgcagtgagtcacctcaacctgaaccagacggaggctgaggctgggccccactgaggggctgtgacttgcccaaggtcatccagggccaggcctgtgcccacctcagacagagggcacttcagtcactgcagagcaggggcagcagccaggtggccaggctgccgcctctcagagggatcagccagctagccaagtcttgttcttcacaagacccacaagtgaaaaatgaatagcaagtccttatactgctcttcagtaggtactattattattcaattttacaaagaaactgggagccatcctggttgtctgcctcgaaagaccacactctttgcactgcatcgcggcacttccgatgggaaggctcccctctgactctgga

SEQ ID NO: 14508 - DNA, 459 bp, Homo sapiens
  source 1..459: mol_type = other DNA
cgcaacgtgggcctcctgacgcgctcccgttccgagcgcgatcaccgcaagagcgtcctgtgtctggccaggacggcgagcctcgcagcccgcctggcccttccaaccgccttgggtcaagggggctgctctgcaagcccactggccagctctggctcagggcccacgggcttggagcaccgaggccagcgaagccatcgcgctccttgcggaggtgaagaggaccctgagtccccacctgcggctaacttgggccgctgcaccgcggcgcctccgcccaaatcaataaactgtgtctgtcccaggaggcgaactgggtctccaagtcctctaccaaggagcaccatgctcccctcagcccaggatagaccctcttttccaggcctagcgcagagcccggggatgccgcccgggggagcctgaggacccgctccagctgagcctcagagctctgaggtg

SEQ ID NO: 14509 - DNA, 737 bp, Homo sapiens
  source 1..737: mol_type = other DNA
gtagggtagcggggccgaagggctgagcccgctggccacgcagctgtcggggggagtgggcagcggcagggtgggctcccacacctcgggagtccgggtggggccctcgccgcccccgcgcatgtgggcgatgtagtcgggcactatgggcacgatgaccatgtacagcatgttgtccagtaacaagcaccaggcgcctctgccgccggggctcctgcagcgccgcgcccacagcctccgacagcttggtggccgccgcccgggcctggcccgcaggttccgcggattccactcttccgaggacgcctccgccagggccgagcgctggcgtcccgcagtgcagaggcgagggcacgggacttcggggaggctgtcctggccgagcagactcccctgtgcctcaggtggccgcggagctcatggcccagcgtcccggcgaggcgttgcagctactcttagccgatcccgggacccgcggctgctgggctcaggggcggccgggaagtcgggcgcgccgaggggccggggccggagactgggcgcacttcgcccggggcgcgcccagagcagcccccgccgcgctaagaggccgcccgcgctggccgagggacatgctgttgccgcccgcccgcgggctgtgacgcggcgagtcccagcccccgagtggtgcccgggccacttacgtcgctcatgctaatgcgacgtcggcggggcgggggccgggggcggggcgtggc

SEQ ID NO: 14510 - DNA, 519 bp, Homo sapiens
  source 1..519: mol_type = other DNA
gtgatctgggtaattgattaattacctcatatccacaaccatattaattggtttgatatgtacttgaatatattcttgtgaagtgcatactgtagttttgagattaaaattcaagagtgtaagtgtaacaggtatgttatgttcctatacaagaaatccctgcatttaaacaataacaggacattgcatctgctattctgataataattagaaagttgatctctatcccagagaaagttccacgcaggatcctatcagatttggggtaagcatttttttcaaaacatccctaagatagtggaacttttcacctagttttaggacgagcacacggggttcagggcctcagccccgttctgcggtctcagagaggagtccccccttcggccgtgggcgacctcgggcctgggccgccagcaccgtggacagcgccaggagcggggcggggcatccatggagacgtcacgacgcgcggagtctcaggggcgcgcgcccgtgggcggctgcgtcacgtgaccc

SEQ ID NO: 14511 - DNA, 252 bp, Homo sapiens
  source 1..252: mol_type = other DNA
gtcatgtgaccttggggaggttacttaccttctttgtcaggcacacactacttgccagatgtcgagtattcctcacacacagccataactctttattgagagtagaggcaaaaatgaccgttttatattcagtcagcaaataaaagttgttcaacttggttgctaatgtttcttaggactaaaattcaggaaccaaagccacagggtggggcagccaaggcagggcattgtgtgccacatgcctgggctccc

SEQ ID NO: 14512 - DNA, 322 bp, Homo sapiens
  source 1..322: mol_type = other DNA
acacacagccataactctttattgagagtagaggcaaaaatgaccgttttatattcagtcagcaaataaaagttgttcaacttggttgctaatgtttcttaggactaaaattcaggaaccaaagccacagggtggggcagccaaggcagggcattgtgtgccacatgcctgggctcccacctggggccagtgggcttcagtctgtaggtgactacagaaggaggaggaactccgtctgtcaggggaggcagcagggtgcgggccttggcccgcagccctagccggggccggggccagggctggtgcccggggcctcgctgtg

SEQ ID NO: 14513 - DNA, 399 bp, Homo sapiens
  source 1..399: mol_type = other DNA
aatcaggttatttaatgaggtgataacaaatatcacatccttgcaagatatgtagcttcgttttactgaggaaagctcagaaaagttaatgagaagcttgtccttgaacttgagggcaatgctgagagtgcaaaggacttgggattctctatctacagcagcggattttgctgcaagagaagaggcagcaggccaggccttttccttcgcccacagcgcctacgtcgaaggctcccagggacccgccgaactggcggccggtgctgtggccgatcccgcgccgctgcctcgggccttggggggcagcgccacccggccaacggtcggatcacgtgcgggttctgtcacgtgacatcaggtcacgtgaggccggtcacgccccgggcagcttggctgggg

SEQ ID NO: 14514 - DNA, 457 bp, Homo sapiens
  source 1..457: mol_type = other DNA
ttgacctttagataaaggagccccagagccttggagcccaattagtagctaatgaagctcaaagcgagagcctctgcagtaactctctcactcctttttttaaccaaacaccatgcaaaactatatatttgcctcttgcatattagcaaacttcaaagatctaatcaaacattaaaaacttccaaagggttagaagagaacttttcccctgggaatgaaggcaatactgcagaatgttgatttttggttttgcttggaaaggacaacaggaaaatgtaaacatggtctcgtttgcttcaaggtgatcagtttcctccatatatttttcctctagaaaaatgttgatagggtagagaaagaattaaatatttattttccaaaccaaatagttgttcaggatcagcagaggtgtgtcctgccctgcgcatgagtcagcacataagtagttaagctggcg

SEQ ID NO: 14515 - DNA, 501 bp, Homo sapiens
  source 1..501: mol_type = other DNA
ttttatggccttctttaaaatgtgtcctagacagcttagattttacctgtagtctatattctccaagaggaaggaaaacattttatttccccatttcaaaagtgttttcctgtacttacagtctttaatatgtaatatatataaagtatatgatgtatataaagtaaacatatgtaatgtttacaaatgggatcgtattgttttataaacttaaaattacttaatatttggcaatttttgcatgtcattaaattattttcagtgtgatttttaattagttactactcacatttagtaaatctaaaattttgcattctttttatgagcactcataaaaattgattagttttctgttctttactaatctctttgctaagctttgcacagaacttgtcatgctggaaagtccagcaggcctttgcaacttctatctttgataacagtctgccctaagagagagttcatgtataagccttttgttatcaatactctaatgagagc

SEQ ID NO: 14516 - DNA, 381 bp, Homo sapiens
  source 1..381: mol_type = other DNA
agaactatttcagctctaaaattctttagatatttaacataggaaagaatttttgaaaattacgagccagtttgtttacaattttggctttgcatgcatatatatactatgatttttcctatacatacctatggtgaagtttaacttataaattaggcacagtaagagattaacagtaactaataataaaatataacaattttaacaatctcagaatgacatgaaatttaaaatttatgcattgcttatttctagaattttccatttaatattttcagacctcattgatgataattaactgatacaactaatgtacatccactgaagtatctttcgtaagattaatcctttttcgaaaggcttctaagcttggcactgaac

SEQ ID NO: 14517 - DNA, 573 bp, Homo sapiens
  source 1..573: mol_type = other DNA
cagtgctgcaacactgcctgttgcatagtagaggctctgtagttatttgttaaatgaatgaatgaggttactcttacagcccctgggatttggtaagaatccaaaccaaagggttggaaaatgagagcattctggaatattccctgtttttagcaaagactaagcatttcttttacaaagcaaattgtgtgtattagtagagaacaacatatttctgaaattggtgtttttatgaaatatagtttctcaaaggctctaagtaacccttgctgaaatgctgattttagtttgaggtcaagtttcctaaaatgttttaaaagctaagtttatatctttagatagagagatttttctatatttggtttctgaaggtctgaatacttagttagcttctcagtaccttgagtcactaacaaaattaacattttaaataggaagtttacagttcttccctcttttaataaatgtttccttgtataagaatgatctttgaagcagaggcctcaaccgcattccttattacactgctgcagctctggatgtacgctcagataagcagcttatttgtgagcc

SEQ ID NO: 14518 - DNA, 567 bp, Homo sapiens
  source 1..567: mol_type = other DNA
cccgctcgccaagtccccgaccccgcgggaggcacggcctcgggctgcctgtaggccaccgaggtgcggcgcgggccggccagggacggcgggcatcggggcgggaaggccagctctccccgctgtccacgtggggctactgggcatgcgcgggctccgaccccggcctagccgctctccgggttttcgccgcagctcggaggggcggcggaaggtgggccccaggcggggcggggcggctctgacgcagtcggagcgcgcctcgtttcctaggaatgatccattgggcattaatcccaagtgtcgcagccattgtaaaatctggctcccgctaggccttacttagtgggcccctaaaaacgccctcctcagtttcccattacttgaaagtaaaattcaaggggcgttcggggtcccgctcggtcccgggaggagccccccgcggaccccgcccggccggcccgcccccccggccgcagtgaacacccggaggagcggagtcgcgtcgcgcgggaagccgggccggctcgggcagcggactgggcatgctcggcagcccgggaggct

SEQ ID NO: 14519 - DNA, 347 bp, Homo sapiens
  source 1..347: mol_type = other DNA
ttttaaagtacatcaaagacagcagttttctggcactcccttagtttgaaaaaatttacatcacaagaaagcaagccttcctttcacctttctcaaaacatgcagttgaactgaatttcagttgttattttaaagccgtgcttgaaaagcgtatgtgacaaatgtactttcctaatcttcctgagaagagcagtactgtgtgaaattttcactgcctagctactccacccgcagtttggtcccgaaagcggcccaccagcaggggccgcggggtatgcgctgcagggaagagcacggcctctgtccaatgtccctgccggtacatcactcctctgcagggaagcgct

SEQ ID NO: 14520 - DNA, 495 bp, Homo sapiens
  source 1..495: mol_type = other DNA
atttacttatttatttatttattatttatttagtggcatgtcagcctcccgagtagctggaattacctcctgacctcaggtaatcctgccttgtcccaaagtgctgggagcacttttaaaaagatttttttctaagtaaaatggcccccaaagagcccaatgatttttttaagggtttatttttaatttttaaaaaactggataaaaatgaaagaccaggtagagaggaccgctacccactagtccctgctcagaggacaagagaccaaactcaagtcttctttcttgtggttggttgggtgtttacatgtgcaagtgtagtaagccacacaccccacggacataaggtgcctgtctgtggatgccataggcatgcctaagctcagtctctagtgaccccgagtctctgggcaggccatgggcctccaccttctccacggggtagacggcttccacctagtggtagatgagccgcagctgcgtagggtccagctg

SEQ ID NO: 14521 - DNA, 393 bp, Homo sapiens
  source 1..393: mol_type = other DNA
agagtctgttggtcctggaaaaagagggcctaggctggagtgcagtggaagcgatcgttccgcctcagcctccagagtagctgggaccacagggattgagagagagccctgtgctgggtcctgccttggactcccaaaatactgggattacaggctcatctgtcatctttaaagagaaggaagtcgactcgagccatagtccatttgtcccgggcacggtgactccggggtggccaggaccaaatgccgcggcaggccgcacagctgccctggccttcgcggaggactaaggcgagggcggtgtacgctgctccggagtcccaccgcgggagttgaggcagcggattcccccggtggaacgcactgcgcagacggcgccggcgcccgcacagt

SEQ ID NO: 14522 - DNA, 589 bp, Homo sapiens
  source 1..589: mol_type = other DNA
cttttctatagacaaaaatgctctctaagggttcctagaaaattagactccttttactagaactaaaggcaagtaggggtatcctctaattctagttttggaatgtgtggtttccaagctcttaaaccaaaatttactcaaaattaggaaggttttggttctttctgtagactacagctcttaccagagaactcagagtataatgtttgtatttcttttttcaagaaactcagttatgagattttcagctatcatataaccccagtatgtagctgattattgtacacactttactccatgtaatatagtgatataaaaagtgtaaaacaaagaaatattctcctaaattaccttagctataatatcactttgacatagtaaaagtttttactttttaaatatatcgtataagccaataaaatatcttcaaaataatatttaccccaacatttttacaacatttattttaattttataaacaaataacaaagatagttttagtagattatatctgtgagttaaagtttaactcccaggaattgtaaaccaaacctaaagccactgaacctttggagtttggcataacccg

SEQ ID NO: 14523 - DNA, 618 bp, Homo sapiens
  source 1..618: mol_type = other DNA
ctgtgtatgtgggaacttccagggcctcacacatcatatttggaatgtgattcaaatcatgttcccaaaatagaaaatgtagacaatgaaatgctgaaattatacatttatatctgtacacacaaacgtgaacatatgtaaactttcatcattttttaaaatttacaaaagttttcatgtactctaaacaaaagcatccattgttcttgttttgttaaaattaatgtcacatttttattacatagagtactttgctattttgctctaaaaatttatctttggagaataagtagataaacagactaaaactcaatctctgagaattctgatttcttatcttagtggttagaattgttctcacgtctgtaaggaacattcttcatattcttttaatagatgtgataagtggattcagaattactaatctgcattataattggagaatgggtattgttcatttttttttgtttctaaatttcaaccaatattgtgcatttttaaaagtttttttttaagagcacatttacacagatgacgcatttacagagaatatttcctaaagatgtccttcatgaaaaggagaagtttggacttgacaacagtaatttacttaattta

SEQ ID NO: 14524 - DNA, 589 bp, Homo sapiens; identical to SEQ ID NO: 14522
  source 1..589: mol_type = other DNA

SEQ ID NO: 14525 - DNA, 428 bp, Homo sapiens
  source 1..428: mol_type = other DNA
gtttcagaaaaggtagaataattttttttttgtaagtagccagtaattatacattgatttttcttttttaagaaaagttacaatttaggaaagaatctcctggtatcttagttgcaactatttttttccttaaaaaaattaccaatgtgttgactattatcagaagaaatacttctcattccctatcaaatcaaactctcaaatagtgacttatgttatgtaaatgctctctgtgatagatataaaaaaggaaaagtgaatacgcgattattctactgtgcagaataatccttttagcttagcactggtggccaccactaagtttacagttaacacatggcctgtcattcttactagggtcagaaccatctgaatccatccagggttactgtctatcacatggtaattgttgctatttcaaggatcaa

SEQ ID NO: 14526 - DNA, 248 bp, Homo sapiens
  source 1..248: mol_type = other DNA
gtgaatacgcgattattctactgtgcagaataatccttttagcttagcactggtggccaccactaagtttacagttaacacatggcctgtcattcttactagggtcagaaccatctgaatccatccagggttactgtctatcacatggtaattgttgctatttcaaggatcaagatggagtgggaccaggctctctgatccaaccctctgtggggtggcgcgcgcgtattctcacggagtgacatccc

SEQ ID NO: 14527 - DNA, 417 bp, Homo sapiens
  source 1..417: mol_type = other DNA
tgctagggcccaaatccgtttttggcctttgccctaaaaacaaccctttcccaaaggtagtaggctgaaagggggaattcctcgcgggcgccgactcgctcgcatctcctgagaggcaagtttcttcgcaagcgttagaaggtggcgtgggagaagcgacagctcggccacaccgctcgggagctttcaggctggtctgctctggagtcagctgaggcctcccgaacacccccggcgcgcctcggaggcttatcaggctccccgcacgccccgcaagcttccttgggcgcccggcgcgagggactctgagagcccagccgctgcctcggagccccctcccccgcgccgcggcgcccaccgcgtctcaggtttaatcccgggttgtctccccgctctgagcctcacagccagcccaga

SEQ ID NO: 14528 - DNA, 215 bp, Homo sapiens
  source 1..215: mol_type = other DNA
gcgactgacctggcacgttggaccctgaacaacattaaatggtttgattatcagaattagacggtttgtatttaatactgctgtaaagtatttcagatccgctgccgcctgcatttattaaagtcgtctgctataacgctcgctggtagccttcaccccgaaggtgagccgggccagcaggggccggaatgctccgggcccgcggtataaaggca

SEQ ID NO: 14529 - DNA, 217 bp, Homo sapiens
  source 1..217: mol_type = other DNA
ttccggtatttagcactctgtaagaaatttccagagaaaatgcttacccaggcaagcctgccaatgagtaaatgatgaggcataagccagctggcaaagtactagtcacgcagtgtcacaaggaatgtttactttagcctgcacccagattgtagggcatgctcggtaaatatgtgttcattaactgagattaaccttccctgagttttctcacacc

SEQ ID NO: 14530 - DNA, 446 bp, Homo sapiens
  source 1..446: mol_type = other DNA
tgtatgatttcacatatatgaggtacctttgggatgatgaaaatcatcccatgatgtggtgatgatagcacaaccgtgtgtaataataatggtcaaaatggtaaattttatgtctattttaccacaatgaaaaactggaaaagtaaagtcaatgactataatatcataaagtgttcaaggtactgatttctctgaaattggaatatttgaaccgtaaggggtccaggcatggagacgaggcaggaatggccttaatgcattaatggcagcagtgtgcgtgcatgcacgtgtttctgttggaaacaaggatgtcaacaggactaactaggtgaacctagctgtggtagttttgccaatgtattaaagcagctgagataatctggagttaaggccaggcccaggatatccttgttcacaaggttgattgggctccctcactctgaggc

SEQ ID NO: 14531 - DNA, 236 bp, Homo sapiens
  source 1..236: mol_type = other DNA
tttaaaatttgattattaacccttttgtcagatggatagtttacaaattttgaggacttgcccaaaaaatctttgtctagaccaaagttaagtatgcaatcccagcaccattcattgaaaagtatttgtttatcagacggcatcatgctgttttttaatttagctggtatgaacattttaactgtgttaattccagtaaagatcttgcatatggaatatagaaatgttattaattg

SEQ ID NO: 14532 - DNA, 538 bp, Homo sapiens
  source 1..538: mol_type = other DNA
tcctagtaaataatccacatggttcattaagaaaacatatatgctcaggtgaacacatgggtgaaatttaatatggaattgaaatatgtactatgcaagatagattccttaagaaatgtttctctgatttatatgacataattgtattttactagttccatctgtaaaactttgttttggagatttcatatattacaatgtttaagaaatatgctataatgttttgtatagtatatttcttcgtgataaccttatatactaccagtcacacgtgtttgtaaaaatctaaagagtacttttggctcctacagaatgataaaagaagcttaagagattattttatcttgtcaacgacattgttattgaatgtaagctgctaaacttcttagataaagtgtagcacctgctactaattggtgcaaagcgctcaccagtcagtgcgtggtttagcgcactcagctgtctcctgagcgatagctaattgctgttgcttcagtgccagtgaaatcaatcctgctagcagcttagtgttagttgc

SEQ ID NO: 14533 - DNA, 391 bp, Homo sapiens
  source 1..391: mol_type = other DNA
aggctggtcttaaaaatctttcttgagacacatactgctcagtactcagctgaatgaataccaagttcctgtactctgcaaagaacattacccaggcaatactaatatctttgaaagcagctaaacttttttttttctacagcagtagtgaatattttaaataaagtgtcaatgctgtaagtttcccttaaaacgcaaactcaaggaaatgctttccctttttcgagtagagaaagaacttcgcgcggtcgagctcaagctggcaccgcgtaaggactagcgcgcaggcgcagagcccgtgcgcgcctagccataaccgcgcttgcgccaagcagcgaggcccgcgagcgaatcgcctgccccggcgcgaagtcgactgtgacttcaaagt

SEQ ID NO: 14534 - DNA, 219 bp, Homo sapiens
  source 1..219: mol_type = other DNA
cgcttctcagcgcgtcagctcagagaagccagggacttctaagtggtgtagaagacagagaaaacttctaatttttttaagtgaacatgttttttaaagaaaggagcaagattccctaatcccagggccctgcccctcggcttcagggccccgcccctcggcttcagggccccgcccctcggcccggagtccagactcacacacgtgcctacgacccgc

SEQ ID NO: 14535 - DNA, 337 bp, Homo sapiens
  source 1..337: mol_type = other DNA
aggccacatatggtatgaatgattttatcacccagatatggtttggctgtgtccccacccaaatctcatcttggccaagaagccaagttattggacagaagagacacctttttcctctgcaataatggataaggaattactaactgatgatttagaaattcctggttcagcaatttgctctaaatgagactgtagaggctaattccgctctcaccttaagctgcctggctgaggtcagcagtaagttacctggcagcgtccgggggcctgcagccgaggacacttcccagtgtgccaggcggggcggggcgcggcggggagggcgcaggctccttcc

SEQ ID NO: 14536 - DNA, 673 bp, Homo sapiens
  source 1..673: mol_type = other DNA
ggtaagtcctaaggggttcacccgtttcacatttcaataatatgcaacctaaatagagtttagtgttcatgtacacaaaatgatcccgtattttaaacacacactgtgttgtgcagtcttcctgtaaaattaaaaatatcagcggcacaagtcacatgaacatctcatttcacaagtcttaatcccaagagaatatagttttttaaaaaacaaaaacattttaaatgcaccaagctgcctctattaaaaaaagtctcaagatgagtatcctttaatataatttttgcaaataataatctctatatcattagtaacttcgaaatgtcatggaatatttgtcaacagaagtggaactctccaatttttggaaactacctattaaaaaattagggctcaagttagtagggactttttattacctggcactacagatgttcaatatttactgaacgtatttttaattaacctctagatatattgtgtgtctggtacacagtattatattaacaattataacatcaccaagaatggttataaagtgaaactccacattaaatgactgcttataaagtctcttaattttattataacgctgcgaaatactgtttccaaacgctaggtactgaaggttcaacgaacgcagttttcaatcctttatcctggggattgcgtt

SEQ ID NO: 14537 - DNA, 544 bp, Homo sapiens
  source 1..544: mol_type = other DNA
tatatactcaggaaaaaaacctgtttattccatgccagaatgggaggtttgaacagatgacttggaaggtccctttcaaccctattaccgcttaaaagaagaagtaggcttagtcctacttccaatgacactggtaagaattttctaacaaaacaactggtatttaagggctggaaggacccttaggtatctttaggtcttcctaatctttttcatgccattgcctatacagaaaatggtatttctataacacaaataaaaaaattatacagcaatttttgacacatcaatgtctcaaggcatacttgagagggggaaactgaatcccaagtcacgttaatgttaatactggaaaattccagtttccgctcaaattaagcaagctaaacagtctaaagctatattgctttaaatgtggtctcaagaccaccgacattagaacttgttaaattctggggatccagccctggacgctccgctgggcgcgcagcagccgccgatcggacctcggggtcctggatgcaggactgtctgttacgtacag

SEQ ID NO: 14538 - DNA, 597 bp, Homo sapiens
  source 1..597: mol_type = other DNA
gggctggaaggacccttaggtatctttaggtcttcctaatctttttcatgccattgcctatacagaaaatggtatttctataacacaaataaaaaaattatacagcaatttttgacacatcaatgtctcaaggcatacttgagagggggaaactgaatcccaagtcacgttaatgttaatactggaaaattccagtttccgctcaaattaagcaagctaaacagtctaaagctatattgctttaaatgtggtctcaagaccaccgacattagaacttgttaaattctggggatccagccctggacgctccgctgggcgcgcagcagccgccgatcggacctcggggtcctggatgcaggactgtctgttacgtacagcccttgtgaccgtcacgggcggacaccggccaacgccgggttggggtgaggccgccgccgcggtccctccatcaccctcctggcccggcagaggaacccactgctccgggcggccggggacagaggtggctcaacagcgccgcctcgaagccagagccctccgcaggctagaggattgcgccgcaaggccgcccaccggggtacgctctcccgcgcctgc

SEQ ID NO: 14539 - DNA, 478 bp, Homo sapiens
  source 1..478: mol_type = other DNA
agccccttttctacttaaaaaaaaaaaaaagtctgctgagaaaacaattccttccttactccattcaagaaaaaaaaaaattccctttctcagaataaaaagagtaagcctcttgtccacctctcgtgcagcgggccacttttcgagcttgtggaaccacgcgcgcgagtgtgtgagcgccaggggccgcccgcccgccgcggctccccgtgggctggccgggccaatgagcgcgcggctgtaggggcggcgggcggggagggggcgccgagccctgcggatggaggcgcgggcagcgcggcgcgctcattccgcgcgggcgttgctggcggggggcggcgcagccactggacccggaccggggccgcgacccggggtggcgggtggcgtgggcggcgcccggggctgggatgcgccgggggctcagtggcggcggcggcgttggcggtggcgtcggcggctgcagggggacgagcta

SEQ ID NO: 14540 - DNA, 365 bp, Homo sapiens
  source 1..365: mol_type = other DNA
gatcccagctactcatgaggctgaggcaggagaactgtactccagcctgcaagaatcagttttcagcttagctcctgttccctgaaccagtggcaaaagcagctagtgcacgtgcccaggaagccacatgcagcatgtttacgctttaatgatttcttaagaaaaaataaaacaagatcagagagcttactgggagaaagagctgtatgaaaaattaaactattatctcgttactttggtaaattaaaattgccaggcctaggcaaagatctgactggccaggttatgtcttttaaaagccatgtaaatcagcaagcgtaaagctgacaggaccttgcaggcttcgtgagccatgccaatagaaa

SEQ ID NO: 14541 - DNA, 757 bp, Homo sapiens
  source 1..757: mol_type = other DNA
tgataaatttgaactccaaattttcaacacatagcacagtgtcctggacatataaatatttgcatgagtttgaattaaatgcatgtcgtatttcttacttgaaaatcagtaaattgttattctagtttacacagttccttttttttgagatttataaatttgagactactctaaaaaatgaacaatttctagttctacagagccaggctttcgaacacagaaaattcaccagtaagtactttcttgtcatatcctttgacaggtaataatttagaattctttcaaacttcaaaaacatccatcttcattaataagttcataatgaagacttttcactttaagatgcctaattatctttcacagatatttatgaaatttcaattgtgccaagatttacaggctttttactttaagctggtccttccatttattgaagcttcaattaattagacttcatcatgttatagctaaatggatgtgactagaaagagcagcatacagacatctatgtgtaaactgttacttgttggttaacatttatgtttgaaatggaaaatcaataaaagggaacttatattaatttataagcacattaagaaaagaggggacactatttttgatcccaagatagcaacaactgtgacctctattttatgtttaaaacgtttgcacatccactaagtgcactgcagaatcttaaatgcaattaaaatcaatcacaagtcaatcttcattagctattgtagcaaagattcct

SEQ ID NO: 14542 - DNA, 582 bp, Homo sapiens
  source 1..582: mol_type = other DNA
aagtgcactgcagaatcttaaatgcaattaaaatcaatcacaagtcaatcttcattagctattgtagcaaagattcctagcattgaatacttatttgctacgcgcatgaatgaatgaagctcgaaggcagactgcgtggctgctggtcccgtggctgctggccccgcagcatgtctgccgccttttcagcaggcacagacgcagctgtttccgaggaatgtccggccgagcccgcagggtgcgggcagcgagtatcctgggaccttcaggggaggaggtggctcccacaccccgaagagtccgggcccttatttttccaattcttggtacagggccaactcgggcttcgccaggcacagagagggcgaggcagccgcgcggcgtatagcgctcgcccttcccgcgcgctcggtcgcccgacgcctcacgcgcgaggttgcctgggcgcgtgcgcgcagaagggcgggggagggaccaccgcgcgccagcaggtgggcgcgttctcccgcgcgcgtgcgcgcgtcgaagccctgagagcagcgtcccctccccgccgggagcgcgcgcctcccatcctcgcgc

SEQ ID NO: 14543 - DNA, 569 bp, Homo sapiens
  source 1..569: mol_type = other DNA
gaagagtccgggcccttatttttccaattcttggtacagggccaactcgggcttcgccaggcacagagagggcgaggcagccgcgcggcgtatagcgctcgcccttcccgcgcgctcggtcgcccgacgcctcacgcgcgaggttgcctgggcgcgtgcgcgcagaagggcgggggagggaccaccgcgcgccagcaggtgggcgcgttctcccgcgcgcgtgcgcgcgtcgaagccctgagagcagcgtcccctccccgccgggagcgcgcgcctcccatcctcgcgccgggtcctgctcggtctctcagagccgcacactccgcggagctcctgccacagccgtcgccttcgcggcggctctccagccccgcgcctcagcctcggcgccgcatcaccgccgctcttcttgcccacccggccggcagagagagcctggatacgaagcaggaggtgccgcgcctggatcatgccctcaaccccctgtgaggaggtgcctgggacagagttcgcgccgaggcgccggggccactctggctccgccgacgccgctcgccagggcggcaggg

SEQ ID NO: 14544 - DNA, 483 bp, Homo sapiens
  source 1..483: mol_type = other DNA
aatcttatttcaaaattcaaataaaataattcaaattcaaataagaatctttaatagatgctacatagaagccagtggggggactgacagtctttcctttccctaacaaggctgcctttattcaaagggataggctagctagggagctgagctcaagcgggctgctctaggtaggcttctagacagatcaggtgtgatgcactttagagcctattctttttcctaggcaacaaaaaacgcgagcctccatccctgggggtggggaagtctcccgggtatttcagcacttcggcagaaacactggggcattctcattgccagcctcggggggtggctggcacaaagaggccttgcaggtgctcctcgctggatcccggggtcccagccccgccgccgcgccccgcccagctctgtccccgcagcctcgcgggctgccgggctttggctgggcccctgctgggggtgtcgttacgagcatgtgca

SEQ ID NO: 14545 - DNA, 537 bp, Homo sapiens
  source 1..537: mol_type = other DNA
ttaatgaaacctgtttttctttgaaaactcaatttttatttttcaaggtataaatttaaaaagttaaaatacaactctcacaaaagcattttgaggatctgtggatttacaggtatttagaaagaaagtttggttagatgcaaaatgattatttggttagatgcaaaattggttatcttcctatattgcaataaaatcataaacgctgcgattatctttttctatcaatagtgaatgtctcagtttgacattgaaaggttatttccaagttttggtaaagtttttaattgcccaattagaaaaattatgagttttttgttgttatgttaactcattaacttacataggtttggactaaaaaatgggaatcttatttcaaaattcaaataaaataattcaaattcaaataagaatctttaatagatgctacatagaagccagtggggggactgacagtctttcctttccctaacaaggctgcctttattcaaagggataggctagctagggagctgagctcaagcgggctgctctagg

SEQ ID NO: 14546 - DNA, 264 bp, Homo sapiens
  source 1..264: mol_type = other DNA
ctgggtatgcctacataccgatgttccacgtaattaggcacttgattatataccatatgtcaatgttctctaatgttatcaccccaatcatctgtaagactctgtgccagtgattctagaattgctgaaagtttgcaatgacaattcaaaacaagtaaatatgtttctagcactgtgcgaaggacttcatctccccactagccatggcgtcatgggactctttagtccttgagtgaagaacacaaattatgtcttcgctggata

SEQ ID NO: 14547 - DNA, 431 bp, Homo sapiens
  source 1..431: mol_type = other DNA
taatacttcagacagaaccagtgtttaatgtaattaggtataaagacatactgttaatattataaacaatttgaaatgttttgaaatataagtttccacatgaatttatgtatgcctatatgtttccaggaattgttttgggatctctaagggaataaacaaactttaaaaagttgataacatgcatttcaaaatccatttgttgatagatttttaaaattgaggagtcaatataaacaaggtaaaatgtataaatttaagaagatattcagatgtccatggaaaacattaaatgagtcatggtgtcttttctgattttttgtattattattatacttcaagttctagggtacatgtgcacaacatgcaggtttgttacataggtatacatatgttttgttggttgtttaactcttcaaaaacttgacata

SEQ ID NO: 14548 - DNA, 512 bp, Homo sapiens
  source 1..512: mol_type = other DNA
caatcattactatttgtatagcataatgttatgtctaaagaggtgtaatcttcaatgtttgcaaaacagttgcaccttgtttaaacaattgagccagttaagtcaaaaacaccttgcttttgagaatataaaactgcgtgtatgtgtgaaacagatagtgccggagcccggctgacctttccacgtgtccccggcacctgcgaggctggtggggctcggggcgggcgcgagcccggaaggcttagatcagggggctcggaggccctcccttggaacacggtggtgcgggggcagtccttggctttcccgcacccgcagtgcctgcgcgttcccagcccgcccgtggtcaccagacggcggcgggcgggtcccggagctttcagccagctttgctgggcggcctagggagcgcgcccagcccggctggagcgagccccagtgcaatactgcccaagcccgggcggggtctctgttctctggcagaggaggtcccttggcagcgggaagcgccc

SEQ ID NO: 14549 - DNA, 458 bp, Homo sapiens
  source 1..458: mol_type = other DNA
gttgtaatgttaactaagcgtgggtaataaaactagtctggtcagtttcactttccaatttttatacataagtgaaagctgttttgtgtcaacagggcaaagtgtttagaatcatctcaccgggaataaaagtttttgatttttaatttcttaaactgcaaagctagaacgcattacagtaattactgttttatttttacatgctaacaatcattactatttgtatagcataatgttatgtctaaagaggtgtaatcttcaatgtttgcaaaacagttgcaccttgtttaaacaattgagccagttaagtcaaaaacaccttgcttttgagaatataaaactgcgtgtatgtgtgaaacagatagtgccggagcccggctgacctttccacgtgtccccggcacctgcgaggctggtggggctcggggcgggcgcgagcccggaaggcttagatcagg

SEQ ID NO: 14550 - DNA, 220 bp, Homo sapiens
  source 1..220: mol_type = other DNA
tcttataaaagactgcttacttcagcaagaagacctcagtcctgcctcctatctggggcaacagaggccttcctccagggacctctcgaaggagcaccagtgagaaaataaagcagaacacccatttgcttttacaaagttgaaagtttgcctggagctccatcttcattcatatttgagaagaatcacctcctaattaggagcagtcctcatatttaca

SEQ ID NO: 14551 - DNA, 284 bp, Homo sapiens
  source 1..284: mol_type = other DNA
attctttagagttggaaattattctctgcttgggaatagttttcaatatgttccagacattataaatgacttcagcatcctaatattatatgaatcatgcatttatccattcatctatgcatgtatccagggaaaacagatttttcccccttcttataaaagactgcttacttcagcaagaagacctcagtcctgcctcctatctggggcaacagaggccttcctccagggacctctcgaaggagcaccagtgagaaaataaagcagaacacccatttgctttt

SEQ ID NO: 14552 - DNA, 374 bp, Homo sapiens
  source 1..374: mol_type = other DNA
cccagcctgacatttcagcaaagatttcttccggtgtgtgcatcctagcagaagacaccccagcaggccttgagcactgctgctgcttcacttcacataatgaatattcagaggctgcagtcattgagaaatctgcatttcagtgactcagaaacactgatgtatgatgtgttgtaatcagcatgttgtttttaaaagacaacaagatgttttaaaggatgcactgttgagacaggcaatacatgcattgttttccctgttagcaaaatttagtgtgttttttgaaatcttattttatatatttttgattctttttttcaaaggattctaaaataggttttccccttggagatggtggcaggggatacagccat

SEQ ID NO: 14553 - DNA, 662 bp, Homo sapiens
  source 1..662: mol_type = other DNA
tgaaacaatgttataaattccagttctctgtgataaaagggagtttactgtttgagagagaatactttctccttgtatacagaagaactgaaagagaatgcaaaaaggaatccatttcttactatgtgattcactcggtgcaccgactactccaagtgagatgtcctccctttaggagacatgacgtgagggcaatttctcccctcgccccacaccaagtagaatagtaaattctgtgggggcagtggctatcccgccggccttgtccaggacaggagtgcatatcatatgagctcctagaaacaaggacgctcagaggtcccctgctccccactgttgctggaccagggagtgctgccaggaccattgctcggaagctatctgcctgggaaacattgcttttacatagatcgcatgctacagattaataataataaaaatgcaaaaacaaaattgcctaaagatgattttattcccttaagccatgttattttattattattattattatggggatggctactatcagcagcccggaggaaagaggactcgccctccctctcttcccttaccctggcccctgggccctggccgactggatgtgatcgccgggagctgggtgcagcgcagcctcggcctccggcccagccgcgcctttacct

SEQ ID NO: 14554 - DNA, 563 bp, Homo sapiens
  source 1..563: mol_type = other DNA
gttctatactttcatggagttaaatcgactcactttcaaaggtaactttcagagtctgaaggtaactttcagcagcctgcttcagtcgtgtccccgaggtgagggcgtcctgagcccggggcccgctttcccaagtcctcgggcccccctctctcctggggatgctccagcactgggaccgagttcgagctctcgcctctgtcccgggccgcaggaaccgggtccctcgccctcccggagcctcgcggcgccgcctggcacccccaggagggcaggactcctggggccccccggcccgggcctcccgcccgcccgggtccccgcatgcccctgggtgaaggcagccgcaggtaggggggcggcgcggcgctcacctgggcaggagcggagtcctcggtgcccgcgggagaggaggaggcggagtggggctgctgctgctgctccttccaggaacccgcaccaagcgcggccccgcgacgcccgcccagcgcggcctccgctgcgaccgccaggtgcccgcgcgggccggtgcgccgggggcgggcccggctcaggtaaaggcg

SEQ ID NO: 14555 - DNA, 401 bp, Homo sapiens
  source 1..401: mol_type = other DNA
cactggattatttaaagcataatttaagcaacataatgagacccagtctctaaatgcatgcctctctctatatatttaaaattctgatgtgaaaatattttaaaatttaatacatttcaaatgtttttaattgtataataaacaaaatgtaaataataaaataatttaatattaaattcaaaaatgagggcgatataaataataaattttcctttacattttctcctaaccctaagtattagaagtgaaagtaatgtgtaaacacaatatcacttttttgatgagctattttgagtataataaatttggtagcttcctgctccgctgactagaaacagtaggacgacactctcccgactggaggagagcgcttgcgctcgcactcagttggcgcccgccct

SEQ ID NO: 14556 - DNA, 479 bp, Homo sapiens
  source 1..479: mol_type = other DNA
cactggattatttaaagcataatttaagcaacataatgagacccagtctctaaatgcatgcctctctctatatatttaaaattctgatgtgaaaatattttaaaatttaatacatttcaaatgtttttaattgtataataaacaaaatgtaaataataaaataatttaatattaaattcaaaaatgagggcgatataaataataaattttcctttacattttctcctaaccctaagtattagaagtgaaagtaatgtgtaaacacaatatcacttttttgatgagctattttgagtataataaatttggtagcttcctgctccgctgactagaaacagtaggacgacactctcccgactggaggagagcgcttgcgctcgcactcagttggcgcccgccctccacccgggaaggcctgcccagcgtagctgggctctgattggctacgggctacccgattggtgaatccggggcccttt

SEQ ID NO: 14557 - DNA, 594 bp, Homo sapiens
  source 1..594: mol_type = other DNA
cctgatggcaggcacccggttgttggccaggcaccctcagaactcacggtcagcctctgtcttggaagaccaagacagcccacccgggtcggggtcagcggtgcgtccctacgccccctggggggacccctcccgccaagtcgcggaggaagcagcacgtgcagccgcccagggaggaggaggctgggtcggttttgaaacaaaagccaatgtcctccctcggagtccgcggccggtcagctcctagggggaagaacttttccagagcctgggacaaaacggggacacagatggcccagactctcccctcccggcagcgcggggaaagggccggggtctcccatgctctgtgtcgttgtcccgggcgatccgcctccgtgcccgggcccgtcgggtctgcgtagagccgaggcacccgtgtcccagccggtttcatgaatgaaatccaatcgtgtggatataaatagccgcgaaggctgctaacgtcacagtgcgagcggcggccgccacggcggcggagcgaggtgccgggtgctccgttccgcctggctgccccgcctgggagcggggtgggggcaggggaaaggggcgagc

SEQ ID NO: 14558 - DNA, 619 bp, Homo sapiens
  source 1..619: mol_type = other DNA
atcttatttttacctctccttaatatcaaagggaaaatgaaaaagatggcctagatcatcttgaccactggaaggtctgaactattcacagcaaacgtataaatgtgcgggtttctaatattaattgtttatttaaaaattaagttccttaattagtaaacgactaagccatgtgtgatttgtgatgtcagcagaaccccctgatggaatccttgagtttccaggcgtccatttgcaggagatgcccccgcaagtcccagaggtgggtgggtcctggggaggcctccaggaagggcggcccctcgggccctgagggccgcaggcactggggccacaggggccaggtccaaagaccggggtcccagtaggagccccacgcgccagcgggtgacagccctggggggcggggggaggcggcccagggctcccgggaccgcctaggcgttggggccccgcccgcaggactgtccggcaggccgcgaggatgtggagggacccgtggtccccgccccgcagggcggcggctgccgggccgggagcgaggtggcggaacggggactgtggcccgggtcggcggggcggggcggggtcggcgctgtcccggcggctttacaaagcc

SEQ ID NO: 14559 - DNA, 390 bp, Homo sapiens
  source 1..390: mol_type = other DNA
tttacaaatgatacaaagtttctttttaaaataaatttatttgagtaaaaatttgaggacatttaaagaaaaatattaaaaaaatcatgaaggtgttttgggaaaccccgacttcatttctattgatctcaagagcacaggtccttgaatttgagagtgcagctacccctatatttttttcaagaaaaaaaaataaccaacactggcccagggaggtctcgcagaaagcccagagggtctgactgcctctgatcctaggaagttttagccagagatgctctccggggaggcagcgcagccccagcagtctggaaaagctgggtttggactcacccctctttgaagagtttaggaagtttgggggaggggcgagccgcgcaccagttctac

SEQ ID NO: 14560 - DNA, 679 bp, Homo sapiens
  source 1..679: mol_type = other DNA
ttaatactaacactaatgtcaaggctgatataaacattttcatatatatattaatctgttcaatcttcacagtcatgttttaatactgttatttcatttaacagatgaggaaaccgaagtcctgcatagcaacctacatgcaggtaaatacgtaagaagtcaagaatactcatgctgctatgtgacatttcttttgttgtaaatgtttttgttgtggaacacttcaaacatatacaaaaggagaatagtacactttctttctagtgtactattaagtgcactattttggaataaatcacatattttatatcatttcatcatcactaaattgttcggcatgtatctctaaaagataaagacatatttttccttctaaacatgaccacaataccatcatgatactttaaaatttacaatgattgcttagtatcaaacatcaatcagtggttgaagttctaataatatatcttactttaatatttgttgaaacttgcaatgtgctagcattaggtactttgacatatttcatttaaattactactactgcgggctgctgtcggcctcccgcggtccccagccctctacccggcgggcagaggctcgggcccagcgccgccttccgctgggatctgttcccaggcccagggacgccggccccaccccagttgcctaggtgacg

SEQ ID NO: 14561 - DNA, 450 bp, Homo sapiens
  source 1..450: mol_type = other DNA
cttggtattatagtaatatgactaattaattctatatctccctttataacaaagaaagagggagtgcactaattaatatctagagagatttcaataacatagttcatcatattttagctatttttgtaattactttccaactatagccaattatacaggctttccatttacaaatgatacaaagtttctttttaaaataaatttatttgagtaaaaatttgaggacatttaaagaaaaatattaaaaaaatcatgaaggtgttttgggaaaccccgacttcatttctattgatctcaagagcacaggtccttgaatttgagagtgcagctacccctatatttttttcaagaaaaaaaaataaccaacactggcccagggaggtctcgcagaaagcccagagggtctgactgcctctgatcctaggaagttttagccagagatgctctccg

SEQ ID NO: 14562 - DNA, 336 bp, Homo sapiens
  source 1..336: mol_type = other DNA
cagctgggtcggagcttgcgagggcagtgcatgcaaacaataaatatacacatttaaagcctttattgtctatttaactagtttgcaaatggattttttcagtttcaaactcccctcccttttttggcggggggggttatataaacacacgtactagtgtatatacttcaaaattaaagagagcctgaattcatattctatttttttgcgaagcgaacaaatgcattaatatttatatgtttatataatcgataacccacttttcccttccatgtaaataggcatcaaaagataatttaacagattagttatctacatgtctactttatattagac

SEQ ID NO: 14563 - DNA, 355 bp, Homo sapiens
  source 1..355: mol_type = other DNA
acgtactagtgtatatacttcaaaattaaagagagcctgaattcatattctatttttttgcgaagcgaacaaatgcattaatatttatatgtttatataatcgataacccacttttcccttccatgtaaataggcatcaaaagataatttaacagattagttatctacatgtctactttatattagacatatacaatgtcagatgcacagtggagctttgatcaatccatctttggaaaaacatagttttttcaggagctgaaaattgagtcgttatagaaatattaggacatattttcaatcatttcctgccaggacctgatgcaatccattcaagccaacaagtttggagaga

SEQ ID NO: 14564 - DNA, 324 bp, Homo sapiens
  source 1..324: mol_type = other DNA
aggctggagtgcaatcggcccccggggttcaatggagtagcttcaaacagtattcaatttatctatttatttactttttaaattttattattattatactttaagttttagggtacatgtgcacgacgtgcaggtttgttacatatgtatacatgtgccatgccctatgaatttattttcaatagtttcatcttttattcttattattttagctagaacttctaaaattgttaaattatattggcataacagacattgtaattttgtttttgattaactgtacttattcacagctgttcttgctctgttaggattaacagagca

SEQ ID NO: 14565 - DNA, 608 bp, Homo sapiens
  source 1..608: mol_type = other DNA
ttcttccaagggtggtacaaaagtagcactattctatatgcagcagttaagtcaatgcatacaatgaacttcttaggacattaggacttaattctttcttaaaaggctttagaatgaagtaagattatttgacttcttaaataatttcactggattgagaaataacttaaaacttcttgcagaatgattatgtacagaggcactttgagtgaagatctattagaaaagccctaaagaaatccacacacagtttgatttcctcatttctctaataaaagcttatatgatatatttaaaaactggttatttcaattatttactcttatcatacttcttccttgcttaaaataaaatgataaaacataacaggatatagaatattcaagatttttttaattccagaattcaataattaagagaaacaatgtttttatatgaatgatgaagaaatatacatgtgtatatgtaacataaaagatattttcacgggtaagcaaatatatatataaagccctgtgttaaaaaaaagcacaggttcttttttaggcactgtgtatccttaaagagttacagcctttaaaagaggtttatatctgatatggtttagg

SEQ ID NO: 14566 - DNA, 412 bp, Homo sapiens
  source 1..412: mol_type = other DNA
tagactcttcaagaagaggcttcctcttgccttttcaaggattttgatttttaaaaatcccatgtttccctttataattaacaaaatccatgaattaaaatgggtctttgtgctattttgctatcaccgaatagtatctcccatgatatctgggtgaccctgggggactgcagcctcgagtcttgggacaggtgcgctccgccgccgaagctttccccgcccacatccctgtccgggacttaagtccggcaccgccgccctctcccccgccccgccgcgctagagcctggggtctcggcaacttccggcggcgggagctgcagagcgcaaggcgcgcccactgcgcgtgcgcttcggcccggctcctcctgcgcccccggcccctgcgactgggacttggtacggccgggcg

SEQ ID NO: 14567 - DNA, 309 bp, Homo sapiens
  source 1..309: mol_type = other DNA
agttaaaatgaccacataatatccaacagacccagacagggtctgtccctggattttttggtagactcttcaagaagaggcttcctcttgccttttcaaggattttgatttttaaaaatcccatgtttccctttataattaacaaaatccatgaattaaaatgggtctttgtgctattttgctatcaccgaatagtatctcccatgatatctgggtgaccctgggggactgcagcctcgagtcttgggacaggtgcgctccgccgccgaagctttccccgcccacatccctgtccgggacttaagtccg

SEQ ID NO: 14568 - DNA, 420 bp, Homo sapiens
  source 1..420: mol_type = other DNA
aagaggtaggtcttgattatcttcatttcatagatgaggaattgaaggaacagtctagttacttgacccaggccctagaaccaggatttgaatcaagtctgatgccagagcttggattgcatttgatgtgataattcatttgtgaaaaaacaaagcaattcatttgttttcatttgtcaaaaacaaaacaaaatttcaactaagataactgttgagctctttaccgttgtctacagatgaacagaatctcttctcttctttgaacaagaaatccttcagaaggaatgatttgccgtcttctcttcaggacatcccctctttaggaggacaaattttttctccagggaaaggggtatagaaagcgccgcgactgcgaggctgacacgcgtctttccttccctcccccggggaatgatccca

SEQ ID NO: 14569 - DNA, 429 bp, Homo sapiens
  source 1..429: mol_type = other DNA
gtctacagatgaacagaatctcttctcttctttgaacaagaaatccttcagaaggaatgatttgccgtcttctcttcaggacatcccctctttaggaggacaaattttttctccagggaaaggggtatagaaagcgccgcgactgcgaggctgacacgcgtctttccttccctcccccggggaatgatcccagcatctctcgcagtgatcgggctcccggctgggtggcgggggggcagatgatgctcccgccagctgggcagagcaagggtgttccccgcggaggtggcagccctgggccgcggcgttccggaacccccgcacccacggcgcggtgccccacggtgcccgcgagcgccgcccccgctggctagccgcgcctcgctccgccctggacgccgccggtcccggcgcggaggtgcggcgggg

SEQ ID NO: 14570 - DNA, 562 bp, Homo sapiens
  source 1..562: mol_type = other DNA
aagtagttataagtactcttgtgattatatttgactcacagataatccagaattgtcttctcatctcaaatctttaacttcttcatatctgcaaaggtaacatattcacaggttctgagaataggacatggacatctttggagaccattattctgctaaccatactagtcatgtgagctcaggaaaattattacatctctgtttttcatctgcaaaatgatagtattaggtttctcaaaatattgttatgaaaatataataagataacgcaaaacagtgctggtacttttgtaagcacttaacattttttactttaagaaatgactgtcactgaaacactagtattcacctgttgtcacaaacatcagtatctttcacaagtttcatgtagaggtaataattcttaagtctttagacagtattatggtttgaatgtgtcccctctaaaactcatattaaaaattaatccccaatgtggagtcaagagggctctgcactaatgaatagattaatccatttatggattactggattaatagtttaacgggttaatgaattacca

SEQ ID NO: 14571 - DNA, 480 bp, Homo sapiens
  source 1..480: mol_type = other DNA
tccaagcttccatctggacgcccccacgcagccgaccgcccagacgcgccgggaagggcgcccgctccgcgcagcagctgaaggggggcggggagcgctgttccgttttcgctcctgtatgaaaaaagcagtcagcttccgtgaatgcatgtagcttttttccggaggctagggaggcggagccgccggcaccggatcttcgccttttttggaaagtcccagagaaccggaattcctccccgccccgggaggctgagccgcagcctggagcagctcgctctgggtccatggcgcgccctctcccccgcgatccctgcgccccggacccaggctgcagctagggccgcgcgcccgggaccccagcgatccccgccgcctgcgagctggaagtcgcgagcccggcggagtccgcgcggccgagcccgtcctcagtccatatatgggcagcgaccgggtattgaagacctgcccataaatact

SEQ ID NO: 14572 - DNA, 483 bp, Homo sapiens
  source 1..483: mol_type = other DNA
cagaaagctagagcttctccttttggcagatggagtcacttcctgattggggtccatttggaactgagatcttcctgcttgaagcgtttttgcagcaaagtcatacccgaagatccaccagtgtgccctgggggcatttctgtgtgccctgggtagttcaagttataaacttaagtttgattcaaagagaagcaaatcttaaattaataggcaatctgaactagaagttcaatccagactgtgagtctcggatctagactcagcggcggtgcctgggggccacatggagcctaacccatgctccagactcttctgcatgatataatcctgcagtaagggggaagccactcagctttcccagtgtggctaagtaaaattccagggtacagatgagaccttatttaaatgcatattaggctagactattgcattgtcagggcaaagggtgagcttttgccttgcagagtcttagcataactcagg

SEQ ID NO: 14573 - DNA, 433 bp, Homo sapiens
  source 1..433: mol_type = other DNA
gatcattgagctcacttgagctcagcagttcacttgtagttcctaggattgcgtcagcaagacactttctcaaaaaaaatttgtcagtgaattccatgacagaacgaacctagcttttgtttggcacataattgttaaatgaatgcagtattatatttggctagaccaaaattgtttccctatcagtttgtgagcaacttgagggcagttagtccagtgcatggtctagaattgctcaaatcggccttttgaaaaaatgaatcatgtaagttagactttaagaacctaaactaacgcttctcgcgagaggaaagattgaccgctcgcaagcgtacatcagctggtgccccgccttccctgggccctcatggcgccgtgcgtggcctcggcggtggcgcagggggcgggcccgcggcgcggcgccggaggagga

SEQ ID NO: 14574 - DNA, 284 bp, Homo sapiens
  source 1..284: mol_type = other DNA
aagcaaactattttaaagaaagttgtttctttgttggatttttaatcaaaacaaaaaagttcaaatgcttaatagtagggaccatggtacatgtttgtatgccagcctggctattccatccacagtctaggtctggaggggcagggggcgtgtccatgacagtcccttcctgacctcagctttgctctcctcagaacctgattcttccctagtgggctgagtcaggctccactgcaagctacccatatttaagggttggtacttcaagagacaaaaaaacccag

SEQ ID NO: 14575 - DNA, 633 bp, Homo sapiens
  source 1..633: mol_type = other DNA
gttgctacatatgattagtaactaccatagaactctagaatttagatagatgttaagagactatattatataacacatctgagaaatgcattttatgctttcaaattgtatcttagaactatctaggttaagaaatggttgaggaatattttcaaatctaccaaaataaatattaccagtttttttttagtaaaatgcctatgagattgttgagatcattgtctaaaaatattttaaattgatttattttgaagtttttaatatttttaaggcaaaatggttatactaataaataaatcgtgcccaaaaacatacaaagtatatttgatgctttatttttaccaggtaaatctggaaagcaaaaacttagtatttgcatttgctttatgaaggagacagtaaacttgagctttcagagtaatcactagtaatgtgactcgtgctggaagtgactccatcagcacctgtgacgggggacactgtgtttccacgcagacagagtacagtgggaaaggctttctccagctgcggaggatgcagtagtgcttcagctgcaggatttcttagtcgttaacaccacagtgctgatgacaaagagcgagttgtaatcctcatcactgccagggctgagcc

SEQ ID NO: 14576 - DNA, 645 bp, Homo sapiens
  source 1..645: mol_type = other DNA
caaaatattagcatatcaaaataaaattattcatgagatacctcttaattttttttatattcaatgtgtattttgtacatcacacatctcaattcagattaactacattttgctcagttgctacatatgattagtaactaccatatgaactctagaatttagatagatgttaagagactatattatataacacatctgagaaatgcattttatgctttcaaattgtatcttagaactatctaggttaagaaatggttgaggaatattttcaaatctaccaaaataaatattaccagtttttttttagtaaaatgcctatgagattgttgagatcattgtctaaaaatattttaaattgatttattttgaagtttttaatatttttaaggcaaaatggttatactaataaataaatcgtgcccaaaaacatacaaagtatatttgatgctttatttttaccaggtaaatctggaaagcaaaaacttagtatttgcatttgctttatgaaggagacagtaaacttgagctttcagagtaatcactagtaatgtgactcgtgctggaagtgactccatcagcacctgtgacgggggacactgtgtttccacgcagacagagtacagtgggaaaggctttctccagctg

SEQ ID NO: 14577 - DNA, 409 bp, Homo sapiens
  source 1..409: mol_type = other DNA
cgatatcggtaatattaatacaaaataggtaggtaaaaaatattaggtagatacctgtacaaatattacaatgaatttggaattgtaagctttcatgcacacaaagggaaaaaaatttcctaaatttgaagttttcattgaaaaagtaaatgtagattacgtattcataaatcaaaaaaagataatcaattctgcatggcatttaacattttaattgacaacatttttcgtcttatttaaaatcgtataaaaccctatacctttctaacaagaaaagcacataaaatttttcacttttatcctttacggttagaaagccaaaccagggaagctggccgcctgtcgccatgagtggtcccccacctgcccgcgcggcgccggactcgcggctccgcctttcggggaggtc

SEQ ID NO: 14578 - DNA, 723 bp, Homo sapiens
  source 1..723: mol_type = other DNA
cttactattagagcattcttgtccagtagaaataaaatgtgagctacatgtgtgattttaaattgtctttacatcaaaattttaacataggtgtattaattttacagtattttatttaacccaatatgtcaaaatattagcatatcaaaataaaattattcatgagatacctcttaattttttttatattcaatgtgtattttgtacatcacacatctcaattcagattaactacattttgctcagttgctacatatgattagtaactaccatatgaactctagaatttagatagatgttaagagactatattatataacacatctgagaaatgcattttatgctttcaaattgtatcttagaactatctaggttaagaaatggttgaggaatattttcaaatctaccaaaataaatattaccagtttttttttagtaaaatgcctatgagattgttgagatcattgtctaaaaatattttaaattgatttattttgaagtttttaatatttttaaggcaaaatggttatactaataaataaatcgtgcccaaaaacatacaaagtatatttgatgctttatttttaccaggtaaatctggaaagcaaaaacttagtatttgcatttgctttatgaaggagacagtaaacttgagctttcagagtaatcactagtaatgtgactcgtgctggaagtgactccatcagcacctgtgacggggga

SEQ ID NO: 14579 - DNA, 529 bp, Homo sapiens
  source 1..529: mol_type = other DNA
gaattatcttttactatcgtcttaactggaaaaaataaaaatatctaaactttaacatcattttctcaatttggtactgtcacaaaaaaaaaaaaaaaacagttttaaaagtctgcccttgaaatgatatttatacagttgtaaatcttacagctgtaatatagttgtaaatcttaagaaacagtctttgcagatgctctgatggcattgcaccacgagactcgtggcacacacggaggcctgtgaggcacacctcaaagtcttggctctccaaaaccagggcctggtcgagactctcgccgcgagtgtggcaggggccaaggccgcggcagcgaggccgtccagcgcgggctaggatcccgccagcccagccctggagcccggccgcctggccccagccctggcccgggccaacgcgccgccgccaccgcctatcagcggagcgcaggggcggggtgctgtccggactaggctgccgggccggcgggcgggggcgggcggggacgggcgggggaccgacctctgcgca

SEQ ID NO: 14580 - DNA, 491 bp, Homo sapiens
  source 1..491: mol_type = other DNA
gctttaaaactagaaactttgcgatttaatcaaatgaaaaattttgaatgctgtgcaaatctgattaaatagggctagtaattcacttctttaacaaaaagtctggtaatgttatttttcctaaattctaaagcttatcagagaagccacataaacattttttcatatacctttatgaaaccttctgtaatgaattcataggccctagctgtaactacggagagaaaatcagtttaaactgtattcaaatacatttacacgattaatatttccgccgagacagggccgaattcggggatctgttgggaaaactaggacccttcccagggatcctgggctgggagcgggctcggcactgccgtcgcatcctcgggaggatcgcggagcctcccgcgctcggcgtctgcggagcctgcgcagggagcagctgcgaggcgcgccgctcccgggcccgcagggcggtgccgcgctgcgcggggagcaggagcggg

SEQ ID NO: 14581 - DNA, 463 bp, Homo sapiens
  source 1..463: mol_type = other DNA
ttttcactgacttcttttttaaatgaagataacaatgttgttgaacaggatcataatgactcgcttctgaagctcagcttgaccttgagaaagttacctgtttcctcatctttaaaagagaggttataataggacccacatcatactattgtttaaagcgtagcccatttaaagcacttagaaagtgctccataaatattattagtgtaataaatagcagcaacatcaataaagtatgaaccaaatgatctcttgattcgtatcctaaaatggtttatttcccttctaattaaaagagaattacaagccataaaatcaattatatacttgcataatataatcactgtgactccaagagtgaaaagctcaataattcattttataaatttcagtttaaagcctgcgtttgaacttaatgtccacggtgatcattttccagcagagagcctgctcatttgcaagt

SEQ ID NO: 14582 - DNA, 625 bp, Homo sapiens
  source 1..625: mol_type = other DNA
tgattgctctattataaaaggattgagcagtgcagagtattgtgaaataatataaatatgttactaaaatgttttctaaagtgaaattaatgtagaaatatctataagtagaatttctgaatcttttggtctatattttaatcatataacaattcagattaattcaagatatttaaattaccttcattagttattcctaaattactgttgtaagagctattgacaaatatatgaaggtgagataagaactgcttttctcaccccaccgtacttcctgaatctaaaataaaagttgatattataaggaaaagaaagaatggcttttctgtggatagcctgatttaatttctgttaaaaataacaggcatattcttaagtaacctgaaaagggaagtatcatataacatgcctgttttatattttttctttctacttttacaaattctcaaaaattctactttgggatttatgcaagttgtatttagaagttgagtaatgtattattatttcattgtaaatctgaaaaatagaatttcaggtctgattctgctgttgaaatacactagggtgcttgtcaggctgttatgcatcataagccaaaatttctaaatacaagaaattgctt

SEQ ID NO: 14583 - DNA, 464 bp, Homo sapiens
  source 1..464: mol_type = other DNA
atcatataaaatgaactcctttcatagttgattctcggagagccaataaataaatgctttctttttattttgaattcagccttttaagaacaggactgccaaaactcaaacaagtagttcatattttagttagcacctcttgttttagaagctattagaagaaagaagattgagaaaaaataaattttggtggagaagacttttttttttgtttaataatgggttaacctattgagtttttggtaaatcttcagtttagattctttactgataatgatgtggttcctcataaatcagatgtgacacatggccttgatgccatcatagacattgaatattcagcctttggctttaattagatagaagaggttcttcttttggaaaggaactagagaaatgcaaatctaaacttattcagagctatgtttttcagtaacaagttgtcagtgaggtcagtgatgggt

SEQ ID NO: 14584 - DNA, 353 bp, Homo sapiens
  source 1..353: mol_type = other DNA
ctctaaagcacaaatcactattttatttttttattttttgagtctggagtgcagtggcaccatctcggctcactacagctggactacaggtgtgggccaccaacaaatcactattttaaatgatgagctcagtgagctgagactgcaccactgcactccagcctgtaaacaaataaaaaataaaattaagtattttaaacactaaattttttttcttttttttttttaaaggatagagacaaaaatatatagtggcaagtttctgaaaatagacagtctttattaactcataagacaaatggttcacatgcatctcttatattcttttcttctctgtaaacagccaatgagag

SEQ ID NO: 14585 - DNA, 392 bp, Homo sapiens
  source 1..392: mol_type = other DNA
tacatctggttatctcatttaaatctatgacgttttaaaatacttattaccatttaagacatgagaaaaattaagtttaaggtcttcccaggaggacatatgccttcaaggattttacaatgtataccaccgagagtgggaaaggagccgcctccttttgcctctcttcctacttattaacaaaacagaataagtcttagccagcttcagctgtgttttaacccttagctaaatatagacaaggctaaggtcccaggggaggaagggccgccggccgccggggccgagtgcgcttccagcccaggcggagcggtagacgcaacagcctccgcccgccacgtgacccgggtctggcccgcgtgggtggcgggagcgccgggtttaaatctccc

SEQ ID NO: 14586 - DNA, 534 bp, Homo sapiens
  source 1..534: mol_type = other DNA
gttccagtgaactgagatcgcaccattgcacagagcgagactctgtctcaataaataaataaataaataaataaataaaaatttgaatattcattctagcaatacccaacttacaatttcaaaagtgcattgtttcatgcagccaatgtgtaattttctctgatagaatgagaccctgcaattcaagcctatctttcagggagagtagagtagcttcagccctggctccagttgaggccatgggataaatattcataattgtgatgtttcatctgctactttaaaatctccttgggaaaaaaccaaaaaacaaagtgattttcttcattaaaaggctttgtgcacgccgaagcattctcaaaaacagttgacatcttcttcgtttggcttttccctctaagcaacgcaaagcggcacactgcgcaggcgcctgtggccagccacccccccccccccccccccggaagattcggcgcaggcgccggtgccggggccgggaagtgggcgggctcgcgcgcgtgctctgcggttcac

SEQ ID NO: 14587 - DNA, 683 bp, Homo sapiens
  source 1..683: mol_type = other DNA
ttccaggctggaatcgatgatagcctgaactgaggcgaaataattactgccaaaaagcaaaggaattatatatttatatgttatttgcataagcaagaagactgtgaacatatatatagtaaatatccattaaatatttgtcaattgagcaatcgttcgttgtttagattgttatctttctaaggaagggaatttattgtttccagtgcctgacagaatactatgtccataaaataatctcaaatctaattttactgattaatcaaatgagggaatccattaattatctaagacctgtgtctttgaatttctctctacatattgaaatatctggacctattgatttttatattttaaagtcttaacagagaacactgaacatagcagaagtttaataaatctctgttattaagatttcatcagtgaaatacaagtttgctcattgtaggaatttagcaaatattcgttaagtaaacatgatttggaaatcttgctattggcaggtacaattaaatctaacatgaaaagtttcccttgggggaaaaagtaaagtttcccttaatgcagatcagagtatgattctgaaagatgttttattttttactatgaaacaactctacccacaggagaaaatagctcctccaaggggagccacatgctctgatacccatggcagtggcatg

SEQ ID NO: 14588 - DNA, 635 bp, Homo sapiens
  source 1..635: mol_type = other DNA
catttttaccttgaatttttcacaaatatgttggaaatataatcatttgaatatttgcagtggttatgagcacagactcagaagttttaaacttctttctaagcctcaagttttcatctgtaaaatgagaattataacagtatgttaacttattactaccaagactatagtatatttatgtgtgttaatataatcattatattaatgtggtgacaattgttccagtgtaacttagtctcagagtgctcttttaaaaagttctgaatagattttcttcttggaaataatactttttgaaaagtgtaaactttgatatgtactacataccaaaagaacaagtaaaggaagctttgttgtgttttaatgcaaaccacacagtaaagctttaatttaatcaccttaaaattaggggaacaaacaggaagtgttgtaataattgattgttttttggtaccagataaagatatttatacatgtaatatgcatcctgtgtatagatatcttatgtattccatatgcttttcttcactcttattttcatttagactaaggagaaatcaagaaagcctatttccttagtcgcagactgagttattaaagttgatctgaaagagcaatctgttctaaatgactgt

SEQ ID NO: 14589 - DNA, 608 bp, Homo sapiens
  source 1..608: mol_type = other DNA
atgttggaaatataatcatttgaatatttgcagtggttatgagcacagactcagaagttttaaacttctttctaagcctcaagttttcatctgtaaaatgagaattataacagtatgttaacttattactaccaagactatagtatatttatgtgtgttaatataatcattatattaatgtggtgacaattgttccagtgtaacttagtctcagagtgctcttttaaaaagttctgaatagattttcttcttggaaataatactttttgaaaagtgtaaactttgatatgtactacataccaaaagaacaagtaaaggaagctttgttgtgttttaatgcaaaccacacagtaaagctttaatttaatcaccttaaaattaggggaacaaacaggaagtgttgtaataattgattgttttttggtaccagataaagatatttatacatgtaatatgcatcctgtgtatagatatcttatgtattccatatgcttttcttcactcttattttcatttagactaaggagaaatcaagaaagcctatttccttagtcgcagactgagttattaaagttgatctgaaagagcaatctgttctaaatgactgt

SEQ ID NO: 14590 - DNA, 526 bp, Homo sapiens
  source 1..526: mol_type = other DNA
tgacttaattaagaaagctagatttaaaccaatgtgtttcatgctatcagaatctaagaatgatctttttaaagaataataaccatcatttaagtctgaattttcaaagcttctaccatgattgataatgttatagcatcatttaatctatactaagcaatcaggttaacttttttcaagtttatttatttatttatttttaattttattatgccgcagcgcaccaaacctggctaatttttgtgccagcctggtcttgaactcctgacctcaggtgatctgcccacatcagggattacaggtttggacgaacaatccaaaaaagctctcagctttaaaacgttagaccttagaaaatgtatcagtgatttaatgagagtaaatttcctattgattaaaattaaagatcttaaaaattaaaatgaagagttttcatacatttaaaaataatgccatttttttgaatgatgaactatggtataatgcatttagtgttcattccaaacgtcaatcatacagctcaaaa

SEQ ID NO: 14591 - DNA, 498 bp, Homo sapiens
  source 1..498: mol_type = other DNA
aagcaacatacatgcctcttgtatgtttcatgcatttcattaaaagcagagcttaggtggatcacaaggtcaggagatcgagaccatcctggctaacatggtggcgcagtggcgggcgcctgtagtcccacctactcgggaggctgaggcccaagatcatgccactgcactccagcaagctagttctggctgactatgattatgctgctaagttctatgtataatatgaaaagtcaatacagaatatggaaaaaatcaatttagccagtattttaaaatgaatttcattttagaggttttaaaaagtttcacctgaggtcaggagttcgagaccagcctggaggtgcctgtaattccagcagtgagccgagatcggtgccactgcactcccgccaagttaggggattatatatctttaaatgtagtatctttgaatactggacaccaagtaaaacattaactttttgatttccttttccaagaagaagacgtaaagca

SEQ ID NO: 14592 - DNA, 499 bp, Homo sapiens
  source 1..499: mol_type = other DNA
agccttttttggaacttaaaaaaaaagccataatgtgtcattaggaaccttggtgacatgacagcaaaaccaaaatgtacttatttattaggtgtcacccgcgcggcacattgggacgaagcgcgctggcgggcggccagcaactctgggccaggggaaggaggcggacacccagcccgagagccgaaatcggccccagtggacgctttggtggaccagaaaatccgccccgcgtttgccggtcgaaccacgtggggccctttccgcgccgtcgatgcctagccagggcggggccctcacagaagtgggggcagatcaccggagaacttctccagagcgactgccattgccatcgccccgaggcggcagagtgcgcgctgcagctctttaactggaacagcccgcaacccaccaccgcgcaggcgcgctgcgtgccgccagcgccatgcgaaaccgactttcccgtctcgcgagagtggggccggccgccttcgcagtt

SEQ ID NO: 14593 - DNA, 432 bp, Homo sapiens
  source 1..432: mol_type = other DNA
gggtcactcaaacctactgtttcaaggtaagattttcgtaaacttttccttggcaatcttgagaaagcatcactgaacatcttcaataataataagtttttgtttttagagctggaaaagtaggtaacaatattcttataaagttttacatgaattatcagaaattctccttgtttaaaatacgattacagtgtactatactcctacactaataaccgtattttgaagtattttacttctagagcggaagatttaacatcctgggttgttttaactgtttcccaaaagtaaaacttaaaaacaaattcttattaacgtttaaacatgaaaaaaacagtacgtactcttttcgaagttccaaatctggaatataagggccggctaagcttatctagctgccctagagaccagaaagctagggagagtacggct

SEQ ID NO: 14594 - DNA, 402 bp, Homo sapiens
  source 1..402: mol_type = other DNA
ggtcgccgctcggaggccgccgcttggaagcggcggggctgcgcctccccgaccatctcccacttcagggagggcggcttgccgacgccgaggcccgaagtaggggacatccagcatcagtggcgcggccaccagcttccgaaaactgatgccgggcgcgctcccgatggaaatggcgccggatgggcctggcctcccaccgcggcctcccttcctccgcagtctcggcagggctacctgggctgacgggactgcgagtgacttctgacgcaggaggcagacggcctcctttgtaattctgccgagccgtactctccctagctttctggtctctagggcagctagataagcttagccggcccttatattccagatttggaacttcgaaaagagtacgtactg

SEQ ID NO: 14595 - DNA, 650 bp, Homo sapiens
  source 1..650: mol_type = other DNA
ggcggggtggcgcgcgcctgtcatcccagctactcaggaggcaggagaatcccttacaaaaaaaagtcgtaatttgggactaactagttttattgccccaccagcccggtggaagcaacgtttgcgtgtggccggccgccccttgaaatccggccttcgcgctccagcgaagcccccgggacacgggaccgagggcccagcactctggctcctcatctcctcgcggtcccagcggatgcgaggaggcttagagacggcgggcttctctcccgcccgccgcagggtccgcgggtccccgccccgcccggggcgccgctccccctggggccgcccgggcgccctcccgccgccgggggcgctgtgggctgcagcgggcctggctgcagatgcggtggtggccgccgagcgcctggaaggagctgctggacaggccgagggagcctccgcccgagaccgcgcagccgccgccgccatgggtaaggcgagcgggccgaaaccgaacgctaggccctcagtcccgggctgagggccgcggccaggcggggtggactgggagctgggggagacgccgaggccgccagtcggaactggggcccgaacccaggatgggcggggactgcctgggactcgggggctcccggggtcgtcat

SEQ ID NO: 14596 - DNA, 425 bp, Homo sapiens
  source 1..425: mol_type = other DNA
tgacctatacccagccgaggtctgaatttcataatgaaatatttttgaattgtttgctttaggcggggtggcgcgcgcctgtcatcccagctactcaggaggcaggagaatcccttacaaaaaaaagtcgtaatttgggactaactagttttattgccccaccagcccggtggaagcaacgtttgcgtgtggccggccgccccttgaaatccggccttcgcgctccagcgaagcccccgggacacgggaccgagggcccagcactctggctcctcatctcctcgcggtcccagcggatgcgaggaggcttagagacggcgggcttctctcccgcccgccgcagggtccgcgggtccccgccccgcccggggcgccgctccccctggggccgcccgggcgccctcccgccgccgggggcgctgtgg

SEQ ID NO: 14597 - DNA, 409 bp, Homo sapiens
  source 1..409: mol_type = other DNA
aagccctgggatgccaagaccagaagaacactttgtctgctattgaaaaattagaagttttgtagaatttcctacccaggctggagtgccgttgcaggatctgcaacaccatgttggccaggctggtctcacctcccgcctcagccttccgaagtgctgggattacaggcctggagtttctattttctcaataagttttctgaaaaaaaggggagattgggcaactacatgtggttgtgttcaaactaagcgtgtaaaggttgtgttcaaactaagctcccttcccagtcctaagcaagggagcaaaggcagggggccctgctgctcaggtgaggggccccacgtggaacgcgccggcgcgggaggggcggcctggcgcagtggcgcatgcgcgcgaggtgcgcaggct

SEQ ID NO: 14598 - DNA, 263 bp, Homo sapiens
  source 1..263: mol_type = other DNA
ctggagtgcaatggtgcgaggattacaggcgcccgccctcacggagtctcactctgtcacccaggctagaggcctctcgagtagctgggactacaggtgcccgccacctggtcgtgagccacggcgcccggcatccaggctagtcttgaactcctgcaggcgagcctgggtgacgccctgttccgcgtcctggccccgcccctcccggcagagccccttggcgcgtgacacaggccccgcccttgctgtacgccatcagccgg

SEQ ID NO: 14599 - DNA, 395 bp, Homo sapiens
  source 1..395: mol_type = other DNA
ctttgattgtgccattgaaaaggaggcaaattttattcatccttgtatgcctacattgtagtgcaagaatacatttgtatgttatacttatgtgtatacgaattgaatcctttctcttcacttgaagtttgacctggaaggaatgaagattccatgaacagcattttcctgtcttaattctggcgtaatgccactggttattcctcctaattcggacaatggtgtcatctctgacctggcaccttcttcatacatttataaacatgcaatttagagatcctaaaaactttttctagagctcccctgggaaaaaagttaatgaacctctctacgtcttcttcggagacagagaagttgtccagctccagtttgcgctcaactgtgcagggtccagc

SEQ ID NO: 14600 - DNA, 336 bp, Homo sapiens
  source 1..336: mol_type = other DNA
gcggtcagcctcctgagtagctgggactacaggcgcctatcacacaccggggcctgtacatggcacatgtatacatatgtaacaaacctgcacgttgtgcacatgtaccctataacttaaagtataataataatttaaaaaaagaatgttacggggcatatcctttctctcaaataagatcacgtgaccgccatttctttccttcccacccaaaggaaagcccttccttcattgttaagcgaggccaaggcaacccttaggcgcgcccctttcgtagcggggagcgcgcacgcagaacgtcagccagtaagcgccgttcctccgggagatgtggag

SEQ ID NO: 14601 - DNA, 514 bp, Homo sapiens
  source 1..514: mol_type = other DNA
attcacgggcagttaatctccatcactaaaattaaatccttttttattcattgcaaatagataatctgtggaagacattttggcttttctcgctagcagaaaatgtgagcatcttccccaaaacgagcattgatctcggcttcaggagctaaattctctagtccagacttaagagacggacatctgtccgtccaccgacgccaggcctgtggcctcgcgcgaagctgtcatctcccccgcaatgggcgggatgcaaatggcgaggcggcgcgcggcgttgcccactggcctcggcatgggcctgcccacgcacccgcccagcgcgcgccggaccctgtctaccgccgttgaagggcttcccagccctagcagtgcgtactgggaagcccccaaaaggctctgcgaggccggataaaccgaactatttatgttaatcagtgcatgcttactcattggttgagaggttcccgccgtgcggtgcgtgtcccggaagtgacgcatggccaaggccggg

SEQ ID NO: 14602 - DNA, 514 bp, Homo sapiens
  source 1..514: mol_type = other DNA
gggcacctgtagtcccagctgctcgggaggctgcgtgcagtgagccgagatcgcgccactgcactctcatggatgaaagggtccttagtttattattctgaggaggctgagatcagaggatcgcttgagcccagaactcagtgaatagccactgcactccagcctaggcgcagaactgagactcaaacctaggtttcctgcctcaggctgttcctcgaaggcgagtctccccgccctggggactcctggcgctgcagttctccagggagctgcgaggagccccaggactaaccccagagcgcgcccctgggggaagggagctcgggacctcgaggcggctggaagtcgagggcatcgccagggggccgagttgggcccgggtgtggagaacgaagccgaacgctgggctctggattctcctccagagcgctccgccggcctaagcacggccgccccacccccggcccgccaggcgcagtcggccccgccccctggagctccgttcccccggcag

SEQ ID NO: 14603 - DNA, 339 bp, Homo sapiens
  source 1..339: mol_type = other DNA
aaaaggccgattttcaatgtcagatattattctatcccatttttgaaatttattttttcttttatatatatgaaatattttatttatatattatatatgtgtgtgtatatatagatatatagacataggggtttgctaagtgagcccaggtcacgccatggcactctccagtctggatgacagagcgagactctgtctcaaacccacaagaaagcttcttgacgataaggcctggtcgacacacacacatccgcgcgtctgtacgtgcaaacaagtggtcaattcactaataacgcggaaagcagcttttcctgtgcttcctgcttcccccggaagtgc

SEQ ID NO: 14604 - DNA, 281 bp, Homo sapiens
  source 1..281: mol_type = other DNA
agtgagcccaggtcacgccatggcactctccagtctggatgacagagcgagactctgtctcaaacccacaagaaagcttcttgacgataaggcctggtcgacacacacacatccgcgcgtctgtacgtgcaaacaagtggtcaattcactaataacgcggaaagcagcttttcctgtgcttcctgcttcccccggaagtgcacccagggtggggaactacctcttcctctccacgcggttgagaagaccggtcggcctgggcaacctgcggaaccccgggg

SEQ ID NO: 14605 - DNA, 465 bp, Homo sapiens
  source 1..465: mol_type = other DNA
ttcctacaacctgtatttcagtgaaaatatttgtctatcactgagtatatttgatcaagagattatgtgtcaatgataataatcagctatacatgtgcagaacatgcaggtttgttacataggtatacatgtgccatgcctcagcctccatggtagctgggaaccacgcccggctaattttttaaaaaaaattatgtagagatgcagtgggcatcccaaaatgttactggcatcccaaaatgttaggattgcctggccttttttaaaaaaagttttatccagtgacaggctgggctatacacttaatgtctaaaggtttttgcccaacgcgagtagagttagctagctatgtttgtaaacaatattccgatatgcttcgttaaagtaagccgatattaaacatttatataaatccatcctcacagggtcaatctggagataaactctcattgacaacttcatttc

SEQ ID NO: 14606 - DNA, 313 bp, Homo sapiens
  source 1..313: mol_type = other DNA
atgcaaaatagtttttctgttttaccacagtctttgtaactgaaaatcctatgttctggccagcctggccaatggtgacacaattagtccagcgcagtggtgttacagagtgagactatctgaactcattcttgaaggttagagctcagctttgaagtttcacttggctcagtgaggtatgttactccccggcagcacctagatcccttatctcataaaaaatgcagcagattcttaatattagcaatctagtgtttagattgttacctgaagaaaggaaaaagtttcataatgtttggaacattttctaaaa

SEQ ID NO: 14607 - DNA, 366 bp, Homo sapiens
  source 1..366: mol_type = other DNA
gggttaaacttgtgaatttaacatgttgcagcctcacatgacgtatttttgccatgtggtcacaactatgtggtcatagctgctaattaaagcaaaagtacttacgtaatacaaggggtttaatagtgcaacaatatttcttagcaagttattatcgctaacgttatcatatcatgctattttcccttctttagggaaaggtgaacaaaacagagaaagagaacgagaattatctctagtggttttgcctgctaatcttctttttccctgaaagaacaccctcacggcacggcgttttccttaacggtcaggcccgggcagcttacctgctcgggcaggcgctggaggtgcgcgtcactgtccgcc

SEQ ID NO: 14608 - DNA, 477 bp, Homo sapiens
  source 1..477: mol_type = other DNA
tctgatttcaatcctcttaaatttgaggctcacactgaggattaagtataaaaaaattttttttgatacctgtttcatagagtgcactgtggcccttcaacactatactctgacctctcagaatgagccctccaggctcagggtgggtcgctcaggggtctactggtcttctcttcagaggcgagaaagccaagtgcgttcaggcaaggtggcagaacgcctcgccgtggacgaagagagcacatctcttcttgcgaggcctaaggaagtagggctcccactcgccaggagagagcctccagatgaatccttcctcactgggtgcgggacacggaaccgctcgtccggtgaccgaagagacggcgaggaggagcccgcgaacccgcctcccaccctccgaagggtggagcctgaggccccgcctccaagcggcctctccccggagtgcctggcggccagcagggcggggcaggaggc

SEQ ID NO: 14609 - DNA, 274 bp, Homo sapiens
  source 1..274: mol_type = other DNA
caggctggagtgcaatggcgcgatctcggcactgcaacagtagctgggattacaggcacctgccaaggcgtgagtcactgcatctccagcagtgattcccagtgagcactggtgacttcagttcactctttctaggaatagattttctggcttaacactgtgaataggtaaacatttattgatcattttctgttaaccatgggctattagttaagagatctgatctgtcacagaagattttcctcggctgagtgggctatttggtggcacccaa

SEQ ID NO: 14610 - DNA, 220 bp, Homo sapiens
  source 1..220: mol_type = other DNA
tcaagcatggtggcgcaacctcccgagcagctgggactgcaggcgcatggtccatactttcaatacaaatgtatggtgatactactgtaccaaaattaaggttatatctctttagagaaatgtcgtatgaatttattaaatgtatctttttatattttgaagttatgcctctttggagaaaggtttcaccttatcaggtttcatcttaatcagttgacct

SEQ ID NO: 14611 - DNA, 268 bp, Homo sapiens
  source 1..268: mol_type = other DNA
ctgcctgccatttcctctgacatctgaagcacttgctgtaaagcactcactgcttacactatggctgcctggtgagaatatgtatatttaatctgtatagctgctacatggaaagtactatggatctctgggccccagattccagtcctcccgggatcttcctgcggcctccagcgactggaaccctgtgggagcacgaagttgttttttttttcccttattgataaaaataaaacagagattcctccccatttcatagtaagccttc

SEQ ID NO: 14612 - DNA, 708 bp, Homo sapiens
  source 1..708: mol_type = other DNA
taatctaagaatcctaaagtgttcctctggggaaggggcgctgaaccgtgccccaagtcccagtgggcctggatgcccaggatggggacaggccacgacctgtggcccaagtcccgcccagagggagtgcgccctgagggagagccaccggagctggtgactcgggggcgggtcccaggtaggccggtgcgttcggcctgggtgaggaaggcgcgggacccgggtgcgaggactgcgtagcgtccccggctcccgctggcgtccaccggactcctaggggcgagccctcatttccgaggaatgggaccgccttcgtgcccccggggctgccagtccctagactagccctaggggcttctcgtcccggcggagccgggcggtgcctcctgcctgcgcctcgcacctccccgcctggcacggcccacccgggcacggcgccgccacgcgtgaaggcccgcatcggctccctacgtgggcggggtcgggggggatttcgctgcgtcgcccgccccctttccggcgcaggagggagcggccgccgcgtccccgctccccggccgggacgccaccgccgggcgttgcagaggcgcgccgcaaccaatgggcgtggaggaggtgggtcggctggcggctgtcaccctccaggggacgggagcgcggagaccgggagcgcgcgagctgtcgccgcgccccgggccgagggggagg

SEQ ID NO: 14613 - DNA, 395 bp, Homo sapiens
  source 1..395: mol_type = other DNA
tgtgggggccgaggcccagccacgagaaacccaggctgcaaggcagagccctgggagcacagaggctgctgtgccgagaagcctcctctgctttaatgaagacaccacaggtgtgcacaggttcatgcgtgtgtgtgagcttaacacgtcagccgcacagcagcttctcaggagttaaaactccagctttagacagctccgggttagagcgcccagagctgctaagtagactttgtgcacattatctccatttaaaattcacaaatgtactgtaagatgcacaccatttttctatatttttccttgcctggagtcacattcagaagccgagagctgggccggggtgggaccaggggcgggagccaaagccccccctcgtgagaggctctgccaag

SEQ ID NO: 14614 - DNA, 512 bp, Homo sapiens
  source 1..512: mol_type = other DNA
aagtgatccgcacgccttggcctcccaaagtggagagagggtctcactctgtctcccaggctggagtgcactggcacaatcacggctcactgcagccttgacttccgcctgtctcccaagtagctgggacaacaggcgcgccaccgtgcctggcttttccaggctggtcttgaactcctggggctcaagtacaggcgtgagtcaccgcgccaggccttcaacctagtttgaagatggggtttcccgggaggaacccttcccaaggctgggttatcacctggcaaggacttcgaggtcgtttggtgaaggccttcagcagatctgtggggcctattagccccttttcccaaagttttccctcttgacaagaggaaagcttgcatcagagttgcacgcgagctcccctctagggcccagggcagcagccccgcccctggcccgccccctcccagacgctaggcagccgcggcctcccattggccgccagggctggcaggcttcccggctggggc

SEQ ID NO: 14615 - DNA, 623 bp, Homo sapiens
  source 1..623: mol_type = other DNA
cgacccaagacggtgggcggctccggccgggtagtgctaccattctagtattaatgagcgcactttgcaatgcccacttcgcgcgggcagcagcaagggttgcgtgcgttggcgcggctcggagggccggggaatgaacccagcctgccgcccccgtggaggcctgggccggccaggggtcagccaggcttttgagggccgccgccgtcggccaccctctacggctcccgttcacagaaaatctgagaaagccagactgcctgggctaggtggcccccagcagcccgggtcgctcctccagcgacgcggcgggactcaggctgccagcctgggagactggggagtagagggacccccagtccccgggggaaccgcctgggctgcccagctccccgcagtgcggcgccggcggctccagcgcgtacaagctgtggtccgctatgcgctgggcgaagcgcagcgtctcgatcttggtgagcttcgcgtcgtctgggaaggtgggcaggacaccgcgcagggcgtccagccggctgcgtcccccgcgccgtgcccggagcttcctcggggcccctcggcagcctccgcctctgcgcagttcccccgtgtgcgagtggggctgggcg

SEQ ID NO: 14616 - DNA, 557 bp, Homo sapiens
  source 1..557: mol_type = other DNA
gatcaaggctgcagtgagctgtgattgcaccactgcagtccagcctcgttttttggttttgtttgttcgtttaaaaaaaaaaagaagcaagagcttgtcacggttcctggccagaacgcttacaagctaggggtccccgcacagccaacccctgcctctggagtgggatcatctcagggtgtggcagaggctcggacacccccaaagggacataggcaggatctctctcagtgatgtcccctgtcttccaggatgaagagtggacccttctccaggctgctagtcaggacaatgagctcgtggttgtctttgccagtgtaacgtgcaggcattgtaccctagaggcattgaccagagccacacgaggctcttctcactgggcgaggctcttctcgaagcaaacagagcggcgctcccctcccccgaccccggcggaatccagctgtgccctgcgggggaggagcgggctcgcgtggcgcggccccagggccccggcgctgattggccggtggcgcgggcagcagccgggcaggcacgctcctggcccgggcgaagca

SEQ ID NO: 14617 - DNA, 479 bp, Homo sapiens
  source 1..479: mol_type = other DNA
acattttttgctgataaggtttcatgatcaaataatcagactatggtggccgacattgcccagcagctagcagaatctgggttctaataaatgctcaacaaatatctgccacaaacatttattaaatgataatcatagctaacgtttatcaacattgccaatgtgttcacagaagtcctgtaaggctatgattatgctttgtgacactgagcagctaagtaacttgctagagtccagaacctacccagactgtgggactcccccactggtgagcaggtccacagggagcagcttatgaaggcagaggtggatcattcactccctgcaggtggttccttctgcgcctgcgcccgcccttcctcccaggccagggcgcccccaccccctggcgcgccgcccccaaccctgggccgggcaggtgcatcctcaggcggcctacagagggcgatgtgcgccgccactgggccgcgcccctccgg

SEQ ID NO: 14618 - DNA, 354 bp, Homo sapiens
  source 1..354: mol_type = other DNA
cctctcacagtcctttgactgtaggttagtatttcccactgaaataaacacattctttctagtaactaattgggatattgtggagttaatgtacttgttattatttaaggacacaaaaatatagaccttctcccaccaaaggtggatccagctaacaggagatgtgcccgcgagtggccctcggctcgtctcgcagatcggccaagtacgcggaggccgcgcggtttcaccattaattccccaccgaaagccccggacccgtcgcggagcctgggctggcgggggatgggctgagcaactcctcctagaggtggttatgtggagaaggagcaatcccttctccctcctcctcct

SEQ ID NO: 14619 - DNA, 329 bp, Homo sapiens
  source 1..329: mol_type = other DNA
tttcatttattattattattattattattttttttttgagacagaaccacctcagcttcccgagaagctgggactacaggtgtgcaccaacaagcccggctaatttgactgtaggcatgagccaccgtgcctggccatgcccaatctttctcccaacgtgtgaggggaaccccactcgagaaaatcagaggaacagggggatgcttgttttcctctttaaagtatgctgaaaggacactttaagccccagcgtgccaggaccgtttccggggcctggccggggcgttgccgcggggtcggggaccagcacgagtgctgagtcacgcccc

SEQ ID NO: 14620 - DNA, 526 bp, Homo sapiens
  source 1..526: mol_type = other DNA
gaaaggtttttacatatttaaatggttggaaaaaatatttaaagaatgctatttttggacacaaaaaattgtatgaaattaaaatttcaatgtctgtatctttttattggatgcaacagctgcagagtcaaaaactggaactgtttccatgtgcacactgtaaaatataggcctgtatgattaaaatttttgatttcagcactgttcatagtcgatttaaagggcaatttaatttacagcaaatccagtttctcggagatttgtgttggggctttggcagcaaaaaaaaatcctaggagtaatcttttaaattttcaaaacactgaattggccaaggtttccttggtccatattagacctgggcagatgctcacaggtactgtcgtggcctgggcaaatcgagactaggcttgaaggtactctccccggggctcatccgggggaatggggcagattatgtcccaccaatcgggtcgggtcaattggggcttagccaatcgggctcgatgaggaagacgtgagtcag

SEQ ID NO: 14621 - DNA, 515 bp, Homo sapiens
  source 1..515: mol_type = other DNA
gaaaggtttttacatatttaaatggttggaaaaaatatttaaagaatgctatttttggacacaaaaaattgtatgaaattaaaatttcaatgtctgtatctttttattggatgcaacagctgcagagtcaaaaactggaactgtttccatgtgcacactgtaaaatataggcctgtatgattaaaatttttgatttcagcactgttcatagtcgatttaaagggcaatttaatttacagcaaatccagtttctcggagatttgtgttggggctttggcagcaaaaaaaaatcctaggagtaatcttttaaattttcaaaacactgaattggccaaggtttccttggtccatattagacctgggcagatgctcacaggtactgtcgtggcctgggcaaatcgagactaggcttgaaggtactctccccggggctcatccgggggaatggggcagattatgtcccaccaatcgggtcgggtcaattggggcttagccaatcgggctcgatgaggaag

SEQ ID NO: 14622 - DNA, 280 bp, Homo sapiens
  source 1..280: mol_type = other DNA
ttatagaaatatcagtattaaatacacatgaattcttaatgagaatgtccttatttttaaacgataaatattgggtgttcaaagcaaatgcaccacatttctgtaattaatacctacttaggtttgcttttaaggaatggataaaatgattgtaatgatcgtcctttcaatcttttcccggtgaaaataaaagagttttacttctcatgaacttttctaatagaacaagggtgacatgtgctcttctccacactgttgggaggtaatgctgccccacgtg

SEQ ID NO: 14623 - DNA, 363 bp, Homo sapiens
  source 1..363: mol_type = other DNA
caataaggataatacttcaacataagtgcacaataaatattagctgtttttctgtttttcttgggcgcggtggctcacgcctctcatcccagcatccgaggccaacctcaagtggaggatcccgagtgtaccaggccgctcagggactccaggacccagccccggacccagggttccggcgctgccacgtctcgcgcggtcagctagccagacgggagcaggcggggccgaggcggggccagaccccgagcgcgctttgtcacgccttatgcccgcccctccgcggcccgagtcgctggtgggacggcaccggggcagagaggcgcgctgtgagggggcggggcccattacgcgcccggaagt

SEQ ID NO: 14624 - DNA, 363 bp, Homo sapiens; identical to SEQ ID NO: 14623
  source 1..363: mol_type = other DNA

SEQ ID NO: 14625 - DNA, 490 bp, Homo sapiens
  source 1..490: mol_type = other DNA
ggaggtaagtgatgcaaatattttccttcccagtgcttccatctgaagcccctggagacccaggtgggttaagtaggcgggggcgtaaatcctcccccactggggagggtgacagtaacaacttccagattgttgtaatcatcccagtaactcatgaaatagttatattattatcttcacttccttactagtagccactagggggtcagtaatatggctcaactttgttacgacggatcagaaaaatgctctgccctcccgggtcagagcccaaagccgaaggccagcgccggcggcagccacgtggcccagcctctgagccctagctgccatcgcggaggctgggcccgaggggcggggctggggagtgcggacacccgggcctggcggagtgcgcctgcgcacggggttggcccggcgggggtgggaacactagcagagccgcgttaaaggcgctccccgccccgcccgccggtccagtgctcgcagt

SEQ ID NO: 14626 - DNA, 468 bp, Homo sapiens
  source 1..468: mol_type = other DNA
ctcactatttgttttagataattaaaaaatataatgtcaacatgtaataggttattattttatgaattaataaacatttaaaacattctcagttttaatttgttttttgtgacagggcctcactctgtacaatcccactagtgatcagcagcggctcagttttaatttctaatacaataattatcaatacatataatagctcttggaaatcctcaataattttcaagaatgtagaggtactgatagagttccagatctagatttttcagtaatacaataatactcattcttgttgcctttctgctctgtttgatttttaaaatacagtacatcgtgcatgtagtgcctgaattaataatgaacaattaaaagtaaaattacatttttaatgcataggaatgcatgagaaactcaacaataagaagaaagttttccttgtccgcctgccccgccccgcggcgacgtcac

SEQ ID NO: 14627 - DNA, 492 bp, Homo sapiens
  source 1..492: mol_type = other DNA
ggatttacatttctttaaaagtcattccagccctgatttgactttgccacccaggtcttctgtggccctgccacaccaggcagggattggggtgggcacaaacacctttcctccaagagcctgatgaaccaggatcaccccgttggctccatctggctccagcttctgctgaacactcccttttcaggtggagaagtttggtagggccaggggtgctccccgaggccatctagacagtggccagggaggctgcgccggccagattgtgtcaaagtctgcctgagagccacgaggatccctcggcattctcttcctgcttcttgagttctgacctgggaatctgccgggacaagcctgggtgccagggtgtccagaccgggcaaaccaggagccctagatcccgtccctggaactaggtcctccgccagctgcgggcctcctcctctctctgccccccaccctccggaggggggttatatgatcttaaagctt

SEQ ID NO: 14628 - DNA, 682 bp, Homo sapiens
  source 1..682: mol_type = other DNA
gaagcacagcgaagagtgaacgcacgcacgtgggtgcgttcacccacgtgctcgcgggggcgtgcggggccgtcggagtgggccgggctggctgccgcctagtgctagtcccgcatgatgggtgggggcggagggacccctctccatccaaatcacctctgggggccgaggggcgcgtttccttaggaccccggggcgtgggagaagcccctgcttggggggaccgtctgctgtttaggggctccccttcgacacctccggccgcactgcacagcgaggccggcccggagcccggatgctgggctcggtcccgccgaggctcggcctggctgtaaagcagaggaagccgggccagcgggtgtcgcgggtagccggcgtccgggacggggtgtggcgcccagagcgctgctgcctctcgcagccaggaggcaagaggaactggcttcccgggcagtctcccccgccccaaacttttcctcctcgcggagggtgggcgggcggagggaggaagcgcagccggggaacgtggcgcccgcgttcctcccgcccgggggctgcggctgggctgagtaaatctgagccccccgcccctcgcggtggggccgggactcgcggtccgggcgggggcgggcgcggtgattggcggccgggtcgggtccgcccctcggcgttgggtagcggg

SEQ ID NO: 14629 - DNA, 355 bp, Homo sapiens
  source 1..355: mol_type = other DNA
acacagttatgagaacaagttgtgagacacgacctcagcagggctggagccagcgtggaggccactggctgtcctcacaaagcgaggagcaggagcccctgttcgaggaacatgcttggagcaacatctctcttctcccactcagggaggagctgcccaagccccggcggtctggcgtgtaggcccatgctctgagccgccgcccatgcgatgctgtgcatcagaagcaaggagatggccctgctggcctgttcatcaacaccagggccgagtctcgagccccagcagctctactcggcagatgagcctctggccctgctgctcgcttcctgagggctgtcagagccacagtggg

SEQ ID NO: 14630 - DNA, 557 bp, Homo sapiens
  source 1..557: mol_type = other DNA
ttgaaatatagtttatttgcaagttattagttacatatttacagagtaaagcaagagctgacctggtctcaacaccatgcacaactgaggctcagagctaggatttcaatcagggctgtctgactctgaagccagggctctcccggctcagccctaggacacaggtcagtcgtggaaagagggagtctccctctaccgggaggttcactaccccttgggctcctggctctggaacagaaacagagagcggctttgggccaccactccggggatcccaggcgtctgaggggacaatcggtccgtgcgccaggaaccccttccccggccgcaggcagctgcactccccagccgcgcgccccgcccccgggcgcccggcgccccagctccgacccgcgcccggccccgccccgcccagtgtgcccacccccggcccgtcccgccgccccgtcgcccggctcccgcggagtcccggagcgtcactgcgcgggcgggctgaccgaccagccggcagttggcaccgggtgcgctggcgcgtcagtggccccgctctccagccg

SEQ ID NO: 14631 - DNA, 413 bp, Homo sapiens
  source 1..413: mol_type = other DNA
caagttaccaataataatgatgattattatcctttttgagcatctcttgtgcagacatacaactaaagtactgtttgaaacgctttaatatatatcaactcacttaatattctcaaacatcctgtgagaataagtcattttattgtctgaagcaaggattcttcggtgacttacccaaggtaacgtgtctatgggatgttgaaatctgattaaaacacctgagagagaggggctggggtccctctgtgggtccccagaaccaagaggtggggtcaggccaggtggggctgacgaagctgggacgcagcccaccaacgtcctcctcccttggcccccattgaaagtgttggatgggaggagggacagaaggtccttagcccttgtctacccttccaggaggcactgggctcagt

SEQ ID NO: 14632 - DNA, 431 bp, Homo sapiens
  source 1..431: mol_type = other DNA
tagtgatgatgccctaattttagtgtcatggcaacattttccaaggggatggaaatttcaagagtctatctaggtgtcattttaaaatctattgaaaaaaaatcttgaatgcaggtcactgaccagttggttccatgtaactggctgatctagagccccagctgagacttagttttttcataagtagtgatggcagagtagcctctgctctccaaaagtccctggcccaggaaagagacccaactctctgttttaaagttttttgtccaaggcacagccgccccaggacggcctggttgagacattcactggagggtctgggtgcagcccgctgcctggccggtaggcggcgcgcacaggccgtggggcccgggtctgggcgtgcgcgcggctggtagcagcggggccgcgcacgccagggtccgggagcc

SEQ ID NO: 14633 - DNA, 464 bp, Homo sapiens
  source 1..464: mol_type = other DNA
gctgatctagagccccagctgagacttagttttttcataagtagtgatggcagagtagcctctgctctccaaaagtccctggcccaggaaagagacccaactctctgttttaaagttttttgtccaaggcacagccgccccaggacggcctggttgagacattcactggagggtctgggtgcagcccgctgcctggccggtaggcggcgcgcacaggccgtggggcccgggtctgggcgtgcgcgcggctggtagcagcggggccgcgcacgccagggtccgggagccgggccggtgcccccggagccatttccgggaggggcgaggccggcggctgccgggcctccaatctcggcggcggcggcggcaacaggggagcctgggtctcgcggcctgcgagtccgtcgcgtgctgagggagacgcagccggctggaggggccgccgcgggctccggggggcggtg

SEQ ID NO: 14634 - DNA, 494 bp, Homo sapiens
  source 1..494: mol_type = other DNA
caattaaaatttaaaaggctgactatatggaatataaaatgatacaaccattttgcaaaacagtatggcagtttcctaataagttataacatactcataaacaaattgtagtctatctgtacaatgcaatactataaaataaattttacttagtagtatatactctatggtccatttacataaaattctagaaaatgcaaactaatttatagtgcaatcttaggtctcacgagggaaacattaaaatttatcaaattgtacacgttgaatatgtgcaatttattgcatgtcaattatatccaaataagagatttttataaagaaaaaaataggtatagggccacccagctgtaagcggcggggtgggattccaaccctgcttcaccctagctccctgaaacaagcacggaggatggctcgcgtccctggctggggacgttaatcattaccggagggcggcccgagcgcggccccgccccgggacggcagcctgc

SEQ ID NO: 14635 - DNA, 477 bp, Homo sapiens
  source 1..477: mol_type = other DNA
cctggcacagggaccacgtgctccttggaccacttgacacttgcactgcaatttccacacaagttttaaaatttaattctataccttttcctccattttacagatgatgatgaagggagcaacttgttcaaacagtaaataaggggcagagtccaagtttacactgagccaaaaatggctgtcccactgtcaggccaggggtctggttaacagttctgccggagatcatattttttggaaagacccccacatgtggatgcgcaaagccagatttccttaatttgggggagcgaaaattgggccgccggccgggtttttcaaaacgctgcgcccagcgtctcgcgaggaccctccccccgggtcccccagctctgccgcggccgcgcccagatggccgtcggatcggctccgccctcggtcgcccaggccccgccccggccgcgcgcggtcccctcggttggcgaactcactccggcg

SEQ ID NO: 14636 - DNA, 704 bp, Homo sapiens
  source 1..704: mol_type = other DNA
ctggttaacagttctgccggagatcatattttttggaaagacccccacatgtggatgcgcaaagccagatttccttaatttgggggagcgaaaattgggccgccggccgggtttttcaaaacgctgcgcccagcgtctcgcgaggaccctccccccgggtcccccagctctgccgcggccgcgcccagatggccgtcggatcggctccgccctcggtcgcccaggccccgccccggccgcgcgcggtcccctcggttggcgaactcactccggcgagcgagcggcggcgctcggcattgtggcaggcggctggggccggctagggcgccggagccgcacgcagccgcggggctccgagaggcgcgcactggggctgggactgcgcggcgccgccgctgcgagcgccactgagcggtcgcgcaacttcggaggcacagcgccggagccaggcgagcgctcagagacccggagccagaggggcgcgccggagcctcgttcgagagccggcgccaggcacccaccgcgctccgagtgccaggcggccctccgcgcagcgtggcttccgctgcccccacggaaggcacgggctggcgctgccgggcgccggggaggacggcgaggaggaggcggcggcggcggagacggcggcggcgagactggggccagccctggaggcgcccgaaccaggccgcgggagcatgggg

SEQ ID NO: 14637 - DNA, 382 bp, Homo sapiens
  source 1..382: mol_type = other DNA
cctgagatccccgctctgaataggccaactgggccaggtcgcccaggctccaggctggagtgcagtggcaccatctcggttcactgaaatctaagctgggccaggctaccgcgcccggcccctgctttcttaaagaacacgcggcagctgtgtgtttgaaaatagctgcctggcctgggaggcccagttcagtccgggggtcccgcttcacctccagagcagcggcagccggtaagcctttgatgcgcagcgcaccctgggtgactcactttttctcctataaaatgggcgcacgcaggccccagctcagcgccagaagggggagccccggcgcgcccggcgtgctgccgcgaggggcggggcggggccgggggaggagccc

SEQ ID NO: 14638 - DNA, 338 bp, Homo sapiens
  source 1..338: mol_type = other DNA
cctgaggacctctccagcgaggctcaggtcttggacagggccatgacgaggtccctggtggggaagctgccaaagacttgggctcctaagcaggcagctggttgtcagcccgtggcccacccgcactgtggggagcatggccttggaggccaggcgctgcaggaggggcctcaggggctgccagggaccagcactctccctgctcccccagggtaacctggtggctggcaggcactgaataggccgcagaggcagtaaaaccctccccctctcttccacccctgagagggctccaaggagaaggccagggggcatcccagagtctctggacatccagc

SEQ ID NO: 14639 - DNA, 437 bp, Homo sapiens
  source 1..437: mol_type = other DNA
gggggtggctcagaaggcccctccagctgtgagagctgtgggagccccgctgctgcccattgctgccagcatcagggtcccaggccttgacagtagccactcgctggcccacagggcagtcctcgggtatgctgaccgccgagtcggaggtgaagtcaaaccgggcgtccagcagagggtgaacgtggtcctgggtcccaccgtgggtccagtagggaccagatccccagtgggttctggaacatcgccctgggcccatggctcctagcagtctaaagcttcctgtttttcatgaaaaataaggaatctagattttaaagtgaaattggctgattaaaattagtccaaaacacatctggtggccagatattgcccgaagtgaatttctgactgtcaaataatgcaacaaatggcacgcaagagcatattgttttgtg

SEQ ID NO: 14640 - DNA, 409 bp, Homo sapiens
  source 1..409: mol_type = other DNA
ccaactgctggtcaggcggacagctgaggcctctgccggaggggctgtggggcacgccaacaggtgttgccttgtgtgtgtgtgtgtgtgtgtgcgcgcgcgcatgcactcagggtgcctcaggctacagttaaactggctccagcttgcctagtaccacataccaagccctggtctggctggaggatctgtccccaatatcacgctgttagaggtagatctacttcttaggctgcgcagcaataataatttctctcgctgggacgcacgctggctccccacccacggggccggcctccgggaagcccctcccacgcggccctcggagaggcagttcccccacacggccccccgggggcgctgcgcgaagggggcgggtgcctggagcacggcgctggggccgcccgca

SEQ ID NO: 14641 - DNA, 254 bp, Homo sapiens
  source 1..254: mol_type = other DNA
gtattacatctttaaccacaatgttaaaatccaggctgcagtgcagtagtgcgatcaggctggtcttgaggtgccaccacctgcccccacgtgcccctggccaggactgagccctgtgagatttaaaaggtattttacatatataatctctgacctattcaattagtatccccttcgcgcaggcgccctcagaggcgctgagtcagggcgctgttgagctcgggcaggcccggatggggcggggttagcgcctg

SEQ ID NO: 14642 - DNA, 471 bp, Homo sapiens
  source 1..471: mol_type = other DNA
gcaacttgtccctaacagggctgtacaggaaataacttattgtatagctcatgacgttacgtactggaagtcccaggagtctcgccttctcggggacagggccatcaccaggattcggaaaggatcggtttgtgttccagttgcagccggtgctgcccagccgaccacgccatgcacgggaggcgactgggaccccacttgcctggcagcccggccggagacccagctgcctgggagggtccgaagataatgccaggcagccctggcgggccgggaagaccctctgtccctcccgttgtgggacctgctgccgcccagggtccagcccacttgccccaggggggagcaggaagatcctctccgggcagagatgatggggaacccgtgcagccagagggtctccctggcaggtcgggggagggggcggccgtaacggccccgggcgctccggcacggagaagccaagggggt

SEQ ID NO: 14643 - DNA, 513 bp, Homo sapiens
  source 1..513: mol_type = other DNA
cccacctgggtgagttcttagctgagctggagccctctccccctccactgcagaggggacacagtggggagaagccaccccactgcaggggccggggctgcctgaggcagggcacagagagggtctttgctgcgaaggaacactcagagagtctctggtgcctcaggagaggagacacttctccttttcattcgttaaacagaaatgatatttgccaccttttcttctctaaggcctaaagagatgacagtggactccacagcggggtgtggggtggcccctggcaggcctgggcctgtggctgctgggccgccaccagcttggagggcagggtgggccccgggagcccctgaccaccagtgacttcttgcaccacctcctcacaaagatggctgtgtgctgagggactgtggcttccctgggccctaggaaatttatcactgaggtttcagaggactctaaccacctcggaggccagcccgggatgttcttatttaactttaagagcctcaa

SEQ ID NO: 14644 - DNA, 653 bp, Homo sapiens
  source 1..653: mol_type = other DNA
ttacgtactggaagtcccaggagtctcgccttctcggggacagggccatcaccaggattcggaaaggatcggtttgtgttccagttgcagccggtgctgcccagccgaccacgccatgcacgggaggcgactgggaccccacttgcctggcagcccggccggagacccagctgcctgggagggtccgaagataatgccaggcagccctggcgggccgggaagaccctctgtccctcccgttgtgggacctgctgccgcccagggtccagcccacttgccccaggggggagcaggaagatcctctccgggcagagatgatggggaacccgtgcagccagagggtctccctggcaggtcgggggagggggcggccgtaacggccccgggcgctccggcacggagaagccaagggggtccaccagcctcgccaggagagcgtggatacccgagcggccccaagcgagtccccggggactggagggccgaggggcagcgcccgaggcccgcagaggggtcctggagacagcggctccccgggggcggctcccctctctcccccccagaggcccggccggctcgcggcccgagcagcgccaacttcgccaacggttcccaagttgccgggcgcgcagggctcccggacgccttggacg

SEQ ID NO: 14645 - DNA, 277 bp, Homo sapiens
  source 1..277: mol_type = other DNA
tcatttaaattgaagtcaaaaaaccataagcaaatatgccttttccaaatttgcagctccaaggcagatgaaatggtcagatgcctttcagtgctcaggccttgccttgcgcaacgcggtgccgctggggagcagtcagggctgtggcgacagtgtctggccaaattccctttccccggggagatcctggggctcctgtgtgccaggcggggctgggccccgctgcggctggctggcgcgcttcatcgagggagcgcttcgtgctacagttacagcc

SEQ ID NO: 14646 - DNA, 372 bp, Homo sapiens
  source 1..372: mol_type = other DNA
cagcaagccgtgctctctcactgtacagcgacacacccaggaagaatgctttattactgagaaaacatggaaagggagctattgttttctgttcagattcagggtgacaaggaaccttgtaagctatgtttactgattaagattatgttttttaaagcattttaaatttttattttatttttagatcacagcagctaagtctttttataaaaacacaatctagggcttgggtcccaaatcatttaaattgaagtcaaaaaaccataagcaaatatgccttttccaaatttgcagctccaaggcagatgaaatggtcagatgcctttcagtgctcaggccttgccttgcgcaacgcggtgccgctggggagca

SEQ ID NO: 14647 - DNA, 357 bp, Homo sapiens
  source 1..357: mol_type = other DNA
tttgtaaactaaaactattggccattttacaagttttgcattactattggccactggagaagctacctgggactgtgggagccattttgaccctcagagtctggagacattgtaagatagcacaggaatgggagagctgtggtatctggtacctatctcctaagtgccttagagatatatagctagctgatggcaaattttgatgaatcttcagaacaagactaactttttaaaaaaatgcccattatgcccacttagtatttttaatgatggtattaccattagttttagatagaaacagcaagccgtgctctctcactgtacagcgacacacccaggaagaatgctttattactg

SEQ ID NO: 14648 - DNA, 191 bp, Homo sapiens
  source 1..191: mol_type = other DNA
caaccgcctgtagtcccaactacagtgagctgagatcgcgccactgcactccagcaaataaataaaataataattgatgagttgtttgaacaggcagttgtcgcggagacagcaaatgcagcatctacctgtcctacgaggacccggaattcctctacgcgagcgcgcgcgtctccgccccggccacgccc

SEQ ID NO: 14649 - DNA, 281 bp, Homo sapiens
  source 1..281: mol_type = other DNA
gaccagactggccgggcatgatggctcatgcctgtatggagaccatcctggccaacgcgccgtcccagctactcaggaggcgctttgcagtgaccttgtctctatttaaaaaaaaaaaaaaaaggaaagagcatgcctgtaatcctgcctgtaattccagctactcaggaggctgagacaggaaaaaaggaaagaaagaaaataccatatacactttttagaatttttgttaaagtcgtattcagtacagttacatttagatgaaaaggttaatttttttt

SEQ ID NO: 14650 - DNA, 501 bp, Homo sapiens
  source 1..501: mol_type = other DNA
ctggatcttttacacaaagcgctaggcgagcgctgggtgctaggacccggggggcgcccgggcagggaggtccggctgcgctgcctgcagtccgcggggagggcggatgggcagcatggtgcccggagcttcccagtctgtggaccccacccccatatcccgagcctttgcaaagcagggggcgcgagggcaggccgggctaacgtctgctcctgcgccgccgtcccacgggcatcccagttgttcccgaagctttaggatccaagacgctgggggcaaccaccctgccgcgagcgccctcggggaccttggcagctgcagccgccgcggatcctttccagagctcaatggaggcggggcccggccgctgtcaccgggcaggagagaacgttgcttacgtgcgcccggagtccattggccaaggcgggccacactcccgggtctggattgggtcgtggcgcagagaaggcgtggcctcgccgcgctagtccttataggctg

SEQ ID NO: 14651 - DNA, 537 bp, Homo sapiens
  source 1..537: mol_type = other DNA
gacgaagaacctctgctcctcggctctggttcttagaatcccagcttctccactaaacaagttatataaccttggtttcctcatctataaaatgggaattataacatccacctgctgtggaaattaatgagtaatgcatataaaatgtctgcccactagaaatgctcaacaatattagtttaccccctcactgatgtccagcacctggcccagggtcagctacacagtgggtgcacatcttcagtggggtgggtccccctctcccaaaaggtggccacctctggctgggagctggcaggacccttctcagccagcagggggcagagtcggtccactggaccctggccgccggctcaggctccctgtggccagatcctttccctgcaactggagagatgggagcagaggactagggcagggactgttgtccccagagcactggtcctgtccaaggctcttcccacagctgacagagcctgtgattggagctgggaggataaggctccctggagccccccctgcggtccacgtgtgtgg

SEQ ID NO: 14652 - DNA, 245 bp, Homo sapiens
  source 1..245: mol_type = other DNA
ataactcaccaagagaattccggtacctgttaatgtctgagaggtttcttttatcgcgctatttaaaatagcgagtgggcactcaatatctgttcagtgaataaataacctttgtctgaaacgtatgtagttacattacgtatatagggaagattcttccaccctcaaggaggggcggagggtggatgtcatcactccgcgcccggctgcccgcgacgcgccggcgggtggcgcagcccttcgct

SEQ ID NO: 14653 - DNA, 244 bp, Homo sapiens
  source 1..244: mol_type = other DNA
ggagtgaactggattacactctgtagtagaatcctggagtgcaatgcgattctcccgcctcagcctcccgagtaggtgggattacaggcataactcaccaagagaattccggtacctgttaatgtctgagaggtttcttttatcgcgctatttaaaatagcgagtgggcactcaatatctgttcagtgaataaataacctttgtctgaaacgtatgtagttacattacgtatatagggaagatt

SEQ ID NO: 14654 - DNA, 347 bp, Homo sapiens
  source 1..347: mol_type = other DNA
aatagctgtattaatgtgttctgtttctgtaaatgcacacaaagtcaaatatgataaaatagtgctgtttctggatttgagatgtatacacgtcagttaattcactctcacagtgatcactccgtgatgtagagttaatttcagcatatctaaatattatcagttatgaatgataattctaggcgtgtattaatggttattaatttggtgcctattttgccaacttagaacactcacttcaacttcgaacaaagctttgccataggttccctaatttgcactctggaagggactggttccgcggtgagtggcgggtcttagctccgccctggccgtccgctgcgctg

SEQ ID NO: 14655 - DNA, 434 bp, Homo sapiens
  source 1..434: mol_type = other DNA
tcctcgcactttgggaggccgaggtgggcggatcacctgaggtcgggcgttccagaccagtgcagagagccgagatcgctccactgcactccagcacattcttcaagggaaaacatgtttttaagtggcttctagagattataaactctgcaataatattagtctggtgagggtttctaaatccaaaaaagtctcaaggttatgaaacacatttaatctctgagttggaaagaaacaatttccaactcactgtggtccatcctttttgcttagccaacatagccaacacgaaaagaaatgcccgagagcttctgggagctctccagctttcccgcctaaacgctgaggggacggggctagggcggggcccgaggctggggcgtggcgcgttgatttccccgcccctcccgatcccgacaggcccagcggctagg

SEQ ID NO: 14656 - DNA, 539 bp, Homo sapiens
  source 1..539: mol_type = other DNA
aaccagtgattgcccgagctcggtggctcacacctgtaatcccagtgaaactgactccgtctgaaaaaaaaaattgtgctaagaagcacattttctctcctttgtctaaaagtgaaacttcaggaaattttgacatttaattttccagagtgttaatttaatgagtagtttctaattttaagctcctatcttaatgtgagaattagtgaaataaataacattaaaccattttttaattttgggagtaaagacaataaaaatatgaggtattgctgcttgaattagtaaaaacacaatttaaaccttgtttctttcagaagttttgaggccaaagaccgtaataaaacaaactcaggagcttatttcaagagaatactgaaccatctgaccaagacagttgcagtgatgctgcaacattgtgaaatcaattcctagaagtcacaaagcaagaatttgacgtgaagggatgtccctcatttagaattcccttctgttgtgtttttttttttttttcctaaagaaaactattaataaaggaa

SEQ ID NO: 14657 - DNA, 328 bp, Homo sapiens
  source 1..328: mol_type = other DNA
ctgacctcaggtgattagatggcatttcttcacacgactaaaaaacactagacttcagtcaacagtcccttggaccatctgtagatcttgtcttatgatccacttatgctgagtgtaaaagagtggctacatctgggagctctgccaaattaccacagcagaagctggggtacactatccttcggtcaagctcttctatcaagaggctggccctgaagagccacactttgatcatggtcggaactccgaatccttcaccgttcctgcgtctgaagctggctatccctccagggtggtagaatccactttgggggaacagacagattga

SEQ ID NO: 14658 - DNA, 568 bp, Homo sapiens
  source 1..568: mol_type = other DNA
gtcttagtatgaaaataaagtcttagtatgaaaataattttgaccttatgaaccattgatttagacatcattatatctataatcaccgtaagtcaaatgttaattattgctatactttttagcatacatggaaaactttagaaaccacaattcttaatgaataacaagtcttagcaactcatttttctctttaactgacaaggaaaaaattatcttcttcattgtattctccctcatagtacagggagatataaagaaacccttggtttggggttactttataactaaggcaaatgttagactaagatcaaacgcaacattggtgccttatataaattaatgttactggagaatctaatatttactagtgttaagtgctttacatacattatctcattttattctcacaagaatcttacaagatgggtagtcatttctattttacagactcttagtctattatctactgataaggtatgactgaatctctattattttccatagaaaaattcggcctcgtcgcttaggccggaaaccccgtggtaaccacggtaacggtggcggggct

SEQ ID NO: 14659 - DNA, 563 bp, Homo sapiens
  source 1..563: mol_type = other DNA
aattcttaatgaataacaagtcttagcaactcatttttctctttaactgacaaggaaaaaattatcttcttcattgtattctccctcatagtacagggagatataaagaaacccttggtttggggttactttataactaaggcaaatgttagactaagatcaaacgcaacattggtgccttatataaattaatgttactggagaatctaatatttactagtgttaagtgctttacatacattatctcattttattctcacaagaatcttacaagatgggtagtcatttctattttacagactcttagtctattatctactgataaggtatgactgaatctctattattttccatagaaaaattcggcctcgtcgcttaggccggaaaccccgtggtaaccacggtaacggtggcggggctgcgcagctcggcctcagactccacgggccggccacgggtgggggcagcagggaggcacgggcttggcgcctgcgcagtcgccggggcgctggtcacgtagcgagggctgcagtcgcctcctccctggcgctgccatcgcggcc

SEQ ID NO: 14660 - DNA, 214 bp, Homo sapiens
  source 1..214: mol_type = other DNA
actataactccttatctcttaattttctaagggttttcctaaataagagtactagagaaatggcggtggatggaccaccctaactccatctcagctttctaagagactcgtaaggaacctgggcttgacttggagtctcctctccgactgcgagagctgatcgagagctgccaccggccgccgaagcctggatcaggctctgtcccgacgcctg

SEQ ID NO: 14661 - DNA, 337 bp, Homo sapiens
  source 1..337: mol_type = other DNA
actccataaaatggaccaatcagtgctctgtaaaatggacacctttaagagctataacactcttgaaggactacttccagtcaaatggaatgcgcttcctctgataaacatatctatacatacctatatccttttaaattggaagaacttcatgaaattttagagctagttctaaagtgtaataatatatgccttaatgactttatctttttttaattaaaaaatggatctaatactaacctactttctccaaggatacagtagttctcttggtaataagatcttagatgttcatgctttgacaaacaattcccagagtgcatctctaggaggattc

SEQ ID NO: 14662 - DNA, 503 bp, Homo sapiens
  source 1..503: mol_type = other DNA
gctctttaaagtctcaaaagcaaaactgatcttttgtacctctcagctctaccaccttcaagctgatctttatctgtagaatgtgcaaaataatgttcccaatctgatatcattgataggaatgagcaaatgtatgtaaatagctttgcacagtgtctcagttagctattaataacttctcgagctaccatggccattaacaatgggacctgaagcactgcggatgctacaaatgcttcagcagacccagtgctaatagaattccgaagaaaaatctctccccagccctgggggtccccagagcgcccgccgcccgccccggctggggtggctgagcagtccactcacagctccaagctctgtcctcctcctcctcagccgcggccggggcaggcacgccagggtgggggcctccgggcctggccctcccgccggctccggcccggcccctcccgccagacctccctgctttgccgcgggggcggaagtgacgaaggcccccg

SEQ ID NO: 14663 - DNA, 516 bp, Homo sapiens
  source 1..516: mol_type = other DNA
aatgtatcctttgaggctttgcagaaagagcagaatgattctgaaaaatgctacatcagtgaggggatatttgataaggtattaagatatgtatacacatacttcctctgtgagtttataacaaagtttgggatccaacatgttcaaacccagctgtgaacttcaagtattaaaagaaagagcctttgcttcagcagtttatgttatacagggctagagggaaagtacccatccaaccagtggggtgcaaaattttcctttcaagaacatttttgaaaaaacacatctgttaagttgaacctttggccgttttctacttaaaaaaataggccagcagtttgtaaattcaagctaatatatgaactttttgaaaaagttctagctcctgcgcgcggccggggactgtgactccacatgccggcgttacttacccgggcccgttgcggccgccgtaaagcgcggatgcgcggcgtggccacgccccttcagtgcttgtgacgcaggcgccctgggctt

SEQ ID NO: 14664 - DNA, 191 bp, Homo sapiens
  source 1..191: mol_type = other DNA
gttcagttaactgaaatacaggaattaaggcatcattttgggcaaagagcatgctagtttgctgaaggtggagctattgatcacggcaaaagcaggaataacaattttggttaacgagaaggataaagtaaaatcagcggactgtgagctccacgaggaaagaacaccaacgcgtctgagcggatcatccg

SEQ ID NO: 14665 - DNA, 334 bp, Homo sapiens
  source 1..334: mol_type = other DNA
gcatcagatgtgcaaactttagtgtgccccagaagctaccttttaccactctaaaagatataaattccttaacgagtttaaaatattgagcctcaaatgtttaaacaactcctttcgggagtgattttgattgtatttcagaggcggggaggctgcaccagcctcccagtggtgctcctaggtgacttgaggcagcctcacctctttttccctcaggtggcgcctaggggcgggactgagggacagcccgctccccgcagcgccctctccggctccgggggtgttcccggctgcagccgcgatcctaacgggctcgcgagacgccccgcccacc

SEQ ID NO: 14666 - DNA, 229 bp, Homo sapiens
  source 1..229: mol_type = other DNA
agaggtagaaaggtactccttggaccttcggactactccatatatagcttggaataatttttgatgaacacccagattctgtgcatgtgcagaaataaggaattaatttccaattccctatttactcctacaaactatggcgcttccagactctttttggatggtctactctagaaccagtattcagatctggtagctaaatcgttatatcagtttactgggaatgcca

SEQ ID NO: 14667 - DNA, 501 bp, Homo sapiens
  source 1..501: mol_type = other DNA
aaagtcagaacttttttatttaaaaattttaaaaaaattttttgagggtaagaaagatcttgcagtcttttaggacctgccctaacaacttcagttgaatttcctggataagagaatggttgagctgattcttttctattttcttttcctagaaatagtatgtatttttagtcattaactagtattttggttttgtttaatatcccagaagcatttatttctctcactcagagagttatcttacccttctttcagggaaagtgaattttacaagttaataaatggcctacttaatccaagattggacattgttgagttttgtttgaacaatgtttgttatgctgaaaaaggacaccaggcctgggcaaacagaactccattggaaaggtgcttacctttcttctggagtgttgggggacagatccctctttgcctcattagggagaattcagccttgtctgtctggttggggcacacttaatcactgagactcagcatttc

SEQ ID NO: 14668 - DNA, 370 bp, Homo sapiens
  source 1..370: mol_type = other DNA
atgctaggtgatctcccagagaatgattaagatgttaaagcatttttgtgattgttgatgttggcaaatttaacacttaacatttaaaaatttttccttatgtagatggacaaattagttgaaaactaaagttggtcaatgatataatctggagattaaatgatttgtaacccaaattatctctcgatttagttctcttggactgcatgttaaggacatgtggtgttttcataagcatattcatggaaaacaccttttaaaaagtgctttattcacaatgtccaaaaggaactttcagatcaactttcttctgcttcaagaaaatttcagagaattttcccctgaaagtaaagctgttcttaagtgacct

SEQ ID NO: 14669 - DNA, 328 bp, Homo sapiens
  source 1..328: mol_type = other DNA
tgctaacacttgtcacctataaagctatgatgtttatatttaggtttaaacatttcacattttaaggaaagactgaaatgaggataagtaagatttatgtgttgctacttacagctactaatttctttcttcttaaaaatcattaattatgtttttgaaatctcagaaatgtttttcaattactgacttatcaaatttgcattttattaagcaatactctccaccacatagaatctgcagttttgaagaggccatctcgggccccaaatggacagatcacccgaggtgtcggcaagctgactgtaaatttcacagtctctctgaagaa

SEQ ID NO: 14670 - DNA, 155 bp, Homo sapiens
  source 1..155: mol_type = other DNA
gtagctgggaccattagtctgcttttatagttgtctgagagcagtccaaggtcaataaaaaaaaattttttttttggtaacttccctctccgcctggagaagggcctgtccgggacacccgtgctctcgccatggccaaggaaagtgtcgcgaga

SEQ ID NO: 14671 - DNA, 243 bp, Homo sapiens
  source 1..243: mol_type = other DNA
gaccagcctggctcccagctactcagtaggctgaaaaaaaaaaaaaaaaatgcagatccaagtgtttgtcttttattaaaaagaataattgtcaagtcttccactgtgaagacttccctttggccctcagggactgatccctggctcagacagttcagtgggagaatcccaaaggccttttccctccttcctgagcctccgggcaaggagggagggatcttggttccagggtctcagtacccc

SEQ ID NO: 14672 - DNA, 191 bp, Homo sapiens
  source 1..191: mol_type = other DNA
attgcgccactgcactccaatatgtgcttctcagggagacatcgatgtctatcccgcacgaccagcctggctcccagctactcagtaggctgaaaaaaaaaaaaaaaaatgcagatccaagtgtttgtcttttattaaaaagaataattgtcaagtcttccactgtgaagacttccctttggccctcaggg

SEQ ID NO: 14673 - DNA, 301 bp, Homo sapiens
  source 1..301: mol_type = other DNA
tcccgagtagctgggattacaggtgcccgccacttgaccttgtgatccacccgcattggccaaaggattctttatagtattaatactttggctccttatctcaggcaagaatgttggcctgggcaaagcccacaaggtctaagggtaaacgttctcccgagagttgagagtctgacatccctgagtgtccaatatcccaggaattccagatgcgtgcctaggatcctatggatgagaccaagcagacctggaaggcaggtgcccacatccatcacacacagtgagctcattcagctgccag

SEQ ID NO: 14674 - DNA, 166 bp, Homo sapiens
  source 1..166: mol_type = other DNA
agtctcgctctgtcacccaggctggagtgcagtggcacgacccaccttttttggtttttttttttaactttttttaataataagaaaatagagatggggggccatctcacgatcaccatttattaattaacagataaatttatattattctgagtcctgaataaaa

SEQ ID NO: 14675 - DNA, 440 bp, Homo sapiens
  source 1..440: mol_type = other DNA
ccttccagtgatttctgaggtacctgggaatctgtggccaataaattggtaatcactgaattagtgagttttttaaggatatccagctgcataaaatctgacagcttgattggaaaacatttcattcaattaaggtcctgtattatggatatagctatgatctgacttgcagaggaaatccatgcaataagggctacattgcaaggctgcgctactggggcacagaagtgagtcagaggcaagtctttatatatctttgaaaccgaacagctgtgctatattttagttccgaacttaatttggggtttcggctcaggtctaagtcgccggccgggaccacgtcgccaggaaacgacgtctccccgagcagatgcctgctcctcaggaggaaagatgacccggaggaccgcgggaggaccttcccactcgccaccgtcgcg

SEQ ID NO: 14676 - DNA, 538 bp, Homo sapiens
  source 1..538: mol_type = other DNA
ggcctgcagtcaccacctcgggcccagagtgctcccccagaggcagctgtgctcccacttgccggcgcctgtgccaaccaggtggtggagccccgaccccagctcggccctttaccccgggcctacaagggcagcggttattttccggcctttagcccccaaaagggcgaacgacagcctggggggcctcagccccgccccaccccctggccccgggccctgtgaccaggtggagctccagagccccctgcgaccctctgcgcgcccagaggcgcctgccccaggcccaggggctcctgagccccccagcgctcgcgagcagcgcatctctgtgccagctgcccgcacgggtatcctgcaggaggcccggcgccgggggacccggaagcagatgttccggccgacctggatgaaaagcctcgggccgggggtgcagaatctggtcctgaagaagatgctctgagcctcggggctgaagcctgcaacttcatgcagccagtaggggccaggagttacaagaccctgcctcacgtgacac

SEQ ID NO: 14677 - DNA, 371 bp, Homo sapiens
  source 1..371: mol_type = other DNA
ttttctaaacagggtcctttgctgcactttgctagaagcttgactatagaaaaggagctgatctccctttatgtttccaaagccggggggaggggtaaagaaaggagcttcttctccagaaaataatcccctcaatcaagagcttggagtcagactgaagtctcgactccattctgggtggatagtaagcttcctagaactctgaaagtagtccctaagtcgggagagggggctgctctgttaagcacagagaccaaacgtcttgcaccttttcgggggatgcgtgaggtgagggtctctacccaggccccgccccccacttccggttccgagggggccgtcccgtcacccccggaagttcctttcgggga

SEQ ID NO: 14678 - DNA, 375 bp, Homo sapiens
  source 1..375: mol_type = other DNA
aattttgtttcaaaccataaactgaattcactatcataatttcctcagttgtaattttgcaaaggcagtttcaacagcagtgctcaaatcctagcactgttagctataattacttagccattaaatggggtactaataattactgcaggaactatcttttccaacagagcgcagagatcttttggctctgataaagctctgcacctaaacaaagcgctgtataaaaatggttaataacaattgacctttactgactatgatgccaagcggcctatgtggcctatgggcattattaaagatagtttgacaaattctttttaatctcatttctgaggcgcatgcgcggcatccgggtccccgaaaggaacttccggg

SEQ ID NO: 14679 - DNA, 392 bp, Homo sapiens
  source 1..392: mol_type = other DNA
aatgagggggtttggaggcacccagaccctggctggacggctcagtgtcatccacaacttcctatattaggtcctgcaatgattgatgatcactccgtggatataccagcttcctttccagacactgcttctccaggcccggggttgagaggcagctggagcgccgttctctcctgctcagttatcttccaaccccaactggcttgggggcaggacaagggctaggcttgatggtggccaggcttgcctgctccccacctgggatggtttatttttcaatgcatctttaatttgtaaagaaataaaataaattaagatgtaaccattagtcattcggctgagcgagctgcgcatgcgccacgtgcccccgtggcgtagggcctcgtccggtc

SEQ ID NO: 14680 - DNA, 240 bp, Homo sapiens
  source 1..240: mol_type = other DNA
ctcagctactcagagctgcagaacgtgccaaactagtagcagtagtagcagttgttgttgttataaaatgaaacaagtctaatttttctttttttcctataggcagtgaaaaacgacagttctttcaggtttattaaagtaaaacaaaagtctcaaattttgccccgtactgcccccagacttcggggcccggagcccacgtcgccgcagcctccgcgccgattcgtccgcccgtagggg

SEQ ID NO: 14681 - DNA, 415 bp, Homo sapiens
  source 1..415: mol_type = other DNA
aggcgtaagccaccgcgcctggccttaggagttcttaacctaggtcaatagactccagttaagactgtgaacttgggggataatttatatttttaactccaactgaaatttagcatttcagtatcaaaacctatatgaaatcatggtattttcataccatgttacagttggttacaaatatctcaaaaagcatttatactcatcactagcttcaaaattatgatagttactacagatcttgtcatttaatgtgtaaataaaggagcactattacgttacagatttgttctattaatagtttaataattgtatttaaacaactggttttccagacttctcccgtacccgatccggatcccgagcgcgcgagggcggaagtggtggtggcccgcgcggccggaagtccagatcagct

SEQ ID NO: 14682 - DNA, 443 bp, Homo sapiens
  source 1..443: mol_type = other DNA
tctctgtaggcgctcagccagggccaaggggagagcctggcaagatttgcagcctgaagccatgggccagggggccatggtgacctgagacaagtggactctgtctaccctatgctaaggggactcgtctccacctcgtaaaggaaactcccatgctccagttgtggaaggtggtacgcccagctcggcagctggaactgcaccgcctgctgctgatcgctttcagcctgggctccatgggcttcctggccaccagccctaaggccaaggaacccttgcccctgcccttgggagactgcagcagcggtggggcagctggtcctggccctgcacggcctccagttccacctcgctccagagacagctcgaactgaacccgtggtcctttggcacctggccgaggggacatgcccacattgactgataatacccatggcctcaag

SEQ ID NO: 14683 - DNA, 463 bp, Homo sapiens
  source 1..463: mol_type = other DNA
tgttcccacaggcgccgggaactgtgtacgcagctgcggcagtggcaactggagcggctcttccccggcttccggccagcggtggaggcctgctacttcaactgggaagaggcctacccacttcctggtgtccactgacaggaagctggcactgtgctgggcccgggccctgccctctcggccaggtgcctcccgctctgggggcctggaggaatcccgggaccggccccgaccccttcctaccagctgtgcggcccaaggagcctgggaccaagtgggtgagggggtcccctcatcacagcggggtccccgccgcctctcagctgaagggggagccagacctggccgagatgagcctggatgacagcagcctggccctgggcgcagaggccagcaccttcgggggattccctgagagcccccagtacttatgaagagcctcccacagcctctgtcaggacga

SEQ ID NO: 14684 - DNA, 237 bp, Homo sapiens
  source 1..237: mol_type = other DNA
actagcacactgtatcctggactagctcagggactcttctgagctgtggcctgctcagggtacctatcatgaggattgctctttaagattaacagactcatgagttccttaagaagagctgttgctggctgccagctgctcggggaacctcgagcaatctctgagctttgcttagagaggagaatttggacattcatttgggtattctaagcagcttgtagattctcctagaggaaa

SEQ ID NO: 14685 - DNA, 173 bp, Homo sapiens
  source 1..173: mol_type = other DNA
cagactcaggaggctgaggccggaggattatctctaaaaaaaattaaaaattagtagggtgtactagcacactgtatcctggactagctcagggactcttctgagctgtggcctgctcagggtacctatcatgaggattgctctttaagattaacagactcatgagttcctta

SEQ ID NO: 14686 - DNA, 592 bp, Homo sapiens
  source 1..592: mol_type = other DNA
ttcatagctttgttacaatgaaaccttgaactgaaaatatttaataaaataacctttaaacagtccattgtgttaagcctggcttaccaggttggagagagtacctcctcgagaccagcctggctggcgggcgcctgtaatcccagctgctcggaaggcagtgagccgaggtcgcgccactgcactccaggcgctcggtgctgcgcaggcgacgcggggcggggagggagggtgagtgccctgggagccggctgagggcctcgccccgcccctggtcccgcccctcccccgagtgggccggcccggctccccctccgcggggctgagtggatgagcccaggcctgagcccgcccctgctccgaagtcgtggtccccgacgctcggccggcagtgccatcgcgcggagaggagggggtgcgcttccgcgggcggggcgcggagcccgccgtctcggaggccgcggctcggcccggcactgcggagggccgcttgatttcccggaacccaggtcgcgcggctgctagggccggagccggtggatccgagcgggtgccaccagcggcggcgcgccgcctcccccggtgggagcgg

SEQ ID NO: 14687 - DNA, 578 bp, Homo sapiens
  source 1..578: mol_type = other DNA
caggtcacagagctgatcagtgagttgcctaagaaaatggggatttcccctttcttcggccggatagagaatactctttcatctctgcagttatggtgcaggaaggcagagtcctctgtcagctcccagagggaaggcggctggcagctggctctgcgcaggctgggggcgcctcccgggcgtgcagcctggcacaggctccttgaccttggctctctccccacgtgctaggagcccggttgggggctcgggacccgcgtgtaggacccgtccagagaggtcagtggtccagactcgcatgcacgttcccgagcccgcgcggggtccgccccgggacaagcctccgtctgcccagacaggtggcccggagcggggaccccctcccctcggctgccccgcgcgcctggcccagcgagggcggctccggggcggggcggggccggcggcgggaggcccctccccgggggcgggccgggggccgggcggggggggggactggcgctgggggcggggcggggcgggcggcgcgggggtgtccctccctccctcgctctccccggtagtctcgcggtgctgcc

SEQ ID NO: 14688 - DNA, 278 bp, Homo sapiens
  source 1..278: mol_type = other DNA
agccatagtccgagcagtctttctggaaggaggtctccaaagtcaggaggagggctcccctgagctggatcatcttttccatatctgcaaaatgggaacaatcataaggcagttatgagtttaaagagaaatggtttacattaatgtgccttgaagcacaagacagaaatacggggtcccagctatgtgccactgcactccagcctgggtgacagaccgagactccgccttgtctttaaaaaaaaaaaagaactgtgctttgtccaggaggaaatgaa

SEQ ID NO: 14689 - DNA, 395 bp, Homo sapiens
  source 1..395: mol_type = other DNA
gacaaacagtgaaaaataaatcttcctcttattttgtctcagaggtgaagttagaactgtctacttgcctgcacaaataaatgaattgctcattatggaaacttcccaaaagaccccgaaagcaataagcccggctttgtttgaacagacgcacagagggagcccctacaggcaggggtttttctgatgaagacttcacagctccatcagctttggggccctcggggactccttgcactggggcaggcccccggccaggtgcatgggaggaagcacggagaatttacaagcctctcgattcctcagtcccccaaatctttgtgagcgttgcggaagcacgcggggtccgggtcgctgagcgctggggcggcgccggggcgggccctgatatagag

SEQ ID NO: 14690 - DNA, 282 bp, Homo sapiens
  source 1..282: mol_type = other DNA
tttatgcagacttagtatagcactttgcaaagtggtgacaaagggccgggcggcaccagcactgcactccagcctatgaatctcaatgtactgaaacctcaaaaagagacctagaacatccttttttttttttttttttttgaactcctgaactcaagggatcctcccactttggtatcccaaagtgctggaatttacagataaccacatattataggattctattgatatgaaatgccaaaattgattgtgatgtctcacaattctgtgaatctactaaaa

SEQ ID NO: 14691 - DNA, 615 bp, Homo sapiens
  source 1..615: mol_type = other DNA
atcaaaatataaaatgcatatacttttgcgtttttctcaattcatgcagaattgttttttaatagtgaaagacccaacccaagtccatgagtaggaaattggttctgtaaatagttttatttcatgcaatggaatatcatgcagtcatagttccaggaaaatgtttattaatctcatttagttagaaaatatatatgtagaagtgaatctatagacaagtctagaagctacacacccagctgttaaacagtactaaaaaccttcccatgcattgctgggagggaatggaaggagaccccttggtctcatcaaactctagcgccgcttgaggtgaggagaccccgccccgctgaggtgattctgcagaggggcggagccccccagatccgaggcgggaggcggcccgggggcgggaccagccggctccagcggcccgctccgctcccaccatgcccttataaggagcgcccggcgttagggctcgggaatccggtagcaatcccggcggctcagccccaatcccaggcccctcccttaggaatgggggaggggcggggtttggagtggcggcccaggtctgagctgcgctgccattgggcgcggcgacgagagggc

SEQ ID NO: 14692 - DNA, 317 bp, Homo sapiens
  source 1..317: mol_type = other DNA
catcccccgggaagagaaggcggccgcctacagacgctgctccggtccgaccctccggggtcgcaccagcccagcctgggcttgctcgcaggtggcgcggtcagccagctcggtccccctgcgggccacgactggcgaagggctgctggagccggagctgcaccagacaggaggtcctgcgtgttggccccaagctggcagtgagagacaccacccagcgtcggggccgtgcaaccccacgtgggccctggcagactgcgttagtttagatactaacctgcatatttaaaatttctaatacggtagacagagtcggt

SEQ ID NO: 14693 - DNA, 361 bp, Homo sapiens
  source 1..361: mol_type = other DNA
tattttaacaaatgactcttcataagtaaaagttgcaacatcaatcacatgtgaggcaggtgttaggggcagcagcacgaaaaggaaggtcaacgtgcccttccgcaaccatcccccgggaagagaaggcggccgcctacagacgctgctccggtccgaccctccggggtcgcaccagcccagcctgggcttgctcgcaggtggcgcggtcagccagctcggtccccctgcgggccacgactggcgaagggctgctggagccggagctgcaccagacaggaggtcctgcgtgttggccccaagctggcagtgagagacaccacccagcgtcggggccgtgcaaccccacgtgggccctggc

SEQ ID NO: 14694 - DNA, 274 bp, Homo sapiens
  source 1..274: mol_type = other DNA
gtttggggttttgtcctccaaagcagaaacctgggactgaggccgtctgtactccagctcactatagagggggaacccagtaagcttgacctccggggctcaggcgcctgagaacactgggctgcgctcccttctggccttgctggcgagaaagcccggaaggccgggtgattcggcgccggatcctctcctaccgaagctggagaagcaccgactctgtctaccgtattagaaattttaaatatgcaggttagtatctaaactaacgcagtct

SEQ ID NO: 14695 - DNA, 402 bp, Homo sapiens
  source 1..402: mol_type = other DNA
aagcattcttaactcttcaactgcattaaactgtaagattattcggatacataaagtgacactttccatattaaataagctgctctaagtgtttctgaagttcaggaacgtttgggaccatcagatccagcgacagcgcctggccacgtgactgctaaaccggttgcgcggccatttttggggcgggcacccaatctctcgccctgtaaactgcggggtgacggagatggccaccgcgcccgctagtcatctcgctagcccgcgcgccagtgagctggcacgagacacgcggtggcccacggcgtctggggacgatctccagcccttcgcacggggcggagcgcccgccttccctccaatcagcacgccgggccggctagccaggggccgcccgcgcgcggg

SEQ ID NO: 14696 - DNA, 434 bp, Homo sapiens
  source 1..434: mol_type = other DNA
agttgtcctaacaaagtacctacctaggccgctgcagtgtcagtggcatggctgcaggagtcaaccagggcaggaagcctggggcctcccctccctggcacccggcatagccatgcccaggcccaagatggccctgactccaggggcgctctcttcagagtccagagagctctgggagggggcagcgtcagagtggcctcgcctgggcggccagaggagcccccagtctccctcaagtgggcctcaggaactcggggggcccaggggaagcctgcgccatcagccttccttacagcgctggctaaaagagagggggggaagggccccccagcggtcttccccgcccccctcccctgagctcgccagctcctcgcaggcagggagagagcatcctggggggcagcttccccctccgggcccaccgggagtgggga

SEQ ID NO: 14697 - DNA, 576 bp, Homo sapiens
  source 1..576: mol_type = other DNA
ccaggggcgctctcttcagagtccagagagctctgggagggggcagcgtcagagtggcctcgcctgggcggccagaggagcccccagtctccctcaagtgggcctcaggaactcggggggcccaggggaagcctgcgccatcagccttccttacagcgctggctaaaagagagggggggaagggccccccagcggtcttccccgcccccctcccctgagctcgccagctcctcgcaggcagggagagagcatcctggggggcagcttccccctccgggcccaccgggagtggggacgcgttggcgaggaccgcacctcagtcccagccctggcgggcatcccgcggacaccagcgtctccgccctcccccgagggcggcgagaggagccccccggggcggaggcaggtacccccggggcggagactggggcgggcggggtccgggctgcgcccccggccaggccgggcgggctggcgggcggcgcggggggagcggggctgggcggcgctgcctcgggctctgtgcgctgcagcccggagccgaggaggggtgggtcccgggcggggggagcgcgg

SEQ ID NO: 14698 - DNA, 320 bp, Homo sapiens
  source 1..320: mol_type = other DNA
aggtgcatcatttactcagctcaggaaacaatcaatgtccttggggacaatggaaagtcctctcccacattccactggcagtaacacagtgatggccaggctcccagtgtgagagtgtgagcacaaggcttctgaagtcctgctgatgtgcgtgtggcccagacccaggcccgggcaggtatggccttggcgcctggaatgtcaggaatcttctgggccttcctattttgggtcccaaatggcccaaaccagtttggggaaactctttccaaattttaagataagcttatctctctcataaccagctgcagaaaggagag

SEQ ID NO: 14699 - DNA, 533 bp, Homo sapiens
  source 1..533: mol_type = other DNA
ggcgaggttagccggggacccgggtggccggaggcagcggcgagcggtgcacgtgcttgcagacacgggcgagtgtggagccggggggtgcacgcccggtgggtaggggcttgctcccccgaggcatgggatggcgaggaggctgcagcgacatcgttctgcctgcacccggcctggggctggcaggcgcccggggggcgggatggaacgctccgggcggcgcgcccgtccgcacactccaccgaaggagctggcgactgagaacctcgaattttaacttcgcgtgcccgcccgcgcgcgcccgcccgcgcccacccctaaatcctgcggccgccgccagcgatcagctctcacacaaactttagctgcgggtggcgtcgtctgcagccaataaggctacgctcctctgctgcgagtagacccgtggaccctcccccggggtggtgccggagggggggagacagacccgtaggccaacgggtggccttacaatggagcagcggcggggcgggaccgcgactcgggtttaatga

SEQ ID NO: 14700 - DNA, 462 bp, Homo sapiens
  source 1..462: mol_type = other DNA
aatggagaaccacgtcattcattataagaagattttactagaaaatgactgttaacgttaaatatatatatatatatatatatatatatattttttttttttttttttttttcaggctggagtgcagtggcacaatcttggctactggagactgttaaatattctaatatcattcagtcctcatagcaatgtaagaggaggatattatgatcattatccccactgaagcccagcatggttgggtgcttgctggggtctcactggaagccacacagcacaaactctgcccagagtttcattgattgctgtgccagtggcctcccctgttctagctgttctgggacagggctcagggcagggcctgtagacacctggcgtgccctggtggccacatgtcctgcctctgtggctgggccgggcaggtcgcactggaaaatcattttgcaagcagatgtcataggt

SEQ ID NO: 14701 - DNA, 432 bp, Homo sapiens
  source 1..432: mol_type = other DNA
caccgacttcccctccttgggagggactggggctcctgactctgacgcatagcgctaagtccaggggagagccccgttcttcagacctgggcctaggtcccctcggaggcagaggccccaaatccttgacccctctggagcctcctgggggtggagcctggctgcctgctccctggcaaggctgggctgtgacacaccaccagggggcactgccaagctccgcaggcctgagcccggagcctcctgcctggggtggtgcagccccacctgatggctccagaccagtgtggctgttggactcctctgggtcctgggggcttccccagtgcagagtgctgggggagccaggctctcctccctgcctcagagtagactcccatcttcatggaggttttagagggaccggagggcccactgcagtccacaaggcct

SEQ ID NO: 14702 - DNA, 217 bp, Homo sapiens
  source 1..217: mol_type = other DNA
agtgtggcaactccagcctgggtgacagagtgagaccctgagcacctactatgaggtaggtgtgattatccttactttacagatgaagaaacgggaggaaaaggtcttgtccactccagaggcccctgtgacttgctgagtcatgtccctgtcaatctctaggggtgggcgggctggcccatggctgagacctctctcccagagctggggggagagg

SEQ ID NO: 14703 - DNA, 255 bp, Homo sapiens
  source 1..255: mol_type = other DNA
ggacttggtttatgccaatgctagacctggcttgggaggagaccttccctcagggtggtgcacccgagtagctgggattcaggctggtcggcgtttggcatagacactgtcaaagagtaaatgggcggctctctccaaggaattcggattacctcggcatgacgcatgcgccctcgggctcctccgcggcagcgtgtgggccccgccccctgccggtagaaccccgtccccggccggtagggccccgcctcccga

SEQ ID NO: 14704 - DNA, 338 bp, Homo sapiens
  source 1..338: mol_type = other DNA
cccgagtagctgggattcaggctggtcggcgtttggcatagacactgtcaaagagtaaatgggcggctctctccaaggaattcggattacctcggcatgacgcatgcgccctcgggctcctccgcggcagcgtgtgggccccgccccctgccggtagaaccccgtccccggccggtagggccccgcctcccgaagcagttccggttcggctccgagcagctgccggcgcggcggtgacggcggccgggacgatgcctgcgcgcagtcgccaccgcccccgcctccactccggctccccgccccgggctccgcccccgccgcttgaggcgcttcactcc

SEQ ID NO: 14705 - DNA, 555 bp, Homo sapiens
  source 1..555: mol_type = other DNA
ggtcaaggaggttgggcccggagcaggcttgcctcgccaagctccggctccgtgcatgttcagggagaggcagtcccaagcgaggggctggaggtggcgcccctgtgtcccactcgttctccctgggctgggaaagagaagcggtccctcagaagcgcaggctgcgctagcttaggatggactccccgcaggcaccctatcagggctttgtttcgggggggatgaccctggtgcgcagccgcgccctatcgccccggccacgcgccgacgccccgccccgtccgtgacgcgttcgcgcggggcctccgccccatccccctcccaggcggtccccagcgcgctgcctccgccgtccgccccctcgcctctgaggctgcccggatagctgcagcttctgccttccggatccccaccgacggacggaggcagcccacctgcaggaccggggcgctgtcggtccacgtggccgctctggagcagcgggctgcgctgcagggacaggcgcggcggacagccccgggggcagcggcggggtcctgtctgggagaggacagg

SEQ ID NO: 14706 - DNA, 355 bp, Homo sapiens
  source 1..355: mol_type = other DNA
cccagctactccagagtctgaggcaggagaatcgcttgaatcgccactgcactccagcctgggtgacagagcgagactcagtcttctctggacagtgtttcaacagaacaaccttgcaagaacataacagcagctgccacttatgtattgtttaacagctaatggcctgatgctttggggcatgcccccaaggggcggcgcttggcctgctccccgcaggggcgcagttcccggcgcggccaccagatcgcgcccggctctctcgggcggggctcccgagaccgcggctccgcgggtagtgccccgacaaggtggagcccggcgggcccgcgagtccgagacctgtcccaggagc

SEQ ID NO: 14707 - DNA, 318 bp, Homo sapiens
  source 1..318: mol_type = other DNA
caggagtctgacaccagttgggtgtaggggtgcgtgcctgtagtcccagctactccagagtctgaggcaggagaatcgcttgaatcgccactgcactccagcctgggtgacagagcgagactcagtcttctctggacagtgtttcaacagaacaaccttgcaagaacataacagcagctgccacttatgtattgtttaacagctaatggcctgatgctttggggcatgcccccaaggggcggcgcttggcctgctccccgcaggggcgcagttcccggcgcggccaccagatcgcgcccggctctctcgggcggggct

SEQ ID NO: 14708 - DNA, 312 bp, Homo sapiens
  source 1..312: mol_type = other DNA
tgaccccctctacgcgtccccgggcgtcacgtggccgggaagggcggagagcccagcgctcctcgcggtgttgagccgccgccgctgcgactgcccatctagcttctggtttctccgccgcggaatctgaggaaattagagcgggcgggcgggcttcttccagctcctgcgctgcgccgcgcgggagacagtccggccggtgtccacactcccaccggtgtcaaaagaaggtctcgtcctcccctgagagtcctggcagcggcggcggcggcggcgcgggacgcgtcacatccccttgtcccatttgattgg

SEQ ID NO: 14709 - DNA, 325 bp, Homo sapiens
  source 1..325: mol_type = other DNA
cctggctccccagcctgcggggatggcggcaggtgacctccaggactagaggcagcctgacctccgcacgcaacacgccccgcgaggactcgcggcggcggggtggggtggcggccgccgctggtctcgggtacccggagccgcgcccgaactccgcgaccccaactcccagaggtggaagggcgtctctccgacaccgagagggcaggcgcacactccaggcctgcgcgcccctctcggcgccctgggcgcacctgtgaccccctctacgcgtccccgggcgtcacgtggccgggaagggcggagagcccagcgctcctcgcgg

SEQ ID NO: 14710 - DNA, 396 bp, Homo sapiens
  source 1..396: mol_type = other DNA
agctagcttgtccctcctaccatttgaggacacaggaagaaggccgttgtctgggaaccagaaaatgggccctcaccacacaccaaatcgtgggtgccatgatcttcctccagaactgtgaaaaataaatttctattgtttatacagtcctagtagactaagacaactacttaactttcaatagctccctattgttatcagtttacagctggccttcttgatgtgttcaccaagcagctgagatggactgtattaattattacttgattaagggtgacattggtagtgtctgcagaacagcctatgctcagatgacccaacccccttctggtgggggaagggagagccgttctccaatctaaagcccttctaggaaagctgagctgctcacttcct

SEQ ID NO: 14711 - DNA, 291 bp, Homo sapiens
  source 1..291: mol_type = other DNA
catctcggcaagatttaaaatcctggaaatgattaatcttgaggctttgtgatggcctttgtcacaaatagcctttctcactttcctttaaggtaatattttgcatttaagaaataaaaacaagcaaaataacctgaaatgaattagaaaaaccacctttttaaaataagttcagtttgtcttttttgtttatattgagtcacttaacatcctgtgaagcggctttcagcctgctgcaagcagatgccctttgctgactgttgaagaaagaggatctggctgaaagacccg

SEQ ID NO: 14712 - DNA, 854 bp, Homo sapiens
  source 1..854: mol_type = other DNA
cgccctgggggtcaggggcgcttgccgggccgctgccgaggggccctgcccacccctgcccagcccggagcccaggcgagccagcgcggcgagcctcctcccctcccgcctgggcctgagtccgcgcccgctccagttgctgcagctgctgctgctggcggctgcggggagcgcggggcgcgcgccgaagaggcttgggcggcgccgaggggctcagcggcggggctagcaggcggccacgggccggcggccggacgcggtgaacctgccgcggccgggcgcgcactggcgcggcgagccggagccgagcgcagccggggggggctggcgcaggggcgcccgggcggccgattatccattattaacgagttaccacctaataagcggagagcggctcgttagccgcgcgggaggcgctcggggaagggggtcaccggccgagcgcagcgcacacccgtggcgcacggcgggcggcgcggcgccgaggacacccgggaccgcgcgcggagccggggcgggcccgggggcggcgcagaccccgggcgcgggcggcccgcggcgccccctggctctcggcgctcggggccagcgcagcccggggcgagcggggcgcgggccggggagggggagctgcccgcgcactccatccccctcccccccgggcgggcggcggcggctcgctgtatatatctcggcgcaccccgccaggtcgcgcacagcgccccgagcccaggcgcctccccgcccccctcccgcgctccgcggcggcggcggcggcggcagcagtagcagcaatatgggggtggcgctggcggcgggaggagctcccccgagcccctgcgccggctgcccgt

SEQ ID NO: 14713 - DNA, 853 bp, Homo sapiens
  source 1..853: mol_type = other DNA
tccagttgacagctggccactccccactgggggggaaaaaaacggcctgaccggggcgccccgccgtcctcccagtgtaccccaccgctctcggctgggggcgcagcaccttggagagaggcgcctggccccgcgcctgggctgggggcgctctaccttgcgccctgggggtcaggggcgcttgccgggccgctgccgaggggccctgcccacccctgcccagcccggagcccaggcgagccagcgcggcgagcctcctcccctcccgcctgggcctgagtccgcgcccgctccagttgctgcagctgctgctgctggcggctgcggggagcgcggggcgcgcgccgaagaggcttgggcggcgccgaggggctcagcggcggggctagcaggcggccacgggccggcggccggacgcggtgaacctgccgcggccgggcgcgcactggcgcggcgagccggagccgagcgcagccggggggggctggcgcaggggcgcccgggcggccgattatccattattaacgagttaccacctaataagcggagagcggctcgttagccgcgcgggaggcgctcggggaagggggtcaccggccgagcgcagcgcacacccgtggcgcacggcgggcggcgcggcgccgaggacacccgggaccgcgcgcggagccggggcgggcccgggggcggcgcagaccccgggcgcgggcggcccgcggcgccccctggctctcggcgctcggggccagcgcagcccggggcgagcggggcgcgggccggggagggggagctgcccgcgcactccatccccctcccccccgggcgggcggcggcggctcgctgtatatatctc

SEQ ID NO: 14714 - DNA, 778 bp, Homo sapiens
  source 1..778: mol_type = other DNA
gctccttggagaggatggagatgtccaaatttaggggaaaccctgtgggctggccgcgtgccaggcctgactccgtgtcccccacccccggctgcgcctgggcctcgggggaccgggaaccagccggcgccgcgtccccgcctagcgggcgggccggggacccctcccctccgcccgtcccctcctcccctgctgccgcctcccggagggacggcctggggaggggagagagcgggccggcggcggcggggctgtggccacgggggagcgggtggcggccgcggggccccggtgagccgggccggggtgcacgggggccgaggcggcctccgagccgggccggagctgtcgggagcctgggaaacacggcccaggcgactttctcccgggagcctgggggcggcgcgcggcccggctttcggggcgagttttctcgcggggcgggcggcgcgcgcggaggctgagggggagggggagcatgcccggctggagcccggcctcggggcgcgccccggccgccgtccccacctccgagtcccgccgccgcggcagccaacatggctgcgctccggagcccgggaggcggccgctgctgagcgccgcccgccgccccgggcccccagcccgcccaggccccggcccatggctcccgccgcctcacggctcccggcgccctagggctgctgccgaggtgctcgcctgcccgcccgccggcctcggggggcccgggaggcgtccggcggggcggggcggcgcggcccgccaccatggagcccca

SEQ ID NO: 14715 - DNA, 179 bp, Homo sapiens
  source 1..179: mol_type = other DNA
tcaggcaatagggagcctgtctggaacccagttcatttctgcaaatatataaatgttcacaaaaaagttgagatcatgtcaaaagcttcattgacatccttgagcttattcatgaagccaaggggacaaaacagatcagcaaggattattggtttgttccagacaaagtgcctctcacc

SEQ ID NO: 14716 - DNA, 259 bp, Homo sapiens
  source 1..259: mol_type = other DNA
gcaaaatactgttctattagtatttgattttggagtgcagttcacagcacactgcagcctcgaactcctgggctcaagtgatccttgcgtcatacttgtgttcatttgaaaacattctgaagtggtaccagtttgagagctcatctctggatttccccatttgttaaatggacatgctaataatggtacatatatgtatcacactactacagccagccagcctccctgaataaaagaggtttggtggaggggagctccg

SEQ ID NO: 14717 - DNA, 499 bp, Homo sapiens
  source 1..499: mol_type = other DNA
aaaaaaaacccataatgttgactatatatatatatatatatatatatatatagtcaacattatttcatgattaagtgatggagtaccgaaatgagttagaaaaacgtcccttcttaaaaattgaaagttgttaaacacttttgttaagttctgttttgagtttctcacaaataatgaggacttagttctaattctaagcgctaagcctgtagacaacttatttcaagacatgaatgatctttttcactctaacagattttcaactgtttttgtaatcaataatgtaagtttattcatgaactggaggcacatgtgcgcccatattttcttaaaacaattagaagctcttaatttagatggtactgatgttaatgatgatgattccctctgcttgtctaaaagccttgaggcaaagagtcggtgcggcttccagtaagcgccaccaggtgacgcggaagtctctcttgacagacagacgcgcgggcgagtgggacactct

SEQ ID NO: 14718 - DNA, 430 bp, Homo sapiens
  source 1..430: mol_type = other DNA
ctggagtgcaatggtgtgatctcggcccactgcatgcctcagcctcccgagtagctgtccgcccgccttgctgggataaatatttttcaaaatctaattttgcataatgaccaagatttgcagaaaaatacaaattaaagagatcttttaaagtaaagattcgtcataaaagtcacagaaataatactcatgaataataaattagaatgggcaatgttaagtacttgaaataacaaaggtttagagaggatatcctaaaatgctttccaagtttgaagaaggcaatttaaactaatttggtttaccggaattcaaatacgtacaattcaacataatgaattgaactgaaattgaaccgtaggcagcctaaatcaggcatcggcgcggtcagcctcgtggcgcgcccacgcccccacgccggctcttcccg

SEQ ID NO: 14719 - DNA, 641 bp, Homo sapiens
  source 1..641: mol_type = other DNA
gggcgagcagcgatcgggcggccgagcgagcgagcaacgccggcgcagcgcggtgaccccagccccagccggcgcggagcaggagccggagccgagcggatctcggcgccctcgctgcgctcctcccggcccgagcctgccctacccggcggtggcggcggcgcgtcctccagcggcggcagcggcgctcgcagcgcccggtaagtttggggccagagccaggcgcccgctggctccggggctacctcccgctccccggggactctcggggtgcaagcccccggagcggggcgaccggccggcggcgcgggctccgctccgctctccttggcggccgggggccgaggcccggcggccggcgagctcccggctgcgcggagccggcttgggctgcgcgtgggagtgtggtcgtgcgcgcgcggacccggtgcccgcctcctgccggcgcgcctccagccctcgctccctacacccgggggccgggcaggaccgggaatcggaggagggagggaaggaccgcctcggtctccttcgcctcctcctgaatttccagggaaaacataccccagggcttcgcaagccagaggggcgctcaggccagtgcctggacggggctgccccggccaggagggggcgcgcgc

SEQ ID NO: 14720 - DNA, 482 bp, Homo sapiens
  source 1..482: mol_type = other DNA
ggtgtgggctcagacaccacttgatgtctttatctagaaaatgggtgtgcattcttatcctccttttccaggagggcaaagtgaaaacaacagagttgtgagtggtttgtaaattatgaacaactgcagatgccacctgagatctccactcagagcacatgtgcatgtgcatgtgcactgagggtcggggaaggtccccctgcatgcacatgtatgaacacacacacacaacacatgcgcatacagaaatgtgtgcacctggctgggcgtggggagcctgaggtgggcggatcacctgaggtcaggagtgacacctgtattcccagctactcaggtgcacctgcatgtgcagttcctggtgggcatgcctgcccagtgctcacatgtgccacacatggaaagcccagtggggtaccccaggtgcagccccacagggcccagcaaaggactctggaacctgccagtgttgtggcggcaggcct

SEQ ID NO: 14721 - DNA, 536 bp, Homo sapiens
  source 1..536: mol_type = other DNA
ggagcactggtgcaagctggtagcaatactccagggctccctagccctagccagtgccttcctgtgtccaggcctcagcttcccctggggacagtacgacctcccaccaccttgcagtgagggtggctctggctgctgggaagcccactttcagcacgtggggtttaaatgcctgggtctccccactgagtcccctcccagggtgcatgctgatgggagggggcagctggcagtctgccccggggccccaagcccaggttgctagaagcaggtctggtcccaggtagacttttgctattatattcaaattgcaacgtatagatgctcatattttggaattaattacgttttagcagtttttctttttttaaaaaaatctgctggtaccttaataaacatggaaccagcaaccttttgccaggtgtctgtctggaggcgggagtgttaagcacttcacgctccgcggccccaccggctggctgcgctgcccgctgcggccggcaggggtagtccacggacaggcctggaggagggct

SEQ ID NO: 14722 - DNA, 372 bp, Homo sapiens
  source 1..372: mol_type = other DNA
cccggcccaggctggtgtcctggcgactcgccaaggcaccggggcgggctgcggggagtctttcctggggcaggaacccgggccccccttggcgcagccggcccgcaggggctgcactgagctcccggcagctcggggagctgggttggccgggaggtggggcttgggcggggcctcgcatgggcgggcccgcgccgtgctgcatatgcagatgagcccggggcagggagtgggcggcggggcatcgtggaccccacccccggagccgccgctggaggggtcagccgcgaggcagatagcggatcgccgggcggggcgggacggggcggggccaaaagtttcctgcccaactttcgctgcctccttccaccg

SEQ ID NO: 14723 - DNA, 415 bp, Homo sapiens
  source 1..415: mol_type = other DNA
agttgctggagcttcgccccacctagcacccaccacatggtgtggcagacagcatccctggaagagctccaaactcctcaatggtttgggatttttcaaaccaattccaaataagccaggggagattttcctgtctggtccacagttgccagacatcacccaacaggtgctgccctgactcctccagctgaacctgctagggcagagggaagtggaacgtgcagcatatttgcctgccactctgtccagtgcccaccaactcggctgcaggctccagagacactggctgggggtcctggggctcagggcagacaggttggcctggatcaacctgaccaacctcagctgaagcagtgacttcttcattgtctgaaactaaaccaggaagcagcctgagtgcagaacactggcagcc

SEQ ID NO: 14724 - DNA, 408 bp, Homo sapiens
  source 1..408: mol_type = other DNA
gcacccaccacatggtgtggcagacagcagctccctggaagagctccagactcctcaatggtttgggatttttcaaaccaattccaaataagccaggggttttcctgtcccacagttgtgccagacatcacccaaccaggtgctgccctgactcctccagctgaacctgctagggcagagggaagtggaacgtgcagcatatttgcctgccactctgcccatgtgcccaccaactcagctgcaggctccagggacacaggctggtgggggggcctggggctcatggctgagccaggtcgcaggacagacaagttggcctggatcaacctgaccaatctcagctggagcagtgaaaccaggaacccagtggggcttccttagtgcctggaagcctggcagcccccacat

SEQ ID NO: 14725 - DNA, 271 bp, Homo sapiens
  source 1..271: mol_type = other DNA
tgaggctgcagtgagctataaatgcattatggcactctagcctgggtgacagagtgagactgtctcatctgaggccagcagctttccaggtggcagctccctagctgctgcccccacatgctgctgcctctgcatcagctctttcccaatatctgggcagtgctgttgaggctcttaagatcttctctggactcctgatttctagacatctataaaatacagaaactatacatagtattgtgaatatccacttcgcaggcataaatagtga

SEQ ID NO: 14726 - DNA, 421 bp, Homo sapiens
  source 1..421: mol_type = other DNA
taagtaattaatctaagcttattaaatccaggcagcctgtttcacagtccctgctcataaccatggtgctgtatagttccaaacatcttaactaatgaggacagcattatttctcaaggtcttcaaaaattagactcttagtaaaacaccatctttttttttttggagtgcagtggcgtgatctgggcccactgcaacctgcacctctcaggttcaagagagtcttgtctcagcctctggagttgctgggactacatcaccatgttgaccacgctgattgctgtctctccagacctgagcccaggtgtgattccaaggcccctgtactggggccagacagggagactcgctctcagggacttcccaccatcttctccctgcggggatggcgagggagcgcgggccggccccggccctgcct

SEQ ID NO: 14727 - DNA, 504 bp, Homo sapiens
  source 1..504: mol_type = other DNA
tctgggcccactgcaacctgcacctctcaggttcaagagagtcttgtctcagcctctggagttgctgggactacatcaccatgttgaccacgctgattgctgtctctccagacctgagcccaggtgtgattccaaggcccctgtactggggccagacagggagactcgctctcagggacttcccaccatcttctccctgcggggatggcgagggagcgcgggccggccccggccctgcctccgcgctcgcgctcgacggtgtcctgaagcgcgctcccggggaggtgttgcagccatggctacggcagccggcgcggctggagcgctacggtctgacgaacgagcgagcgctcggttcaccccaggacctgggctcacaggccgcgggccgggggaagtcgtgcaagcacaatcccgactcccgcgcgctaggagcggaggggaggggaccgtccgccagggtcttgggcgggcgcccagggccctgagaaaccggctagccag

SEQ ID NO: 14728 - DNA, 476 bp, Homo sapiens
  source 1..476: mol_type = other DNA
gtctctccagacctgagcccaggtgtgattccaaggcccctgtactggggccagacagggagactcgctctcagggacttcccaccatcttctccctgcggggatggcgagggagcgcgggccggccccggccctgcctccgcgctcgcgctcgacggtgtcctgaagcgcgctcccggggaggtgttgcagccatggctacggcagccggcgcggctggagcgctacggtctgacgaacgagcgagcgctcggttcaccccaggacctgggctcacaggccgcgggccgggggaagtcgtgcaagcacaatcccgactcccgcgcgctaggagcggaggggaggggaccgtccgccagggtcttgggcgggcgcccagggccctgagaaaccggctagccaggctggggagctcccagccaagcgggcctctgttttggcccgccgggccctcgtagggcgaggggagctctggg

SEQ ID NO: 14729 - DNA, 194 bp, Homo sapiens
  source 1..194: mol_type = other DNA
agttgcaattcaatggaactctgtaataataaagacctgatagtcacatagttgtttgctatttggcccagttctctgtgctaggtatcctaggacaggcttaggctccgccttagcagcctgcccctcagagcatatggcatatccagcctgtgtccactaaaaaggtcacggctactgcgtggtgtgcttaa

SEQ ID NO: 14730 - DNA, 440 bp, Homo sapiens
  source 1..440: mol_type = other DNA
tgtgtttgcagcagagaagttagagctacagcactaaaacttatgtcccataggggaagtttccttatcccctcattaataatgaattgaataaaatctttagtatatgctaatttcatatctttgcgagagttatgggtctccctcttaggggcagacatgttccatgtaattagaattaatttcttgttcgtaggggaagacacttccctccgagtcttgccccgccttccctcccgggctcccaggaggtgcggggactcggggggcggccccttcctcgggaggcgcccaggtggcacgtcggtgcctcagctcccggggtctctgggctccgcgctgcccacggggtgccgaggggcctctggagggggcgggttctctcgagccagaaagtccggagccgcccaggtttcctctcgggccggccgggtgcgatc

SEQ ID NO: 14731 - DNA, 494 bp, Homo sapiens
  source 1..494: mol_type = other DNA
agagtgaatctcaatttttactcatttactgggtctaatttgcccaggctagtctggaagccctgtcttcaaaaattgtatacctaccatatatgcatatattacctgggtgaccttttaaaaatatgctttatttttagaacatctttagatttacagaaaaagtgtgaatacagggaattctcataaacccgggcttttcctattattaaagtactggtcatgtatagtcacctaaaggaaatgcgtttgaccttttcagtgtaaaaagttttctcgaaaatgcccacccctgcaggagggcgaatgcggctctgcgcggcactgggcgccgcaggggttaggggcggcagagggacctccggagcccgagacttcctggagcagctccgcagccggaaggctgctgctcctcgcgggcccgccgtgcccagtcctcatcttgggggcggggccgcgctcaggccccgcccctcccttgcactgcctcggca

SEQ ID NO: 14732 - DNA, 452 bp, Homo sapiens
  source 1..452: mol_type = other DNA
gatctgagatgagacgctgtcatttagtacatgaactaaagatataatcctgtttactactttttttggtcaaagcaaaaaataatgcaagacgatgtttattacatgtatagaactgaatatgtagatgtttataatccggaggactttgataatttccctgtaatgaatccatttctcaaaagcatttttttctaaaaaaaacacaagatagatactttttaaagatcttgcttgttaaaatgcctgccagccttttagagaagttgacaggagcagaaacacgtggactcaaagcttttcctctaaaatgaatctgttgtgtaacatcacagctggctcagaatacaggtgcgtgctcctgctatctctgagaaagagtttctggtgatcacagacccctgctctccaaggtgggttgtgaactctagcttcaattctgcagaactata

SEQ ID NO: 14733 - DNA, 365 bp, Homo sapiens
  source 1..365: mol_type = other DNA
ctcagccacttgggaggctgaggcaagagaattgcagtgagctgagatcgcaccactgcactccagcctggtgcagagcgagactctgtgcagaatttatttacaaaaattaaaaatgaaaataatttaccaatgatgagtgaattaaaacatgttttatttcagtggccaaaaaaaatgtgtccaggaaaaaacaaacttgtctaagattttagccttttgagctgctcagagttgacactgggagcaacatcagtagtcaactaataacaaggcacatgattctgagtggcttgaaaaaccaaacctctatgaatagtctttgatatggtttattctcacgatagtgaataagtctcacgaga

SEQ ID NO: 14734 - DNA, 123 bp, Homo sapiens
  source 1..123: mol_type = other DNA
tagcagcttgctccagggactctggaaggtcttccacagcatgccgggctgccagtcaggggcacacgcccgtcccgcgcctggagcgcgccgccgggcgccccgcgcctgcgctcctgaggc

SEQ ID NO: 14735 - DNA, 454 bp, Homo sapiens
  source 1..454: mol_type = other DNA
ctccagagtagctggaaatacaggcacgcgccactatgcctgggctcaatgcggtgtgtgacacacccgcctcagcgtcgcccggagtccgcaaggctgcggctcaccgttctctgccccatagctggcaggaaattctgaatctgtacatacagcttgaaggggctcatcgaatgtgtcggtcctttagattccccctgcccgcctcggccgccttctttgccctaggcagcgccctgaagaacgcgtcggggcctcggttcgcggacttgaggagtggaccgaccgagcgctgtgcgtaaaaggaccgctggggcacacgcccgagcgccaccggagctaggagaccgcggcccggaggtcggcgagtcgggggcaggcccggagctcctcccacggggggcggggcgggtcacatggcggtggcgcggtagcgcgcgatgcagcacaggct

SEQ ID NO: 14736 - DNA, 242 bp, Homo sapiens
  source 1..242: mol_type = other DNA
tagaaccaagccagattcattctgtggttcttgactttagttttggatgtggtacaaccaagacaccggcctcagaggtgccagctgactttccaggcctgagaaaaggacatcttcttttatttgcgctagtaaatgactcaaagctttgctcaactttttgaagggctagggccagggtttctgggtggcctggtcctgcctatggagtgactgagcctagggacctagtcccgcctcca

SEQ ID NO: 14737 - DNA, 544 bp, Homo sapiens
  source 1..544: mol_type = other DNA
atgcttcctacaggtagggaggctgaggctggggagccgcccctggctatccaaagaggggcgccacccctggctgcaaagaaagcttggtatttttagcaccaaggccagaaggagcgtgtccttactccttggtttaaggttcggctccgacaaggccagagcggcgtctgcgcagcgcaacggctcagagcgctcccggcggctacaagtgcccggccccgggccaggcccggcctgcgccgcgcacccactgggagggcgcggaccggggccgccccaagcctccggcaccgcccagagcgggacaaaggggcgggccggcgacccggcctcgcggtccccggtgccgcgcgggccgggaggcggggtgcggtgctgggggaggggcggggccagggcgggcccaggcgcccggggccgcaccgggcggcgcagggaagcggcgccccttcctcggcagacggcaggcgccgcgcctccggccccgcccctccgcgcccctccgcgccccgcccccgccgctcggacggcccgagtcgcg

SEQ ID NO: 14738 - DNA, 336 bp, Homo sapiens
  source 1..336: mol_type = other DNA
agccacactgtggggccagcagacacgaggctatcagagtacccagggagctgctaactgtgaatcagggaggttattcataatatcaactgtccagcttgcagagtggacggtggtgaggcaagctttcaagttgcacgattttttttttttttcttcctggaaaaaaaaagttgtctacttttctcatctgtaaagtgagaagaatcaagtctgccttttctgtctcacggggttgcagtgaagcattaggagttaggcctgacactggtgtgagacagctgccatctctggcggcactcagcaagtgttcaccagcagctgattctgggaacc

SEQ ID NO: 14739 - DNA, 775 bp, Homo sapiens
  source 1..775: mol_type = other DNA
ccgccgcggcagcctggcagccagagcccgtctggagacgccctcagcccggggtctgcgttccccgggacccccgacgcagtctcccgcttccgtcccccacgctcaaccgggcagggcgccggggcgtgatttgtccctcggaggcgggtcagaccgcacccgccgcgggcgcccggtgcgcccccagcccctggctcgcggcggcgacagcggcgctgttcgctggagtttgactctccggcggcggcggcagcggcgcgcagcagcgaacggctggagcaaggcgagccgggccgctagccctccgcgctgcgctgggattggtctctccagcgggccggctgaagaacaggtgcacctcaccgcccgggctcgcggagcagccgccgaagatcgcggcggccaggcaggccctctgtgtcggaatgcgggtggcgggcacccggcaccccgcgaccggccgccggggccactgaaggcggcgcgaggcccaggcgcggcgcgagcgggcgccccagggagcgggctgggcgcggtgccccgaggatgtcggcgctcctggagcgcacgcaggcggcgggcagcagcagcagcagcgggcgcggggacccggcgcgcaggaggcggcttggagggctgcagacgcgccccgccgctctctgaccgaccggaggcgccgggggcccgtctcgcccctctctctcctccccgcccgccgcccgcctctcggggggaggggcgtgggggcagggagcggatttgcatgcggccg

SEQ ID NO: 14740 - DNA, 851 bp, Homo sapiens
  source 1..851: mol_type = other DNA
tccgtcccccacgctcaaccgggcagggcgccggggcgtgatttgtccctcggaggcgggtcagaccgcacccgccgcgggcgcccggtgcgcccccagcccctggctcgcggcggcgacagcggcgctgttcgctggagtttgactctccggcggcggcggcagcggcgcgcagcagcgaacggctggagcaaggcgagccgggccgctagccctccgcgctgcgctgggattggtctctccagcgggccggctgaagaacaggtgcacctcaccgcccgggctcgcggagcagccgccgaagatcgcggcggccaggcaggccctctgtgtcggaatgcgggtggcgggcacccggcaccccgcgaccggccgccggggccactgaaggcggcgcgaggcccaggcgcggcgcgagcgggcgccccagggagcgggctgggcgcggtgccccgaggatgtcggcgctcctggagcgcacgcaggcggcgggcagcagcagcagcagcgggcgcggggacccggcgcgcaggaggcggcttggagggctgcagacgcgccccgccgctctctgaccgaccggaggcgccgggggcccgtctcgcccctctctctcctccccgcccgccgcccgcctctcggggggaggggcgtgggggcagggagcggatttgcatgcggccgccgcggccgctgcctgcgcccgagcccgccgccgccgccggagcccgcgcccgcgcccgcgcccggcccgcgcggccccatgcctctgccgcggccctcgggggggcgaaggtgaagtgaaggggcggccgctgcctcgccacctggtgccgcttcggcagccgccg

SEQ ID NO: 14741 - DNA, 310 bp, Homo sapiens
  source 1..310: mol_type = other DNA
gcattttgtaatctcacatcaacttgatataattggatgtcagtcattctgatagtggaattcaatgatatacaatatgtagtcaagcagtctgccaataatttattgagtacctgctatatgccaatcagcatgatagagttctaacaagtaatcccagctactcagagtcactggttgcagtgaggtgagattgcgccattgcactccagcctgggtgacaagagcgaaaggaaatctctctagaaaagtattatgaagaactctagaatctctaggtctctagggttccttctaattcaagaagcca

SEQ ID NO: 14742 - DNA, 472 bp, Homo sapiens
  source 1..472: mol_type = other DNA
aagcacggagaccagccactgtgcactggctaggcatgctggctgctatggcagggcaggcagctccaggcgctagcacaccacatgtggtacatgtctgcatctggacgagaggaacatggtgttgcccagaagcttggagacaccgggtgtcacagccctggcttagggatcccctatgtctgggctcccttcttgtcacccacaatgtggcaagtgggaggctttccgcaggcaggtcatcccgatgagtgtccagctctcagcagagaggagacccaaagtgggtagctacttttcacagacacagggttttcctgggcttcagaagtccatgggcagccatgggtgggcccagaaaaagctcctggccgtggactccacctggaattccacctgaaggtgtgcccagtctgttcaagtggagggggcctgcaggcccacactgagccaccctcagcagccccaactc

SEQ ID NO: 14743 - DNA, 211 bp, Homo sapiens
  source 1..211: mol_type = other DNA
tctagaacagagcttggttcagtaaatatctgttgagggagagtgaaaaagaaagtaactctctcgtcagcactagaaaaaatcttttctggatgtaaagatatttatctcacgataaattaaggaataaacggaataatttttaactctaacattactttctttcaatttttataattcttatgcctcccccagtgtggccgcttttccg

SEQ ID NO: 14744 - DNA, 310 bp, Homo sapiens
  source 1..310: mol_type = other DNA
ccttgaggcgaggcacagtgtcgtgtccctggagccaagcgcatggctcagcccaggtcacgtgtccagtgaatggcccccatgcctgccctgggcagaggctcctctcttccaggccttgttcagggtgaccctgtacttgtgtggccccacctcctttaagagctgtgtgagcaccttggtgtcatacatgctgcccatttcacagataacccaggtcatctgactccaggacctttactgacactaaaagttaacgttcaactcccagttctgaaacctcaaatgcagaagggctctgcccattggg

SEQ ID NO: 14745 - DNA, 416 bp, Homo sapiens
  source 1..416: mol_type = other DNA
tctccatccacccaagggcatcctgggaagtggcctggcttgggcttgagtaccccccagttcagatctatcttggccagctctgtgcaagtctgtcctaagatgcttcaggcccttcactcttccttggaaggtttgaagagtgggtcagctgccccttcatggtcccagactgggcactgactgggaatggggatcaccctggtggacacctgagggtcctccctgctgcccaccacacagatcagaccctttgggagaggtggtccagcaatgcttagctcagagaaggaaagacactcctgtcccccatggtgtcctcctgtccaggactgggggccgccggcaaagggggcgtggcgggcggggagtcctcttgtcacgccctcctgcccccgcccgcggctgggagcctg

SEQ ID NO: 14746 - DNA, 445 bp, Homo sapiens
  source 1..445: mol_type = other DNA
cagttcagatctatcttggccagctctgtgcaagtctgtcctaagatgcttcaggcccttcactcttccttggaaggtttgaagagtgggtcagctgccccttcatggtcccagactgggcactgactgggaatggggatcaccctggtggacacctgagggtcctccctgctgcccaccacacagatcagaccctttgggagaggtggtccagcaatgcttagctcagagaaggaaagacactcctgtcccccatggtgtcctcctgtccaggactgggggccgccggcaaagggggcgtggcgggcggggagtcctcttgtcacgccctcctgcccccgcccgcggctgggagcctgtcgctccgctctgcgccgctaattggtctcgtcaggcggccggcaggagcagatccgatcccgccccgtgccccctcccgccgcgg

SEQ ID NO: 14747 - DNA, 306 bp, Homo sapiens
  source 1..306: mol_type = other DNA
gcttggtttctttatctgaaaatgaactaagttgtcctagatcagtatttcctggtgtaaattttatcatgagcacccctctgttctaagacagtgtcctaggacatggtttatattcgtgatatctaaccaggacttatataaaggccaaccccattttctggtcccagatggggttcttcctttggagtatactcatgtgagcctgaggacacagttcacaaaggctgcattgtccaatgaatgggttccttctgcttgggccaagaggaccatcacgcacatgggatggccctttaaaaggga

SEQ ID NO: 14748 - DNA, 464 bp, Homo sapiens
  source 1..464: mol_type = other DNA
ctaagacctctctgagctacctctctggggccctccttggagtagggcaccttgaggagaggggtgcccttgtcccttatgtggagacatctccacctttggcattcgtagcaatgcccagaagggcgctgtttgcctggcagcctcatgagagacacctctgatgtctccccaaaaagtaccagtgaaactgggcacttacaacttgtgagagagcttctgttcccacaggctgtcaagaaacacttgaagtaactttatttctctttgtcagataaggacacagaggccaagagataggtcacagcccctctgggatttgaccccaggaagcctgggtccagagcttagcctccgcttttttgctatgagacagtgtcacaggaaagaatttccaaatggaagggggtcccccgcccctaccctcaggactgagtgattcagaaagcaataagcctctgagt

SEQ ID NO: 14749 - DNA, 262 bp, Homo sapiens
  source 1..262: mol_type = other DNA
cagccggccaggcccggaagccttccaggctgaggactctcagcatcccaacactttgggaggccaacttgcctgaggcgagaggatcgcttaagcccaggttgcccatgctcgaccactcctcgaggaggatcagccgcaagactggcgtcactgcgtgggcccagcaaaggccggatcaggcggtgggggcggtccccgtagccccgtgaggctcgcgcctgcgcacgggcccgcggcggggcgggactgcgcgtgcgcg

SEQ ID NO: 14750 - DNA, 300 bp, Homo sapiens
  source 1..300: mol_type = other DNA
gcagttgagtataatttgaagtttaaccagtgctggagaacgcctgggaggaggtacggctgagcccagtgctgcacacacactgtgatgtcattgtgcatctcactgtcagaataaccgcgcctgccagctacttgggagtaatcccagctactcaggaggctgaggctgaggctgcagtgagctgcgatcatgccactgcactccagcctgggccacagagtgagaccacttgcacactttccccagcttcagtctgccaggatagggtgacggtggatccgttcaggttgacagact

SEQ ID NO: 14751 - DNA, 845 bp, Homo sapiens
  source 1..845: mol_type = other DNA
agcccgccggccgcttggaaggctcctcacgtccaggcgccgcggtcacggctgcgctccggccatgggcttcagagtccgagcctcttgcccgactcccggctgagcgcgctgcccatggagcgggggatgggcgcccgccgaggtccgcgcggccagccagggttcgagcccacggcccgggctctactctgagatgcttgcggcggccggccccctctggctccccagctgtcctggggcctggcccggcgccccgccccggtctgtttcggccggggacatgacccgagacgcgcggctgctgaggtcgccagggcgcttcgggagcccctcgagggcagttagcggccggccctcctccattctcccgcccctggcgaaccggagaaggaggcccgaaccgtcagagctcggcgcgccgcagcccaggccggtccccgccgctgtgccggtctccgagcgtcccccgagccgggagcgtggagcacccggcgccccctccgagccgcgagcgggcgagagccgcgcggcgaggctgaggctccgcagtcaggagggggaggggagggggcgtcctccgcagttcgctcctcgccggggctcagacacacagccagcccagagccgccacgccggcccggccgccgccgccaccgcctcagcctcccccgaagccgctctagccgcgggaagcgccgctgccacagccgcgggccgcccccgccgcgccggcctgggctcaagctgccagcaccgccgcagccgccaccggagccggagcgggagcccgaccgcgctgggctgggctgggctgggctggggcgggcgcagggcgcaggggc

SEQ ID NO: 14752 - DNA, 158 bp, Homo sapiens
  source 1..158: mol_type = other DNA
tgaccagccttggtttgcacatggtggtagggcccactgtgacaagggtgaggctgggctgcacaggctcagctgcccacaaacagctctgggggctcttgggagccttctgcccgagaccttggtctatgtgcagctcccacatcgctatataaaga

SEQ ID NO: 14753 - DNA, 616 bp, Homo sapiens
  source 1..616: mol_type = other DNA
tttaaactttttattatggaaaatttcagatacacaagtaaagagactgtatgatgagcacatatgctcgcatcacacgatgaaaaacgttctgccagcttgaaagcgaggggcgacgctgctcgtggcctcgggtgtccggcgcctcgcggtccccgccatcgtcacctacgccgggccaggaccgaccaggccaggtcgagggcggctcttgaccacgcgccccctgcctcccagctcccgggcggcggcctccgcaggcccggcacagctgcacagcccgcggtccccaggcaccggcgggtccctggaggggaagcgattgatacagctgcctgcactgcgccacccgcccggctgcccatctccgtggcacctgcgtctcccggctgggccgggagctagaagtggctgccgagaccgggagggcccggccagtcgcccgctcccgctcccgcgcctggtcctcggcccgcgacctcgcggacctggactacaactcccgtcgggctccgcggccgggccaatggcgggcgccggagcatgcggggcgcagcgcctgcgcggcggtttgagtaagcggctgcgcgattggctgcggggtcgggcggccgcg

SEQ ID NO: 14754 - DNA, 340 bp, Homo sapiens
  source 1..340: mol_type = other DNA
ctgtcacccgtgctgcacgggatagctcagcagccgcacccgaggctcagcctgaggggtatgtgcccaggcccttgacaatggtgatcaggctgggcctgtcactggcataggaaggccagccccgcatcccactgtggcccacattcttgtgcacgcgggcatttgcaggcacgctctcgcgtagttacctatctgaatgcacaccaagcacatgcgtgcacactctgcgagaaccagggcctggcctctgatgcccactctgaggcccacaaaggccaggctggcctccatcctcccgagggaggcggatggagggaggccggccttcgcctttaag

SEQ ID NO: 14755 - DNA, 367 bp, Homo sapiens
  source 1..367: mol_type = other DNA
gcctgccccctgccattcctgcgcaaagggcacggggcctggcgtgtggcactggcagctggagctttccatgctgccgtcaaagcacaaagacaggagagccaggaataactggctgggcccccagagggtctggaggggacctgctttcagaccctatgccaaggggtgcaggcagagggccagctgcccaggaccagggctttgggagcccaggctccagtgtgacctgggccagctggaggctcgagctcagcccctggtcttctgagcaagagtgtctacgctctccagaggacacaggagttccccttcctcccccctggggggtgctgggtgccggacacccctccccaggggcggctgg

SEQ ID NO: 14756 - DNA, 327 bp, Homo sapiens
  source 1..327: mol_type = other DNA
gccgagatggcgccactgcacttcagcctgggcgacagagcgattttagtttataccagaatataagggaataccctggaattcaggcaagaatgtgtgtcaatacaaatgcctgcccagttttaaaagtgattttttaaaatgcacctttaaaagaacatcttttgttaagtgacttaaacttcacatttggtgaaaaaggggcctatctcctctttcctcacttttaaaagcattttccaccatggaaatggacaattatttgcattttccaaatggcctccggagggtacacgaggtcaccagcgtgagcccgcggtggagctg

SEQ ID NO: 14757 - DNA, 718 bp, Homo sapiens
  source 1..718: mol_type = other DNA
aattatttgcattttccaaatggcctccggagggtacacgaggtcaccagcgtgagcccgcggtggagctgaattcgcgggctcgcaggtcacaggagcccgggcgcgccgggcctggcgctcccgaatcgatgagggaagccgctctccccggcagatcctcccggccggggagcctccatcaccctgcctgcgcctcggcacgctggcaaggagcccgggaagagaaacaaatgcaatgtgacttatatttttctttccagctgactggcgttcaccgcagtgggatatccggccccgaaggccggagcgggcgtccagggcgccgatggccgcagcgcccggcagccgtgtccacgctcccctccgccgcgtcgcgtgctacctacggcgtctgcgggaagctacccgggcggcagctgtggggctggcttgtggggaggggccggcgggcccgcgcggaggagcagccccgactcccgcccgcaccagcagctcggcgcccccttgccggcggctggccctcctccccggcaactgggcgccgggctccgcgaactcttcgggcgcttccgccgtgcgctcggctctgtccggggcggggcggggcaggcgcccgtggtcgggtgcgcgcggcgcgggcgggggccttcccagtgcgcgcgcgccgtgcaaggcccgcggacgcccgcccctcccccaggcccccgcacccgcg

SEQ ID NO: 14758 - DNA, 512 bp, Homo sapiens
  source 1..512: mol_type = other DNA
ggcccagagaaggcggcctgtgctctgccctgcacccagctgaggctggtgactggggccaaccagcctgctggcagcagcatcccctacacggccaccctcttggggggacaggacagcctgggtgggcctgggctctcactgtcacttaggagctctgtggccctgggaggcgtccccacccctccaagctatcatagcaatgtgatagatgggacaccttgcctgactgagttccactgggacagcaatcctgggtctgagcggagtccaatgctcaggctgctggctccctgggctgggcccctcggggtccctggcaacctaagcctgcatcctgggcccagcctagccctggggctcaggcagggcagaatgcctggccctggcagccgagcctccttgtgatggtgttggtgtcaccacccctgctagcttcccatgctgcagggacagggtctggagcacgcttccacctccctggtcacaggagcaagggaagttgcccatcc

SEQ ID NO: 14759 - DNA, 722 bp, Homo sapiens
  source 1..722: mol_type = other DNA
aattcgcgggctcgcaggtcacaggagcccgggcgcgccgggcctggcgctcccgaatcgatgagggaagccgctctccccggcagatcctcccggccggggagcctccatcaccctgcctgcgcctcggcacgctggcaaggagcccgggaagagaaacaaatgcaatgtgacttatatttttctttccagctgactggcgttcaccgcagtgggatatccggccccgaaggccggagcgggcgtccagggcgccgatggccgcagcgcccggcagccgtgtccacgctcccctccgccgcgtcgcgtgctacctacggcgtctgcgggaagctacccgggcggcagctgtggggctggcttgtggggaggggccggcgggcccgcgcggaggagcagccccgactcccgcccgcaccagcagctcggcgcccccttgccggcggctggccctcctccccggcaactgggcgccgggctccgcgaactcttcgggcgcttccgccgtgcgctcggctctgtccggggcggggcggggcaggcgcccgtggtcgggtgcgcgcggcgcgggcgggggccttcccagtgcgcgcgcgccgtgcaaggcccgcggacgcccgcccctcccccaggcccccgcacccgcgccgccccctcccctcctggcaagagtcggcggcggtggcggcggccgctgcagagattggaaggcttaggctcgg

SEQ ID NO: 14760 - DNA, 582 bp, Homo sapiens
  source 1..582: mol_type = other DNA
actgggacagcaatcctgggtctgagcggagtccaatgctcaggctgctggctccctgggctgggcccctcggggtccctggcaacctaagcctgcatcctgggcccagcctagccctggggctcaggcagggcagaatgcctggccctggcagccgagcctccttgtgatggtgttggtgtcaccacccctgctagcttcccatgctgcagggacagggtctggagcacgcttccacctccctggtcacaggagcaagggaagttgcccatccgggtttggtgagagagcatgggccctgcaggcagggggcttccaggcttgggacacctgggcattcctgggccaggtacatgcaccctccaccccagagaaggactgcggggcccctgcagggctgcccatcagcagttcccaaaccctcactccttggggctaagggagcaatgtctctcccacaaccaagggggtggggaggaagaggagcagctccctcctccctcccgtccatcctccctttcatcaaaaggcggaaggtggcctgaagagcggagtggctggatccagcccgcccctcccccg

SEQ ID NO: 14761 - DNA, 624 bp, Homo sapiens
  source 1..624: mol_type = other DNA
aggccagctggagcccagccagccctgcgtgcagtgggggcggggagggagggagggagggaaggaggttcagcctcaccttcctccaggataggaaggcagagaccaggctccctgggctcctgctggctcagcccagctctcctgccccgtgccctccatgggctggagggggctggccacctcccacctgcccacccatgggggcagccctggctgggtgctcttggccccaggggtgctgtgtctatgctgcacctggacagacatggccattgtccccagcttcctaggtaggggtcagggccacatagggcagccaacctcccgcggcctgggctgtgcagctacccaccagcatcctggatgccgctggaccctgggctgcggaaatgaaggacttcctcatgccttggccaattgccccccatttcctggccagcagtgtggatgggcagcaggtcccctgagatggacctgaccacatgcatttggtggggccaccccatggtccctgagccaagtcctcagggacaggaactggcttgtgtggttggcggcccctgtggggccagccagggtagggggggcaggacaagacccaccgggtaggccggcccaggc

SEQ ID NO: 14762 - DNA, 561 bp, Homo sapiens
  source 1..561: mol_type = other DNA
agagaggctctgctctagctgagctgggactcagatcctactccaaggtccaggccttccagaccccaggtgtcctggagctctgcagatcgaagcctgggcccatgcccccagcagcccccagcccagggggcccccaaggctgaacagcaagctcaggatcatcttggtggtggggccctaaactgctgttgtcttcaagttaagcctgggccggcctacccggtgggtcttgtcctgccccccctaccctggctggccccacaggggccgccaaccacacaagccagttcctgtccctgaggacttggctcagggaccatggggtggccccaccaaatgcatgtggtcaggtccatctcaggggacctgctgcccatccacactgctggccaggaaatggggggcaattggccaaggcatgaggaagtccttcatttccgcagcccagggtccagcggcatccaggatgctggtgggtagctgcacagcccaggccgcgggaggttggctgccctatgtggccctgacccctacctaggaagctggggacaatggcca

SEQ ID NO: 14763 - DNA, 624 bp, Homo sapiens
  source 1..624: mol_type = other DNA
gcctgggccggcctacccggtgggtcttgtcctgccccccctaccctggctggccccacaggggccgccaaccacacaagccagttcctgtccctgaggacttggctcagggaccatggggtggccccaccaaatgcatgtggtcaggtccatctcaggggacctgctgcccatccacactgctggccaggaaatggggggcaattggccaaggcatgaggaagtccttcatttccgcagcccagggtccagcggcatccaggatgctggtgggtagctgcacagcccaggccgcgggaggttggctgccctatgtggccctgacccctacctaggaagctggggacaatggccatgtctgtccaggtgcagcatagacacagcacccctggggccaagagcacccagccagggctgcccccatgggtgggcaggtgggaggtggccagccccctccagcccatggagggcacggggcaggagagctgggctgagccagcaggagcccagggagcctggtctctgccttcctatcctggaggaaggtgaggctgaacctccttccctccctccctccctccccgcccccactgcacgcagggctggctgggctccagctggcct

SEQ ID NO: 14764 - DNA, 472 bp, Homo sapiens
  source 1..472: mol_type = other DNA
atctcaggaaaggtgacctgagagaggccatccactgggtctctggctacaggcagagagccagtcagcagtgcccctgcagctgtttggggctgggggctccgatgatgccagagcccttccaagtccctgccacatgcgtttgggtgagaccgacctcactaatacccacttcaggaggtggttgtaaagattatacagagcgtggcagcacctaaaagaccactgctgtcattaaggtcaacaccagccctgagctcctgccctggagctgacccagcgctcacgcccaggatcagaaagctgggaggtggtgtgcgcccttctcctgcctccacccgtcttaggccaggatgtgctccctgccctgcggactctggagcagggcccggccactccccggagcctgtatgacgggaaccgccccgcgccctctcccctacgcggggcaggccagccctggggcgcctta

SEQ ID NO: 14765 - DNA, 398 bp, Homo sapiens
  source 1..398: mol_type = other DNA
tgtgtgtgtgtgtgtcggcacacccaaggccgctgagaggctctgcccttttctgagacagggtctcactctgttgcccagactgagtgcagcgtacaggctgagccaccatgccccgccttcaagacaagaaaagccttttctagaagactcctggcctcaggcctcaagtgaaaagtcccttgggattcatccctgagtcataggggaatgatgcacaccagaaggatgctgggctctgccagtccagccccaccagcctcctggagtggccctgaggccggctctccagaccctaggacctgctcctggaggcaggggctcctggaagcgcccctgacactgctccgggtgtctcttcaaccttttggggacagtcagcaacatgtaaccgatac

SEQ ID NO: 14766 - DNA, 480 bp, Homo sapiens
  source 1..480: mol_type = other DNA
gtcacggtgacagatgaggaaacggagggagtaactagggagcagccctgccactcctcatgtgatgcaccaggagccggaagagaagcatctccctgagtggtggtggaggcctctgtctactcctccaggactgccaggggataggagggcactgctggcctcacagacactcttgggtgagtggcccagtgctgtgcccccctctgactcaggcctgcagagctctccaggaatggggagggcagtcaccctcactccacttgagcagcaggcttggaatcctaggccttgtctccaggtacatatcagtacccaggcttgggaagttttggtctcggggctcaggccctctgcctcaaggaagaggcatgtccggaagcctcaggctgtcaggggatgctgccaccccagtgccagggtggctccgcccagccccactgggctggggcaagggcttgttgccccagagcctagaca

SEQ ID NO: 14767 - DNA, 617 bp, Homo sapiens
  source 1..617: mol_type = other DNA
taggactaaaggcgtgagccaccgcgccgggccggagcctctgtgcttgtggagtctgcagccctggctggtgacgccgagccctcagcccggccttacgcggcggcggctctgcctcgcacgtgtcagcccctgcacgcccggccccggcctgaggccgccagaggacaggccagggtgggccgcccgttccgagggcgcgcgggcggaaaggaggggcgcccgtgactcacatgacccggtccccccgccaagcctcacccacgcggcgctcggggggactcggcctctgagcgccctacagaggccagcccccgccccctgagggacccccgcggcgcacatacctgagagccccgccggaggcgggtgcggcctccgggcaaatccggccgcccgtgggcccgccccgacccgccccgacccgcctccccactggcgcgcgagcgtgcgcgccgagcccgcccgcgcctgcgcgcccccgacgccccgccggcgcgcgctgccgccagcgaggcccggggaggccgcggcggaggcggaggcccggcgccctgggcggcgccctgtccccgaagtccgtcctccccgttaggtggcgagcgcccgaggggagg

SEQ ID NO: 14768 - DNA, 580 bp, Homo sapiens
  source 1..580: mol_type = other DNA
ttcagagggagatagggtctccctctgttgcccaggctggggtgcagtggagctcgtagctcactgcagcctcgaactcctgggctcaagtaggactaaaggcgtgagccaccgcgccgggccggagcctctgtgcttgtggagtctgcagccctggctggtgacgccgagccctcagcccggccttacgcggcggcggctctgcctcgcacgtgtcagcccctgcacgcccggccccggcctgaggccgccagaggacaggccagggtgggccgcccgttccgagggcgcgcgggcggaaaggaggggcgcccgtgactcacatgacccggtccccccgccaagcctcacccacgcggcgctcggggggactcggcctctgagcgccctacagaggccagcccccgccccctgagggacccccgcggcgcacatacctgagagccccgccggaggcgggtgcggcctccgggcaaatccggccgcccgtgggcccgccccgacccgccccgacccgcctccccactggcgcgcgagcgtgcgcgccgagcccgcccgcgcctgcgcgcccccgacgccc

SEQ ID NO: 14769 - DNA, 464 bp, Homo sapiens
  source 1..464: mol_type = other DNA
cactgagtcataaagtcattgcctgttaaactgtttgtttgctttttaaagaaagtatcaaattgttagagaatggctttgttattttattccattgggtatatattgaaatcccattggggttttaatttttcattccctaaaacatatattcttttcagtgaaatgtatattcttacatggcaagcaaaaggaaggaaggagcacctttttactgtcaagttgagatgaaggttttgccacacaaaaagtaaatactctgtgtttttaagataaagtaatggatgccaagaaagactcaaattttttttatgtactaatcataaaaatgaactatgatttataattcttctcgtccattttcattatacataagttaagaaaacaaaatacatcatactcaataataagaattctgagtagaaactctctcctttttctttaaaaattttggagtgtgcaga

SEQ ID NO: 14770 - DNA, 392 bp, Homo sapiens
  source 1..392: mol_type = other DNA
gatttttggggtcaaagattctgagcaataacctattaaaaaacccagcttttgatttgagtatgtaagcttcgcaaagcagattagctcatacttaataatagagtaaatctgttggggaacaacaagcacagaacttaaagattcaggacttaaattcctgcagaatgtatgtatcctgtttattttcaaactcaaatggaaaaaaacgaattaaactttgaaaaaagcctgggaggctaaggtttagtctaggcgactaaggggcagcgacgccggccggagctttccgccgggacgcaagacccaccgccagaggttgggcatcccgagggccgccggccggaagcgccctccagacccgccccctgccctccggagccggaagctgg

SEQ ID NO: 14771 - DNA, 227 bp, Homo sapiens
  source 1..227: mol_type = other DNA
agcattacacagtgtgagacccagtgactgcccccaaagtgcttaggcctaaagggcccattccagtggaacagaagtgctactttgtgaggaggggccgtgcctccacaggcccatacctgtggagttatcaccatgaggctgtcagcctgcgcttcaagcatccttgcctaagctcttaggtcctagaggcaggaagacttcctggcggggtgaacttgacccca

SEQ ID NO: 14772 - DNA, 340 bp, Homo sapiens
  source 1..340: mol_type = other DNA
ggctaaagggcccattccagtggaacagaagtgctactttgtgaggaggggccgtgcctccacaggcccatacctgtggagttatcaccatgaggctgtcagcctgcgcttcaagcatccttgcctaagctcttaggtcctagaggcaggaagacttcctggcggggtgaacttgaccccaggccgcgtgccgggcgtgccatctgccgctccgctgcaaggtctcgcccgggaccggggctggcggagcgcgcgcccgcgagtaggggccgggccggggaccccgcctaggcggcggcggccgggtccccaaggctgggcgctgcttgcggaaccgacg

SEQ ID NO: 14773 - DNA, 393 bp, Homo sapiens
  source 1..393: mol_type = other DNA
aacatcctaaaacactataacctagagttatttgttctccatttccgagtggaaaaccgtgaaacaatttattgacatgtatagcattcatagcatagcattcaccttcacaaagagggcaggttattattaacatcaccatcttttgtattttgcacaaggtggtggccgcgcctgtgcgacaatcaccctaagggcccaggccgggccggacgccaaggcgaggcccgggacgcccttggaggttacctttcctccgggggttcccaggtccgagacggtccttaaaggacccaacctgggagagaacgcttccggcgggaggcgcggcgcactccctcccacggagcatgcgcgacccgcggtcgccggcgcggagggggcgtgctccca

SEQ ID NO: 14774 - DNA, 376 bp, Homo sapiens
  source 1..376: mol_type = other DNA
agtattctgaaagtactttcctagcagacctagacaagttctaacctcaattgtgaatgcagcctttatgtgagtaaaagaaatgttatcacaatgattgtattcattaaccttcataatatatatgtgaaagtggccatgcacataacattaaactggattgccatctgttcataaagatttctaatttctcatctcattacattcttggagcagagacagagtctcactctatagtgcctcactgcagcccaaggtgctgggattacaggcatgcacccctggcctctgaagcattccttgagtcagatatgcttgggtttactcaacctgctactgccttaccctgaaaggggaggtacttactatatatact

SEQ ID NO: 14775 - DNA, 512 bp, Homo sapiens
  source 1..512: mol_type = other DNA
tcacaaagtttgccctccaagaagacgacagtgctgaccttgactcagaggcccagaagataaacaccaggtccttcttcttgctgtctactgtcagtgatgtacttctcactcaggcagaagagcagcaacttcttgcgcttcttcaccttttctagtgttgaagacttgcacactttcatgtcactgaacaccttgatgacatcatcaaagacagccacatgggagcccatggagagccgctgcagctgctgccaggatctgactagacatttgaatattttgagaatgaagtcttattttctcactgaccccattaaaaaatcagtaatgtaataagaacaataatgataataactatatttattattactaacatttgttgataacacttaatggagtcattaaagggtatgtctgtcacacaagtaataatgaatatttattgattgcatactactactaaatgaaagctatccttctcctatagcagctgaggctttattataatt

SEQ ID NO: 14776 - DNA, 562 bp, Homo sapiens
  source 1..562: mol_type = other DNA
cggtgacaggtcagcccaatcggggctgtaaacagacttgacaggtttgttctgggctgaaggttctcagaccagataagtcactctgaggggcgcgctcaccagctcagggacatcggagtgcacgctctgggctgcagcaggagcgatggagaggcccgagagccctagcgcccagctccttttccgcaaggagtgagtctcaggtctcagtcctttggggggactctctccccgcgttcaagaatcggcggcagccagcaggcggggggatgtgggtgcttgtgtaaccagttccccaagcgccagccccgacagcgctccttcgggaggctggtccgagcccctgtttccgccgcggcgcaggaagggttggggttccgctgcctgcaccaggcaagagcaccccggggagtgggaatttggaaagttccccaactagggacacacgtgacctccttcggaaagtagttccgccaaacgtgcacggtccggccggggcgcgcggagcctggccccgggcgatccatcctgccgggcggggctaggtggtctctgagaa

SEQ ID NO: 14777 - DNA, 394 bp, Homo sapiens
  source 1..394: mol_type = other DNA
gattgctctttgtgctaagactgacaccatgggggagggtattccccttgcagggaccgtccctgcatcctgtgcacaggtaacctccctaccctgcctccggctgggtttctgggcagaggccgaggcttagctcctcgcctcgcgttgctgcaaaagccgcagcaagtgcagctgcaggctggcggctgggaaccggcccgagcaagccccaggcagctacactgggcatgctcagtagagcctgcggcttggggactctgcgctcgcacccagagctaccgcctcgcccggcgcggtcccgtccgcctcccctcggtcttccgaggcgcccgggctcccggcgcggcggcggagggggcgggcaggccggcgggcgctcggcgctgggacg

SEQ ID NO: 14778 - DNA, 571 bp, Homo sapiens
  source 1..571: mol_type = other DNA
ggtaatttttttcatgatgtggacatgaagtaaatattctgatttttaaatgtttccattataattggctaccattgtcaattaggtaataatttatctgcaagtcagcgtaacttaattatttgtttttaacaacggcaatggcaccaatccttctcttgttgttattccttagaacatacggaatgcgttctgacatagaacttattgaagagtaatttggaattttctgatgaatcaactgtctttaatctttacaagtttgaaaggtatacgttattgtttccatttcccagatgaagatgtttctattatgctaatagtggccgttcaagcattagaggaaattcttcttcccactttcaaatctagaatagtaaaacctgcttctctgctgtggcggcttttctgggcgaggggcagggcgcccggcccccaaagcgagaagaaggacggaggggcctctcagctccggccgcctcctttccgccccctgcaggccggccggaggaaagctcagggcccaggtcggcccagggagcgccggttcggccgcctttccagaaagccc

SEQ ID NO: 14779 - DNA, 610 bp, Homo sapiens
  source 1..610: mol_type = other DNA
gggcctgctggtgcagcaaaccaccatggcgcatgtatactatgcagcaaacctgcacattccgcacatgtatcccacgagcaacagatgctcatgatggttgtaaaggatcaactgtattttaaaacataatttaatatatacttttaataaacacattcatattgttcaaactataacccatagatttttttgtttccttttttttaacttttattttaagtttaggggtacataggtaaacctgtgtctttcttctgggttttatttgtaggatttgagaccctggtcaaagaccataataaaatattaatctttgctgaacacattctcaaaatagcttatttttaaagaataacaggtggccttttgtcatgccaaactatataatcatttgcattatacctttggctcaaaaacgtttatatgtttaggctatcaaggattatttttaatggttcctaaatcattttaatcctcagaactactttggccaatatttgtctttgttaaaagttaaaggtgagcactcagtattatgtgaaaatgaatgcaatatttaatttttagttttgtcctgttaacattagagttttgtatataagaagtc

SEQ ID NO: 14780 - DNA, 498 bp, Homo sapiens
  source 1..498: mol_type = other DNA
atagacatgtatgaaaattcaggaaataattcaggaatactcttcctcttcagattactttgaagcatggaaaatattagttttgagatcattttagaaatttggttgttttaatttacccaaactggacttgtaattacccttgtaattttcgataatataaatgcccactactgaaaatagagctctatgcagttctggaattccagattatctgatttcaaactttcatggaggagagtagaaaaaaaaagccagttttgtttttgtttatttgcctttagctagctagagatcttgaaagaattggatatactatttcctaccaattctaatgcccaatttatttcatccacccttggtggaaattattttctaagtagagagtctcagattctgctgagaatcttccaatgtgagaattttagtctcaatcacattcaagtttaccttagtagcatctgttatatttgaaaccatgattaatgtttaaaacag

SEQ ID NO: 14781 - DNA, 440 bp, Homo sapiens
  source 1..440: mol_type = other DNA
acatgcttgagtctttcatcaagactaaatgattaaggagtggtactttaattggcatgaaatttcccactccactaaaacagatcttaggatttggacaacacaaaatatcattttttttgaaaggatttgaggataaatccaaactaatagaactgaaacttctatattatgctggccttcttcatggagatgaaagagcacgtgtgcctctttaaccactggtgtaaacaaaggttactgtgccaaagttgacagcaacccaaatccctttggcatgtgaattagtttctccgtttgatcctcatgaaggatcaaatggggaagggagatactattgtctctgattgttttgacacactggtttgaaaatgttgctaagtcttcccaacactgcaagctttggtgtgtcagggacacgccttgggtgtgtgtctcag

SEQ ID NO: 14782 - DNA, 614 bp, Homo sapiens
  source 1..614: mol_type = other DNA
ccaattggaaaatgctgtgaatcacctaatgctgcacatagatgcattttgcttcacttttaatcccaaaaattggatattatattatcaaattgcaaaacatcagtggccacatattcactaacttgctagaactttcaagtaaaacttcctttgctatcttatacaagataattgaagttgtttaaaatgtttgtttaaaaacaactatgacttcaactacttatctgtgcagattctatcatatcatatagccaaataaaacaagatataaccaaagttctgttatttgtaataccatttctaattttggggatcactgaacccttatcactgtacttcatgatatgtgaaggtcataaatttgaattgtatatgataaatatatactactgctactcatttactttatatgtgttgaagcctctacaacattttttgtttgaaaagatttgcttctaaattatatctagatccttttaaaaaattagaaaatatctacttgtattttcagcctttgcgaatttgaagtaggaagtagagatcactgaagtggcaggcattgcggtttcctgatttttaaagttattacatcacaggactatgtggtgttg

SEQ ID NO: 14783 - DNA, 517 bp, Homo sapiens
  source 1..517: mol_type = other DNA
gcttcaaatttgacggatcttttgggccaatgagcccctagctaggcaaaaacatttttattgtgcatgcctgggctatatctacagagtaaattgacatttgttatcaacaaagttgattgtattcagttcaaggaaaatgtgtgaatgatatcatatatagcatataaaatgtttacaatatttaagagattgggcatactagcatgtttgataaataaattgatgatgcaatttaaaatgcataacagagtatttgattttagacttatgatttttaaattgaatattataaagtaatttggctaaatgtgtgaatagtattggaatatttaaaacaacttaagatttattatgttagtaaatttattagtttacaaaactgcataaataaggctgagaattttgaagattatttttcaagttctttgccagacacgtgtggctctcacaatcaatggccactgaaaaccagattttgattacgaaatgtctgaaatacagtatcttggtgtaa

SEQ ID NO: 14784 - DNA, 387 bp, Homo sapiens
  source 1..387: mol_type = other DNA
ccattgccgcagtgttacctctggcactataatggagacatttctaaaatgtttcttcttgaaactgctttttaggaatcttaaccttcttaattaccactgaattttaaattgtccagtaggtcatgagattatctggttcagcctaccatattctcaaatgtcagtgaggtaactgaagagtgtcttcacagtctattcagctgatgttacgattttacagaaaatgtgaaaagtctgaatttctgtgaaatttcctaacttcaacatttggaaccaacttaaaactaagcaaaacaacactgttgcttcttaaaaatcaaggctgcaggctgcctccaacaatcaaactcttcatttaaaaaaaaaaaaaataactcagttggt

SEQ ID NO: 14785 - DNA, 383 bp, Homo sapiens
  source 1..383: mol_type = other DNA
taactcagttggtttggaagtaagtatcagttaatagaacctgtgatcagtgttggatcagagtttaaatttcagcttctactgtgagtaacctgggataaattattttacttctctgtctctcgttcatggaaaaaacaaaaacaaaaacaaaaaatgagtcccttttatatacagggttactgcctgacacagtgccaatagtaacataacatccaggagatattctaatacttcttattaagtgggattttcaccaaaaccctgacagtttaacggtcagagatccgcaggggccctctgcagaatgcgggaagccgccgccgccgccacagaggagggggcggaggcagaggcggaggcggcacccaggggccggggca

SEQ ID NO: 14786 - DNA, 322 bp, Homo sapiens
  source 1..322: mol_type = other DNA
gtctctctacttcctgtcaaggaggttagtgggcagagagtgaatgtagttatagtaatgctaacatccaaattcctctttgtaagacataggcctgtacttgatttataaacagtgtgcctacataaaatcatcactccctctatgtatttatagacgactgaaggaatatctttcttctttgcatgctaccgtggtagaagggttttaaaagtccgtgctaggcagaggcagccctttctgcccccctgaaattccagcatgatagcaagctggcatcctctgtggaatgtgccacaggcggctgaaccgcctccccttt

SEQ ID NO: 14787 - DNA, 345 bp, Homo sapiens
  source 1..345: mol_type = other DNA
gggaggcggttcagccgcctgtggcacattccacagaggatgccagcttgctatcatgctggaatttcaggggggcagaaagggctgcctctgcctagcacggacttttaaaacccttctaccacggtagcatgcaaagaagaaagatattccttcagtcgtctataaatacatagagggagtgatgattttatgtaggcacactgtttataaatcaagtacaggcctatgtcttacaaagaggaatttggatgttagcattactataactacattcactctctgcccactaacctccttgacaggaagtagagagactgaaagtgagtgagttctcacgatatc

SEQ ID NO: 14788 - DNA, 323 bp, Homo sapiens
  source 1..323: mol_type = other DNA
atttttttatttaaatgaacttttcattttggaatagttttaggatttcaaaaaatttgcagagataataatgctcagagtgtgtgcacaaggctggcacgcccagggtcttcctgaaacctttagtgtgtccagtctggaactgcatccaaattcaggttcagtaatgatgtcattatccaaacataccttctgtaccaaagcaatagtgactttgaacaattacaagatttttttttaaagaaaattggccaggaattagctttgttttcctcttgagaaataaaaactaaggggccctgtgagcctctcatgttgcagcc

SEQ ID NO: 14789 - DNA, 303 bp, Homo sapiens
  source 1..303: mol_type = other DNA
ctgaaacctttagtgtgtccagtctggaactgcatccaaattcaggttcagtaatgatgtcattatccaaacataccttctgtaccaaagcaatagtgactttgaacaattacaagatttttttttaaagaaaattggccaggaattagctttgttttcctcttgagaaataaaaactaaggggccctgtgagcctctcatgttgcagccctctgcgaggccggctctcgaggtcctcacctgaagtgagcatgccagccactgcaggaacgccccgggacaggaatgcccatttgtgcaacg

SEQ ID NO: 14790 - DNA, 360 bp, Homo sapiens
  source 1..360: mol_type = other DNA
gaaacctttagtgtgtccagtctggaactgcatccaaattcaggttcagtaatgatgtcattatccaaacataccttctgtaccaaagcaatagtgactttgaacaattacaagatttttttttaaagaaaattggccaggaattagctttgttttcctcttgagaaataaaaactaaggggccctgtgagcctctcatgttgcagccctctgcgaggccggctctcgaggtcctcacctgaagtgagcatgccagccactgcaggaacgccccgggacaggaatgcccatttgtgcaacgggctggagcctcaggggcgggcactggcacggaacacaccctgaggccagccctggctg

SEQ ID NO: 14791 - DNA, 393 bp, Homo sapiens
  source 1..393: mol_type = other DNA
aaatgttttctcaatcttgaatcattaattttctccaaggaagtttctaaagaatcccaaatagtgcacactatttctgaaaggaacaggatttttttttctaatcataaaatcagattgagttttggaattagatctgagttcaatcccatatctcccactgaacctcatttcgccatctgtaaaatggggatgtgttggggcccaataaaataaaaatccatggactctcagaggctccggtactcaaatgagcctcctggatccacgctgctcaagtttcttggccaataggcagtttctttttctgtgtgacaataaaaaacggtaaactttttcgagaaagaaaaaggctctctccccgcccccgcggggcggcgcgcactcacccac

SEQ ID NO: 14792 - DNA, 491 bp, Homo sapiens
  source 1..491: mol_type = other DNA
gggcgtatagcacttatcaccacctcatgtattatatagttattcatgatgtgtctcttcccatcagaatatatacaagagaacaggaaccttgttaatgcctggcatttagtaggtgctcaataaaatctttgttttagaaaatgattaataaataatatgtacatattgaatattgtttcctcttttaacaaatctttaataataataaaaaatttaaagcagcaagattgctttgcatcaggcacaatgataagcgctttaaatggagcccatgattcaagctgtcaggcgcagaaggtgccagccctgcaggagcttcgggggcctcagcctttgctcgcgctgtagagctgtggacctgccagcctgcgaggcggaggacgggatctcagcggcagcgctggtctggggcggagtctccgaggcacttcgagggtggtgggcatccgccctcccgacaaggcagaccaggccccccctatccgcac

SEQ ID NO: 14793 - DNA, 317 bp, Homo sapiens
  source 1..317: mol_type = other DNA
caacaactacttttggaatgcttgccataccatgcaatgtgcaggttgttttcagggactggagcctcctccagagatctacattaaaagtaaaattcaccttagcatctttaacagtatctgctgaaaagaacccttttgttaaataattgtattacaagtccccaacttaatcttttcgaatatgaaataagagagggaaagaaaaaaagaaaaagagtcctgccaatttcactttctagtttcactttcccttttgtaacgtcagctgaagggaaacaaacaaaaaggaaccagaggccacttgtatatatagg

SEQ ID NO: 14794 - DNA, 388 bp, Homo sapiens
  source 1..388: mol_type = other DNA
ggcagcttccaagagattcaaagattttctgattgacaatttgttgaaagagttattatcaatagaaaggaatgtttggagacatccaatagaaattcaatagacaatcattagaaaggaatgtctgcctctaaatgtttcttaatacacttaaaaagagcatgttctggctgggtgtcccagcataatcccagctactcgggaggctgaggcaagagaatcactaggttgcagtgagacgcaatcatgccactgcattccagccacaaaaaaagagtgtgttctattagtaattccaaaaggaaaaaggatgtatatccagcttcccctattttttgatgcttccacattctctcaaacaaattttagtcacagttttgaataacgt

SEQ ID NO: 14795 - DNA, 287 bp, Homo sapiens
  source 1..287: mol_type = other DNA
ctaagtcctactgcactccagcctggatgacagagtgagatccgttttaataaagactggcgactagggagtctggttaacatgtaaccccagtcacgttacgtgagtcagttttcagggctcataacacatttggaagcttctaaaattttattttctttttacagtgcctttttacaactttcaaaccacagttttccaaatctgtctggaacatgttcctgagtgagctcagttctcacagattctgtttcagtttcccctcaagagggatcttgatagggttc

SEQ ID NO: 14796 - DNA, 275 bp, Homo sapiens
  source 1..275: mol_type = other DNA
aagtatagcgcctcggtgtgctgagtactttgaactgaaagacattggaagggcctccgaagaaagatctttctcccctggagtgaaccatggaaactagttcatatcacataaaactttgattaagtaaatttgttatgctagtgtcagccatgactcttacaatgagtaaggagaggtattacctacctcctttaaatttaagaacatcataatgctttgtcatatgacaagagtgattagtctaaattgttatcacaagcccagtctgacca

SEQ ID NO: 14797 - DNA, 418 bp, Homo sapiens
  source 1..418: mol_type = other DNA
aagaggaattcagaatagcagctttccaaattttcctcatataaatttttcattaaacatgtgaacattgtttgatgttgctttgtaacagataatcttcaaaatatgtgaatttggatttagatttttaactcaaacattgttgtttgaaccactaatggtgaacagtaaagatcatcaaaaccactatagccagggttggcagtaatgcaaataaaattgaggagttgttttgcctaacagtctaaggagcttccattgtagtgtgatagtaacaagtttgacaacagagtctgacatgattcacaaaaatatacgttctggacaccaaaactcagcatgtatttgtaatcaaagcagagacagcttatcaagggtgtaaaaaactgcctggatatacctcccatatataagcacc

SEQ ID NO: 14798 - DNA, 481 bp, Homo sapiens
  source 1..481: mol_type = other DNA
tcgagtaggtgggaggccacgatggtgctggaagaatcattatttttaacttgatgactgaaaataataataataatagttaccacttatttgcatgcttctatgtgccaggtagttgctaactatttaaactcaaattccatgaactgtagtggaggttgtactggaatttgattcagaatgacagtgtccatgatggagcaatagagggctctctatttcaacctaagtcatcaggggttagaatgcttatttccgtcatgttactcaattaattaagagtagatttttatatttgatagtaggttccttctaaatatagaaactgaaaatagagctatctccttcaattctcctttttctttagggaggacgtgaatctcgttccaaatgctggccagtcattgggtttctgcagcactagaaacatctatggttgcaggtctgcagtttatctgttttaaaatagaaacaaagtttc

SEQ ID NO: 14799 - DNA, 426 bp, Homo sapiens
  source 1..426: mol_type = other DNA
gttgaggctgcagtgagctgtcatctcaccactgcactcgcagagtgagaccctggatattgaggttttgaatacagacattaactcaataagggtaaggcccgtgtctgttttctttattgttatattgacagtactttgaacaaagtctggctcttacagttgtttgtcaatatttgctgaatgaattcaaagggcgcagtctcctacaattgtagagtggatttttaaagctatttggcaatatccgtcaaaacttaaaatgtatatagattttagctccaaatttctctagcattgcagtgttgcttgttgaatcaaaagactggagtggaagcagggacttaagtttccgcctgtaatcccagctcacgactgggtgacacagtgagacgctatctcttcggtttctgaagcttacgttta

SEQ ID NO: 14800 - DNA, 592 bp, Homo sapiens
  source 1..592: mol_type = other DNA
cggggtgctagcccctgggcgaacctgacgcctgcagggctgcggcgaaaccgcgtatgccacaacaggcctaaggagacccgtggcacgtagcagctgcccccggaacagcgcctgggggctctgcaggcgctgaccagtttcccggaggcggcggccgcggacccagcacggtcaccgtcgccgctgccgagaagagccgtcgggtcgcgatgggtggacaggccttccgggggagcgtcgcccggcacataccctgacagtcccgaccgcagacgccagggatgggacaggctcccggggagcatctcctgttcctcctccctgcgctggggaggggccggactcccgagaagcgtccactcggccaccctccccggcaggcccgacttcagacgccgcgcgccgggacagagcgcccggggagggtccccaacgcagatgcccggttgctgggcgcgaggggctcggcccctgggtttgattacctcatgatggcagcgctctgcaggccgtccgggcggcgcagtccctcggatcgctctctcctcagcaccggggaccgcgggaagccgcgcggtgggcgtgcgcg

SEQ ID NO: 14801 - DNA, 477 bp, Homo sapiens
  source 1..477: mol_type = other DNA
ggccacgatggtgctggaagaatcattatttttaacttgatgactgaaaataataataataatagttaccacttatttgcatgcttctatgtgccaggtagttgctaactatttaaactcaaattccatgaactgtagtggaggttgtactggaatttgattcagaatgacagtgtccatgatggagcaatagagggctctctatttcaacctaagtcatcaggggttagaatgcttatttccgtcatgttactcaattaattaagagtagatttttatatttgatagtaggttccttctaaatatagaaactgaaaatagagctatctccttcaattctcctttttctttagggaggacgtgaatctcgttccaaatgctggccagtcattgggtttctgcagcactagaaacatctatggttgcaggtctgcagtttatctgttttaaaatagaaacaaagtttcggtttaaacg

SEQ ID NO: 14802 - DNA, 482 bp, Homo sapiens
  source 1..482: mol_type = other DNA
gatattgaggttttgaatacagacattaactcaataagggtaaggcccgtgtctgttttctttattgttatattgacagtactttgaacaaagtctggctcttacagttgtttgtcaatatttgctgaatgaattcaaagggcgcagtctcctacaattgtagagtggatttttaaagctatttggcaatatccgtcaaaacttaaaatgtatatagattttagctccaaatttctctagcattgcagtgttgcttgttgaatcaaaagactggagtggaagcagggacttaagtttccgcctgtaatcccagctcacgactgggtgacacagtgagacgctatctcttcggtttctgaagcttacgtttagtttttaatggggtctctcctttaacaaagacacgccgcgcggccgagtccaggggctgcagaggcctggcgcgcgcacgcgcacgcgcacgcccaccgcgcggcttcccg

SEQ ID NO: 14803 - DNA, 473 bp, Homo sapiens
  source 1..473: mol_type = other DNA
ccccgccagcccccggcatgggcgaccgcagcgggcagcaggagcgctcggtcccgcactctccaggggcccccgtgggcaccagcgccgccgctgtgaacgggctgctgcacaacggcttccatccgccgccagtccagccgccgcacgtctgcagccggggtccagtgggcggcagcgacgcggcgccccagcgcctcccgctcctgccggagctgcagccgcagccactgctccctcagcatgactccccggccaagaaatgccggctccgctcagacgcagcgtgcggggcccgggactgggagcggctgaggcaggcgccgcagcacgccccgtgcgcccccgcgtctgcggtcgagggactgcacagacccgggaaaagtgggcggcacaccgagggtgctctctcctttaggcgtggagtttaactaccccccaaaatcacagcctattagaagctgtttcttccc

SEQ ID NO: 14804 - DNA, 568 bp, Homo sapiens
  source 1..568: mol_type = other DNA
ttcgaagtttttttttttttttaaaaactatgaaccagccaagattcacaaatttcatttggtttcttttgactctcgaaagtgtcatgacactgacattcatgattaatgtcaaacatttctagcacaaatactatcgggtgatattagcgatgctaagtatcttcacttggttaaggtatgtctaataaatctcttcagtgtaaaattctattttccctttataataagaaatgatctgtagggtagttttagcattcataagcttacctatatcaatttttagaaccctccggatcccgggatgccgagcctttttctgccccgtagggacaggactgggaagtggctagcccgccattcctcggcccgtccttaggggagtcgcaggactaagtgcagtggcagtggcctcacctcgggccttcgcggctaagcaccagggcggcccacgcctgcttccgcccattggctgcccgcgcccgcccccatattggagaaagcccgcagcgcgagccggctacgctccctggcggagctctggacgccccacctactcccagcgttc

SEQ ID NO: 14805 - DNA, 381 bp, Homo sapiens
  source 1..381: mol_type = other DNA
aactatagtcacacttttgtagtataattgattattatcctcaatagatcatttacacttcagatatgtgggatatgcgtcaccttgtacatttctcagctggaaaagtgtaaaacatctcaattttgcacggtaagtccattgtaaacaacggaatggactttgaaaggaaaggaaaacgtgttctttaagactctttaaatagcgttttcacccagaattctctgttttgaatgaattcatttctacactattttataggagtattgaatagttaatgaagctgttgatttcaacacacaaattctggtggttctccgaatccctagtcaactggaggtagagacggatgcctgaggggcgggctcagcggctgcgcag

SEQ ID NO: 14806 - DNA, 722 bp, Homo sapiens
  source 1..722: mol_type = other DNA
aggaaggattagtccaaatgggtgtaacccccttggaggccttcccagagcatcctcatctcctgggtgccaggggcttaaggaccataagcggtcaaaatagaaaacggaagtacctattcgtttttttggttgttgtttaattaagaaaaataaaatccccctttcgcaatgagcctccgctggctcattaggcctcccccactgaactgtggcggcaaggacagcttcccgggcgaggggacccgggatcccgggaggcgcgtgcagcgccgccccctcacagtagggaggcgcgggagaggcggcggtgcctgcccagcccgggtatcccgtcccaggagcgcgagggagcgggcagcggccggaggcggcggcggcggggacgcggcgcggctgccgcaggggagcggcggcggcggcggcggcggcggcgggcgcgaggggcggggcgcactccgcaacttctgccgctgccgcccgggcgctctcggcgcagccgagctgctgctgcgaactgtggagctgccagcggagcccagcccgagctccctcgactccgcgcgtcccaggcgtccgtcgggggccgaagcgcctcccgcagggagtccccgtgaggccgcgctgccgcgttacccgcagcggccgggggtccggggagtgcggggctccgagacagagccaggcgccccccagcggtcggcgcgggccccatggctggg

SEQ ID NO: 14807 - DNA, 447 bp, Homo sapiens
  source 1..447: mol_type = other DNA
gtctcatttttttcatatatatatatagtatttttggtagagatgggattacaggtgtaagccactgcacccggctgattttgaagtaaaaatgctccaattattatgctgttttagaacacggtaagcatgtcatgtgctaattatggccatgacatcataaaagaaaagtgcattactgaatgctttcaatttcttataatgagtggcatgtcatggggcctatttagcctttagggcccagatccctggtttacccagggaataggatgtcctgggacaagtttcccctaagtgaataagtctgcttatcagaaagatattattgatagtagtcatatgaaagctgacaaagcaatgtcaacagacagctgtcccctgcagacactgagtctggaatgcccaggttggaagattatctcacccggccccagctatataagctga

SEQ ID NO: 14808 - DNA, 456 bp, Homo sapiens
  source 1..456: mol_type = other DNA
cacgtgtctcaaatcttgatgcatcagaatcatctgggtgctttgaaattcaagatgattcctacgagttaccatgtctcatttttttcatatatatatatagtatttttggtagagatgggattacaggtgtaagccactgcacccggctgattttgaagtaaaaatgctccaattattatgctgttttagaacacggtaagcatgtcatgtgctaattatggccatgacatcataaaagaaaagtgcattactgaatgctttcaatttcttataatgagtggcatgtcatggggcctatttagcctttagggcccagatccctggtttacccagggaataggatgtcctgggacaagtttcccctaagtgaataagtctgcttatcagaaagatattattgatagtagtcatatgaaagctgacaaagcaatgtcaacagacagctgtcccctg

SEQ ID NO: 14809 - DNA, 493 bp, Homo sapiens
  source 1..493: mol_type = other DNA
tcaagaaggcctgagaaaactttattcagtcttactaatgtgatcacattgggaaatttgtattcatgaatggcaaccgaggttccttttaggatctggctttttaaaaaccctcaaaaaactagtcttaaggagtcttcttttaagatccacttttaaaatttttctaattacttcagaaccagttagccggcaagccttggggaatgtgtggaccctgaccccccaaaagttagtgtggaagaggggaccccgctgcccttttgcactgtccctgacccccccacaagttattgtggaagggggggaccccgctgtccttttgcactacccctccgggcgtcatcactgcagaggggccactctccctgggtcagaggtacatagcgagtacgcgcgcgtgtgtgtaccccgcatgaatcatcggggcccggtccgcggggcgatgattcattcaccgccctggaggctttcttaatattaaacaaatgtt

SEQ ID NO: 14810 - DNA, 435 bp, Homo sapiens
  source 1..435: mol_type = other DNA
attaaggctcgaggccatggtgggcacgcttcctccgtctgtggggggagaaggtgccccctcagaggctgtacgattcgaagtctccggcctgagaagtttcgaatttctccttgcagcgaaagcttggcttcacgcccgcccggggcagccgccgcggctcgtcccctccaggcctgggcaccgccgtgggccgtgcccggcaggacgctccgggagctgcgcggcggcggctcgaggaggcctggcgggcggcggcgagaggccgtgcgggctgtgccccgagccgggcgccccctcggcgcgctcgccccgcgcccgccgccgccagcgccgccgccgccgccgcgggctctgctctcctcgcgcccgcccgccgggccggcccagcccccgccccgcgccgctcgcacccccgctgccccgccccgcccc

SEQ ID NO: 14811 - DNA, 538 bp, Homo sapiens
  source 1..538: mol_type = other DNA
gatattagaaatggcaatttttaaacatgtcaaagtttgattataaaatggatagtttaaaaagctgccttgatgcattttaaatttgaaatggataagcaaatattttgctgctctggcttctagaatacacatttttgaatgaaggtttttcttgtagatctcaaagtccactagaaagagtactgtttttgtttgttttgaacgttgcaaacagtagcttatagttgtcaacgaccatgatctcgtcagtcattttcagataaggtgcaaatcaagggatggctttgtccccacttcggcgcaggtgggacagacttgtgcgtaaatatgccagtcattgttagagctacgtgtagcacagggagccagggcggcagctgcacctgcgagcagcgcaggcggcaggcgcggcctccgggcgtggtggtgggcgtggccgggcggcgggggcgtggccgggcggcggggcgggcggtgccgccggtttggaggcggcaccggacctgggccccgaggcccgccgcgccctgtcggg

SEQ ID NO: 14812 - DNA, 452 bp, Homo sapiens
  source 1..452: mol_type = other DNA
ttgaattagggtccaccttgatggtctcattttaactttttaggggaatgcagttcataacagtcacataaatataaagacacatgtctttcttattctccctcctaaggcaggagaagtgaaaaggtgagccatgcccttctttacagagaatgaacatcatattggatataagatttagtttttaaactactcgagataggaaagcgcattttaataatagaaaaaaactaaaacagttcatatttctgtgctattgagtgtagactgttgaatagactgagcataatatatgttcatatgtaaagaagcctgtgatatgtaatttacttattaaaacaaattgagactaatgatgcacatcatgataatacttgttgttattggctgccaagcatggagtggttaatcaacgctaaaccaatcagaaacattccctgggatttttcaag

SEQ ID NO: 14813 - DNA, 624 bp, Homo sapiens
  source 1..624: mol_type = other DNA
ttgaatgtgactacatgtacagacacacttttatttagtctcacacatgaaaaaagaaagctcatccaaacatttttatagcaaattactaaatctagttgaaaacaataggaaagaggatacttttccctctagtatttgtatatctgaaattgcagctaaaataaaggcttcattttataaaataacatttgagttgttcctgtatccatgatcagcatacagacctgctaaaagcagaaaataatgttatgttcctctctatgtatttcagtagttttaaggaaagaaaatcctgaaaaagaatttagaaaaatatttagcactgaaattatatggcacttattctataccttttgttaattaacaagtaaataggtggcaaactatattaaagtagaaagcctttctataaatgaaagtcagaattcaaaatttagaaggcaacattgtttgcttcagatctacttgttacaaattgtgggtttgaaaacatgcaaccatgatgcaccataactagtatttagttatactaataactccaaattatgtaaacaatagataccccgaaatcatatttgggtttgtttcagagataacttaggtactcttgatctaaaaatt

SEQ ID NO: 14814 - DNA, 471 bp, Homo sapiens
  source 1..471: mol_type = other DNA
aatgatttggactggccgtccaatcgggggaaggggaaagggggggcccaccacgtcgcactcctccccacctggttgctgagccaggaaggctgtctccccgggctgcgcaagctccgggccgcctctcctgggctcaggagggcgggtggccaccagcccagaccccgagggcgcttgcccgcgggactcggcgccgcaggccagggccgtccgtgaagggtagtctgtgcctacgctactggtaccactcggggcccgggtgcgcgggcgtcgaccggccttctctccgggccctcggggttgacgagggggactaccgccggcgctcccgacccgcgacgcgcgagccccgggcgggcgggggaggcgagggggagccgcgtccgcggggctggcgcgcgcgggggcggcctcgggctcgcgcgcaaaggcgcgggcgcgggcgggggcggagtggcggcggcagcg

SEQ ID NO: 14815 - DNA, 505 bp, Homo sapiens
  source 1..505: mol_type = other DNA
tttataaaaataatttagacttgacttagacatttaattttacagttgtaaatgatggtctaaaaattcttcaaacttgattttttaaattttattttaacattttgagttccccgcaggggagaaaaaaatacgaagtgtcttttaattaaatgccaccttggtgacaacatattacacattcggccccaagcctgaggcactggcgccccgcctgggcgaggctggctgcgctctctcttggccggcgcccgctgcatgcggtacgtgcctgcccggcccctagcccagggttcccgttacgcggctggttccagctggccgcggagtcccagaacctccccgcgatgcccagatagctctctgcacgtctcgccccggggcgatcacgttgccggggcgagggctggcgccccagctgggcgctggttggtcgcgccctggggctcgaggcccggcgattggtcccagggatcgggtcacgtgcttgggagcagataagcgg

SEQ ID NO: 14816 - DNA, 502 bp, Homo sapiens
  source 1..502: mol_type = other DNA
ctggatttcctgaaaaatctgtaagtaaaatgtatgtataggcatacctttctttcagtttaagactcgtgtaaaactacaccagtatcttaagcatgaaaatcaattatatgcttttcttttgtttgttggtcaaagaaaaagattataactcagaaaactttcttggagatgcatgtcagtgtatccaaactttaggcatgtcaggtacaatattgatttacaaaaagttcctctaatcaatcctgagctaataacttactgtggaaagagtaattgatcagagccatccctccaattggagtcaacttgggggcagttcatccaaacttctattaaacggcaactagttcacttttgagaagtggtttacaagagctctttttcaagatggcggtgggacgaagccccttctcccgccgccggaaacctgcccagccggtgcccggccactgcgcacgcgcgggacgacgtcacgtgcgctcccggggctggacggagc

SEQ ID NO: 14817 - DNA, 504 bp, Homo sapiens
  source 1..504: mol_type = other DNA
agctttgcttaaatgtaacattttcaagattcaagaaagtgattctcctgctgggaccaggccaggctggtctcacataactattataccatttcaattggtaatcttaccgttcaactactataatacaaataatttttttaaacttctaatttttggaggacccttataactgatttctaatacctaaaaataataaaactattgtatgttaataaactaggatattatatttttattagtagtaacaattattaagattgagagtcttaagaaaggctattgagaatgtaaatgatataattgtgtaaaaaatgcctagtttagaatactgaagtttgttttgtttcattttatttaacttttaaaacttagatcttttgtttaatttttattttttggatggttaagtacatgaaagaagaaaaacttggttaattttgcctgattattttaaacattggaagcaaaatacaagatttgtatttcataagtctcccagtg

SEQ ID NO: 14818 - DNA, 428 bp, Homo sapiens
  source 1..428: mol_type = other DNA
attggagaaatattattttgactactagcataaaaatcaagtttaagagacaagcctggcgtgtgcctcccagctactcgggaggttgagctggtgtttaaaagcctaatgaacttaaaaatattgaaaatttaaaaatggtagttttcaaatctggcttagaagaccttctctccaatacctaggcagaacttctggcaaatcaccacctggacaagagcatgttaaggtccttctgatcttgcttcctagatgcagtacttagaaaccaagctttcgaagttccaggacttggactaaatcgcctttcttctctgtcaaataaggggaccctagcgcttttatttaggcgcgtgccgccaaaccaaaggcgctcgcgccgagctaagctcctgtcggtgagcttacggcgcgctgacgctcagttg

SEQ ID NO: 14819 - DNA, 613 bp, Homo sapiens
  source 1..613: mol_type = other DNA
ggcttcctagaggtgacttttgagtaacaatctgaaagctgtgaatatctaggaaaagtttcaatagttttaaatagtttaagaaaatgttatgctttccaaataaggctcagatttcttttatcaccttatagaaaaaatggttggccaaataaatttcaagtatttatagaaaataatgctgtatatgctttaaaatgtgctaagtttttcttttctaaatgctgaatgaaagtcctcaaaatttttggtctttaagtcataatagaacatttcctcaaatttaactggtaagattatactgtattgctcagtatattagttttctctagtatataaaagcctaaaaacgttaatgttatgctggaccagatgcaggttatatgcaggttataaagcctattaaattcaagatccaatttgaaaaaaagaattcaccaacctatagtgtagttagaatatattttgctcaaaaaattttaagcagtttttaagtaaatcatataagcagaatatggtgtaaaacatttgtttaaatgatggattatcttaaattcattgtgattcacattatcttttattcattttctaaatggtgacttttattttttag

SEQ ID NO: 14820 - DNA, 562 bp, Homo sapiens
  source 1..562: mol_type = other DNA
cagccgagtagctgggaggtctcgaactcctgacctcaggtgatctgcccatatacaattgtttttaaataattcaccaaatattattttagtataagagttgaattttatttgagtaatcctttgtatgaataatgcaaggtgaacttttattttgacaagtaaaaataaggtacaatcttaaaataagtgatttgttcctgcattgaaaactaaaatacaagaaatctggtggatgtcaaaaatttatgactaaaatctatttttacctgacctctaaggttgatatcacatttaacattaaggtgttttttattctaaactaaaagtgattcttttatgccatctctgctgaaaaatttaaaaaattatttaagtgtttaagtatggtcagattttaagtatctaacattcggatattgctagctatggtttatttattctgaatactacaataagttgacaaactttatttcaacaactcgtgatttagattggttaggaggatataatgtaatcaggacacaaccttttccccgtgctgaagtcagatccctgtgtg

SEQ ID NO: 14821 - DNA, 625 bp, Homo sapiens
  source 1..625: mol_type = other DNA
tatcaggctttccaaaagaatgcttatcattggttctcagacagagacttaaaattataagggggtcattcccctgaaagataacccggttcttgcagtgacatcgctgacacacttctggccgtggaactcctcccggcacgccgggttctgctcaccaagagcctcgagggcgggcgcgggcagggccagagcgagggtcggcggctcccggtcccccccacagctgcccgtacctgtccagcatctgctgtagggcttggtccggcatcttccgcggagccggcgcacacggccttccccagtggacccgctcaaggccaggcccagggacaatctgagaggcggcggagtaggccgcagtccggcggcagccgcgaacccgtcacccagcttcccggggcagctccgctagcctggcggcggcggtgcagggcctgcgggagtccggcggaggcggcgtgaggcggggaggcggcgatcgcggcccgggttcccgtccgtcggcccgaggttccggtccatggaccgcgggcgccgagttgctgccggcggaggagcttgaggtaagagtcgccgcctccgtgcgcgccagggttacgacgcagggcggcccagagcagcc

SEQ ID NO: 14822 - DNA, 404 bp, Homo sapiens
  source 1..404: mol_type = other DNA
cgcattcgtttgagccgacagctcttttagaaacggttaacagctgagtaagcaagagctgtttattcaccaactggagagggagagaatcatctttccttcccctcgggtggaagctgtctggtccaggggctctgccgcaggagaggctggctccagcgccgggggcttcggaaggagtttctgccacccccactgccgccactgaccgccccgacgccacggccggggccggggaccctgataagaagccccctcccctcacctggctcggtcccacctgagggcaagattttttccccctggaggaaggaacgggagggcgccggccagacggcggcaggcgcggaggcgttggtccgggcggggctgctctgggccgccctgcgtcgtaaccctggcgc

SEQ ID NO: 14823 - DNA, 503 bp, Homo sapiens
  source 1..503: mol_type = other DNA
tagaaacggttaacagctgagtaagcaagagctgtttattcaccaactggagagggagagaatcatctttccttcccctcgggtggaagctgtctggtccaggggctctgccgcaggagaggctggctccagcgccgggggcttcggaaggagtttctgccacccccactgccgccactgaccgccccgacgccacggccggggccggggaccctgataagaagccccctcccctcacctggctcggtcccacctgagggcaagattttttccccctggaggaaggaacgggagggcgccggccagacggcggcaggcgcggaggcgttggtccgggcggggctgctctgggccgccctgcgtcgtaaccctggcgcgcacggaggcggcgactcttacctcaagctcctccgccggcagcaactcggcgcccgcggtccatggaccggaacctcgggccgacggacgggaacccgggccgcgatcgccgcctccccgcctca

SEQ ID NO: 14824 - DNA, 470 bp, Homo sapiens
  source 1..470: mol_type = other DNA
agcaatacttggactaaatagcattcttccttaaagactcccataaggtattatggaaagttagattcataacaactattaagttgaaaaactgacattagtagtattcctagtacggagtactaacaagagtagtagtttctactctggatgtccacgtccccaccgcgctctagagggagcccgcgggccgcgcgccggccgcggattcattttacgtgaggccgccgcgaccacgacctgcagggtccggcatcacaagtgcggccggtgggatctagctgggaccctccccgcctgggaaagtctgggtgctggctcctaaagcgcccccctgctcaggcctcggctgtccgcggtcttcaccgtcctcgcctgcgtcctggccccatccggctccaggcaaaacccggagcagctacctctccgcagctcccgggagaccgcgcggcgccgcggctagagcatgc

SEQ ID NO: 14825 - DNA, 337 bp, Homo sapiens
  source 1..337: mol_type = other DNA
tctgattgctaattttgtatttataatttgtattttatatttatagattccattaatggagcataaatgtattcagaaaggctgcattaacactctcagaggagctgctttggtaatttaaaggttcttaaaaccatgcaccaaaggtttgcctttaggtgaaaccgcactgttaaagcaatacttggactaaatagcattcttccttaaagactcccataaggtattatggaaagttagattcataacaactattaagttgaaaaactgacattagtagtattcctagtacggagtactaacaagagtagtagtttctactctggatgtccacgtc

SEQ ID NO: 14826 - DNA, 446 bp, Homo sapiens
  source 1..446: mol_type = other DNA
agcaatacttggactaaatagcattcttccttaaagactcccataaggtattatggaaagttagattcataacaactattaagttgaaaaactgacattagtagtattcctagtacggagtactaacaagagtagtagtttctactctggatgtccacgtccccaccgcgctctagagggagcccgcgggccgcgcgccggccgcggattcattttacgtgaggccgccgcgaccacgacctgcagggtccggcatcacaagtgcggccggtgggatctagctgggaccctccccgcctgggaaagtctgggtgctggctcctaaagcgcccccctgctcaggcctcggctgtccgcggtcttcaccgtcctcgcctgcgtcctggccccatccggctccaggcaaaacccggagcagctacctctccgcagctcccgggagaccg

SEQ ID NO: 14827 - DNA, 283 bp, Homo sapiens
  source 1..283: mol_type = other DNA
tcaatagacagctggctactcaatagactaacacgccaccttagctaaaaaaaatcaaatgtttagccaacaaaattgctttgctaaaaatcctttgttcaagtgttcaatttccttaagattttaaaagttattcataacaataagcaggccggaggtgaccgacggcgcgcaggccccagcgagcgctgcatgctgggatccgtaggccggggcggcggatgtttgcgcagcttccttgagatgccaccgcccgctgcgccgcgcagaaacggggagcgca

SEQ ID NO: 14828 - DNA, 273 bp, Homo sapiens
  source 1..273: mol_type = other DNA
gcggggaggggggtctccctccccaacattaattattcgcacctgtaatcccagctactcgggggctgaagcagcagaatcgcttgaacctgcgaggcggaggttgcaatccacacacaaagactattctggtctctgccttctaataattataatcatgggatggttactattatttcctctcttacgctaaaaccccgtaggccacgctccgggggcggggctccagtgaggatactgcatcccatggtgccttgcgcgccagcgcaaatt

SEQ ID NO: 14829 - DNA, 444 bp, Homo sapiens
  source 1..444: mol_type = other DNA
gcaccactgcactccagctgggcgacagagaagaaaaaataaatgattaggagttcagtattttgtggtcaaagtaatcaggttgtactgacatattttttggtattgttgataactccaaataagaacaagcaggggagatggaactctctacccctctcttgctggctggggccccgggggacacccgcatcctcagcctccggtccctgagcggagcgtggctcccccgagaggaggcggcgtccctggcacgccgtgggccccgagtgtcagtcagaaaagctagacaccccgagtgcacaaatctctctggataacacagagggctgctgcgcatccggccgtcgccgcgagcggccgaaccacttaaaaaacgtttgtttaaaacgtattttctaagcattccttagaggtatctttgaaaaaccttaagtattcaaa

SEQ ID NO: 14830 - DNA, 678 bp, Homo sapiens
  source 1..678: mol_type = other DNA
cccttgccccggaggcgagtggagccgccgaggccatacgggcctgctcgcagcggcttctgccagcatcctcgcggaagtggcttgagtccgaggcctcgaatcccgccgggccgcagctaagggccgccgagcagccctaggaacccagggcactgtcccgctctgagctcgggaaacggccggtgtcaccgaggaggcgtcttaggccagcggcctctgctcccgccgagtcccgctgctccccgcctggaaacagctgctgccaccccgggcccaggcctggacggcgcccccgaatttcggcagaggtgcctcggggccgcggacagggccgctggagcccgcactccagaaggcggtcttcctcgcgcctcccccgacggacgcggcccagggcttccctcgagggcgtcctcggccggggtgcctggagtccccaggggcgacagccgcggcggggcaccagggcgccagttccccggagcctggtagcaagcgcgtcccgggggcggggagcttggccggcggggcgggccggggtgggggcgggcggctgctcttggggccccgcgccattggccgcagggcccggcggcaggaaggggccagcgagcgcggccccaccccgcggccggcggagcctatcgccgggagcgcggagcgcggataaatgta

SEQ ID NO: 14831 - DNA, 292 bp, Homo sapiens
  source 1..292: mol_type = other DNA
aacatggggctggccaagtggtaagcccaccctctctctctcaggagaggaagctgtatttccttggcatgaggcaaactgtgaattgtagagggggcacctgtgccaatgaaacacatgaacatgtcagaagcatttgaatcagagtgactccatcttgtccgcattctgtcgtgatgagagtgacttctgatcatcctcactgctcattataatgcattagcatgctaaacaaatgccatggcaatgaaaaaggggaggaaccctcaattctgggaatcacccacccctt

SEQ ID NO: 14832 - DNA, 207 bp, Homo sapiens
  source 1..207: mol_type = other DNA
ataatgcttcctactaggcagttttatttgaagaataaacttacttaaaaaaaggttaatttccagcacacagcctgatggtgtgtcccaaagatcagcttggggcaggatttctcagcctgggcatgggaacatggcatcttggaatatggctgtttcaaaagagagccagtggaaacaggaagttgttgcccgtgtctcctacgg

SEQ ID NO: 14833 - DNA, 419 bp, Homo sapiens
  source 1..419: mol_type = other DNA
gcaatctatgacaaatgccatagattgtagttatagcatgctttgaatactacatttttaaggtcaatttttggtcagagcttttaaaaaagtctgataaaaacaaaaaaaaataaaaagcttcttatggaagaatgtcactactcattcctttaaatattgtatttcttgtattaagcaagaaagcttctgcagagcatttgtatttgaacaagagataaaagaactaatggctctatctctatgggcaagcccttgcccacaaatacaaatgcttctggaagcatactaggaatgtagctttagttatgtatttagcataaataatattaatatatatgccttgtcaaatcaaatgcatttaataaatttgtatagtgtaatgactgtaattcctacatatagttattgtctttgag

SEQ ID NO: 14834 - DNA, 428 bp, Homo sapiens
  source 1..428: mol_type = other DNA
cacaaacatgtagctactctgacctgggggcacctgagttgcttataaacatgaatccacctgttcgttcctaaaataaatcttactatcacatgcaattttgcttttcgtatgtccccgtggctcttattacagattcagggtgatgatctgagtgtccaccttgctgattactcggtacccccgcgtgtggcacagggtgtggcacacacaagagagggcaggaggccagctgggtacccggccgccgcccgtagccccagctcacagcccccgctcactcctgcaggtgcgggggcgggaaccgggtcgcgcgccttctgcccggcgttccgcgcgcccccgcgccgccggcccgagcgccccgcccccgccccgccccttcgcgctcgcgccacttggagctcgcccccgtcgttcccgcggcg

SEQ ID NO: 14835 - DNA, 359 bp, Homo sapiens
  source 1..359: mol_type = other DNA
ggaaggagcagaggaggttccttccctcctgcacttgatatgctctggagcctggcggaggtggactcctttgctgtgactcccttagcaatagggaggctgttttgtaaacatcttggaaacgagttgtttttctcctgccggacgcccccgccggcctcgatgtacagatagattaaaacgtttttttccctgcttgagctgaacttggcgaggtggccccgcagagttcactcggatgtcacggtccggcctgcaggggtcacaggcgggtcaggcccgaggattgggaatgggccccaggtcacgtccccattcgtcggctttgcacaccggccggaggcgctgtccagaaaggg

SEQ ID NO: 14836 - DNA, 612 bp, Homo sapiens
  source 1..612: mol_type = other DNA
gtctgggtcagatcccagcccaggcccagaagtgcccgcagggctcgcgcttccacagttctcgccgagagcgctatgggacagtgttcaagacgcacctgctgggcaggccagtgatccgcgtgagcggcgcggagaacgtgcgcaccatcctgctgggcgagcaccgcctggtgcgcagccagtggccgcagagtgcgcacatcctgctgggctcgcacacactgctaggtgcggtcggcgagccgcaccggcggcggcgcaaggaccgtagatacgtcggatccgcggtccccggcatctgccatgggccaggccggggccccggtgttggatacactgtgaacccgaccaaggtccctggtaactagcgggttcttccgtggctgtgatagcaggaactggccttctggctactccggaatcgccagatgaggccagaccgccgccagcgctgatcacgcgcgctcccacaggtcctggcgcgcgtgttcagccgcgccgcgctggagcgctacgtgccgcgcctgcagggggcgctgcggcatgaggtgcgctcctggtgcgcggcgggcgggccggtctcagtctacgacgaccttccgcatggcc

SEQ ID NO: 14837 - DNA, 571 bp, Homo sapiens
  source 1..571: mol_type = other DNA
cagatggagccgggcctcggagccaggactcctgggctcccgacccccttccctgctgtccagctggggcgccaagcagcagggccctccgaataggcgagctgtgcttggatctcagagacgggcaccgactgccgagccccagacgaagtgccccagggtcggggatggggacctgagggacctggaggccttcttgtatcctgaagtaggaccttctaagacttcatgagtcctggcccccttgcaggggttggggagctggggatcccagaggactctggccctgatctggaggccccacacgtgggaggaggcagctggactttccccttcctcatcaccgggaaggctagagcttggaattccggctcctcggagtcccaccgccgcctcggagctcagcacaccttggatgggggaggcgggcagctcctagccccgcaccccaggaggcgcgctcggagggaagccgccaccgcgccgcctctgcctcggcgcggaacaaacgcctcgcggggggtctgaccaaggtaacgtgggcagcaacctgggccgcctataaagcggc

SEQ ID NO: 14838 - DNA, 348 bp, Homo sapiens
  source 1..348: mol_type = other DNA
gacagaagaaacagtggggagtcacttctccattttcactgaaggcaattggcagcataattctatgttcagtcctttatatatatatatatatatatatatatatatatatatatatatatatatatatatatataattatttatacatatatgtaattatttatatatcccatgcctgttacttgaaataaacgctgccctttagctgctttaaaaaaggttttaaaactaaatcaattaattcagttagcaactgtgcctgcggcactgctgggagaaatcctcccttcactgggagagaacttctctcccagggcggtgcgacccggagctccagcgggaatct

SEQ ID NO: 14839 - DNA, 343 bp, Homo sapiens
  source 1..343: mol_type = other DNA
ttgcagtgacgctacactgcactccagcctggtgaggcagagtctcacactcagatctggctgactaaccgacagaagaaacagtggggagtcacttctccattttcactgaaggcaattggcagcataattctatgttcagtcctttatatatatatatatatatatatatatatatatatatatatatatatatatatatatataattatttatacatatatgtaattatttatatatcccatgcctgttacttgaaataaacgctgccctttagctgctttaaaaaaggttttaaaactaaatcaattaattcagttagcaactgtgcctgcggcactgc

SEQ ID NO: 14840 - DNA, 459 bp, Homo sapiens
  source 1..459: mol_type = other DNA
atcgatcaatagatagatatcaggctggagggtagcagtctggtctgaaagccggtccgctagcattggcagtaatcccaccgctgtctgtataaaattttttaataaaaaattagccgggcctgtagtctcagctactcggcaggctgaggggttgcagtgagctaatgacaagggggctgtgctcctttgtgaaatcccgttgtcccagggcaggaggggccgcagaactagttcgttttatcccattaaaaatagtaatttgctttctcctaaaaagctggcgggcccgggaggaagtgttcccgccctctgtcccgccccgcggccccgcccttcaaaggcggcagccaatcggggagccgcgtccccgccgcgcgcgcgctgctcctccttcttgcgggccgcgccctgccggcagtgacgtgccccgccctgcagccgcgggattcaaactcc

SEQ ID NO: 14841 - DNA, 568 bp, Homo sapiens
  source 1..568: mol_type = other DNA
ccgctgtctgtataaaattttttaataaaaaattagccgggcctgtagtctcagctactcggcaggctgaggggttgcagtgagctaatgacaagggggctgtgctcctttgtgaaatcccgttgtcccagggcaggaggggccgcagaactagttcgttttatcccattaaaaatagtaatttgctttctcctaaaaagctggcgggcccgggaggaagtgttcccgccctctgtcccgccccgcggccccgcccttcaaaggcggcagccaatcggggagccgcgtccccgccgcgcgcgcgctgctcctccttcttgcgggccgcgccctgccggcagtgacgtgccccgccctgcagccgcgggattcaaactcccggaagcggcatccgtgtgactcggccgacgcgagcgccgcgcttcgcttcagctgctagctggcccaagggaggcgaccgcggagggtggcgaggggcggccaggacccgcagccccggggccgggccggtccggaccgccagggagggcaggtcagtgggcagatcgcgtccgcgggattcaatctc

SEQ ID NO: 14842 - DNA, 214 bp, Homo sapiens
  source 1..214: mol_type = other DNA
ttgaccgtgaagacttcccagcctggacatgatgggctgctccagtggaacactcagttggcttgcagatgtgtaagcttagggtacatatgggaaagccagtgttgacctttcccttttgcaacctgatatccccacaatagcattgctatattgggtatgtatgaaatagacaaatgatctatatctcatccaggatggtttcatccttaaa

SEQ ID NO: 14843 - DNA, 535 bp, Homo sapiens
  source 1..535: mol_type = other DNA
aagtcactctggctgggcctcagtggggcacattcagaaatatcgtctccttggatggcaagtttattaaaaattttggaaggactcactctttttataagaaagcatttatgtcattgttcagaatgcaaaatgtatatgcattttagttacaataactaatatttgataacatttaacgagtaattactgttcacaataacctaatggggtattattattcccattttatagattaaaaatctggggtagatccacctaaagacctgttattaagtagtgataatacaagttgttgtaactgacccttttaaatcaattttagctaaatccgttcagttgggcaggccctgccagagggcacgaggcttccgccttggccgccacctccccggccagctgcggtgttcgcggccagtgttgccgggcacttcctggttcccgcgcgccccgggtgcagctccctgcacccagtgctggcgctcctcagaagggagggggccagaggcgagatgtcgcaaccgcctccctccct

SEQ ID NO: 14844 - DNA, 555 bp, Homo sapiens
  source 1..555: mol_type = other DNA
tcaaagtcacactgttttgattcaattggctaaacaacttagctgttttgaaaataaatgaaaattccaacatgggtttgaaataaaattgcatcataaacattagggttttaacgcttttaaagatgttgaaactttataaaatgaaaaactacttggatgaattattccaaaattcctgcacaaatttggcatggccagggcctgggcactcacgcaccagggagcctcgcgggtccgctctcgctctcccgccaggttgactcgagcctcctgccagagccactggccccggaggccaccctagaccgcagctggcggccgctggcacgagtgcagggtaactgagccagggccgctggcgcatttggcctggccgaggccaccccgcgcggccgctccactgtgcccgaggctgtcctggaggtgaggccggcccacagggaccctgcccgtgcccgggctccggtgagtcagggcgcgttatgcaagtgcccccggcgccccgcgcggttacgaaagcgcgaccccctccccccggcgctataaagcagc

SEQ ID NO: 14845 - DNA, 629 bp, Homo sapiens
  source 1..629: mol_type = other DNA
gaaaccaacatttaagtatcgaaggcaattggttcatgaattaatagtttgaattattagttgcataatagtgtttaaatatttgaggaaatgtgtttaatagatgtaaaagcttagtaaagtgaacattaaacaaaactaagtagtggtaagtgttcttacaagatatctatcatctagtagatttagtagactgtatgttgtagcaaaatttggctattgtaggttaccttttgtaattacagtaagggttattattcaattcatgacttgattaggtttggatcattggcaaatattttcacctctttagtaataagcttgaggtttactcctttaaaacacttctgaggtccacttttaagaaaaggaaagattaatattcacctttatgttgcagtgatgcaaactgttccatatctcccagatttattacagttgctatataaacaaaaaaaatccaagcacttccgaggtctaaatagttttacttcctataggttcattcatggatatgtcagtgattcttccttgctgtggacagcagcctgaagattcgctagggacttatgagctactaatgctcagggatttagtgtcctgaagaactctttaatcctgtgcttcct

SEQ ID NO: 14846 - DNA, 261 bp, Homo sapiens
  source 1..261: mol_type = other DNA
agagaatgcttctgccatcagcactgctttctgaagcgctgatgagctgctctgagaggatcctccgaggaggcgttactatatatttagcacaaggtcggcgcactcgggggacggtgccatttagtgtcggaccgtgcccagtcgggacccgtgttgcgggcggcggcggcggcggcggcggcggtggtgtgcggcagggcgcacgggacctgtgctgcagcggctctctcaggccgtgggtcgtcgctgcagctgccg

SEQ ID NO: 14847 - DNA, 200 bp, Homo sapiens
  source 1..200: mol_type = other DNA
actgataaggatatcgtgtgcattaagtgccttcaattcaacaaatatttaattagcacttagagaatgcttctgccatcagcactgctttctgaagcgctgatgagctgctctgagaggatcctccgaggaggcgttactatatatttagcacaaggtcggcgcactcgggggacggtgccatttagtgtcggaccgtg

SEQ ID NO: 14848 - DNA, 380 bp, Homo sapiens
  source 1..380: mol_type = other DNA
gtctttactatcatccccgttttacagacaggagaataacctgcgttctcaaagccaggtgtcatgtcacagcctcggggctgagccaggcctttttcaaagccccaggaagctagagctggccgcctcctgctggcagggagttccttccaggcttctggtgagagggtcccgcacttctgtttcccttccttgtcatggaaggagagaatcattcatgacagttaataagtgtcagaaaagtatgtactcacattcatgttttagcccaatctggctccaactcccagaggtttctgagattgccgacatcctatcataatgccgtcctatttttggtaacaattaaagggcctcccggtgaaagcagaaagctgttt

SEQ ID NO: 14849 - DNA, 295 bp, Homo sapiens
  source 1..295: mol_type = other DNA
gaattagcatcttgtcatgcaaaaatacctaaagctctactcctttgggcaggaagtagaacttccagatttgggacacacctggtcccagctactggagaggctgagcccagctgcattaagctgtaattgcaccactatatttcagcgtagtaattcaggatttgactgcttaatcattgctaccagcttcagaggaaggagaaaatctcttcattcaaacaccagtcagtaagatgaattatggagacattctcttgaatagtcttcatgtggacagccatagcagttcatc

SEQ ID NO: 14850 - DNA, 562 bp, Homo sapiens
  source 1..562: mol_type = other DNA
agggccagaacctaggattcctgacttcaagtctaaaactgtttcagctgtctgggccaaagaatatattttaccaggtctaattacatcagattacttgacaaattaggatatttccatttaagaaaagaaatgcatgcctactcttgcaaaatgcaaagaacatataaatgggttctggtcagtcttatagatatattttcctataattacacactaattctttcttaaaaatatttcccaaaacagcaatcaatgaaacgcccactcttgagcctcctgaaaaggaggccacaggacccccgggcgccagggcttgggaacccagcgcccctccttgtctgtgccatgacagacaggttcagtgtgacttggctccaagcagctgggccatgtagcctgaacgcagcagagggacgccttagagccagctgtgggcaccacagcccgaccagggaggcagcgggtctccccaggttaagaggccagcggaggacgcgcgcggtctccttgggggagggtgcgggtgggccgggcgcgcatgcgcatgggcgccatcgcc

SEQ ID NO: 14851 - DNA, 419 bp, Homo sapiens
  source 1..419: mol_type = other DNA
ggaagcatgctgacacctgtagcataggaacaataatggaatccaccctatagggataaacacttcttaaaatttactattatgatcagtaataggtctctcttccaagcaggtgctgggttttcttgttcatcatcagttataggaagaaaaaacaaatactgtctgagctctgctattctgcagcatggcaggtgcccacatacctggatggctgcctttacccttttttttaaacttgactaaaacagtgagtaattgggaagttctgaatttctatttggaaaacaaattgatgattactaaaacgcaaggacatttttttgtaatgtagaaaagttatgtttcacagaggtattacatcatttcatttcctaatgtaaacactcatcaccctgcacgttgcaggatttttcact

SEQ ID NO: 14852 - DNA, 589 bp, Homo sapiens
  source 1..589: mol_type = other DNA
ggctctcctaagactcataaaagccgctccagtcctggatggccattgatggggctcaatgaatatgtatttgtcaaccaggggtggtccgcctgaggtgtgcagagttcccgcccttcccggagccgggcgccccaggagcgctctctctggctcccgccagaaaggatggctcctagggcaggggtctgggaaggggtcgcgccgccagcagccagctccgggggaggcggccgggtcctcgctccgcgcccgccttccccgcgcggcaggagccgggggcgggcccggcacaggccgctcccccgcccggccgcccgcggtggcgctagcggcctctcacccggggcgggcgagttctgggaaagcccggcccagggcgggggccccgctgccgcccgcgcagccgccgctgtccgggcagcgcgcacatctcggcgggagcggactgtgaacggcgcgggtccacacggtaacgctgggcaacgtgggcaacgcggcgggcggcgggctcgcgcggcgggaggggcagcggcggcgcgcccgggctctacctcccgggctctgcctcccgggctctgcctctcgg

SEQ ID NO: 14853 - DNA, 386 bp, Homo sapiens
  source 1..386: mol_type = other DNA
aagatactgaaatgcagatacagttttttatttttatttaggctggagtgcagtggtgtgatctcgactcactgcaacgcgattctcctgtcagcctcccgagtagctaggacaggctggtctccaggtgatcatacagttctttatcagctaatggttaaaaattaaagcaaataagcttctttctgccctcaggactgtatggaggaaaagtcctctcattctgagagcaccgacgccctcggggcttccctcgtgccagtccgcgcgcgcacgccggggggcaaccggtccagggccgcgagacagtcaccgcgagagggcgcgagcccgaacctgtctacggaagtcccgccctcacttccggcggcggaggattgggaggg

SEQ ID NO: 14854 - DNA, 369 bp, Homo sapiens
  source 1..369: mol_type = other DNA
taaatatacttcatttagagtgctggaattatttcaatatcgctctaggctggagtgcagtggcgcgatctctcccgagtagctgggactacccggcaacagagggtgctaggtgagcaagataacttaggatatcaccacgctaacacctcccaaatatgggagtattttactaccataaatgaaatacatcaagtgaatttttgctaagcgagcaccatccagatggcggatcctagattggcagcctgcgtctctctagaccggtccgacttttgcgcgtgcgcgagtcctggcgcgtgcccgccctcaagcaactgtccgacccagcgggtgggaggggtgggtctgggaacgttgcggcggctg

SEQ ID NO: 14855 - DNA, 534 bp, Homo sapiens
  source 1..534: mol_type = other DNA
aaccattttggtgattctataagtactgcactttgagtttatattaggttactaaaagatgatatttgagttcttcatacaataataataatttttatttagcatttcttacatgccaaacgctgatgtaaacacttttacgtttattaactactataatttttaaaacaatcctgagatttcttatagtttactaacaggcattctggtttcatagctcatacccttaactaccagactgttctaccactctagtatatattagacataaggttgtaaattcacataattttgttatttattatttaatttcctctgagacagagtctcactctatcaccagagtggtggcacgatctcagctcgctgcaacctccatgtagctgggatttcaccgtgttggccaggatgggaaagccatatgttatttgccttcttatccctaattaaacactgttctttttttatagagatgcttactgagtaaatgagtcaatgaatgaaaaatttcagtgaccatttttccctctaatt

SEQ ID NO: 14856 - DNA, 321 bp, Homo sapiens
  source 1..321: mol_type = other DNA
ctgggattacaggcgtgagaaactcttaaattttgtatagacacaatcatacaagttgtgggagctccttccttcacaaaaaagccctcctctttgtcattttgggggagcgcgctgcggcgaggtcctcgtgcagatacgcagacgtctctcaaagtttaacagcactatcaaactttaattgcgtagttcggaaccagatatgtgaggaaactgctgagttcggcagcgggacccagtgccacaggtcagtcctgacgaccgcaagctgcgccaaatctcgcgcagcggggcgggagattttcccgcgaaggagaagcg

SEQ ID NO: 14857 - DNA, 321 bp, Homo sapiens
  source 1..321: mol_type = other DNA
caatatttcattccattatttctgacacagaccctactgagtaggtttcagctcttcagtgacagagaggggagaaaccctagcttttatttcttctcttgagaatgtacaacccattttgctaaaactgttgacactggacagtccctttccccatttggaaaatatgaaataatatgtttacttagttaattgataaccggtttagccatttaagatgaatgtttaggcagctgtaatgttagtactacattaaaatatttcaaaaggatctcattttcaaggaaaatgatctagtgtttgagagccttttatagaaaa

SEQ ID NO: 14858 - DNA, 325 bp, Homo sapiens
  source 1..325: mol_type = other DNA
tgtttaggcagctgtaatgttagtactacattaaaatatttcaaaaggatctcattttcaaggaaaatgatctagtgtttgagagccttttatagaaaaatctgcacaaaacatctagtgtaagtacttggggtttaggttctcgggacccaataggataaacattattttatgtacaaggaatataatacacagcatcaatctaaaaatccaaaattttgaataattttttgatgaaataatttatttcattgtttctcaattttgctgcacagtggaaccacctgggctgtttgagggagaccagcctggccaacatgggcat

SEQ ID NO: 14859 - DNA, 335 bp, Homo sapiens
  source 1..335: mol_type = other DNA
atctgcacaaaacatctagtgtaagtacttggggtttaggttctcgggacccaataggataaacattattttatgtacaaggaatataatacacagcatcaatctaaaaatccaaaattttgaataattttttgatgaaataatttatttcattgtttctcaattttgctgcacagtggaaccacctgggctgtttgagggagaccagcctggccaacatgggcattgcattgccattgcactccaggaaagaacaagaaaaaagaacaccttatttttatcttcttcagtgttcattcaaaagagagattaaagtgctttttgctgactagtca

SEQ ID NO: 14860 - DNA, 552 bp, Homo sapiens
  source 1..552: mol_type = other DNA
tacaggactcctgcatcaggatccctatgggatgagctttgcaggagatcctgaagcagtgtcccagcagctgattattggtcaaaatatggacattaggaactaactgctcaggctcacagcttgactaagcaggcttcaaatttggaccttctgttactggcagtgaatttgaaattctttaaaatacaatctgtcttatctgtaaaatagagtaaacaaggtgttgatgtgatgattaagtttaatagcctgcatactacttgcttggcacattgaaggcactgtatatgtgcagctaaaacaataatcatcatctttgtctaaaatatacaaatatttgaagctgtatttgacagaataatcataacaacattatgatgataatatcagtctgaatggacaatatatagaccaaatactgagttttgctactacacaggaagttttccagtggctgaaaaagttaacaaaggacttggtaaatgtgcatgtatctacagtccacgtggaatccttttcagcaatggaaagattctgcctcatgactct

SEQ ID NO: 14861 - DNA, 574 bp, Homo sapiens
  source 1..574: mol_type = other DNA
ttagataaataagtggttctatttaatgtgaagcctgttttatgcaggatgaatgtggtatatattcagaataactaatgtttggaagttgttttgttttgctaaaacaaagttttagcaaacgattttttttttcaaatttgtgcatctctgatgtaagagataagctcatcccagttctgccagctatgagctgccatttgaaatataaaaaataacaattctatctgctaaggtaatttacttgatatatgtttggttattgaagatatatgagttatgttagctatttcatgtttaggctgctgtatttttagtaggctatattaaatagaggatttcattataaaggacaaagtctcctaatcttcgatataggattgacatactttttaaatatacaaggcatagaatatggccatttccgttaaatcataaattcccaactggttattaatctaagaattcagaattttaagtaattgtttttgcataatacagcttcaacctagtacaatgaaacacaagaccaaaggacattttatttttatgattggccactttatccatcact

SEQ ID NO: 14862 - DNA, 399 bp, Homo sapiens
  source 1..399: mol_type = other DNA
ttactataaatgctatgatgcatgctaatcataaaagaataaatttctcaagcatgagtgtttgaataagtgaagtttcaaatttgggtcttctgtatattagctgtgggacactgaaaatgaatttgtcattctcttagctcagtttgtttgtttaaaatagagcaaatagacctgctgagagtggcaagtataataatcatcatcatgtttatatataaaattcagaaatatttgagcctgtgtgactgaataaaaaatggacaaaacagtgacttcatttgctgttaacttggaagaggccatttcccactggctgaaagagctaacagaggatttggtagcttcctgttaggaatcgttttcagcaatggaaagagtttctccctcatgacgctg

SEQ ID NO: 14863 - DNA, 355 bp, Homo sapiens
  source 1..355: mol_type = other DNA
gtatctgtagcagttggatgaaatattctgcaaatatctattagacccatttggtctatagtgcagatgaagttcaatatttggttgcatatatacttaaaataaatataataaaaattttagtccatttacattcagtgttattattaagtaaggacttacttcattgataataattttctctgcatatatgtgtacagatttttcttaatggcttaaggcacagttacacatttgtgcatctgtagcagtcttctttaagttacacatacttccagcactataatttaaatttattatgatgtttggataccttcatcatgattcatgaacccctgcatgcaggacaggggcc

SEQ ID NO: 14864 - DNA, 375 bp, Homo sapiens
  source 1..375: mol_type = other DNA
atctgcacaaaacatctagtgtaagtacttggggtttaggttctcgggaccccctcaataggataaacattattgtacatacaagggatataatacatagattgccctcaaagttatatttccaactggtcatcaatctaagaatccaaacttttgagtaattttttgatgaagaagtttacttcggaaccacctggggtgtttaaaaaaacctgggcctggcggggcgcctacatgcctgtaatcccagctatgttgcagttgccattgcactccggagaacaagaaaataaaacaccttatttttatctttttcagtccattcagaagagagattaaaatgcttctttctgacttgtcacagtcagagtcaga

SEQ ID NO: 14865 - DNA, 578 bp, Homo sapiens
  source 1..578: mol_type = other DNA
ttctgcagtgatggagaagggagatcccttattagacaaataaggggttctatttaatgtgaagcctgttttatgaacagaataaatgtggtgtatattcagaataactaatgtttggaagtttgttttattttgctaaaacccagttctgccagctatgagctgcttttcccatttgaaaaataaaaaataacaattcctgccttcaggaattttttttatatctgctaaggtaatttacttgatatatgtttggttatttaagatatatgagttatgttagctatttcatgtttaggctgctgtatttttagtaggctatattaaatatttgaaaggatttcattataaagaacaaagtctcctaatctttgatatagcattgacatactttttaaatatacaaggcatagaatatggccatttctgttaaatcatatattcccaactggttattaatctaagaattcagaattttgagtaattgcttttgcatcagattatttacttcctcaattatgatacaagaccaaaggacattttatttttaggtgattggtcaatttatccatcaaaga

SEQ ID NO: 14866 - DNA, 427 bp, Homo sapiens
  source 1..427: mol_type = other DNA
ttggactagataatttattggaatattttagttctaatattagatatagttacaatgttaatatcatcaaattgaaaccattaaatctcagatttctggaatgttataaataaagttaaaatcttatcaaaacaataaatcttcaatattttattaaacaaatattgtgacctcttttaaatatatgttataaatttgaggctccaaggtggacggatcttgagtacgagaagagggccttcgatgtgcctatttatttaaaaaaaaaaaaaaaaaaaaaaaaggcagggtgtggttacctcacctggctgatgagcaacctaagcaacaaaatcttatttaaattatctcccagaagcaaaagagattgccttttaggcttgagaaggacttagtttgtgctggcaccaaggaaatgcctttttcc

SEQ ID NO: 14867 - DNA, 678 bp, Homo sapiens
  source 1..678: mol_type = other DNA
atcagaagatctctgctcaaatcccggttttaccggcagtttctttcccaatttgaaaaataaaaaatgataatctttatactccagtctcttttaatgatgaatatacatttatatatatacttttatatatttaatataatatttaatagtataaatatgtatttatgttattattatgtaataatgtatgtaacatctttgacatgtaaagtaaataatcacctattattataataatgtaataataacacaaatattattatgtaataacatatatatttatgtatattgtttatatacatttaaatatatataaatatacatttattagctaataatttgatatatgtatggtaattcaacatgtatgagttatattcactgtattttaagtgaactatactaaatatttgaaaggcttttgctattttttgatatagcattacaatgtacattttttatacacaaaatatagaatacactgataaattcccaactggtcattaatctgagaatattgaattttgagtatattctaacatagaatcatttacttcagtgtttctcaaccagggacttttaattaaaaatacctgggcccatacaattaaaacaaaagaacattttatttctatccatggccaaagtccactcagaaaaaaagtataaattgga

SEQ ID NO: 14868 - DNA, 457 bp, Homo sapiens
  source 1..457: mol_type = other DNA
tgcactccaccgggaggctgggaatccaggtcccggactcaagaggtttactccagcctggaggaaagatttcctgcagcactgggcccgggcagtggtccagcctactgagcagactcagttacttcgatcgttcgaaagcaccttttaaacatcattaccgatagtcggagccgacctcagagggctcacctagcacccgccccgggcccgagagccgcggtgcggccgtgcgtacggggtcccgggcagagctgctgagagccccggccccgcatctgactcgcgctctctcggcgggactccgggccagggcccccaggccggcgcgcagggcggggagcggctgcgggcgggaggacgggcggggcggcgggcggctacgcggcctgggcggagccgcccccgccctggccctcgcggttgccctgcccccgccagccccaggctccccggg

SEQ ID NO: 14869 - DNA, 507 bp, Homo sapiens
  source 1..507: mol_type = other DNA
acattgtagaggatcttatatgtctccactggaaaaggccttgcctgtcttgttctctgcagttattttcctgcataaaaatagtaattattttcagttttctcactagaaaaatatggattagtaatcgttcctctcttatcaggctaagatcacctatgttaactatgttaatcccattttacagatgggtaaactgaggcccaggagttaaataacttatcactgttattttgacccttccgaaggaccagaaggcgcgccaggccagcgtccggcccggccaggacggaaagggttactaggcccgcgcgcccgttaccggcggaggccggcgggctcacaatgccaggagccgggcgccggacacttcttcctgtcacggctgggcccggccccgcccccggcaccgcccgctggccgggcgctgccagagtggacggttccaatgagggggcgggcaccgcagcccattggttgtccgcggatgaagtcagcgctgagtcc

SEQ ID NO: 14870 - DNA, 507 bp, Homo sapiens; identical to SEQ ID NO: 14869
  source 1..507: mol_type = other DNA

SEQ ID NO: 14871 - DNA, 507 bp, Homo sapiens; identical to SEQ ID NO: 14869
  source 1..507: mol_type = other DNA

SEQ ID NO: 14872 - DNA, 579 bp, Homo sapiens
  source 1..579: mol_type = other DNA
taacagcaaggaaagagggagaaaaatctgtgttttcactttttttctttttcctcctgggctcaggtggttctcctgcctccacctacgagtagctgggactacaggcacacaccacagtgccaggtttttgtggtctctctttaaaggtgattagattgaatatcctattttaaaatgcaatattcttacaactgcctttgtgccaaaatgcttccatttaaggagccaaagtttgcaaatgtgtgtaaactgatccaagtaacaaacatatgtaagttgatccaacctatttccgaggtgtgcccgggatataaatggttaacattgacaacagctgagggtgccaggcacctcttctacctccctggaaggcccagtggggctgtcccctcccgggacgtgggcgtccgcctcttccaggctgccggggcctggtgggctggcccgccacgtggagcgctggcttgattctcgaaaggggcctacgccattgccgcgccgcagctccaggacaggccctcgcccccgtcagcgtagggccggctctcttacgccactgacgtaacgtcatcgtgc

SEQ ID NO: 14873 - DNA, 508 bp, Homo sapiens
  source 1..508: mol_type = other DNA
ctggacagagctacgtggggaatcggggaaaaaaatcttctatttaacaacaaacatgcagtccatctttaatgatttgatgcatttctttagggttttcaaaatttctcaatgttaaaatgtaaggagctgaatgaacattatttctaatgtgttttttttttttttaaaaaagccatatttagaggagactgttttttaagctgagaacatcttagaaagggtttctcaccgttggaatccggggtgaaaaaaaatttgcaattctagttccttgcaccggaggccgggctcagtcctctgggccgcgaagtgggcgcggaacctctcggtccgccgaactcctaccgccacctagcggaaggaaggcgcaagggcttcttcgtcactgacggttgccaggcaacggaggcacggcccggcccgcgttaaggaacatttcgattggctcttctcatgagcagcacgcggatggcgtcagacgctatgcgactcctcccaatgcgat

SEQ ID NO: 14874 - DNA, 379 bp, Homo sapiens
  source 1..379: mol_type = other DNA
gaagaatgaaatttattcacatgtgtcaggaccaagtcttaaattgagatcatataatatcatctcagaagcagagatttccaaattagatcatatgatactagaatatgtaattgaaagatggcagacaacaagttctgtcccccccttttccaaaaatctctgaaaattacagaaaacttagatacacacacacttgtgcatacatgaacattaaatagactcttggagtgctctaagcacagacaattctatgagttattgaaaaggtgccctggatggcttctgaaatccccaatgtgcatcatgaggtctctgccttcatgaatggactaatccattcacgggttaatggattaatgtgttctgagttagcaag

SEQ ID NO: 14875 - DNA, 265 bp, Homo sapiens
  source 1..265: mol_type = other DNA
tggcagaaactgtttattgctgactatacatttgttctctcttctctcaaataaacagacaactttttactgatcccccgagaaatggaaactagaattcctcttcccccataaaaatatcactttaactttctctttctcccagcctttctgtataaaaactggccataaagaagaaacccattctggagaggcttctatagcatacttggttgaacctaagcataaaagtgggctgaggtcacaggcatgtgacactgtgccc

SEQ ID NO: 14876 - DNA, 339 bp, Homo sapiens
  source 1..339: mol_type = other DNA
aatgtctgaggtatctttcagacctgaaatgctagctgccaagtcgccttgggacttgaggacttaccttcctttcaaaggattagcccttgttttgatttcaaaataattttgttacacagtttaaaaataatttggggtggatgactttcatcaattcatagccaggcagcggttcccattgagcagctcctaggtaatgagccttgagaaacaactttcttattatctagcttcataattgcagtaaggaatagctttttttgcttgcagctgagatgactttttcaacattgcttcaaggatgcaaaaaatatctgtcctttctagtcaatgaaa

SEQ ID NO: 14877 - DNA, 511 bp, Homo sapiens
  source 1..511: mol_type = other DNA
atacatgtctgctgatgatcttcaaatgaagacccagaatcacataaaatgtatttatcactttgtagtagttctttatcatcatgtatctttttggacaaaggattcaaagtaaaaggggtgaagttttaaaaatatttacgttttactattaagagattgatctccagtctcagaaaagtggacagtctcactgtcgaggttaaaatacaattgattaggtttcctctatggttaattacatccaccatgggtttgacaagcaaggttactagaagtaatcttaaatgtcttcattcaaagctcttgggaatccctacctgcagaaactgatgatccacggagcagcccctgggatggaagcggttggtgcaacgtaaccgacttttaaacgccggaactttgctccgcggcatcgaggagccatcgaaggaggtgagtggcctaactggattggtcactgcagtgatccacgccgacctcagccggcgatcaggccggcttcgcagta

SEQ ID NO: 14878 - DNA, 626 bp, Homo sapiens
  source 1..626: mol_type = other DNA
taaaaggggtgaagttttaaaaatatttacgttttactattaagagattgatctccagtctcagaaaagtggacagtctcactgtcgaggttaaaatacaattgattaggtttcctctatggttaattacatccaccatgggtttgacaagcaaggttactagaagtaatcttaaatgtcttcattcaaagctcttgggaatccctacctgcagaaactgatgatccacggagcagcccctgggatggaagcggttggtgcaacgtaaccgacttttaaacgccggaactttgctccgcggcatcgaggagccatcgaaggaggtgagtggcctaactggattggtcactgcagtgatccacgccgacctcagccggcgatcaggccggcttcgcagtaggtggcggctgagcgccccggcaaccgaagcgccaggccagcccaggccacgccgcgccgtgcgggatgctgaccgtacccaggcgggagccgccgcgccgccgcctggcgctgcacctgggcccggcccggccgccaattggacggctcggggcgaccccgctgtatcgcgagacgagattggcagcggcggggcctcaagtgcccccgcgctggctttgtatgcg

SEQ ID NO: 14879 - DNA, 515 bp, Homo sapiens
  source 1..515: mol_type = other DNA
ttttccaaactaacatcgttttttgttattaaaagaaaaatctcgttctctctgtgcatgtctggcttgcacagaaatgaaaatccactttgtaaacatgttcttcattccataatggcatcccctttggtatttacagaagatttctccttgtgtgttttacacaagcataaatatgactaatgtgaatttccgctcattcgccttttctgaggatttctcagtgtgctttttctacaggctgacattttcaaaagcctgccctaagacaatgaaaaatatgtatcatacacatattttaaaaaatttttaaaaattataaatgtcatacatgctacttaattaaaaaatgaaaaatctgatcatagtttcactttcaatttatcacattttaaaaggaagataatttatgtagaattatgtagaaaaagatagtttttgatcaattattcaatatatacaggtttggagttcagtatgtcttctagaactactggacaatggttgcaactggt

SEQ ID NO: 14880 - DNA, 504 bp, Homo sapiens
  source 1..504: mol_type = other DNA
ctacaggctgacattttcaaaagcctgccctaagacaatgaaaaatatgtatcatacacatattttaaaaaatttttaaaaattataaatgtcatacatgctacttaattaaaaaatgaaaaatctgatcatagtttcactttcaatttatcacattttaaaaggaagataatttatgtagaattatgtagaaaaagatagtttttgatcaattattcaatatatacaggtttggagttcagtatgtcttctagaactactggacaatggttgcaactggtgagaccattcccagtcagcaagggcttgggaagtgcatacagtcctggtgtctactctgaagagcacagagtagacgttttcaccggcagtaagatcagcagctgctggtgaggggcgccggggccgcgcgctagatggagaggtcagcggcgagaccgagcgcggaccctgccggcctccgttctcgcagatccctccgccgcagcgtgcgctcccggtagc

SEQ ID NO: 14881 - DNA, 442 bp, Homo sapiens
  source 1..442: mol_type = other DNA
aatggcattctgcttttaggacttcagaatggcctgatgtaggactgactctatcaggtaaatcccattttaaatagagctccagaaaaagagatactctaattctctgagtaaaagcacaaaaatgccatttttatataatggttctataagtagaaaaagcttatccataactttatgcaaataagcagaaagtctcccaggaagttcccagttatagcatgcacctgctggaaacagactatatgtgtttgggataacctggttacaaatctgattgtaaaagaaagcagctggaaagaaatttgcctgcccaataggtttcattattaaagtttacacaaagtggagtaatcaccaagctggctggctatccagatcacatgattatgtagaaacatgaaacttactatgtgctcgggcaagttttacttttgccagc

SEQ ID NO: 14882 - DNA, 282 bp, Homo sapiens
  source 1..282: mol_type = other DNA
actttctgcttatttgcataaagttatggataagctttttctacttatagaaccattatataaaaatggcatttttgtgcttttactcagagaattagagtatctctttttctggagctctatttaaaatgggatttacctgatagagtcagtcctacatcaggccattctgaagtcctaaaagcagaatgccatttctgaaaaatgctgatttacctgttgtttaaagaacacgtttccaacatttattctccctctcagttacctctcctgttgcatctg

SEQ ID NO: 14883 - DNA, 297 bp, Homo sapiens
  source 1..297: mol_type = other DNA
gatcctgtcagctagtgtattggtgaaagacaaatttaattttgcacataaagttatgaaactaatatatgcatacagcatttggaatccaaagaactgaattcaagagccttggttctcttgcttataaacctatttggcaaaatgagaaatgtaacaatgccatttatgtaatatgaaaacaaaagttaattgactgtcttcattatgatctccatattggacaaatgaagctgttgccagggcagcacctgtgaagccctggcctggcttcagagcccttcgtgtaggagggtg

SEQ ID NO: 14884 - DNA, 348 bp, Homo sapiens
  source 1..348: mol_type = other DNA
ttctgttgttttattagcaactcattcaccattttaaagaggcaaatccctaacagggaaattgtaagttataaagtggccactgagtgcagcaccttgcagcagctggagcccccagcagtgtgactcctgccacaatgactccatcattatcagtaacatggtggatggagtggccagcctcagcctcatgtaacccattgtttccaaagggctgcaggctgcagaagcccccaagctctcaggccagctgtggcttctttgctgagatggaggtgcagcccatctttcccgagggatggactgagggcttggctactcccctgaccataaatggcttggccaggg

SEQ ID NO: 14885 - DNA, 390 bp, Homo sapiens
  source 1..390: mol_type = other DNA
accacttttaagagaccaaatgctagaacttgttgactggcactgttctaggtacagctctgctccgggatttatgacttggcaagctaacttagcatgtcttgaagtaaatattcagtaactttgcccgtgattcattaagcttaagcattttggcccaccgggacgcggcccggaggcggcttcggccttgcggtccaggctaggccactgcgccggggcccagcctgctcggcgcccgcccgagtgctcggcaggcccgtagcgccgcggctcccaggagccgaggggcagccggcgcgcaggcggcggttgccgggccctccctcggcccggcggcggtggcggccccgcgtcgcgaggcacttccggcgcgtgccggggtggccg

SEQ ID NO: 14886 - DNA, 524 bp, Homo sapiens
  source 1..524: mol_type = other DNA
aaaaagatctttgaaaagcctcacagtaataatactttttatatctctaaatcaaaatggctcagttctgagaatttttacattttaggtacaaaatagaatttgggcatatgtttttaattggcaaaaaaaaaacagacttcagaaattggtcatttttattccatcttaacggtgagtggcttatttaataaaaacatgtctgtaatttaacacaagtagcacgtacagcctatcgccggccactaggttaggttagttgccgccagcaagcgcccgaatcgaaatcctcgattttttcctggtccagcgctccgagttctaaccactctggccatcaggagcagcattctcgggagccagaggccgaggtggcgccccgggcaggcgccttaggctggggagctggctcgctcgcctgcctccgaagttgcgaaggtgccgggaagaggaggggcctcgcctcgggcgcccgagtgccagccctggtggagaggggcggagcggccactgctccaaccacc

SEQ ID NO: 14887 - DNA, 384 bp, Homo sapiens
  source 1..384: mol_type = other DNA
tagctctttgtttctttggctccaatgtaaagacagttggcagagaaactctattagacatttatcatgtgacattataattaatgttcatgtcgagcacccagggccaggtgcccagccctcccctcccctttcctgctggggcagcaggggcttagggacaaagtgccctttggtggcagatgggccgaggagtggggcgcacgtggcgcgaagcccccgccttctcgctgcccctgagcagggggccgtggggggagctggccggcggccggcatggggttctcacttcccctccccaacggccgcgggtgcaggtgccgcgggccgagtcccgcaggcggggcggactctgtggacacgccctcgtggcgaggccgggct

SEQ ID NO: 14888 - DNA, 364 bp, Homo sapiens
  source 1..364: mol_type = other DNA
ctttttaaaagcttttttgaaactctcacctaacagatttatttatactcccatctgaaagtctcagacatttatgttttttaattaatagatgttttagaattaaggaaaaatagaacagatacatcttgcattagtgtagtacgtttattacaattaatgaatcaatattggtacattactattaactaaggtccatagtttacattaagatttaccctgtattgtattatatgtataatgtcattacagtatcaaacaatcattttgccacactaaaagttcaaatcattgtgataccccattcaaatctcatctcaaaggtggtttcccccatactgttctcatgataatgaggaagttc

SEQ ID NO: 14889 - DNA, 364 bp, Homo sapiens
  source 1..364: mol_type = other DNA
ttataaagatggtgggggggaaggtgccttcctacccttgcgctggctgatgtcaagtatttaacgactttgctttacctactacagtaattaaaattaagtcttcaaacttaaatttaaatttctaaaagcaggaaccagaatcctagggtactaggcctacttcgaagtaacagtgacaaaattaaggtgattcaattattccaagaggcttgctcatataaaatattaaattaaagcatttccaatagtctctgctttaagtattcctagttaagtctacttttggaaatattaaatattctcactttggcacaatattccaaaattaaccacttcacctttgaaaatcttagaggtcagt

SEQ ID NO: 14890 - DNA, 528 bp, Homo sapiens
  source 1..528: mol_type = other DNA
ttcgaagtaacagtgacaaaattaaggtgattcaattattccaagaggcttgctcatataaaatattaaattaaagcatttccaatagtctctgctttaagtattcctagttaagtctacttttggaaatattaaatattctcactttggcacaatattccaaaattaaccacttcacctttgaaaatcttagaggtcagtcggggagggcgggggcagccgtggccttgggggacagtgcgaaggcggcgcggggccagcgggactgacttccggctgtgggaaggcgccgtcccgggcggccagaggcggcggcagccgcgtagaaggacggcgggatcgcagcccggcgggcggcgcgcggggcgggtgagcgggcccaggccgcccccgggccacgccggggccacggtgaggtgaggccggccctgcccccgcaccgcccccggcaggaggcgcgacgcccgggccgcgggtgcgtgcgcggccccgggcgacgcggctgggcgtgcgcggggccgcggcgga

SEQ ID NO: 14891 - DNA, 549 bp, Homo sapiens
  source 1..549: mol_type = other DNA
gattcaattattccaagaggcttgctcatataaaatattaaattaaagcatttccaatagtctctgctttaagtattcctagttaagtctacttttggaaatattaaatattctcactttggcacaatattccaaaattaaccacttcacctttgaaaatcttagaggtcagtcggggagggcgggggcagccgtggccttgggggacagtgcgaaggcggcgcggggccagcgggactgacttccggctgtgggaaggcgccgtcccgggcggccagaggcggcggcagccgcgtagaaggacggcgggatcgcagcccggcgggcggcgcgcggggcgggtgagcgggcccaggccgcccccgggccacgccggggccacggtgaggtgaggccggccctgcccccgcaccgcccccggcaggaggcgcgacgcccgggccgcgggtgcgtgcgcggccccgggcgacgcggctgggcgtgcgcggggccgcggcggaggctgggccgggcgggcggccaagaactggattcgtggcgccacaagct

SEQ ID NO: 14892 - DNA, 823 bp, Homo sapiens
  source 1..823: mol_type = other DNA
gcgggggcagccgtggccttgggggacagtgcgaaggcggcgcggggccagcgggactgacttccggctgtgggaaggcgccgtcccgggcggccagaggcggcggcagccgcgtagaaggacggcgggatcgcagcccggcgggcggcgcgcggggcgggtgagcgggcccaggccgcccccgggccacgccggggccacggtgaggtgaggccggccctgcccccgcaccgcccccggcaggaggcgcgacgcccgggccgcgggtgcgtgcgcggccccgggcgacgcggctgggcgtgcgcggggccgcggcggaggctgggccgggcgggcggccaagaactggattcgtggcgccacaagctcatcgccgaccgccgccgcccctccggccgccccgccgccggtcgccccagaccagggaggaagctggggaagtggcaattgctgctccggcccgcccttcccccaccccccggagtgtgagcgcgcgcgacctccaggcgggctcccctgctcggccgagcgcgcgccggcccctcccctccgcgcgcctccccggggctggctctcggcgggagcgcgggttcctccccctcccgctccccgcccctgctcccgctccaggcccggcgccccggcgccgccgccggcttattgtggcgactcgcctcgcggcgctgccgctgtactgggggaggcgcgaggggcgcgggcgtgctcggcccccacccgcgctgtggccgccgccgtcctcctcctgcgccacccctcccccacgcgcggggcgcgcccccgggtctgcgtgcacgcgcggcgg

SEQ ID NO: 14893 - DNA, 609 bp, Homo sapiens
  source 1..609: mol_type = other DNA
ggccgctgctgctccccggcctggactagcagctggggccgcgggtgccggggtgcgtgcgtctgtacagccaggacttggcgggtcgagtcacaccgccccgtgcccgctgacggcgcctcggaggttccacctttgaaactgtaggcggcttgcagccgcttgtgcgcagggtgcgtgcgcgcgcggggcctgcccattttcctcctcgcagcagtcagttgggagctggagggcgaaacggcagaggagccgagccccctccgcccaaggcgccctccctccgtccgcgcacaggcgccgtcgcttggaggagcaaggtgcctcccagcccgcaggggcgccgcgcgcaagcccgcgggctcttcggtggctctgccccgggactgcacctggaggcggccccggacggggatggtcagcggctgctgccgtctggctcgcgagcgggacgctgtgagggcaccatggcgctgactcccgggtgggggtcctcggcggggccggtccggccggagctctggctgctgctgtgggcagccgcgtggcgcctgggtgcctcggcgtgccccgccctctgcacctgcaccggaaccacggtggactgcc

SEQ ID NO: 14894 - DNA, 357 bp, Homo sapiens
  source 1..357: mol_type = other DNA
tggtacaaatacgccctgctgagcaagtgttccaatcagagccattctcatcctgggcatggccgctgctgctccccggcctggactagcagctggggccgcgggtgccggggtgcgtgcgtctgtacagccaggacttggcgggtcgagtcacaccgccccgtgcccgctgacggcgcctcggaggttccacctttgaaactgtaggcggcttgcagccgcttgtgcgcagggtgcgtgcgcgcgcggggcctgcccattttcctcctcgcagcagtcagttgggagctggagggcgaaacggcagaggagccgagccccctccgcccaaggcgccctccctccgtccgcgcacag

SEQ ID NO: 14895 - DNA, 301 bp, Homo sapiens
  source 1..301: mol_type = other DNA
aatattcattttcatctgtttccacctgtcagaaatggaggatggtacaaatacgccctgctgagcaagtgttccaatcagagccattctcatcctgggcatggccgctgctgctccccggcctggactagcagctggggccgcgggtgccggggtgcgtgcgtctgtacagccaggacttggcgggtcgagtcacaccgccccgtgcccgctgacggcgcctcggaggttccacctttgaaactgtaggcggcttgcagccgcttgtgcgcagggtgcgtgcgcgcgcggggcctgccca

SEQ ID NO: 14896 - DNA, 385 bp, Homo sapiens
  source 1..385: mol_type = other DNA
gaggagaattctctccccacctcatgccttacggtgacgaaggtccctacccagccgggtgtgaggcctgggtctgacggggctggcctgtggggttctctcccaagcaggccgcccagcaatattcattttcatctgtttccacctgtcagaaatggaggatggtacaaatacgccctgctgagcaagtgttccaatcagagccattctcatcctgggcatggccgctgctgctccccggcctggactagcagctggggccgcgggtgccggggtgcgtgcgtctgtacagccaggacttggcgggtcgagtcacaccgccccgtgcccgctgacggcgcctcggaggttccacctttgaaactgtaggcggcttgcagccgct

SEQ ID NO: 14897 - DNA, 247 bp, Homo sapiens
  source 1..247: mol_type = other DNA
tttacccagaatgtccttccagagtcattcaggaaggacaaggggtgacacctgggtgctccggaggtaattctctcctcctgagtaggaacgtttctgttacagcagcctgtgttagcaagtgactgaaggcttcaaacggaagacaggagatctaaacctagatactagcattttgttcctaagatgcacaagcgttttacaccagtggtgattaactcaactcctcccctggccatgtctgggg

SEQ ID NO: 14898 - DNA, 236 bp, Homo sapiens
  source 1..236: mol_type = other DNA
ccaaaatccccacatgtcatgagaggaaagtctcatgagatctgatggttttataaagggcagttaaggcctccccataaattacccagtcttgggtatttcttcacagcagtatgaaaatggacgctgaattaattactgttttatgtacctagttaaaggaagctgactataaggaaaaatgatgtcccgaaagattttcttgagaaactccgacatgagaaacctgagatttt

SEQ ID NO: 14899 - DNA, 354 bp, Homo sapiens
  source 1..354: mol_type = other DNA
agtagggaaagatactatttttaaatttgctttattctgataacttgtaaagttgactaattttctattgagtcaaattttattattacttttaaagttttagatttatttatctatttatttatttatttattatgaatggatagtacgttcaaatgaatataaaatccagacttcatttttaagacatttagtatgtaatgtcatttgttatacagaaaaatttaatgtagttaaatttatgattctttgttaatttattgcttttacatttgtaactgtttcatctagcatagcttaagggcaaatacagttaattaactggctcagagtcaagtactgttctttgtcaca

SEQ ID NO: 14900 - DNA, 383 bp, Homo sapiens
  source 1..383: mol_type = other DNA
gctgcaatattgtactgtgctccagcatgaaggctttgaactatacgtttaaaagcaagtacttctactctgggtcaagaagagtcttgcattaaattacattaaattaaatgaattaatttatggctgggtgccatgcctgtaatcccacatggtgaaaccctgagaaaaaaaaaattaaaaaaattgtaaaaaaaaattatttattttcaacttttattttaaatttagggaaagtgatgagtcactttcaaagttgacagttctataattccctgatttacatatcaggacaaaatcggggctccctccctctttttccgccagggctgggaacgaccaatgacggttagtcatttgaatagaccaataatatattaaac

SEQ ID NO: 14901 - DNA, 343 bp, Homo sapiens
  source 1..343: mol_type = other DNA
ggctggagtgcaatggcgtgatctcagctcaccgcaaccgtcaggctggtctcgaacatcgtgagggattacatatatacttttatatgaaggtatatgactttcatataaatgtgtttctatgcttaattttgaaaatagattttcaaatgtaatataaatgtactttttgttgttgtttaactgcaaaagaactccagttttttgaggcgtgatctcggtcccgagtagttgggattacttcaccctggtgatcaggctggtctcaaatataaggcttaacctggtcctcttggagctcctccccatccgaagccaggaggaggtgttgactgttttacca

SEQ ID NO: 14902 - DNA, 411 bp, Homo sapiens
  source 1..411: mol_type = other DNA
caatggcgcgagagacggggttaccacgttgataaggctggtctccacatgctgggattacaggccccaagggttgcggggcgaccgccctgggtcctccccctggcactgttaagagagatgctgcccaaggtgccggccctctccgagagggcgcagacgccagccaggcggcctccgaggccggacacccggccctcacctcgtagcgcctgcccgccgcgcttcgcctcctcgtggcccgccgggctcaggtcggcgtcgtaccagccgctgaattccggagtagcagcccgccccgtcggccgcgcctgcgcgctcgcaccgctcagtccggctccgctgtgcgcatgcgctgcatcctggcgctgcggcccccgacaggagggggcgcgcttcggcacggcagag

SEQ ID NO: 14903 - DNA, 415 bp, Homo sapiens
  source 1..415: mol_type = other DNA
ccgagatcgcaccactgcactccaaaaaattgtaataataaattgctgatagtgactagaactcgccccttcctgaaatatttgaggaaccagcagggtcacgggcagtttccttacgtgtaagagtaatagtaaaaactactatttaccgagcacttccaggtacccggtatttatatctggccgagctgctccggagcagcgcggcagccagcgaattggggccgcccccacaacccgccgcccgccgcccgccgccgtgcgctccgtgactgcggcgaccgacgcgggactggagagggaggacgcatgcgctctgccgtgccgaagcgcgccccctcctgtcgggggccgcagcgccaggatgcagcgcatgcgcacagcggagccggactgagcggtgcgagcgcgcagg

SEQ ID NO: 14904 - DNA, 382 bp, Homo sapiens
  source 1..382: mol_type = other DNA
ggtggcgcgcgcctgtaagtcccagctgcgcgggaggcttgcagtgaacagagatcgctccactgcactccagcctgttttttttggaaatctgaatctgaggttccatatctgtgaaacagctcgggctgaggagggcacggccccgcagggcggggcgggccccagggcagtgccctaccggggagcaagggccgaggcttcgcccttacctcctccgactcggcgccccggccgggcccggctcacaccatggcccgccgcccgcagcgccaggcagcggacccggacccgccgccagcccatccaaccacacgcgcaggcgccagcgtggacctctgaagttccgcccccggatttgtcccggggtaacctgggaaat

SEQ ID NO: 14905 - DNA, 304 bp, Homo sapiens
  source 1..304: mol_type = other DNA
agcgttccagatagatggcatgttacaaaggctctgtagcactagtatgttataaaaaatttttaaagggcaagcagagactgtgattataacttttaaacacagaaaagactcatacagtatgcaactcactgctcactaaagacgcgtccgcagtgcccatgcctaaggactaggggagatggcatgccgcttcctttgcgggtggtgccgctgcccgggctctgcaggcccccagaagctgtaggccgttgatttcccaggttaccccgggacaaatccgggggcggaacttcagaggtcc

SEQ ID NO: 14906 - DNA, 605 bp, Homo sapiens
  source 1..605: mol_type = other DNA
taaaattctttatacttggctggatattcgaaaattttcataataaaatatgagggaaaatgacattggacactgtacttgtaaattgtaaacactgataacacactacatttcataaaattgtaagatgttaagtttggtggcagcaccaggtatttgctcctatactataagttcagatctaacctaatttgtatttatattcctattgctttgcatcatgtttggggaataatatgtattcaacaatagtggcatgattgaattaaagtggaatactgctaacgaacaaagtattatatttctagcagattcactattcttttcttacatattctaaaggttaaaagagacatacgaaatttccaaagtttttttaaaaaaactactcattagataattttatattgttacttaaacccaagatctgaaggcctcctaacattcaataactttttagtagttttttttttttcctagaagagcaaagtctcagaactccttattctaattttagataagctgtctgaactaagagatctcgcgcggggccatctgccactcccaggatgccacgcgacgggagcggacgctgcgaggatgca

SEQ ID NO: 14907 - DNA, 737 bp, Homo sapiens
  source 1..737: mol_type = other DNA
gtccatcggtaagcccaggactcgggcgaggagggggacaactggcgggatgcccgaggccctgctccctgcgggggtgtcccggggctgccggcctctcccggcgcttcctcagccagtccccatgcaccggaggcggcggggtggtcggctgctcagcggacggcggcgtcccgggtcaatggctccggccgcccggcatcgggcgctccccgatctccccccgggggcgcgctcagccccagcgatggctccgccaaaactttgcgggccagactccccagcacggtcccaggtggccgggccaggggggcccgcgacggtgcccggccggagaccagctccgctggaggggcggagagagggggcgggcaccgccgcagctactcccggctcgctcggggcaccaggcaggggccggccccctggagcctgtcactcaccccggccttccgccggctcgcggtgcccgcgccgccgccaccacccgccccaggtgcgcatgtgaccgacagcaccgccccctagggcccacccagccaggtgcccgccccgcagcccgtctcccggggagccgggctgggaattatcgcctccggctgcgtgcccagcagccccgcccctccctggaactgcctaggcagaagccggcaggcacgtgaccccggcgccccgcccccttgcgcttccccggagattggctcgggaggcgcatgcgcggagagcccgtctcgagc

SEQ ID NO: 14908 - DNA, 563 bp, Homo sapiens
  source 1..563: mol_type = other DNA
gggtccgagtaaaatgtaatgattccctatagaggccgctccctcctgttggcccccatgcggaaggcgcgcggcgccgtctgccgtacctgcagccacctggtcagcggggccctcttgctgacccacgacgaagtcgtgcacgaggccccatagggcacccataggcgccgccgcctccacagccgcggcagcggccataacgcgctcgagacgggctctccgcgcatgcgcctcccgagccaatctccggggaagcgcaagggggcggggcgccggggtcacgtgcctgccggcttctgcctaggcagttccagggaggggcggggctgctgggcacgcagccggaggcgataattcccagcccggctccccgggagacgggctgcggggcgggcacctggctgggtgggccctagggggcggtgctgtcggtcacatgcgcacctggggcgggtggtggcggcggcgcgggcaccgcgagccggcggaaggccggggtgagtgacaggctccagggggccggcccctgcctggtgccccgagcgagccgggagtagctg

SEQ ID NO: 14909 - DNA, 547 bp, Homo sapiens
  source 1..547: mol_type = other DNA
aggaaggtggtctgctcctgcagcaagaggggctaacttccggcccagcaaaatctctgacagatttagatcgtgtaaccagaaaggaaaaggaaccggttcctcatgcttcctaggggaatgcatgcatatctgaagaggtgagccttacagaagcacagggctgggtacctgggtcacagtgactcagagctccagcatgcgagttccaggtgtggaactgagcaagtacagatctgcttttcctggccagggaagtctggcactgtctgggcctgacagggaaaccctgggagagtagctgctgttcctaccctttcttgaagcaagactctgtaagccctgcagaggtcccctgttcatgactaaaagtcacccttacggggaagcatgtgggacccccctggcctggacaagtagagtgtgaccctcctcacagccagcagggcctgtctgcaggacagcctgggagtacagaactgtcctggggcaggtggcacatctgggctggagcatgcagccagcagttcccttttgcaactcagtt

SEQ ID NO: 14910 - DNA, 578 bp, Homo sapiens
  source 1..578: mol_type = other DNA
acctgggtcacagtgactcagagctccagcatgcgagttccaggtgtggaactgagcaagtacagatctgcttttcctggccagggaagtctggcactgtctgggcctgacagggaaaccctgggagagtagctgctgttcctaccctttcttgaagcaagactctgtaagccctgcagaggtcccctgttcatgactaaaagtcacccttacggggaagcatgtgggacccccctggcctggacaagtagagtgtgaccctcctcacagccagcagggcctgtctgcaggacagcctgggagtacagaactgtcctggggcaggtggcacatctgggctggagcatgcagccagcagttcccttttgcaactcagttgccttggctaaggcccaaccagtcccaagtgctcaggacagaggctggacgggctccttcctgggccaggagttgggggggcaactggctctgctccctggccctggctccccctgctccctggggctgcccgaggtgaaggtgacagcatggcaaaggcgcccagctgggcaggggtgggtgctctggcctataaagcc

SEQ ID NO: 14911 - DNA, 438 bp, Homo sapiens
  source 1..438: mol_type = other DNA
tgtgacacttcacacaatgccagttgcccccatttgagaagcactggtggtgtcaatgagggtaccttctgtgctccaggcaggaaagaccccgacggacctggtgcagctctggcaggctgatacccggcacgccctggagcatcctgagccgggggctgagcatcctcagcctgtgctctgtgtgcagccggagggtctggctcccggagctaactgagggctttctgcatgatccaggaaactaccacaataaaaaagctgtttttgctaattgcgtgtgtctgaaatctttgggaaactgggagccggttggccctctgagccatccagggccaggcttggcccctgcatggatcaggcttgtcacgtggctgccttggcaggagatggacagcctgtcacaggcagcttcttgcccagcgggcaggacctgct

SEQ ID NO: 14912 - DNA, 439 bp, Homo sapiens
  source 1..439: mol_type = other DNA
ctctgtgtgcagccggagggtctggctcccggagctaactgagggctttctgcatgatccaggaaactaccacaataaaaaagctgtttttgctaattgcgtgtgtctgaaatctttgggaaactgggagccggttggccctctgagccatccagggccaggcttggcccctgcatggatcaggcttgtcacgtggctgccttggcaggagatggacagcctgtcacaggcagcttcttgcccagcgggcaggacctgctctttagtattgggatcccagaaaccagtcctatatctggccagactgggttgtggcatctctctagctgctacccagaaggaacagggccccctggggcctataggccttgctgggaacacccagctcaggcctgccccagtggccataatagggggttagaaagagttcaaactaagt

SEQ ID NO: 14913 - DNA, 178 bp, Homo sapiens
  source 1..178: mol_type = other DNA
acagcatcagggccatgctgctgtagcgcgctagccttagaagggtttctgagatcacgcgttcagggaaggaaccgtccttgagttcatctgctccctgcccctcacagatcagccctgagcagtgcttgagccaagtgacatagaaatctgtatctaatgtctgcgccctggccaa

SEQ ID NO: 14914 - DNA, 339 bp, Homo sapiens
  source 1..339: mol_type = other DNA
ctaaaatgtataaaatcaagtggtgtcccgactattttggacacacattcttaggaccttctaaggctgtgtcacgggcatgtccttaacattggcaataaattgattgagacctgtctcagactcctgagtagctgtgactacaggcacccaccacttgggctcaagcctcccgcactcctgagctcaagccgcggccgtctatattttaactgccttaaactccgcggcgggggcgttgcagaggtgggaccacccctccccgcacaaagatggcgtggagccgggctgggccaatgcggagtggcgttgctcccggttgcctaggtaacagccaat

SEQ ID NO: 14915 - DNA, 313 bp, Homo sapiens
  source 1..313: mol_type = other DNA
acacgtgtaatcctatcagctacttagggctgacttgagcctgggaggtcaaggctgcagtaagccgtgatccagctactgcactccagactgggtgacagagggagaccctgtctttaaactcatgtatattttacatgtattgattgatgtctctaaaatgtataaaatcaagtggtgtcccgactattttggacacacattcttaggaccttctaaggctgtgtcacgggcatgtccttaacattggcaataaattgattgagacctgtctcagactcctgagtagctgtgactacaggcacccaccact

SEQ ID NO: 14916 - DNA, 539 bp, Homo sapiens
  source 1..539: mol_type = other DNA
taataataatattttaaaaagaaatcttcagggcttcctaggaaaacctggaggcaattgtttcaagttcctgcgaacttgaagtgtaacctgacattaatacattggaagtatgtacgaatttgggatacaaagtacaatgtatagccaatctataacttgttattttaatgtaaattcttggtaaacaagttaggaactgcctcttttccttttttttttttggagactgatcactctgtctcaaaaaaaaaaaaaaaaaacgtttcatcgaggtagagcagcagctttgtttctttgcttcaacatagtacgtgctcaataaatgaatgagtgccgcctccaatctcacagccggttcagagtaggcactcaatgagtgactgacaggatagtgcagggggcgtgcctgacccaaggttgggtcctggagcatgcgattggctactgttcgcgcgcgcggggccaaggaggcgtcgcgacctggttggccggccggggcctggggtcgcggccgcgagcgcagtggtgtggagcgc

SEQ ID NO: 14917 - DNA, 276 bp, Homo sapiens
  source 1..276: mol_type = other DNA
ctggagtacggtgacatgatctcagctcactgcaaccttcccaagcagctgggattacaggtgatacagaggagtgcagtggcacgacgttgggactacagggccagttttgtatctttactaactggagggcaaaaaaataaaggatttgttttcatttgtattttttaaatgattcttttgtaaatggcctatttgcatgattttccattggtattttaaaaaattgattttcctttcagaggcagatctggaatgctgaggcctctagatcga

SEQ ID NO: 14918 - DNA, 508 bp, Homo sapiens
  source 1..508: mol_type = other DNA
acctcccagaggaagcttaggatcacaactgtaatcacatgcataggtcactaatgaacatttccgaatgcatacaaactttaaaatacggtcttgtttaggtaaggctttgaatccctcaaagccggagccaaacggtgggcggcagagtctgaggatctgcagagggccacgcgctgcaaggcagtcagtgccgcgcgcgctggcctcgggcccaggagaaggggcatccgtcacgtgtacccggcagggccagctttcgccgcaccctggggcaggaatgcagccccgcccagctcccgcgccagcaaaaccgcgctggccctggggactgacgtcaagggggcgcctcgggcgccgcgcgggggcggagagggcggtgggcagggcccgggcagacacgccccctcaccgccgctccgccgccgattaggtgcttcgcactccgctttcgaggccagcggaggcggggggcggggatggacacgccccctccctgtctcccacc

SEQ ID NO: 14919 - DNA, 371 bp, Homo sapiens
  source 1..371: mol_type = other DNA
ctaagtcctgttccagctgagatgacacataagcttcaaattccagctcccatttgcttcttagctgtgactctaaagactcagtccggttcagtgcttggctcctctgtacctgagcgctaagtcactgcctgcacaggaccttgttgggcatctcatacaggatacggtgtctttccggggctaagaggatgaagacgtaaattcttcatttaagcctcccctgcggcaaggcagggcaacgagctgcagcttccctcaaggctttgtgaacggcggccggccaccagcctggagcgcgcgggaaagacgcgcaggcgcactgctggcaagggtgcttgcctgtgctgacccggagcgggatgacgtca

SEQ ID NO: 14920 - DNA, 506 bp, Homo sapiens
  source 1..506: mol_type = other DNA
cttggtcattaggcctacagactcagaatccaggcctcctggttgtttctggtcaaatcccgggacaataatagtacctacccaccatctagccttattgtgagaattagctgagggagttttgtgctcagcacccactaagtattggctatcattagcaatagctgataagcttggaacgtaccttgcaccgcaccttgcaccgcaccttgcaccttgcaccgtccctggcaggtagtaagagctcactaaatagaagcagccagcatggggcctggcaccaagtgtggggtggcacgagcctcccaccaaaacgctgggcgaggccagggctgcggcaggggagccgagccgggagaggggcgcaagacctggcgctgggcgggacgctcgggcagggtgcgggaggggctgagggccgcccccactgcctccccgccttggagctggggccaggcggccggagattggctggggcgcacggcgaggcccgggctggagccccg

SEQ ID NO: 14921 - DNA, 315 bp, Homo sapiens
  source 1..315: mol_type = other DNA
gtcagtccatgcctcacctacccagggccaggcattgagcacctttgggctagaaacagctgcctggaatcccagcggttgcagtgaactgagatcatgccacaggcccttcccagcgcagtgaccgccccggtagccactgtgggctccaccctgggattggaacctgggccaaacttcccagcatctccactggcccagcccctgagggagcctggagggttgtggtgttgtctcaccccacccccaccccaccctgccaggcagccttgattaatcccagctgcattggttagaaattaacgggggtggcag

SEQ ID NO: 14922 - DNA, 521 bp, Homo sapiens
  source 1..521: mol_type = other DNA
actggcttcaattctggagctgcaggcctcacctgcgggcctgcgagcggctcgggagcggtcagccttgcaggctgaagcgtcttgccccggaaaaattcctgccccactgtccttcaggctggatgtcccgggggccacggaagcgagcgcagagctccggggctctcaggggcctcgcgcggggcggtagccgagcctgtggcccgggcggggctcctctccggcggcgccggagtctgggggccgcggcttccccctcccggccagcggcggctcctggcccctcctcccccggccgcccccatccccgccgccgccgccgccaaagctaaacccggccgttgcctgcaggagccgcggcagcgggcgatcgggccgtgaggagcctcgggcgcggcctcgcctcccgggcccggcgcctgcctcagcacagcggacagcgccgcgccccttgcctggacccagccgcccgcccgcccccggcccacctgagcccgggcccgcggcgcccgcatcag

SEQ ID NO: 14923 - DNA, 761 bp, Homo sapiens
  source 1..761: mol_type = other DNA
ccatccccccaccaccaccaaggcagcgggttgggggcgaggagcaggagcgggtgggccaggcccgactcggccactgctggggtaggggtggggtagaagcggcgctgcccgcagccgcctgggcctctgcgcgcctgatctccgagctgcgctcgcccgctccccgcctgcgggggccgtcgcggagccctgctctccatactgagcagtccccgggaggtgctcggacacgtccccaggctggctcagcgcggctcgctcggccgctttggcccggcccggcgacgccagatcggggggaaatgggaaggcagtgcagccgctcccgcctccaccctcggtcctgcgcgcaggggtggccgcggggtcctggggctcgccgccctcccctccccctgctgcctcccgagggaccctcgcttccctccggcctggggcccccagcgcccagccaggcgccctcctcgccaggcctcgctgccgcctgaaggttacgcgacgcagtggcggggcgcggggggcgcccgccctcgccgccgccttcgccgccgcccaccccagtggccgccgcgccgcgccgggccagcctggctgccggctgctgccaccgcacagcgcggggaggcgctccctccccacgcccggctctccgggctctcggggccgcgattggccgcgccggcgccccccaccccgggcccccggctccagctgccgcgccattggctgcgggcctccgccagcctttacataagacc

SEQ ID NO: 14924 - DNA, 536 bp, Homo sapiens
  source 1..536: mol_type = other DNA
ttcagagcgcctactccatccccccaccaccaccaaggcagcgggttgggggcgaggagcaggagcgggtgggccaggcccgactcggccactgctggggtaggggtggggtagaagcggcgctgcccgcagccgcctgggcctctgcgcgcctgatctccgagctgcgctcgcccgctccccgcctgcgggggccgtcgcggagccctgctctccatactgagcagtccccgggaggtgctcggacacgtccccaggctggctcagcgcggctcgctcggccgctttggcccggcccggcgacgccagatcggggggaaatgggaaggcagtgcagccgctcccgcctccaccctcggtcctgcgcgcaggggtggccgcggggtcctggggctcgccgccctcccctccccctgctgcctcccgagggaccctcgcttccctccggcctggggcccccagcgcccagccaggcgccctcctcgccaggcctcgctgccgcctgaaggttacgcgacgcagtggcggggcgcggg

SEQ ID NO: 14925 - DNA, 524 bp, Homo sapiens
  source 1..524: mol_type = other DNA
ctggaaccctctgcccattttacagatggggcggcacctaagggccaggactgcatcattcagctctgtgaaggggtctcccattcgctcagtgttcccagctgcacaatgggcagcgcagagttctgcaggagagcaccgctgaccgagctcgtgagattcggcccctgtgacagccgggcgctcccgtgcgaagggtgctgtgccgggggccctggcacccaccaggactcacagactgtgggagagggactcccgaggccgccgcggccctccctgcaaaacagccgcgggcccagcgccgccctttcccgagagctccgctcccccccccgccccccgggacttcccggccccgccggctgcggctgggcgcccccgccacctggcctgtgtcccgacggggggcgccgcgcggaaggccgggcggggcgcccgcggactccaggcccgcccggggcggggcctgcggggcctcctccgcggccagctcggggctggggggccgcgggcgggaggcgagg

SEQ ID NO: 14926 - DNA, 419 bp, Homo sapiens
  source 1..419: mol_type = other DNA
gaggggtcctcggaacccccgcaggtttccgtcacactgcgatcagcagtgaggggttttttcctcctaggggaacactccttggggattcttggaaaatgggcaaggtgcccagtgctcctcagcgacagacacagctgcctctgcggtgtctgaaggatggccgccctgggcgcctcctgtgggcgtagaggcatcaccactctgcactggcagactcagcatggagttggagcagagtctgacacgacatcccaggcgtttcagttctgactgagaaggtagaaggggaggagagggccctttcgagctccactctgcctgcatcctggaggtgagcccagcacagccccagggcagcaggaggctggcctgtggggggcctggagggggactgcagctcctcctcttcctgcttc

SEQ ID NO: 14927 - DNA, 384 bp, Homo sapiens
  source 1..384: mol_type = other DNA
aaatggaaatcatatccatttgatggaattcattcgaccactgaaagcacgatctcaaccaacccataccttgctgggctgggctcaaagctcccaggtggcacccaggcaggtacgattttttaaaataaatattgcaaacataggttctggcactctgggggctctgtgcgctatgtcacctccccaaaggtcagggagagccccagaacttcagttcattaggcaaagcctgaggtccaggaaacctgggttctgagcctggttcggacccggcatgggcaaggcctggcaggggcggggctcgaacccgcggaaggcgacggcggctccggcccctcccggggcgggcggtcacgtgcgcgatcacgcggtcctacccgg

SEQ ID NO: 14928 - DNA, 237 bp, Homo sapiens
  source 1..237: mol_type = other DNA
cctctatcccagcgcgtcccgggttggcgctggggctttcgggtcggagtcggagcttgaaccgccctccagagcctctcactgtacccagacggtacaacggcatggtttgggggttaaattaggagggtacttacctttaaaaagttaaaaaatgtctgcagtagaaatctcttaaagctcttgtgctttgtgccttccctgaagccatgccgcccccccgcgtgcctagccccg

SEQ ID NO: 14929 - DNA, 395 bp, Homo sapiens
  source 1..395: mol_type = other DNA
ggcgtgatggcgggcgcctgtaatcccagctactcagcgcgccattgcacgttcaaaataaataaattaattaaaagatgtaaacgtaatcccagcaccctgggttggccaacatggtgagaccccatctcgtgccactataaataaataaataaataaatctcatataagtgtgtgtgtgtgtacaaatttatacataaatacttttaacacaaatggtagcatattatacttggagagtatcacatatacttgatggacattcggatcttaactaagaattgaacttaaataatccagaaatgtttacaataatgaggctaaaagttttcacatattcaagacttgactccagaatattcttttgaaatttcccggggcagggaattactgcc

SEQ ID NO: 14930 - DNA, 479 bp, Homo sapiens
  source 1..479: mol_type = other DNA
ttggccaacatggtgagaccccatctcgtgccactataaataaataaataaataaatctcatataagtgtgtgtgtgtgtacaaatttatacataaatacttttaacacaaatggtagcatattatacttggagagtatcacatatacttgatggacattcggatcttaactaagaattgaacttaaataatccagaaatgtttacaataatgaggctaaaagttttcacatattcaagacttgactccagaatattcttttgaaatttcccggggcagggaattactgccaggccatgctgcaaacccagacttttcaggctgcatctcagatataccgaagtgtgtacccgctacgcacagtgcgggcctccagcggggacctcctgcccaggtggagtctgaatgcccaccgccaccagcccacgcgcgcagtgggcgtacacgtggtgacctgcctgcggctgggttcccagctc

SEQ ID NO: 14931 - DNA, 466 bp, Homo sapiens
  source 1..466: mol_type = other DNA
ctgacgacagcaagatctggtccggtgcgcgcgggaggaagctgggaagggacgtcgcgcccagatcccgaggtccttgaggaccaggccctctctgcaaaggaattcgtgcgcacccctctctgttggaaggaccttccctgccagagaccaaggctggcaggacaggtagtcgcccgcgcaggctccggagctgcacgtcctggacgaacactgtatttggctgccagcccgggcccgccaggccgggcctggcaccgccaacacctgctcggcgggaacaggaagacctgtgttcggccctcgaaggtcgaaaggtggccgacaccctcgctcggctcctcccctcagccgggagatcgcccacgcctcagccggaggaaattgcatcgattggttaatcgcgttgccaagctttggacgcggctcgaccattggaggccgcgggcccgcccccgccggctag

SEQ ID NO: 14932 - DNA, 543 bp, Homo sapiens
  source 1..543: mol_type = other DNA
ttcggctcttggcctggcgcagagcccagtgacagccggggcccggggctcagtgccgggcgctggggcctgaggagcaccgagtccggccagagggcccaatactccagacccgaccagagtctagcgggccgccgcggtcccccctggaggtgaggcggttcccagcccgcatgtcgcaacggcttcccggacaggctgcgggtcgcgccagccagggatgaccggcccaggccggccccgcctcacgcccgcgacgagatcccgcgggaacacggctctccggggccagggccgcccgctctccagccacgcgtctcttgaggagcgcacgggagcgcgggtcgtaacggcgcccgtcagcagttgacgttgaaggcctgtcgccgccccgcccccgacgcgatcccgcgcacagggaccgcagctctgcaggcgctagtgaggggcccgaagtcggcccctagagtccctgggcgcgtcgctcgactgagcctatcaaagttcagccttaaggggcgtgtccgcggggccaagcgggag

SEQ ID NO: 14933 - DNA, 506 bp, Homo sapiens
  source 1..506: mol_type = other DNA
gaatctgaatcaatgttacgggctagaaactattatttatcagccctcgaaacggagggaaagtgtgcagccttacctagccatggggcttcctctggttcctcaggcccaggggaccctacccgggcatcctgggagcggggcgttctcgtgggccagctctgtcctctaggaaccggtcgtccccaggtggcggggtgtgggtcccgcttcctctccccgtccacgggatcaagcggcccgccggttccttcggcacctctcggttcagtcccgagctgctccccgcggccccttgcccagccggaaggagggcccggccggcggcggcgccacgtccccagaggggccggctctccacgagccgaaccgggggcgaaccagctcggtcagcagcacgtccgtccgccagggtggccaatcccctagagcgctcggcctctgatgcccgccccgggactttgagccgcgcccaatcggaaaggcgtcgtaccgaggctccgcct

SEQ ID NO: 14934 - DNA, 370 bp, Homo sapiens
  source 1..370: mol_type = other DNA
gaaacacacacacacccacgcgcgcgcgtcgtttcctttgtgttactgtaaggtcaaggaagcagacattcaatgaatgaatgaatggacataagcacagggatgcgcttcggtcgcgacgcgccccagggagggaagcgggcacagggccgcccagcgccactcacctgtgagctctccgcgggccctgcaggcggagcctcggtacgacgcctttccgattgggcgcggctcaaagtcccggggcgggcatcagaggccgagcgctctaggggattggccaccctggcggacggacgtgctgctgaccgagctggttcgcccccggttcggctcgtggagagccggcccctctggggacgtggcgccg

SEQ ID NO: 14935 - DNA, 530 bp, Homo sapiens
  source 1..530: mol_type = other DNA
aaaaaaaaatttgttttaatttctaatacagtcaaaatagatagatgtaatccacataaagaaaaaatctttgaggattcttgataacttttaggaaggttcctcttcacggaggaagagggacttgccaaattctctggcacctgccatgccatgccttggagcagccacaagctcggccacttggtagctgcgtgactttggggaccaagccccgtccccgccgtggcagctacaggtaactgcaggttcgccgttatgaggggaccccgggactcgaacctttacgactcccgccggcccgccccggggagccttcggccgaccgtcccctccccccggccttcccggacggtatccgcgccttggaatttgggctccggcgcgcaccagctaagaagcgcgtcaacagctgcgcgcgcccgtgcgcgcgtccccgacacctacgccccagcagcccccgcgaaagcggagtcgcgctccggtccccagagaaggcggggctcccgctgcccgacccggaagtgctc

SEQ ID NO: 14936 - DNA, 563 bp, Homo sapiens
  source 1..563: mol_type = other DNA
gttcctttatataatgagaccatgataaggattaatgaataaactgacttcctccagggcaggagtagttcctaatatataataaccactcaataattactagttaagcaaaattaactgagtcacctttagaaaagtaactttaagcctcgtaggatgcagtaatacttcctcatctgacgaactttttaagcaaaaataaactatatgggtaaaaattactcagcttttaccatgtgctaaaggcctgatgtatattaaagaatgtaatcctcataacaaaccttaaagtaggtattgttatccccattttacagataaggaaactgaagaacagaaatgttccagatctgaacctaggggctctgatctgaacgactcggagtccgctgcagtgcggtacctgtgctctaggcgctgccctaggagccaggagcggcagatactgcctccccttcaaggccctcaagagcacttccgggtcgggcagcgggagccccgccttctctggggaccggagcgcgactccgctttcgcgggggctgctggggcgtaggtgtcgg

SEQ ID NO: 14937 - DNA, 705 bp, Homo sapiens
  source 1..705: mol_type = other DNA
gaaggatgagattaatttttactttctcccaaatagaaaaactttggatgggggcatgattaatcaatgaatattgtgactactacataagtattgtagttgtttttgtagttgaaaaacatttctaaaatggttcttgtcctgtcttaaataaacaggctctttgaaataggtgaaccttgccttgtaaaggcattgctgaacttagaccagtcaaattctgcagttgagcttcaaatgagtcagatatgcacatgtgcccattcgcctatgatttcctgtaaagttaatatggtgtaaggatggaagagtcagtcatttttctccctcctatttcagttattttgaaattatattaccattaagaaattgtgagtattatatggggttttttaaatacttaagaagactcttacaatttaatagtagttgaatatttctgtttataaattgggaaaaacacaatgtaatcccagcgctttgggaggccaaggcaggttcgagaccagtctggccaacatggtgacataaaatcaagtatactgtccagtggattcagctgctggatgtttcaagtaattaattgatgaaaattatggaatatactagtccagcatacttgacctacccttgtatcatgaaatagtctataaaatgcccatttaataacataattatctgttcctttattatttctgttacaga

SEQ ID NO: 14938 - DNA, 389 bp, Homo sapiens
  source 1..389: mol_type = other DNA
tcatgatatcatgaaaaaagcatgttcttaaagcaatttaagtgctgcaatcccagccctttgaccaagccgtccctacagaaaacatttttttaattagctgggaacccatgaggtcaaggctgcaatgaatcatgatgactatgttttatcatgatatcatatttacaatgcctgggcaaatagaacttttgaaagcctgtattatgtatataacatataggctcacactggataagctattttataacctgacttcttcaaagaaagtttacatcatgtttaaaccatgttttagattctatatttttaattaaaaatctaaggaagaaggatatttcacatttctataaactctaagatcttgcagctatggccactcctacaga

SEQ ID NO: 14939 - DNA, 407 bp, Homo sapiens
  source 1..407: mol_type = other DNA
tgcaatcccagccctttgaccaagccgtccctacagaaaacatttttttaattagctgggaacccatgaggtcaaggctgcaatgaatcatgatgactatgttttatcatgatatcatatttacaatgcctgggcaaatagaacttttgaaagcctgtattatgtatataacatataggctcacactggataagctattttataacctgacttcttcaaagaaagtttacatcatgtttaaaccatgttttagattctatatttttaattaaaaatctaaggaagaaggatatttcacatttctataaactctaagatcttgcagctatggccactcctacagaaatgtaacatgcatctaggcaaggttaacgattaaatggttgggatgaaaggtcatcctttac

SEQ ID NO: 14940 - DNA, 214 bp, Homo sapiens
  source 1..214: mol_type = other DNA
atccacccatctcggcctcccagggtgctgggattacaggcctcccagcctatatgtttatatagaaatatgtatgggtttttccattttcttacaaaattgtgcattttcttaaaaaattgtggcatattagcgggactcccagttcctgtgctcctcaaaagggcattcccatcttagattcaaactccagaggtggaatttcgagggtgcg

SEQ ID NO: 14941 - DNA, 374 bp, Homo sapiens
  source 1..374: mol_type = other DNA
acaatgtcaatgtacttaatgccactgaactgtacacttaaaaaggattaaaatggtaaatttcatgtgatatatatttaaccacaagtttttaaaaagcagcaacatagccaagctgtgtaacttcgtggtcttacattctcaaagatgtcctgagagactttcctcagaaaagcagccggggctgcacgtaggactgcgtgaggccgaggcccgacgagccgtgtcggcgcgctgcggcgggggcgggcccccgtgcctcagtttccccggtggccgttctgggagcgacgcccctctgacgtcgcgaggcgagcagggccgggccggccgccagggggcgcgagcgcggggcgggcgccggagaggtgggc

SEQ ID NO: 14942 - DNA, 481 bp, Homo sapiens
  source 1..481: mol_type = other DNA
acaatgtcaatgtacttaatgccactgaactgtacacttaaaaaggattaaaatggtaaatttcatgtgatatatatttaaccacaagtttttaaaaagcagcaacatagccaagctgtgtaacttcgtggtcttacattctcaaagatgtcctgagagactttcctcagaaaagcagccggggctgcacgtaggactgcgtgaggccgaggcccgacgagccgtgtcggcgcgctgcggcgggggcgggcccccgtgcctcagtttccccggtggccgttctgggagcgacgcccctctgacgtcgcgaggcgagcagggccgggccggccgccagggggcgcgagcgcggggcgggcgccggagaggtgggcgcgcgggcagcggagcttggcgcccccggggccgcgcggaccgcgccggcagaggcggaagcctgagcgggaggcggggcggcgcgctgactcacacgggatcgacc

SEQ ID NO: 14943 - DNA, 355 bp, Homo sapiens
  source 1..355: mol_type = other DNA
gtgtagtggcatgatcatggctcacttcaggctggaacttgccatcacacccagctaattttaaaaatatttgtagaggtgggcaatttgtaatttgtatttccttaatgactaatgacactgaacatctttaaatgtgcttattagccatttgtatatctattttggtcaaatgctgttgaaagatttttgaggaaaaatctttttgaaagttgtaataaaaggttttaaaaaaaaagggttataagcagctatttattgaagcctgtttacagtccagttaaccagtaaaccagaatcagtgaaactacccatctggggaagtgcaaaaaacctttcaaaaggctttcctgga

SEQ ID NO: 14944 - DNA, 359 bp, Homo sapiens
  source 1..359: mol_type = other DNA
tcctggagccactgcacctggtgtgtagtggcatgatcatggctcacttcaggctggaacttgccatcacacccagctaattttaaaaatatttgtagaggtgggcaatttgtaatttgtatttccttaatgactaatgacactgaacatctttaaatgtgcttattagccatttgtatatctattttggtcaaatgctgttgaaagatttttgaggaaaaatctttttgaaagttgtaataaaaggttttaaaaaaaaagggttataagcagctatttattgaagcctgtttacagtccagttaaccagtaaaccagaatcagtgaaactacccatctggggaagtgcaaaaaacctt

SEQ ID NO: 14945 - DNA, 315 bp, Homo sapiens
  source 1..315: mol_type = other DNA
gtgaactgcacatgtgaggggttagcctctagcctttcaaggcttaaaccattaatgtccttaatatgtgcccatggttttttaatttaaaacgaacagaccttcaagccgagagaatgatgccgttatatctaatatttagttgctcctgaagtgccggaagcaagtgcgtgccacacagtgggagtgggttctctgaagaacaaaccaacagcagtctcactgcgcggcccgcggctaggagaatcgctccccgtctcactagccgcgggccggggctacgccgtgtgcgtccccgcgcagccgcagtgctgg

SEQ ID NO: 14946 - DNA, 258 bp, Homo sapiens
  source 1..258: mol_type = other DNA
gtgctggcaaacccataactggactgccggacagcaagcgatcttcactccggaatagcgaacaagaaggctaattcattagtgggcctgctagcgtagtattttaacgatttcgcagcctttaaatcattactctgggatgccccgtgatcgtgccattgcactccagttttccaagactagaaaccttagccggcagggctctggcagcgccctgggagaacttagggaagggccttctcgcagcgtcattctcgc

SEQ ID NO: 14947 - DNA, 315 bp, Homo sapiens
  source 1..315: mol_type = other DNA
agtggcgcgatctcggctcaccctgcctcagcctcccgagtaactgggactgcaggtgccaagcaaatttgccaacatgctactgaatcaaggtaatagccattattcttttaacttgtgcaatggcctgaagcaacggggtccatgttgcccaggctggtcttataggcgtgagcgtccacgcccggcctcttaactttttgataggttaaaaacttacaaaaattcgcttcaagtgctctgaaatttaatttaaaaaatcatagttggaattgaggcgcaaacacctgagagaggcttctgtccctcggcggt

SEQ ID NO: 14948 - DNA, 300 bp, Homo sapiens
  source 1..300: mol_type = other DNA
taaaagttacagtctaagctttcttcaaggaaggctgtatcaactgaagagaagtagatgcctgcctgtgactgtagggatgagctcgccctcagtcccagacgtcgcgactgttggcagtggatcaattcacaacagcctggcgtaggctggctggactggaccgctaggcgcaggactgcagggccggccgggtgggcggggcacacccagtgcgcatgcgcagcaccccggcccggaaacagcgcggggtccgctatggcggcggcagccgagggcgtactggcgagtgagaggagt

SEQ ID NO: 14949 - DNA, 315 bp, Homo sapiens; identical to SEQ ID NO: 14947
  source 1..315: mol_type = other DNA

SEQ ID NO: 14950 - DNA, 268 bp, Homo sapiens
  source 1..268: mol_type = other DNA
agactcagtcctcagggtgtccaggagcctgcctgaggcctgctgtaaaagttacagtctaagctttcttcaaggaaggctgtatcaactgaagagaagtagatgcctgcctgtgactgtagggatgagctcgccctcagtcccagacgtcgcgactgttggcagtggatcaattcacaacagcctggcgtaggctggctggactggaccgctaggcgcaggactgcagggccggccgggtgggcggggcacacccagtgcgcatgcg

SEQ ID NO: 14951 - DNA, 262 bp, Homo sapiens
  source 1..262: mol_type = other DNA
cctttccccacggctgagagggtgaagtgagggaagggagctgcccatctctgctccaccaggggacagctgctgggagggggacagcgctcttcagctttcctcccatgagctcagacccgcagcacaggcccccgggctggtcccctggggcttgcagcaagagggagtaacagcgagtgggcacctggggtaccgggcccccccacctcattccccatgaatgctgtgggaagtcctgaggggcgggacaaccccgcct

SEQ ID NO: 14952 - DNA, 324 bp, Homo sapiens
  source 1..324: mol_type = other DNA
taggagaggaaagtctctgctctagcctcaaggaggaaaactgcagggtgaccaccacaacctgtgggatcagccccattctggggcatcatgcatgcctaggggagctgaaagcagattaatcctgatatcatggataagccatgggaaaaggttcccagctcagctgggtcaggactctgtggtcctttccccacggctgagagggtgaagtgagggaagggagctgcccatctctgctccaccaggggacagctgctgggagggggacagcgctcttcagctttcctcccatgagctcagacccgcagcacaggcccccgg

SEQ ID NO: 14953 - DNA, 387 bp, Homo sapiens
  source 1..387: mol_type = other DNA
gaccacgtacagatttctgtgccacatggtactgcatgacgatgagctgtccacatctgaaatcatccagtcttgttcagaactttcacaccggacagggagccaggactggaatgcagtctcctggtcactggccagagagttggcctgaccctgagacctgcttagtctacctcccaggaaatcccaggtgcttgtcttcctgggaagtgaatcactcctgagttcctcacttttaaaatggaataatgggtgaattggcttgcagtaataattcaatacctgccagctatacatcccgcacgcatcctggaggcgcgggcttggggatgggactgcccgcccgggtcctgaacaggatgcgtgcgcgcaggcacacacacacca

SEQ ID NO: 14954 - DNA, 470 bp, Homo sapiens
  source 1..470: mol_type = other DNA
ttcctcacttttaaaatggaataatgggtgaattggcttgcagtaataattcaatacctgccagctatacatcccgcacgcatcctggaggcgcgggcttggggatgggactgcccgcccgggtcctgaacaggatgcgtgcgcgcaggcacacacacaccagccagcctgtgtgtgcggccggagtccggtgcggtcccgggcaggcgtaccgagtcccccgcgctcgcccgggagggaggcggggcttcccgcgtcccccaagctccagatcctggggtggctgccacgtctccctgccacgcgcctggggggacggaagtggtgggcgccccccgagggttcaccacccgttctccgtgtgcccgagggccggtcctgggctaggctccgcgccccagccccaaaccgggtcccctcccgacgcgggatgccgggcagaggccccggccaatgacgagccggagttt

SEQ ID NO: 14955 - DNA, 486 bp, Homo sapiens
  source 1..486: mol_type = other DNA
acatcccgcacgcatcctggaggcgcgggcttggggatgggactgcccgcccgggtcctgaacaggatgcgtgcgcgcaggcacacacacaccagccagcctgtgtgtgcggccggagtccggtgcggtcccgggcaggcgtaccgagtcccccgcgctcgcccgggagggaggcggggcttcccgcgtcccccaagctccagatcctggggtggctgccacgtctccctgccacgcgcctggggggacggaagtggtgggcgccccccgagggttcaccacccgttctccgtgtgcccgagggccggtcctgggctaggctccgcgccccagccccaaaccgggtcccctcccgacgcgggatgccgggcagaggccccggccaatgacgagccggagtttgtgtggtgtcggtgtcggcagcatccccggcgccctgctgcggtcgccgcgagcctcggccctgcttggcagcgtttaaattcc

SEQ ID NO: 14956 - DNA, 233 bp, Homo sapiens
  source 1..233: mol_type = other DNA
cttaaaaatgtacatatatatgtatatatatacacctccacacaactttttcccttctgtctggggacgctgcctgcataatggcagctgacatgaacctaagtttgagtggaagcattcatttccttgatagccccaaatttgggtgccaatgaccctgggatccaagtcacaggtgagcagcacccgagccaatcagagctcaagagatatcaaactttaccactggaggg

SEQ ID NO: 14957 - DNA, 379 bp, Homo sapiens
  source 1..379: mol_type = other DNA
cttctaatagttacagaagagtttgaatctttctctcaataggagacagtattttatgattatcctaaaatggggataaaattactacctctgtgtatagaaattttataacttctttgtctcagttttctcaattgaaaatggaaataatagtaatacttcatgaggttgttaaatgttctgatacatagcaagtattcagtcagtgtaagtggtttatgtgaagtaatctatttgaagtatatatcaccagcctatataaccccaatgttaacttaaaaatgtacatatatatgtatatatatacacctccacacaactttttcccttctgtctggggacgctgcctgcataatggcagctgacatgaacctaagtt

SEQ ID NO: 14958 - DNA, 320 bp, Homo sapiens
  source 1..320: mol_type = other DNA
aattcatgcgttaagcataagtttctaagatttatctctgtcacccaggctggagtgcagtggcgtgatctcagctcactgctctcatgcctcagcctcgtgagtagctgggtttttatttggaagtggcacaatttcttcaacataaaaaatacattatcggctggaatatcacctgtgttcttgcagctccagctgctgggctgcagtgcaacactctccagctctcgggctcggcgcccgcggagcgtgtttccgacggtgccctgccggggtccgcgccgctttggtcctccgcagccgccgtccacagcgcccgg

SEQ ID NO: 14959 - DNA, 350 bp, Homo sapiens
  source 1..350: mol_type = other DNA
gaattcctgaccttaggtgatctggcccagggaaggcttatgtacattaaaatatttcagagtttgccatgaacttttaaatacagtgtggactctagaacttgagctcttgccttgtcatctataagatgaggagactctgaattgtctgaggctgctccatggtatagctgggaccagccgggcttgaccaagtaacactaagctttcctgctcaaggaagctgagatctgagattgcatgtggcactgtgaaagttgtgcacttccatgatggagctgtgcctcagacctggtcccagggcagtagagctatttgtctttctgcctcagatgcactggcacctagac

SEQ ID NO: 14960 - DNA, 292 bp, Homo sapiens
  source 1..292: mol_type = other DNA
tttactttttataacttaaaaaaaaagagacgccaaagtgttgggattacaggtgtgagccacattgctctgatatatacttgagaatgtttataataaatacgtgcatatttataatgtgtaagttattcaaatcccaagtgaaaacattcatatgcaaacataataatgtctccaattcttctgagctgtctacctgagttgctcaggttcttcccatcatccctggatgggtctaagtcagcattctgaaatgtcagagactggcccggctcagccgccgtgacaggcc

SEQ ID NO: 14961 - DNA, 388 bp, Homo sapiens
  source 1..388: mol_type = other DNA
acagctggccctgatttaaatttttgactgccttaaagttaattgattagggactttaattacatccttgtcatataagctgtatacaggatgtgtacaccgtagggtacaaatcttgggatacatcttagaagcaatagaggtattaatatggccttttataatcagtatagattgtttgaaaatgtgagatgtccatggttggcctctaataacattcgattcacggcaaacatagctaaacaaaagaaaactgtctttgattttgaaagaattcaactccccattcatgaccgtgggactagtgtctagccccatttcttcagcagtggagcctaggatgtagagctgcatactaccattaggaggcgcaccctcaggcctcggc

SEQ ID NO: 14962 - DNA, 476 bp, Homo sapiens
  source 1..476: mol_type = other DNA
ttctgaaccaagcgttctggactgcccagacccggtgggcaaggggactggggaggccctgcgcacggatgcgcactgggcccggggccgcgcggcccaggcgggcactggccagtggatggcagggctgggcctgagagcccggcttcacagcgcagcgcgctccgaggccctccctgccctcccctagccggcaccggagtgacaggctcggggccctcctcgccgaagctcggggctccagcgctggcgaatacaagtcatccatctcccggcgcggggagggggaggaggcacaccgggagccgaggctccagtctccggccgagtcttctccctggggccagcccagagctgccagcgccgctcggctccctccctccctcccggcccttcggccgcggcggcgtgcgcctgccttttccgggggcgggggcctggcccgcgcgctcccctcccgcaggcgccacctcgga

SEQ ID NO: 14963 - DNA, 653 bp, Homo sapiens
  source 1..653: mol_type = other DNA
gctctgtacctgttacatgagagaatctgaactgtgcagtgtacactgttttatccttttatggtttacaattacccagaaaagtgagtaaaaggttacttatctatgctgcccacgcttaacatggaaaactgaaagctgaccttgtgttcctttaaaaaatctccaaggaagtcggctgcagagacttcatggtaactcatgagaaacaaaatgcttttgtggattaacaactgtctttattccaatttttgggggttttttcttcttcttaaagacaaaaaaataatctacagtcttcggatcgcgctgtgcagatccctcagcaaattgtgacagtattatggcactttggcctaagctgttaaagtgtaatggatttctgaggcacaattgtgtgacacaggaagcccagccatcctcaacgaaggcagctgccgggctccggtttgcttcagcaaaccctcacccctcgccttcaaccaggcgggtgtcgtcagctgtccgccagctgctgcccgcgcctttccgcccccgcgcgccggccaaggccgaggcggccgggaccagaggcgcgcgccctcagtgcatgtgacggggtgggagggggaggtttcttcctcccccgtccccaagccccgagaggctgcggc

SEQ ID NO: 14964 - DNA, 258 bp, Homo sapiens
  source 1..258: mol_type = other DNA
tgcaaacgcttgtggcttatttatccagaaaaagcattttctgtgtagggtagccttccccacaccctaggccgagggccagaaggccctccgagagggtcccccggggtggcgaggccaccaccagggggcgatttcagggccgcagcgcctagaggtggggggtcgcccgatggccgaaggctgtgtgtgagcctcgccctcaaaccgcctctatagggggcgcaaagaagagagtggcgaccttcccctcacccc

SEQ ID NO: 14965 - DNA, 431 bp, Homo sapiens
  source 1..431: mol_type = other DNA
cccctgccacacctggggcacagctggcacctgatgtgagtcctctatgtggcctgtctgcgggaaggcagacgagggcctgggtcgggccagccgggcaggaggatctgcggtgcaactgcagacagtctcaggccagttggagggcagctgtctccagatcatccctggggagggagccccagcccccggctgagctgaccaatggcttggtggcactgcccagccggctgcggcaatatgaggcagagcaacaatggagtaccagcagggccctgctccttcgccgaggcacgcagctcgtggagcagctagatgagagctctgtctgagcccagccctatctgtcccaggctgggccactgcctcccgtagggctggccagtcaggcccagccgtgagcagcccaggcccatcggtgctcctcagag

SEQ ID NO: 14966 - DNA, 207 bp, Homo sapiens
  source 1..207: mol_type = other DNA
ccaaatgtgggaagctccgggagcggtcgtcccggaaccggaagcctcgaggttttgcttaggctccgcggcctccaagctgtagctatgacggcgcgcgggactccgagccgcttcttggatgtgcagcagctgcagcgtctgagcttcagcgtcagccgcgacggcgcctcgtctcgcggcgccaggtgagccaagggcaacgac

SEQ ID NO: 14967 - DNA, 195 bp, Homo sapiens
  source 1..195: mol_type = other DNA
ctgcaaaggggctcagtgcccgcaggcaactgtgaccatcctggaaggggatcccatgcccccgcttggagaagggcctggggccaagtttcggggcaggcccctccgacccatcgatacggagggggtacccacttcggaggaggacccacattcctagccaaatgtgggaagctccgggagcggtcgtcccgg

SEQ ID NO: 14968 - DNA, 500 bp, Homo sapiens
  source 1..500: mol_type = other DNA
gggttccatttgcctgggcttggaatcccaaggctggggcaggatcctgaacctctcgggggcgtagcccgcggatgcggatcacgtccaagcccgactggtcggccagcttctgcaccagcgtcgagatctcctcgaccgacttgcagtggatgctctcctcgcgcacagccccgttaactggcagaagaggggtgaggatagcgggtcgagcccctgatcccgccctccagcccgagcccggccccactcacggtgattccgtcgggcgacccgggacagtgagcagtatgacccctgactgggggcgacctacccggggagtcgttgcccttggctcacctggcgccgcgagacgaggcgccgtcgcggctgacgctgaagctcagacgctgcagctgctgcacatccaagaagcggctcggagtcccgcgcgccgtcatagctacagcttggaggccgcggagcctaagcaaaacctcgaggcttccggttccggg

SEQ ID NO: 14969 - DNA, 274 bp, Homo sapiens
  source 1..274: mol_type = other DNA
acagacttggctgttgatgagggggaggggaagctaatactccccccagccctatctgttcagatccctggattctagaaagcagtggggggtccctagggctcaggaaaggcctggctaaggcttacgcctgtaattgagaccagcctggccacgcgcctctagtcccagctgctctggaggctgaggcaggagaatcggccatggtgggagggagcccttggggcctccctgcaatacaggcggtgggactttatgagtcttcgagaagccc

SEQ ID NO: 14970 - DNA, 363 bp, Homo sapiens
  source 1..363: mol_type = other DNA
gcttacgcctgtaattgagaccagcctggccacgcgcctctagtcccagctgctctggaggctgaggcaggagaatcggccatggtgggagggagcccttggggcctccctgcaatacaggcggtgggactttatgagtcttcgagaagcccagccccccgtgggggtcagaacccgcaggcctgctcacctgggcagatacctacggctgcctgggcagccccactcttagtttaagcttagtttaaggcagccagaggccagaggggcagcctcggccaccgtcgagtcactcttaggctgctggtggagtgcggggcagaccactcccctccctgggtggggggcgcggcctgagccgcc

SEQ ID NO: 14971 - DNA, 609 bp, Homo sapiens
  source 1..609: mol_type = other DNA
ctgtgcccaacaggcctgtgacaccgccagtgattgttggggagccaggggccgctcctctccgataaatgacaggggaggctggggagcacgcggtcgcgccagaggccggcctgggttcccgtgcccggctgggtgtgttctccgagccggccgccaggtggcgtcgcctccgcgaagcccaggttgccgcctccaacccgccgtggggcaggcgcggatcgagcctcggcctcctactcgggctagggcgcggggtcccggcaccggagagtgggggacggccggccatcggcctctcgcttgggagaagcggagggggaggggcggccgccgccgcgccgtggccctttgtgctggaacaatgaccagctgccgctggccccggggccccggctggggttgagggtgaccaccgccgccgccgcgtcgagccgaaccgagcccccagacacgcagtcacagggcgtcggagggagggctcccgactgccgccgagcagcccctacgtgcgccccggcggattcgcgtgacgcgggtgcttgcgcgtgtccgcgccccggggcggagacgcccctcggaccctcccctgcgcggtgccgcccactc

SEQ ID NO: 14972 - DNA, 296 bp, Homo sapiens
  source 1..296: mol_type = other DNA
gaagccggcagcgccaaggagctttcgaatttgagaccgggagagagtgtctgccccccacctcccccctctggccagggatggcctacgtggctcgggagcgctccagtgcgcatgcggagtcgatcccgcgcaggcgggcggggacggcagccgggtcgcggagcctgactaagtgccgcccccttgccggcccccgcgagctggactgcgccaaggcttctgtgagccgcttggggccggccggggcggggcctgcccgacccgggtttggctggcgggcccctaggaatgct

SEQ ID NO: 14973 - DNA, 441 bp, Homo sapiens
  source 1..441: mol_type = other DNA
aagccggcagcgccaaggagctttcgaatttgagaccgggagagagtgtctgccccccacctcccccctctggccagggatggcctacgtggctcgggagcgctccagtgcgcatgcggagtcgatcccgcgcaggcgggcggggacggcagccgggtcgcggagcctgactaagtgccgcccccttgccggcccccgcgagctggactgcgccaaggcttctgtgagccgcttggggccggccggggcggggcctgcccgacccgggtttggctggcgggcccctaggaatgctctcctccccgcccccggcccaaagtgccacggtggcggtggtggcggccgcgaggccgagtgtctccggccctgccagcctcgcgacccgagggacgcccgccggggaggcgccagcccgcctctccctgcggccgctggtcggct

SEQ ID NO: 14974 - DNA, 643 bp, Homo sapiens
  source 1..643: mol_type = other DNA
agagagtgtctgccccccacctcccccctctggccagggatggcctacgtggctcgggagcgctccagtgcgcatgcggagtcgatcccgcgcaggcgggcggggacggcagccgggtcgcggagcctgactaagtgccgcccccttgccggcccccgcgagctggactgcgccaaggcttctgtgagccgcttggggccggccggggcggggcctgcccgacccgggtttggctggcgggcccctaggaatgctctcctccccgcccccggcccaaagtgccacggtggcggtggtggcggccgcgaggccgagtgtctccggccctgccagcctcgcgacccgagggacgcccgccggggaggcgccagcccgcctctccctgcggccgctggtcggctccgacctctcacccggctcacccgcgggtcgcagcacctgccggatgtgaggcgcccagtctgtccgcgccttggtggggcagctgggtgggcaagcctgcggtcgctcccgggaaccagccctgggctgcggggagacgaaggtggttggtcctgccctccaggagcgccccgttatgcagctgccctcgccgacgccagggactgtaaaatcagatgggacagggcctagccgttcagcc

SEQ ID NO: 14975 - DNA, 382 bp, Homo sapiens
  source 1..382: mol_type = other DNA
gctgtctgccgtcttttgtacaagagagagaacagcacaaaggctagcacagatgcacagacagtttatgcagatgtgcacatgaaaactgaatatcctccagaagctgcagggcctgctctctaagcacatgcctgccagatgtacaaagagaaagtttgaacttgggcctatccatggctggagggaagttatcttcccgggccgaggcgctgtgtgtagatggcgacagcctcctacacgccagggctccacccggatcctggcgccactgcgggagggcctgcccttggctcagcgtcagagtttgtcctctggggcccaacgcagggagcctggccacatgggaggggtgtggtccggaactccaaccccaggtcct

SEQ ID NO: 14976 - DNA, 606 bp, Homo sapiens
  source 1..606: mol_type = other DNA
gagtcgatcccgcgcaggcgggcggggacggcagccgggtcgcggagcctgactaagtgccgcccccttgccggcccccgcgagctggactgcgccaaggcttctgtgagccgcttggggccggccggggcggggcctgcccgacccgggtttggctggcgggcccctaggaatgctctcctccccgcccccggcccaaagtgccacggtggcggtggtggcggccgcgaggccgagtgtctccggccctgccagcctcgcgacccgagggacgcccgccggggaggcgccagcccgcctctccctgcggccgctggtcggctccgacctctcacccggctcacccgcgggtcgcagcacctgccggatgtgaggcgcccagtctgtccgcgccttggtggggcagctgggtgggcaagcctgcggtcgctcccgggaaccagccctgggctgcggggagacgaaggtggttggtcctgccctccaggagcgccccgttatgcagctgccctcgccgacgccagggactgtaaaatcagatgggacagggcctagccgttcagccggccaggctgggggaaatgacccgggagggtcccatgcggc

SEQ ID NO: 14977 - DNA, 470 bp, Homo sapiens
  source 1..470: mol_type = other DNA
tggaacctgtgcctttcccaaagcttggcttctaaaaggtagcaaacattttctagacaggaagaagaaaaagggagtttcctccttttctcttgggctctcagccagacagccactggcaatgcaatctggttgaattcattcaaacactgtaggaattgcctcgcatctgtttatttaaaaccaaaggggtatgttgaggcatgggcaccctggcagcagaccccaaaacatatagccagttgttcataggcctgtgttttaaagaagggcaagcctgaactcaccgtcctgcctcagggcctgggctccatacctggggagtagacagtcttctactttctaaaaagctggacttgaaatttggagtaaatctcctcagctgagcccttgaggagattctccagggactcctttggcccagttcaaagtgaggggagggctcccaagaagacagttgacttcaccct

SEQ ID NO: 14978 - DNA, 389 bp, Homo sapiens
  source 1..389: mol_type = other DNA
aatgcaatctggttgaattcattcaaacactgtaggaattgcctcgcatctgtttatttaaaaccaaaggggtatgttgaggcatgggcaccctggcagcagaccccaaaacatatagccagttgttcataggcctgtgttttaaagaagggcaagcctgaactcaccgtcctgcctcagggcctgggctccatacctggggagtagacagtcttctactttctaaaaagctggacttgaaatttggagtaaatctcctcagctgagcccttgaggagattctccagggactcctttggcccagttcaaagtgaggggagggctcccaagaagacagttgacttcaccctaaaccgcgaagctctcttgcaccgggctttttcgcctgg

SEQ ID NO: 14979 - DNA, 283 bp, Homo sapiens
  source 1..283: mol_type = other DNA
aggaacctgcttcccgccccggagcccagcttagctcactccctctctggggttagatatgaggggagagacaaacaaagccagggccagggctgtgtgtgtgtgggaggggaacagcccttctccctgaggcctgagggcacagccctgctggaatgcctgggccctaaggtctagccccagcctaactggaagcctggcctccctgcgagttcctgagagcaaagccccagccgcggcctggctcccgccgggcccccgccccgcatccggaacagctgga

SEQ ID NO: 14980 - DNA, 451 bp, Homo sapiens
  source 1..451: mol_type = other DNA
taccttttcaggccaaagaaaatatttatatgctttatttgctggcaagttatgtgctttttgagctctaaaaattccgcatttgtctgtgagctgctgccaggtgcccattggcccggtcgcaaacctgcagatgccagatacatgaaatttggggacgttcagcttcctaaaaccacagttaggcaggtcctaggacccggcattggccgccatcttgatatcaaatgccaggcaagccgctactggcgtcgctcggtaaccacggagacacccgtgcccccgcaacgctgccgcagtgaactgtgggagttgcggttgggggaagttccagaactacaaatccagtgggctttcgcctgcgcacggagaagccgattctccttggcccctcagcctgcgcctgagatccgggcgctgcgttggctgcggcctggcaccaaaggggcgg

SEQ ID NO: 14981 - DNA, 352 bp, Homo sapiens
  source 1..352: mol_type = other DNA
tcctgcagcagcgcagtcttctgggctgtccgcagacagccgctgccatggcaaccgttccagagggtcaccagtagtcgaccccacccggggaccgactctgggggttggagagtctagccccgagctgggaggcctgcgccagctgcgtacacggcgagtacaccgcacctgcccgggacttcacccgcagctgcgagactcctccattcccggagcccacacctgctgcggccgtgccccatctccccgcagctgcggcgctgagcacccccatgtcgagagatgtgcaggtcctccccaccttcgaagcagcagggctgtcctctgaggaagtttaaccgggtttcat

SEQ ID NO: 14982 - DNA, 308 bp, Homo sapiens
  source 1..308: mol_type = other DNA
cctcaggatcctggctacccagtgggtccagaaaggacctatttagaagttcacttatggtagtccatccacttcattttatagatgaggaaagcatgtgttccagtcatgtcaaatgcaggacctggcccggctgaccgccgagacccttccagctctgccgacccaggccctgaggcccttcccggagggccggaccctgagggagaaggagcccgtggggaccctcgagttaccgtcctgcagcagcgcagtcttctgggctgtccgcagacagccgctgccatggcaaccgttccagagggtca

SEQ ID NO: 14983 - DNA, 373 bp, Homo sapiens
  source 1..373: mol_type = other DNA
acccctgggatccattgaagtatggctggatcccggcctattggagccctccaacccctttgcctatgaaacccggttaaacttcctcagaggacagccctgctgcttcgaaggtggggaggacctgcacatctctcgacatgggggtgctcagcgccgcagctgcggggagatggggcacggccgcagcaggtgtgggctccgggaatggaggagtctcgcagctgcgggtgaagtcccgggcaggtgcggtgtactcgccgtgtacgcagctggcgcaggcctcccagctcggggctagactctccaacccccagagtcggtccccgggtggggtcgactactggtgaccctctggaacggttgccatggc

SEQ ID NO: 14984 - DNA, 615 bp, Homo sapiens
  source 1..615: mol_type = other DNA
ttcaacacgtaatcaatataaaattattaatgagatattttgcattcttttttttgtagctcatttcaatttgtattagccacatttcaaatgctcagcagacagcacaggtctagaccttctcccttatttgaagttatggactcaggatctagaagactaagctcacgccaggaccgtgcttccgggcctgtgtcaacttctagggctgcagattcgttgggccctcacatgtggcggccacccaactaggggcttcttgagggcaggtgctccaaatggccgcttcctgagggcagcgggtcctcttgtggcctcaggcagggccctgaaaccggcctcacgtgttttgtgcttccaccaagcgctctcggggatgcgggggtggtgtcagcgccccggccccagcccgcaccccgaaggtgtgaggggcgtgcccagggctcggcccgcgccgccccatgtgacccggtccgacatggtgtcgcctcctcccggggcggcggcggtggcggctcgggctgggctccgcgtcgggccggccccgcggccgctcatgggcagccagggccgctcggggccccccgggaacggcgggcccggcgagggcgaggg

SEQ ID NO: 14985 - DNA, 548 bp, Homo sapiens
  source 1..548: mol_type = other DNA
ccatgtataattttaaattttctagtagttacattaaaatatattgtatttagcccaatacagcgtattattaacacttcaacacgtaatcaatataaaattattaatgagatattttgcattcttttttttgtagctcatttcaatttgtattagccacatttcaaatgctcagcagacagcacaggtctagaccttctcccttatttgaagttatggactcaggatctagaagactaagctcacgccaggaccgtgcttccgggcctgtgtcaacttctagggctgcagattcgttgggccctcacatgtggcggccacccaactaggggcttcttgagggcaggtgctccaaatggccgcttcctgagggcagcgggtcctcttgtggcctcaggcagggccctgaaaccggcctcacgtgttttgtgcttccaccaagcgctctcggggatgcgggggtggtgtcagcgccccggccccagcccgcaccccgaaggtgtgaggggcgtgcccagggctcggcccgcgccgccccatgtgacccg

SEQ ID NO: 14986 - DNA, 579 bp, Homo sapiens
  source 1..579: mol_type = other DNA
ggatggaagtcccttcccccatacggggacagtgggtcctgccagggacctccggactgaggcatttctggctcccagggcctcctcgggaggagcggggtccgggtggcaccggcacgcactgcgcgagggccgggtgcgcagccattcgctgcatggttagcggccgctcccaggggcccggcgggacacacagtaggtggctcggagaccactgcgtagccggcggcggaagcggctgggcccggaggcggagacccagacccgccagactcgggcgctccaggcggtcggggaagcccaggctcggggtctcccggcccgcagagtttgcagccctaggcgcccccatccccgcgcgtccgggaccggggagcgcgcgaggggacaggccggggatagggggaggcgcccagaccggccgcccccgcccctcccgcgggtcggccgcccctccccggccgccccgcccccgccccgggctgcatccaggccccagttcccagccgggggctgcgggctcccgccgcccgccccgcgctcccccctcgcgcccggtgcggcgccccccgccccccc

SEQ ID NO: 14987 - DNA, 208 bp, Homo sapiens
  source 1..208: mol_type = other DNA
tggatcttgaagggccatctattaggatagaaagcacacagtttgcctctgctagcaagtgccagcagctaagtctcagtgaaggcatagctgaggcaaagacaatctgagtgcatttcctttgcttgtagcagaaaagcactagaagggtttacatttttatatctataactcctttaacggatgttaacataaaccccaaatggcc

SEQ ID NO: 14988 - DNA, 319 bp, Homo sapiens
  source 1..319: mol_type = other DNA
ggctcagggaaggcttcccaaggaagcgatgccttataatccagctgaaaagtgaagccatctctccccaaaggaggagtgagtatcaccctgagctctctccaccaccgtactgtgagctcatagtgttctagagcccagcacgaggcaagctctatagttccgaaccaagcctgggttaggcagtagaaagtaggtcagttctttcctatctctttaagaacgagaggccgcggctccgcgcctgcgcaagggtgccaggcttgtttcggagggtggcaagcagaaagccgggcggaggggaccggtctgagccggt

SEQ ID NO: 14989 - DNA, 306 bp, Homo sapiens
  source 1..306: mol_type = other DNA
gcgggggcgcccccgtgtggctgcgaggagccatgcgcacggagctgctttggctttcccaggaattttaaggcgttagagagcagaaggcagtggggcacaactctgctgcctcccctaaaagatacggttcattccccaccccccccccccgtccaggaactttgggggcggctgcttcacatgatgctcctctcgtgcggccggagaacatggtccagggtttcgatcctatgcctgccgggccggccctcccgcgccgcccacgcgggcctacccgggtgagggcggagaccggaccgcccc

SEQ ID NO: 14990 - DNA, 218 bp, Homo sapiens
  source 1..218: mol_type = other DNA
gaggcagcccagcttccgtgctagccctgcctttggaaaggagctaatcttaaggaaggggtttcacctggtaattgtggggggactcagatatgataccccaggctctgcctcagccagaactgtgttgacctggggacaccgggtgcctcccccgggctgcaaagggtggggggcgggggtagggggagggggcgggaggagagaggcagctcggc

SEQ ID NO: 14991 - DNA, 396 bp, Homo sapiens
  source 1..396: mol_type = other DNA
ttaaaccttccatttgtgtataaaaaaacagagagtaatcccagcatttcctgaggccaggagcttgagaccagcctggcaacatggtgaaacaggagactctcttgaacccgggaggcagaggttgcagtgagccgagatcgcaccactgcactcgcacgtgcctgtaatcccagctaccagcagaggagcggcacacgtatttgttgaaagaatgagtttgttttcaatctttcacgtacaaagttgtaatacacatttggaaaatatatctttccaaacttcgccatcaatagacaagtccactgcgaatttatttctcgcgaccggtctcaggaagcgggcgtggactaacccattgcgcgccgggctttaggacccggcggggcgcgggga

SEQ ID NO: 14992 - DNA, 305 bp, Homo sapiens
  source 1..305: mol_type = other DNA
gggagaacaggtcctatccatccctggggacccttggatggccaagttggtgggggcagggaagcctggagtgtcccccttcctccaatcagtgtttacagtctgatgtcagaatgtccagttcaccaggggagcccaggctggcagtccgggccagccttcaacctctgcagagaggagcccgccctcctccaacctgctcactcctgagcaccgtgcctggggctcgggggaggcgggctgcatttcgttcctggccccctcctctcagggagggggcggggccggtgggggcagctccaccc

SEQ ID NO: 14993 - DNA, 327 bp, Homo sapiens
  source 1..327: mol_type = other DNA
acctaggtctctcgggggtgggagactccacagtgtacaagctcccctatcccccatcctaagcacatggtggggagggtctccattcctaggcaggccaaggtggagagaagaggtctcataaacactttatgtgcagactctgagcggctaggaccccaggagggagggggtcaactctctactccaggcggaggtatttcctgtttatgaggcagctaaagaagggatggagatggagcccctcccctcctagggctgggttggggagtccctcctcccaggggaaggccacggcccacagcctctgcctctctgggttagggg

SEQ ID NO: 14994 - DNA, 384 bp, Homo sapiens
  source 1..384: mol_type = other DNA
tgttacataaaaaaagcaaatcaccaatgtgcccctatatatttttccattcatagaaaaaagcgtcaatgcagtagaactataatttgcaggcctactactttttttcctctaaacagtcttgtactttttgaaataatttttgtgctttgtaaaaagttatttaaaaatagcaaatatgaagtagcttttcttggctaggacaaccaaagcctttcctagattaaataaggcatgaaatgttttgaggtactgccgcagcgcttggagcgcaagtgcccactagggggcccacttggccccacttggacttccaagttccaggaaccttcgcgcgaggccagggccttcttccagggtgcaagtgggtctcgccgcacctgg

SEQ ID NO: 14995 - DNA, 363 bp, Homo sapiens
  source 1..363: mol_type = other DNA
actgctaatatctggaatgtggcagaacttggaatttcaacacctttcccagcttgggaaatcaacacctcccacttctgcagcagagggaacaactgttcgagcccgccatctggaatccgagtcccagcaggggcgcgggaaaccgctgctctgagaaaaggtacctcccccagaaagactgcgcgggaagtcccgagttttcccgccacgccgagggcgtgatccctgacgtcagagctccgcctccacaagctggcggccggtgggctccgccctcccgtctaccctacctctgaggtgaaggtgggactgccccctttccgttatgcgcccgcgcggcgcaatgacgtaacacaggcc

SEQ ID NO: 14996 - DNA, 258 bp, Homo sapiens
  source 1..258: mol_type = other DNA
tctggctctatacccacatcttgattttaattattttatatctactccttcgctttcataaaacctaggaaagaaataagcagccaagtaaaacttttaaaagttttagaacatttatttctttgagatacactggctctagtctggagcagttcaggaattcgctcatcacaggcctgggtttcccaggatctcagggagcctggaaactgattcactgacggttgacagttccaagaaacgcctggcaggcgggcc

SEQ ID NO: 14997 - DNA, 383 bp, Homo sapiens
  source 1..383: mol_type = other DNA
ctggtaccaccagcgccagccgctgaaaggcaatgcctttggagtgcccagcccaagccactttggtttgtatcattccaaaccctgctgtctccacgaagtcaccttccttggagaagaagggagaagtctgagcgctgagacccggcggccccgtgcgccttcgcgtcctagccggagcgcggtctctgccacgtggggaggggcgcggccgagtgccagagggcggggttcttggcgtctcgccggccagacccctccctcaaaggcggggcctggagatccacagctggaaagggcggagccccagcagggcagctggaaaggggcggggcctgacgcgcgcggctcgccgcggcgggctgggggcgccctggtctgcc

SEQ ID NO: 14998 - DNA, 206 bp, Homo sapiens
  source 1..206: mol_type = other DNA
tagcgtttctaaggcaaacaagaaagacttctgtttctgaggagacccaggggttcgtctctctgctcaattatgtgaacatgggcccatcttggcccaggactcagagagagccaatttcctttattcgattggatagtcggaatgctactttcacggtgcaaatatgattggctgcgcgcggcagggctcgcgcagttaccagg

SEQ ID NO: 14999 - DNA, 303 bp, Homo sapiens
  source 1..303: mol_type = other DNA
cattttatctccactaaaaattttaaaatttgccaggtatggtggtgtgacctagccccagctgcgcaccccggagttcgaggttgcagtgagccatgatcacgccactgtactccagcctgggtgacagcggatcacctgaggtcaggagttcaggcgatcccctcactgcattccacgatttgaaatttgagctgttcctgagcagagctcctgagccctggtctctcccggagccttgaggccgaatggagtctactcgcgggcccagggaggccgccagagggcgcccgggaccgaccg

SEQ ID NO: 15000 - DNA, 637 bp, Homo sapiens
  source 1..637: mol_type = other DNA
actcggatccacgtcgacaccgttgtacaaagatacgcggacccgtacgtacacctgtacctgtgctggcgcacacacggcagcgtccgtgcagtcgcacacatgcacacggagacgtgcccaccggtgcactggtgcctgcaccgtgtccgtacaacacacttgtggagctgtggggggggagcgtgcagagatctccctgtcgcctgcgcgcccagaaccggtgcggtgtgggactccgaggaggagacacttttcccgcagccccagaatcgcgttctcggggcagaaccccggggcctcccacaggaaagagcccccgcctacaggctgttcgaaggggaggccgtccgacagcaggaatgtccccccaaaagcccccggggtttatcagccgtggcctccctctggatccgggggaggggagcgggaggcggacttggccccagactgccagcctcctcccggccaaagaccctcctgttccctgccctggagggaggagggggcttaacccccaccggggcttcccggcccgctgaaaagcagcgggagcccgtagactgtcgagggcctcccgcccctcccgtcgcgagggcggggccagtggcgtcatttccaggcccgccccctccgg

SEQ ID NO: 15001 - DNA, 464 bp, Homo sapiens
  source 1..464: mol_type = other DNA
agcggatcacctgaggtcaggagttcaggcgatcccctcactgcattccacgatttgaaatttgagctgttcctgagcagagctcctgagccctggtctctcccggagccttgaggccgaatggagtctactcgcgggcccagggaggccgccagagggcgcccgggaccgaccgcttccgctaacttcccggcagcgcgccgctcagggtgggggccccgagggctggggccgtcggcttccccctggggatcccccgcttcgttaggcgcagccaaagccgagaggcagcggaagctcccggcccggggtggcgctgggtcagcgggtaccttctcggcggtcccctggccggccgaactcgcgcctggtgtcctgtccccgctcccgccctgagtgagcctgtcccctctcaggggcgcgcccgagtcgctccgggttggctgcgccatgggaattccccc

SEQ ID NO: 15002 - DNA, 520 bp, Homo sapiens
  source 1..520: mol_type = other DNA
ctctgcgcctgcgcagtgcgacaaatctggcgctgtccccttcagcaccacgcggagtccgcgccgcccctccccgcggtgagccccgcgcgcccccgcctcgcacgtcagtagttgccatagtaactccagcggctctttcttagcagggcccccttctaccctggccaagggcacaagggttgccggtcctgggcaggcgtgacaggcagcaaggaagttcttcctgaagtctgatttaacatccccctgtcctgggtccgagactcaaaacccctacccataccgtgtgcttggcgcggccgcgtgctcgtgggggcgggagcgcgtgtggcatgtaacaggtcatgtggcagcctcctagggacacgcgtggggtctggagcgggacacgcgtgtgcagccgggccttacgtgtggctcaaaaccaggggttcgggagagcccagcggggacctagcgacaaggggggctggcagcctccggggctctgggccctgggagagggcgggaacgggag

SEQ ID NO: 15003 - DNA, 385 bp, Homo sapiens
  source 1..385: mol_type = other DNA
acgtttccccaccccgcaaggcagcgagaatcctcagcctgcttagggaggctctgcgcctgcgcagtgcgacaaatctggcgctgtccccttcagcaccacgcggagtccgcgccgcccctccccgcggtgagccccgcgcgcccccgcctcgcacgtcagtagttgccatagtaactccagcggctctttcttagcagggcccccttctaccctggccaagggcacaagggttgccggtcctgggcaggcgtgacaggcagcaaggaagttcttcctgaagtctgatttaacatccccctgtcctgggtccgagactcaaaacccctacccataccgtgtgcttggcgcggccgcgtgctcgtgggggcgggagcgcgtgtgg

SEQ ID NO: 15004 - DNA, 317 bp, Homo sapiens
  source 1..317: mol_type = other DNA
tgttcaataagtaattgttgaaataatgaatgaattggcgaggctataatgtttccctcatcaagtagctgggtccgccctgggacaatgacgccccagacctctggagcgtccccaggtcccagtcccaggatccgcttcggggaaccccaggagtagtgccttcccccatcatccacgggatgggtgtggggggcgcgagagccactgcaccgctgacggtctggcgctccggtgcaaccgcttcagctgacgtttccccaccccgcaaggcagcgagaatcctcagcctgcttagggaggctctgcgcctgcgc

SEQ ID NO: 15005 - DNA, 512 bp, Homo sapiens
  source 1..512: mol_type = other DNA
cccgccctctcccagggcccagagccccggaggctgccagccccccttgtcgctaggtccccgctgggctctcccgaacccctggttttgagccacacgtaaggcccggctgcacacgcgtgtcccgctccagaccccacgcgtgtccctaggaggctgccacatgacctgttacatgccacacgcgctcccgcccccacgagcacgcggccgcgccaagcacacggtatgggtaggggttttgagtctcggacccaggacagggggatgttaaatcagacttcaggaagaacttccttgctgcctgtcacgcctgcccaggaccggcaacccttgtgcccttggccagggtagaagggggccctgctaagaaagagccgctggagttactatggcaactactgacgtgcgaggcgggggcgcgcggggctcaccgcggggaggggcggcgcggactccgcgtggtgctgaaggggacagcgccagatttgtcgcactgcgcaggcgcagag

SEQ ID NO: 15006 - DNA, 416 bp, Homo sapiens
  source 1..416: mol_type = other DNA
ccttctcggctacagggcttgaggcctgaagctggagaatgcggtgggcatcagagactggcttctgtcgtcctcttgagccagtagccgccggggcggagccaggactcttaggttaccggcctctcctcaaaacggggagttactgtctgccacgtagcaggtgttcaataagtaattgttgaaataatgaatgaattggcgaggctataatgtttccctcatcaagtagctgggtccgccctgggacaatgacgccccagacctctggagcgtccccaggtcccagtcccaggatccgcttcggggaaccccaggagtagtgccttcccccatcatccacgggatgggtgtggggggcgcgagagccactgcaccgctgacggtctggcgctccggtgcaaccgcttcagctg

SEQ ID NO: 15007 - DNA, 354 bp, Homo sapiens
  source 1..354: mol_type = other DNA
ttctcgctgccttgcggggtggggaaacgtcagctgaagcggttgcaccggagcgccagaccgtcagcggtgcagtggctctcgcgccccccacacccatcccgtggatgatgggggaaggcactactcctggggttccccgaagcggatcctgggactgggacctggggacgctccagaggtctggggcgtcattgtcccagggcggacccagctacttgatgagggaaacattatagcctcgccaattcattcattatttcaacaattacttattgaacacctgctacgtggcagacagtaactccccgttttgaggagaggccggtaacctaagagtcctggctccgcccc

SEQ ID NO: 15008 - DNA, 221 bp, Homo sapiens
  source 1..221: mol_type = other DNA
cctgggcgcgcctgtggttccagctactccagaggctgagatgggaggatctgcagtgaccagcctggccgcgcgcctgtaatcccagctactcgggaggctgaggcaggagaatctcttgaacccttgcagtgagccgagatcgcgccactgcactccagcccgggagacagtgcgaggccatggccgccacggcgcctctggaagggaagtctgggccc

SEQ ID NO: 15009 - DNA, 244 bp, Homo sapiens
  source 1..244: mol_type = other DNA
ggaggtggtggtgcacctgtaatcccagctcctcgggaggctgaggtgggatggctgcagtgtgccgagatcatgccgctgcactccagcgtgagcctgagtctcagactttgggatgagttatttaacctacataagctccagtcactgaataaaagcaggggtaatatcagtacccccactcaacccaatccacctgcaggcagacagccatcagtaatactgtaggaagggcatcctttcc

SEQ ID NO: 15010 - DNA, 446 bp, Homo sapiens
  source 1..446: mol_type = other DNA
gctttttgccctgtgtcccaaggtaggggaaccaggacaaaacttgattttattgaatctctctgaaatgcagtttcttcacatataaaatgtggatatgcacatagcaagcactcagtactccttaggttttattattgccgttattaatacaaggctcctgtggctagagccctggtgcccacagctcaacctggacctgtccacccttgaagggctcatgatgcagcatcagggagtcccagatcgagccgctgacacctccaagtcggctgcagctgtgcctctttgttctcccaacgagtactagcaggaatccaggcaacctgaccctattggtcgcggcaagcgcccgtgacaaacatggcggcggcagcctcaggcgcagtcacctgccggagctgcgcccgggggccgcgcggagccaatcgctgggcgggggcgga

SEQ ID NO: 15011 - DNA, 350 bp, Homo sapiens
  source 1..350: mol_type = other DNA
ctaggatttaaacataaatctgacaatggattgattcattcatccatggggcgttagtattaatagatgataataaatctaatgttttctagggctattgacaaaaaggtccctgaaatttcaaactgggctcattttctagctcgttatgaaaattaaagagatactcgagcagtttctgaaacccttagatgatgttttaatgaccaaaagattacaggtttttaaacttaaagctaattttatgcaatttaaattgttttcctctaggagatgtttattaaagtcttacagacccaaataaaaacatagaggcgaggtcgggccgctccctcgccgccctgaaccgg

SEQ ID NO: 15012 - DNA, 530 bp, Homo sapiens
  source 1..530: mol_type = other DNA
tgtttttatttgggtctgtaagactttaataaacatctcctagaggaaaacaatttaaattgcataaaattagctttaagtttaaaaacctgtaatcttttggtcattaaaacatcatctaagggtttcagaaactgctcgagtatctctttaattttcataacgagctagaaaatgagcccagtttgaaatttcagggacctttttgtcaatagccctagaaaacattagatttattatcatctattaatactaacgccccatggatgaatgaatcaatccattgtcagatttatgtttaaatcctagcagcaaaacagtaacaaatcctttgttggctagcacctcagagggtgctcagcatctcggttcctcctaacactagggggagaccaagagccttgggacactcccgaggggaggcggggcctattgtcaagtcacaccttccctgcctgtgactggcacagacattagcctgggtgcttggatagggtgcgccggcgccccgccccccttagcgccccgcc

SEQ ID NO: 15013 - DNA, 489 bp, Homo sapiens
  source 1..489: mol_type = other DNA
taatatgtcttcatcaacatggattatgtattgaatgaaaaacttccctaccccccaggggcccgcacagcgcgagaaggaggagagctaggctaccatctcccctgctaccgccagggcgacctcagagccaatggggccggccttctctccgcccgggaagtctgctagcgaaagctgctctcctgggatccgccctcacccctgtccccagagtaatgatggagcccgggctccgcacccggccagccgcgcactctgccactcgggtctaagcgcagtgctccgccctgggcctggggacgggagggggataaccggccggctccaagggggcccaggcccccccgttaccaggggcaactgctgcggcgccgcccccgacgtccctcgcacgcacagctgaggagctgagcagcaatacggggcggggtgcagctccgctttccccagagtgcgcaagtgcgctaaggcgcccgcccacgcagt

SEQ ID NO: 15014 - DNA, 754 bp, Homo sapiens
  source 1..754: mol_type = other DNA
agccttccaggccccagagggccgggagccgagcctcctgtcggcagagcccgggcgcccgcccagcgcggagacgggcgcgcggggtctctccgcggcgggggcgccgggcctcgggggagcgcagaagtagccgcccgggggtcaggccggagcgccgccggggcttctccctccccctcccccttccgtttctatttgtgaagggaggaggaagggccggggactggtctgaatgactgcccctgcgcgcacgcagcgccccggagtcggcccgcccgcgccccgcagcccgcgcccggccagccagccgggggacgcctgcaccgtggcccggggaccgccggcctgcccctcccgccccgtccggatctagcagccctcggcgcggccgccctcgcctcctggccccgcagaccccgggctccggcccctgcgagggaggtgcggcgccgacgagccaggcaggagccgccgctgccgccgccgccggaagaagtgtgctgctcccaagctccgtctgccgcggggcgcgccccaatgtcagccgcggggacgagcgcaggccgcgggccgccactgccctagccgcgccgacggggaggcggcctcttggaccccggcgctcccctccaaggctggagtcccggccgcggccctggcgcagtccgccgcctcccgctaggcgctcgggaggaggaggagacgcagcccgctgcgcgcgcggcgtgaggaccgcggctccctcctccgg

SEQ ID NO: 15015 - DNA, 667 bp, Homo sapiens
  source 1..667: mol_type = other DNA
agcagcttagcaaaaccggccagaggctgggcacagtggctcaccactttgtggcttgaccccaggagttcgagcccagcctgtggcgcccgcctgcaatcccagctactcgagagtctgaggcgggagaatcgcttaagcctgtgaggcaaaggctgcagtgagccgagatcgcgccaccgcactccggcccgggcgacagagcgacaccagctcacctcagggctcagggccagcccccaggctccccagccgctcggcctggcactcctaggcaatgggggtcagagcagaggggcccatctgcagccccagggcgcacttcgcgccacgtggcttctgcaggtggaagtccagcccgcgctgcagccccgcctgggcagtcaggacagcaatctacagggcgagcgccattgtcccaaggccccttacctggtcccgggacaaatgccaccagcccgccttgaaaactggcccgggtgagaggaggacctgggctggggaactgcccccacgcccgccccacgcccaggccgggaggctcccgccagccacgtgggcaggctccctggtccaggcgagccggcggcggcctctgcagctcccgtagcccgcccactgcgtgggcgggcgccttagcgcacttgcgcactctggggaaagcgga

SEQ ID NO: 15016 - DNA, 572 bp, Homo sapiens
  source 1..572: mol_type = other DNA
cttccctaccccccaggggcccgcacagcgcgagaaggaggagagctaggctaccatctcccctgctaccgccagggcgacctcagagccaatggggccggccttctctccgcccgggaagtctgctagcgaaagctgctctcctgggatccgccctcacccctgtccccagagtaatgatggagcccgggctccgcacccggccagccgcgcactctgccactcgggtctaagcgcagtgctccgccctgggcctggggacgggagggggataaccggccggctccaagggggcccaggcccccccgttaccaggggcaactgctgcggcgccgcccccgacgtccctcgcacgcacagctgaggagctgagcagcaatacggggcggggtgcagctccgctttccccagagtgcgcaagtgcgctaaggcgcccgcccacgcagtgggcgggctacgggagctgcagaggccgccgccggctcgcctggaccagggagcctgcccacgtggctggcgggagcctcccggcctgggcgtggggcgggcgtgggggcagttccccagcccag

SEQ ID NO: 15017 - DNA, 211 bp, Homo sapiens
  source 1..211: mol_type = other DNA
catgatatagtaatattttggaaattttgtccgtcaacaagacaaaagacattaaaatatttttacattgcaattgtttatttattttccaacacccttgagaaacattaaaccttttttctttttttgatgtggaaaactggaaaactagtatcagaaatagactttccatctgggtggccccgcattgatcaatggacaaaagagtctc

SEQ ID NO: 15018 - DNA, 302 bp, Homo sapiens
  source 1..302: mol_type = other DNA
ttggcttacaccaccaccaagagttggtttaaatatagatgaagacaagtgaggacttgcgcagtttgtttatgaaatataaactctccagcgtgtcgtaccttagctggggaaaaggtcattcccgaaagagccaaccgactctggctttctgtgaaactgacagacactggacttgattttctttcccagggaggagaaacaatactgagccaaggggttgcagcagcctgctcccatctgcagcccccaccatcctcccacagtgggctctggctctaggtgggtccagggctgaactc

SEQ ID NO: 15019 - DNA, 358 bp, Homo sapiens
  source 1..358: mol_type = other DNA
ggtatcacagtcctaccctcagccggctgacacttatagaaagaatgatggcattttgatcaacaagaaatgttacccttatcgctgccaaaatgggctggagggccagtgcatggacagtcacaccactgcacaccagagcataaaagacctttaacagtccctgctactttgattttgcaacatggaaagttccaagcctcgcactctggagtcattcaagcatggggagctcctcagagggtgatcaactgacctccctcctccggaggtttgccctggagttgagccagcccttgaggaggccttcaatgagctcaggcctggctgggctccagggtagccctttaaaaggcct

SEQ ID NO: 15020 - DNA, 338 bp, Homo sapiens
  source 1..338: mol_type = other DNA
agccaaaaatttaaaaattaaaaaaaaaactttctgcaagatgaagtgacaatacctggaaaatacatgtgacttgaccaaaaattactataggtgaaaataaatttagcaaagttgctttcctaaaacatactgttaatggttccctctatgtgacagttcacagaactgatttcacggaatgtgaattatatctcaacaaactcctccgatgggcgggcggagcaagcctgccagcctgggcggggcctcggcacaggagctggctgcgggagcccgccgtcctgagtcgcaggccgaggagacagtgagtgcgcgccctgagtcgcaggccgagg

SEQ ID NO: 15021 - DNA, 423 bp, Homo sapiens
  source 1..423: mol_type = other DNA
caagttatcgcgtgagccaccacgcctggccccttgtctcaattaggggaaaaaaaaatatatatgtatatatatatgtgtatatatatgtatatatatgtatatatgtgtatatatgtgtatatatatgtgtatatatatatatgtgtatatatatatgaatggaatgatattctcataacctggaaacattattacttctgtttaacagatgaggaatataagacagaagctgagtaatttgcagccacacactgctaaatggtagcattttttaattatttgtattaattttaattttattttatttttaaagagagccctgccgcaggcgattctgaaccatagagtcaatgaaacaggatatcaatgaatagttcatgcgtcccttccttttcccatggaggaagagacgcctctttt

SEQ ID NO: 15022 - DNA, 517 bp, Homo sapiens
  source 1..517: mol_type = other DNA
gaactcaaatacaaatatctatatagaaatgatttaatgatttagtgatgtctttgttagtatgtacttataaaaggtagaaacactattatagaatctagatctccaggtttccaggtttttgaaattagctaaataaaatgttaagttcctgatcactcatttgccttacattttaaggataatattttaaagataaaatgtgttgttataaaagtaaataacaacattacaaaaagttatattttttaatagaaatggggtcttgctgtcacccaggctggaatgcagagtgacactactattcttaagagataaaagattatgaatactgatgatatcctctgtttcagattggctaaaaatttaaatgtaagtaacctgaaaatctttatttaggagacagacactcttagaatgtgattttattacctgttggataattgtaactaaagaggcagctgctatttgttcacaaagggtcagcttaaacattgctattgatttttaaatttga

SEQ ID NO: 15023 - DNA, 438 bp, Homo sapiens
  source 1..438: mol_type = other DNA
tattatcattttaatagtctggaagttgagataaatgcatgcttttcatcagtctatgaaatcaaaagttcttattcttaaaataatattaactttattcttactatgtaataataaataggtaccgttaacaaaaaccctatctcttaaaaaaattacttataatcatataacccagtgataacttctttttttctctgtcacccaggctagagtgcagtggcgcaatcttggctcactgcaagtagctgggattacaggtgcatgccaccatgccctggtctactttattcacataacagagtgtcctgaagaatggttcctagagaccatcagctagggctttctactcaagttagctttaggatctatgttttaactaataccatgtcctaattaattatatagaagaatagttcccttaatactgtattaagt

SEQ ID NO: 15024 - DNA, 499 bp, Homo sapiens
  source 1..499: mol_type = other DNA
atatatatatatttctttttttttttgagagagagagatggagtctcattctggcacccaggctggagtgcagtggtgcgatctcggctcactgcaacctctgcagctggaggtgatccacccatttgggcctcccaaagtgcctgggatattctttattctttttttaaaacaaacaaacaaaacagggtcaggctggagtgcagtggcacaatcatggctcactgcagtctccacttcctgggctcagcctcccaagtagctgggactacatgtataggcctatgatagatattcaaaacaatatatgtagaatgttaaataaatgaaagtatttattctgattattttaaacaatgtcctgaggcttggcatgcatttataagaatggcattatggaagtttcccaagaaaaaaatgatttttaaggatatttggcaaacagtggattgaaaataaaccattttaacttcataaaaagtggaaatactacaaatgt

SEQ ID NO: 15025 - DNA, 622 bp, Homo sapiens
  source 1..622: mol_type = other DNA
attcctgctgggaatacagattcggggcccttcccactctgtaaatatgggaaatactcctagcaataattggggaactgtccccctgaccgggggtacgccgccgacctggaaagcgttgcagggcgctcatgctgcccgcaggtggcgccacgtgatcgcgagccgcagagagcccgtaccctaggagtctcgaggcgcgaggactgctggtccgcagctgtgccggggccaccgacgccgcttaccccggcggagcgccgcgcaggtggagttggggacagcggccggtgccccggctttttaggctgtgtgcatcccaagccgcctccgggcttccgggagagccagtaaccggtgcaccgggaacctgccgccttgcgccgcagggctttagtccaaacctggccggtccaggctccgggatctactacaggggcccctggggagcgcgggccccagggacggctccttcccattggcagcaggagctctcgagtcgggacggtggctctcgtcgccccacccgtccgcggagcggcacggtcacgcccccattccagccccctggctgggagggcgggcacccgcttgtgattggctggtcggcctgcctctcgcg

SEQ ID NO: 15026 - DNA, 378 bp, Homo sapiens
  source 1..378: mol_type = other DNA
aggagagattagacgtttgttctctgtccaaggcatcgaatttcggccctgagagtggaagtttagacacattttctcactggtgagagctgctcggaccaaggaattcagtctatcctggtgctacaaatgtgggcaccaggtataggaggtcaggtacctcggccttgaggtccattagaaaaggatgccctctcctcccaaggaaaagcttcttctgaatgaggttccatcgtttgaagatctcgacgcagcgcggtcagggagcgtcggcttcgccgaactctgcggcggagctgggggacggaacagcgcgccggtccctggccgggcgcgagcagaggggcggcgcggggcggtgccgggcggcgggggcgc

SEQ ID NO: 15027 - DNA, 493 bp, Homo sapiens
  source 1..493: mol_type = other DNA
gaaaaatccaatttctttacaggtgaaatctcctggtttaaaaatgctcctttcgaaatattttaaaatataatgctctaaacacacaggtgctgggagaggcacttgctgaacatctttccgcccggagcctccccaggagctgcagaggggcagctggagagatgctttctcccacctttctccttggggaccctgaggaaggggacaagggcaggaaggctttctgtgcgcctcacctcaggatgagggtgggtgtaggggacacctcccagaaacccctaacctccctgtgtggtttccggatgggaaaccacttccgaagcagtcgattcttggggagaagcgctgcggaaaggggcgactccgatgcagatggccctgtcccggcgccccaggtcgtcgcgcgcgcagctgcggtagtcactgcgcccagactctgagcaggagctccgcccccagcgcgccgccccagccccggcgccttaaaagc

SEQ ID NO: 15028 - DNA, 318 bp, Homo sapiens
  source 1..318: mol_type = other DNA
tctgtaatcccagctactcgggaggctcaggcaggagaatcgcttgaattgcagtgagctgagatcgggccactgcactccagcctgggcgacagagcgacactccgtctcaaaagttaaataaataaataaatgtaatgtaatgcatgcagctcgattaacttttacaaaagtaagaatgggggataatattacctcataagattatttaattgtagcagcataatgtaaaacatctatcataatgcctaaatatagctggcctgcaataaatggcaattattctcaggcaaatgtaataggtggtcaccaatgccc

SEQ ID NO: 15029 - DNA, 503 bp, Homo sapiens
  source 1..503: mol_type = other DNA
agccaactccaaacctctcttaataaaattgggcattgttgggcccggcgccctggctcaggccaggcgccagtagtcccagctgcttgggagcctgaaaaaagcttttcgaattcaatataatgtgattagattttcaccttgtatcaatacactatataattccttaaaataaataaacgtacatacttcagaacaggaactttatacttcctaagggaaattaattggtactcaagtggaaatgattattatttgtgatgcaacgtcacatgctacctagttcagtgctctgtgaattaatgcaaacagaatattgttgcttggaacggtagcaattttgctgtttttaaaaggcggcgaagagagcgtccccttccaaggaagtgcggcccgcgcgccccgcagcctgccccggagctgcagggtttgcgccccgcggaggtgagggccgctaaaccacatttcccggcgagcccctcaggctgccgcgcctgcgcagt

SEQ ID NO: 15030 - DNA, 298 bp, Homo sapiens
  source 1..298: mol_type = other DNA
actgcaggctatagattgcactgtttcctgttatctcagtgacagaaaaaaaaaaaaaattcatagaaacaggaaagtttggggggtctagtttgctgataatttcacccttaatttcctttcaagcaaggggaaactgcaacagagccggcttcgaagcgcgtgtgcctggcagggaaccaggcctgggacagacctgacagtccggaagtgtgtcctacttccgttgctgtgttgcggaggccatagccaatcgtcgcattaggccgaatcgcgggggccggctgtggcttcttcc

SEQ ID NO: 15031 - DNA, 213 bp, Homo sapiens
  source 1..213: mol_type = other DNA
taaaggtccaaagtgaccaggaggcccggctggccgtgacctcgagggacgcttggagttgcgaaacggcgggcggtcctgcaacgtgcaggcgccaggtccaagcccggactccagcctcggcccggccggaagaagccacagccggcccccgcgattcggcctaatgcgacgattggctatggcctccgcaacacagcaacggaagtagga

SEQ ID NO: 15032 - DNA, 399 bp, Homo sapiens
  source 1..399: mol_type = other DNA
ttgagacagagtctcacttgtatgatctcagctctcacgcttcagcctgcctagtagctgggactaggcgcaggcgatgatccacgcgcctcgggctcccgaagtgctggcattacagtttaaaatttaacttcaatttttatgctttaatctcccagtggtctagttgaataattcctcagagacaacagcaagcctcttttacccttaagctaaaaaagatcttctttatgaagcataatctgatttgcattttaagttacttgcataattgttttatcttccaaaaagtgtgcatgttctttgaaggcagaggaattcatctgtagagctacagtgtatctctgacttaactgtagcttcttagtgagtatgtgctacattgaatctataactcaa

SEQ ID NO: 15033 - DNA, 427 bp, Homo sapiens
  source 1..427: mol_type = other DNA
tagcacatgctcaaacaaataaacaagcagaacttggtaccttttctttccgagcactgcagagctgacagatgtcgggggtaccgtgacgcttcagtggctcctgaattcaatcctcagccctccagggatccgaagcaggtcccgtggggaggtttgtccagtcagagggtggggccctggccctgagcatcctgcagggctcagcgcgggcctgacgacaccctcccttgaccctcgcgggcaggtctgggtcagatctcccccacgtggccctcccgactggtcccattggtgtggagcatggcccggtccgggtctgggccgagggcggagggccagcacggcccagggacggcgagcagcgggtcggtgggacgcgcagcagctgcccctcggggcccgccctcctctgcctggtggcgcc

SEQ ID NO: 15034 - DNA, 324 bp, Homo sapiens
  source 1..324: mol_type = other DNA
tggccaggctctgtctcagccccagaccaggagccccccggctggagctggatctgacctgcccttgggaggtcagggagagccctgggcatcagagcgagcatgctcagctcctcctctttgagggctggccaggtttctgcaggcactctggaggccactgatggaggagccctctaggattctgatacagcatggcaaggtccaggacctcaggcccctgcagcagccctggactctccaaactccagccctgctggagacagtgtcttcccagtctgtgtctctctagcaggtgctagcgccggaggtggagagccctgg

SEQ ID NO: 15035 - DNA, 352 bp, Homo sapiens
  source 1..352: mol_type = other DNA
cagtgagctcacatgtgggcacacacatggggaggcacagatctgtgggccccatggggatgtcctggccaggctctgtctcagccccagacccaggagccccccggctggagctggatctgacctgcccttgggaggtcagggagagccctgggcatcagagcgagcatgctcagctcctcctctttgagggctggccaggtttctgcaggcactctggaggccactgatggaggagccctctaggattctgatacagcatggcaaggtccaggacctcaggcccctgcagcagccctggactctccaaactccagccctgctggagacagtgtcttcccagtctgtgtct

SEQ ID NO: 15036 - DNA, 367 bp, Homo sapiens
  source 1..367: mol_type = other DNA
caagatcgtgccactgcactccagcctggactctatctcataataataataataataagtaagacccaggtttctgtctgtcttcatcagaagtacagaccacacagaaatttgcatttgggatatgggccaagtgacctttacaaaattcgttttgcaggtttcaggggtccctatgcccctcacagcctctcccatgggcaccttgaagactcctctcaagggtctcctcttccaggaagccttcggtcaggaataggtgcctgagacaagttcagagtcatgcttttgatcaagaccagaaaatatactacgctgcccggtcacagagggtgactcactcccccagacaggaggggagtggcac

SEQ ID NO: 15037 - DNA, 625 bp, Homo sapiens
  source 1..625: mol_type = other DNA
gaacatcttccatccctgatagaccaggagagatgccccgggtccaggaaggagaagaatgacttctgtttcccttcctgaaggcttcttggtgcagtgttgagctacaggaaggcactagccacatgagcagggcccttgctgaaacccccttcctccaggaagcctgagatctcttggccagagctccaggcttgtgagtctggtccgcgggcattcaaaggccctcagtggcatctgtgcatcagtgagactgccagcagggtcaagtgcgccaggcccggtacctggagctagggaaaccgaacattagtgctggctcgcccgcccccgcatccggggagctcggcgttctcgcggctgctgggaataaggccagccccgggtgccaccatactcgccccccgacccgcgccgccgagagcttgcggctacgggaacgcggcgcgccccggggccacatctggcctagcgggcgcgcgcgtgtcactaagacgctcattcaccggcgcaactgccggggcggggggcgggggcggcggtcgcaggagggacccggcgcgggcgggaccgcggcggtcgggggacaccagctgcgtcggagcgcccagaacgccccgcgctc

SEQ ID NO: 15038 - DNA, 740 bp, Homo sapiens
  source 1..740: mol_type = other DNA
agagggtcaagtgcgccaggcccggtacctggagctagggaaaccgaacattagtgctggctcgcccgcccccgcatccggggagctcggcgttctcgcggctgctgggaataaggccagccccgggtgccaccatactcgccccccgacccgcgccgccgagagcttgcggctacgggaacgcggcgcgccccggggccacatctggcctagcgggcgcgcgcgtgtcactaagacgctcattcaccggcgcaactgccggggcggggggcgggggcggcggtcgcaggagggacccggcgcgggcgggaccgcggcggtcgggggacaccagctgcgtcggagcgcccagaacgccccgcgctccgccgagccccgctccacgcagacccgcgggcgggagggagccacgcacatcgccgccgcggccgtctccgcggggcggtaaccgagcctgcctcggagccgccgaacgcccacgccagcgaccctgactctatggccccgggggagcgcgccggagccgccgcgccgcccacccccagccggaaccctagcgtcccggggagcaagcggggagccccgggcgtccccggccccggcccagggccctgcttgtggcccccgctcccgccacggggcatgggaggcaggtagcccagcctgcgccaggacacccgtggcgggcggaacccgcgctgaggagctgcccgcccgcccccggctgcagccccagcagg

SEQ ID NO: 15039 - DNA, 497 bp, Homo sapiens
  source 1..497: mol_type = other DNA
gctagtctctggcagagtcaagacctcacattcactcgagggctcaaatttagatattgacatctccaagtgaatagtcaggtcacttaccaactgtaaatgaacatttaaaatatgccacaatgcttactttttatctgttttacatatcaggaatcaaaaagaaaaatacctctaggaggcccaggttcagggtcccgccaccagcaggcaaggtcgcctcctaggcctcagcggtggaggctagcacgaaggcggggctgcagcgctgcctgaaccatgcgctgagcggggttggtccctggcggggcagggggcgggctcaggccggaactccagacgacctcagccaactgctcctgcgccgggcggggtcgtcgccgccagcggctccgagcgccggaagggccaggtctcagggctcctggagctgcaggcggcgggaggggctacaggaaaagggagggctgcgagggcgcccgttcctcccgggaccc

SEQ ID NO: 15040 - DNA, 498 bp, Homo sapiens
  source 1..498: mol_type = other DNA
ttccagagtctctgtaaattaggaagaattcctgatctttcctcactttaaaatagaaattctggagactaagcaccatcaaggtggccatgatttatttcaaagttcttaagtgtacaaccttccagactgtagatgattttgcacggctagtctctggcagagtcaagacctcacattcactcgagggctcaaatttagatattgacatctccaagtgaatagtcaggtcacttaccaactgtaaatgaacatttaaaatatgccacaatgcttactttttatctgttttacatatcaggaatcaaaaagaaaaatacctctaggaggcccaggttcagggtcccgccaccagcaggcaaggtcgcctcctaggcctcagcggtggaggctagcacgaaggcggggctgcagcgctgcctgaaccatgcgctgagcggggttggtccctggcggggcagggggcgggctcaggccggaactccagacgacctcagc

SEQ ID NO: 15041 - DNA, 332 bp, Homo sapiens
  source 1..332: mol_type = other DNA
gtcccagctactcgggaggctgaaaaaaaagagaagtggtcttaaacagtttttatgtatctgtgtaaccttctggtagggactattaggatcttcaaggaaaccgaggctcggagaggtcacctgcccaaggtcacatggggcccgtctgagagcgaaaccccgagccccgtgctccgctcacgcgaaccctcgggggcagccagtctgagggacgtagcgcgcgtgcgcggggccagaggggacgcccccacgcgagcgcgcggtgagcagggcgcgtgaccgggcgggcgcgcagccgggaaagcgcgcgggcgcgctacggagtcggc

SEQ ID NO: 15042 - DNA, 440 bp, Homo sapiens
  source 1..440: mol_type = other DNA
tctagggaaatctaaaggtccccaggatgtacttggagttgcaggacatctgggagcccacacatgcagtacattcagtcattagcatattatgaattagttcaccaaccttgagtcagtatgaccacaggccatccatgtgcctagaccatgctcatccatgagcccatccacgtgcctagactcatgaatcatgcagtgggattccagtacccatggcactgaggaagggtactgccacaaagttgtggcagttctccagctgtagaaggtaggcaataaaaaagcatttcctttatgctggtccttaaatagttaatctacctaagctggaaggagaagctttctgcctccagtaaagtttgattcctggaggcagatgtaaaccatgacacacctttgtcaagtgaacatttttgaaagatcactcagctttaaca

SEQ ID NO: 15043 - DNA, 461 bp, Homo sapiens
  source 1..461: mol_type = other DNA
tttaggccccctgggaagccagatgctatccaggtattcataagaattatcctgattgatgcaagttgaccctctagggaaatctaaaggtccccaggatgtacttggagttgcaggacatctgggagcccacacatgcagtacattcagtcattagcatattatgaattagttcaccaaccttgagtcagtatgaccacaggccatccatgtgcctagaccatgctcatccatgagcccatccacgtgcctagactcatgaatcatgcagtgggattccagtacccatggcactgaggaagggtactgccacaaagttgtggcagttctccagctgtagaaggtaggcaataaaaaagcatttcctttatgctggtccttaaatagttaatctacctaagctggaaggagaagctttctgcctccagtaaagtttgattcctggaggcagatgtaaacca

SEQ ID NO: 15044 - DNA, 489 bp, Homo sapiens
  source 1..489: mol_type = other DNA
aattctgcataattgaaagggttctgaaatgcacgactgggcagcttaggagcaagagccccacagctgttgttgtggtctgctacccttccatgggatgcagtgcccacaatagcaaggtgcagttgcacatcggtgctatgctgtaagggccccactgctcccctccagtatcttaggataatgcctcagaactgggaatcccagtgtgatgctgggtcccaggaatttaggccccctgggaagccagatgctatccaggtattcataagaattatcctgattgatgcaagttgaccctctagggaaatctaaaggtccccaggatgtacttggagttgcaggacatctgggagcccacacatgcagtacattcagtcattagcatattatgaattagttcaccaaccttgagtcagtatgaccacaggccatccatgtgcctagaccatgctcatccatgagcccatccacgtgcctagactcatg

SEQ ID NO: 15045 - DNA, 665 bp, Homo sapiens
  source 1..665: mol_type = other DNA
tactaaagctgagaatttaaaaattaaaatgaacattttaattatggctaaaaagtacgtgtgtttgtgcttttagagactgagagactatttactattcttttcttgccattagacaagaataagaataaaaaaaatttttttgtaaaacctcataaagattttaggtctatagtaacaaatagccaacagtagccttgggtattgaagaaattttaaaacacaaggaaagcctgacttaagttgatattaattactattattattggagtctactgcttaaatattttttcctgcctgaaaagtttcatacgaaacatacaatgtcctgtgtcagaaactaatagatttgaagtcacttaagacattgaaatgtacgctatgctttatctaaaggtacaatttagctatattccagatctctgacatgaagccgagaggaaactggatttccagtttgttttcaggagatgtagatcaacaaatgcacatttctgaaatacgggtttttctgagtatatgttctgaagttctttgaaaatctggccaaacaatgcaaggcaaaatgttgttttcctttctgcagccaggaaaaacacagctctaaggagctgctgattttagagactcataaaaacaactcgcccttagtataaagaatatgc

SEQ ID NO: 15046 - DNA, 355 bp, Homo sapiens
  source 1..355: mol_type = other DNA
taggtagtcctcaggttctgtaattattatacctgtcagatgttattaatagtaaagagacgatatcaatgtttaaaatggccattcaaggaaattcccaacttccacgtgactcatgcccggtagccagcaagggccctgtcggtctctggaccgacacaattgttgcgccacaacaaatccctcagatttgagtaaaagatagaaacggttttttgtttacaacaacaacaaaaaacccagctaaagtgccgggactctcggatagatttctaacatgtttttgggtctctgcctctggggagtccacaagctgtaaacatgcagccagccgtgcggcttctggccgccccac

SEQ ID NO: 15047 - DNA, 466 bp, Homo sapiens
  source 1..466: mol_type = other DNA
ccagcaagggccctgtcggtggaccgacacaattgttgcgccacaacaaatccctcagatttgagtaaaagatagaaacggttttttgtttacaacaacaacaaaaaacccagctaaagtgccgggactctcggatagatttctaacatgtttttgggtctctgcctctggggagtccacaagctgtaaacatgcagccagccgtgcggcttctggccgccccaccaggacattccgaagctcagcctcgcccgccccgaagacctgctgcggatcgcggccgcgcgcgcgcgcactcacgctgctctcgggcgctgggcggggagagccgcgcgcaccggcctcccatcgtgtgggccaagccccgccccaaccacccgctggcggaggcgcgcgcgcagtcccaccgctctgagtcgctgagtgaagcggcgcctcgcgcgtcaggcaatctggccaattgcgc

SEQ ID NO: 15048 - DNA, 419 bp, Homo sapiens
  source 1..419: mol_type = other DNA
ttcaaatacttttttttttttaacaaagcaaagggtcatcaaaatctttgaaacatttctattttcatgtagatccatttgagtcaatgaattatagaaatttaaatgtagacctaaagttccgtaggtctccggccttcttcagataactttttcagcaaaggaaactctctgaccaaacctgagaaagtctcagaaggacttctggggtcttctatacttttcttttataattagtttgatttttttaaataaactttaaaaaacaactttgcatagtagaaaattgcttatttacacagatgaagagtatgtggccatattttagatttaaaaatacagataaacgttctatttttatttaaatattaaaggtatgctctcgagacattagagtgtccagggatgcttttcaaagg

SEQ ID NO: 15049 - DNA, 435 bp, Homo sapiens
  source 1..435: mol_type = other DNA
gcacgtgcctgtaatctcagctacttgaaataaataaataaataatataaataaataatctaaatgaaagtctgtttagaaatttattgatttttaaaaataattatttatttagagacaggtctcaggctggagtgctgtggcgtcatcccagctcaccgcagccttgaactcctgggctcaagcgtagctgggactacaggcgtggcccggcttgcggcacggaggtttcgctatgtcttccaggctggtctaagcgcggaggcaattattggccgcaccaatgttgctggtcagcaaggggcccgcccctcgcttggcttgccgctcacccattggccgagagcggcagaccttccaccaatctgctcggctcagaagggagcgggccaaagcgcagagccaatgggcgcggggcttacggtctccgggata

SEQ ID NO: 15050 - DNA, 287 bp, Homo sapiens
  source 1..287: mol_type = other DNA
agcattcactgaatgcgcatgttacatattcttaagaataagctgttagtttacattgccaagatgaaattcaactgatctgttaacaaggaatagctatttagcaacaaaatgggaagtgagtcccttcacaggccacaggctctgaagtcgtgaagccttgggacggtgaccccttcgttcggagggatgaccacagccccttaagatgttttaagggctatcccataaggagctggcggccgccgggggcaggcagagggcgggaaggacgcgccacctacttc

SEQ ID NO: 15051 - DNA, 231 bp, Homo sapiens
  source 1..231: mol_type = other DNA
ggcagcataggtggtgtcccatttatgtaattaaatactgtgtaggctgcatcagcaactaagcttacgcatggaatcagggctgttcaagttcgccattgagagaaacctccgaatgactaattcttaaatttaagggtgcataataatccgctgcatttccgcagggtccctcaacccaggtgacgcaggcggtgtggggaccgcatccggagggcgacctggagccga

SEQ ID NO: 15052 - DNA, 468 bp, Homo sapiens
  source 1..468: mol_type = other DNA
ttcttatatgtaataatagttcattcagaaactggatgagaaatattgaatgcttagcatgtgtctgatacatagtaagtgttcaacattagctattattattttatgattatttcaatgtagcagggaagactttacacgtgggactcgtagaacaccttaattaaaggtatgcggtttaaagacctgttctttaaagttggcacctactgtgggcgtggcggtgagagaggtcccgcgagagacctccgggaactcgggcaacccggcggcagcagcagcaaggaggcggggcctagacggggcctgcccctcgcgccaatcctcaaagctttggaagtacctgcccagcagtgcggctgagccaatgggcgctcctggagatcgggattcgcgggtcctgccggcgccggtggctgacgaaccggtagtggttggctgtgggaccccggcacccggctccgcacc

SEQ ID NO: 15053 - DNA, 463 bp, Homo sapiens
  source 1..463: mol_type = other DNA
cataggtggtgtcccatttatgtaattaaatactgtgtaggctgcatcagcaactaagcttacgcatggaatcagggctgttcaagttcgccattgagagaaacctccgaatgactaattcttaaatttaagggtgcataataatccgctgcatttccgcagggtccctcaacccaggtgacgcaggcggtgtggggaccgcatccggagggcgacctggagccgacagcggccaccaaagccccggctgccggcggcggaccacctctgctgccgcgcgcctaccggagccgcttggccctaggtgcggagccgggtgccggggtcccacagccaaccactaccggttcgtcagccaccggcgccggcaggacccgcgaatcccgatctccaggagcgcccattggctcagccgcactgctgggcaggtacttccaaagctttgaggattggcgcgaggggc

SEQ ID NO: 15054 - DNA, 335 bp, Homo sapiens
  source 1..335: mol_type = other DNA
aatgcatttacaagcaattcacatcagctcaattctggaaaatttaaggaattatttttttacctgctgaaattcaggatctcagcttatcagcgtttttcagagcttgggtaaaatctcacaatgtgagttgtctagacaccaaagttgtctaggtgtctaacttacttacttgttggagtttaagatgtagaggaggcccctccaaagcttttctccccaggttaaagcccagtagttcaaaaattaaatttggggcaaggggtgcgcgccagagcgcagctgtttctggagcctgcggcagcggtggcgagccacagggcggcgaccgtgag

SEQ ID NO: 15055 - DNA, 368 bp, Homo sapiens
  source 1..368: mol_type = other DNA
gtttttcagagcttgggtaaaatctcacaatgtgagttgtctagacaccaaagttgtctaggtgtctaacttacttacttgttggagtttaagatgtagaggaggcccctccaaagcttttctccccaggttaaagcccagtagttcaaaaattaaatttggggcaaggggtgcgcgccagagcgcagctgtttctggagcctgcggcagcggtggcgagccacagggcggcgaccgtgagctccgggagcctctccatgggcgccggcggagctgcctggccttggcctgcagaccggcggggcaggaagggggccacactgccctctctgggacttgggagttggagctcccacagccatcttggg

SEQ ID NO: 15056 - DNA, 353 bp, Homo sapiens
  source 1..353: mol_type = other DNA
aagttatggatttcataaactattaagggtagtaacacttgtacagtatccggtcactgttctcctttgtgcccggttaatcccggagaaaagcaacgattatcataaaagtcgcgcctcacgcctgtaatcccaggcgcttcggaaggccgagtcccagctactcggggtgagccgagatagcgccaccattgcaaaaaaaaaacggtagtaagctattttaatcctttcaagctgcaaaagagaaaaaggctggtccgggtaaggacttaaccccttccgccgaaggtcttcccggcggatccccacacggtcctccttaaggagcttccggggccgcggttataaggagg

SEQ ID NO: 15057 - DNA, 553 bp, Homo sapiens
  source 1..553: mol_type = other DNA
ggggagtcccgccccgggagtcttcaccaggcggattttatccggcctgacgcctattcctcccttacaggaagggagggaaggggacttttctttcttagcgctctgctcagatgtgagaagtaaccccgctctgggctccgaggctgcgcgcgcctcgaggaggagctgcccgcagccctggctggagcgagcgcccgggacgcatcccccgacgcggcgggaacgcccgcctgggcacgcgcgctttaagggaagggggtctccaaagtcagcccccacccgggaggagcaggcgcccgcgctccccacaccctcctgcagccacacagctcgagctctgcgggcttgggtccccggtcccggtccccgccgcgggaggacggctccagcacaggctttgcgcgcaggtcgagggccgaggcgccgctgcttgcaggcggctgcggtggagcttgcggcccggcacttagaggggcgcgggcggcgatgcccccgctggctcccaccttctggcctgcagcggccggcaaaaactttttcctccttataa

SEQ ID NO: 15058 - DNA, 274 bp, Homo sapiens
  source 1..274: mol_type = other DNA
cagtagcattatttaaacatttttaaaaaatacactgataaaaattttgtacatttcccaaaaatacatatgtcatgaaccaaggagtataattatttcaactatttgtacctgaagtccagagtgggactcccccagcctctcaggggcaccgcccattgggatatatttgcatatttctctgaggaactagagggcgtgtccgttgccaggcgacgggccgacgcgccgagcgcgggtttccgctcggggcgggcgatagagacagcgcgtc

SEQ ID NO: 15059 - DNA, 500 bp, Homo sapiens
  source 1..500: mol_type = other DNA
tgcaccaagcgcgcaggctacactcctgcagtagcggattgggcttctctcgccccacctctggccgggaggtcggggcaaggagctggcaagtccccgatcccaccgggggggtgctcggggcgccaagaggagggggctgccgagagcgtgatgcacgcactaacgtgcacacatgctcgtgcaaacgcgcacgcacggaaccgcgcgccccacccagccgcgctcccggcccggctcagccaggtgcccccacgcggcagcgcccggtctgcccgccggccccctgcgaacccctcgcctcacgcccgcctgcctgcgcgcacgcacgcgcacgcacgcattccccacgcccccgcgcgggggcgcaggccttgggtggcggggtttggccgggagccggccgggccagggagcggcgagcagagtccagggtgcatcccgcgcttggcttccgtgcgcagcctccccgcgcggaggcacctggctccctctcagtt

SEQ ID NO: 15060 - DNA, 511 bp, Homo sapiens
  source 1..511: mol_type = other DNA
gcacgcactaacgtgcacacatgctcgtgcaaacgcgcacgcacggaaccgcgcgccccacccagccgcgctcccggcccggctcagccaggtgcccccacgcggcagcgcccggtctgcccgccggccccctgcgaacccctcgcctcacgcccgcctgcctgcgcgcacgcacgcgcacgcacgcattccccacgcccccgcgcgggggcgcaggccttgggtggcggggtttggccgggagccggccgggccagggagcggcgagcagagtccagggtgcatcccgcgcttggcttccgtgcgcagcctccccgcgcggaggcacctggctccctctcagttggcgttgagcggctcccaactcttcgccgggagcacgttggagtcatattttaagaagattttcttattaccttttattaagaggaccggcgaggcgcgccagccggagccacctccttcccggccctcgctcgctcgccggcgcgcgcacaccccccgcgccgga

SEQ ID NO: 15061 - DNA, 571 bp, Homo sapiens
  source 1..571: mol_type = other DNA
ttcctccaagttgctcgaaatttgattcaatgagtttgcagtctcttagggaaaccaatatacgcttaaaaaacgcgtagtggaaagcgttttcttaaatatgattgcatgcaggaagatctccccccaggctgggacacacaccctatcttcgactgctccgggagcccggggtcgaccgcccccgcgggcagggtgcgcggactcagcgccgggacccgcggccgcgggggcgcagagtgggcggcggggagaggcggcggcagcgcctgcgaggccgaggggaggtcgccggcggcgcctccagcgcccggagacccggtgcgcagcgcagctcggccgcgggacgcggcgcccggagtcccggcagcgcctgccctccctcccgcgtcgcccgccagcgcccgcgcccgctccgccagtgacttcagctcagctccacccccgcgcggcggcggctcgctccgtccggacccgcgctcggcacaagcccagcccgggcaagcggccgccacctgcccggcgccgcctccgcccgcccccaccgcggcgcaacttggatggagttggg

SEQ ID NO: 15062 - DNA, 603 bp, Homo sapiens
  source 1..603: mol_type = other DNA
taactagaaactggaatcggtactattttgttgtgtcattcatttattcaatcagtaaatattcattaaataatgtaataacatgtacctaagagaatattacgtatatgagcaaactgtctactttaaaaaggattggattttgagaaatcctttgccgttttcaaagaacttacgaatagtagcagggtgctaggctgggcagatactataatcatacaattatagaattttaggagcgaaaggtcatctaatgtgaccatttaattttaaagcttaggaagctgacagattgtgatttgtctgaggtcccaaagcaaaccaacagacttgctattagggatctcaaagcatgtggcagtagcactgggccaggcaccaagtgacacagaataactataagtactgtgcctcctttcctgtatttatttgttatgcagatatgcattagactcacaataaatatttattgaactaatgactttcctccaagttgctcgaaatttgattcaatgagtttgcagtctcttagggaaaccaatatacgcttaaaaaacgcgtagtggaaagcgttttcttaaatatgattgcatgcaggaagat

SEQ ID NO: 15063 - DNA, 691 bp, Homo sapiens
  source 1..691: mol_type = other DNA
gttaggaacattccaattctactattttcattatttaaaaatatataataaattattgttgactgtagttatctatgctatcaaacagtaaatcttattcatctttaaattttagctcacctatgaatgagaacatgcaaaatttatctttcaaatgacaggatttcattctttttatggctgaataatattccattgtattttatcattattttagagtgtacttcctctgcttattaaaaaaaaaaagtaagttaacaggcagttctgtcagaaataaggcattgctatcataggagatgacagctccataggtgttattcctcctgaagacttttcagtagacctaggctaatatatgcatttatgtcttagtttttccaaaaactttttaaacttaaaaagttaaaaatagaaaaaagcttgagaagcgaacacttctcttaagctgttttaagcttaagctaagtgctattacaatagtcaaaaggttaaataagttaaaacatttataaataagttaataataaataaataagtcaataataaataaataagttaaaacatttataaataagttaaaacatttataaagttaaaaaagtacagtcagctaaggttaatttttattgaagaaagaaaaacatgtttaataaatgattgtagcctaagtgtacagtatttataaagt

SEQ ID NO: 15064 - DNA, 525 bp, Homo sapiens
  source 1..525: mol_type = other DNA
tctagtgaattttcattttaattatatttttcaactccagaatttctatttttttgtataattcctatttcaatactatctttttaaagcaacattaccgtcatacttttaaccaaggttttttaaaattctttgagctgtttataatggttacccctaaatctcaacttttttgttcacagtaattggaaacttaagcttattactgaggtttgcttacttacttagtgatagtctggattaagagcagtctatggaagtataatctctataggtctatataatttctctaaagccttacatcagtttaaagctgtcactgaaacagtgaatttttattttaattacatatctttcaattttgtaaaattcctatttttcaatatcatcttagagtaatgttactgtcacatttgggtatcccagtagtaggccttcaagggtaactgatgaccaatctgaccaagagtcctttaaagcgggcccccaaccattaccagtctgtggctagttaagatctgggcc

SEQ ID NO: 15065 - DNA, 251 bp, Homo sapiens
  source 1..251: mol_type = other DNA
aaaagaaaaacaaagccccctttgctttaatctttattctagaattgcaaataaagccaattaagacttttgcattaaatttattttaattctgtattttgacagctgtataaagggggtacagtcttcactaggtaaggaatttatctcccctgccaggcagaccagcagaattccatcatgctattaagtaagtactcagtattgctggacatagctgtttactaaaaatcaagcagttaagaagccag

SEQ ID NO: 15066 - DNA, 341 bp, Homo sapiens
  source 1..341: mol_type = other DNA
gctgtaaccacacgggtggggtggtacaaccctctgatgcctaaattttgcctcttttctaaagcttgagaccctgttccaaagcctcgaagaccctgtcgaggttcttcggccctttttcctctttgaggaatgacgacaaaaacgactgcgtcctttccccgctcgctgcagggagaggcaatgcggaggaagggcaggccccgctctgggccgcaggcgctgcggccgcgaaccccaggtccgggagtgtgggcggggcctgcgtgtgggcggggccgcggcgccagcgcccgccacgggcgagggcgtggccgacccggcgctagcccgcccgcccg

SEQ ID NO: 15067 - DNA, 562 bp, Homo sapiens
  source 1..562: mol_type = other DNA
cacattttaatagtgtaaatagcagattcatatgcacttagagtcagtcaatccacttgtgtttcttaattttgctgacctttgaattgccactgaaatagcattaatactgtgctattatccaaaaattattttagatatattttgttttttctatacataatactgtaattttattttatttttacccaggctggagtgcagtggcgcgatgctcctgggattacaggcgcctgccactggccaggctggtcttgaacttatatcacatgagcacacattctgtcaacaatatattttctaatactggtattcactgaagttccaagtatgcttataggtaggacttgaatccattgcttctagtcacataaacgagttttaattcatttttctttttattcttatattaaatactaaatagctttcctttatatagttattattttagtacgatgttgaatattagcacaaatattaaattaaattaaatattagcacaaattactaatcagtttcaaggcatacaactttataaattagcagggctctttaaaacttg

SEQ ID NO: 15068 - DNA, 486 bp, Homo sapiens
  source 1..486: mol_type = other DNA
tcctatagactaaaaaagcatgcagtttacatagtatttgatctcctgtacgtccttctaagataaggaacagatccctgatttggccactcttggatttcttagctcagaattctgaacacacattcaggtgcatctgatatgcacatgtagttatcactgtcaggtgtgtctaacattcatggaggtgtattaaatgaaacaacctacattaacacagtacctggcacatagtgagtgctcagcaaatgttagtaatactattatgttttaataagaatggtgatttttctccacccccatttgaaatgaaaatgattggccatgcagaatcaatattgttttatatccagattttgttatgtttaattttcacaaataccaaccgctattaaaaataaaaaatattaactagactggtttttacaacttgatctctatttatactgtatataatctgcaagtgattagatttcatttttatta

SEQ ID NO: 15069 - DNA, 437 bp, Homo sapiens
  source 1..437: mol_type = other DNA
tggcgatgcctcgacttttcgcctcaaagaagtgaagcccctgtcctccccctatgtggaggtgaagcaggcaaagtccaggccccacggggggcgtgcggaggttgaacctttgcagtggcctcctacagccccagcagccagcgtgggcggccgaggctgactcaaagcggcggctcagcctcggcccctctggccctccggggacgccgcggatgcagccgccccgaaccaggccctcccggctgccgggcctgcaggcccccaccgctgcggcttcacggacttagagcttgagggcgcggagggggggggcgggaccaggactcccgaggggcgctcggggcggggccagagagagctcggggctgccagaggcgaggtccggggccgggaggcttcggagcccaagaggcggggccaagggacgctcgagg

SEQ ID NO: 15070 - DNA, 545 bp, Homo sapiens
  source 1..545: mol_type = other DNA
agcccctgtcctccccctatgtggaggtgaagcaggcaaagtccaggccccacggggggcgtgcggaggttgaacctttgcagtggcctcctacagccccagcagccagcgtgggcggccgaggctgactcaaagcggcggctcagcctcggcccctctggccctccggggacgccgcggatgcagccgccccgaaccaggccctcccggctgccgggcctgcaggcccccaccgctgcggcttcacggacttagagcttgagggcgcggagggggggggcgggaccaggactcccgaggggcgctcggggcggggccagagagagctcggggctgccagaggcgaggtccggggccgggaggcttcggagcccaagaggcggggccaagggacgctcgaggggcgctcggctagtcccgccagagcgcgagccgccagcccgtaacgttaaattagattttttaaaacacaaagcgccagaggcgtcggcatcccaggtgtcgccgcttcctgctgcatggggctctgcggcgcttaagaggcg

SEQ ID NO: 15071 - DNA, 394 bp, Homo sapiens
  source 1..394: mol_type = other DNA
tgtccaagctcacacagtctgtatgcacagtacttcccagggctggaaagcatccactgccacttctgcctctcaaattaaaggggagctttgcacagctgaaccaaggctgggcagaggagtgtggagagggatgctgacatctcctcccacttctggaatgtgaaggcacacacaggtgcctcgcaagtgtgtgggagcttagccacctaactatgtgccaggcattgtgctggacacttcaggcattatttttctgtgaaaaaagtagtttgtttttatgcaggtgcaaaaagacagtgttctactgcggggacgggcaggggcggtccctgcctcgctcgcggcgacaggctcgcactaggacccaggcgccagagtgcctccgtctgtc

SEQ ID NO: 15072 - DNA, 220 bp, Homo sapiens
  source 1..220: mol_type = other DNA
cgacaggagccctgggaggcggcagctacctagacccgcagctctgagctgccgctgaggaaaaatgtataactgttaacggttctcatttaagagcctactcagtaaacactttgcagtttcagggaagtatcaacacagtaactttggttggaaattgtcactaagtggctttgcctgcttccttcagaaggcagtcaaatgactcccttgagagtag

SEQ ID NO: 15073 - DNA, 445 bp, Homo sapiens
  source 1..445: mol_type = other DNA
tttatggatccaaccaggcctttattgcttttttaattgaaataaattatatatatatggtttaaaaaaaaaagaacatttggcttccactccaaacctctgaacagttttgtgtatccgtccagacgtatatattattacaaacatacacaaggggcatttctttttgaacacaaatgtgagcccaactaaattaaaaccaagtaggttttaacaaaacagattttaaagaaatcaatcttctctccaataggttatttctgtatcctagcacttaaaacaagagtctcatttgcatttccaataaattccaagccggaactccattccgcgcctggcgaagcccagctacgccttcgtgtccctgacagccagggactggctagagggcgcgcggagtcacgtgagtcgagcgacctcgcgcgagagtttgtatttctcgcga

SEQ ID NO: 15074 - DNA, 383 bp, Homo sapiens
  source 1..383: mol_type = other DNA
gagaaaacatcatcatcgcttctatttactgagtgcctagtatatactaagtgctggaattattatatttaatctttgcaaaaagcagtgcctggcaatcatatccattttatacataaggaaagaagggcttcatggaaaccctctctgatactcttcttattttgcagatgagcaaactgaggcacataagttagggagtcgctgagaaacgtttccccgggagtatgtctggagggaggaaaaaaaaattcttccctcccagaagcacgcaggcgccctgaaacggcgtgtgcactacgattcccggcagccgcgggcgggtgcgggaccagaggcaggggcgggagggggcgggccccggcgctgctcccgcccctccc

SEQ ID NO: 15075 - DNA, 413 bp, Homo sapiens
  source 1..413: mol_type = other DNA
aaaatagttcaatctagaaataattagggccagaattgtctccagcaagtaatttcagagcagcccagagattcattttctaaacaaatgatgtttttctctttaaagtggattaaaagctttcagccttacctaaatctttgttgcaattgtacagatctgcctagatttatagcaggttgtcctccgagtgggcaattcggcgtgcgcgcgaggtccgcttttttaaacagcgcggaatcacgtggccgacagcccgcggcgctactggccctcggagtcccgcgctcggagccaaccctaagcttttgactaagtctcaggaaagcgttagctacagaattctgaaagagcagacctgaacttgactcctcctaccctaaggtggttccgtccgaggcgcggactccgcc

SEQ ID NO: 15076 - DNA, 478 bp, Homo sapiens
  source 1..478: mol_type = other DNA
gaggcctgaagcccctggggtggagtacaacttattattctaatcattatttttttacttttacaaactttattatgaaaaatatcaaacatacacctcggtagcgacgggaatccgttccggactcctctggggccctggccggctccctcggccctgctcagcgcggcgcgggcgggttctcagcccacgtccgtgaagctgaaggccggatcgtgcggcgccgccccgccccccacggcgcttcctcctcggtccgcaccgcgagggtcaccgcggccccggagcgcctgggacactcgaccggcagccgcgggtgatgcgcgagtgagtcccggaagagagaacgaagaggcgccttccacttcctctcgctgcacccgccccgcgcgtccctcgcccccgctgccccgccccctgcagggcgtggccacggcccgaggggcggggaaacacccatatttggccttatatgggc

SEQ ID NO: 15077 - DNA, 539 bp, Homo sapiens
  source 1..539: mol_type = other DNA
cgggaggaaaatgagttccctgagcaaactcctctccaatcctgggctctggtttcccagcttcccggggacgctggcctcaggacttagaactcctgtatgccggacagccggtaaggtctactgggcctctcagccttgaaaggccgcagtgtccgcgtccacagctgtgaaccggtgagtgcaggtggacgggcgcacgcgggcgccagggtaattaacaataacaagaataaaatgtacgcatggttttgtgaacccacggtggccccaccggctgcttccggggacacctgaaatcagcagctggaagacctgggttacaatacaagtctgacctcggggcgagtccaggctttcttcccctcagggtcgggtgcctcaagagccagtggcgctggccgggctccagccgcgagcagatgccaggcccggcacactttgcacgggcgatgcgcgcggacgtcccgggcgcgctcggtccgcccggcttggcaggagctgcgagaggccgcgcgcaccgtccccagggacagccg

SEQ ID NO: 15078 - DNA, 745 bp, Homo sapiens
  source 1..745: mol_type = other DNA
ctctcagccttgaaaggccgcagtgtccgcgtccacagctgtgaaccggtgagtgcaggtggacgggcgcacgcgggcgccagggtaattaacaataacaagaataaaatgtacgcatggttttgtgaacccacggtggccccaccggctgcttccggggacacctgaaatcagcagctggaagacctgggttacaatacaagtctgacctcggggcgagtccaggctttcttcccctcagggtcgggtgcctcaagagccagtggcgctggccgggctccagccgcgagcagatgccaggcccggcacactttgcacgggcgatgcgcgcggacgtcccgggcgcgctcggtccgcccggcttggcaggagctgcgagaggccgcgcgcaccgtccccagggacagccggaggactcagggctcccgggtggagcgagagcgcggcggccgaccgcgggctgcgtgtgtcgccttcctcacgcggtatgctgcgccgtggaacgctgggctacggaccctgagggtgcactgtggcgggtggcgtacgccgcgctccctccccgcttcctgcgcccagggtcggcgggcagagttcctgggtccagcttggcgctgagcagcccccggccgcagagcagctcccgccggtcgggagacgccccctggcccccgcccccgcgtggccggccgggacgagctggagcagcgggaggaggcggcgccgccaggactgcctcctcccc

SEQ ID NO: 15079 - DNA, 309 bp, Homo sapiens
  source 1..309: mol_type = other DNA
tccgcgccgggctgcaggctcccacgcgagccggctccaagggccccgcactcccggagacagcaaccaggaaagcggcggcggcggcgcctcccagggccccggcccctcgggcctcgccccggcgctgccggctcgcgcctgtcagggcgcacggggcctccccctaccgacagccagcccgactgcccgacggacaggaaggcaggcagagagacgggcagtgccgccagcttctggctagccgggctgtctcaccgttacccggggcaacagctgagccgtcagttctccgaaattccctctcct

SEQ ID NO: 15080 - DNA, 245 bp, Homo sapiens
  source 1..245: mol_type = other DNA
actgggcagccaagggaaagcgctggccgagcccccatgagggaagcctaaggttctggttatcaccctcaggggaccgtgacctgaacttcaaagagttttggagccgctttatatctgtgaaatgggaattatttccatctcaaaggtttgaggggattcgctgagagaaacttcttagcatcggtgagctgggtcgaggaagcttcatcctcgtccccccaggagccacatgcgcatgcgcc

SEQ ID NO: 15081 - DNA, 459 bp, Homo sapiens
  source 1..459: mol_type = other DNA
tgcgcccgggccctcgccaacgatttacacgactcggggcgccctgcggactgggcccgggggcccagggagccgagaggagagagactgtccgccgggggcccccggcccgcgccctcgcgccggctcgccgtcgcccaggcgctgtccgggccgcccgccgccgccgccgcaggcccggccccggccgctgtcacacccgaccctctccgcgccgggctgcaggctcccacgcgagccggctccaagggccccgcactcccggagacagcaaccaggaaagcggcggcggcggcgcctcccagggccccggcccctcgggcctcgccccggcgctgccggctcgcgcctgtcagggcgcacggggcctccccctaccgacagccagcccgactgcccgacggacaggaaggcaggcagagagacgggcagtgccgccagcttctggctagccgggct

SEQ ID NO: 15082 - DNA, 350 bp, Homo sapiens
  source 1..350: mol_type = other DNA
ccgctggggtcctcccggccgggctgcctctggctgggttagggcggcctgtagagcggcctcaccccacagggagcctcacgggggcgggccgccgccaggccagcccggaacggaagcggccctgagcccctctgtcccacagggaccgtccggcccgggtccggcccactggttgggggcacgggcggccaggctattaacacccttccgccatgacccaattcggaagtgccaaatgcaacttccgggcaggagagggaatttcggagaactgacggctcagctgttgccccgggtaacggtgagacagcccggctagccagaagctggcggcactgcccgtctct

SEQ ID NO: 15083 - DNA, 398 bp, Homo sapiens
  source 1..398: mol_type = other DNA
tgcatgctttctaaagttctaatttttatttagaaacaaatgtttttgaattaacaggctcatttcctttattttcaagaaaatgtctgccaaatactagagactcaactgaggttttgataatccatgtatatttgaattactttctagtgtccttccatttcaacccaaagtactcactttatttctaatagcatttttgaaggatagtttttatggatatagaattcttgttagacagtttaaaaaaattcttttagaactttgagtattctgatgagaaattaaatgttaatacttagtatctcttgtttttctaagatgaagaattctttctgtctgtcagcagtttgataatcatcttaagcttcttagatgtatagattcccattatgagt

SEQ ID NO: 15084 - DNA, 392 bp, Homo sapiens
  source 1..392: mol_type = other DNA
agacgtttaaaagccattgtcttataaatggtcctgttgctccatcttagctggctagactggattgctataaattttaaactatctaaatagttgcatatatttagggggaaatacaatgtggaataactgaatcaagctaattgacatatccaaatacttctcagttttcatggtgagaacttttgaaatgtactcttagcgattttgaactgtataatacattattatttactatattcaccatgctgtgtaacatatagtccgaagggggaaaaaagcccttatttctcctaactgaggctttttatactaagaccctgaggctcgcaggccgggccccgcccccggcgctggctagccggcggccccgcgtcaatgccacgcgccgg

SEQ ID NO: 15085 - DNA, 293 bp, Homo sapiens
  source 1..293: mol_type = other DNA
gggcagggaactgtgccaggtttggctcacctccatatttacctaatacttaagttcctttaaatattgagctctaatatatcaagaccctttgagggtttgtctaccagtctatagggcctgtaagagcctcagagggccttcagtgagctgcacacaccccatgggaagctgtggacacctccgctgagaatgaggttactgagctcagagctttaccattcattgcatcattaaattgtaacaaaggaagcctgtgattggctggccaagctcagcctagcaggccttat

SEQ ID NO: 15086 - DNA, 265 bp, Homo sapiens
  source 1..265: mol_type = other DNA
cacaaagaccttgctgatcactgctcattatgtattaattataatgcattagcatgctttacaaatgcgaaggcatttaccctgtgtagtctgagttttcctgggaaatttgtgaataatccatcccttgtttagcatataatcaaggagtaaccataagtatattcagttgagcagtccatgctgcttcttgcaccaagaaccctttttggtgtctgaatcagtgagaacttggcgagccttcagtgaagtcctgcagctgcag

SEQ ID NO: 15087 - DNA, 386 bp, Homo sapiens
  source 1..386: mol_type = other DNA
atatcaacccacagcccagtgccttgtgaatggtggatactcaataaacattcgtaattgaattgtttgattttaactttctgatatcttggttacagaatatgtaagtctttttgagattattgatttagacatctttacagaatccacaaacaaaaaatgttgtttgtttatcaaaatgctaagcagagctattaaaatgatactatcatattcttttgtttaaagaatagtttttagcttcctccatcagttaattattatcactagcaacctatctcaggctggtggtgatctgtctgggcaggcaattgctcagcacctggctcaatgagcctttagaacaaattgatccgactgtttgtggttccaaaagccacccagta

SEQ ID NO: 15088 - DNA, 271 bp, Homo sapiens
  source 1..271: mol_type = other DNA
acactcaccgccagtgtgttcattcttgaagtcagtgagggcacacggtgtgggcagccagctccacctgtggccacggtgcgggatcgactgggtgaagccagctggcctcctctagctaagggattataacctgtgtctagggttttaacctttatgtctagctagtaaaccattcagcaccctggtctagctcagggtttgtgaatgcaccaatcgacactctgtctagtgggctgtaaaacagaccaatcggctctctgtaaaatgg

SEQ ID NO: 15089 - DNA, 229 bp, Homo sapiens
  source 1..229: mol_type = other DNA
gagccagaggatggaatgccacaggccccacttcgtctcccagaggccaagggctcagctcttgtgttctctgagactgtggcacagctcattccttagtaggaagcttttaagaactgctctgtagaaagtgtagccacagccttaggcggaccaaggcggcagctctggtctgtgaggcttctgatctgagatcttagttgaagggaaggctttgacatttcagttg

SEQ ID NO: 15090 - DNA, 234 bp, Homo sapiens
  source 1..234: mol_type = other DNA
cccagaggccaagggctcagctcttgtgttctctgagactgtggcacagctcattccttagtaggaagcttttaagaactgctctgtagaaagtgtagccacagccttaggcggaccaaggcggcagctctggtctgtgaggcttctgatctgagatcttagttgaagggaaggctttgacatttcagttgtgaaaaaaaaaattctgacatggcctgactcgggacagctcag

SEQ ID NO: 15091 - DNA, 406 bp, Homo sapiens
  source 1..406: mol_type = other DNA
ttttgccgcatataattataacaatattattactaacacaacaagattgttttctttgaatactcacatgtctataatttacaaatgaaaacattaagactcttaagacgttaagaaacgtttccaggtccagccgggcaaggctctcaccaggcgggagtcgtgggaccctcgcatcttgctggtgatctctgcagtgagcaccgcgaagtcctgctcgaccttcgaagtcggacgacatggagcccaggccaaagcctaggtcagggaaagggcctcgaggggcagcgaggggccccgcggcttagcagctctcattttccgctccgactttaagataagtaaggaatcggctccggatccacacgctacttgcttccggagggaggttgaacctccggaagtg

SEQ ID NO: 15092 - DNA, 287 bp, Homo sapiens
  source 1..287: mol_type = other DNA
ttctaagctgcctcttatgaagtcttgaattaagccaagtatgagtcagacatggctgcctggactggatctgaagatctggaagatggtctcattcaggagagcctgctcccactctggtgggacaaagaccgccatcgcatatccggggcggcctgggctcacccggaacagatccttggatgactccgtcatggactggagtgcgggacctgctacaagccgagcacctctcggccagcgccctcgccaggactctcccgctcacacttccggaggttcaacct

SEQ ID NO: 15093 - DNA, 301 bp, Homo sapiens
  source 1..301: mol_type = other DNA
ctgcctggactggatctgaagatctggaagatggtctcattcaggagagcctgctcccactctggtgggacaaagaccgccatcgcatatccggggcggcctgggctcacccggaacagatccttggatgactccgtcatggactggagtgcgggacctgctacaagccgagcacctctcggccagcgccctcgccaggactctcccgctcacacttccggaggttcaacctccctccggaagcaagtagcgtgtggatccggagccgattccttacttatcttaaagtcggagcggaaaa

SEQ ID NO: 15094 - DNA, 188 bp, Homo sapiens
  source 1..188: mol_type = other DNA
tcaaaaaggactttgactacatttaaaagaatcatatatttttccttaaggatacttttaatgtttctgacatttagcatttgttttttgcataaaaagtggacttaacatttcatgaaatgattcactactagttaatagtttccccaagctctctgaaagtggagggggcgctgaatgggccggcc

SEQ ID NO: 15095 - DNA, 187 bp, Homo sapiens
  source 1..187: mol_type = other DNA
ctacatttaaaagaatcatatatttttccttaaggatacttttaatgtttctgacatttagcatttgttttttgcataaaaagtggacttaacatttcatgaaatgattcactactagttaatagtttccccaagctctctgaaagtggagggggcgctgaatgggccggcctttgaactgaaaagc

SEQ ID NO: 15096 - DNA, 102 bp, Homo sapiens
  source 1..102: mol_type = other DNA
cttaacatttcatgaaatgattcactactagttaatagtttccccaagctctctgaaagtggagggggcgctgaatgggccggcctttgaactgaaaagcag

SEQ ID NO: 15097 - DNA, 98 bp, Homo sapiens
  source 1..98: mol_type = other DNA
ggcgctgaatgggccggcctttgaactgaaaagcagttgatcggatccttgggaaagaaaaagaagcagaaaaaagttcaccttggactcgtcttttt

SEQ ID NO: 15098 - DNA, 527 bp, Homo sapiens
  source 1..527: mol_type = other DNA
gccactgatgcagtccacgtgccaaacagggatggcaggcaggggggcacaggtgagcacatgcctccgctggcagcagctcctggaacccaggcatagaaggagattaagatcatgcctattaaagagatcaattgtgtccacaagaaccaaacaattgtcctgaaatatgaacaccatgttttttttcctccgcttgatcaaagaaataaaaagtaaaagtcttacctaatgaggtttaaaacaaaacttttgaagccaaagaatcaatgtttgtcaatagcagttttgcatcctttaatttatgtctcatgaatgagatttgatgaaccagaagtctatctggcagaggcctgtggcacagggctgtcaggcttcctgctcggaacacccagcagctgtcatgtgcaccgtggagcctttctttggagagtttctccccagaagagaaaccattgtttaatcaagatagttagtttgcaaaacattaaacattaaacagtatttgatgcctagttaataatttg

SEQ ID NO: 15099 - DNA, 391 bp, Homo sapiens
  source 1..391: mol_type = other DNA
tggtgtgagtattaaatttatttcattaatccaataaatctttattaagcatttttaaaaatagaaacattaacatgtaatatgtccagccaggaagagagattctgtcttcatatcacctcttgccaaaacaccaagagttctcattagtttttagttttgcgttccagtagaagctaaacacaaactaacaccttattaagtttttagtttaactgttgtaaacgctttgggtaggtaaagttaaaattcaagtgtgatatttatccatttaaaggagtgaatcaatcctacatacaccagggtttggttatccacataaacatgatgctgttgtgagttcatttttctatttagagaagcatgtcagctagaaatacttccaagtgtt

SEQ ID NO: 15100 - DNA, 187 bp, Homo sapiens
  source 1..187: mol_type = other DNA
ttgtgtctaagttaatcaattataattattcccttacacttgccaggggtcagtctttttttttcaaaccaaggaagcatcctcacctctttaagcatgtactccattccaaggattgtggttgtaaatactgtgtctctgatatgaataaaactacaatttcttctcagatattttacacctcagt

SEQ ID NO: 15101 - DNA, 543 bp, Homo sapiens
  source 1..543: mol_type = other DNA
tccaggagcagcatctccaccagcaagctgggctgctgggtgggtacttccgctgagggagcgtcctacgcccacgcgcgcaggagggcgccccccgcgtggatgccacagcgggcccgaagcggatcagccttgtggtgtaggcgtggagtcccccagggggacgccagcagttccagctgggatccactaggggagagcctctgggggcggggaagtggaggtgaccacacgagcgccccatcactgagcgccgccgcgaaatctgcgctctttgggtcacttggagcgcggccagtttttcccggaacaacccgcggcggctcggctgtcccgggaaactgcaaactttgctgtgcgcgttctcccgcgcgcgggctcaactttgtagagcgaggggccaacttggcagagcgcgcggccagctttgcagagagcgccctccacttccacccctgcggagcgcactaccccgagccaggggcggtgcaagccccgcccggccctacccagggcggctcctccctccgcagcgccgagatc

SEQ ID NO: 15102 - DNA, 460 bp, Homo sapiens
  source 1..460: mol_type = other DNA
cccggggccgcctagcccaccgcttcgcgggagggcgccgtccccgaggaaggggaggtgccgggaggggcccccaccccgacgccagcccctcaccttcgatactggtagaccaggctgtccttctcctgctgggtaacggcgtcgagcagggcgtactctagcgaggtctgcgcggggagcaggccggagaggctgcggccccggcctccgggcgccgccatgtttccgccgggctcccgatgcggccgccgggcccgcgggagagtctcgctgggagttttaaagcacgccgcagccgagcctggggccttagggacagcgtcccagaggcgctaagggaaacatcccaatccgtaggacttaaaagggcaatgtatttttaaaaattatttttaaagtctctctctttggcagcgggaactgttcccgccatgactggcgcgagtggctttcactt

SEQ ID NO: 15103 - DNA, 528 bp, Homo sapiens
  source 1..528: mol_type = other DNA
cattgccaccggggacactaaatattcacggagtgtccacttggctcagacgagtatgtggatccccgtgccagggaaacccccgtcggtggccgcttggggacccctggcactccccggggcgccgcctagcccaccgcttcgcgggagggcgccgtccccgaggaaggggaggtgccgggaggggcccccaccccgacgccagcccctcaccttcgatactggtagaccaggctgtccttctcctgctgggtaacggcgtcgagcagggcgtactctagcgaggtctgcgcggggagcaggccggagaggctgcggccccggcctccgggcgccgccatgtttccgccgggctcccgatgcggccgccgggcccgcgggagagtctcgctgggagttttaaagcacgccgcagccgagcctggggccttagggacagcgtcccagaggcgctaagggaaacatcccaatccgtaggacttaaaagggcaatgtatttttaaaaattatttttaaagtctctctctt

SEQ ID NO: 15104 - DNA, 356 bp, Homo sapiens
  source 1..356: mol_type = other DNA
tggcaagatatgcttcacaaacatccctgccgggaatatctgttggccaggatttaaaccctggaaataggctataattgattccgatttttaaaagtattagtttggtaattgaataaggtaatatctcctcaagtgtttaggtatcaggccgggcgcggtggctcacgcctgtcccagctactccggaggctgaggcaggtgaatcgcctgaacctgggaggcggaggttgcagtgagccaagatcacgccactgcaatcattgccaccggggacactaaatattcacggagtgtccacttggctcagacgagtatgtggatccccgtgccagggaaacccccgtcggtggccg

SEQ ID NO: 15105 - DNA, 513 bp, Homo sapiens
  source 1..513: mol_type = other DNA
tgttttaaagtcaaatcatttattttctatgacaagacactttaactgcaaaatgtgcttcatttaaggaggagtgaggtgccattacacctccgtgtgtgtgttttgctagtaagttttgctttacaaattcttacattgcagaagaggtttcttccttctctgggccgggcgaggtgccaggttactcagccgggaacagtttattattaaacaatggcagcagtcgtagcctgctccagccgactccgcccacgtaaggtgcaacctgactcatgcaggtgcgtgggtccgggggcaggagacccggctctccaggtcgcggaggcgtgggtgcccagccaggcggagtgcggggcggggcctctcgggccgcaaggtggggcctcctgggccgggaggtgggaggtgagctccgccagcccagcccactgaaggtgtgctgcgtcaccccgcccgcgctgcgctgattggttcctccagggagcccccgccccctcagctgtaaccggg

SEQ ID NO: 15106 - DNA, 377 bp, Homo sapiens
  source 1..377: mol_type = other DNA
atcaaaatattttcaaagtttattaatcttgtccgaggtacagaaaaaggcaagatctctgaaagtatcttttctaaaaattgtttcaccaagggttcccttatgaaattgttagaaaagttccatagcacttaaaaagcttgtctttcacgtgtgtgtttactttccggccacggtgacccagcatctttgcgcccaaatttgccaaaggcgttgccagagacatctttctagaagaagctagaacaaaataaaagtttctgcaaaggaactttttgagcctgtaactagagcacaagctgcttccggggaagggtgtgcacgtggacgcggagtgcgcaggcgtgcgctgaggccagcagggcgcatcccaggcg

SEQ ID NO: 15107 - DNA, 500 bp, Homo sapiens
  source 1..500: mol_type = other DNA
gggagaaaaaaatgagtcctttcctagcctccttcaatgaggtttgcaacattaaagtcaccacgggccactttcactggaagctgtcagtgtcggagtgtaaagcaaattattttcctatcagattgacatttacaagaataatgataataggcatcaaaagtcttaagttgtataaaacctgtatcctagaaatttaccttttcgtagtttattctaaggaattaattggacaaaagcacaaagacatctaattgtattattaaaatggaaagtttaatattcaacaataaatgaactaaaaatatataaatttttgcataggtagaatgaaaatgattgatttatcaacttgtgcagtcatagtcaacgttcattgagagcttactttatataaagcatcatgctcagcattgtgctttgtggcatttgattttttaaaaatcaaacgccctccaatcttaagcaaggatgatggccaaaagtcaacattttttcaa

SEQ ID NO: 15108 - DNA, 597 bp, Homo sapiens
  source 1..597: mol_type = other DNA
attttaaagtgaaaactgaaaaagtttggccgagcttccttatggaaccggcgccacccctccaaggcggtcaggtttactgggcgccccggaaacggcactcctcacacaccctgaagtgtgggagcaggtttggttgcccccgctgccctcctcgcccctccaggaaggcctagggcaaaagcgcgctggctcgggagccaagcgcgaggagctctaagccagtctcaacctcctagcttggaccgaacaatcttggaggcccacccaagcccggcctcccggagcctcccccagagtttgggaacgtcccagtctcgttccctctcgacgcccccggagtcaagacgtgaagggagtgccaaggcggccgggggcggcgagcggggccgcgggcgcgcaccgactcaagagccgactgtcagcctcggcgggccggagttctccggcgctgggacaggggcgctgggacaggggcgctgggggcgagccctggcgggggccaggtccgaggaccctgggcgcggcggccccgccaggaggtccggccgcgagcgtgacctcacggggaggggccagcgcggcggcctgggcgct

SEQ ID NO: 15109 - DNA, 517 bp, Homo sapiens
  source 1..517: mol_type = other DNA
acctctatgaaagagatcataataatacccatgtcacagggatatcagtgatgtacagcccttagcgccgtgcctggcttgtggggagggctccatccacattaggtgctagtataactaagaaaaatatttctacatgctgttgggaggggttgggggaggtctccaaacatcacaactaggaagaattaagaagtctttcttcaaggaagctggggattttaaagtgaaaactgaaaaagtttggccgagcttccttatggaaccggcgccacccctccaaggcggtcaggtttactgggcgccccggaaacggcactcctcacacaccctgaagtgtgggagcaggtttggttgcccccgctgccctcctcgcccctccaggaaggcctagggcaaaagcgcgctggctcgggagccaagcgcgaggagctctaagccagtctcaacctcctagcttggaccgaacaatcttggaggcccacccaagcccggcctcccggagcctcccccagag

SEQ ID NO: 15110 - DNA, 348 bp, Homo sapiens
  source 1..348: mol_type = other DNA
tgagcaaattgctacccaggctggagtgcagtgcgcaatctttcacctctatgaaagagatcataataatacccatgtcacagggatatcagtgatgtacagcccttagcgccgtgcctggcttgtggggagggctccatccacattaggtgctagtataactaagaaaaatatttctacatgctgttgggaggggttgggggaggtctccaaacatcacaactaggaagaattaagaagtctttcttcaaggaagctggggattttaaagtgaaaactgaaaaagtttggccgagcttccttatggaaccggcgccacccctccaaggcggtcaggtttactgggcg

SEQ ID NO: 15111 - DNA, 427 bp, Homo sapiens
  source 1..427: mol_type = other DNA
gaaaaaactccctcaaagatttttttttccttttacgaatgggtgcaagttcaaatgggaccccataactggtgattgtgagcagctaacactaaaatattctgtctcacaatagttatgatagcatttaatgtttctggtgcagaagtaatttttcttgcaagaataccttttgatatctaaacaaagtgtactaactgatattcaaaatcagaattattaaaaattgtaatttgaagaattcatacttatttatacgttttcaaatatttatttaagtgcctacaacatgtgaggcatttgggaatgtcttctaatagagctcacatttggatgtcttctaattctgaacctgaatgtaaggaaaagtcaacatttaaaattttctatttaaagtgctcttggttgggaacatcttgttgcatca

SEQ ID NO: 15112 - DNA, 560 bp, Homo sapiens
  source 1..560: mol_type = other DNA
tgggccagatacgtattttcagcactaccagcataaaacaaatttcttcaggatacaaatattttcataatttgtattaactcaaggcttgactaatacactgttagggagtattttaagttttccggtatcatctgataactgaatagaaaatgctgttctgaatatcaaccatatcacaaataaattatgttatatattatatataaatattataatgggctatttaaactaatgtttcaatgttgaataataatatattttaaagttagcaagttgatttcttcaaaatctgagcatttaaatccattgccaatgtttgcttaaagaacactgttttcttaacgagtctgttacttccactggagaaacaggcgccctgagaaagccgggagagggcggtggctgcccacaggccgcctccagccccgcgcgaggccgaggcctcagcgcgccccccgcccccgcggcgcctagcggccccgccgcagggcaggcctggccgggcctccccgggctgcggcggcgccccctgcaggccgcggcgggcagagcggggg

SEQ ID NO: 15113 - DNA, 685 bp, Homo sapiens
  source 1..685: mol_type = other DNA
gtgggcatcacttctgctcttctgaaaaaaagccccgatgctgcaatatttttcaaggcagagcgcggggctcggagcctcgcaggcttcgttattcccgaggcagcaatggctccccctcggaggtccctccgcggagaccgcctcgcgcctcgctgaccccacaacgtggtcggactgcggttgttggagtttttctctcttaagagaaaaagaagaaataaaagcgttgcacttttgcagctgcagacggcggacgggaaggacttcttttctgctgaagggggctcccggggcgcggggtgcgggtggggccggggtgcccgcaccggccggggggaagggcacgcgggccacacctggggggcctgtctccagtcagcgcgcgggccaggcggggtgggcgcgcgcgcgtgggggagtccccggtccctgtcaggggcggggcgagaccaaggcgccgggcctgtaggcgcgcgcgagggcggggggcggccccacgcatcgtgggctcccggcgctgccgctgcggccggctcgaggcaccggagacagaatggctgccggggcgcccttgaccgccgggcgggcgaggcggggctgaccgccgcctccttgatcgcccccttccacgttgggcgcgcccacttcggggcgcccgctcggcccccgccctcctgggcgc

SEQ ID NO: 15114 - DNA, 746 bp, Homo sapiens
  source 1..746: mol_type = other DNA
gatcgctgaccccacaacgtggtcggactgcggttgttggagtttttctctcttaagagaaaaagaagaaataaaagcgttgcacttttgcagctgcagacggcggacgggaaggacttcttttctgctgaagggggctcccggggcgcggggtgcgggtggggccggggtgcccgcaccggccggggggaagggcacgcgggccacacctggggggcctgtctccagtcagcgcgcgggccaggcggggtgggcgcgcgcgcgtgggggagtccccggtccctgtcaggggcggggcgagaccaaggcgccgggcctgtaggcgcgcgcgagggcggggggcggccccacgcatcgtgggctcccggcgctgccgctgcggccggctcgaggcaccggagacagaatggctgccggggcgcccttgaccgccgggcgggcgaggcggggctgaccgccgcctccttgatcgcccccttccacgttgggcgcgcccacttcggggcgcccgctcggcccccgccctcctgggcgcgcggcgctcggagccgaggcagttggcgcgggccgcgggcgaggcggggccgcgcgcggggtcccctcctcctgccggtcaggtcccctcaggagcgccgggcgcagtctgcgcctcccgctccccgcctccggccgggtccgggacgccgcggctgtggggtcggcccgactggaggcagccgagcggaggcgacggcggttgggatctg

SEQ ID NO: 15115 - DNA, 515 bp, Homo sapiens
  source 1..515: mol_type = other DNA
ccgcagctggacgcggtcggttgagagggcccggggggcgctcgtggcgccgggctgcacctgccggggcacgccgggactgcgggccggcgcgctcgccctgggctggggtgcggaagcgcccgagtcctgggcaccggaggaaccgggtttcagccccagtcgggacatcggttccccctggcttggcggcctctggagggagacgagccggcggctgagcgagctcgctggctgacgcgaggagggggaggccaacttcccgggagaaggggctctttcggcgccagggctggctagggagctgccgccgccgccaccgagggctcggactccaggcagctgcaggctccgctcgcgacgcgggttgaaccccgcacatgcaccccgacctgggtgggggtgggtcctcaccccggtgttggaaattccccaaaggcgggactgtggggggagtctccggcgctctccgctctcatctcaaagcgcgccctcccttccaggttgggtcggac

SEQ ID NO: 15116 - DNA, 391 bp, Homo sapiens
  source 1..391: mol_type = other DNA
cagcccgcctgcaagcagccgctgcagccgaggggcgcgcctggctgaggagagcggcccaaccctcctgggcgcacgcagatttgattcaaactcggtctcccccagtgtagacttcggtgccccgggcgccccccggcgtgcgggaaggggagcgtgtgtcagcacgactgggaaccagcggtcccaggggttgttaatttactctcgaaacagccaaaatgcttataaattttctaaagccaggtctggcctccttgtcggagctccaggagtgagtgtgcacgcgctggcgtggacgaacggatgggcgcatcccaggatcgccgctccagcgtgtgtctgtgtgtgtgtgtgagagagagagagagagagagatgtgtgtctggca

SEQ ID NO: 15117 - DNA, 630 bp, Homo sapiens
  source 1..630: mol_type = other DNA
tgtctttcactgagataagcatttgtaaacttcagtttactggaaatactgttgacaagtatattgaagttacttctgaatacttacagacaagtcatatgaagacaattaaattggttgcagcatttctattgcagatgatgaaagcacatatataaataatatcacctagttagcaatatgtaatcggtgacattgattatctttgttgctagaaacgttttgcaaaatgcatcatcaattggtcaaaaccagtcactgtgactcacctcctgcaatgaatagtgttaatatccaagagacatagaatttagatctcctaattatgtcattttgccaaaatgtgtggtaattgacaatgtgaacagaataaaatttctttttatgaattacataagatatttctggacacttttatatcattcaagagagaaaagtgaatcaaagtatttaattattttggctgatattagaacctatagactttcaatataaaggcattcacaaacagatgatgccttttgatatggtttggctgtgtcgatgggagcaatcggatcatgagggtggtttcccccatgctggtctcatgatagtgactgagttctcaggagatctgatggttttaca

SEQ ID NO: 15118 - DNA, 756 bp, Homo sapiens
  source 1..756: mol_type = other DNA
tgattcacaataatttcaaatttataaaggaaaaataaaatgttaatatgtacttctaaatgacatgatttatacttttcagtatttattcttttaaaataaactcaaagaattaagttttatgcatcaatggcttgatggaaattaaggcggaaatttggaataggttaaaatgtataactgattagactgcagcattaatgaaatattaattaagcctattgtgatgtgacagaattaacatttaccttattttacttaattttaagtacattctgacaaattactttttaaagttcaaccaatgtcaattttacattcataaagtcaaatgtttattttacttaattttaaatacattctaacaacaaattactttttaaagttcaacaatgcaattttacattcagaaataaagtcaaatgtttattataatgtcaatatttcaacctactaaaactaaaaatattttaatttttgatttaaaaaatcccacttcatgtttaagctttaattagcaaccactttggtctctgacacatattgcgcagatattgaagtgttaatattactgcagcttgattacaaaagcaatgattaattttaaagtcagacattgtagcagtctttgccatcgtcaaagtataagactttgtaaaagtttatatttagaatcacagttactttgtactttataatattcagtcaactgggcctaagacctttggggttcacatgcccagggcaaacctgccc

SEQ ID NO: 15119 - DNA, 469 bp, Homo sapiens
  source 1..469: mol_type = other DNA
aatttcaacagctttttacttatactgtggagacaattattattgcagccattatgcaaaataaattgctttgcttttcatattcatttgggctaggtgctaggatgtgacaacaaggccctgagcatttataatatacaaatgatcagtcttaagtgagagaagttctaaaaagaaccttcctgtgtccatccatggatctaaactttgtgacaatttcaacaactcagtgtatagctgtgacactttcaggctaaaaggttctggtctcttaaaattatggtatcacattgtactctttttaacatttattgtaagcaatccatcattaactgaaaacatccatattttccatcaaacaattctctttcagattattttttctaaaccttcctccatgacattgttgagaaataaatcagttctatggactatcaaaattaatcaaatgcttagctctcttgaactt

SEQ ID NO: 15120 - DNA, 638 bp, Homo sapiens
  source 1..638: mol_type = other DNA
gttctttgtctaattcttgcataatgtaacaaagtttttatgaaaaggctgtgcctcataaatgttggaaattttaatattataatagtcagaaacaaaaagttaggaaaaactaagaaataatgttagctattttctatgagcgtttaaaaattgagaaactgactaagaatatctgtagattgaattgctcatcactttaagttaacatagtagccaaaatggcaagtttctattacgttaaagtatatcatgaagcctatgtacaatcatgtaaggttatatttagctatatgtgaacatcaatttgcccatacaaaaaattaacaggtaatatagtacttactatgtcttcagacaataaataattcaatcatcttatttagcatatgagctatagtgaggcttactccagcattcgggctctaaagattagctatgtttgttattgaattggtttggaaaaaaaaaattaccttttaaatgcttattatctaacaccttgtaaccttaaagtaactttcaagagtgactcagtttgtgcttaaccaaaatattactaataatgaaacagcaaaaccttggaagtttccattgccaatcataagatgttgcagagcataaggtggaataacatg

SEQ ID NO: 15121 - DNA, 307 bp, Homo sapiens
  source 1..307: mol_type = other DNA
tcgcagaggtctctggttatatcatgatggctttacatatctgcaggtgtgcaacctcgcataatgcaatcattgttcattgcatagcaatatataatccaaagctcagaagagaagaagttttcttaatcagagatttctctttactttcaactaattgcaggtattttcatctattctaaatgagaaatactattctgctttaaccaagcattctgtcatatttccagacttgtgggaagacttgacaggcagattaaagtattaagtgcgcacagcatgggctataatcacctgctgacgtaca

SEQ ID NO: 15122 - DNA, 450 bp, Homo sapiens
  source 1..450: mol_type = other DNA
taaactttgtgacaatttcaacaactcagtgtatagctgtgacactttcaggctaaaaggttctggtctcttaaaattatggtatcacattgtactctttttaacatttattgtaagcaatccatcattaactgaaaacatccatattttccatcaaacaattctctttcagattattttttctaaaccttcctccatgacattgttgagaaataaatcagttctatggactatcaaaattaatcaaatgcttagctctcttgaactttggtatttgtttttaagactgctgttatcaaatctgtgaaaacaatttaatttcacaaacctttactatatagaacctttactataatgaaattaaagtggttttgagctttttactctgtcaaccttagtttatctatgattaaaattagaaacatcaaaaagataagcttcgcctataaa

SEQ ID NO: 15123 - DNA, 435 bp, Homo sapiens
  source 1..435: mol_type = other DNA
cactgccaatgccaaaggcctggctgggctcttgcccctgggcatcccagccgtcacgtccaagctccaccagccttcatttgcagttcaattttcagaaaacctggaagtagcgcagcttcagcgtcattttctcaatgagaggaagcccctcctaacaggagacagggagggaggggctgccaggcccaggaagctcctgtattggaggcgccagggcccccaggcctcgcctcctcccgctgcagacccaggcgccgcagtgcttcccctggctggggcagccaaggcgcggaggacagctccgaggccagtactgcgcagatgcccgactttacaccggggtccgggctgtgccgggcgctgggggaagcgcccaccttccaggtgggaccgcgggggcctttgtgctccaccgggtgagcgcacaaaggc

SEQ ID NO: 15124 - DNA, 400 bp, Homo sapiens
  source 1..400: mol_type = other DNA
tgtgtctgcaaactctcttgtcttctccctctctaccccatctcaggtggtggagagagagttattctaacaagactaggccctttgtttgctgggaaccaaggccccatcgatgggcacagagccccttttctctggaagaaagtggtctagccagacactgccaatgccaaaggcctggctgggctcttgcccctgggcatcccagccgtcacgtccaagctccaccagccttcatttgcagttcaattttcagaaaacctggaagtagcgcagcttcagcgtcattttctcaatgagaggaagcccctcctaacaggagacagggagggaggggctgccaggcccaggaagctcctgtattggaggcgccagggcccccaggcctcgcctcctcccg

SEQ ID NO: 15125 - DNA, 219 bp, Homo sapiens
  source 1..219: mol_type = other DNA
gaacgtgagccaaggccattcccccaaagggcaagtggccgtttctctcctgtgggcctgcctggcacgggcggccttaggcggggtggcccaagacgctgggccactgggacccgagcgcgcgaccccagccggaattcggagctaaggctgccgcagatttccccctctggaaaatcgccactagtctcgggagtctaggaggagatctgggggtcg

SEQ ID NO: 15126 - DNA, 762 bp, Homo sapiens
  source 1..762: mol_type = other DNA
gcttccttatctgtagcacagtgccaggcacccggaaacgacccagtgacggtgctcctcggattcctattactgccctcgtttgccaaggcagggtggtgacaccgcggacccagggggtgcctggccaggcccaaacaggtgccagcggcgcgtgtcattcacaactgaagccttgcattattaatatcgtgcaagcacctccctgggtccggagttgccatggagtcccgcaggcggcctggaggcggtgccccgggctcggcccccgcgcaggtccttggtctgcggcctgggtcctgcccgcgccggggtccacccagcccgcctttgcgccggcccagggccgctcccctgggaccctgggggacagacagggactggcgcgggcgtcctcgggagagcgccgggcgcgctgggcttgctgaagggctccaggcctggccacaaagaggggacgcgccgcggggccccgagggcctgaaatccgctcccgcagcgcagccccgggcgcgccactacccccgccgcggtcgactgcggggcgaccgctcggtcccgaagccgggagaggagaggccgggcctcggcgggccgctctgggcgggcggggagcgcagctccggagccaggcagttccccgcgcccgccttccccgacctttcccggccggcccgagctcggaggggcggggcgccgggcgggccggggcggggcccggggaggagccgtggctgcggcggctgccgcgtcagagcagcg

SEQ ID NO: 15127 - DNA, 596 bp, Homo sapiens
  source 1..596: mol_type = other DNA
agtaggtatcactattcttcctattcttcagatgaagttcaaaaacaatgcagacctgccacttctctgcagtgaactgggacaaacgcttggcttaactgccagcctctgctgcccgggggctgcgcggcattcggactgcagtggcaccctctagggaaggtcatctgcaagggccctccaggccacctggcaaacctggtgcgatgggggaaagctagccagggccctccttcacaaaatgtaccaccctgggcccgcccctgtgggcgctaggttttgccccagagggaagaagcccaggcgttgttctttgggagcgacccccgggaagcgtccaaagtgaactcgcgtccctgagtccgggaggtgggcggagaaaagggtgcggagcgaccccacgcagggccgccccccctcccaccagcgcgtcctgccgcgccggcagccacaggctggcatagcggctgccgacccgcccctgaacgggactgctgggcccgccccgccccgcctgcaggtgaagcggccgcagccgccgagtaggtgcgtggggatgatctcactcgcgcgctccgcgccaggaggaggaggag

SEQ ID NO: 15128 - DNA, 476 bp, Homo sapiens
  source 1..476: mol_type = other DNA
tgcctgtaatctttattaaaaacaacaaaaaaaaactgcattataaattctggacttggtgttttgtgagtaggtatcactattcttcctattcttcagatgaagttcaaaaacaatgcagacctgccacttctctgcagtgaactgggacaaacgcttggcttaactgccagcctctgctgcccgggggctgcgcggcattcggactgcagtggcaccctctagggaaggtcatctgcaagggccctccaggccacctggcaaacctggtgcgatgggggaaagctagccagggccctccttcacaaaatgtaccaccctgggcccgcccctgtgggcgctaggttttgccccagagggaagaagcccaggcgttgttctttgggagcgacccccgggaagcgtccaaagtgaactcgcgtccctgagtccgggaggtgggcggagaaaagggtgcggagcgaccccacgcaggg

SEQ ID NO: 15129 - DNA, 416 bp, Homo sapiens
  source 1..416: mol_type = other DNA
agacggagtctcactctgtcacccaggctggagtgcagtggcgcgatctcgggtaggtgggactagtgcctgtaatctttattaaaaacaacaaaaaaaaactgcattataaattctggacttggtgttttgtgagtaggtatcactattcttcctattcttcagatgaagttcaaaaacaatgcagacctgccacttctctgcagtgaactgggacaaacgcttggcttaactgccagcctctgctgcccgggggctgcgcggcattcggactgcagtggcaccctctagggaaggtcatctgcaagggccctccaggccacctggcaaacctggtgcgatgggggaaagctagccagggccctccttcacaaaatgtaccaccctgggcccgcccctgtgggcgctaggttttg

SEQ ID NO: 15130 - DNA, 277 bp, Homo sapiens
  source 1..277: mol_type = other DNA
tcaaagatattgtagcagagacaatgaaatagctaggggaaaacttttttgggagatactttttgggaaaactttctccccacaattcaggatgaatcttgtcaaaagttttatatattatccaaacaatttagtgtattcatgaggtacgtccccccgggtgtcggacaactcaggcgctacctgatcgccaggctggggacaacgtgctcagaggacgcgggtgctgacgaggcggcctcgccgcagctccaccaggatcctggaccagactggc

SEQ ID NO: 15131 - DNA, 235 bp, Homo sapiens
  source 1..235: mol_type = other DNA
tggagcatgctccttgcacaaggccatgcgcttgaattgaatcattgtagcctaatcaattctcaaagatattgtagcagagacaatgaaatagctaggggaaaacttttttgggagatactttttgggaaaactttctccccacaattcaggatgaatcttgtcaaaagttttatatattatccaaacaatttagtgtattcatgaggtacgtccccccgggtgtcggacaact

SEQ ID NO: 15132 - DNA, 450 bp, Homo sapiens
  source 1..450: mol_type = other DNA
ctcctttgcttataaaagggatggacgcccaggcacagcatggtggggagagagtacaggacacagggcctaggcctgctgccccgcccacagcccgaggtccagggtcccctgctcaggtggccccagagggagggcgacactgaaaagtgtcgtggcaccccgcatcgggctgcagaggaaagggaagcctgtccctggctcccagcacctgtcacccagggacactgaggctcaaagagccacgtttccccaggcctgggtccccaaggcactcggccacgcgctgggtccggggaagaggcgcggccgcggccgaggcggggacagggaggcggcagcccctcctgcgcagcgacggcgcgggcgggcggaggccggggcgccccagccccccgcccccgctccctccggccgtgacgtcagagccggacggggtaaactgagcgg

SEQ ID NO: 15133 - DNA, 491 bp, Homo sapiens
  source 1..491: mol_type = other DNA
catattaatcttccaatcacttggcaaacttcgagggaaatggcgcgccccagggcccaccctccgcggacgcagagcgtctgccggggggacggcaggtccgcgatggctgcctctgaggcagtcggtcccctctcgccgtgggcttgggaagcgtccgaaaggcccgctcggatcgtctgcggtgctgcccgcagggaaagcgccgctgccagccgggctgtcacgggtgcgacgccgctgcagaggtaaccgcggggactgcggctaacgggatggccggcatccggaacgcgtcaggcccgctccgccggaccgcccgcagctccagaagtgacggccacgtgggtggcggcgcgcgccgcggggaaggacccgcgtccgcgtgcccgggcgccgactgctgggcgacgccgccgggagcgagcacgcctctgacgtcacgcgctgctcgtccaatgagtggaggcctgagggaggcgccggtcccg

SEQ ID NO: 15134 - DNA, 365 bp, Homo sapiens
  source 1..365: mol_type = other DNA
aaaaacaaaatcattttctgaagatcaggatcttatctctgatatgtttattattaagttatttgtcaaagtataattaagaattaagaccagctgggcatggtgccgtgcgcctgtaatcccagctacatgaagcagagattgcggtgagccgagatcacgccataaaaaaaaaagaattaagacacttgattgctatgtattttcttaaccaatgagatgcccagctgctgaacctcattctttcatcccagggcttctttggggactacgcagaagtgcttatttgcaatgcaatatggtttggctctgtgggcagacttccccctgttctcatgatagtatatgagttctcatgagatctt

SEQ ID NO: 15135 - DNA, 405 bp, Homo sapiens
  source 1..405: mol_type = other DNA
acacggcccgggaccggagggcataataataataatagaaataataataataaaataatatcatctataataataataacattgaccctccttccagaattgttttggggaaggaggtgagcaccctcccagacagcccactgctccggcggggtcggcagctcccggtcgcaccgaccctgggacctcgaggctaagcgtggttgatggggtgggaggaccccgtacccctcactccaggatccctcctggccaacggcgcctttatggggcgatcccagttctcccgacgcggggccgcgtaaggcagcagcggcggagcgctaggcaggcaggctcgggattcagggggccgcagcggaggcggcgccggccagggactctgcagggaccggggtgccccgg

SEQ ID NO: 15136 - DNA, 409 bp, Homo sapiens
  source 1..409: mol_type = other DNA
aattgttttggggaaggaggtgagcaccctcccagacagcccactgctccggcggggtcggcagctcccggtcgcaccgaccctgggacctcgaggctaagcgtggttgatggggtgggaggaccccgtacccctcactccaggatccctcctggccaacggcgcctttatggggcgatcccagttctcccgacgcggggccgcgtaaggcagcagcggcggagcgctaggcaggcaggctcgggattcagggggccgcagcggaggcggcgccggccagggactctgcagggaccggggtgccccggggagaagcccggccgcccggtgggcggcagaaggctcagccgaggcggcggcgccgactccgttccactctcggcccggatccaggcctccgggttcccat

SEQ ID NO: 15137 - DNA, 298 bp, Homo sapiens
  source 1..298: mol_type = other DNA
tcaggatatccagaacttgcaatgaaacatttgaattgcttatttcttgaccccaggtaactgatgagttttcttatataatcatcacaaaattagcaaataggtacacttaatgttattcttattataaaacagtatttcggaaaatgcaaatatttctaaaatagccctattcccattagggcatgttttctgctaaccagagattagcacgatgcctggtactttccttgcccaagccccaggaggccggttgctaaggcgaccctagggccagaacggccccagcccattggtt

SEQ ID NO: 15138 - DNA, 505 bp, Homo sapiens
  source 1..505: mol_type = other DNA
ttactagcggcagaggcgcggccggaaccaggtcttctgatgacctgctcctgccaggcaaagacgccctagttaggggcgtctccgggtctttgatgacgagcggtccccagcccagggtgccggcctctgcaggtacccacgtccctaggacccgccactgggccaggcccaagcagcatcaagccccgggtccccgccattgcgcccgcgtcgcgcgcctccagtcgccacggcaaccagggaggtgctgacccctgacctcgaggccccgccccttcacgttccggaagtgccgccgcagccgcccgcccggtgttaggagccgccggccgggccaggccgaaccaagcgcccgcagccctgcagcccgctgcccgccccacgtcccgccggcgccggggcggccgcgttccccgccctcccccactccacccctggctacccgctcccgcccgagaggaggagctgaggcgaggcgttagccgccggcggttcgtattac

SEQ ID NO: 15139 - DNA, 432 bp, Homo sapiens
  source 1..432: mol_type = other DNA
tgcattttctgaccccgggaggtaaaagacgacgccgtccttggcactgagtgcggtgaccaccgagtctccgacccccagggaggcaggtctttgaaccggaccaggttccttccccaaggaaacatcatccgcccgaggggcggcagatccagcggaagctgtccgtggtttggccggacccgctgcccgctgagcgcgctgcagccaagcagggggctcgtgtggcggggccacgggagggtgagggtcctcaggtccgcgaccagctccaggctctgcccgctaggcaggatccagcctttaagaacgggtcaccggaccctgaccctccaggggccgtgcaagctcctgcaggcagagcgcgctccacccctattttccatacatgggagctggagtggggggcgggggaggcgctcccagtccctc

SEQ ID NO: 15140 - DNA, 609 bp, Homo sapiens
  source 1..609: mol_type = other DNA
ctctcaggcactcagaggtgcgaaggccgcgcgcgtcctcaggaaccggcgagggcctcgtcgtcatggtaaccagattgcgaacgcgcgtgcgcaagacacacctttgtcacgtgaggccgggcagggggcggggccggcgaatgcccgtcccgacccgtcgcgcctcccctgttagctccctgccagccgaggcggggcgaacctctgcggccctttccaactgcctgttggaagccgctgtaaaacgagcgccgctgctccggagcggccccgcggagagcgagagaccctgcgcaccgcagccctctccgctgcgcccattcctgccgccggcgatgtaactcggggaggcagcggtgcccgctggcccggggttgagacaggcggcaggtgcctgtgaggcgggcgggtgccggggtgggaggctgcggtggacggcttccggcagcccctgccacctccgcgtcgatcccggcccctgcccgagagcctccgggggggcagctgctggcggtgcccgcggtctccgtggacaggaaaggccccaaggaggggctcccgatggggccgcagccaccgccggaggctaatggagctgcgacgcgg

SEQ ID NO: 15141 - DNA, 413 bp, Homo sapiens
  source 1..413: mol_type = other DNA
gcagctagctggtagtagaaacggggtttcgccggcatttttaaaagttattttaaaaacacatgagtaactcaaacgcatttcttgtgtcgcgacggctggggaccgacccaagagcagtcggaccacgggccgcccagcccggggggggctctcaggcactcagaggtgcgaaggccgcgcgcgtcctcaggaaccggcgagggcctcgtcgtcatggtaaccagattgcgaacgcgcgtgcgcaagacacacctttgtcacgtgaggccgggcagggggcggggccggcgaatgcccgtcccgacccgtcgcgcctcccctgttagctccctgccagccgaggcggggcgaacctctgcggccctttccaactgcctgttggaagccgctgtaaaacgagcgccgctgct

SEQ ID NO: 15142 - DNA, 527 bp, Homo sapiens
  source 1..527: mol_type = other DNA
cgcgctcggagcggccagcgggccccgccggccccgggcagtgaggggcttagcacctgggctggcggcggcggagggtgtagtgggtcccccagcagtgccggcccaccagcgctgcgctcaatttctcgccgggccatagctgccttcccgcggggcagggctcaggacctacagcccgtcatgcctttccgtgggctcctgtgcagccccagcctcccagacgagcaccgctctctgctccacggcgcctagtcccattgaccacccaagggctgggcgcagggcgcgggactggcaggcagctccacctgcagccctcttgctggatccactgggtgaagccagctgggctccctgtgtctagctcagggtttgtgaatgcaccaatccacactctgtaaacgtgtctagctcagggtttgtaaatgcaccaatcaacactacacagcaccctgtgtctagctcagggtttgtgaaagtgccctgtcaaaacagaccactcggctctctgtaaaatggaccgc

SEQ ID NO: 15143 - DNA, 510 bp, Homo sapiens
  source 1..510: mol_type = other DNA
ctactccactgcactccagcgactccgtttcaaaaaaaaaaaaaatttttttccttctgagctcaccgagaattagattcggttcaaatggttttcaaattctaggtaaagtacttcgtctgaacattaaaattgttaagcaacaataaaagggcctctcagattgatttttttcactaacactaatttttcttaatatgtaaaaagtgacgacactcctttccgtgtgttttcaaacaccaagacacaaactttttactttaccaagatataaaagaaccttgcttgtttattttaggcgctcacggttgagcggcgctgacctgatgacaccgctggaaaccaatctgcagacgtttgctccaggacaggcccaagacgggaactggaccttgcgcgcctaggactccggcgccgccacgtctgtcggcgtgcgtgacgccagcgcgcttgcgcgcacggagacccgccccctacatccggggcctgggcggcagcagggccgccgcg

SEQ ID NO: 15144 - DNA, 251 bp, Homo sapiens
  source 1..251: mol_type = other DNA
tctgtcatctatttatctatttatttatttttgagacagggtctcactctgtcacccaggctggagtgagtggcaggatcacactcaaaatcgccttggcctcccatcgtgttgggaaggaatggatggagacccttcctccatcctcaggtttttaggaacaaggtgacctgttcagtggagctgcactgagcaggtcctggcaggggggcgggccctacggcgggcggggcggggttcgggtgcgaggc

SEQ ID NO: 15145 - DNA, 449 bp, Homo sapiens
  source 1..449: mol_type = other DNA
tttcctgttcctggaggcgcagggcaagggctgagcacttctgagggctcagtgctctttgatcagaaacaaaacctcattttgcggtgctgggtcccccagtcctggactccggaggccccctagtgcacacagcccccgcctggccctgtgctggggaagggcaggtggctttacaaatggtacctatttggtagtcaacaaagggatagtgcactgtgcccagggccctataccctgggctgagaccatgatgcagccgcagggtgaggttgcggacggcctcactcacaaccccccttggggcctggagacggcccggctccccaaaggtgcggagtgggagagctgcgctcgccggaacagtgggcgcgcaagggccccgaggcgctgtgacacgggacgtcgggcgcgcgggcctggggcgggaactgcgggtgcgcgcggcc

SEQ ID NO: 15146 - DNA, 291 bp, Homo sapiens
  source 1..291: mol_type = other DNA
ctgtaatcccagctgctgttgcagtgagccaagatcatgccactgcactccagcctgggaacacttggcttcattaatagacaaaaaccaaattttaaatttgtcccagttttcccaattttgggaagagaggccaaatttaacggactaaaactgcatttgtaattaattccatttcatacagaagccggaagtctctacctgaggctgataagggaatttctccctcagggtctccaggaggcggggaggcggtggctcctccggccccgcccccccaccagcagaggc

SEQ ID NO: 15147 - DNA, 291 bp, Homo sapiens; identical to SEQ ID NO: 15146
  source 1..291: mol_type = other DNA

SEQ ID NO: 15148 - DNA, 692 bp, Homo sapiens
  source 1..692: mol_type = other DNA
cagcttcccacgctggaccctgagccccaggcgccgtccgcgtagaccccgcgccgcgcaccgcggccggcggggggcgctcgggtcgcaccgagagcagcgcgggcagccagcgccgggtcgcagccgacccgcagagcccttcgcgccctccgaggaaacaaagtgcatctttgtccgcggcccgaggcgccgcgtgggagacgctgggcaggggccaggccgggccggccgccgccgcgtgcggggaccctgggcgcgcgtcactgacccgggactcagaccctcgcgggcctggcgcggaccggaggaagcgggctgtggcgcgcggccgagctggcagccctcccactccgagcacggctcgggacccgcactggctcctgccgggccgcggcgcttcacgcgccgtcaccggggcccgtgcactccgctttccgggctggcgacggggcgggaagggggcaaagtcgcctgtcggccgggcggtgcccgctttcggtgccgtcccggggcgggtcctcgctccgacagccgcgcgccagcccagctcagccccggcgccgcgcggccgggaggactccagctcccagcaggccccgcgccgcgagcaccgaggcaggaggcgcgcctgggccggcgcttgcgcagtgcggccgcccgagcctgctagtaccacacccccgggaggg

SEQ ID NO: 15149 - DNA, 274 bp, Homo sapiens
  source 1..274: mol_type = other DNA
tcctgatctgtaaaatggggccctaggaaactagcttgcaaggattgttgcaaaggatatagtaagtgctcagtaaatgtcaacttttctttttcagaaaatgtttatcactataaaatatatacttgagtgccagacatcatgctctgaggaagactcagaggaaaaagtcatttactttgcctcgagggatttctggactttgcctagaaagtggagagtctagggagtagaaactggaaaccagtggccatctgttgtttagtccacttaa

SEQ ID NO: 15150 - DNA, 383 bp, Homo sapiens
  source 1..383: mol_type = other DNA
agacatttgatagggaactctgaaacttgtaaagcaatttacaagggccacctacttgtatttaacaaataggctagaaatacctatttgtgggaaatcgaggagccagccgttctgatgaacacaggagggccggacggccctgctggctcggacaccaagggagagtgctgcctgagccacaccgctctcgggctgcgaaggcggagcactcagaggagcagtccgaggacagcccccggcgcgaggaactcgtgggcgccggcggcccggagctggctgggcttcggccggccagaggcccacagcgacgacgtgatcccttgcaggctgtcgcggctggcctgagcggtgacctggcgggtcgcgcctgcgctctgccc

SEQ ID NO: 15151 - DNA, 855 bp, Homo sapiens
  source 1..855: mol_type = other DNA
tggggctgcgcgcgcagcgcccagcaggtgacgccgtgggggcttgagtggtcccggtcgtggagcctgaaggccctgccagaggcagtgcgagagcgcggtgtgcgggacagagcaccgcccggcgcaggaaccggggggttcctgcagaatcctctcagatctccccgagtcctggcgcccgcgcggcacggccggggagagggcgcccacccgcggcggctcggctagctcagcgcacgggccctggggacgccccacccgcattcgcggggcgggaaggcgcagcgcccacgaagccaggccccagcaggcggggatcctggtgacgaggaggcaaaggccacaggctgggccgcgcccggactctgcagaaccgcgaggcctaggcttcccagcctgtgacccgggaggggaccccgcccgccacctgcgaaggctcgctgagagccccgaagcgcggtgcgcccgcggcgccgtgccagtttctccggggctacagggagaaggcggcccgggagcttgaagctgggcggggcgggccggggcggcatctcaggcgagggccagggaccccgggacgcgctaaccgcctccgcggggctactaagttcccggcggcgcgggctccctctgggccagtgcaccttatcccaggcgcggggcacactctgggcgatcgggggtcacccggggctgccctgccctgccccgcccgggcaccccggagcggaaccgcgagtcctcaccagcgggggcgggcagggcgcactgagcgcgccacgcggcgcctggctaggaggagggcggcgggcggggacctagagctccggggcggtgctgagcccgctcctc

SEQ ID NO: 15152 - DNA, 341 bp, Homo sapiens
  source 1..341: mol_type = other DNA
gcagttaagttctggcaatgggctgaaagatctttaccaagtactttctcctgaaggtacttagaggtatgaagacatttgatagggaactctgaaacttgtaaagcaatttacaagggccacctacttgtatttaacaaataggctagaaatacctatttgtgggaaatcgaggagccagccgttctgatgaacacaggagggccggacggccctgctggctcggacaccaagggagagtgctgcctgagccacaccgctctcgggctgcgaaggcggagcactcagaggagcagtccgaggacagcccccggcgcgaggaactcgtgggcgccggcggc

SEQ ID NO: 15153 - DNA, 608 bp, Homo sapiens
  source 1..608: mol_type = other DNA
ttgaaacaaccaatccagtcttggttaatggagatgttgcccaatttctagaatcacaaataagatctttaacaataaaagttaaaacaacaacaacaaaaaagatctttaaatgtgttgtaattttctcctttgacaggttacaagtgcaattgaataaaccaaacaaaaaatgtcatggttattcggtctttaatgtgatttatctttaaagctgcaacgaaactttctttttagtctaggagactaaaagccatcagtaatctctttttttcttgaagtttccaaaggaaggcaggtgagtttgcactgacttccgagagtccccgcgctcctcccggacagccctcagggtcctcggctatcaggcacggggagcacgggctccggccccgggaacactcccgcccggggcgcacggaggacggccccagtccagctcgtccggcttcccacccgcaggcggaccccgaagccgcgcccgcgcccgcccgcggcgactccggcccgggcacgcgcacgagtcggaaggaggaggtgggggaggggcgagcgggccgaggccccgcccccgctcctctgccccgcccgccgcgattatagccgat

SEQ ID NO: 15154 - DNA, 632 bp, Homo sapiens
  source 1..632: mol_type = other DNA
caacaacaacaaaaaagatctttaaatgtgttgtaattttctcctttgacaggttacaagtgcaattgaataaaccaaacaaaaaatgtcatggttattcggtctttaatgtgatttatctttaaagctgcaacgaaactttctttttagtctaggagactaaaagccatcagtaatctctttttttcttgaagtttccaaaggaaggcaggtgagtttgcactgacttccgagagtccccgcgctcctcccggacagccctcagggtcctcggctatcaggcacggggagcacgggctccggccccgggaacactcccgcccggggcgcacggaggacggccccagtccagctcgtccggcttcccacccgcaggcggaccccgaagccgcgcccgcgcccgcccgcggcgactccggcccgggcacgcgcacgagtcggaaggaggaggtgggggaggggcgagcgggccgaggccccgcccccgctcctctgccccgcccgccgcgattatagccgatgactcagggcggagctccgcatccaaccccgggccgcggccaacttctctggactggaccagaagtttctagccggctccttcccctctggcagcgaggaggctattaaag

SEQ ID NO: 15155 - DNA, 312 bp, Homo sapiens
  source 1..312: mol_type = other DNA
aagtgggggcctagggatgaacccctgtagccaggccccggggtctcgcctggtttcggtacgggcaggcagcgcaggcccgcggggaacgtaccccgcaccgctccgggagagcgggtgtggggtcggcctggcgaagcgtgagcgcctccctgcacggaggggaggccccagcggtgggcgcctgtccccaaggccgcgcggagggaggcggtcagtccagaccgactcggccgagctcccgagctgccaccggtgaccacgacaggaaggctggcgcgccggaggagcgggggggagaggcctctacgg

SEQ ID NO: 15156 - DNA, 552 bp, Homo sapiens
  source 1..552: mol_type = other DNA
agcctcctgaaccagaagaggttcagagcgactcccacagtttcactcttgaacttgggtattttccaaattgcctcagcaaatcctagcggcgcgcagtgcaggagcctcgcaccgctccccgacggcggctgccagcttccagacagacgccgacccggtgttcgcaaccagggcgcaggccgggcccggagcgtttagagcgcccgcccctcggtaaggaaccgtccctgagccacagggcctgacgcgactgcagaaggagcgtggggtcctccgaggttccccttctctaaatgtgcaccttcctcagggagaccttgtgcagctgggccagagatgactctgaggtctctgagctcgacaacgcgccgcccttggagcgcgtcgccgggccccgcgctgcgcagcctccagcggcgctgcgtgcccgtctccaagatggcggcgccgccgccgcccctcctcctcgccgcgcagagccgcgctgcgccgcgcgctcccgccgcccctccccacgcgagctccacccaggtcgcaggcagcgcggtc

SEQ ID NO: 15157 - DNA, 557 bp, Homo sapiens
  source 1..557: mol_type = other DNA
aagataaggaatgcattgtatatgtctacttcacaaatattacaggcttctagaagagggcacagtccatcttataagatatcttactgtaacctagaagatattgtactgtatcacaacaatctcctagtaggagacagtgtaccgtatcctaggagaggggcacagtccatcctaggaggtatcttaccgtatcctaggagtctcctagtgggagacagactactgtacctggccagtaatgatcctggcaagctcagaaggaaaaactcccgtctgacctttgtcagccctccccttattacctcccggtaagagcagggaggccctcggaagtggaggcgccgccgctgccaccgttaggttttctctcggccatggctgcggacgtctccgggtacccggtaccacaccactgaccggaaaccgatccagcgcacttccgcacttgcgcacaggagccgaaattacgggtagctagcagccgccctctcccttcccctacacggcgacgccagatatcaacatggcgacactgtcttcacgcccgcgtctag

SEQ ID NO: 15158 - DNA, 399 bp, Homo sapiens
  source 1..399: mol_type = other DNA
gcaggcctcccagccttgcaatgagcccagactgcaccgctgcactccagcctgggcgacacaaaacaacaaaaataaaacgaaatatttttttctccctatggattaaacacttaaaaaatgttttaccacttctatttctctagcatgcgaattcccattcaggattcgctcctccaaaatctttgtcaggagagccatcctgacggtacctttaggaaggactttcagggtcaattgcgtctcagcctccgcctccgagggtgtcacgtgctagacgcgggcgtgaagacagtgtcgccatgttgatatctggcgtcgccgtgtaggggaagggagagggcggctgctagctacccgtaatttcggctcctgtgcgcaagtgcggaagtgcgctgg

SEQ ID NO: 15159 - DNA, 327 bp, Homo sapiens
  source 1..327: mol_type = other DNA
attttatagagaatgatgtgatcagtgggtgtggggggtcagacctggaccccagctcagcccagtgagcaaacggcaggtgcctcaccaaggaaggtggtgaaatttgcttaaatttcccttaagtttctttaaaaatgaacatttaagatcctttaggcaccatcttattttagaatccttgggcctccagccagaccatctgaatcagtctcagggggcagagcctgagccctggcacttgttcaaggcccgcctgcttttaaatacaggcaagctctgtgcatgtatgtgctttttggtgggcaggtttatgcaaacctaccc

SEQ ID NO: 15160 - DNA, 404 bp, Homo sapiens
  source 1..404: mol_type = other DNA
tggatcatgttatctaacctgctggtgcagcaacatgacatttcgcatatgctcatagctgaacagctgcgagagccagctacctccaaacacatggaaggaatgtggcttcaagaaggatgattctgtgtgaagagacatcctgatccaggtttatataatgaataaggctagaaaggatgacatcatagctttgtttaaagccaaacttacaacaaattgcaaatctgtattgacagttgtacccagaataactcccggttggggatgaccccaccatgcagcatggaacaggatggcccctgccccagtctcggaagctgtgaccaggcttgagacaatcaattcatcatggttccctgactgcagtgattggttcagggttggcagcaacaatggaggtc

SEQ ID NO: 15161 - DNA, 606 bp, Homo sapiens
  source 1..606: mol_type = other DNA
ctgagccatagctccttagtcccagattttggctgggtctctcctaaaatccaagagaggcctgggctcccaaacaacctaatggttataatcactgtgtgttttgcattttaaatgtctgcttggtttaaattagtgaagccaagaagtcaaaattctaagaaaagtaaataaaatcctgctgggctccagctggaggtcgtgacccctaggctggctgacggctggttgaatgctgtgtcagcgacgagcgaccctgacttcccacacaccggccaggccagggacggtggcaggagcagttcagcagccccaagctgctgggggcggaggacagtcggtccccaggggccacctggcgctggtggcatggcggggagccaggcttgcctgaccctggctggcatctcctgagagcaaagcgaagcccgcgagtgatctctggggacacgggagcaaggttggccagggctgccctgagccctggagaatccccagaacatgcccacgtgcgtgcgtgtgccagggagctgcagaggggccgcgggcagagccccagcgagcgcgctgccctggcgcggagcccaggggccgcccactggcggg

SEQ ID NO: 15162 - DNA, 405 bp, Homo sapiens
  source 1..405: mol_type = other DNA
gaaataaacagctttattgctcacataaagtctgcaaatatcattgctgaaaagaaatcattgcattaagtgctatagttaaagcgtaattgcaaacaccagatatgcagtgttatctgtatttggaaatttcattcaattaatctcattcatttcttaattaatctcattcattatactagtagttaaggcagcaagaataactgggactcttctctcttgcttgggcaggaggcagcgcctcttcttgacgcagattagcacaaccgcctaagcggcggaactctggagagtgcggaacctaggatcctatggaatccgggaggaacccggagcctggaggaacctgacagcggcgccgagggggccacccggactctgtttggaacggaagcacagtgtccg

SEQ ID NO: 15163 - DNA, 255 bp, Homo sapiens
  source 1..255: mol_type = other DNA
tgtgattgaaataaacagctttattgctcacataaagtctgcaaatatcattgctgaaaagaaatcattgcattaagtgctatagttaaagcgtaattgcaaacaccagatatgcagtgttatctgtatttggaaatttcattcaattaatctcattcatttcttaattaatctcattcattatactagtagttaaggcagcaagaataactgggactcttctctcttgcttgggcaggaggcagcgcctcttct

SEQ ID NO: 15164 - DNA, 728 bp, Homo sapiens
  source 1..728: mol_type = other DNA
ctgctgggctccagctggaggtcgtgacccctaggctggctgacggctggttgaatgctgtgtcagcgacgagcgaccctgacttcccacacaccggccaggccagggacggtggcaggagcagttcagcagccccaagctgctgggggcggaggacagtcggtccccaggggccacctggcgctggtggcatggcggggagccaggcttgcctgaccctggctggcatctcctgagagcaaagcgaagcccgcgagtgatctctggggacacgggagcaaggttggccagggctgccctgagccctggagaatccccagaacatgcccacgtgcgtgcgtgtgccagggagctgcagaggggccgcgggcagagccccagcgagcgcgctgccctggcgcggagcccaggggccgcccactggcgggggaggcggggagcgcgcagggaggcggcggcggcggtggggcttccccgggcttcccctccccggtccgcgggtgcccggcgcgggcccaggaggcggaggcggctcctggggagagggatccgggagtccctgaggcggccccggctccgcactaggaggcggggtccgcagtatcgccagcggccggcgcggcttcccggagccccggagcccgaggcgcgaggtttaggctgagccctccccggcgcctgcccccgcccggcgcccgcctccgcccccgcccgcggcctggagcgcg

SEQ ID NO: 15165 - DNA, 351 bp, Homo sapiens
  source 1..351: mol_type = other DNA
gcttggcacaaggtctcggctccgtagagccctgctgactcttgacttagaggcttcctggccactctgagtgtaagacttggtgtcctaccctgacactcaccggaggggggcagaaagcccctctgttgcacccttgctaactctatggccttagaaaaggcatggaacctctgagcctcagtttccttaatagtaccatgcaactgttcccatcctgatgaaaggaggggtcagtcctgtcctttcctccaggatagagatttcaaaacttcctttggtagctactaatgagcttttgattgctacaaagcagcttttcattcctgtttcacaacagggatcccgggg

SEQ ID NO: 15166 - DNA, 644 bp, Homo sapiens
  source 1..644: mol_type = other DNA
aataaattaaaggtaaatggacataggaactttaaccagttacagctaagaatcagattttgcatttatgatttttaatctaagattcagagactcctttgaatttctttttattaatccaaacatatattattaaacactttttttttttgatgcaattttggctttttctgagagagccacattcaaagtcaggctgtcctagtagctctgatcctgtttccttatcagaaactgggaatagtacagtgtgaccctccatttctattgtttagaaggacagaaacatgcaatgtcctgcgacatttgttttctaacttgacataaaacaacgtaacgcagcgctcagcgagccgttggccagcctcgctcgcccggggaggagggaggaggtggcgcggggcgcgggaccaggccgaggctgtcgctgcatccctacggccgcatcgcggccgagccctcgcctcccgggccggtgtctccggctgctcggaggcgtcgggagccgcgcgggactcggggcggcccgggcgcgcggcgctgattggcagagagggcgccgccgtccaggaaacggctcgggtttcagtgggggcgtgacccgccgcgaggaggcgggggcggcggcggcggcgcgggcggcg

SEQ ID NO: 15167 - DNA, 621 bp, Homo sapiens
  source 1..621: mol_type = other DNA
aaaactgttttgtttggactgtagagttaaaaaaaacaaacaaatttaatgaggaagacagcaactgtctctagctgacagttgtcctttaaaagccgttaagagttctttaatttagctggtctggaagcagctccagcaagtcatggccaggggcggcctgactttcaatccgagacccgccgggaatgactttgggataatcacaacctccggtcctcagtttccttaggcccaaacgcagggcttggggacacgaccaccatccccgcccacgggtccccgcgccaggcttcgctctccacccctcccgccgcgggccccagcgcttcgccgaggtcggccccgggcgccaagaggcgtggtcggcccgagcggaccctcgcggcggccatggcgtcggtggtggaatacaagggcctcagggccggctaggtgagtgttcccgacgccggagttggcgcggccgccgcgccccgcacaggccctcggcgggggaaagggcaggctcgcaccccgactcccgcttcggtcaagatggcgcgggcggcgtcagctccaagaggcgccgggccggccgggcctgcgggcgcccgagtggcttcgcgcgagcctcgggag

SEQ ID NO: 15168 - DNA, 304 bp, Homo sapiens
  source 1..304: mol_type = other DNA
tcagtatcccaagtatgtgggactacaggcgtgcgccacccctgagctcaagtgattttctttacataaacaatagtatatcatacacactgttctgtatcttaatatttaattggctactgatgaaacttctccctttctaaaggaggcatattgacatgtttgaaaaggaccatgacctgttttgaaaagtggcttgtcccagccaaaatataaaggtagttgacactggcttcggatcccaaatgagctggaggctggcggcacctgcaggctccctgctcctcagagctgcctcccaggc

SEQ ID NO: 15169 - DNA, 402 bp, Homo sapiens
  source 1..402: mol_type = other DNA
agtcttaaggttgaaacttacagttccttcctcaggaaaggacctccagagatatttagaaggaatttgttctgctctcacaaaaaatggtattgccagctgcacataagccatgatggcacaggaggtgagcagcagaccgcgtctggactccacatcccgcgctcacgtgcccatgtgggtgccaggctgcggctgtgtcctgggcagccctggtgtggtaagagctcattacacctcagggaacaaaggatccccgccaggcccctcttgtgcacccagcggtccccccaggcgccttggagacccggccgggcccgtcgccggcctccagccacaggcgtcgctgtgcgctcgcgcgggcccgggagccgcgttccgccgggagcaggcgctggcgca

SEQ ID NO: 15170 - DNA, 395 bp, Homo sapiens
  source 1..395: mol_type = other DNA
tcattgtaagtgctatgaagaatttaagagaatagaagttgcattttttctttccctccagatagagtctcactctgtcacccaggctggagtgcagtggtgcgatcttgctgggatagcaggcacctgaggtgtgatgagcagcacaaacatttgagatgtgacttgaattgtgatggttcagaaaggcatacatacctgtgttagagtcgaccatcatgtgatggtcagggcagccctgaagctagtgtcagccgcttcctgataagatctcaactcaagcatgggccctaaggggcaaaatgtcagagtttaactaatatatgaccttcctctaggaattctcgactggcaagggaaaaatttcagtaaacacactgtgagtgcggccactc

SEQ ID NO: 15171 - DNA, 560 bp, Homo sapiens
  source 1..560: mol_type = other DNA
ggggatggtggggttcccaggtgtgccccaaacctcccagcagcctccagtgaggaggctcaggatctcaagtcttgagggtttctgagcctgccatagcctgccagctaatgcatgtcacggagaactgcctttgccctgtacacgggcctgccttgggcggctcagctggccgcgccaaagatggtgttgcagccccagcccgctcgaggcgccccaggccctcagactgtgcggtgcaaaggtccttggaggctagccccgggctggctgtgaggggagagccaggtgccgcagctctccctggtacagacttcagctgcctccaggacccggggcctgaaggaggcagaagccggcggtggaaaagggcgcacgtctctcccagcgtcgctcttcctccttcctggagggatgagccaacagggctgagccccctactctctcggtggtcagcccgccgccccagctcccgggccgcggctcgtttgcatttcaaagctacacaatgcgggcggtcccggcgaggcgggaggggccggggcagagggagggtcttc

SEQ ID NO: 15172 - DNA, 577 bp, Homo sapiens
  source 1..577: mol_type = other DNA
ctgccagctaatgcatgtcacggagaactgcctttgccctgtacacgggcctgccttgggcggctcagctggccgcgccaaagatggtgttgcagccccagcccgctcgaggcgccccaggccctcagactgtgcggtgcaaaggtccttggaggctagccccgggctggctgtgaggggagagccaggtgccgcagctctccctggtacagacttcagctgcctccaggacccggggcctgaaggaggcagaagccggcggtggaaaagggcgcacgtctctcccagcgtcgctcttcctccttcctggagggatgagccaacagggctgagccccctactctctcggtggtcagcccgccgccccagctcccgggccgcggctcgtttgcatttcaaagctacacaatgcgggcggtcccggcgaggcgggaggggccggggcagagggagggtcttcgcctccccacccccagccccgtttccggagcccgcgatggactcggcgatgatgacatcatcgtgtcacacacaggagccggctgccggggggtttaatacccgcacgccccgggca

SEQ ID NO: 15173 - DNA, 309 bp, Homo sapiens
  source 1..309: mol_type = other DNA
aggatattctaaaagatgttgataaagattttttaaagggtgaaaggcgtggcatgtaattctttattctattaaaatctggaacgattttgctagtttggtgacagatcgcgtacttggcacacagttaagtgctcgagaaattgctaaacactcaacgaatatttaccagaatacatatttattgaaagaattattgtaaaaattggcgcgcagagctgtaaagcgtttttctcgaccgattatgggacagcttgcaaacaaattatctgctcagagaacccggacaggaagcaccgcggcgcggcg

SEQ ID NO: 15174 - DNA, 427 bp, Homo sapiens
  source 1..427: mol_type = other DNA
gaaaggcgtggcatgtaattctttattctattaaaatctggaacgattttgctagtttggtgacagatcgcgtacttggcacacagttaagtgctcgagaaattgctaaacactcaacgaatatttaccagaatacatatttattgaaagaattattgtaaaaattggcgcgcagagctgtaaagcgtttttctcgaccgattatgggacagcttgcaaacaaattatctgctcagagaacccggacaggaagcaccgcggcgcggcggcccagagctccgcgcgcaggcctccccggcgcgccgaggccgccgccgctggatcggcccgccacgccgcagggacccgcgcggggcctgccgggactcgtagtctctgcgggctgggagcgcccgctccggaatctcagccgccgtctgagggctga

SEQ ID NO: 15175 - DNA, 607 bp, Homo sapiens
  source 1..607: mol_type = other DNA
ttgggaggctgaggtgggaggatcaccgtgagccatgatatgccactggattccagcctgggtgacaaagtgagaccctgtctcgattatgcctgtaatcctagcacttctgtagctgtagtcccagctactcaggtggctgaggtaggaggatcaccttagcccgatgttgaggccacaataagctgtggtcatccccatctcaaaaaaaaaagttttttattttgaaataattttaggtttagagaaaagttgaaaaatagcattcaagttcttggaaacatttaaagcatgtgaaacatttaaaacatttaagttggaggctttaagctaaatatttcagtgtgtttttcttaaaaaaaattttctcataccacagtaacatgatcaaaattggaaaatcaacattgattcaatactatgatctacaatcaaggttttttttttttttcaaatccctgggtctctgcattttttaaaagcttcacagatgatttcacctctgttgcctcctctggcagagcaggactgaggggtggaccctccctgagaccacccaacaattcagggtggagttatcagggcgccctgactcctgggggcattt

SEQ ID NO: 15176 - DNA, 625 bp, Homo sapiens
  source 1..625: mol_type = other DNA
cacaggcctggtgctgcctgggcacccagacccacctccagggtcgccctcagccctcgggtgggaaatcaaatttttgataacaagtgttttgaaataatcacgcacttggtgaaaaaggggaaaacccctttcaactttttaaaagaatcagacgtgtgaaggattctattcgaattgccagctccgcggacgctgccttcgtccggccgcagaggccccgcggtcagggtcccgcgtgcggggtaccgggggcagaaccagcgcgtgaccggggtccgcggtgccgcaacgccccgggtctgcgcagaggcccctgcagtccctgcccggcccagtccgagcttcccgggcgggcccccagtccggccccggcgctcccacgcgaagccgccgcagggcccccttgagtcccgcgagagggccggcctgtgcgctgccccgcccgcgccccgccagcaccgccgtgcccgggcgcgcccgccctgccccctccgcgggcggtcccggtccagccgcccgccggccagcccccatcccgggcgccgtgcccgtccccaaggcggctcgtcaccgctgcgaggccaatgggctgggccgcgcggccgcgcgcactcgcacccgc

SEQ ID NO: 15177 - DNA, 311 bp, Homo sapiens
  source 1..311: mol_type = other DNA
tcagctgagaagcagggcacagctcagaggcaagtcctggaaagctgtctgcttttaaccaagagttactggccatcaagtgtctagagtcttgcatgtaagactgtggccaaagctattatggacccatggtctccgtggagagcatgtcctgccaggaaaaaccatcccacttggggcagacttcccaggtgaatttgaaccttggtttcaacagcgatatggcaatcaatcaaacacacctaagttttttccacactttatattgatttatagcagcagtagaaatataccttagctaggtacctata

SEQ ID NO: 15178 - DNA, 331 bp, Homo sapiens
  source 1..331: mol_type = other DNA
tagtctagaattctctgaccaattactggttaatgggtatttgaatttgccatgaggtttgtcacctcaaacaaagtcacaaatttattttgtaagggcaaatacatttataattttgatacatattgccaaattacctggaggacaattgtttactgagttagcaaactgagcatctaccttctttcaatagagggagagacagacttaccaagaaatctgacttaccaagcaagtcattgtgaacaatagctcttgactgagtcttcctcgtgaaaactgagcagtcttgtgtttttcagtggcagtgacatggtcagattcacaccag

SEQ ID NO: 15179 - DNA, 234 bp, Homo sapiens
  source 1..234: mol_type = other DNA
ctctccacttagaatacaagattctatattgcttaggccctagatcaataagtaatgtttactgactgaatgggtcagccacctggcagggcatctgaatgtcccagctggacccagggtcaaagcagagccctgaagacttcaatgatgtcaatgaggccacctgctgggaaccagctgctggagatccctacagagagcttccactgggggcaacccttccaggaaaaagct

SEQ ID NO: 15180 - DNA, 192 bp, Homo sapiens
  source 1..192: mol_type = other DNA
cttggagcaaggaagacagctgcagcaccttggccaagagggcactgtccccattagttcacatgcagtgaccaggggtgaccttgcttgcaaaatcactcactcttgcttttgtaacctcagtttacatttatagcaatcatagaagggctgagaagaaaaattctaagcctgtgctttgtgtgtgtcttt

SEQ ID NO: 15181 - DNA, 448 bp, Homo sapiens
  source 1..448: mol_type = other DNA
acttccattggtgctaaaatatatctggaagtggaatggaattcagaactccatcacagcgtgtgtcttctaaaagccaactttggatgttaatcattagaattttctttctcaaattaaaggtttgagaaattctaaagtttattaccagtttcagaaagttaaactaatttattatctcaaattggatttcttgggagaatttaagatttagttgtcagaggaagaattgtaaagttcttttcctaaaacatgcatcatttacaaaatggatttgcatattctcagtattgttgggacagtaacatttggaaacatctccaggtgctggggagtgacgccatcagctccactgcaggcctgctgtgaaagggaaagattcttcctgggccagcttgggatcctaggccgccctgggaagacatttgtgttttacacacataaggat

SEQ ID NO: 15182 - DNA, 504 bp, Homo sapiens
  source 1..504: mol_type = other DNA
catatttaaaagactttaaaagtattttctagtagggccaatgtctgggcttcttccagaaacagtttcttataggcttttttgaaaactggacatttaaaataatataacatagctaagagagtatttaggcatatctacttccattggtgctaaaatatatctggaagtggaatggaattcagaactccatcacagcgtgtgtcttctaaaagccaactttggatgttaatcattagaattttctttctcaaattaaaggtttgagaaattctaaagtttattaccagtttcagaaagttaaactaatttattatctcaaattggatttcttgggagaatttaagatttagttgtcagaggaagaattgtaaagttcttttcctaaaacatgcatcatttacaaaatggatttgcatattctcagtattgttgggacagtaacatttggaaacatctccaggtgctggggagtgacgccatcagctccactgcaggcctgct

SEQ ID NO: 15183 - DNA, 428 bp, Homo sapiens
  source 1..428: mol_type = other DNA
tacattactggacacctactgtgtgcacaggagttctttttcggtcgtcctgacgacccgtcacgcctgacggggacgtcggggatcccggactcagaccctcacgttccccgaggagcgcggcagtcgccgagcgcagcgacccggtcgccggcggcccggcgcaccgtggcgcaggtggcgccagaagctcctcccagtcgaagtcgcgggcgcagacaccgggtgggagagggccccgcctgcggcatcccaggaagaggcaagcgtggggcggcgggtgaggcccccgtcctcggaccgcgtggctttcaaatgcccgccgcttctggatttggtgactcagagcgctaaagagcggagcatgcgcactggcaggccctcgctcagcctttggagaccatgcgcaggcgcggtgcactgtgcgc

SEQ ID NO: 15184 - DNA, 399 bp, Homo sapiens
  source 1..399: mol_type = other DNA
tacattactggacacctactgtgtgcacaggagttctttttcggtcgtcctgacgacccgtcacgcctgacggggacgtcggggatcccggactcagaccctcacgttccccgaggagcgcggcagtcgccgagcgcagcgacccggtcgccggcggcccggcgcaccgtggcgcaggtggcgccagaagctcctcccagtcgaagtcgcgggcgcagacaccgggtgggagagggccccgcctgcggcatcccaggaagaggcaagcgtggggcggcgggtgaggcccccgtcctcggaccgcgtggctttcaaatgcccgccgcttctggatttggtgactcagagcgctaaagagcggagcatgcgcactggcaggccctcgctcagcctttggag

SEQ ID NO: 15185 - DNA, 288 bp, Homo sapiens
  source 1..288: mol_type = other DNA
aatggtctaaccttctatgccatatgtaaacatcaatcccgtgtacaagtgtcatccaagacagtacaaacatctaaatcaccagattctggctgagaagaaaacaggtgaaaacatcacacagtatagtttctgaacatggctcaaaacccacttgttaggccatgaggtttattctaacaaatgtacattactggacacctactgtgtgcacaggagttctttttcggtcgtcctgacgacccgtcacgcctgacggggacgtcggggatcccggactcagaccct

SEQ ID NO: 15186 - DNA, 322 bp, Homo sapiens
  source 1..322: mol_type = other DNA
gagggggcacactatatacagtcccatcccgtggggcatctagatgaggagcgatctcatggggcagcccctgcccgtccagccctggatgcccgggttccgcgtcagctgagacacggcgaaggcctcggcagcgcgtccgccgcgctagctgccacaaatgctgcagatccgacggaccgcttgcgtgccggcgcgcagtgcaccgcgcctgcgcatagtctccagcgagagcaagggtctgccagtgcgcatgcgcgcctgaggccagctggcacatgcgcatgcgtgtctctggtgcctgctcacttgaagcggagtg

SEQ ID NO: 15187 - DNA, 367 bp, Homo sapiens
  source 1..367: mol_type = other DNA
aaaaagtgtatctttttcgaaattaagtcgacagcgatcatctatagctggacagcagccctgaggggctatcacgcctgatggggacgttatatgaaattccgagtccgaggagcctcggccccttcccggcccgcgaccccgtccccgtcggcccggcgcaccctggagcaggcggtgccagcagctcctcccagtcgaagtcaccggggccgagaccggcccgggtgaggaggaggctgtgggtcagggccccgcctgcaacatcccaagaggccagcgtggggcggcgggtgaggcccccgtcctcggtccgcgtctcccactccgcttcaagtgagcaggcaccagagacacgcatgcgcat

SEQ ID NO: 15188 - DNA, 270 bp, Homo sapiens
  source 1..270: mol_type = other DNA
gcaaaaacgttatttcctagtctagattatagacaagtggaatttcagagtttgcttttttcaaaagacagaaaaataatctggagggggcacactatatacagtcccatcccgtggggcatctagatgaggagcgatctcatggggcagcccctgcccgtccagccctggatgcccgggttccgcgtcagctgagacacggcgaaggcctcggcagcgcgtccgccgcgctagctgccacaaatgctgcagatccgacggaccgcttgc

SEQ ID NO: 15189 - DNA, 413 bp, Homo sapiens
  source 1..413: mol_type = other DNA
ctcaaaaaacaaaaaactgtaatctgaattcaatttttctcagccgcggtggcttgcgcctgattgcgccactgcactccagcctggacaaaaaacaaaaacttgttttgtacctagtattactttttaacacaaacacctatctttgcccttgcactcttcacatctgggaaccgcaaaggagcgcggtggtcggactgtcagcctccagtaacttattttcgaaagattgctggagggaaatcttttgggattttcctaagcagaagggaggccaggagctaggaacgcagcgccgcggtctctccagcctctggtccctgggagcaagcagggcaccggtggagcaggtgcctctggggccgcacggaaacccagctaggccagttcctccactgcgccggtaggcggcg

SEQ ID NO: 15190 - DNA, 374 bp, Homo sapiens
  source 1..374: mol_type = other DNA
ttgaagagggaccggcaccggctccggctcccctgggcggcggtgagtctatccagggaactctgtccctggccgggctacctttgagcggggccgcggaaggctcagaatgagactgggagatccagagatccagactcggtggctctcaggaagcagcgccaccagctgcctccaccagaggcctgaagggggtcgggcgggtctggggacccaggacgtggagcggggctcaggccggcgccccgaggcccgttagaaggctctgccagctgcgattccaggggccaaggtcgccctgggcccccaggacgccagcctgcctgctgccgcgcagcatgggagcctgctcacgcgagacttgagcaaggcag

SEQ ID NO: 15191 - DNA, 371 bp, Homo sapiens
  source 1..371: mol_type = other DNA
cagcagcctcaccaaggattcgcctaggagacccgcgcccggctgactcccagcccctgggacgccccggagcctccgagctcctgctcgaaggcaatgacagcaggagaccccgctccctcggggttctcgcggccataggcgccgcagtccactgccctccgggaggtcccgggccaactgagtctccgtccggatcagccggcccgccacgaacctcctgccgcgtcgccgccgtccgagccggcagcctgctgcatggagtaaaccacaccgccttgttaaatgccgtcgccgccgccgccgtcttcgtcaccgtcacagtcgccgccgccactgccttgctcaagtctcgcgtgagcaggctccca

SEQ ID NO: 15192 - DNA, 356 bp, Homo sapiens
  source 1..356: mol_type = other DNA
ctgcaaagattactaggagctgctgccaccactcacaaaaaggggccttttttgggaaaagtgaatgtgcctacacaaaattcctcctggacattccctaggggaagacagggcatcccatgtcctctctcctaggacactgaaccaaatgacttcagcttccaggctactagcatacccaatcacaaatgtgtttggcatcaccaccatgacgtaattgtggccttaggctcccacctcttacagtgccaggctctgccgctctgagcacccccgaggcctctggaccctgggagaccacagagccagcacgcgaactgtttctgttggcaacacagatgtatttcttttatttt

SEQ ID NO: 15193 - DNA, 475 bp, Homo sapiens
  source 1..475: mol_type = other DNA
gaattgagtcgagtctgctcaattctaagttcggaaaccttcaaaatttaagattctgtaggtccgtagaacctgtcctggccatgctggagaggatgagcgtccgcctggagacgcctgctccgggcgccacggtcccaggagtgccggctttgcccgcccactggggctagaaggggtggtggagcagcctgtacaagcccctgggaggcgcggagacccgtcgcctgcggaggcgtcgagccactccagctccgagtcccgcaccgcccctgcctctgggagttgccgcagccgccaggaacccgggctagaatctgcagctgctttcagccctggctgcccctggttagacgccgctgatgcccgccaggccctcggcgcgctctgggggcgcaccggtgctgtgtgcctggccggagttccggggccgctcggcggcgctgcgattggccgcgttctatgcaaatgaggc

SEQ ID NO: 15194 - DNA, 309 bp, Homo sapiens
  source 1..309: mol_type = other DNA
tgatcctcatttctagaggattctagaaaacctgtcgtttcaggacccttcaaaaaagagctctacacccttctgaagacatgcatctttccagagcctctcaccaggcctggcgccagtggagaatataaatatgatctgcagttgatagagcaaatatttcctcctctacacgggcgtgtgcacgcccagagggagacaactttaggactatataagtattgcccaaccatggacagagctgtaaagatctttcccgctttctatgaagagggttcctgggcagctgagcggaccaatcggccccct

SEQ ID NO: 15195 - DNA, 322 bp, Homo sapiens
  source 1..322: mol_type = other DNA
gcagttgatagagcaaatatttcctcctctacacgggcgtgtgcacgcccagagggagacaactttaggactatataagtattgcccaaccatggacagagctgtaaagatctttcccgctttctatgaagagggttcctgggcagctgagcggaccaatcggccccctgcctgcgggcaaggaggcggcggcggccgcagggagcgggctctccagggacttcccgggtccgcaactggcagggccgttcgattctgcccggggcgacgggaccccgggtccggaccttggcgggcgagtgctcggcgcaggcgcaagcgc

SEQ ID NO: 15196 - DNA, 383 bp, Homo sapiens
  source 1..383: mol_type = other DNA
tcagccgattgactcagcctgtctttgacacacacggggaagggagccacagtgagccaatcaccctgcaccggagccttcggggctggttcccgcaggggcgcaggtgcctgcaacccaggatcccggggcgctaaaggcttcgggttctaccgccgctggctccagaggtgctgctgggggccagggttcactgccgcgcgccaggtgcctgcccgtgaggcggcgcggggctcccgggtggctgcgcgcccagacgcctgcccgggaggccgcctgaggctccggggtggccgcgcgccctcctgggagccatggcggctggggccggtggtcgccgggcggcggcggcgccgaggggctgagccggccgcgggcagcgc

SEQ ID NO: 15197 - DNA, 470 bp, Homo sapiens
  source 1..470: mol_type = other DNA
tcatcgtttgttacagcagcaagggaaacgatgcagtccctggttcccaagccgcagggccatgggcctgggctccgaggaggccctttctcaaaggaccctctgggcaagagcctgctcttggataccttggggtaacgtcaaatcacagtctcagatgggagagggctcctccagggtccctaggccctgctcccagggaacaggaattcctcattcccagttcctgaaacagtagcatggctagtgcgtctgcggaatggtcagcaattctccacctgtaaaacaggaatggaacagcgggtttcttctaagattgggccccacgctggctggcctgcgggggaggtggaacacctgcctccaaggaccggcctcggaggggtggagggaagaaggaagggcggggccggcccccctgcgcccgccccgcgcctctgcgcgcccctgtccgccccggcccagcccag

SEQ ID NO: 15198 - DNA, 386 bp, Homo sapiens
  source 1..386: mol_type = other DNA
gctgggcttggtgctccaagcgccctctgagcgacggccactggtcgggctgtccaggtggttccctggggcagccgactccaggccactgcggcaggccgtggcgatcggggtcctgcagagctttacctcccccgcgggccgggccagccttcagaccgcaatataaaattagcctattttgcggctactcgggaggctgaggcaggagactctcttgaacccgggaggctgaggcaggagactctcttgaaccaactctgtctttaaaaaaaagaagtatctggcaaccagggtttcgatgtgcttttatttggaatcaccgcaacacggggagggggcaggggccaaacccaccgctcggagctgatgtgtgtcatcctccc

SEQ ID NO: 15199 - DNA, 780 bp, Homo sapiens
  source 1..780: mol_type = other DNA
ctcggggctccggcgcccctccgcgggttcgggccaggcagcgccggcggcggccggggctgggcgtagggagtccgggccggcggaggcggcgcgcagcctcactccccgcggcgctcccggcgcggtggtggcggtggcggtggcggcggcggcccaggcagacctcgacgagccgaggcaggtttgggccccgggctccttggcccggcctccccgaggcttcagcgatccccagcgggaggagtcccttcgccattggtcctggccgcgctccgggcgccctgcgcgcttgaggaccccgcgggaagggttacccagcggcgacacacgccccctccctcgcagagaggacgcggccggagcgaggccggaggccggcggggggcgcaagccgcgtggaacgcaccggcgggctgtccgggagagcccgtagtcggaatcggggcgcccctgcaccgcccagctctgggagccgcaggcgggggaccgaccgacggacagaccagtgctttcacggtgtgagcgcgcgtcgtttggcggtaggggacggggattccccccagccttgcgctaagtttccaggcgcggcccggggcaggtaagtgggcatccgccactctctccccggttgcgagctcggatgcgcttccagaaccctggctctagccttgcggcggttccgggcggggaggccagagctctcccgcgcctaagcccgtgggacccggttcagggaagtgagccccgagcgcccctccctgcgccccgccgcgtctc

SEQ ID NO: 15200 - DNA, 501 bp, Homo sapiens
  source 1..501: mol_type = other DNA
agtgtggtgccggcagctgccagcgcctgccctctgagaggggtggcgaggggcacacaggaccagactgccctaataaccggctgtggagggcaccacaggcaaatctgtactgtgagtgggttgctgccactcaattatctgacagcagctgcgaacgcacaactaagccgcgcggcgcatcagctcccgcagctgtggctggggcagagctggggctggtccctccctccaggagcacagggcgggcggtccagcctcctccagccacacccggcccgcgcagtggggggcccaacagaaagggcggacaaggactcttctcgtcccgccagaggaggcgaccgaggggcctgagctcaggtacaggccggcgggctcaggaggcgcgagcgcggatcgaatccgcgggaggagcaggcggaggacgggacccacgcgattggtatcctgccctccgccccagccaatgagcggcgagggtgtcttgggggcgggggc

SEQ ID NO: 15201 - DNA, 501 bp, Homo sapiens; identical to SEQ ID NO: 15200
  source 1..501: mol_type = other DNA

SEQ ID NO: 15202 - DNA, 433 bp, Homo sapiens
  source 1..433: mol_type = other DNA
tgcagtggtgcagtcataggtcactgcagcctcaaccttcaagtgatcctcccacctcagcctttggagtaggtgccaccacaccagattaatttttatttttttttgtggagacggggtctgtgtcgcccaagtgtggtgccggcagctgccagcgcctgccctctgagaggggtggcgaggggcacacaggaccagactgccctaataaccggctgtggagggcaccacaggcaaatctgtactgtgagtgggttgctgccactcaattatctgacagcagctgcgaacgcacaactaagccgcgcggcgcatcagctcccgcagctgtggctggggcagagctggggctggtccctccctccaggagcacagggcgggcggtccagcctcctccagccacacccggcccgcgcagtggggggcccaacag

SEQ ID NO: 15203 - DNA, 457 bp, Homo sapiens
  source 1..457: mol_type = other DNA
aataatatgatcctctcttctttgaaagctcaaagtttctatttaataacttgaaaggttccgaaactcctcccttttaatatcaatgtgtatttattgcaaaaataatgtagcatcgagtggtattttatagcttatccaaaaacctcctgggtttatataattttttttttttttaagacaaagtcttgctctggagtgcagtggtgcaatctcggcggttcaagcggttcttccgcctcagcctaccgagtagctggggctggtttctttctttaatagagacagggtctcaccacaagctgtccgcccgcttgtgctgggaccgctgatctcctgggaagaaagcttccgaaaaggacacggcgagtgacgccggggtgcccaggccgcgccccagttccgggtttgcacccggtccgcccgcgggactacagttcccaggcgcccctgcgcg

SEQ ID NO: 15204 - DNA, 642 bp, Homo sapiens
  source 1..642: mol_type = other DNA
ggcacctgccagggacccagctcaggccaggtcacgggctggatgtgggaacctcactgggccccagcaagctgctgtcctgagggtggccgtgctgggccagcacgtggacagcagggaaccggtgcagaccatctgataagcagccttcagagaagctgcgggtgtgcaggtggaggcagacctcccagctgcatcctccaggcacttgccagggtcaggctctgaaataaccccccaggcccccgggggtcttgggctcctggggttctctgtcggcacagccgagctggcgtcaccctctgatgccagtgcccagatccctgaattcactgggcagccgccccctgcacctggctcccagccactgccttaaagcaaatggggacagggatacctgcccctccctgggtaggcagctgttgccaccctgccccttcccctgcccctgcagggtagagaggaggcgggtgggccaccgactgggagtcccgggcagctcaggtccctcaagagcccctcggggagaggccgcacccgtctcccttggtggagatgtccctgtgaagctggccaggccccaggcacagatcacccgttccctgcattcggctgacagagcatgaacaggcactggcctgc

SEQ ID NO: 15205 - DNA, 617 bp, Homo sapiens
  source 1..617: mol_type = other DNA
tgtcttgcccccggagtaccactgggcgtggggggtcctggcaccacatgcccggtgtggccgagggcacacagcctctatagcaggccttcctgtggggtgccagctgaggctgaggcatgcagcagcccccagctacctttgcttagggtgggtgacctgccctcaaaccttgcctgccacctccccattcaggcctggtggcaggaagggacaagctgtggagctggctgagtcacagccacctccccacctcagggctgcctgtcctgtgcccaccacgcagcagtcaggggagaacggagcagcctccctgctggccccaggacttctgatctcagtcctctgggagggaggttcgcctaggaggtgccccccacattggtgtccccatgggcaacagctcacccccaccagcatgatggccccagctgggggcagtggcaggagccttacttttgtcacagccttgcctgcctctgagggggcagagccagaagcaagccgtgccaggccatctgcctgctcatggggtcctaaagcgcgggctaagcctgcaggaacggggcggtggggggggcttagtgccacatgcaccccactccaggggctgccgt

SEQ ID NO: 15206 - DNA, 521 bp, Homo sapiens
  source 1..521: mol_type = other DNA
aagcggcaggttcgctttgggagctgctggtccatcgcccaggcctggccaggggcaggcgaggatcctggttgccgatccatcgtccaggcctggccaggagccggtgaggaacctgggaggcgccgtctccagctctctgccgtggtgaggggattgtgctgtgtgcacaccaccgggctgcccaccatggcccagagggtggacctgtggctccttggggggccagcatctccagtctaatgggtgcccctgccacaacaatgagcgtgcccatggcaggcacatataccttcctccaggctggttcaacagcttgttggctgtgacagccagtgatcacctgtatttcaaagagacaagggaggcggcgggtgctccaaggccctgcttctgggaagaaactaaaggctggaattcccccctgccggttggggatatccaggactgcgccgggagtgcccctcactacattctgaggacctgggagcaggtgttgaactgcacccacttgtgcacag

SEQ ID NO: 15207 - DNA, 461 bp, Homo sapiens
  source 1..461: mol_type = other DNA
tcttgtgcctccctaggaagatgagacaaggagagcaccggacaggtcctgcctggcacgtctgccaggcagttctaactgaaagtgcattgccccccttgctagttggtagccagctttaaacaagcctgatacacttctagaacagtctacagaattttctgagaaaaataccctgcggcaggggagccggtggctagagatgctgattatgcagcattaaccaagaaaaaatatctcatctgaaatggtgtgaggttaattgtcactcagacagcaggaaatggaaggcagtgtctggcctgggctcccctgttggtgtgcccctcaccagccgagtagcccgagcaagtcgctctccctgggcctcagtgtcctcctccccatgtcgtgggagtgaagcagcctgatgagggagagctcctacagcaggcagctgtgcagtaccccctggagaggct

SEQ ID NO: 15208 - DNA, 456 bp, Homo sapiens
  source 1..456: mol_type = other DNA
ggtacccaggtgtggcccacgcttcttttcagttagacctttggagcagctggccattctgaaaagctgcagctcccctagaggtcccgactggggcctagagcagattgagcacacgcttccctctggccatcattcggtgtggccagatagactgtggttagctggagcccctccaatccgggaagctctgaggtccaaggccctgccctcatctgtatccacagttgagttcagcagaggatatcaggagatgtgacctcagagctggaaactgaagatctcttggtccctgtgcccatcagagttcttgccacatggataatgcactatccatatgggtgtgtgtttatatatgtgtatgtgtccacatctgttgatatgcgtgtgtgtgtatctgtatctgtatgtacacacactccccccagtgcattggctggcacaggccgggtgctg

SEQ ID NO: 15209 - DNA, 306 bp, Homo sapiens
  source 1..306: mol_type = other DNA
ggcagtgccccagccatcttttggccttggccaagggcatcgagtcccagtcctgagagcaagatgagaaacattttggatgaaaaatattgctcatctgtaaaatgagagggccttttggctctaagatactgtgtttcaaatcctgttttctccttgtcatttatgaaccagaaaatgacagatggcgagactggacaggatcactatggcaccgggaggcagtgaccgcctgcgctgtgaccagtctggctcactgccggtgtccagttgccggacatcatggaggcccttgggctccaaagt

SEQ ID NO: 15210 - DNA, 358 bp, Homo sapiens
  source 1..358: mol_type = other DNA
ggatctttctctgtcacttaagctgtagtgctgtgtagctgggactattttttaaattttttatagagatgggactcttgggctcaagcatttcacctgcgtcagcctgcccaagtgcaggtaggcgtgagccactgcgcctggcggtgaagcccttcatctgtgaatagacagatggctgttgttacacatgcagcggctcccccgccattgtgctgtggctggtggtgggagtagtcttactaacctgagaggtgccacagagctcgggtatacttgtcatgtgacagacccgcctgatgagcctgtctgattaatttctacaacagacctgggtggcacatgggcaacctggtgc

SEQ ID NO: 15211 - DNA, 436 bp, Homo sapiens
  source 1..436: mol_type = other DNA
aagacacttgatcattgctcacagagttcattagccaagtgaaactgaaaaaggttttggcctctttgccaaaagtagaattgctattttgcattgctgaagacatgctgcctgcagaaatcactcaccccaggttgggatttgaacttggcccagctgacctcacaccaggggaggagagttgtaagacacgtgcattgcccagtgggcgttccctggcaactcctgcctgggtgccatgctgcagcttctaggagggggcggccctcgagctcgagaggcggcttatgcaggttccagttgctgctgcctgcccccaccccgtggaggccacccaggctgccctctggctgaagcctgaagcaccctgacagacaaagcccagctgggagaggcctcggccctgcctggaattccccttgctctggcattggcc

SEQ ID NO: 15212 - DNA, 806 bp, Homo sapiens
  source 1..806: mol_type = other DNA
ggacgcctgaagcctatgcggcccagcgttttcatcccggctcgtgctgggggcggggagagaagcccgtagggcctctggcgcggggcccgggcagccgcggtggcgcggcccaggcccggggccacttcccgcgtcccggggcctcgcaggcgcgagcgcggcgagcggcgcgcggctgagcccgcaggacgccctctagccccgccggcggcgcgccgcgagtccctcactccccgcccatcggcggctgcgcgcactgcacactcgcctgccgccgccgccgcacgccgcctgcctcctgcacgccgccgccgcgcctagcgcccgggcccgcgacaccgcccgctaagcgccgggccgagttcacgcagccgcggtctggcggctccgcggcggcggcgggtgcgggcggcctggccggtgcttcctcctccccgggagtcgctcgtacaaagcgctcggcgccggcaggcgagcgtgcgcgcggcggacgcgcggcgggcaccccggacgacttggcgagcgctggcggtgacggcgcggggtccgcgcccggagcgccccgccgcgcacagtaagcgacccggggccgggcggcggcggcggtggccggggggctggccccgagcgaggtccgggccgtgtgcgtcccggccgctggctggagggagcccggctcgcgtgcgcaaggtctcgcccctgatgcaggcgtgagacttgtcagagcacaggcatggggagaacaagcctggctgcggcggaaaagtctgcgctccccaggccagggcgggcgggcgcgggga

SEQ ID NO: 15213 - DNA, 599 bp, Homo sapiens
  source 1..599: mol_type = other DNA
atagggagttttaaaaaaacttctctttaaaaatcgctttttggatacaaatactctgcttattcctgaacttaagtcaacatcctaagttttgcatgtattttggatgtggcttctgaattcccaaagtgcggaagctggacgcctgaagcctatgcggcccagcgttttcatcccggctcgtgctgggggcggggagagaagcccgtagggcctctggcgcggggcccgggcagccgcggtggcgcggcccaggcccggggccacttcccgcgtcccggggcctcgcaggcgcgagcgcggcgagcggcgcgcggctgagcccgcaggacgccctctagccccgccggcggcgcgccgcgagtccctcactccccgcccatcggcggctgcgcgcactgcacactcgcctgccgccgccgccgcacgccgcctgcctcctgcacgccgccgccgcgcctagcgcccgggcccgcgacaccgcccgctaagcgccgggccgagttcacgcagccgcggtctggcggctccgcggcggcggcgggtgcgggcggcctggccggtgcttcctcctccccgggagtcgctcgtacaaagcg

SEQ ID NO: 15214 - DNA, 576 bp, Homo sapiens
  source 1..576: mol_type = other DNA
ctcaagaagttaattgttcatttatgtttgatactgggattgaaacattggattaaaaccaattaaatgttcctagaagcaacagaaaaagtttccttatttatgaatagaaccattgaggtgttttgtttttttggcaaaggagaacacaaaacaggcatagggagttttaaaaaaacttctctttaaaaatcgctttttggatacaaatactctgcttattcctgaacttaagtcaacatcctaagttttgcatgtattttggatgtggcttctgaattcccaaagtgcggaagctggacgcctgaagcctatgcggcccagcgttttcatcccggctcgtgctgggggcggggagagaagcccgtagggcctctggcgcggggcccgggcagccgcggtggcgcggcccaggcccggggccacttcccgcgtcccggggcctcgcaggcgcgagcgcggcgagcggcgcgcggctgagcccgcaggacgccctctagccccgccggcggcgcgccgcgagtccctcactccccgcccatcggcggctgcgcgcactgcacactcgcctgccgc

SEQ ID NO: 15215 - DNA, 506 bp, Homo sapiens
  source 1..506: mol_type = other DNA
gtttttaattctgctgaaatacacataacataccattttataaccatttttaagtgtatacttatgtggtattaagtacatttacattttcaaattcatttatatttccaagttatatgtgtggtgtgaattaattagattactacatatgaagcactcaaaataatgcccttagccagggccaggctgaggtgggtggatcacttgagatcaggcgttccagaccagcctggcaggttgcagtgagctgagcttgtgccactgcactccagcctcggtgatggagtgagactccgtttaaattcaaagtgattttggaggagcatacatatgctgcatgaagtgaaattcagcacaatttagagtttggaatcatagttttacaaagggttcaatggtacagtgttaatgcatgcatataaatacatgtaagtatgagactcaattcttaataaaagtatttaaattttgtctgacaggatttgaacttctcgaagataccaaca

SEQ ID NO: 15216 - DNA, 323 bp, Homo sapiens
  source 1..323: mol_type = other DNA
tagtcccagctactccggaggcttaggcaggaggcagcgagcgagatcgcgccattgcattgcactccccaggtgcctgggtcgaggcagagctgaggctacaacacactgatccccgtgtttccctggacataaatttccacgtgagaatcttagccagaaacgaagttggcctcttgccaaggggagagcgcacggtccccgccggcgcagggagccgggggtagagcagagggcgtcgcgtccccatcccagccccagcgcgggggctggagcagtcgagagggcggcctcccgccgcctagaggcgccggtccgctcgt

SEQ ID NO: 15217 - DNA, 512 bp, Homo sapiens
  source 1..512: mol_type = other DNA
aggcacaacacactgatccccgtgtttccctggacataaatttccacgtgagaatcttagccagaaacgaagttggcctcttgccaaggggagagcgcacggtccccgccggcgcagggagccgggggtagagcagagggcgtcgcgtccccatcccagccccagcgcgggggctggagcagtcgagagggcggcctcccgccgcctagaggcgccggtccgctcgtccgctcttctatggcggccccaacggccgtccaggacgtggagcgaaatgagctcgggcgctgacggcggcggtggcgctgcggtggcggcgcggtcggacaagggcagtcccggggaggacggtttcgtcccgtcggcgctggggacccgggcaggggaggatgagccgtgccgccctgcctgggccccgagaaggggacggcggggtggagacccggggctcagggacagggagaccctcgggggcgcaaagagtggaatccctaggggtcgccctacgcggt

SEQ ID NO: 15218 - DNA, 229 bp, Homo sapiens
  source 1..229: mol_type = other DNA
agaggccaggcgcggtggctcacgcctgtaaggatcgagatcgagatagtcccagctactccggaggcttaggcaggaggcagcgagcgagatcgcgccattgcattgcactccccaggtgcctgggtcgaggcagagctgaggctacaacacactgatccccgtgtttccctggacataaatttccacgtgagaatcttagccagaaacgaagttggcctcttgccaa

SEQ ID NO: 15219 - DNA, 290 bp, Homo sapiens
  source 1..290: mol_type = other DNA
caggctggcgcgatctcggctcgcctcctgagtagctgggactacaggagttcaccgtgtaagccattttgtattttcaatatagacagggcctgacctcaggtgatccgcccgactaaggtttcacttgcaaaggagggagcgacacccctgcggaggatacggtgccggggtccttccgagccttcaagactgtgagcgctcagggccctcggccgctgcccgccgcagactccacttcccatgatgccaaggggtcgggccgtccggaaggccgtgtgccctccgcg

SEQ ID NO: 15220 - DNA, 595 bp, Homo sapiens
  source 1..595: mol_type = other DNA
ggagagagcaagaggcaagctctccatgactttatacatccatatacatggatacaaagcacctagagctttatcttccctggtgttttacgaagagcttcaaagtcccttagaaatgagacctgggggttaacttaaaactctggcacaccgccgaggacgccctccaggccgccgtcagccggcgcccccgagcgccacgcaccccgcggcagtccagcaccctcaagaccgcagtcggccgcggaaccgacgcgcgccgccgactcacaatcagggccgcgcgccggctgacgtcaccctgtgtcgaccagccccctgagccagaggcggtcgctcattggctgcgccggcggcggcctcggggccaatgacagggcggcgagcggcggggtctggccttgacccgggtccctcggccgccgccattagggtccgcagcgcccgcggccgcctcccacacctcagtgcccccgccccccggggctcgctcctctcccccggcctccggcagccgggagccgcgcgcggaccctcggagaccagcagcagcggggcgggcggcggcgcgcggagaggggccgggctcgactcg

SEQ ID NO: 15221 - DNA, 424 bp, Homo sapiens
  source 1..424: mol_type = other DNA
agcagcactgcaggactcttgtcagccagctgtgcatagcaactggaagccatggctttttagcataaagcccagttcttcggaaccccactgggcctggggaccccacgtccctgaaagaatgtatatgaatcttactctgtgtgtcagttacatcctaataggttatgagctcttccagaaacctctgccccaggctccagcaagcctgtagggcagcggctgctagaaggcttgaatttcagtccactgtcccagctaagctctcatgcccagggcttgggggtctcctgtggcctccatatccctgcacctcatgcagggcactgccaggattcgagcctcagaccttggacaggtctcgggccagcctcagccacgttctgcgtgcccggccagagccgatcgctaggcaacctggagt

SEQ ID NO: 15222 - DNA, 592 bp, Homo sapiens
  source 1..592: mol_type = other DNA
gcagcggaccccgagccaccgcgacaggacctcggcccctgccaccgaggcccccgcgcctcccgagggcctcccgggcggggccgggctagggagtgcccgccgcgcccggcccctggccctcccgcccgccgcgcttgtgtgcactttcgcggagccactaatcccccgagagagaggagtgagcgagcggcgaccctcacctcgcctcccgcctagctcctgcgcagccagcgggtaccgggagctgcggccagcgccgctccgttttccttctccttccccggaggagaaaacaaataaagccgggaggcgctcggcatccaggacgttccctcccccgatcctcctctcgggggtgagcgcggcgcggggcgggcccgggccggggacccccagcgcagccccctctcggcgggcgggagggcgcggggccgggacgcggtggctcgggagcggcccggaggagccggcggcggcccgaggagcgagggaccgaaccgggagccatgccgcgctgagggggggccgcacagccgccgccaccgccaccgccgccgggtggggtgggaggggcgggagacgccgccgc

SEQ ID NO: 15223 - DNA, 765 bp, Homo sapiens
  source 1..765: mol_type = other DNA
gtcggggcgtgagcggctctcggtccccaggggcgctgcccctgccggcgggggatcccgcgcggctccccgggagcgcaactccgggcagccgggccacatctgctgccgctgccgccgccgccactgccgcgcggggctcggcccgccaaagtcgcggcggggcggggggcctgggcgggccgggcggcgggcgcgggcgggggccgggcgggccgggcatttcctctgcccggccgcgctcccgcgggcaccacttcctcctcgcccgccgccgccgggagcccggcccgcccgcctcccccaccttccccgcccgggccgcacttttcgggtggggcgggggctggctagggcgcgccccgggcggcagggacccggtgcggcgcagggacagccgggccgccgcggttcctcctcctcccagccctccgcggcgccggacggccccgcgcggccgaggggaagcgcctttctttctctccctcgcgctgcccccagcgccccgggcgagttgggcagaggcgcgcgggagccggggcgtgcctgggcctttctcccgcgggaggcccagcggcgtggcgggtcgcctgcagcccacgccgcgccctggggctcggaggccgcgggcccaagagctcagctcggtcaccgcgggccgcgccgagacacgctcgctttccgccggcgacgacggtcgcggacacggagtgagcgtgtgcgcgcgccgcccggtactttttccggaggcggcccaagcggcag

SEQ ID NO: 15224 - DNA, 557 bp, Homo sapiens
  source 1..557: mol_type = other DNA
gcccgggggctggcgccgctggctgggcggggccccatgggaccggggccacccggggctcgcgttcccccacgtggccggctgcccggtaccccacgtggaaggggggggagcagcggaccccgagccaccgcgacaggacctcggcccctgccaccgaggcccccgcgcctcccgagggcctcccgggcggggccgggctagggagtgcccgccgcgcccggcccctggccctcccgcccgccgcgcttgtgtgcactttcgcggagccactaatcccccgagagagaggagtgagcgagcggcgaccctcacctcgcctcccgcctagctcctgcgcagccagcgggtaccgggagctgcggccagcgccgctccgttttccttctccttccccggaggagaaaacaaataaagccgggaggcgctcggcatccaggacgttccctcccccgatcctcctctcgggggtgagcgcggcgcggggcgggcccgggccggggacccccagcgcagccccctctcggcgggcgggagggcgcggggccgggacgcgg

SEQ ID NO: 15225 - DNA, 627 bp, Homo sapiens
  source 1..627: mol_type = other DNA
cagctcccttccggagacggcgctcggacgtcgcgggtcacgggcgccaggtgctcgttgggccgcgagcggccgctgggcctggattcccaggctcgctgtgcagactccaaccttgagacgtcaggacggcgtgggctccgggccgccgcgcaagcccaggaccccgagtcgcgggcccccacgccgcagcgcgcctccctcctcgagacccggggctccgagcactgctgcaattgcagcaggatttggggagcgcaagtgccccctgtggccggcccgcgcctgaccccgcgggcctgagaaggcagaagcggccggtgcggggcaccaggcccgggggctggcgccgctggctgggcggggccccatgggaccggggccacccggggctcgcgttcccccacgtggccggctgcccggtaccccacgtggaaggggggggagcagcggaccccgagccaccgcgacaggacctcggcccctgccaccgaggcccccgcgcctcccgagggcctcccgggcggggccgggctagggagtgcccgccgcgcccggcccctggccctcccgcccgccgcgcttgtgtgcactttcgcggagccactaatcccccgagagagagga

SEQ ID NO: 15226 - DNA, 454 bp, Homo sapiens
  source 1..454: mol_type = other DNA
ctggacaggttgtcctgcatgtgtttactctcgtattcacacggagtagccaagagaattgtgtccaggccccgagagaaacgcagcctttgcagccctggggatgccaggtggcccttggcaaggctcatgagctctggagctggcccatgaccttgctggagaaaaaataaaaacaggtgaatgtttagtttagcacagcatataataattattcatgagtggtccgagctgagacacagagggtgggtcctgggtgcagcagtgccactgatgcaaacttacttctctgaaaactaacaggttcaaacattattggttcaaaaattgagagggtacaaaatgcacaggcaaggaaccagtggcaagaatcctccgagggtttagaagactcctttgcccattgtgatgggtgagttcccattccatgacaacaatggccgcaccttcccct

SEQ ID NO: 15227 - DNA, 513 bp, Homo sapiens
  source 1..513: mol_type = other DNA
caaattgttgcaagagccaagttaatttttaaaaacactttctgtatcttacgcacaacaaaacacttttactacaaaacatgtattgtataacggatgtgagcctggaccttcaaagcttgcaaacggcccgggctatttgcatcgtttcctgggaacctgtgagaaatgccgagtgccccaggttcagcgtctcacgggtcctgcaccacctgggacgccccgcaagcagcgggcatgccgggcccccagaacggggagggcctcgtccgcgcgtcccagcgccctccccggaagccccgccgctcccacacccaggatggggccgggcaggagcgcccagtctcgagatggctggctcgcctttccagtccgggccctcggggtgcccgtgtgaaaagatgtttgaacctccgtaacgggagccgccggcagcgctgacggctgcacctcccctaattcccgccctggccgcgaaggtggcacccgcagcgggaggcggggccgggcctt

SEQ ID NO: 15228 - DNA, 268 bp, Homo sapiens
  source 1..268: mol_type = other DNA
gctcagataaaagcctctgtcttcaggatcccaaagaaacttgagagtttatccttctataaaaatcacacacaaatacttctctaggcatctgtgcatatgtatctgcaagaatgttaatttatactatctgctcagaagatctcctttatataaagataaacataagcaaactaacggtcagggtttttaaactctcatttagcggcaaacttgcccgaggcagcacgcccagggcctgccacgtggcctcctagcgggcacactt

SEQ ID NO: 15229 - DNA, 563 bp, Homo sapiens
  source 1..563: mol_type = other DNA
gcaaccctaaggctaggttattcccatttaacatgggaaaaaacaagatagaccagagctcaggtccgttggttccttccttatattatcaccttagagaagggagaaggtaatggctcactcctgtaatcccagcatttttgctattagagccaccccaaaagaattctagtgtgagcatcttctttagtattcttagaagtgaaattacagaagaaaagtatataaagcttttgatgtcaacaaatcgttttccatgtttctcttatgatacttgacgtttagaaaacatcatttaataagtagaagagtcaatataattatttcccaaagtgcttatgagctacttagcatatttatcttgaaatggaaaagctatttatctccttaaaacataagataccaatttctctgtttgttgttgatacaaccctaaatttacatcactctttccggaaccataaacgtttggcataggacataatggtttcatgtctttccaagtgatatcaactgctaaacaagcccattagtgctaagtcatggtgtaggagggataggtc

SEQ ID NO: 15230 - DNA, 261 bp, Homo sapiens
  source 1..261: mol_type = other DNA
aaaggcttctacagctgctgccccgaggggagagggccccctctgcgagcccggggtggccgattcaggatctgaggcttcagcctgaagacctttaaaatactactatgctgcggaaacctgagaaagaacttatctccagtttctcctcacagggtcagggaagaccctacactatttttacacagcctgggcttgccaaaaagtttttcctgggggatccggcggctgcggaaccccactttccacggcgcgcctgcg

SEQ ID NO: 15231 - DNA, 495 bp, Homo sapiens
  source 1..495: mol_type = other DNA
ctggtgatccacccgctaggcgcgagacaccgggcccggccccccgccgaagcatttttaactgcggtgccggctttaaaaaaactttgctcggcgagggtaggctgggcaggcgccttccgtcaccggcgcagcggtagcggcagcggacatccccgcctgggcaggcccaggtccgcggaagcctcggggccctggccccactgtgtcacacaccgcccggggccgggcccctgcacgcccgcgggcttcggcgtccgtaccggtacagcgggcggcgacacctacctcgcgggaccgtgcccagcacccggcctggcacacagcgggcacccggtcggggggcggtgtcgcgcagtccggaagccccctccccacgcagcccgaggggccgcggcggccacccgcgccgggccccaggaccccgcacctcagactggggtcgcgtgggtggctgcgcgcagctaggcgctcgcgcatgcgcaccgccatcca

SEQ ID NO: 15232 - DNA, 577 bp, Homo sapiens
  source 1..577: mol_type = other DNA
aatatcatgaactgtattttattattctttttttatctggttaatgtgaaaaggagcttatttccagcaacactaatggaatttttctttttaatcactagtaattggaaggggaaagacccttcacctgacatgtggtcatttaaattaaaagttgtccttaatggtctgacatgtaagaaatatgctagagatttctggtttaattaaacaaaagaccttattaataaaagccagccagctgggcatggtggctcacatttgaaacagaaattagctggacatagtggtgtacacctgtagtcccagctactgcagtgagccatgatcacgccactgcatccagcctgggtgacagagcgagaccctgtcttttttatatatatataaaataaaagccaaccataactacatatggaaggaaataataaattcattcccctcacttggctttctaaactgacataagcaaaaggaaaatgaaaagttttaaaaatgtttttcattaaagtaaaggatttcttaataatagattttcctgtagcctaggaaccatgggattaggtgaccacgtgat

SEQ ID NO: 15233 - DNA, 485 bp, Homo sapiens
  source 1..485: mol_type = other DNA
tttagataaattttaagtcttccccttattttgagaacaagctcgtgtttagatctgataactcaaaactgcacaacttttacagaaaaagagattacaaacattttttgagtgtcctaacttgtaggggtctctaataaatacaagacccagcctcggactttagaagaaatgcttacagcccccagcgcggactctagggcgccggcggcccaaccatacagacttgtgtagcccccttctcccctctccaggagagaaaagcgcgaggagacgcaaaccgatttccgtgtcccctgcggagtcgcgcgcggggcgcccacactcgttcccggggagccccagcccggtcgcccgccccggtcccagctccagcccgggcctcccttactctggggctccatggtcggctgctccccggcctccgcgggcgaacccccggactcccagccagggccggcgtcgctacggttgccctgacaacc

SEQ ID NO: 15234 - DNA, 805 bp, Homo sapiens
  source 1..805: mol_type = other DNA
gcaaaccctgaatcactgtgttttaaaaccagtatgaaagactattgtgtgggataatgttacattgtttcacagccctacaaagtttggccacaaaacgtgtccgggccccctgcctgaaatgggacacggggatgacggcaaaaccgtgctcctggctctcgcgattcaggagacgcgccaggctcactggggacgacagcgacgacggcggcggctcgcattgctccacgcttcccgtcaggggggctcgagggaccgccccaggcccggcccatgcccgggctcggagggagcccctggtgcgagggctgcccgcagggctccgtcctcccgctgaggcgcggctcccggagcaggaggcgcggaggccgccctcggcgtttcggagtcggggcggggaacgtccacggccaactgcgggcaggggacccccaggcggctacaacaggtgcgccggggccgcccacccggctcggggcgcgcccgcccctgcgccgacccccgaccccttccgccgccggggccccgctgttacctgcagcggcggctcccgattcccgggagggcggcccagggccggcgccttacccgcgggcaggcccactcgcccgacggacgccgcgggtcggcgacagcggggaccgcgggtcggcgacgtcggggcacaggtcctgcggggccgcgggggccgccagggagggcgcgaccgcctgaccgggcttcaggagcagtgtcctcagccggtgacctggccgctaccctcgctcagtgtccccggcgacgcgcgggtcctcacgcgctc

SEQ ID NO: 15235 - DNA, 417 bp, Homo sapiens
  source 1..417: mol_type = other DNA
caggtgtggtcacagctgtgggatcacattctgtggtcccagctacgcgggaggctactgcactccagcctggacaaacaaacaaaatatatatttatatatagagagagagaggctgcatacactaaactagcaatgctagtttcaatttagggtgaattacttcagtagagaaccaaagtaccctgaatatgtttatttaaattaaaaaaattaaaacttaaaaaaaaattcgcctcagcttcccaagtagctgaataagctgattaagttgtttaaaggaactggcctttgcctctaggagaaaggaatgcctcctcccttcttccccagccctgtgagcacagagcactggtgtgagttgtccactgtctgcatgtaatgagtcattcaggtcattagttcagaatagacaag

SEQ ID NO: 15236 - DNA, 573 bp, Homo sapiens
  source 1..573: mol_type = other DNA
ctgagggcgaaggcgcaccattctttcattggtctggcagcctggagagtccccgggaatctttttaacaagccaacccaggtgctttcaggaaagtccaggtcatggaagcttgtttctcgggcgagagatgcccctttgggcgcttagggccgggcggggtcgcgcgccgggctgtgggccgcggtggagacctgacccgcactccgagggttcccagagagccggggagcatcgtttccagcttcagcctgaaaagctggaccgtgccgccgcatgtgcgcttggcagccgggcgccccgggccctgcggccacatcatcctggggcggggacgtgtgcgctccgggcgcccggacgccactgagccacgtctgagccgcccaccctcgggggtgagcgagccgcggctcggggcgggaccctggcggggggacccgagcggtctctaggacccgcgggacgccgccaactggcgggggtgcgggggagacaataatttgttccgcggtggccaacggctggcttgtgccagaacggcgcgcgcgcgcgcacgcacgcacacacacgggg

SEQ ID NO: 15237 - DNA, 579 bp, Homo sapiens
  source 1..579: mol_type = other DNA
gagctccacgcattgtgggaaataagtccccaaggttgggaatcatggtaacccgcagggtgggcatctgagggcgaaggcgcaccattctttcattggtctggcagcctggagagtccccgggaatctttttaacaagccaacccaggtgctttcaggaaagtccaggtcatggaagcttgtttctcgggcgagagatgcccctttgggcgcttagggccgggcggggtcgcgcgccgggctgtgggccgcggtggagacctgacccgcactccgagggttcccagagagccggggagcatcgtttccagcttcagcctgaaaagctggaccgtgccgccgcatgtgcgcttggcagccgggcgccccgggccctgcggccacatcatcctggggcggggacgtgtgcgctccgggcgcccggacgccactgagccacgtctgagccgcccaccctcgggggtgagcgagccgcggctcggggcgggaccctggcggggggacccgagcggtctctaggacccgcgggacgccgccaactggcgggggtgcgggggagacaataatttgttccgcggt

SEQ ID NO: 15238 - DNA, 504 bp, Homo sapiens
  source 1..504: mol_type = other DNA
ccgagaaaactcctctgcaggaaggcagcttcctcaaatgctggataaccgcctcctaggagtgggtgctccgtcaggcgcactgcaggtggtcctaggtctgagcagcacagtagaatcacctgaggctttgaaaactattgagctccacgcattgtgggaaataagtccccaaggttgggaatcatggtaacccgcagggtgggcatctgagggcgaaggcgcaccattctttcattggtctggcagcctggagagtccccgggaatctttttaacaagccaacccaggtgctttcaggaaagtccaggtcatggaagcttgtttctcgggcgagagatgcccctttgggcgcttagggccgggcggggtcgcgcgccgggctgtgggccgcggtggagacctgacccgcactccgagggttcccagagagccggggagcatcgtttccagcttcagcctgaaaagctggaccgtgccgccgcatgtgcgcttggcagccgg

SEQ ID NO: 15239 - DNA, 466 bp, Homo sapiens
  source 1..466: mol_type = other DNA
tccttataaaattgtgtatttcattggaaaggcaataagttatgcagtttctcacatttcccctttgcttggaggccacccaccttggcctcccaaagggctgccggtgctgctttttttaaaagtcagttttactgtttttaaactgcattattaactataagctacctcaaatttggttgggtataaattataaaacaatgctcattataatttagtgtcaaagatatttcactaaattgaaaaccaatcagtcttataagagcttgcatggtaaactgttatattgctcaattttctacataaaccatttgtaaaaaaattggtaacaagtagattaatcaccatctggatgtattttaatactaagaaaacttttaaataactctcatgcaaacttgttttactcagcctcaaatgtaatcacgattgctgctaacaagaaatgacaaggtgggcttgtatg

SEQ ID NO: 15240 - DNA, 455 bp, Homo sapiens
  source 1..455: mol_type = other DNA
taattattagcattgtgttaataacactgtgcaaaataatttgggtagctgttttgctcaccagatcctaacaataaccctgtgagaggattcctttcagtcctggcaagtaaaagcaggaattctaaaaagcaacgattattcctcctagttcctttgtacagagccctgtaaataatttatttggatagactgacaaacatattgaatctctcagtaactgggtgaattctgtgttcaaaacttcaatgcagtggaaagagaaatacttctttgaaatcagggaaacagaccacaacaagaagttttttttttttttttttttttttgttcccacatccacctgggacaggtccgagctggggcactgcccaagtccctcctgtctgggttaaacaaagaaaattgtgtttgccagtctcactagctaaagtcacaagatactgagtctcatg

SEQ ID NO: 15241 - DNA, 499 bp, Homo sapiens
  source 1..499: mol_type = other DNA
aacttttcccttggagaaatctgaagcccccacttcccacctcgggcgaggatgccgttcctgagccccacgcgtggcctgcttctgcaagcccagctgggctgagcagcacctaccaggcagttggtgcggcgctcccagcacactcgggcaatgagtgggcaggcgcgggactctccaccagggagaaatccgagctgggaccaccaggctccggcctaagcccgcgccttgcaagccgcccgtttgcccccctaagggcgcacccctctcacggcgtgagcgccagccccgggagctccaggaactcaggagaaccccgcgggggtgcccgggtgcggagcgcggggctgggcgcactgggacagaggaaggggagccccggcgaccgcggggtcggggcccagggtccgcgccgagggcgggcgcagagcccgcggccgtcccgcctcccgccggcgctcccggcggcccgcgacgctccgcccgccccgcctcc

SEQ ID NO: 15242 - DNA, 696 bp, Homo sapiens
  source 1..696: mol_type = other DNA
cgggcagcttggggggccgggataacccgggctgcagcaaccccgggcggcagcaggactggagagctggtgtcggacgcactgcagagacgtccctgttttcggcgcgtcctccgacacccagcagagagcttggcgctctccgctctgcgcgcccgaggtcacagcgcggagaaacctggcggggccccggactccccggcttgggctggggcgttcgaaatttccagggtcccgaccctccgtggggtacgcgcgacttcggcgcagatgtcagtccgctgcctgggttgagggagcgaggactccagacgaccccagggccgctgtccaggcccagccccgcgctgagatctagccccgagtcccgggtaacccaggggccccggcgaggcgagtttctttgggagccgagcaaaggggccgcgcattggacggggctcccaagccacagccctgggggccttgagagggcagtcggggctgcggggcccgtgaagccatgggtccccgtccggtccaggacgtgtcaggcctgggcggggcggaaaactgaccctgccaggggaggggctcgccaccgtcactctccatgggctctggccccgacggtgtttaaagggcggagggctgggccgggctggtcgcacccgggcgctgctggcggccaagctggatgggtcgccagtgagtttc

SEQ ID NO: 15243 - DNA, 529 bp, Homo sapiens
  source 1..529: mol_type = other DNA
ttacatttgcaccaacttaatattatattactaaataatcaaagaatacagtaaaaagcggtatggaaaacatgctatgaatgtctatttatcatctcaagaaatgatcttttcgccaaatgggagagtttttcgaaagtccagaaatgaccatttataaactatttaatctcttagtaataaagatgaaacttctcaagatataatttaaataatacgcaaatatgatccaatttgaaagaggaaattcttacatttgacaaaggtttaccctccttaggattcctcttggaacaattataagagtcaaatcactaccacagacttcgtcaaacttctagaagtttaaatatgaacaaaggtttatgcctaaagatatttgggtgttgttctttctcaatcataattgtgaaattgaagcaacataaatatccacaatagtgaagtatatgtttacatatttccaataattcctcctgtatgatatcacttggccaaggataagtccctgggaagaccatgcccaccc

SEQ ID NO: 15244 - DNA, 414 bp, Homo sapiens
  source 1..414: mol_type = other DNA
atgctgtgcattgcacatgtaagggtgcaatggctgagcagggctgcagtgagccatgttcacacaactgcactccagcctggttgacataatgtcagtgtggtgtggcatgccagataatttttgcatggcaatctaaatgattattatgtaaattttgcgtgattaagtattttaatcccataatgttatcacttaccatgaaggcattcattcttcaatatgcaccattgactccagtgatcgatgaggaattgtggccattaaccaggctcgtggcctgaattaaaccaggctgggtgttctagaacttcactttgcttatccaaagaaaggggctgtcctgggccatctctgggcccctcacaccactgggcaggaagggcctgactccgtacaaggctggatcccagg

SEQ ID NO: 15245 - DNA, 535 bp, Homo sapiens
  source 1..535: mol_type = other DNA
cctctgccaggaggcacccacgtggggtaacacacgaatgcagcttccctcatgagggctgggccgtggccccatccagagggcacggcaaggttcagaacgctccttccagggaactgccttttctctgaaagctccctaaactagacagcaggcccagtgcctggctctgtcgctcaccagaagcgcacggggtgccctgcgtgtcccacacctgctgcaagaccagggcgagtccctagtcaggccacttcctggtgcacagggatagggcagggagaggcagggccttgcctttgctctccaccaggacgcacctgggtcccggcggagtggctggaccaggcctccccccacagtgtctgggtgctcccagggcagggccgcagggcctcagggccatacccgcctcgcaggtggggcgggcgccctggatgcgctccccgcgccgggcaccaggcgtcgcccccgctcctcgcagcgcccaggcccccgcccccgccgcggagccacagccggagctggagccgaggcg

SEQ ID NO: 15246 - DNA, 451 bp, Homo sapiens
  source 1..451: mol_type = other DNA
aaggtggcagcgaggccaccagtgtccgtgggtcctgagcagcaacaaagccacttagctgggcctggggcacctgtcaggtcacagtgcgccagggccacaggcctctgcccagccccagggccaggccgcctccctgtgcctgagctcctgcccaagcccaaggggccctaagagctgaggtcctaggaccctgcagtggccttctccagcttcttagcaggagagccaggcagccaggccgtgtgggggtctggggaactcacccctgtcatgcctgccccagggctgcaggccctccggacccgggcgcctcccagccgctgctggcctggctgctactgccgctgctcttcttcaggtaggagtgtcccggggcactgacttgccccaaccagctcagaggaggaaatgagccttctgatgctgtgggcgtggctgtgcagcactg

SEQ ID NO: 15247 - DNA, 476 bp, Homo sapiens
  source 1..476: mol_type = other DNA
agagtcttctgagactatacttcgcagagaggtcgagcagccgtggggctctaaagaaagcattctttcaggatcccgccaaacctcgcttccgggtgggagcccgaagacgcagagctttcaggccagccccgcgcggctcacggcttttgttctactcctccgtaggcgcgcagccactgtcgggagtgtgtgctgtggaggcagttgccgcgttcgctccgcctggcccctgccggggattcagccaaccaaccctcaacagccggcggcggctcagtctctggcccggcgcggtgctgagcaccactgagccctcatcttagggcaccgaggcccggactcctgcagccgcatgtccaggcccctcctgccgcacggagctcccttgactgctccaaacagcccagactggcgccttttttggataaattaaaacggggccaatccgttgccagcgattggctaacgatggg

SEQ ID NO: 15248 - DNA, 778 bp, Homo sapiens
  source 1..778: mol_type = other DNA
tggcttgcaggtgcagccctgccttctgcctataaggacacgagtcatactggatgaggggcccactaattgatgtccccatctccaaataaggtcacattgtgaggtactgggagttaggactccaacatctctggtggacacagggcctggcaccctgtgtgcgagagcggctgagtcaggctctggcagtgtctaggccatcggtgactgcagcccctggacggcatcgcccaccacaggccctggaggctgcccccacggccccctgacagggtctctgctggtctgggggtccctgactaggggagcggcaccaggaggggagagactcgcgctccgggctcagcgtagccgccccgagcagtaagcgggcgccgtcctacgacccccgcgcgctttcaggaccactcgggcacgtggcaggtcgcttgcacgcccgcggactatccctgtgacaggaaaaggtacgggccattagcctcaggcggaagctgggaaggcgccgcccggcttgtaccggccgaagggccatccgggtcaggcgcacagggcagcggcgctgccggaggaccagggccggcgtgccggcgtccagcgaggatgcgcagactgcctcaggcccggcgccgccgcacagggcatgcgccgacccggtcgggcgggaacaccccgcccctcccgggctccgccccagctccgcccccgcgcgccccggccccgcccccgcgcgctcccgtgcccctcggccccgcccccgcgccccggatatgctggg

SEQ ID NO: 15249 - DNA, 432 bp, Homo sapiens
  source 1..432: mol_type = other DNA
tgttgaagttcaagatctaccacttcttttcatttttgataatttcagcttcctaaatgtacacatctggagcctcaggagtcaggtgtcctgacagccaggaaccctgacacccaggagccctggcacccaggagtcaggaaccccgacacccaggggtcccgacagccaggaaccccgacacccaggggtcccgacagccaggggccattacggccaggagccccgacagccagggacctcgaagcccctacagccaggagccccttcagccagggagccgccccttggcagggtcagagccccccagcgggatccagagcccgccgccgaggccccttttgggatttctcaggctcggcagcctcagcgcaggcaggggcggggctttccctcgcgcagccgctcagctccccgtggccccgcccacat

SEQ ID NO: 15250 - DNA, 683 bp, Homo sapiens
  source 1..683: mol_type = other DNA
gctgcattcggcagacctgcggcaggctgcattcggcagacctgcggcaggctgcattcggcagacctgcggcaggctgcattcggcagacctgcggcaggctgcattcggcagacctgcggcaggctgcattcggcagacctgcggcaggctgcattcggcagacctgcggcaggctgcattcggcagacctgcggcaggctgcattcggcagacctgcgcaggctgcattcggcagacctgctccagaaaatacggcaggctgtatttggcagacctgctccagagaacacggcaggctggaccggcaggctgcattcagcagacctgcgaattcggcagacctggaaaatacggcaggctgcattcggcaggcctgcttcagaaaatacggcaggctgcatttgacagacctgctccagaaaatacagcaaggctgcattcggcagacctgctccagatgcatattttgagccaggattttttagctttaaaaaatatgtatggtcatttgatattcaaatttatagtactgaaattttctctacactgtgctttgttcattaaaacagctctcatgtttccttgcagaataaaagccgccctcattctagggagaatataatacctttcaaagtcatgaaccggagtttgactatttgaaaagtctagaaattgaggaa

SEQ ID NO: 15251 - DNA, 900 bp, Homo sapiens
  source 1..900: mol_type = other DNA
gaggaggctggcggcctccgaagcagggtctacagcgggggagggctagcgccgtctggcggtggctgcgcgtggccagtgcggacccaggctcggctcggccggcgctgcctgcgtgtggtccgggcggagcgagggtccttggagcccggttcgtcctgggtcccaggaagctcggcgtgcagcgtcagaggccgcgtgtgtgcctgggggcatccaggacgaattcacagaggggtggtcctgccccacccagggggtgtcgtgggcaaaggccctggggccacctgcctggtgccttggagggcgtagggcaggagccgccgaggcccgcgggccactgtggggcgcggaacttcagaccaggcacccgcggctcaacttccgggccaggggacccgcgggggccttacgcctgtttggcccatttgtgcaacagaatccgcccgcgcctagcagcgtccggggccgcctgcgccggatccgcagcccagtaccctccgcgccctggactccgaggaggccaggtagagagcggctcgcgcggtccccgtctgcgccctcagccccgcgctgggcagcgggacatgcctggctccggcgccgccacctctgagtgcggagcccggagcctccctcgcggtgcgctgggtcccagagggccagaggccaccagggggccggcatcggcgggagcccagccgggcgcgccctcggccctctcccacccacgtcctccgcggccgcccgggtccaggggcgcagcggggaggagaccccggccagggccggggagcgcgagggcggggcggggtccggcggggaggggcgcgggcgggcggggaccggggcgggggccgggtccgggggcggcggcggcgcgggcgggaggaggaggag

SEQ ID NO: 15252 - DNA, 826 bp, Homo sapiens
  source 1..826: mol_type = other DNA
aaagcgactttcctctgaaaagtgcctcccagtcccgaggctgcgaggcccccacgccaggctggctcccacggaagccgggcacccacccggcccgaccaagcgccactccgccccgtggacggggcgtcccaccccggggacgcccgccccacaccgcgtttgcaccccggaggccccttgccgcagaggcggacggcgcgcctctcccgggcccctggggtccgcgcctccctcgggcagacagcctccgcttcttcctgcgggcggacgccccggacacaacgggccccgctgttcacgcaggggcgccccggcggggcgggcaaagacccggggacgcggtcccgtcccgagacgctcagctccggcccaccgctcgcagctcccgccccgggcgcaggtcccgaccccacgggccgtctcggagccgcagcggccgcttccctgacgggccccgccccgaagcgtagcggcgtctccgtggtagccagtgcccagagagtccgccggtcccaccgcccctggagaacccggcccaccgcccgccgcggcggcgaccgcgcagcccactcgtcacgcggcccgcggcgtccagcccgggccggctcacctcaggcggtcgctgccgccctcgcgcctgcgcgcccctcgcccgcgtcccgcgcaccgcaggcccgcccaccgcaggacccgccccgcgcacgcgccgcacgtgccacacgcaccccacgcccctgcgcacgcgcaggccccaagtcgcggccaatgggcgacgcggccgcagatccgcccggccccgccctgccctgtgagttcctccggc

SEQ ID NO: 15253 - DNA, 443 bp, Homo sapiens
  source 1..443: mol_type = other DNA
caggtctcctctgagagccaccacccccacctctccctggagggaactggggaggaactccgaactctcccaggtgagccagagtgcaggctggccctgcaccgaaagccaggttcctgcagcctgagtacaatgctttgccccgaccagcttgggtcctgcaggcctgggatgttgcctgcagctgtcccaaaggctgccgctgtcccaaaggcagttgcaaagcactggactccttgccgattccctgcagggccacgggcaggcaggtgattggccactgagctctcagtgagctccagctgccatccagcaaggcggtgggcacagaactgcagccgggggccaggctggctctctgggttcctgaagggccctggtgtggtcccagcctcctcagcctggccacctccccgcacaggaatggtgggctggagcccagt

SEQ ID NO: 15254 - DNA, 784 bp, Homo sapiens
  source 1..784: mol_type = other DNA
caagacgctgccgctggacgctctgggcggcggccgcccgggccctcgggttgggaggcgagtctgcgcggcgcgcggagacccctcaacggccgcagcaagtccccgagggcagcccggcgtggcccaggcccgggacccccagcaggtagtggccgcgggacagaggccgtgggcccgggctcggactccccgagaccctcgcacccggaggacgccgggcgtggggctcccccgctcccccctgcggggtcccgaggtcccgcccaccaccgcgtcccggtccctggggagcgcgtgcgccgtctctcgcggccagcgtggaacagcctcgcggggtcacagcctggcgctcggaccctggcccgggtcatctgcgaaggagccggctttggccaaggtgccttcctcccagagcgtcgcggcccggggttgactggctcggaatcccggggccttgggcgcctcgcgtctcctgggacctgggttccgcgctggagggcagcgggggcgcgggcggggcctggcaggacgtggccggactctctccctcgcctccccggggtgcaaaccccgcgcaccagctggagatccccacccagcgctcgtccgcgggtctgcgcgggggcccggggtgcagagatcagaccctgcagcggttccagcgctgggggggctttaaggcggggctcgggctggggcgggccctatcgggggcggggcctgccgggggcggagccggggtgggggcggggcccagcgggggcgggaccggaacggagcc

SEQ ID NO: 15255 - DNA, 812 bp, Homo sapiens
  source 1..812: mol_type = other DNA
gcaggcggcgaggctccatgcagagccgcgccttctccagggcactccaaggcgcccagcactttccgcgcaaggtcgcgcctggccctgcgcaggggcagaggtgcccggaggtcaagccgcgccccaggcctccgaaatacgccgagtgccgaggcccctgtcgcatctggacaaggggaccctgggcgactcgggcacgcggtctcaggccggacgggggtcgcgaggatggcacgggggtgcccgagagcgcgggcgcacgtgctcagggcttagcgcccaccccaggcgcccgcgtgtgcgcgcgcgcagccaggcccgccctgccccaccccaccctctggcgcagcgcttggactcagcctgccgcctcctgaccgtgagccgggctctgcccggcagattcccgccgcccgcatcccgggcctgcagcccggcctcaccctgcgcaaagcagaaggctggagtttagggctccccgcactgggcggcggaagcccgcgcgccggctgttttcacgaagaggcaggggagggaggcccccggagaccgcgagaaggtcccgccgccgtgccgggcacagcagtccccgtgccagggacgccgacctccggggccccaggatacccgtggggacgcgtggtccccgtgtcccggcgaaccacagcccccatccctagactggtggcggccacccaaggcactagccccgcccctgccccgcccccggctcggccccgccacgccccggcgctcagctccgcctcgaccccttccaggagcccgcccccagcgctcgcaatctacgg

SEQ ID NO: 15256 - DNA, 351 bp, Homo sapiens
  source 1..351: mol_type = other DNA
ttcattatcagttggatcctggaatgaaggtgcacgggactccagggttccacaggaccacgaggacgctccagtggctccaggaagccttggtgcctcagcagcaatcggctgtcctcgagcagccccgcccgccccgggccctccggctccccagacggcttcaaggccgcgggcgcggaaaaacggatgctaccgttggccgcgtgcgtgcgcaggcgcaccaccccctgccacccccgcgccccgggcaggccctgccgcgcaggggcagcgcgcaggcgcaggcgcgacacactcgcgctcagcgtggcgcctgcgggattccgtaccggcgtctccatggcgacc

SEQ ID NO: 15257 - DNA, 650 bp, Homo sapiens
  source 1..650: mol_type = other DNA
cctgctggcgtgggaagtcaccaggagccccaggcgcacgcagacaccacctggtgggggccccaccagcctgaatgctgattcaccctggcgggcagtgcccagcgcagcctcaggatggccgctcagcccaacctggagcagggtggcgagggggtcctcagccccacccctggagggggcagctgcagaggcctgtgggcaggacagcaggcaggctccactgcaagcctggcaaccagtgggcaggggctggctgaccctggagaacggggcgccttgaggtgcctgaggccccaggaagggcttagtgttggcgggagccccaggccacacagaggaggacagacactcactgggcttccaggcctcctctgggactgtccccggccagaccggacggtcaggtgtcccaggccccgcgggctccctcactcctctctgaggctcccactgccgcgcggccgccggagggcgaggtcgacaggcgccagcgacccgacggtccccagtggcaccaggggcggtggtcctcaattcccaggctgggaggagccctgcccggcggcgctgggtcgccaggacaactacgcggtcccccgccccgcctccaggcctcgtcaggcgctgcaagtccggctcagaagccc

SEQ ID NO: 15258 - DNA, 817 bp, Homo sapiens
  source 1..817: mol_type = other DNA
tgctcgcggccgccgtgcgcggggctcggagtcatctcaccgcccggtctgcgggatggatgagcgagcggctcccggtgccgtgggggcgggggggacaccggccccccgcgcgcgtctaaggccgccgcccccagcccgcacccacgttcgggccctggacagggcttccgcgctgaggccgtcctggtctctgttctcccggccggggattcgcgagaggcggcccgtgggcgaagtcgtgggcccaggtcacatcctgggggacccccagcgggagacctggggaagtgccgagccgcgcgtgtggtcccgggacccgcctccccgccccgctcccactcctccaccgcgccggccgcgtgtcggcgaaaccagaggcagctccgtgcgagcctcgcccggccgtgaggcccgtggattccgtggactcgaggcccgcgtcctccgccctcctgtggccccgacctgcccggagcgcgttccccgccggcgtccgctgccgctcacacccaccccagccacgggcggcggagcagtcgcgactgggacgcgggccgggactcttccccgagtggggcgctccgagcgcgcgggcgggtcctcacgtattttttcctgttatttcgtccccggggagataaatcggggcgaatttacagcccgggaggcacctgccgcgctaatgggcccttcatggagtgcgcggccggcgggggcgcgcgggcggggggggggcgccggccaatggccggaccgcggggtccgcagccaatcagcgcgcgcgccgcgccccggggagcccccgttatcagcg

SEQ ID NO: 15259 - DNA, 669 bp, Homo sapiens
  source 1..669: mol_type = other DNA
ggtcctctcccaggtgggcctctcccgggtggaattccactctcccacgtgggactctcgtgggtgggcctctcccagggggtcctctcccaggtgggcctaccccaggtgggcctcccctagagctcccctagtgtgcccaccccggggtgagtcccgggccctcccctccccaggccgacagtggctccggcttccccgcgcgggggctgcgcgccccgccaagcctccaattcgggtcggtcgtaggcgccgtccggaccccggccggaaagcagccccggctgggaggtggggagccccggggggcaggtggctgcgctgctaccctctccgtgggggccggggctctgcgtctcgctgcacttccagcaccgtggcaggtgactgactgactgactgactgactgactgaatggatgaatgaatgaatgaatgaatgaatgaatgaatgaatgaatgagagccctgagcggggagaggaggcccgcgcggagcccccggcgtccccccacgccgcctcgccgggggtcgctgccctggtgtctcactcccgcggagctggcggggggcagggcgggggcgcggcgttgttcgccttccccgaagtgtggccccgccgccgacccgtagccccgcgtccgcgtccctttcggtctccaggcaacc

SEQ ID NO: 15260 - DNA, 787 bp, Homo sapiens
  source 1..787: mol_type = other DNA
ggttcacggcggctgtgtccccgcggcctcagacccagggtccagcccatgctctggcccctccggcggccaggatcagcatcgctgccccggggcccgcgccgagccggctgctcctccgtgctctgcgctcctgggcccgcaccagccccctcccctggagcgtccctgcgagggttccctgcacgccccgcgctgagacccagcctggcccgggccggagccctccgcgacgtcaggatgcgcctggcctcacgccgcctcgccgcagccgctcctcgtgagtgaggtcgcggccagggagccgggtggacgcgccgggaagctgcacggtccacgctccgtctgcgcggagagccgggcgcgcgtggcccggcccctgcaggcgcgactgccgccgccccggtgggctcccctcccccgcacgcccggcacgcggctggacgactgcggccgcgcgggggctggaacatcccctcagagccgcaagagagcgcacccgccgccggcgcccggaacccagggcccctttaagaggcgccgccggagcagggccgtgacgagtctgtgcgcagccgcggcgcggggggcggggcgggggcgcggcgttcttgcgggcctgactgacaggagcgccctccgggagccgccggtcggcgccccgcgtaggccccgccccgaaaggaggccccgccccggggcaggccccgcctccacaaggctccgccccaggcccggctcggccccaccccgagtcaggctccgccccgcccaggccccgccccgg

SEQ ID NO: 15261 - DNA, 923 bp, Homo sapiens
  source 1..923: mol_type = other DNA
gacgcctgaaggcgcgggagccgggcgcctgggggaagggggtccggcgccgtcacctcccactcctcgcccgcgggtcggggagcccctgccgcgggggaaggaggctgtttccaactggcggaggcgcgcctggcccctgggcccggcaacccgaagagacacgcccgagacctccggagggagttaaccccccgggccccggtgccggccacccccaggcgcgcagggtggccctgagccgggcgcgcgcccgcttgtcgccccgagaggcgccgagcccagtggggcgacccagtgtcccgccccccacgcggcgagggcgacactaggccgctgcccccgggcgccccgcgtcccctccgcctgccccggcttcctgcgcgcgccgcccgggacttcctcgccgcagtgcccggggccaccagagcccagcgcggggcgctgccgggacacgcgggcggccgaccccaggcgggaggatccgggccaccggggagggctgggcccggagggggaggggggcccgggaccggccccaggcaggggagcggggggatggggtcccggggctccggccgcggcgggtgtcccccccgccgcccccgggctcgtggctctcgggtcctcccgagccaggggacactcccggccagcgtgggccgcgagcccgggcgcagccccctctccagcccgggggtccgcaccgcgcgtccggccgacctctgcgggcgggcgcggcttctcccgggacgcggcggcggcgggcggggtccccgggagcggagcccgcggccgcgcgcccccggcccggctcggctcggctgtggcggccgccccagcggagctttgtgacgtcaggcggccgcggggcggcgtcacgcgcggggctgacccggcggcggcggcggcggcggcggcgg

SEQ ID NO: 15262 - DNA, 837 bp, Homo sapiens
  source 1..837: mol_type = other DNA
cttcaagccaggagcatggattaagtacctactgtgtgcctggccagccacacggacggggagctgacagccgggccctgaagccgccctctctcctgtgtctgggggtggccggggaaggtgagattctcctccaccctccctggaccgcggcactaccgtgggccggggtcaccctggcgctgaagaaagccccggggggcctttggggcaggaagaggtcaagagccccaggaccccccagggtcccccaggaccggggagggtcgggtgcccagtgggtctccaggtggggatgaggcagcgttattgccccacaggagagaccccggcccagcgaccgccccgccccccaccccgggccccgccccccaccccgggccccgcccggccctgcccaacgccgctgcagaggccaccccgggactgcggcagccccgcccggcagcagcgggggtgggacgggggcggcgggagccggcgagggggtctgcccgtccgagctttcctgggcgccggctccgcccctcgacccttggggcccaggtggggcgcagaccccgtggctccccgcggaggccacacgcctggctccgcccccggtgcctcccccaggaaggagcgacgttccctaggcgccgggtccggacagcgccgcgcagcccccgcgcaccccgcgccccccgcgccccccgggcccgccccgtccctgaccgcgtcccctggagacactgcggcagcggcgggcgggcgggggcgggcgagggccgggcgcgtctccatggagccagggcgcgcgtagccgagcccagcccagcccagccggaggccccgggg

SEQ ID NO: 15263 - DNA, 530 bp, Homo sapiens
  source 1..530: mol_type = other DNA
acacccctccaggaggtggggcctaattactctccccatgagttgggcctcaccggtgctgagccacaagacaggaggggcgagactccacccctgcgccttccttccgtgtcgaggacgcgagaagcatttaataggaagagaatttcctcctcccagggaagaagttcagattttaaaagctactcccgcggctggcgacccatcccctggcctggcgactccccctgggacccgggtcggtcctccggacccctcgcgtgcaggtgctgagcccgggcgggggcggcgggggcgggggcagcactgggggccggacaagggggcgccagcgccttccggagcgggaggggctccgcacacacctcgacgggggcgggggtaggctcggcacaggctaaaaacgagcggagccgccggggcttaggcatcgcggcacctccgttgaacgggtctattcccggccgcagcgccaggaccgaccccttaggacccggcgggcggggcggggcgcgcggggcggggcgggc

SEQ ID NO: 15264 - DNA, 739 bp, Homo sapiens
  source 1..739: mol_type = other DNA
ggtcacgtcggtccccgcgccccacgccgacgcgcaggcgacccggggacgcggagacgcagacagctcgggactcaggttcgtgggagcagcggccgcgcgtggctatgaccgtcccgggggcccgtgctcagggcgtccccgtgaggtttgggcgccacagtcaccggcggctctgcccgcgccctggccacagtggggacagcctggcttggcggggacgcaccagtcccgccgccgacgcggagttcctaccccgccgtgcgaggcagtggctccggcccttccagctcgggatggagtcagggagccgcccgcgcccgaatgcagaggctcctgcgatggccccggagtgagtccgccggattagggctggaggcggccgagtcccccgagaggcccctcccgacattcccgcccccgcgcgccgctccccgggcgggactccctcggttcctgcgcggccgcacagcctggacgcagcgcacgcgggcaccggcctgacagcctgaagcctgctcgccctcgggtgtccgggctgggcacaggcgccagcgtccccctggagaggagaggtcgcccggcacctcccaggacaggcccaagtgggagtgggaccctcctaccttcctgcagcctcggcccgcggggtggggggttgggagagagccccgcccctcccccagacatcgaggagccggggaggtgtgacgggcattagccgtgtgggcttataaac

SEQ ID NO: 15265 - DNA, 351 bp, Homo sapiens
  source 1..351: mol_type = other DNA
aagagtctctgttgagagctcaaagctaactgtacaaattggtttgaaaaatgttattttacaacttgtggaaaatgtccatgcatcactcaacattctgagaaatgcctggcccttggccaagcctggagctacttggagaaacgtatggttacatgatttccttcttcgcagacctggatggtgtacggcctacaatgcacctaaaccacctagaggagcctcttgctcgtgggctacaaacctgcccagcaggtactgtaacacagagatatttgtgtatctaactcacgcctgcagttgcccaagccagcctgggtgacagagctaaactgggcactctgcagtaga

SEQ ID NO: 15266 - DNA, 410 bp, Homo sapiens
  source 1..410: mol_type = other DNA
tagccgtggctgcttcttggaggaacgtctagccatggaatcacacaaactgacaggcccagcaactgtgactgggagggactgacgtcctcctcacagaggctgtgagctaccgggacgcgtaagagtctctgttgagagctcaaagctaactgtacaaattggtttgaaaaatgttattttacaacttgtggaaaatgtccatgcatcactcaacattctgagaaatgcctggcccttggccaagcctggagctacttggagaaacgtatggttacatgatttccttcttcgcagacctggatggtgtacggcctacaatgcacctaaaccacctagaggagcctcttgctcgtgggctacaaacctgcccagcaggtactgtaacacagagatatttgtgtatctaa

SEQ ID NO: 15267 - DNA, 645 bp, Homo sapiens
  source 1..645: mol_type = other DNA
ggcaggacgccctgccctgcctctccccagggaggccctgaggccccccccgttcccactccaggagggcggcctggctgtgaaagccccagggaggggtcctgggtggaccgtctggggagctgtggtgtcagcccaaacctgcaccctcgaggctgagcccacacgcttggccgcaggcctggagacgccggagccaggccacggtgggctgctgcaggctttggtccacgtcggccagcgtcagctgctgtctggggatcttaggctagggacggcccctgcacctgccatcacctgggctgggacccccacctagggctccccctccccatgcctatcccactccggtgaggcctcagcctggtggagggggcgcaggcttgggggggagggtggcagagcttcccacaggggaggctttctgttccccaggaaatcagacaggacctgcctggcgccacctccttccagccgccgggtccttcgagaggccccctctcggggctctggccggacttgggacaggctgtgggagaggggaaacggaccccgcccccaggtgccgcgcgccccgcccctcccaccggccgaggggcccattggctgcggggcgccggggcggggcgcgcggaaaagagcctc

SEQ ID NO: 15268 - DNA, 657 bp, Homo sapiens
  source 1..657: mol_type = other DNA
cgtagtcgtccagggcatcgaacacctggcagcagccggccacctggcaggcaaacgcgggcaccctgccaaggagacgtgcttcaggagcccttcctccggtgcgaggaatggactttctgcacagtttttatgaattaagtttcacaaacaggcccacgcgctggacaggcacagcgcctcggtggggcggccgcacatggaagagcggcagcacagccccagggaccaggcaccgcactggctaggcactgcccattcgggcacgtcggccacctgcatgatcacgtcctggaggtagaggtggcgctgcacgtccccatcctgcaggaaaagtgcgccgtgggcggggccaggtgactcgcggcacgcccaccgcgtcaggcctcgcccacacccgggctccggccccgccccgcagtcgtaggccaggctccggccccgcctcgccgccgtaggccccacgtgctcccgcgggaagcgcacggggcgcgcaacgaagcgaaagggcgcggccccagccgcgggatcccgctctacaggcagcggctccgccgccccgggccccgcagcgaggcgggcgcacagcgcggggggcaactgcatcaccccgggcgcgggcgggcgcagcctgtcggccaccgtccgcgagccgag

SEQ ID NO: 15269 - DNA, 543 bp, Homo sapiens
  source 1..543: mol_type = other DNA
ctcacgcctgcagttgcccaagccagcctgggtgacagagctaaactgggcactctgcagtagactgagcacctagcacaggtcctgtgtttcacgggagctgcggggactggagggtcgacaggggctttaaattaaaaacggttacaataaaactggagtcactttggctccagttcgggacctgcgacccggcttcccagggctgggaggggacacccgggacgacccggaggcccgctccgccccgccccggctgagtgtcgggccgcggggcaagacgctggcctggccggtgcaggcccgaagggcttcggccccagagttcggggaccgctggagggagcgcgcgggaagagccgcgtcccgccagccccgtcgcctcgtgggcccccccgggcctggcagtcccccacgcccgcgcccgcgttcggccaggactcaccgcagtcccggagccacagcccccgcgcagcccccgacggcggcggaagtgagcgtgacgtcacgtccggctcggctcgcggacggtggccgacaggc

SEQ ID NO: 15270 - DNA, 632 bp, Homo sapiens
  source 1..632: mol_type = other DNA
accgccatgcccccgtagcagagctgccaagggcggaaaggtgtccccggccttgcccgagcacccgagagctgggggcagcactctgagcccatcaccaatggggggtggcctcggcggctgttctcagacaggatctggaagagcgaatcgtgccactccaggatgtggccgcttgcaaaaggagcaaacatttccggctcgtagtcgtccagggcatcgaacacctggcagcagccggccacctggcaggcaaacgcgggcaccctgccaaggagacgtgcttcaggagcccttcctccggtgcgaggaatggactttctgcacagtttttatgaattaagtttcacaaacaggcccacgcgctggacaggcacagcgcctcggtggggcggccgcacatggaagagcggcagcacagccccagggaccaggcaccgcactggctaggcactgcccattcgggcacgtcggccacctgcatgatcacgtcctggaggtagaggtggcgctgcacgtccccatcctgcaggaaaagtgcgccgtgggcggggccaggtgactcgcggcacgcccaccgcgtcaggcctcgcccacacccgggctccggccccgccccgcagtcgtaggcc

SEQ ID NO: 15271 - DNA, 432 bp, Homo sapiens
  source 1..432: mol_type = other DNA
atgttcctgcctagagtgcactctgggaaatacttccaggacaggctaaaattttggaacaatttttaaattgtgttatatttcttctttttttaactgatgaggtgaactttcataatcatctacaattttattgatcagagttttcattttctcaagtagtaatttgctctttaaaataaaagaactgctttacaaagacttacgtgtaaagtaattgtcactagtttatagtctctggttaactttagcaaatttctcacacataaaaatactattttcaaaaaaaagtatgattgttacagttaagtttataagatgcagactctattatataaacaatggcctatgccaaaatagtaagaaaatatgctacttacgaaatgggagccgtgcagggcagttactcactgctctctccccgcagcccag

SEQ ID NO: 15272 - DNA, 602 bp, Homo sapiens
  source 1..602: mol_type = other DNA
cgggtgtgggcgaggcctgacgcggtgggcgtgccgcgagtcacctggccccgcccacggcgcacttttcctgcaggatggggacgtgcagcgccacctctacctccaggacgtgatcatgcaggtggccgacgtgcccgaatgggcagtgcctagccagtgcggtgcctggtccctggggctgtgctgccgctcttccatgtgcggccgccccaccgaggcgctgtgcctgtccagcgcgtgggcctgtttgtgaaacttaattcataaaaactgtgcagaaagtccattcctcgcaccggaggaagggctcctgaagcacgtctccttggcagggtgcccgcgtttgcctgccaggtggccggctgctgccaggtgttcgatgccctggacgactacgagccggaaatgtttgctccttttgcaagcggccacatcctggagtggcacgattcgctcttccagatcctgtctgagaacagccgccgaggccaccccccattggtgatgggctcagagtgctgcccccagctctcgggtgctcgggcaaggccggggacacctttccgcccttggcagctctgctacgggggcatggcggt

SEQ ID NO: 15273 - DNA, 683 bp, Homo sapiens
  source 1..683: mol_type = other DNA
actttggctccagttcggacctgcgacccggcttcccagggctgggaggggacacccgggacgacccggaggcccgctccgccccgccccggctgagtgtcgggccgcggggcaagacgctggcctggccggtgcaggcccgaagggcttcggccccagagttcggggaccgctggagggagcgcgcgggaagagccgcgtcccgccagccccgtcgcctcgtgggcccccccgggcctggcagtcccccacgcccgcgcccgcgttcggccaggactcaccgcagtcccggagccacagcccccgcgcagcccccgacggcggcggaagtgagcgtgacgtcacgtccggctcggctcgcggacggtggccgacaggctgcgcccgcccgcgcccggggtgatgcagttgccccccgcgctgtgcgcccgcctcgctgcggggcccggggcggcggagccgctgcctgtagagcgggatcccgcggctggggccgcgccctttcgcttcgttgcgcgccccgtgcgcttcccgcgggagcacgtggggcctacggcggcgaggcggggccggagcctggcctacgactgcggggcggggccggagcccgggtgtgggcgaggcctgacgcggtgggcgtgccgcgagtcacctggccccgcccacggcgcacttttcctgca

SEQ ID NO: 15274 - DNA, 144 bp, Homo sapiens
  source 1..144: mol_type = other DNA
agggtctgaggggcgcatgcgcggctccctagccggggagagggtgcgggaccagagtcgaggccccgcctctagccgcgtttccatggcgaccacagcctcggtctcgcagctgcagcccccgccccgcccggccgcgaagcg

SEQ ID NO: 15275 - DNA, 419 bp, Homo sapiens
  source 1..419: mol_type = other DNA
ctgggtgacagagtgagactgtctggcactgggccccgtggagcgggccctggccacacagcgtgcaagagtggtggagctgagctggtcccgccctgccgcaggtggtgggcaggggcagttcagctgagctggggacagctgcccacgacacccttccaagttgccttggttgtgagcaaggctggactgcagtggcgcagcaattctcctgcctcagcctcctgagtagctggaatgccaggctggtctcaatcccctgacttcaggcgccctgagcaggcagctgggtgtccccgctcagatccaggcccgagtgggctgggcggctgcagagccagtcacctgagctacccagggtgggatccctggccaagccccaattggcctgggcctgggcaggaggagctgggccgggt

SEQ ID NO: 15276 - DNA, 607 bp, Homo sapiens
  source 1..607: mol_type = other DNA
cgccaggcctcagagcatttgtgtcacctcagggctgagggccagggccgcagtgctagccccacagctggtgtccagctgggaatctccgcggagggagggcctggccagcctgagctcagccaaaggtcaggatgccgccatcctgggcagggggttgcaggccgctgacaccgggggatggtgtcctcgcagctgagcctggaagctgggcctggctgccctcctggactccccccaagggggtccgaagtcctggctcccgtgtcccttgctcccggtccctcaggagcgtgggctgaaggcctgggtccagctacccaccatggtgaccccagggacccggtgcgctccgggcattctgccaggcctaagggcagcacctcatgaggggaggccgcggcggttgaaccccttcggcctgagggagcactggggagcccccggccacagcgcaagggcacccgagtctcggacctggcgaggagcccgtgggctggctgggtgttgcccccacgccacgactcagcctggggctccccgccctccttgagccgcaagcgaggcccggcccgcgtaaggccccgccccggcccccaagccccgc

SEQ ID NO: 15277 - DNA, 630 bp, Homo sapiens
  source 1..630: mol_type = other DNA
acagccagttctttgttcaagacgtcaagaacctggacccctggcgtttgcagaatccggcacaatacttgtctagatatttaaaaggtataaataaaataacttaaatgaatgaaatttttattatttaaatctgttgaagtcttgtgtgcatgaaaataaaactgtgcccacgccgctgccaccgtgcctggccctgcgcctgggcgcgctgtgtccgctgctacagacgccggcgggcaggcgggcaggcgggcaggcgggcaggcgggcaggcgggcaggcgggcaggcgggcggggggaggcggcgcagagcccggcaggcgccgccgttgcctccgcctccgcgcggtctccccggggccagctgggaccccgagggctggggcgggggcgggggcgcgggcgactgcggcggggcctggagggcgctggtcccagcccagggcggggtcccggggacgcccctcggccttagatccgcgagcggcagctcgggcctgggggcggggcctggcggagagcgacccgctcactctgcccgggctgatctcgcgagggccgcctggtctcgcggcgctggcctgtgggcggagcgagccctgaaaggcggcgagggggcggctccg

SEQ ID NO: 15278 - DNA, 535 bp, Homo sapiens
  source 1..535: mol_type = other DNA
ggagcgcgcggcccctcggcagaggaccggggctcaggaggcggggacgctttccaacccccgcgggctgcgatgcagcagaaaactcggccgcctgcaccggggattctccagaaacacaggcgtgcctgggtgtcccgggcgagggacgttgcagccctgtgactacacgcgcacacgcaggcgcgcgcacacgcgaactgacggctcgctggcgatgctggaggctttcacagcccccctccggacgcgccagacccactgcgccctcgcactcgacgcgggtccctgggggaagcgctcgctgcgccctcgtctcccttggaggagacactggcccgcccggccggccggcttctccctccatggggacgctcgcgcgcaccgcccggcagcgcgggacgctccctgacgcctgtcctcgcgggccctcccacgcggggcgcttccctctgagacccgagcccagtccggaggctcgcggaggccgaggcgcactgtggggctcggcccggccccttccccgcccctcccc

SEQ ID NO: 15279 - DNA, 344 bp, Homo sapiens
  source 1..344: mol_type = other DNA
gtgtcctctcctctagagggtatttaacccccccaaaaaatctgtaacggggctcttgagccgctaaggctggagggcagtggtgcgatctcggctcacacagccagttctttgttcaagacgtcaagaacctggacccctggcgtttgcagaatccggcacaatacttgtctagatatttaaaaggtataaataaaataacttaaatgaatgaaatttttattatttaaatctgttgaagtcttgtgtgcatgaaaataaaactgtgcccacgccgctgccaccgtgcctggccctgcgcctgggcgcgctgtgtccgctgctacagacgccggcgggcaggc

SEQ ID NO: 15280 - DNA, 553 bp, Homo sapiens
  source 1..553: mol_type = other DNA
tccgtccggtagagtaatactcttgtaacgcagtgtgcaattgagcagttgctgactgctgatttagagttgaaatccgactatatttatgtctagtcgaatatttcagcctcattaattaatcggtttaatttagcagaacattaaaccctgaaggagaccagcctggccaacatggtggaactccatctcaggcgccagtaatcccagctactccggaggctgaggtgggagaatcccttgaactcaggagtccactgcactcttgggcatagaaaatgaagagattacatttataaggtaaatttaaagtatttgagagattttaaccaaattgtaaaaagagattgctaaatttttacacttatactcaggatatgcttagaacgatgatttttaatatttaatgaatgttaataaatctgcgaattacttaaccctctgggcccgggccccgcccactccgggcttcgccggaggcggaggcaacgtcgtgcgcacgcgcaggccgtggtgcggccccttggagcgccggaagcccgcagtgccggag

SEQ ID NO: 15281 - DNA, 381 bp, Homo sapiens
  source 1..381: mol_type = other DNA
ttcccaagaagacctctggggccagcccagcccgtctaggtgttgtgaatgagccagtgttactctgtgttacgtggaagggcccggcccggtgcagatcacgaggtcaggacatcgagactatcctcatggtggcgcgtccctgtagtcccagctactcgggaggctgaggcaggagaattgcttcctgcagtgagccgagatcgtgccactgcactccagcctgggtgacagagcaagactgagtcaggtggtgaagaccgcatctggcttttgacacatggcccaccctgtggcagggtgcctcccagtctcccactccgagggtgcggaccttggaggagttctggacggttcagcttgaatcgatcactctagaaa

SEQ ID NO: 15282 - DNA, 358 bp, Homo sapiens
  source 1..358: mol_type = other DNA
ctctgcaggctggagtgcagtggcgcacctgagcagccgggactacaggcgccctagttggtacttttacgtcatatcagtggcaactcctgcctttgaaaatgtgactttttgtagactggtgggtggccgtctagtatagggcacagcagtgtctgagggtggccctgccttctgcctccctgagcagggacactgaatcagtgaaggacttgttgatttaaacatcagtcatactttaggtcagatgattaacagcactgatgtttagaaatatgatactgaggcatgagaatcgcttgaatgctactgcactccagcctgggtgacagagccaagataaaaaaagtaacataga

SEQ ID NO: 15283 - DNA, 269 bp, Homo sapiens
  source 1..269: mol_type = other DNA
gggtgtggtggcgggcacctgtagtcccagccacttaggagagcgagatcaggcagggaggctgcaaggccattcctccatggcgggactccggtgcctgttctcagactctgattcaaagcaggagccccgagggcttcatttttcatattaataaggcatttattaacaaacccattcacttttaagtttatttttaagcgtaagccagcaccactattttcaaatattttggttacctgaaaatgaaactctgtaaatacaaagag

SEQ ID NO: 15284 - DNA, 740 bp, Homo sapiens
  source 1..740: mol_type = other DNA
gtatttcttcgcgggacagcagaggtcccaggccggtgctgcacccggagccaggctcggagctggccgtgcgccctcagctgaaactcaccggaggcgcggccgccctgggctgagaagacgccgtcggcccaggtggcatcagaccaggaggagccatggggggcctctggggatcgcaagggtcgaccccatcctccctgaaacaaggccggaggttgaggaggtctccgcccggccccgcagctcggagaaaccgcacctgccacgggaggggccgcggggtgggctcgagccaccatggggctggtacaagcaccctctccgctcaggacctcggccctcatcccagggcaccagggctcacagggggatgggcccccgggtgcgggggtcgcgggggaccgcggggacgggcgcaaggatgggggacgcgacatccttttcccctcccaccggagggatgcgcctccgcgactgcccgccccaatcccagggcggaggcctcgcgcaaaacccaggcgccgcggctccgcgctccggctgagggtccgcgccgccgcccgcccgctccttcccgctcggccgcggcctcagggacggatactccagcgcgcggttccaaccgaggcccgtggcgggtaaggccggggaggggatgcagctgtcgcccgcacagccgtgtctggacgcggccccgcaactcgaccccgtcccgcccccagccagctgctgaacta

SEQ ID NO: 15285 - DNA, 611 bp, Homo sapiens
  source 1..611: mol_type = other DNA
cctgatgggcagcaccccctcccgtctggagtggtgcacctgctcaggtggccccctagggccagaagacctgtcatacatgttcttgcttcttccttaacagaagtttccttctaacatccggcaagttagaagatagaacgtatttcttcagcgggacagcagaggtcccaggccggtgctgcacccggagccaggctcggagctggccgtgcgccctcagctgaaactcaccggaggcgcggccgccctgggctgagaagacgccgtcggcccaggtggcatcagaccaggaggagccatggggggcctctggggatcgcaagggtcgaccccatcctccctgaaacaaggccggaggttgaggaggtctccgcccggccccgcagctcggagaaaccgcacctgccacgggaggggccgcggggtgggctcgagccaccatggggctggtacaagcaccctctccgctcaggacctcggccctcatcccagggcaccagggctcacagggggatgggcccccgggtgcgggggtcgcgggggaccgcggggacgggcgcaaggatgggggacgcgacatccttttcccctcccaccggagggatgcg

SEQ ID NO: 15286 - DNA, 540 bp, Homo sapiens
  source 1..540: mol_type = other DNA
tagaagacagaatgaaaaacattctcttcattggactaccttcatagaaggtggaagagggtctgtatgaagtagagctctattgtgtcccgggatcaacaaagacaagatatctttaaaatcgtcttctaaatttaccctaatgtaaaacaaatccaataaaactctaatgtaattttttaagaatttaaatttggaataattccaaagaacaatttttcttaattttctacagccagaatatatacctttaaaaaaaatgaaaacagagattaactttctcagaattggttgggaattttccagttaacttgagaaagtggaatcgaattccgatgttgaattttcctaaacctcctcatcagacatcaagaggctgttgcaccaggaggttggagttgtattacataaaccctactccaaacaaatgcatggggatgtggctggagtgttggcaacatgtgtgtttgctggcacagtgacaggtgctagcaaccagggtgttgacacagtaacccctgggggccaccattgcgggtg

SEQ ID NO: 15287 - DNA, 608 bp, Homo sapiens
  source 1..608: mol_type = other DNA
ccctaaccctaaaccctaaggtaaccttttataggttaggattagtcgcgatgcatcgcggcctcccctggccggtgaagggctgggttcttcccagggccctccgggcctccacggtggccccagcgcggcagggaccgtgcagaagggaccgtgggcttgtggccggcctcggccactgtggggcaggctacgctcctctgcgcgcgcaggaacagcgggcccagcgggggctgccgcagatttcactcgctggggcccgtgcactcccgcggcggtgtggtcccgcagagccgcaacctcatgaggctgccagggccacagcgccttgtggagtcgctcgttggtggggagggcctccagaaccagggccggtcccctcggaagccagcgcacatgcgcgggggcacccggcagcgggccaatcgcaagcctggacggccgcacgtggccctggcgggcttcccgccgcgtttgtagccctcgcgcctttacgcatgcgcactagtgccacgcaggcctgccggagtccaggcgcgcgcaggagtgcattgcgcaggcgcgctgcctggagtcctgcccccagcggcggttgctccaatcaccac

SEQ ID NO: 15288 - DNA, 610 bp, Homo sapiens
  source 1..610: mol_type = other DNA
cctgatgggcagcaccccctcccgtctggagtgggtgcacctgctcaggtggccccctagggccagaagacctgtcatacatgttcttgcttcttccttaacagaacttctaacatccggcaagttagaagataaaacgtatttcttcacttattccacgggacagcagaggtcccaggccggtgctgcacccggagccaggctcggagctggccgcgcgccctcagctgaaactcaccggaggcgcggccgccctgggctgagaagacgccgtcggcccaggtggcatcagagaaggagccatggggggcctctggggatcgcaagggtcgaccccatcctccctgaaacaaggccggaggttgaggaggtctccgcccggccccgcagctcggagaaaccgcacctgccacgggaggggccgcggggtgggctcgagccaccatggggctggtacaagcaccctctccgctcaggacctcggccctcatcccagggcaccagggctcacagggggatgggccccgggtgcgggggtcgcgggggaccgcggggacggcgcaaggatgggggacgcgacatccttttcccctcccaccggagggatgcg

SEQ ID NO: 15289 - DNA, 510 bp, Homo sapiens
  source 1..510: mol_type = other DNA
cagagacagactccgcgatgaggcagctgttctgaacctggagctccaccacacaggcagtttcagtgtgaagacaggagctgatgttcagaatctaatcaggggctaattaggttagcactgactcaacctaatcaattcaattttattgcatttgatctaattatcttccccatttttaaggtaggaagggccatttttatttcatcatatatgtgtggatctaatacaatcaaccataatttgacatttgttgtttccaagcatttaagaaattataatatctatgcatacaatgttaacactatgtataataaattctctttctgtgcaaaatatataacatatgacaatataggcatgtttaattgtgcatcttgaaaggtgaacaggatcataaatccttccaggtaggaactgggacagaaataggaagaaatgcttccccgatttctggacaccatgacaggatcctgaaactacagcaagaaacttctgattgaggctcta

SEQ ID NO: 15290 - DNA, 378 bp, Homo sapiens
  source 1..378: mol_type = other DNA
acaaggatcttggtcttcacagagaccgcgtgtggcccagggccatgtggatgccatcagccactaggtggcagcaggggccctcagtcagagggctggactgggacacccctacctgggaccatctcccccagggccttcaacctggggggttgaaccccaggatagcaaccccaagaaggggcccctgcggagggattcgccccaccactctcggcctcaagggcaggcatgactagaggcccttggtggccaggacccactgccttcaccgatcagttggcatggccactccatgcctgttgctgcttggcacccactgggggccagggatctgccgggtcctaatgggcaggtccggtccgccctctaggagag

SEQ ID NO: 15291 - DNA, 42 bp, Homo sapiens
  source 1..42: mol_type = other DNA
agccattgtcttggtcacagaatctagaacattctagagttt

SEQ ID NO: 15292 - DNA, 309 bp, Homo sapiens
  source 1..309: mol_type = other DNA
ctgacaccggctcgagcaacccagtctggcctggactcaggctctgtgcccgggagcaaaggcgtctacggcccccagtccccgctcgacgcggcgcgcactcgcaggcacgagcgaggcgccgatctcagaggagggcgggcttctgcccgataaccgttaggacctaacacatccgcggtgctgctgtaatcccagcaccttgggagcccggcaggcgggggctgcagtgagctgagatcgcgccactgtctgcgccctcggccctaagccggaagtcagcgagggggccatcgctagctgggggcg

SEQ ID NO: 15293 - DNA, 611 bp, Homo sapiens
  source 1..611: mol_type = other DNA
caggacttgaaaatggctgagcaaacttggtctgcatcccgcatggggcttcctgcaacacccagggcagagtgctcgcagaggcctggcctgtgacaggctgggccaggttctgtcacatcaggtgcgtcaggaagggatgccagcgttaaaagtaagagtcctgcttggacaccagcggagcacagcctctactcctagggcctggcctcgggacctgtaacccatgcagaacgatctcacagggggcggcggggagtggggagaccccgctgctgcgcgacccctcgctggagctgctgggccgccacgcgcgccttcggtcctaacggcagtgccggccgaaacccggccctgctcggacccggaaggatccgaatccgcccccctgacagggtcctctcggccgaggtcaccccagctgggccagaggcaggcgcacgcggctctacaggcagcggcgtcggtttcggcccggccctgcccccaacggctcatcgtgccctgccccggctcctcgacgcggacaccgacgcggccacagccgcctcagacgtggcgcagtcgcggggaaagagcttccggccccgcccccagctagcgatggcccc

SEQ ID NO: 15294 - DNA, 598 bp, Homo sapiens
  source 1..598: mol_type = other DNA
gtcaggaagggatgccagcgttaaaagtaagagtcctgcttggacaccagcggagcacagcctctactcctagggcctggcctcgggacctgtaacccatgcagaacgatctcacagggggcggcggggagtggggagaccccgctgctgcgcgacccctcgctggagctgctgggccgccacgcgcgccttcggtcctaacggcagtgccggccgaaacccggccctgctcggacccggaaggatccgaatccgcccccctgacagggtcctctcggccgaggtcaccccagctgggccagaggcaggcgcacgcggctctacaggcagcggcgtcggtttcggcccggccctgcccccaacggctcatcgtgccctgccccggctcctcgacgcggacaccgacgcggccacagccgcctcagacgtggcgcagtcgcggggaaagagcttccggccccgcccccagctagcgatggccccctcgctgacttccggcttagggccgagggcgcagacagtggcgcgatctcagctcactgcagcccccgcctgccgggctcccaaggtgctgggattacagcagcaccgcggatgt

SEQ ID NO: 15295 - DNA, 319 bp, Homo sapiens
  source 1..319: mol_type = other DNA
cctcctctgagatcggcgcctcgctcgtgcctgcgagtgcgcgccgcgtcgagcggggactgggggccgtagacgcctttgctcccgggcacagagcctgagtccaggccagactgggttgctcgagccggtgtcagcaaaggcagggacctgggaatcccgttcgcctgcattcggttcagagcgactcagcccctcgactcgggtcttaaaacaggccgcgcccccttaaagcgccaccagacgctgcgccccgttaaagcgccaccagacgccgcgccccgtcccggcctcccccgcgcgctggcgcggggctttc

SEQ ID NO: 15296 - DNA, 509 bp, Homo sapiens
  source 1..509: mol_type = other DNA
ccttgccggctgggtctgggcgccctcagcccgccggggcccagggcccgtctgctcggtagagctcctccagacggtgccacacagcgggctgcccgggcccggagttctggctctgctgtaggaagcccggtacgtccttcatgacagcaggaagacccccatgtcagcaccgcggggatggctgccggaaatgctcactcacttccggcgccgagcggcgcggggcaggctgggagcgccgtagcaggccgggggcgggccccgctggttgctcggttggccattgaggcgtcaaaaattgctcctgtcaaatgaggataaatgctggctccaggtttgacctccggggcgagagatgagacaccagactagggaacttcctctactcgcctctacgtctacctgggcgcgccggaggcgtcggcaaggaggcgggggcggggcgcggaggcgggaccggggcgccgggggcggggcggaggcggggccggggcgccgggggcggg

SEQ ID NO: 15297 - DNA, 347 bp, Homo sapiens
  source 1..347: mol_type = other DNA
ctgagtccaggccagactgggttgctcgagccggtgtcagcaaaggcagggacctgggaatcccgttcgcctgcattcggttcagagcgactcagcccctcgactcgggtcttaaaacaggccgcgcccccttaaagcgccaccagacgctgcgccccgttaaagcgccaccagacgccgcgccccgtcccggcctcccccgcgcgctggcgcggggctttctgggccagggcggggccggcgaactgcggcccggaacggctgaggaagggcccgtcccgccttccccggcgcgccatggagccccgggcggttgcataagcggccgcctgaggccggggggcggg

SEQ ID NO: 15298 - DNA, 518 bp, Homo sapiens
  source 1..518: mol_type = other DNA
ccattatttacttaaatattcatccattatagggcatctgatacctaacagacttacattaaagcgttaaatgcatatacttttggacctagcaatcccagtactaggaaacaacgaacacgcaagcttgagaaactgggagctgctgccctcggctgcctccggaatgccctgggcacctcgggtctgggaggcctctgcaaggggcgcgccgggtccaagggctcaccgcgggccccatggctgcctctcagccctgccgccaagcaccagccgacagccgcaggcctgaaacggccccacgcctcccccggcaactacccggccccacagccggagggctgccgcggcgcgccaaccccagaacgcctccgcgcagtccaaggagtcctccggactcgccccgcccccggcgccccggccccgcctccgccccgcccccggcgccccggtcccgcctccgcgccccgcccccgcctccttgccgacgcctccggcgcgcccaggtagacgtagag

SEQ ID NO: 15299 - DNA, 582 bp, Homo sapiens
  source 1..582: mol_type = other DNA
acaacgaacacgcaagcttgagaaactgggagctgctgccctcggctgcctccggaatgccctgggcacctcgggtctgggaggcctctgcaaggggcgcgccgggtccaagggctcaccgcgggccccatggctgcctctcagccctgccgccaagcaccagccgacagccgcaggcctgaaacggccccacgcctcccccggcaactacccggccccacagccggagggctgccgcggcgcgccaaccccagaacgcctccgcgcagtccaaggagtcctccggactcgccccgcccccggcgccccggccccgcctccgccccgcccccggcgccccggtcccgcctccgcgccccgcccccgcctccttgccgacgcctccggcgcgcccaggtagacgtagaggcgagtagaggaagttccctagtctggtgtctcatctctcgccccggaggtcaaacctggagccagcatttatcctcatttgacaggagcaatttttgacgcctcaatggccaaccgagcaaccagcggggcccgcccccggcctgctacggcgctcccagcctgccccgcgcc

SEQ ID NO: 15300 - DNA, 397 bp, Homo sapiens
  source 1..397: mol_type = other DNA
atagaggaagttccctagtctggtgtctcatctctcgccccggaggtcaaacctggagccagcatttatcctcatttgacaggagcaatttttgacgcctcaatggccaaccgagcaaccagcggggcccgcccccggcctgctacggcgctcccagcctgccccgcgccgctcggcgccggaagtgagtgagcatttccggcagccatccccgcggtgctgacatgggggtcttcctgctgtcatgaaggacgtaccgggcttcctacagcagagccagaactccgggcccgggcagcccgctgtgtggcaccgtctggaggagctctaccgagcagacgggccctgggccccggcgggctgagggcgcccagacccagccggcaaggtaaaacgg

SEQ ID NO: 15301 - DNA, 621 bp, Homo sapiens
  source 1..621: mol_type = other DNA
cggcctgggcagcgggacgggcggagtcgtcctcacctgtgctggggaccctgtgggagcagcaggcttccgagcacgtgctggaccccggcgtctccggctgcaccacgagcgggcccagggctgagcccagcggcgtccgggtgggcgcaggcgcggcgggggccggggttcccagggaggaaacccaagctccgccgagcgcggcgggtctgtgccgagttctttctccggacggtgtcgagaacccgggcgccggctggggctggagtctcgctggcctcggagcgcccccgagccctcgggcgacagcgaggcgaggacccaggtggggcggccgggggcgcgggcggagggaggaggcgcgggagggaacccccggcccgcgggccccacccacagccgccccgggacgcagctcggggtccaggctcgagctttgctcactcagggcgcttcgtgcagggaacgccaggcccccggacgcgacccacgcggccgctgccagcggggaccgaggggagccggggccgcggccgcgagtccacgtcccgcccccgggcccggcccagcgaccgcccccgccgcccagggaccgcccccgcctcccagcgaccgccc

SEQ ID NO: 15302 - DNA, 445 bp, Homo sapiens
  source 1..445: mol_type = other DNA
gcagttgccaccactgctccggggaaggcttggcgtccagagctggggaccaagccagacataaatgtgagtcgtcagccaggagcccaccccgacaccagtgttaacagctgttgctggtccctgggggttccccgcccccttgcagggatgcctgcgctcctagggcctggcggggctgcagtttcagcagctatggccctgaggcgacactggacggagggggctctggccagtggtctgcccactgcccacttggccagcagcctttgggtggggggattgccactgcccggccgtagccttccaagcggggggctcccagatgggatgtctgtcaggagggaccctgctgggtggtccaaggcagcctcggacaggggctccctggggtgggggctaaggggcgggccgcaccctcggcccgcaggcggctataagtgag

SEQ ID NO: 15303 - DNA, 277 bp, Homo sapiens
  source 1..277: mol_type = other DNA
gcctccaggggaaagggccatggcttctaactccaccgtccagtcctgggcctggagggctcctttggggcaggcaacattggccgccaaccaggctggagtgcagtggcagccacggcgcccagtgtggaggcgtcagcgcaggcctggcaggagccctgaaccgggacagtgaggtcctgcagctgctggcctggggtgtggagactcccaacacaggggaagtttgggctctagagaggaagctggccctggccagctctgcatttgacaaatg

SEQ ID NO: 15304 - DNA, 270 bp, Homo sapiens
  source 1..270: mol_type = other DNA
caggggagggccatggcttctaactccaccgtccagtcctgggcctggagggctcctttggggcaggcaacattggccgccaaccaggctggagtgcagtggcagccacggcgcccagtgtggaggcgtcagcgcaggcctggcaggagccctgaaccgggacagtgaggtcctgcagctgctggcctggggtgtggagactcccaacacaggggaagtttgggctctagagaggaagctggccctggccagctctgcatttgacaaatg

SEQ ID NO: 15305 - DNA, 314 bp, Homo sapiens
  source 1..314: mol_type = other DNA
gattttatcttaataattgcatgaaggggcacccaggcctgacagccccagacttggctttgccaaccctcccaaccaaagccatgggaattgctgggaccctctggggagtcagttctccccagagtccccgttcctgggcctggagggctgctttggggcagtttagtccccaaacccgcacactggagtgtgggggcctggcaggggccctgaaccgggacagttcctgtacttgctggcctggggtggacagaacccaagcctgggtaataggaagtcactagtcctgacttgagtttctgatgaggaag

SEQ ID NO: 15306 - DNA, 293 bp, Homo sapiens
  source 1..293: mol_type = other DNA
tgaaggggcacccaggcctgacagccccagacttggctttgccaaccctcccaaccaaagccatgggaattgctgggaccctctggggagtcagttctccccagagtccccgttcctgggcctggagggctgctttggggcagtttagtccccaaacccgcacactggagtgtgggggcctggcaggggccctgaaccgggacagttcctgtacttgctggcctggggtggacagaacccaagcctgggtaataggaagtcactagtcctgacttgagtttctgatgaggaag

SEQ ID NO: 15307 - DNA, 326 bp, Homo sapiens
  source 1..326: mol_type = other DNA
aggggcacccaggcctgacagccccagacttggctttgccaaccctcccaaccaaagccatgggaattgctgggaccctctggggagtcagttctccccagagtccccgttcctgggcctggagggctgctttggggcagtttagtccccaaacccgcacactggagtgtgggggcctggcaggggccctgaaccgggacagttcctgtacttgctggcctggggtggacagaacccaagcctgggtaataggaagtcactagtcctgacttgagtttctgatgaggaagtgaggtggctgtgctggggccaccccccagcaccat

SEQ ID NO: 15308 - DNA, 363 bp, Homo sapiens
  source 1..363: mol_type = other DNA
tgaggtggctgtgctggggccaccccccagcaccatgtgaagcggaaatccagggggtgccggtgagcctggggctccacctgcccacatgctgcctggggtgggcccagaggctccaggagtggctggctcagagtctgtccctgggtgagaagggaactcacaggtgacttcaccccatggtggggagaacagcctgtgctggggccaaggcagggatgagccccgaggctcctggagagtctgagcctgatctcagggctcagctgggggatcctggtcccctccatctcctctcccccagtctagggacaggaagatggttggcgacgtgaccggggcccaggcctatgcctccaccgc

SEQ ID NO: 15309 - DNA, 321 bp, Homo sapiens
  source 1..321: mol_type = other DNA
gataatccggctgcctgtaatccggctgccgataatccggctgcctaatccagctgctaatccagctgctaatccagctgctaatccagctgctaatccagctgcacgacggggtttcaccgtgtcagccaaggcgtgagccgcggcgcccggcggagtgtggaggcgtcagcgcaggcctggcaggagccctgaaccgggacagtggggtcctgcagctgctggcctggggtgtggagacccccaacacaggggaagtctcctgctcccttgggctctagagaggaagcccccatctggccccggccaaatcccgatttg

SEQ ID NO: 15310 - DNA, 329 bp, Homo sapiens
  source 1..329: mol_type = other DNA
ttcaccctcgttctgacccagagctctgcaggcattggtgaagctggcccagcagctcctggaaggcaccctctagctgcaactccaaaggggcttttcggctgcagctcccaccacggctgctgaacagattgctttgtgatgctctttatttctctgtgaattaaaaccctaatttaaacattagctgggcatgctaatgtgtccagctagccactgcacttcagcctgggtgacagagtgagaccctgtttcaaacaacttttgatgacggtcttgctgagtactgtgggcattttgttgcagcccacaatgcattgcaatctctg

SEQ ID NO: 15311 - DNA, 554 bp, Homo sapiens
  source 1..554: mol_type = other DNA
caaggtcccggtgagaggcacgacactgtcacctgcctcaggccgcgctcggtggggcgggggccaccagctgaggcccctcctgccgcccagacagctcggccccctgcggccccagccctgcaggctgagatccctcccacccctgggctgaagccggtgcttgggcccccccgcctcactgttctcgggaggccgccccgccccacagtcaggctggccccagcgcttcccagccccgcgtctgtgtgccgcgcccccgcgctccgtggcccaggtggacgcgcgccccgcgccccgcatccctctccccgcgcgccgccattggctccccgcggcctggctcggtccgattggttccgcgcgcgcggccggggcccgatccgcggtggcagccgtggatgctgttcggtcccgccgccgccccaggagcgcggagccgggagcggccgggcggggggcaccgcgaggagccgcccccgccgcccaccccgggcccgcggccgagggcggcctgggggggtcgcggccgcacccggtggccgcgcacggcg

SEQ ID NO: 15312 - DNA, 696 bp, Homo sapiens
  source 1..696: mol_type = other DNA
cgcacctggcagctctgcccacgacctgggcccagcgtgagcgcctcccgtgccccccacgctgaccgcctcttgggaggtgactgacaggccacaccgctctcaacctgattgtgcacccaagcggcccgaggctccgtgcagattccgggcccggccccctccagggctcctgtgtcaggagctggctccagggagagtgcgaccctcaggggactccgccgagcctggagctggaagctgcagcggtggcctagcaggcatcgccatccgtctggcccggccgcagtgagggaaggtgcaccccagattcctggctttgccaaaactgtgcctggcgggcaccacgcatcctcagggaggcgccgcagctctgggggggggcacccacagccctctctgccaaggggaggagggaaggtgggcagagtcggccctgggggccctgcaggccgcggggtaccggcgttcccttgtgagcccttcggcctgactgggctgcagaggccctccaggctggcttccccctcatgccgcccagcctggcccctgcagggccccaggtgggcctggggtggacctgggtgcagggcgggacccagcccatgccaggcacatacctccaggccgctctgcgccgcatgtctcccagggaatcagccagtccgatgagctgggcgttcgccctccgaggcc

SEQ ID NO: 15313 - DNA, 701 bp, Homo sapiens
  source 1..701: mol_type = other DNA
gtcccggtgagaggcacgacactgtcacctgcctcaggccgcgctcggtggggcgggggccaccagctgaggcccctcctgccgcccagacagctcggccccctgcggccccagccctgcaggctgagatccctcccacccctgggctgaagccggtgcttgggcccccccgcctcactgttctcgggaggccgccccgccccacagtcaggctggccccagcgcttcccagccccgcgtctgtgtgccgcgcccccgcgctccgtggcccaggtggacgcgcgccccgcgccccgcatccctctccccgcgcgccgccattggctccccgcggcctggctcggtccgattggttccgcgcgcgcggccggggcccgatccgcggtggcagccgtggatgctgttcggtcccgccgccgccccaggagcgcggagccgggagcggccgggcggggggcaccgcgaggagccgcccccgccgcccaccccgggcccgcggccgagggcggcctgggggggtcgcggccgcacccggtggccgcgcacggcggacaaaggaccatgcggggccgcgggcgctgagcgcggcggggcgggccggggatgcggcgcggggcgggcgggggccgggggctgcagcggcgccgctgagcgcggcctggggcgggcgcggcggccgcgatgccgcggctcccggtgaa

SEQ ID NO: 15314 - DNA, 536 bp, Homo sapiens
  source 1..536: mol_type = other DNA
ctgacatgcgctgacaggagtgcaggcgagtcaaccccctggggcggccccgcccccgtgctgggaacggcctcccaccccagggcctggggtgcaggagcagtggtgccagggtcccagaagccagagagggttttggaggcctccaggggctcgctggattccaaggaccagggccagggcctccatggagtcccgttggacacctcaccaggaaggctgggctaccatggaggcagctacctagggccctagacccccagggactggggcaccctccccttcatgctgggggtggcaggacataggccccccgcaggccccctgcccctgacactcaggacacagagggcccctctgtcccagccccacgacaaagggcccggtctggcctttagaaggacccaggtccccgtggccctgtggccaggctgggacctggggccatgcagggcctgttcttcaggcggcggcccctccctcccacctggccaggtgtccccgcccccagctgcgctcagggctgggcaggcgtc

SEQ ID NO: 15315 - DNA, 442 bp, Homo sapiens
  source 1..442: mol_type = other DNA
gccagggccgggaggctggatggcagccctccacaatgaagccctgcccccatgtggctgagggcagggccagggtccaaaggagaccctaccagccaccggtcactgggtccccagtcccaggtcaacctggggagatgccatctgcccctcgctctgaaagggggcgctgccctcccaccccagcctgaaggtctgaaggccctgttccccggggtcagaggagacacatgggggagcaaaccggccccttggcctggaaggcatgccgcgcggtccccggtcctccttgtatgtgtgcagggtggccctggcgggggtctcctggctggaggaccccccatgcacacagaggaaagtgccgtgcctgggtcggggcaggcggggtgagaaccaccaactgcccgtcctcccgcccgcctagggaaggggtgggtgcctg

SEQ ID NO: 15316 - DNA, 470 bp, Homo sapiens
  source 1..470: mol_type = other DNA
gcacctcccacaagcccaccgctgtgcgtgttgaggggtgcggcacagcccgaactctgggtgaccctgggcacccacagaactgggagtgagggctctggcgcaaatttctctgccctcagggctagatgggaaacagacccggagtgaccaggtgaggccgcctcaggccgcctgtcccttctccatgggcttccaagggaggggcgcctatggggtcctctccccgtccctgcacctggggtgttgagggagcttgagggcggtggacgctccgaagagtccccaaggctctggggctccggggctctgcgcgctgggctggtttggccactggccccaggcccgtgcggcagcggctcccgggcagcagcgcagcctccagcgccagccttgggcgcagagcgggacgctggggtccgcccccgccctgactgcggggcggggccgcacctgctgccgctgccggg

SEQ ID NO: 15317 - DNA, 502 bp, Homo sapiens
  source 1..502: mol_type = other DNA
ggggtgctctggccccagtgggcctggagccgttccgttgcctgcggagctctgtaatgtgtgccagcccacggcctgggccccctggacggtcactctcaggcagagcctgcccagctgccgccctcagcccaggctgcacagaacgtgctcagggactggggatgcggggtggagggctcctcctccgttgtctacacagcctggggccagccacgtgtccccaggactccaaggattccggggccgtggcccggggtggggggccgtggcccggggtgggggaggccgtggcccggggtgggggaggccgtggcccggggtggggggccgtggcccggggtgggggaccaggtgtcatgagaccccgggaactccagcctaggacgccatctgggctccaggaaggtgtcccaggctccaggggctggggtactctcctggcctggatgctggctccgccccgactacacccaggcgcggcagctgcaggacgctggag

SEQ ID NO: 15318 - DNA, 376 bp, Homo sapiens
  source 1..376: mol_type = other DNA
cttggcctcccaaagtgctgggatgacaggcgtgcgccgccgcgcccggcctgcctagcataatgttttcaaggtccagctgtgctgtagcatgcgcatgctcgctattatcaaaatgctgcaactaggattgcccaatttcacgcgatctgcgaaagaatgacccagaccggtccgggcgcggtggctcgcgcattggatggcggccgcctgtaatcccagctacgggatcgcgccattgcactccagctcgggcggcagtgcgagactccgtcccccaggccgccttacctccaagctctggaggccttggcgagacccgcgccatttcctgcgacctcagccgcagggcggtccggctccggtttcccagcaa

SEQ ID NO: 15319 - DNA, 447 bp, Homo sapiens
  source 1..447: mol_type = other DNA
agagctgggcgtagctgtcaccagctggagtgcagtggcgtgatctcagctcactgcaagtgatggtctcgatctcctgaccttgtgatccaccagtttttttgtctctaagcgacagtcaaaaatagaatcccagcattttgcgtgatggcgggcgcctttaatcccagctactccggaggctgaggcaggagaatcgctgcagtgagccgagatcacgccactgcactccaaatagttagcatttacaaagcgttgggaattctacttggcacgtggccagagctccgtagtgatgggcaacgaacacgtggtctgcgcgcccggggccgcgcggtctggcggggccgcgcggtctagatcacgctactccgggtcccaaggccccgccctcaggccccgcccacagaccatgtcctcggccccgcccctcacgcgcccttgggc

SEQ ID NO: 15320 - DNA, 372 bp, Homo sapiens
  source 1..372: mol_type = other DNA
caaaatgctgcaactaggattgcccaatttcacgcgatctgcgaaagaatgacccagaccggtccgggcgcggtggctcgcgcattggatggcggccgcctgtaatcccagctacgggatcgcgccattgcactccagctcgggcggcagtgcgagactccgtcccccaggccgccttacctccaagctctggaggccttggcgagacccgcgccatttcctgcgacctcagccgcagggcggtccggctccggtttcccagcaagccccgcgctgctctcctaagaccccgcgggccagcgccgcgaccccttcccagcgctcctcgcgctgtgtgcggcgcgtcctctcgccggtgacccggtgtgcgtg

SEQ ID NO: 15321 - DNA, 809 bp, Homo sapiens
  source 1..809: mol_type = other DNA
agagtcgcgaccccgacatgcggagccgccccaggggggtttctcccgggtccctcctgtcccgaggcggccgctttctccgggggccgcgccccgcgccccagcaaggcccgacccgcgcctgcgattccgcccccaaggcgctgccgcaccgggccccggcctcctccgaggattctcaggaattgctgagacttgcgtgccagtgcgaggcccacaacacgcacacgcgcccgcgcccgccagaccccgcccccggcaccaagccccgcctactgggggagaccacgcccccaagcgagacctccccccaccaggccccgccgctgcgccaagactgtgcttagccgagccccgcccgccgggccccgccccgaccccgagactactcccgccaggccccgcccccgcgccgagccccgcctgaccacgcccacgagccggctcgaacacgcccgcgccgctgactggcgggtggggttgtcgacacgttcaacccgttctgctggctcgagaacgaagtaggccgtctcgctctgggtctccaggcccgcgaccgtccgccagtcgtcccgaggtcagtaggtctagccaggcctcgcccacgccggccttggtcgggcttcttgtgctgcgcgggcgagtggcgcgctcccgtggcggggcggggtcgggcggggcaggcggggccgaggttgcgctgggcagctgcgccgccgggcggacgtggcgcgccttgaggacgtcatcgcggtgcacgctcccgcttgccggaagtccttgcccggggcgcggggctgcgcctgcgt

SEQ ID NO: 15322 - DNA, 749 bp, Homo sapiens
  source 1..749: mol_type = other DNA
tgctaaagaacaaatctgagccaaaatgtcaattctgtgaattgcggactagtcaaaaaccaggctggtctggaactcggcctgcgcccctcagtgccagggctccaggcgacgctcgggtgtcggcagcagagtggacgcaggagcagctcggaccgcgctcagaacactcgggacgaggccgcggctccgcaggccttgcgggctggggtcccacgaaacaaaggcggcagccagtggcacgggcagcgtggttcacggggccgtggctccctcgggggtcgcgagctcggcgcaaacgagcccctccctagagtcgcgaccccgacatgcggagccgccccaggggggtttctcccgggtccctcctgtcccgaggcggccgctttctccgggggccgcgccccgcgccccagcaaggcccgacccgcgcctgcgattccgcccccaaggcgctgccgcaccgggccccggcctcctccgaggattctcaggaattgctgagacttgcgtgccagtgcgaggcccacaacacgcacacgcgcccgcgcccgccagaccccgcccccggcaccaagccccgcctactgggggagaccacgcccccaagcgagacctccccccaccaggccccgccgctgcgccaagactgtgcttagccgagccccgcccgccgggccccgccccgaccccgagactactcccgccaggccccgcccccgcgccgagccccgcctgaccacgcccac

SEQ ID NO: 15323 - DNA, 381 bp, Homo sapiens
  source 1..381: mol_type = other DNA
ctctgcctaggaaaaccagagacctatgatcaataaataaaaaataataataataaaatttttttttttttgagatggagtgcctaggctggagtgcagtggcccatcgcatcagccttaggagtagctgggactacagggtgatccggccgacgcgcggaaccggacgcccaggagccggccccgggctgcccacgacggggccgccggagaggactcgcggcgccccctcctggatgtggccggcggcgcgcgaggaaggagccgccccgaacgcgcgagcgaggccgggactcgggcgccctctgccggccgctctgagggaccggggcgggggggcgtgtctcccggtcacgtgacctggaaaccccgcccgcggcc

SEQ ID NO: 15324 - DNA, 727 bp, Homo sapiens
  source 1..727: mol_type = other DNA
tatttctgattcctttgcaattttaaaaaatgttaaaaacatgtctttttgggtttttggggtgagccctgggcacttcgctcccgtttggggggactgggcgggcagggtcgcctgccacgcaggcccgagcgttctcacgcctggccccagggcacacggctgcgcccgccgcccggaaccccaccggggctgcaagcgtcctcggggtgggttgggtggggtgcgcggccgctccacctgcgcggaagggcagccgggcaaccggaccccgcggccacccgggggcccccagctccgagcatcccgccttggtcccggcggatcccagcctttccccagcccgtagccccgggacctccgcggtgggcggcgccgcgctgccggcgcagggagggcctctggtgcaccggcaccgctgagtcgggttctctcgccggcctgttcccgggagagcccggggccctgctcggagatgccgccccgggcccccagacaccggctccctggccttcctcgagcaaccccgagctcggctccggtctccagccaagcccaaccccgagaggccgcggccctactggctccgcctcccgcgttgctcccggaagccccgcccgaccgcggctcctgacagacgggccgctcagccaaccggggtggggcggggcccgatggcgcgcagccaatggtaggccgcgcctggcagacggacgggcgcggggcg

SEQ ID NO: 15325 - DNA, 803 bp, Homo sapiens
  source 1..803: mol_type = other DNA
ttggggtgagccctgggcacttcgctcccgtttggggggactgggcgggcagggtcgcctgccacgcaggcccgagcgttctcacgcctggccccagggcacacggctgcgcccgccgcccggaaccccaccggggctgcaagcgtcctcggggtgggttgggtggggtgcgcggccgctccacctgcgcggaagggcagccgggcaaccggaccccgcggccacccgggggcccccagctccgagcatcccgccttggtcccggcggatcccagcctttccccagcccgtagccccgggacctccgcggtgggcggcgccgcgctgccggcgcagggagggcctctggtgcaccggcaccgctgagtcgggttctctcgccggcctgttcccgggagagcccggggccctgctcggagatgccgccccgggcccccagacaccggctccctggccttcctcgagcaaccccgagctcggctccggtctccagccaagcccaaccccgagaggccgcggccctactggctccgcctcccgcgttgctcccggaagccccgcccgaccgcggctcctgacagacgggccgctcagccaaccggggtggggcggggcccgatggcgcgcagccaatggtaggccgcgcctggcagacggacgggcgcggggcggggcgtgcgcaggcccgcccgagtctccgccgcccgtgccctgcgcccgcaacccgagccgcacccgccgcggacggagcccatgcgcggggcgaaccgcgcgcccccgcccccgccccgccccggcctcgg

SEQ ID NO: 15326 - DNA, 717 bp, Homo sapiens
  source 1..717: mol_type = other DNA
ttcaagaccagcagtggcgcgcgcctgtagtcccagctactcgggaggctgaggcaggagaatcccgaaatcgcgccactgcactggaggcgtttttcaggcaaaccctgcctctgcccagtccagcgcccgcctcgccctcctgcgccggtcgctgctgacccggggctccacccacgtgcggtcccgggggtcccgcctgccgtccgtccaccgcgcggtcgcagtcagagctcggctcggggcggacgactggacggcgggcggcagcgtgtcccgcgggccgggcactcgggtgcgctccggcgtccggccgtcggcctcacttccaaccgaaggtcaggacggcaggcctcggccccaggggcgacccttccacctgggaaaggtgggcgcgagcctccagcaccgcctttacccgccccgcgtgggaagcgccaggatcgcgaggaaacgcgacacgtgcatcgcgacggcccaggcacggagccgcaggaagctggcacctgacgcgcctgcgcccacccaactcgagttggtggcgcgtcaccttcccctgggatcgcccgcagcaggggcgcccacgcacgtgccagtccacgtggccccgccctagcgaccgttgctaaggggcgtggctcagccgcacggaacccgagcccccggcgacaatgaggcctggctcccgttgctatggcgcccaggccgcaaccccgc

SEQ ID NO: 15327 - DNA, 624 bp, Homo sapiens
  source 1..624: mol_type = other DNA
gacttgcccacatatgtggtcacagagcacagaatacctgggccagggaggcagcagaggctggaacccagtttaggcccccaactgggtttggcctggggagggagggtccggctccccagcccttccttagggccaggctttcccgcgggcacgggggtggggggtggtcacccgagcaggcctgtgagaggcctctcctccgaggggcaggggctggagctgcgagtccaccactcccttgccggccccagggtaagagccacctcctaggccgcagtggcccaaggtcccagctgctcgcctgaggccgccgggggtgcggtccaggcctcccgtctccgggggatctgtagggttcccgcactgcgatagggcggcccgttccctcctcttggcggtttactttgtaggccacgttggttcaataaatgatgcagcggacacagcccgcccagccccggcgcccgcccgcgccctccctcgcggtcccggccccactcctccgcccctaggcgccgcggcaggtgtccgcggtgaccggcaggcagctgaggaagcggaagccgaatctgctctccgtccacgctcttccggcacacctggggggcgcgggggctgaga

SEQ ID NO: 15328 - DNA, 559 bp, Homo sapiens
  source 1..559: mol_type = other DNA
agggatttatactgggaggcaagaggggctccctgctgcactgcgcagagcgtggtccacaggcagccccggccctggccacagctggacacagggagcccagagtcctctggaaagcattccgagcggcatcacaagaccgtggagtggggctccctgccctgtctgaacaccagcagctcagggggcgctgactccgactccagcagctgccggccgggcctgccttccttcgtgcaggtgatagggcacccgccccgggaccaccgcgcttcctccgagcaagcgctggtgcaggccggcagctacagcagggactcagaaggtgcagtggggcgggtctcccctggttacccttcagagctgtgatctcactcagagccctggaggtggccctccagcccccaaggtccccctgccccgccaggcgttgcaggcctgttctgacctcacggggaacatccggtggggactccattcgagggtcccctccccaggcacggcgagccggtcctgtcgccccagccctgcacagacccggaccactggagcccggaac

SEQ ID NO: 15329 - DNA, 509 bp, Homo sapiens
  source 1..509: mol_type = other DNA
tcagacagaaaccctgcagacgggcggaagccccgccacctcttccaggatgtggcagagccgggcgtcctcgccattctggatggcccaccgcaaggcctggataacctgcagcggcagcagaccctgctgcttactcaggccggcccctggccacctggcccaggaggctcctccttactgcgggtcggcagagcagaccaccggctcgggggctgcaggtgcgcctgctggaggtcccaggtgaccactgaccctgccgtgtgcgcctcgtgtggccacacaggttggagcgagcgttgctctctgaagggacccacatgtgggtgtccacacccgtgtgtttctgaccaggcggcgcagcaggtcaccacccgacatgtccctggcgtgtacccctgccacccaggtgcagggccctaccagcactcacctgaggcccgacctccaagcaggcctgggagggataccagcacggtggggctgtttgttaccaggagcctccaggg

SEQ ID NO: 15330 - DNA, 377 bp, Homo sapiens
  source 1..377: mol_type = other DNA
agggccctaccagcactcacctgaggcccgacctccaagcaggcctgggagggataccagcacggtggggctgtttgttaccaggagcctccagggagaccccagaccaggcccctaggtgagttctgggccagcccagcctgggagaggctgagccactgctcagcttagcggggggaccacttagtcgcctggcagcagcagcgggataaataggggggcactgctgcctgtgagccagcccagcatagccatgcctgtttttaaattaataattaattctttagagacagctggaatgcttcggtgtgatgacagcgcacgttaacctcgaattcagtgacaggccccacgcccacaactctttctgagctggg

SEQ ID NO: 15331 - DNA, 785 bp, Homo sapiens
  source 1..785: mol_type = other DNA
ccctagaaacggctgggctgccgcccctccgcacgggccccccgccagccacacattcctggggtggcggccctccggagcacgcatcccctcacctggctcggaggacactgccccctccccgggcggcgcggaggcgcccgcacgccaggccccgcggccgccggcatgggaacgccccaccccgacctgctcaggccgcagaggcgctcggggtcgcaacccagacctcgaccctgcagatggagcagactccgggtctgagcagcccccgccagcccggggagccccgccgctgccgcctaatcgctgcgctcgccccgaaagtcccggtccccgccgcgggcaccgaagcccgcgccgcgaccccagcctggcgggagccagggcgtccccgttccgcagggcgggcgcaggtgcggcgccgcccccgctctccgtccgggcatcgcggaaaactctccccagttggagtcggcgtccggccggctcgaggcgcgccccgcgctcccaagtaccggggacccggcgcggctcacctgggcgctcgccagcctggagacccgctccggcgccgccgcaacctgccgcccccagcgccgcggcgcacccgggccccgcgcccccattggcccgcggtccgcacgccccgcccctagcacccctattggctgctcagcgcgggcgttccgccccctccccgcgtggctcgtcgccgcgccccgccccccccgagactacaggtgtgggcgggtcggaggggggcgccgagccgcagtccccgc

SEQ ID NO: 15332 - DNA, 643 bp, Homo sapiens
  source 1..643: mol_type = other DNA
cccacgcccacaactctttctgagctgggcatggcccacacagctgaccgcgaggctgcggggccctgggcggtccagccagcttcactgtgtgcatggcctggcactgctagagtccgggccttctgagcgggcacctcccgcaccaggactctgcgcccgccagctccgcagggctccacctccctcgccgggactggtgaccctgcgaccccgcgacccctgcgcgtccagactactgcagctgcggtaggccctggcccgggaagcgaggggaggggctggccccgctgcccctggacgcaggcgggggttgcgggatctcaagccagagacccttcctgggcgggaacccgccacagaggaagtcggcccaggagcggggccagacacctaccccgacgcctgcccgcgggccgcagccaccgcatttccgcgtttttcgcggtaggcgggaggtgggggcggggactgcggctcggcgcccccctccgacccgcccacacctgtagtctcggggggggcggggcgcggcgacgagccacgcggggagggggcggaacgcccgcgctgagcagccaataggggtgctaggggcggggcgtgcggaccgcgggccaatgggggcgcggggcccgggtgc

SEQ ID NO: 15333 - DNA, 532 bp, Homo sapiens
  source 1..532: mol_type = other DNA
ccgctcgggacgcctccccagcgctccccgcagagcggccagggggtctcgcgagtccgcgccagctcgggatccccggagcctcccctggtgcgctgcagccacgcaggcctgcgtcccgaggcccacacggcttctgcgcggcatcctcaggacgacctggagccacgggacggcacagcagcgtcctgccgagcccgcctcgtccgccagcgcgcacgattcaccgcgcctgctgcgggacgggcggacgcggggctgggcccggctcacggagagcgcggcgctggtagcaggcgacgccaggactcttctccccaggtgctcccgccgcgcgcggggctagggaggagctgcgggcggcggggccgtgggcggccgtcccgaggcagggcggggctgcagacgtgggggcccgaagcagctcccatccgggcggtaccagctgtcccggccgcgggggggacggcctggaccagcccatggtcgcggcagtcctgcacaggagtgtctcagtggttccagtcaggag

SEQ ID NO: 15334 - DNA, 389 bp, Homo sapiens
  source 1..389: mol_type = other DNA
atggaaatacaccattaattcctttccaaatgttttaattgtgagagtatctgatattcttgactgaacacgaggtgggcagatcacctgaggtcggtcccagctttgtggtgggccaagattgtgccaccgcactcccaaacggtgcagctgcccctttttcgagtggagtggctccatctcggctcactgctcctccctactccgcgctggccggggcggggttccgctgagaacaggcggcgcgcgcccttcccggaaaccgcttccccgcgagacgaaacttcccgtcccggcggctctggcacccaggtactggggaccccagacccacgcggtgcaggccgggagcgagagcctccgtgggggctccgtgaccccggaggggt

SEQ ID NO: 15335 - DNA, 384 bp, Homo sapiens
  source 1..384: mol_type = other DNA
ccttgggagccggtggtctcaaacacctgcccctgagcaggagccagaccaggaggcctaggggtgagagacccctccagagcccaggctgggcgcccatgcccagaacaagggatcccttgatggaaatacaccattaattcctttccaaatgttttaattgtgagagtatctgatattcttgactgaacacgaggtgggcagatcacctgaggtcggtcccagctttgtggtgggccaagattgtgccaccgcactcccaaacggtgcagctgcccctttttcgagtggagtggctccatctcggctcactgctcctccctactccgcgctggccggggcggggttccgctgagaacaggcggcgcgcgcccttcccggaaa

SEQ ID NO: 15336 - DNA, 620 bp, Homo sapiens
  source 1..620: mol_type = other DNA
gggtgccaggaatccactctggcgtgaggactccggaccctctgtctcgtgtggcctcggaccagtggcttgacccctcagagcctgtggagcacggagcgtgcagggcttgaaggcgaccatgagggcaccgtgcagggttaggacactgagcccagccccagccatgggcgcacaggcctggaggaggagaactccacctacccccagtggcctctccctagagctgggggcttcggctctgtcgggcaccagggccccccaggaactcccagctggcctcagtcactaaggccctgtccagccccgccctgagaagccgacttgtctctggggcaggcaggggtgtccccaggacacagtttcagaacctgctgtcaggcagggagggaggtgctccctggggaacacccgggttctgagcctcttaggaactttgcctgagggaccaagccagggcagcctgggctagggaggcaggttccagacaccccgacaccaagggccgagcccccgccctgagccccctggactcagtccaacttgggccaaacgactgcccctccttctggcagtgggctggaccagccggccagcgggagcccccttggcagtaggaa

SEQ ID NO: 15337 - DNA, 302 bp, Homo sapiens
  source 1..302: mol_type = other DNA
caaggtgctccaggggcctccggaactccggccgcagccccttccccggggcccccctccggcccctccgcccccgcaggctccgaggcttcgcggtgcggttccctctgcgggtcccaggcccgcgctccgttcgccccccaggccgggacgtccccctcccccagccggccgaggggcgccagcgcggcggagggggcgggaggccgggccggggcgacagctgggggggcggccctgaccttcccgggatcgctgggcgcggccgggccgtcccctttccgggcgccgccataaagggg

SEQ ID NO: 15338 - DNA, 220 bp, Homo sapiens
  source 1..220: mol_type = other DNA
taagtatcacttcatactttaaaatggctaaaatggtaagtttcatgttatgcatgttttcccacaataaaaaaaaaaaagaccagcctgggcccagtcatagtggcaggcacctgtaatcccagctacttggagagtgagctgagatggccccacggcactccagccagccagccagccagccagccccacattgctggcggggcacggccatttcatg

SEQ ID NO: 15339 - DNA, 489 bp, Homo sapiens
  source 1..489: mol_type = other DNA
tagaatctgtccggtcccgggaccccctgcccagggtcagaggggcgcctacctagctcggaggagggagcggggtcgaccgctcagctgtccgcccagtttcggaggcggccacgcgaggatcaactgtgcaacgggtggggccgcggctgaccgtggtggtcgcgggggctacgaggtcgaggcgagtccgcgggggaggcgggcagagcctgagctcaggtctttctggggtgagcgcccgagggccgggacgcacgcacgggccgggtaggatggcgctggcgtcgatgcccgcgcgcttcagggcctggtctggcctcgggtcgcggaccccgcgcggcgccgggcgatgctggcctgcccgtggccaccacctgggctcacggtggagcgccgcgggggcccccctgagccggggcgggtcgggggcgggaccagggtccggccggggcgtgcccgaggggagggactccccggcttgcgacc

SEQ ID NO: 15340 - DNA, 580 bp, Homo sapiens
  source 1..580: mol_type = other DNA
gcctcggcttcccaaactgtcaggcttacaggcctgttctggctgtacccacagacagcagaaggcggctcctctgcaggatggccgcctctcggaggcgagtctctcaggcaggacggctgaggcaccggcgcccgacgcgcgggacaagagctgccggggactggggcccccagagccgctccgcacccaccctgcccggggccaggcgcccgcgcgcgggggagctcttcggggtgcaggacgcccgccacccaggccaggccaggccgcgcttctcgatggggtgacggagctgtctcgctcacgtagagacggtggcacggccccgtgaacgccgcgcccgccgctgcaagcccggaagcccccaccccgcccgagctcacctcgccgcggggccgccatcttacccgccccgcccgccggtccgtcgcgatcccggcagcctctcggcccgcgcgctcgcgctccttcggtcctgacgaaggggcccgaccgcgccgcgtttcgggagcggacgtccgagccacggccgaggcccgattagtccgtccggcaccgctcgggcactttcggaagg

SEQ ID NO: 15341 - DNA, 715 bp, Homo sapiens
  source 1..715: mol_type = other DNA
cactgccgtgacccgcggcgcggctcctccgcctcgcctcctgccgcggccgcggccgccgccgccacagcggccgcggccgccaccgccgccgcctcagccaggcccagctgctttgccgccgagtccgagtcctccatccggactccgccgagccttcccgaaggcgccgtccgggaccgcccgaagcgccggtcgcggagcccgaagcggggcccgaagaggacgcccgagctgggccgaggccgcccgaagccgccgcccgaatgccgccgagcagagccgagccgagtccgcccgcggagcggagccgaggcgaacagaggctgcccgagtagggaagccgaatcagtccgaataggtccgagtcctcacgagggcttccgagagactcggcccctgtcctgacaggctgaggcggctgtcgtccccggccgacagggctggacggctctaggcagattctcgccggcggccggcgcaattctgcctctcagagagagctgccgcgggtttcgcccgttcccgccgccggcggaagccgagtcagcccgaggccgagccgagacgagccttccgaaagtgcccgagcggtgccggacggactaatcgggcctcggccgtggctcggacgtccgctcccgaaacgcggcgcggtcgggccccttcgtcaggaccgaaggagcgcgagcgcgcgggccgagaggctgccggg

SEQ ID NO: 15342 - DNA, 583 bp, Homo sapiens
  source 1..583: mol_type = other DNA
gtcccagcagccctccaggcacctgtgggcggtgggctccagggagcgcctcgcaccaccgcaccaggggcaacctgacagaggctgagaggccgctggccgccagcctggccctcacggctggcaccgcctgggcggactgggccctcagcgccacgctcctggcccttcacggcctggaggccgtcctgcaggtggttgccatcgcggccttcaccaggtagctacggacacccgggataccccacactggggccctcctcctgggcctgaccagcacctccccattcctggacaggaagggcactcaggagtgggagcaggagccagggactcagccctgtcagtggggtctggctttagcagccaggcctccacagacccccatgggcccccagggccgagagggaggacagagcctgtgttctgagatcccagtttactccgtggccaggccccacctgtgtttccaagtcgggctggagacatggggtaggccttgtgctctgagcaaccccagctctgcctcacaggcaggcaggcccaacagctctgctgcctacccttcaggggcttcggagga

SEQ ID NO: 15343 - DNA, 840 bp, Homo sapiens
  source 1..840: mol_type = other DNA
gccggagccttgggtccctgcatgggcctggggcgccctgtgccccttcgactgctgtggcagccggtgctacccgctgtgtccactgcaccctggccctgttctgagcggtcacagcagctggggagaaggtcccactgtggtgggcagaggtggggcctgggcctgaccacggggcagtatcctgagagggcctgaggtgtccccacctcccctgacaccccatccctcagtgcccaggctgggcagaaaggggggcctggaggagcagctgcactgtgaactcagggctccaggcctggggtgggcatggctgggtcctgcctgacacccacccactcaccgaagcctctgcccctgggcctgcggtgggcccggtaagggaagtgactctgccccatgcctggggcacctgaggggtgcacctggcccggcggaggctctgacctccccagggctggagccctccccagcaatgcgccagcgctgcccccgaagtcccattggcagcgttcccccgtcccccggcctgctggggcgcagctaggccctgcccaaggaagagctcgaggcctcgccctgctcatcccgcggaggcggccctgcgccccgcctgtccccagcgccccagctctaggggctaggcccgcggaggggcacaccggctggagcccaggcggggcagggggcggggcggagctgggtccgaggccggcgggggcgcctccatcccacgccctcctcccccgcgcgcccgcccgctctcgggtgaccctcctctcccggccccgccccggcccggccccgccgagcgtcccacccgcccgcgggagacctggc

SEQ ID NO: 15344 - DNA, 897 bp, Homo sapiens
  source 1..897: mol_type = other DNA
ggcatggctgggtcctgcctgacacccacccactcaccgaagcctctgcccctgggcctgcggtgggcccggtaagggaagtgactctgccccatgcctggggcacctgaggggtgcacctggcccggcggaggctctgacctccccagggctggagccctccccagcaatgcgccagcgctgcccccgaagtcccattggcagcgttcccccgtcccccggcctgctggggcgcagctaggccctgcccaaggaagagctcgaggcctcgccctgctcatcccgcggaggcggccctgcgccccgcctgtccccagcgccccagctctaggggctaggcccgcggaggggcacaccggctggagcccaggcggggcagggggcggggcggagctgggtccgaggccggcgggggcgcctccatcccacgccctcctcccccgcgcgcccgcccgctctcgggtgaccctcctctcccggccccgccccggcccggccccgccgagcgtcccacccgcccgcgggagacctggcgccccggccgaggcgcgaacagacggacgcaccggcgagcgccgaggggacaggccgagcgcggggcgccggaggcaggtgagcgctgcggacacgggggagcgcgcccgcccgggcctcagtttacccggtggcgatgggacgcggggggacaccgggacgaacgcggcgtcgcagggcgcggggcacttggagggcggccgggccgagggcgcggggcaaggggctgggggcctggtcgagtccccacctctcctggacgggtcctgctgcagcccggcctgcccccgtcggtcctgggcggcggccggcgagcaaggaccagcgatgggtgactcacctccccgtcctgcccactcccag

SEQ ID NO: 15345 - DNA, 536 bp, Homo sapiens
  source 1..536: mol_type = other DNA
tatggggctgcctcctgccctgtgggagccccgcccccctggggaggcttctttggcccactggtggtggggggccctcaagttccagctccacatgctgagtgaccttggggtgatcacaggggctccaggctgccctcataggcgctgggtggggccctggaatggggaggcccctcaggccctggccctgtcctgggagagctatgccaacaaggcctgggtgctaagcaggcccgggagaggctgggacccaaggaggggccgcgaggggaggggccgccgccagctgggcctgcctcccagcacagccgacccaggactgagcacggggtgggtgggggcagaggtccgggcatgcccggccctgcctccccctcccctgccaccagggacaccccgcagcaaggggcaacgccaggcagctggacgcagggaccaggaatctaggatggctgaagttcgcgtgcccacaggctcctgccagcccaccggcagggccctgggctccgacacccaggaagtgcctcctggct

SEQ ID NO: 15346 - DNA, 558 bp, Homo sapiens
  source 1..558: mol_type = other DNA
ggattcctggcgggctccaccaagggcgccaggcacgtgtgtccaggcacacacctgggcgctgtgacacgcgacccccctggggaaggccaggttcctggccttcggttgcctgcagggcatcggggacctcaggcccaggcagggccgggcagtatggggctgcctcctgccctgtgggagccccgcccccctggggaggcttctttggcccactggtggtggggggccctcaagttccagctccacatgctgagtgaccttggggtgatcacaggggctccaggctgccctcataggcgctgggtggggccctggaatggggaggcccctcaggccctggccctgtcctgggagagctatgccaacaaggcctgggtgctaagcaggcccgggagaggctgggacccaaggaggggccgcgaggggaggggccgccgccagctgggcctgcctcccagcacagccgacccaggactgagcacggggtgggtgggggcagaggtccgggcatgcccggccctgcctccccctcccctgccaccagggacaccccgc

SEQ ID NO: 15347 - DNA, 617 bp, Homo sapiens
  source 1..617: mol_type = other DNA
gggaagcctagggtcccaacagacccacctgtctgccctggcggctggccagagacaggctctgaggattctgcccctgggggaggccagaggcacctgccccatagccaccctacctcgttggaggggcagtgatactgtgtgttggggccactggactggctcccagtctcagggctgctgccaggggttctgcgctggccacctggccgcatccctgccctcgaggtgaggaaacactgcaccccggggaccccagggtttcctgcccgcacagcctcttccctgccaggtctcccaggcccaggaaagagccaagggccagcctctttgctggggcctggatccacatgtgggtgcaggagccccttggggtgcagagtggcggctagagccgggctccctctggacttcaggacctctccatgctgcccagcttggaaggcgccttctgcccccagggcccttgtcagagcctcccagtcagcctctggggggtccctgtggagcacctggacgtggggccaactgggacgtggggccaactgggatgtcgggcaggggctctgccccccaagggacccccacccaggccaggccagtcagggatctggccc

SEQ ID NO: 15348 - DNA, 565 bp, Homo sapiens
  source 1..565: mol_type = other DNA
ccttttggcctcaaagggtgcctgcctgtctgccaaccacaggccaggcgcggtggctcacgcctgtagtcctcgcacttgggtcccggttgctcaaccgctgtagtgagccgagatcacgccactgcactccagaggcggaagtgacactccgtcgcaggcctccccgcgacgcccccgtcctgggccggcggagcccaccccgcctcctggaccccgccgtccccctcctagtctccggggacacccggagcttctgaccccgcagccccccggtctcccctgctcctcgggtgtggccaccggaacaccacgggcaccgcgccgaagccctaccccgcgcgcgctcagactgcgcatgcggccggggaggaccctcgcgggcccctgccaggctcggatgccgaacccgccggggccaaagcaggcgcgacctgcgaccgcccgggcgcgcggagcggcgggcagcccagccgacccggaccgggtacgaacgcgcaggcgcccagtcccacccggctccgcccccggccgccagggcacgtgacccgcgaactcccgggcg

SEQ ID NO: 15349 - DNA, 590 bp, Homo sapiens
  source 1..590: mol_type = other DNA
cagcataaggaccagtcagcacttcttaaatactgggatccccgagttttggggagactgatttgcccggcagctggtctgcagcagggcagctgggcctcctacgcgtcccccggacacctctgggcttaggactcaggggaacagattcccagaagcaggttccccgccgcgtccggcgcccgggctctgcagccgccccctgctcacccgcagggcgccagtcctggccccaccatggatcctgcatcgccgggttcggccctggcgggttcagccccgcagagtcggcacccgggccaggtccatctcctccagccctcccggtgcgtcccgcggggcaggaaggaggcgaggcccagccgccccgtgtcttcccgggcccgtccgcggcggctgctgaggacctggggagacccagcctgtaggatccgcagctgcggtgcgcggccggcagtggcgctcgggcttcgtccccgggggcggggcttcgtccaggcgcgcagggaccagcgggcctcgccctcccgcgccgctttccgattggcagccgcccgcggggcattgtgggccgtccgcgcgcccgtccc

SEQ ID NO: 15350 - DNA, 540 bp, Homo sapiens
  source 1..540: mol_type = other DNA
ccaccctggcctgggattggccagggagcagggccctgagggtgcctgccctgctctggagggagggccaggagctgccacacccccaactgcataaggcccctgggtaccctgatgtgctggtgctgtgtccccaaaaccggggccctccacagaggccccttcccagcgacactacctggggctcaggcctggacccccccagttcacggttgctcctgggagctgcagaaccttggaagctgctgctgctgcttacagaattatatttttttcttttgaagagttttaagaagttgtaactttttgtgtcttgtcatgtcagagaataaataaatattcttgggggcgggggagggcagtcccctcttcccataactaggggcaccctggcctagaggggatgctgagcgggacccgcctcctgcctctggcagtcccagatgggacttggaccccatcccacggttcccggcggggcggggcccggtcgcccctccccctccccgccctcctgcgccgggagcagtgcattgtggg

SEQ ID NO: 15351 - DNA, 524 bp, Homo sapiens
  source 1..524: mol_type = other DNA
gccagccgcgtggccctgggcaacggcgctgccggtggctctggggggcccagggagggggaaaggcccccggcccctgaggctggctgtggctccccagccttgagaggcctgtcctctcctcctctgtagtggatgggggtgccagccacagggggcctcagaaggccagccatcccccacccccaaggcaggggtcccatcactgggcctgggaggagagctatacctgggatagctgagcccaggtcggggggtcttagggcgcccgggaccccagcccctagctcgaagggggcaggtgccggctgctgctgtccaggtcgaggtgctccggtaggcaccctggccccggcccctggcactgcccccagaggtgcctggccctttaaaagccggagctggctggggtgcacgtgagccccgagcgtgagcatgggactgggtggcaggtgcctcccgctgctgcaccctcaggacgcagtgacggcttcagtctggggtctgggggaggattactcttc

SEQ ID NO: 15352 - DNA, 464 bp, Homo sapiens
  source 1..464: mol_type = other DNA
gcaggtgtcctcatcccagactggagataggctccgggctcagtccctggagggccagggtacacccctgggcccagcgcagcccggagagctgtggccagtctgcactgtcaccaccactggctgaggcagggaagggctctgggcatgccagctcgtgtgccctctggacctgccaggtgagcagggcctgtgggtggcaacagtggcctctggcacccagctagctctggacagcaggcccagacacacatcccacagacacgagtgctgtccaggtacatacagggtaccctggcccggagaaagcctcattctcagagtaccagccctagacagatccaggccaggaaatgctatcacatgtgtgctgggggtgtggtggccacgcgctgaggtccctgtcggtgggtggcctcgctgtgccaggtcagcctgagtcagacccacccccggaagcctct

SEQ ID NO: 15353 - DNA, 504 bp, Homo sapiens
  source 1..504: mol_type = other DNA
cccaccttcaagtctctccagtgtgtggggacaactgcactgtttcttaggcctggcccctgcggggagggaggcctgtgtgcacaggtgccccacatcctacaaagtaacccacatgggcgctggagtgcagtggcatgatctcagctcactgcaaccaagtagctgggacgcttgccactgcgcccagccccaagtgggcccagcagttccacggatcacctgtgtctgccctggaggccacgcctcccccagggcccggcgctctgccacctgcccgcgccccgcgggtccttgtgcctgcaggggcctgaggcccggaaccttggggacgcgcggcccggcctctgcgcgcagaactgccaccctgcccgggggaacccacggccagggggcgggtgggcgcgtggctgtggcctggctgggcgcagtagcctcgacggccaggagggggagccgaagcccggaggaggccgagggcggagcgcgcgcggcgccgagcgg

SEQ ID NO: 15354 - DNA, 474 bp, Homo sapiens
  source 1..474: mol_type = other DNA
agtggccaggctggtctcaattgaaggagacagtgccaggaggctcactgcttctggcccagagtgatggctgcccagagaggaggtcctggcaggcttcccggaggaggccgggtgcggggcagcggcaagagtacccccgtcaccccggcctgggaacgcacctggggccgggtctgcctcggagcggcccggggccccgagaacctcggaaagggcgggtttcgtggccttccgggcgggggaggctgtacggctccgaccccgcggactaacaggaagccgagcgctgctgcgcgggcggctcggcagatggacgggtcgcgtccgcgtctccggggctgcgacaggcggagggaaggcgggtcggggaggagccgggagacctcccccgtggaccccagcccggcggagggggcgcgtcccgagggggcggggcccaaggggcggggtctgcagtccccgcccacccag

SEQ ID NO: 15355 - DNA, 568 bp, Homo sapiens
  source 1..568: mol_type = other DNA
ctgcactccaggctgggcgacagaatggggcccacgactgtgaagtcgagttccccccagggttgcgtagagcccaacgggagctggcgctgcctgctactgcatctgaccctgttcctggtgctcgcccgggatattggcagggatggcgcacaagaactcaagtccttaggaggcaaccctgttccctcccaggacccgagaatgtagcggggtccctgaggtgctgatgtccacatggacaccgaggtcagttccgggccaaagcggccagcgcaggggctgaccactcagacctcactcctcgcaggggtgagcgggcgacgctgcctgctcgtcctctgacaggatgccctgacaccgcagtgcgggggcggcctcccagatagggccgcagtcgctaagtccgaggcggctggctcacctcactgagcccggctggacgtgggaccaccggtcgccgcggccagggccgccagcagcttctgcccgggcccacgcgccgttccgggtaggcccgcggcgcaggccacttccggcagcggtgcaccatgggacttggtcccgg

SEQ ID NO: 15356 - DNA, 579 bp, Homo sapiens
  source 1..579: mol_type = other DNA
cagactggagtacagtggcacgagtttcgacatgtttaccaggctggtctcgaacccctgacctgaaccctccagcatgtggccggatcaggcagaagaatcgcctgtatgggacactggggccccacggcggctgcggggcaagggcggccgctaccttgttgagccggtcgtcgtccgcctcgatacccacgctgtccaagatcttcttgatgtccttggcgctgggggaggagttgccccctagggcaggcggagaggacgcgacggcggagttaccccggcggcctcctgccggcccatcccggggccgccgggcgaggccgcgcgtggctcggcccgtaggcctccgcggactccgcgtccccagccggcaccccgggcccggtcaccacactcacgcggcggcgtctgcggcggaggcggcggagaagtctcacgcgtgcgacctcggtggcgacagccgctacccagaaggctctgggacccgtgcgcggcgccgcatgaggcgcctcagagtgacgtcacgaggcgctcagccaatgacgacggggagggagtcgttgactccttccccct

SEQ ID NO: 15357 - DNA, 642 bp, Homo sapiens
  source 1..642: mol_type = other DNA
gcacaagaactcaagtccttaggaggcaaccctgttccctcccaggacccgagaatgtagcggggtccctgaggtgctgatgtccacatggacaccgaggtcagttccgggccaaagcggccagcgcaggggctgaccactcagacctcactcctcgcaggggtgagcgggcgacgctgcctgctcgtcctctgacaggatgccctgacaccgcagtgcgggggcggcctcccagatagggccgcagtcgctaagtccgaggcggctggctcacctcactgagcccggctggacgtgggaccaccggtcgccgcggccagggccgccagcagcttctgcccgggcccacgcgccgttccgggtaggcccgcggcgcaggccacttccggcagcggtgcaccatgggacttggtcccgggcgtggcggccgcgctccatgttaggcgccgcgccgaaggcagatgccgtccctttggagtccaacgcgaactgctgcccttcgcctttgccgcgaaaaggaagggggagggggaaggagtcaacgactccctccccgtcgtcattggctgagcgcctcgtgacgtcactctgaggcgcctcatgcggcgccgcgcacgggtcccagagccttctgggtagcgg

SEQ ID NO: 15358 - DNA, 478 bp, Homo sapiens
  source 1..478: mol_type = other DNA
caagtgactctcttgcctaaatttttgtggattacaggcatgggccactgtgcccggcctctttttaggacggagcctcgctctgccccccaggctggagtgcagtggtgcgatctcagctcactgcaacctcgcctaccggcccccagtagggctggggcaggaggctgaggactgggcagcatccccctagatggccccatcctgttctctggcttccctaactcagcttgggttgggggcagccccaagccccatcccagaccctctgcagctctggcaacagctaggtccagagatgacctcagcctggggagccagtgttcctggggagacagaatctcattgcctcccaccccaacctgagaaagcctctcgtttgggggtggggtgaggttcagggagggatcctggatctactccaagccctgtttgctccactgaccccaggattgctccacctctggggcaattatcg

SEQ ID NO: 15359 - DNA, 761 bp, Homo sapiens
  source 1..761: mol_type = other DNA
tccctaactcagcttgggttgggggcagccccaagccccatcccagaccctctgcagctctggcaacagctaggtccagagatgacctcagcctggggagccagtgttcctggggagacagaatctcattgcctcccaccccaacctgagaaagcctctcgtttgggggtggggtgaggttcagggagggatcctggatctactccaagccctgtttgctccactgaccccaggattgctccacctctggggcaattatcgggagcagggcggccccagtctcgcgggcgcggggcagggctgaggccccacgtcaggtcgcgtgggtctgcggagctggggtcccccacgaagggtttgcgggactcgcatccagcctgtgggtcccggggctcccgaggcctgtgcggggaccagctcctctgtcccgggtgggtgtgggaggcggcccggggaggggcggtggctgccctgaaaccagagctccctctcgccggtacccaggtctgtgtgaggcttccggcccccaggctcgggcctgcgcccagcccaccctacacccctaggcgtgtgcccccagccgtgcccagcaggggcggagggagggcagaagctttctccgggcggcagcggagggcggggctccagcgcggggggccgggtcaaggacgggggcgggtcccgagggcacggccgttccctgcgcgccccgattggtcttcgtgtgccggccccgcccccgccgtgagtcccacaagcgc

SEQ ID NO: 15360 - DNA, 229 bp, Homo sapiens
  source 1..229: mol_type = other DNA
ctgggcaccaagggagactcgctctgttgccaaggctggagtgcagtggcaggatctcagctctggcgcctgcactggctactttttgtatttttagtaaagaaatagggttggagtgcagtggctgccccagtagctgggactacggtggattccaggggcagaacgggcatccctgggcggggcccgggatggcctgcgctttctgcagcggaacggtgcgcggacc

SEQ ID NO: 15361 - DNA, 592 bp, Homo sapiens
  source 1..592: mol_type = other DNA
ttatttattttcgcagtgagagcctggtggccagggtctggccctaccttggctgaccagcctctccacagctgcaggccaggtctcccagcgtcgcactcctgggcctggcatttggaacctgccaggctggcctgggacagcctcctggctgacccttggccacagccttctgagggcggaaatatttgggaccaagattcttggtaaataaaaacgaaaatgtttgcaaatcccctcacacggtgacacagtggggtgtggaaaccaagcacaggggacctgggaaagctgggcccctgctccacttgggcgtttggcccaaagtctgcccagcctcctgccagtacacagggcagggctgggacctgagggcatcctcttcatggcagggaggccatgaggggagaaggccagccctccttggcaatggcctgagggtgctggagccagcccccacctgctcctcccagaaggcgtggggtggctgtggtggcagccccctgccaacaataagggactgggcgagccggccaggcaggtccctgatgtgcctgtgccagaggccaccccccttggtctcaaggtcctg

SEQ ID NO: 15362 - DNA, 643 bp, Homo sapiens
  source 1..643: mol_type = other DNA
cctgacctcaggtgatctgcccctgtctcccaaatttattgtttaaaaacgccttaagtcgggctccccccggacaggaggggcccctcccaggcgctggtgtctgcgcccgccccccgcagccttgtccctgctccggggggtccctgggtctctggggccttcactgctcgctcgagcctccagggatcgggccgccggggcagcgcaggggcggggacaggcgacagcggcgcagagtggctcctcccggggccggcccaagcgggggtctcggtgcgcgaagcggcaggggtcgctcggggcccagtgccctctacgtcccgtccgggtcccagctggggcggggcgcgcccagtgtttccgggaggagcggcccgggcgcgcggcaggtgcggcggcgcaactcgcgggtaggcgaccgctggtcccgccgctgaggcccctccactgccgcccgcccggcaccccctccgggccgccgtggcccgcgccaaacctgagcgtctcggtcgggaactccggttaccccctcggggcgcaaggcggcaggggtaagggcggggttgtcccccagagtttcggggagcacaggaggctggccgccccaccccaccaccctggggccctgctgccgcgcggc

SEQ ID NO: 15363 - DNA, 709 bp, Homo sapiens
  source 1..709: mol_type = other DNA
tgtctgggagccacagcctgtgtgtgccacatggatgaggtgggcacctgtgcacgcgtgctgtgtgggtgaatacagggagcgcgggcaaggctggagcccctcggggccctcgccagtgtgtggatcagggctccccactgtctcgccagggaggccgggcaggttcccggcctcagtcggccaccccctccctgaatgagcttggtgggtgggcagccccctccttcctcacggtgcagccctaggccggccctgtggtcccttccagtctggagggcatgggccccccaggaccccatgggtatgtctcgctgggaccccaggcctgcccgggtctccaggctgtccacactgcacgccccaggccggcatcggttctgccgacccctgcagcctctgggcggttggagggccgggtcgccacagcccagggcctctggctaggctggtcgccgtcttacctccgggcccgcctcccgcccagctcctccgtccttggacgggatgggcccttgctgggctattggcgcccccagggctgcagctcgcccggcctccgcagtgccaggtcgaccccccacccacgcgggttcagacctgccgagcgcccgccgccgcgggaggggcttgaggccggggcggggccggggcggggcggggcggggcgtccccctcgtaggctccgggccgcgcattctcagcgctg

SEQ ID NO: 15364 - DNA, 818 bp, Homo sapiens
  source 1..818: mol_type = other DNA
ggagtctgcccagggatcccctgtgccggggtcttccaggttctccccgtgctcagaggcgcgtctgagcgtcgggagctcgggacggcgagcagccagcagagccgggacccgggagggcgcaccccgaccccattcccgggagcggacaggagcccggggcggggagctgccggcgggggctgtaattgcgcagctgaggccagggcggcgcccctaggggctgggccgcgtccagaatgggacccccgaactcagcgccgagagccccggacaccccgcgggcagaggccgaggcggaggaacccactactcggcgcggccaggaggggcggcaggaagacccgccccggcccccgcccgccctctccccgagcccccgcgccggaccccacttgttgctgcgtgtcggctctgggctcgaactcgcgcgccccgctcgcgtccggctccagccgctcccggtcggacacctccggccacgggaccctggccgcacgccccccccccaggcgcagtacctgcgccgccgcctcccgctcgcgccgcccgctcccgccgcgcagctccgccgccgcagctttacggccctgctcagacgccgtagcgccgggatggggggtgtgcggtctgctgctgccgcggccgcgcgggcccgggagccccgggacgcacaggcccaggagccccgggacgcacgggaagcccctatcgcggcggaaactgcggccagcggtggcggggccggtggagggacggccgccttctcccgcaacagtggacgcgcccggggcggggcctgggggggttcttcgcgt

SEQ ID NO: 15365 - DNA, 609 bp, Homo sapiens
  source 1..609: mol_type = other DNA
aataaatttctggagatcagggtctccccaggttgtccaggctggtctcgacctcctggatgtcagccgccgcgcccgcccgtcctgcagcgaggtttgcagggcgggtgacaagacgcctgcgacccgccaggctcaggggataaaagccgggcctgaagctgctcatggggcgctggcctcaggcagcgctgcgcctcccgccccggcgcgcaccccagggcggactcagcccccagccccggcccgcgccccacggcggactcagcccctagccccggcccgcgcctcacccctcggtgcggcctgcagcagccccaggtaatggcggcggcgcgtcccagactgcccggcccggcccggccgcacgcgaagaacccccccaggccccgccccgggcgcgtccactgttgcgggagaaggcggccgtccctccaccggccccgccaccgctggccgcagtttccgccgcgataggggcttcccgtgcgtcccggggctcctgggcctgtgcgtcccggggctcccgggcccgcgcggccgcggcagcagcagaccgcacaccccccatcccggcgctacggcgtctgagcagggccgtaaagctgc

SEQ ID NO: 15366 - DNA, 625 bp, Homo sapiens
  source 1..625: mol_type = other DNA
gcggggtgtccggggctctcggcgctgagttcgggggtcccattctggacgcggcccagcccctaggggcgccgccctggcctcagctgcgcaattacagcccccgccggcagctccccgccccgggctcctgtccgctcccgggaatggggtcggggtgcgccctcccgggtcccggctctgctggctgctcgccgtcccgagctcccgacgctcagacgcgcctctgagcacggggagaacctggaagaccccggcacaggggatccctgggcagactcccggaggctgcactggcaggaccccctgaaggcctcagctctggcttgccctggagctcagggcctacggacgacgagggacgaggagcccgtgtctctcgagtgcgggggggctggcaccagcacccttcttgctgtgcccctgtgggccgcaaagcggcacccatggggggctctgggctgggcatcagctgccgctttctcagggcaatgctgcgtctgccttagttgctcccaccctggccagggccctgggcagcttccccagtggcatttgccatactccccccaggatgagtggacgcacatcctgctctgggcagaagggcaggacaggggccctg

SEQ ID NO: 15367 - DNA, 688 bp, Homo sapiens
  source 1..688: mol_type = other DNA
gcatccggcgtgatgacacccaggagtgcaggcacatctgcgcacggggccggtactgacttccagcctgggctggagcaaaatgaaattctgggccccttgtttaaaaattaccaagaatttcaaccagctggggtgggtgcgcgcgactgcccttgaagccggccccgctcccgcattggggacagcacggggcggaggccgagccgggcccacctggagcgctctgggtctgtcctggggctgccagcctcctgcggggctgcctggtggaggggggcaggaatcacacctgcgcgtgcaggctgaccccccacccgccgccggcactcagggcttccccaagggcgcccggggcggagccgcttcaagttgccaccaaggtctccaagcccggcccggggccagagtccgggcgaggtaccgtgcaggtttcatccccaggccccggccccggcccgcgagcatcttcctcccgcgcgcgaaggtgggggggctggggcgccggcgcgggcgaaggggccggggtcgcggctggtgcgttgccgggggctgcgattggtccgcccaggcggagcgctggggtttgccgggcggtgcggcggggaggggtccgcgcgggggcggagccgccggggattggccgggagggcgcggggcggggcgcgcggggtcgggggcgcggggg

SEQ ID NO: 15368 - DNA, 355 bp, Homo sapiens
  source 1..355: mol_type = other DNA
tttctagatatggttgcaccgttgcattcatgggtactcatcaaggccaggcagccggcccttctctgctggagtgcagttcctggctcagcctcccgagtagctgggagacggggtttcaccgtgttagccaggatggtctagatcgacctgggcaggagtgcagtggtgtgatcacagctccccgcagcctccaccccaggctggtgtcaaacctgaggttcaagcaatctgcctgtccccacacccagccagcttgcggaagttggctgtgtgatagtgagaagtataaaacccacgcagcctttgcaaagggcaaactgtcactggccagggccggctgggccagcggggg

SEQ ID NO: 15369 - DNA, 675 bp, Homo sapiens
  source 1..675: mol_type = other DNA
acagctggtgggggacgtgcctcgcaccgcatgcagcccccagccccttctaggaaaggcgtgggcgtccttggagcccacgcgcgccccgggaacggctgagcggggcagggtggggcccggccgtgcggttttctgtagctggccacgcgctcgttcatccaagcgcgaggggctgaaggcgggggtgcggaccgagagagcgcgcgtttcgggcagtccccgctggagacagcgcagtgggcgccatcggcctggggtcggggggacgccaggagtggtgactccgggtccccgggggagcgtgccggggcggagcccaccgcgcggttctcccggcaccgccgagccgggcagaggccctggagcccaaggccccgcgcggccccacgccaagggcgccaggcctgcctaagagccgtggcgctgggaacccggctacccctgggccgggaacctgataaccagctccagcgcgagcaccaggggcgctcaaggtgaacgcgccgggcccggggtccgcccccggcgcggccccgccccggccccggccccggccccggccccgactttcgggcagccctgcccagtcccctgtcctggcccagcccctctccatcccagcgtgccgtgcgcggcggcggcgcgcgggcgcctggggcgggacttccggcg

SEQ ID NO: 15370 - DNA, 510 bp, Homo sapiens
  source 1..510: mol_type = other DNA
ctcagacccaaggctgggacgacccctaaacactcttcccagagctggcactcttccgagtgggcggagggggatgcctgccaggcccaagccctcctgtgggcagcccctgcagcacccccattgccctgctctgtgagtggctgcactgccactgccaatgggagcttggattaggcatgccagcctcctgacgcccagagctgctgggactgtcctggagagcagcccaggacccctctgctcttgtggaccactttctctgccaggaggtggcactgggagagggactccggaggggtgtaccgtcctccaggaagcccacagatcttggttttccccaggagttctggaggcccagagcctgggtgcggcacccggttcattggggaggggcatgggtcctgtgccctcctcctggccgggctccaccagggctaagctctcattggctggtgggtctgggccagttccaggtacagggtccagatccccccactgcagcaggag

SEQ ID NO: 15371 - DNA, 813 bp, Homo sapiens
  source 1..813: mol_type = other DNA
cttcctggccgggacctggagctgtgcagcctggcccagcaggtcctcccttgcccacaggggtgggcctaggcccccgcaacagtggccaaaagtcctggcgccgccgagggactagattccgcaggggctgccgcccccggccgctgtcactggggtggggagggggcacctgggctgccacacagaccctgggctgggtcgggcacggggcctgcctcgcccccagctcagggaccgcaagagatgtggccctggcggctcagggcggcaggaggggcgggccagccccaccgtctcaggataccgtgctaggggagggtttcctcgccaaaggccgtccagcggctgtgaccccttcgcctggagccccagcttcctcccggcgccgccctcccgccccggcccccgcggaacaaggccctggcctcggagctgccccgccgcccagcgcagctagcggggccgaggcccaggacgaggccgtacgcgtgtgcctgcgtggccgcctcttttgcagccaccaacaacgaagaggcggcccgctgcacacgcgggttcccgcccggacccacgcccttcccgtgggggacgcgggcggcatcgccagcttggcgcggccccgggacgcgaacgcgtggcttcagcggctccgtccatggtgtccgcctgcagggggcgcccccgcgcctgcctcgaccggctcgcccccgtgccgcggacgcgcgcgcgctgcctcacgcgacacccgccccggccgccgtccgtcgtcgctcgcgtgcgtgcgcgtgcgtgctggtgcgggcgccgtac

SEQ ID NO: 15372 - DNA, 564 bp, Homo sapiens
  source 1..564: mol_type = other DNA
tacagctgtgggcggggccatgggcggggctagctgtgggcggggccacgggcggggccgactgtaggtgggcgggcctgggcggggccgactgttgctaatgaccagggcgtggctggggggcttctccacatgctccccacaccttcaggagtcgccctgcggtcacgcaccagggctggacccccggcctccctctgcctccccaggctcagatattcacccggagggagaaaggacatgtgtcccccatgcccacacatccccagctacaggcagctggggagggtctgcacagccacggcgggacaggtgtctctggaccctctccccaaggttggccctgccggggccctggctggctggtgctgggtaatgtgccctgtcccaggagcagggccggcctcagggtcctgagctccagggcactggggaagtcctggctccatgagggcagcacgggcccaggacagaccagggtgttctccccaggtggaccccaagcccttctacgaggcctgtgtgcacgactcgtgctcctgtgacacgggcctcctacgccca

SEQ ID NO: 15373 - DNA, 669 bp, Homo sapiens
  source 1..669: mol_type = other DNA
gggctgcaggcggctttgtccccatggcactctgcgcagcatgtccgggcagctgaggccccaggcaccacttcctgctggtcgtctgagggccgaggcctccagcaacccttgggtgcagggtctgccgagccctccacattttcaccgtgccccgctgtgcctggcgaggtggctggctgcagtgaggtccgtggaagccacttcggcctccagcgtccccaggagaacgagacttggtggctgtgcgactgcttcatggccacgtgcaagtacaacaacacggtggagatcgtgaaggtggagtgtgagccgccgcccatgcccacctgctccaacggcctccaacccgtgcgcgtcgaggaccccgacggctgctgctggcactgggagtgcgactgtgagtccggggcccccaggccctccccgcatctcctgccctctccgtgggtgggggctgcagggcccgtctcccgggggcggaagggctgaggctccttgggcacagatcccactgctcctccctggttgaagtttgaaccctggtccgtcctgcagaatgaagtgcagctcagacatccccgtgcccacgcacaggagtggggtccagcccttgcacccgaccccggccgaggggcacaggtggcacggctcactccggctcccttg

SEQ ID NO: 15374 - DNA, 741 bp, Homo sapiens
  source 1..741: mol_type = other DNA
cccaccagccggaggtgctaggcttctgcggctcccacctggggcaggcggaggaccccgggcaggtccaggaccccccggagcagctgcttcctcaaccctgccagggttaatgaggaggcgggactcagggccggagcctctggcctggctggatggctggcattggacaagcgcagctgactcccgtgcatggccaggagacactctgggcctcagtttccccttgaatgtgaaccttgagagacctcccacggtcttcaaggggctctggtcagctgggctggggtctctggaaatagagcctcctccagggagcatcctggccatgtgcatgcctgagctcagcaggagcctcccggcctccccgtgggctaagcagtggtgggaggggagctccagcctcgtgggccctccccgggcctcggggacccatggtcagtggctgggggtgctgcccagaggctgggattcccttccagcaggagccgcagtggggctgagtgtgaggcaggctggctgaccactgtttccatggaccctgcgtccaaggccagccctgccttcagcggctccatctaggacgggtgccaggtggggtaggcccttctctcccttccgattctcagaagctgctgggggtgggggcgtcctgggcctcagggcacagagctgcggagagcatggtgccctgcgtggcctggcctggcttggggccaaggctccctgctacataagctg

SEQ ID NO: 15375 - DNA, 681 bp, Homo sapiens
  source 1..681: mol_type = other DNA
gcttgtttatatgtaagataaaagccaaaaggattgccaatctttgcatcggacatcgggacctaagttccgggtctctggtaaaagtttattaacctgtcctggggatgcagccagcggggttcagcctcagtttacccagcgctgttcgagctggagtcgctctggttggagcgcctgaccgcgagggccgaggtcaggccggactggggttctccggagcgagcaggagaggagcggggctcctgcggagcggcgcggcggggaggccgagggcagggcgggctcgagctcgggctcttctggcttcacccggcagccgccccgtggaggacagaaaggcccttcctccggcaggcagctgagggaaagatcgccctgcaggggatgtcgggccgagcgggtcgcacgtccgaaggtcacccccgccaggtggctaggccctgtcgccactcgacagaggaccgctgcagcgccgccacgctagggcccgcgccggactgggcatgcgcaaacggccccgccgggagccatttcgccgggctgcagggctcgaggagagagcaggtgcgcaggcgccgggcgagaggctgcgcctgccctaccctggagcgcgcgtgcgcgcgagagccggaaggggcggtgcctggcgcggcgcctgcgcagtggggcggtgccggg

SEQ ID NO: 15376 - DNA, 667 bp, Homo sapiens
  source 1..667: mol_type = other DNA
aagggccgggaggcgccagggcgctgcggccggatcccaggtgagttccttgactccgcgccgcgcaggtcacgaaaaccgccgcttctccctcgggagcggaggcggagggccacgtcctccctgggggtgcacaatctctgcttggacaacgcccgcgccacgtgtgccgcatccgcgccctgcatgcaaccctccagcgcagcatgcccctcgctggcgtgcagcaccccccatgtgtgcagcacccctgccatcccccgcgcgtgcagcaccccctcgaggggcgggaaactctttgggacacccggggtcacgccctgcagggtaaaacccccgtccagggcagccatctgcaccccctcgccatgggccgtcccgggatgcgccttaatggcgggtcgggcggcagcgggagctctgctgcctggtgggaccggacgtggcagccggcgggctggaggctcccaggtcccggcctcgccctggcctcgcctcgccccctagagtctccccgagcgctcgtagcggcggggcggggtggggaggcgctgattggccggcgcgggcaccgcttgccgccgccacggcatcccgctgcgttcgctcggctccgttgcgcggcccggctcggctcccctcagctgcgctcgacgctgcgcggctg

SEQ ID NO: 15377 - DNA, 699 bp, Homo sapiens
  source 1..699: mol_type = other DNA
gaaaaccgccgcttctccctcgggagcggaggcggagggccacgtcctccctgggggtgcacaatctctgcttggacaacgcccgcgccacgtgtgccgcatccgcgccctgcatgcaaccctccagcgcagcatgcccctcgctggcgtgcagcaccccccatgtgtgcagcacccctgccatcccccgcgcgtgcagcaccccctcgaggggcgggaaactctttgggacacccggggtcacgccctgcagggtaaaacccccgtccagggcagccatctgcaccccctcgccatgggccgtcccgggatgcgccttaatggcgggtcgggcggcagcgggagctctgctgcctggtgggaccggacgtggcagccggcgggctggaggctcccaggtcccggcctcgccctggcctcgcctcgccccctagagtctccccgagcgctcgtagcggcggggcggggtggggaggcgctgattggccggcgcgggcaccgcttgccgccgccacggcatcccgctgcgttcgctcggctccgttgcgcggcccggctcggctcccctcagctgcgctcgacgctgcgcggctgtcggctcggctcggctgctgggctcggctgttcggctcagctgcgcggctcggctcgtctcgggctcggctcggctgctgggctcggctgttcggctcagctgca

SEQ ID NO: 15378 - DNA, 305 bp, Homo sapiens
  source 1..305: mol_type = other DNA
gcctgtggactgtggccacagtccggctccctgggctggaatgtctcgtcagcttttccctgcagaaagcaggcaagctggagggttggaaagcatggaggcaccatgctgtttcaggctgtgggctggcagacccaaaggcctgatggtgccaggtggccctgaggagccagatgcctgagcctggggccaggcctgggcgtgagcccaggagctggcctctccccacagcctgcggccagccctctacatgggcggccgctctttgtgccacatgtgacaggaccatttgtcatagcagtggt

SEQ ID NO: 15379 - DNA, 857 bp, Homo sapiens
  source 1..857: mol_type = other DNA
tcccccgcgcgtgcagcaccccctcgaggggcgggaaactctttgggacacccggggtcacgccctgcagggtaaaacccccgtccagggcagccatctgcaccccctcgccatgggccgtcccgggatgcgccttaatggcgggtcgggcggcagcgggagctctgctgcctggtgggaccggacgtggcagccggcgggctggaggctcccaggtcccggcctcgccctggcctcgcctcgccccctagagtctccccgagcgctcgtagcggcggggcggggtggggaggcgctgattggccggcgcgggcaccgcttgccgccgccacggcatcccgctgcgttcgctcggctccgttgcgcggcccggctcggctcccctcagctgcgctcgacgctgcgcggctgtcggctcggctcggctgctgggctcggctgttcggctcagctgcgcggctcggctcgtctcgggctcggctcggctgctgggctcggctgttcggctcagctgcacggctcggctcggctcggctcggctcggctgcgcggccgctgacgggcgtgcgctgggggcgcggggcgcggggcgcgggcctcggcggcggcggcggcggcggcggcggaagccaggtgcccccgcccgccctgtcctctcgacgaggcggaggcgtcgccgcgggccaggcctcggactgccgcgtcggagtggacgcggggggcggcggcgcgggcggacgcgggcggcgcgaagcagcggggcccgcgggggcgccccggccgggtcggcgcggacggcactcggcggacgcgggcggacgctgggcggcccctccctgcccgcgcgcccgggcgcc

SEQ ID NO: 15380 - DNA, 587 bp, Homo sapiens
  source 1..587: mol_type = other DNA
cagtctgaggcctttgcaggccatgccgagggcctggcacctgcggggtccccgacactgacctgggccctatcagcccatgaaggagcctcctagaccccaggctccgctaggggagaggtgtgggtgcaacacgcccctgcaggagctgggcactcacccccagggcagcagtggcaaaggagccgtgcctctgtgcctgagcccctcccgcacccgcctgctatccggctgcccccgggagcccactctccagtggaggcagccccaaggccaccatccaccaggggctggattatctggagtcaagtctccagggattggactccctggggcttgcctaagggtccgtgaaccccagggcccacaggaaggacccctggcctcttctctctgtggggcccatttgccccccccacgggcacggtgtgtcctggtgggcgcagctcccagctctgatctgtcctggggagcttctgggtgccacccaggggcccgcagcactgctgaccatccccctgtccctgcaggtccagcaccatgtgctaggtcactcccagcgcgaggccacacctgggccgtcggag

SEQ ID NO: 15381 - DNA, 618 bp, Homo sapiens
  source 1..618: mol_type = other DNA
tccaccctggtcgggggctgtaggggtcccatccctgcgggaccttgcaactccccagggtcgcggcttccgaggcccccaccctcctggcaggaggaggcggaggcggggaggtggctgtgcccgctgccgccgtgagtcaggctctgggctgcagccgcgcggccggtctggcgctgcggagggagcgcaggcggcgggggaggcagcggcgccgccgccgagccccgcgcgctccccaccccctcaaggttgggccgctgggaggcggatcagtggacagacagcggcccgcgggacggcggaaggacgcgcgcaccgaggctcagggggtccggccgcgcgccgaggagtcggaggcgccgtccggggggctgcggcagacccggatggggctgggggctgcagagcctcggccgcagaccccccggcgagcgccgcacgggagctgggaacgcggggtggggcggtgcgcacgagttggagaccccgcacctgtgccggttcttggtgctctgagcgcgcccgcgggtgcgccccggggtctggagagcccgcggtgcagcccgcggtggagcccgtggcggtgcccgtggcggtatcgggtgtccgcgggcg

SEQ ID NO: 15382 - DNA, 898 bp, Homo sapiens
  source 1..898: mol_type = other DNA
gcggggtgcggcccctcaacagcccgcacaggggtcgtcggggcggcttgtcgtggggggtcggcggcgtcctggggagcccgcccccggagttcgcggatgtgtgacccgaggcagccggctcgcctctgagggtcccaggtccgcccgagtgcagggggatccggctccgtcctgcgggggtcgcggcggggcgagcacagccgctgcaggtaaacgccgcgcctgggtctggggagggctccccggcggcggcccagcgccaacaaaggccaggagaaggggggagcggcgccggcgcctgtccgggtcggggggaggacttcgcgcccggagccgctcagctggaccgtccggggtctgtgcgacgcggccgggggcccgggtgacggggggcctgggtgacgcggggcccggggccgggagggcttcctggaggcggggtcccggacgccgcgtggtcccttggccggtcccggggtgagggcggaaggcggcggcggcgcgacccacccgcaccctgcaccccgcccccccagccgcctcagcttcaccccgagcccgggctccgctgacgtcacctgcccccgagccgcgcgcgctgatatgacctcatccccgccggcggccccgccctccgccccgggcctgtcactcgcggccgagcgcggcggccgagccggctccccccacgacgccccgccggacgccggacgcccgagcccgagcccgagcccgagcccgagccgcgccggaacctcccggccgcgcccgccgagccgcggggctgggatgcgcgccgcgagcgcgcgtgcccgcccgcagtgcgcgcgccccggcccgagcgagcgctccccgcggcgttggcggcggcgacggcggcgacggcgacgcggcc

SEQ ID NO: 15383 - DNA, 471 bp, Homo sapiens
  source 1..471: mol_type = other DNA
ccagcctccagggagacaagtgtccttagcagccaggacctcagcacaggaccagagctcggtgacctggggtctgcgcaggagaggccacattctcccagactctgggagtgaacgagtggggccccggctgggtaagtcagaactgagctgctggaactaggacccaggggcgggggtccctggaggcagcagggcccaggcgctggggtggtccaccctggtcgggggctgtaggggtcccatccctgcgggaccttgcaactccccagggtcgcggcttccgaggcccccaccctcctggcaggaggaggcggaggcggggaggtggctgtgcccgctgccgccgtgagtcaggctctgggctgcagccgcgcggccggtctggcgctgcggagggagcgcaggcggcgggggaggcagcggcgccgccgccgagccccgcgcgctccccaccccctcaaggttggg

SEQ ID NO: 15384 - DNA, 349 bp, Homo sapiens
  source 1..349: mol_type = other DNA
tgtggcaggccagggtctcccagaaggtggtggctggccgggtaagcccagctcaggggggagacatgggggcatggcacacaggccacactcagcctgggatcaggccccgtctgaggacaccgggtccagttttccctgggccaggcccttggaaagggccccatccacccacggcctgtgggctccagggagagcatggccagggtgcccaaggagacgaggaggaggctcctcatgcttcatgacccctcctgcaacactgtgcccgggtcagcccaggcataggactggccttccagaccgccatgcatcctcacttttctccatggatgattcaagggaacaa

SEQ ID NO: 15385 - DNA, 634 bp, Homo sapiens
  source 1..634: mol_type = other DNA
tcatggctgctgccctggggttgctccgagggctccctccagcccggcaggattctcggggccctggagtctgaccccgggttccccccctgtctagactgtgggttcccctagcaaagggttggggagtgctggctgtgccaagtttggctcggccctggctctgccctctcagtggtgtttcctggcctcagaggcagccccaaggtggcctgaggccgggagcaggccctggctcccctgtcacctacccagtgaccctgggcaggccctggaccctcgggcccaggcaaccctctcctgctatggaggcctcctcactgcctgaggccttcagggcagaggctgtgtggcaggccagggtctcccagaaggtggtggctggccgggtaagcccagctcaggggggagacatgggggcatggcacacaggccacactcagcctgggatcaggccccgtctgaggacaccgggtccagttttccctgggccaggcccttggaaagggccccatccacccacggcctgtgggctccagggagagcatggccagggtgcccaaggagacgaggaggaggctcctcatgcttcatgacccctcctgcaacactgtgcccgggtcagcccaggcat

SEQ ID NO: 15386 - DNA, 531 bp, Homo sapiens
  source 1..531: mol_type = other DNA
agggcttacagccggctgtgcttccaggagccctgagggagcccagccaggggaggggctcccagggaggggcactgggcccccagggcacactccagtcccggcaggggcttcacgccctgactccccgcagggtggaggtggccagcgggctgaccctgtgcaaggagggctgtgaggccattgtggacacaggcacttccctcatggtgggcccggtggatgaggcgcgagctgcagaaggccatcggggccgtgccgctgattcagggcgaggtgagcgccgggggctggggctggggctggggctggcagggggagccccaaggccaccactacctgtgagaaggtgtccaccctgccaatggggtgccgcacgccccaggtgagcgggcggtgagggggcgcacgctccaggtgagcgggcaagctaggcctgggtactgaccaccagggccgtcccaggtgtcgcaggccgggaagaccctctgcctgagcggcttcatgggcatggacatcccgccacccagc

SEQ ID NO: 15387 - DNA, 384 bp, Homo sapiens
  source 1..384: mol_type = other DNA
gatggggtcagaccagccctcagggcttacagccggctgtgcttccaggagccctgagggagcccagccaggggaggggctcccagggaggggcactgggcccccagggcacactccagtcccggcaggggcttcacgccctgactccccgcagggtggaggtggccagcgggctgaccctgtgcaaggagggctgtgaggccattgtggacacaggcacttccctcatggtgggcccggtggatgaggcgcgagctgcagaaggccatcggggccgtgccgctgattcagggcgaggtgagcgccgggggctggggctggggctggggctggcagggggagccccaaggccaccactacctgtgagaaggtgtccaccctgcc

SEQ ID NO: 15388 - DNA, 551 bp, Homo sapiens
  source 1..551: mol_type = other DNA
aggcgtggtagcacgcgcctgtaatcccagctacttatgccactgcactccagcctgaggagcttctctagaaaacgcgaatttcgggtggaatactttccatcggtgaggcctgagtctctaagcacagcgcccagagggagagggcggagcgggtccgaccccctttgcggcagtttccaggtttctctggaagccctgtagaggacagagctggcgccgggaggagcaggtgcaggagcccacggcgcagcgccccgcgcaggcctggacgcggggacggccgcggcggccgggacaggggtcaccccgcggggccctccagggtgggccgccccacgaccccaggccaggcaccccagaagctgggccgggctgaccccgcgggcgcgagcggcgggaactgtaggcgcggcaggcgcaccaccaccccgccccccgcccgggcgctgtgcgcgtgcgccgaggttgccccgcccaggccaggccccgctccgccccgccccgcgcacgccggccgcgcccacgtgaccggtccgggtgcaaacacg

SEQ ID NO: 15389 - DNA, 623 bp, Homo sapiens
  source 1..623: mol_type = other DNA
tcatctctcccacgggggccctggtgggtaggacccagctcgcactcacacagggcttggaaagctggggcagctccagggtgaccccaggaatccccagggggagcgcactgccaggaaacttgggaggctgagcgaagggccttcccgcaaagagtcagagggtgggggcgcggtgggctccaatgggctccctccctgggccacagcctcacagcacccagcgtcccagccaggtttggagcaggggcaggggtctgcagcccccagaggtgtcacacccctactgggaccctgtcccaaggcgatgctgacacatctgacagccaggccgccatgtgtcccagcccgggcagccagtgggtgggtggccaaggcagcctgggcagaacgcggtggagggccctggaacattcctccagcctgcacactgccctctggcagctggtccaggacatgcctctgtcggggactgggctcccacaccccgacaccccctgctctccaggcccctgtgtgtacagggaaggctttgagcacacggctccaaactgtgggtccccacctgcgtctgcccccactcggtgctgctagtgccagcagtatgaggcagactgtctctg

SEQ ID NO: 15390 - DNA, 492 bp, Homo sapiens
  source 1..492: mol_type = other DNA
ccctgtgctcctctggggacaaggtcaccaggctggcccgggagtgccgctggccggccgcggcaaatcactgcaggggagctctccccgcccggccctgacctttaatctcagcatgtatacaggctctgacattttgtttgaatctggccggcacagtcccgctccagggaccctgcggagcgctccgccagccacgtgtgggacgccggacccacctgggagtgtcccccaggagctgaggggctgccgaggcccgtgagcttcactgcacacccctctgcaggaaatgtgcagcatcttgttccaaaattaagaatttcaagatgccaagcagggacccctctgagcatggggccctgcgcacagggtgcagcctggaaagctggcctggggacaggctgggcttcccaggccatgctggcctccagagcctgctgacacagggtcaacatgcgtgtggggctggaacctggaccctccctcccctcc

SEQ ID NO: 15391 - DNA, 509 bp, Homo sapiens
  source 1..509: mol_type = other DNA
ctggggagtcaccctgggcctggggtcaccgtaggccccatgtagcaccctggttcccggtgacaggagccagcccagccaggtgtgctccctccccaggccctaggcaggcgggtacaggggccagcagctgcgcccgccccaccttccttcccacccacatgccgaagggtggccaggcaggcaggtgtctggccgctcccagctgcaccctgcccccaggcgctgcggccctgagcccctgccaggagacccctctgggcttccaagttcctgggggctgcagtgacatgctccacctgcatggctggcaaaccatggtgggccccagctgtggtgcggggacccccaggcagggcccagggtccagggcccaggagatcctggtggaggacgcatcctacagtgccggtgaaggcagggactaggctgcccaggccctgcctgcttggctggggctgcagctaagctggagctttggccagggtccagagcctcctggcagaccc

SEQ ID NO: 15392 - DNA, 415 bp, Homo sapiens
  source 1..415: mol_type = other DNA
aggtttccagcagggaagccttcgggctgccctactctggcccagccctgaccctggagccactgcgtggtcactcccagaagctggggacagtgagggctggaaacagcctccatccctcccctcgggctggcctatgcctcttgggagggtccctgaggcactgcctttagagcctggggccagcccccaaagccacctgggacccacgaaggctatgacctgggatcacagacgtgtttgtccctgatgctgcaggagggtggacctgatggccagagctactagcggggaccaggggtaacatgggtccccctccccgatttttttttcttcctctcctcttgtagcaacagattaaaaaactccaaacctcaacctgcagccggaaggggggtgggggctcagaagccgc

SEQ ID NO: 15393 - DNA, 408 bp, Homo sapiens
  source 1..408: mol_type = other DNA
cccatgaggagcatggagccatcatctccctgatgctcttcaggacagggaggtgaactttccagtgatccccactctggggctgcattgggaaagcgctcccaggggcccagtgtgaccctctgatgtgaccacggtgggccggacccccaagctagcccgccaggcctccatagagctgcccagcatggctgtggggtacaggctcagtctgcggccaagactccgtcctccctccaggggcaaggctgggctgcagagccagcgcctggggcagtagggttggcctcttccactgggatcacacagaaaaagaggccccctggccaggtaaggcaaggcgggagagaagggcccagggcttctactccccaacttctgctgcccccaggatattgtggctggaga

SEQ ID NO: 15394 - DNA, 613 bp, Homo sapiens
  source 1..613: mol_type = other DNA
ccaagagttatccaatctggtggcctcactggccagcatacaggccatcagaggccaggaaggatgtctgctaggtgccacctggagtcctgagggtctccacacgccacaatgagcctgtgggagatgctggcacagatggtaacggccactgcgagtgcccagggtggggccccccctgcaatggcagcagccccggggggaggtatggcagactcggactgcagccagcctggcgcctcatccatggggggtctccgaggcctcaggctgcttcctccccgggggagacagcgaagggcctggggcattgggccgggcggcgggaggggaccccggctgtgcggacccttttcctggagtttactcccacagaacatctcagagagaaggggcgggggggtgggaaacccggcagcctggctctggggacccccacactagtttggcccaaagagagcctcggcttggtgccccggggccaccccagaatgtacccgctgctgggagtaaaaatagcagctgacacctcctggaggcggagggaggaccttgcctccttctccaagacttggtaaggggcctgcacgggcatagcccccctggccaatgg

SEQ ID NO: 15395 - DNA, 594 bp, Homo sapiens
  source 1..594: mol_type = other DNA
ggggacaggggagggaggctgctgccctctactcccgaagggtcccagcagccctcctggccagcggacgggggtccctgtagagagggccttgccagagggccagtggccctctcagcgtggctggtgtggccagcgtgggggctgccaaccgggctggccagaagggcggggccctggggttccgggctcccaggggcttcagaccccaggcccggggacccgccctccccagacttccagctcccagcagctgcaagcgcagcggtgcggggccaggctgtggcctggagctgccaaagggcaggggcagggcgtgcaggccggggtcccgggaggcagggcagacaggcccgtgggcggggcgcgagcagcaggggcgcgggcccgggcttcaggctgtggggccgggagtgcggggcgggactgctgcggccccgcgtcctgtggagtctgcggcgcggggcgcggggcggggcgggcgcagggctggggacggcacgggcgcgcggcacgggcgctggcgcgtgcggggggggcggcgcggcctccggaagcgagggggcgctgtgccaggcggcggccgtgcggggc

SEQ ID NO: 15396 - DNA, 566 bp, Homo sapiens
  source 1..566: mol_type = other DNA
aaccccccccccatgtaacaggggggcagtggagcctcctggggggcactggccactgagcccccttggagaagtcagaggggactgtccggcctggcttctggggacagtggctggtccccagatcaggagggtgctcggaggccacaggagggggctcctggctggcctgaggctggccggaggctggggcagggtggccgccttccgcacacttgaggaaccctctccaggaggtccgaagctctgtggcaggcgggtctgagcccacagagcaggagagctgccaggtctgcccatcgaccaggttgcttgggccccggagcccacgggtctggtgatgccatagcagccaccaccgcggcgcctagggctgcggcagggactcgccctgcacgcagcccgactagcagtctagaggcctgaggcttctgggtcctggtgacggggctggcatgaccccgggggtcgtccatgccagtccgcctcagtcgcagagggtccctcggcaagcgccctgtgagtgggccattcggaacagagccaaattgtcacaattgtggaac

SEQ ID NO: 15397 - DNA, 246 bp, Homo sapiens
  source 1..246: mol_type = other DNA
atctaagcaactacgatacctgtctgtgccctgcctctcagaggagggggctcagatggtatgcccttgtgaggctggcctccttggcgcctgtccccacggcccccgcagcgtgagccacgatgccttactgtgtgttggcccagccagctccctggtgtgctcctggaaggaagatcttggggacccccccatgcccgtctcctggggaccccccaagaaatgtggagtcctcgggggccgtgc

SEQ ID NO: 15398 - DNA, 547 bp, Homo sapiens
  source 1..547: mol_type = other DNA
cagagggtttgccgaaggcgcggccagcccttccacatcccagagggcctgctgggtgattggacccgtgaactctgggtcccttggcccttgaggggtgaccgacggacccacagcggggtggctgggggagtcgaaactcgccagtctccactccactcccaaccgtggtgccccacgcgggcctgggagagtctgtgaggccgcccaccgcttgtcagtagagtgcgcccgcgagtgcccagcggcggcctggggggctggcaccgcgcccaccagggggtttgcggcacttcccgaacgtgaggaaggggccctctgtgccatccgagtccccagggacccgcagctggcccccagccatgtgcaaatatgtgcagggcgctggcaggcagggagcagcaggcatggtgtcccctggcaatgctcagccctgtctccggatgcggagggcagggcggaggtgggccctgcgggggccctcgggagggccctgctctgattggccggcagggcaggggcgggaattctgggcggggccacccca

SEQ ID NO: 15399 - DNA, 246 bp, Homo sapiens; identical to SEQ ID NO: 15397
  source 1..246: mol_type = other DNA

SEQ ID NO: 15400 - DNA, 356 bp, Homo sapiens
  source 1..356: mol_type = other DNA
ggacattagctcaagtcactgatcagtcacaggggtggcctgtcaggtcaggcgggcggctgagagcaggcacctgctgaccagcctggaagcagtccacccagcgcctgcgcaggggcctgcctgccctcctgcgtgcccgccggggtcacgtgctcgccaaggagctcgaggcgttcagggaggcccccgcccacgggggcgcccccccagagatggccagcaaaactgccgcaagtctgcagcccggcgccaccatcctgcagcctcgccccctccatcgggctgaggaagcaactaattggctttttagaaacacataaaggaatttggcaactttgagtcaaattggcctg

SEQ ID NO: 15401 - DNA, 553 bp, Homo sapiens
  source 1..553: mol_type = other DNA
cgcagggtggctgcgtccttccagggcctggcctgagggcaggggtggtttgctcccccttcagcctccgggggctggggtcagtgcggtgcgtgggacttccaggcaggcccgcaagccgtgtccgccaagtccgagagggacgtgtcgacccctccgaccgtgcttccggtgagggtcctgggcccctttcccactctctagagacagagaaatagggcttcgggcgcccagcgtttcctgtggcctctgggacctcttggccagggacagcagctcaggtggacattagctcaagtcactgatcagtcacaggggtggcctgtcaggtcaggcgggcggctgagagcaggcacctgctgaccagcctggaagcagtccacccagcgcctgcgcaggggcctgcctgccctcctgcgtgcccgccggggtcacgtgctcgccaaggagctcgaggcgttcagggaggcccccgcccacgggggcgcccccccagagatggccagcaaaactgccgcaagtctgcagcccggcgccaccatcctgcagcctc

SEQ ID NO: 15402 - DNA, 531 bp, Homo sapiens
  source 1..531: mol_type = other DNA
tgtgaaatggaggatgcaaatgcacttcatttgggggtaggaagtggcactgcagggcctggtgccagccagtccttgcccagggagaagcttccctgcaccaggctttcctgagaggaggggagggccaagcccccacttgggggacccccgtgatggggctcctgctccctcctccggctgatggcacctgccctttggcaccccaaggtggagcccccagcgaccttccccttccagctgagcattgctgtgggggacgggaggaaagaagggagtggttccatcacgcctcctcactcctctcagcagctccaggggtggtgtgggcccctccagcctcctaggtggtgccaggccagagtccaagctcagggacagcagtccctcctgtgggggcccctgaactgggctgggctggtctgggtcgcagggtggctgcgtccttccagggcctggcctgagggcaggggtggtttgctcccccttcagcctccgggggctggggtcagtgcggtgcgtgggacttcc

SEQ ID NO: 15403 - DNA, 557 bp, Homo sapiens
  source 1..557: mol_type = other DNA
aggtgggcggcagcgtcgccggcttccaggtaagcggcgtgtgcgggccgggccggggccggggctggggcggcgcgggcttgcgccggacgcccggcccttcctccgcccgctcccggcccggggcctgcggggctcggcggggcggctgagcccggggggacggacggctgcgggtcccgttccctgcgcggagccccgcgctcaccctggcggcggagctgggggtggggtgggggggtgccgcctcacatgcgggccctggcctccggggtgctgggtaacgaggaggggcgcggagccgcagaagcccaccctggtatgttgacgcggtgccagcgaggcaggagtcatggcagacgccacattcgcgacatcttggtctgaggctaagaagggcagagccttcgacccggagagaggccgcggcccctgcccagtgggcagcgtggaagtttccatacaaggaggtgggaaggagacccccccccccttcactgccctgtgcagagatgagccgggggtgcagggagcccatggcacttcgctacgggcca

SEQ ID NO: 15404 - DNA, 372 bp, Homo sapiens
  source 1..372: mol_type = other DNA
gcccaccagcgcctccatcgggcaaggcggccccgcgtcgacgccgcccgctgcctcgctgctgactcccgtcccgggcgccgtccgcggggtcgcgctccgccgggcctgcggattccccgccgcttcgcccgaggaggcggttccccccgcaggcagtccggctcgcaggccgccggcgttgtcaccccccccctccccccggcgcgcagcctcgggccgctcccctttccgcgctgcgtcccggagcggccccggtgccgccaccgcctgtccccctcccgaggcccgggctcgcgacggcagagggctccgtcggcccaaaccgagctgggcgcccgcggtccgggtgcagcctccactccgcccccc

SEQ ID NO: 15405 - DNA, 651 bp, Homo sapiens
  source 1..651: mol_type = other DNA
gcccctgcgaccgccgccccccccccggggccccagggcccccagcccgcaccccccgccccgctcttggctcgggttgcgggggcgggccgggggcggggcgagggctccgcgggcgcccattggcgcgggcgcgaggccagcgaggcccgcgcgggccctgggccgcgggctggcgcgactataagagccgggcgtgggcgcccgcagttcgcctgctctccggcggagctgcgtgaggcccggccggccccggccccccccttccggccgcccccggcccaccagcgcctccatcgggcaaggcggccccgcgtcgacgccgcccgctgcctcgctgctgactcccgtcccgggcgccgtccgcggggtcgcgctccgccgggcctgcggattccccgccgcttcgcccgaggaggcggttccccccgcaggcagtccggctcgcaggccgccggcgttgtcaccccccccctccccccggcgcgcagcctcgggccgctcccctttccgcgctgcgtcccggagcggccccggtgccgccaccgcctgtccccctcccgaggcccgggctcgcgacggcagagggctccgtcggcccaaaccgagctgggcgcccgcggtccgggtgcagcctccactccgcccccc

SEQ ID NO: 15406 - DNA, 642 bp, Homo sapiens
  source 1..642: mol_type = other DNA
ttttgacttggtaaaaatcacagtgcttcgtggtggcccccgagaccggtgggccgcaaaggcgagctacttagacgcaccccggtgagctctcctctggcggccggagcctccgtaggctccaagcctggcccagattcggcccggcgcagccggccttccgcgcgtcccgcacctggcgggggctccggggctccggcgcggcaccggggggcgctcgggatctggctgaggctccaagcgccgcgtggccggctcctcctgctggggcaggtggcggctgcgcgccccgcccgagcccaggggccccctcagccatctgcactcagacggggcgcacccgcagtgcagcctcctggtggggcgctgggagcccgcctgcccctgcctgcccggagaccccagctcacgagcacaggccgcccgggcaccccagaaacccgggatgggcccctgcgaccgccgccccccccccggggccccagggcccccagcccgcaccccccgccccgctcttggctcgggttgcgggggcgggccgggggcggggcgagggctccgcgggcgcccattggcgcgggcgcgaggccagcgaggcccgcgcgggccctgggccgcgggctggcgcgactataagagccg

SEQ ID NO: 15407 - DNA, 466 bp, Homo sapiens
  source 1..466: mol_type = other DNA
acaaaacaattgaggtttttttttttttccagtcccaggcatggaatgcgacctataagtttcctagctactaactaggtttccagaaatttagatatcaaatctccattgggtaatttcctccaggaaaatatatagtctttttcttatttaccaaaaataagctaatggaaatcatttaaaaattagcatagaaaaataatactgattttttatttttttattttttattttgttaaaacccggctgctgccttatattcttaagatgtgaaaattaatctcagcttcgtttggcaattttacgtaatatggctctacggcaaaattcccaatttcatatggagaattttcttaaattggtcccccaagctagctggcccctggagtctcgagtttagtcattaatcacggttcccacattaacggagtccccggggtcccctcctttgcgttccccaaaattt

SEQ ID NO: 15408 - DNA, 521 bp, Homo sapiens
  source 1..521: mol_type = other DNA
cccagggctctgagcccagctcagccccctgcccagcctgccccacagcctgagccccagcaggccagagagcccagtcctgaggtgagctgctgtggcctgtggcccaggcgaccccagcgctcccagaactgaggctggcagccagccccagcctcagccccaactgcgaggcagagaggtgagtgtctcaggcaccctgaggcctggcagagagggccacaggctctagcagctcagaggtgggcgcaggttccccgcagtctccacggcaccgaggtcctggcaggggagctcctgggaaggaaagctgggctctgctgggggctgtgagacccccgggttctccccgccccaggctgctggccatggggataaccagaggccttctgagcaaagggcctaaggggctccggcgtcaggatcccattgtggtcaggagcctgcgcccagccagtggcctctgcctcagccagagggagctctgtagtgggggcagcacccattcactggtcgctcca

SEQ ID NO: 15409 - DNA, 266 bp, Homo sapiens
  source 1..266: mol_type = other DNA
aaaatcccattttccctcctcccatgggagggcatggctctggggtccaatctggtggatgcttctatatgaaccctcacccagctgctgtcagtgagggagtgtctgaggtcagatcagacgtgaccaaactgcacagtacataactgtaccgggaagcccccacctcctagctggcagggagcttctggcttatgcccacgcccacaggcgcctttctgccaggtcaggggtgggccaaacctccacccgctaatgtaccatgc

SEQ ID NO: 15410 - DNA, 771 bp, Homo sapiens
  source 1..771: mol_type = other DNA
ggaaggtggggagaggctgccgagagccacccgctatccccagctctgggcagccccgggacagtcacacaccctggcctcgcggcccaagctggcagccgtctgcagccacagacctgagggacccactggtgccttggagtggggcaggtgcagggaccgtggcagcacctggcagggcctcagaacccatgccttgggcaccccggccatgaggccctgaggattgcagcccagggccagggccacaggggcagagaccagggccagggtccccctgcagccccttagcccaccccctcccagtaagcagggctgcttggctggcttccttcccagaagggcccacgggccctggtgacaaggtcgttgtggctccaggtccttgggggtcctgacacagagcctcttctgcagcacccctgaggacagggtggctccgctgggcacccagcctagtgggcagacgagaacctaggggctgcctgggcctactgtggcctgggaggtcagcgggtgaccctagctaccctgtggctgggccagtctgcctgccacccaggccaaattcctgagagctccacccagggctgggctggggatggctgggcctggggctggcatgggctgtggctgcagaccactgccagcttgggcctcgaggccaggagctcaccctccagctggggacctggccactggggcagccctgttcctgaagctctgagctcacccagctagccccgcctccagagtgggggccaaggctgg

SEQ ID NO: 15411 - DNA, 370 bp, Homo sapiens
  source 1..370: mol_type = other DNA
cctgctgaggacttgctgcttgtccccaggtccccaggtcatgccctccttctgccaccctggggagctgagggcctcagctggggctgctgtccggcagccagcagggaggggacccctccctcactcgggtcctggggacaggggtctggggacaggggtccctggggacagcagcgcaaagagccccgccctgcagcctccagcaggtgagggctttgctctcctggagacatttgcccccagctgtgagcagggacaggtctggccaccgggcccctggttaagactctaatgacccgctggtcctgaggaagaggtgctgaacccccccaccccaggccctaatgggccaggcggcaggggtcca

SEQ ID NO: 15412 - DNA, 431 bp, Homo sapiens
  source 1..431: mol_type = other DNA
ggtcctcaagggagttctcaggtcaccccagggtcaccctcaacccggggcctggtggggtcagggccctcagcactgagggacgtgcgtgctctttgccgtccctggccctggtcgccctggcaaccctgaaacgcgtggcgtcagggtcctccacactggacaggtgggccctcctgggacattctggaccccacggggcgagcttgggaagccgctgcaagggccacacctgcagggcccgggggctgtgaagcaaattgcctcctgacatgaggctggaggctgagggctgtggggccaaggggaccctggctgtctcagccccccgcagagcacgagcccctggtccccgcaagcccgcgggctgaggacccacccccgcctccatcaggcacagcaggcaggggtgggggagtcagctcagctta

SEQ ID NO: 15413 - DNA, 625 bp, Homo sapiens
  source 1..625: mol_type = other DNA
cacaaggcggtcgggtgcagacctccaggccctccgggttaaggtgccgcccagagccctcaggccgggggcgcacggaaaccagggcgggttggggaaggcgccccgggaacctgaacctcccaccctagctgcgctaggggacagcgcgcccagcccagtcgcgggggcgaggagcagggcggggcccagcaggaacccagctttgttagcgatgctccccgtgagccacgcgccacgcgtacgcgcttcctcaatggggccgggcgtggagccgcgccctgcgcgattggccaaacgggtggcccacgattggctgagaccctggcccccgcctcctcggccccaggagggtggggcgtgggtgtgggctgcgcggcgcgtgctgcccccggggatcttgcgcgcctcccgaacagccgtgttgtcgccagggccgcgccttccctcccacagcgcgcgctgcgcgtgcgaaggtctggcggctcaacccaggacctgcgtaccttgctttgggggcgcactaagcacctgccgggagcagggggcgcaccgggaactcgcagatttcgccagttgggcgcacgccggcgcggaggagggttatctatacatttaaaaacca

SEQ ID NO: 15414 - DNA, 548 bp, Homo sapiens
  source 1..548: mol_type = other DNA
cacctcccctggaagggtgctgctcccagagaccttcaggccaatggccctggggagggcgtggacctgaccgtcctggcacaaggcggtcgggtgcagacctccaggccctccgggttaaggtgccgcccagagccctcaggccgggggcgcacggaaaccagggcgggttggggaaggcgccccgggaacctgaacctcccaccctagctgcgctaggggacagcgcgcccagcccagtcgcgggggcgaggagcagggcggggcccagcaggaacccagctttgttagcgatgctccccgtgagccacgcgccacgcgtacgcgcttcctcaatggggccgggcgtggagccgcgccctgcgcgattggccaaacgggtggcccacgattggctgagaccctggcccccgcctcctcggccccaggagggtggggcgtgggtgtgggctgcgcggcgcgtgctgcccccggggatcttgcgcgcctcccgaacagccgtgttgtcgccagggccgcgccttccctcccacagcgcgcgctgcgcg

SEQ ID NO: 15415 - DNA, 536 bp, Homo sapiens
  source 1..536: mol_type = other DNA
gtcaccatggtggccacaggaggcccggggcatgggactgctgcaggagcagggagctcggccccagcgggcagggttggggctctctccagcttcccggtcccgtgagagacaggcgtggagtggtctcaggaggccttcactgcagacgccctgatcattgtgtctacggagtgggagtgagccccacccctgtgccagcaccctccggggcaggaaggggagaagatccctggagcccggcagccagtgcccctaggcctcagccccactcaggcctcctccaggctctgtgctgcccctcaggaggagagacggggttgctcatggtggtccctgcctgcctgcggctgtctgcaagggcaaggggagggataatccctgtgctgaggccctgccacccctaagaagcaggtgactgggcaggggcctcagaccgcagctcactgcccaggaggtaggctgcatccgcccccctaggaccgagctgctgggtgccccggaaggggaggggcagtgaggttggctccccccac

SEQ ID NO: 15416 - DNA, 566 bp, Homo sapiens
  source 1..566: mol_type = other DNA
tctcctggttctccctccgcagagggagggaggcggtggcctcagcagttcctccagcagcgttcctgagcgggcggcagctgggccctcttcccacagccacgctggggttgccatgcctgcaggtcttggggccccctcccccttgatgaggtcctgaccaaatgcaggaggagcgcaccgaggggcgagcagagccgcctgttagcactcctgggagggcccggagtggtccctgccccagaggcccacggaaaccctgcctgtactggggccgcagcgctgcccccacccgtgtaattgcaaattgagtgtgagcgaggccccagcccacccctgtggccccattaagctgtcacaggacatttcaaagggtgtttcctaagaacacctcaataatgatgccaggacggggagctcacctcctcctccccgggtggccacacaacgaggccatgtcttcctgggaagggcctcagatgtcagcaaatgccctggtgtccagggtgaggtggtggggggagccaacctcactgcccctccccttccggggcacccagcagctc

SEQ ID NO: 15417 - DNA, 504 bp, Homo sapiens
  source 1..504: mol_type = other DNA
ctggcaccattctggctgtgaggcgtccagctgggctcgtgccagccacccttgcacccgaggcccctcccgtgcagccaggcctggtcaccatggtggccacaggaggcccggggcatgggactgctgcaggagcagggagctcggccccagcgggcagggttggggctctctccagcttcccggtcccgtgagagacaggcgtggagtggtctcaggaggccttcactgcagacgccctgatcattgtgtctacggagtgggagtgagccccacccctgtgccagcaccctccggggcaggaaggggagaagatccctggagcccggcagccagtgcccctaggcctcagccccactcaggcctcctccaggctctgtgctgcccctcaggaggagagacggggttgctcatggtggtccctgcctgcctgcggctgtctgcaagggcaaggggagggataatccctgtgctgaggccctgccacccctaagaagcaggtga

SEQ ID NO: 15418 - DNA, 560 bp, Homo sapiens
  source 1..560: mol_type = other DNA
ggcggcagctgggccctcttcccacagccacgctggggttgccatgcctgcaggtcttggggccccctcccccttgatgaggtcctgaccaaatgcaggaggagcgcaccgaggggcgagcagagccgcctgttagcactcctgggagggcccggagtggtccctgccccagaggcccacggaaaccctgcctgtactggggccgcagcgctgcccccacccgtgtaattgcaaattgagtgtgagcgaggccccagcccacccctgtggccccattaagctgtcacaggacatttcaaagggtgtttcctaagaacacctcaataatgatgccaggacggggagctcacctcctcctccccgggtggccacacaacgaggccatgtcttcctgggaagggcctcagatgtcagcaaatgccctggtgtccagggtgaggtggtggggggagccaacctcactgcccctccccttccggggcacccagcagctcggtcctaggggggcggatgcagcctacctcctgggcagtgagctgcggtctgaggcccctgcccag

SEQ ID NO: 15419 - DNA, 594 bp, Homo sapiens
  source 1..594: mol_type = other DNA
acaggtcctgagtgcacacagcctgggtgtgaaagtcaggggccgtgagggactcctggggggctctgaatgggcctgtctctccatcagacggccctgagggaaggaggagggaggtgggactcgttcagcctgggggactgccctggggctatgtggccggactggagctgtcttatcagtctggacctggacctgggccccaggcatcctcctgccatgtccgtggccggactggagctgtaatcttatcagtccggacctggacctgggccccaggcgtcctcctccagggaggccctggtcctaggactcgggctgcagccttcctgggccccctgagctcctgcctgagagtcccctgcagatctggctctgacatcccctcggggtccctgcagggaggcgtctggctagagcagcccccaccccctccctgagtggaacatcagccatgtggagccctcatggacctgctgtgcccagccccaggccagtcccaggcctgcctgggactgagccctgactgcacagagccaggtcctgaccgcacagagccactgcccacgctcctgtggggcacgagaaccaggc

SEQ ID NO: 15420 - DNA, 582 bp, Homo sapiens
  source 1..582: mol_type = other DNA
acctggtcccacgtggttcccaggtaagagtaagtgcagcaggcctggccccacaccttccggagtgaggctcttcacactgttctgggagctgccctctcaggccccagtgaccagactcccacagcatgggtcagcaattctccccttccgtgagacagggattgggggcctcatgcctgcccaggttccagccccggagagcaatgtgagcaaagcttgctgtctttgcaaagcaggaagcctcccggaggtgctcacctcctttggggagccctcccacggcaccggggctgcactcctgggcagacgctgcatgcctgtcctcaggcgcggccctgctgccacccccttgggggctcggagcgcgacagcagcttggggacgcctcccgcgcccagcacggtgcacctgggccctgaggtcctggccgaaacgcgccaagttgggggtaggtgcagcgaccccatacccctcggctgcgcgccctggcggcaggaggcggggccgggggcggggcgtgagctggccggggcggggcctatggaggggcgggaccgcggcgccctataagtactgcgg

SEQ ID NO: 15421 - DNA, 464 bp, Homo sapiens
  source 1..464: mol_type = other DNA
ttgaggggccccgaacagggggtccttggagtctcaggggcacacagaggtactgaggcccagtggctaagtagctgggattccagaggcacactctgtcccactggcaccctgtcctgactccggatgcagggacagtcctcacagagcatccctggtgctgaccggtgaatggacatcactcacagctggcccacggctgtgcagcctttccagcagatgagacaccatgggggccgatgccccacggcctcgcagggccacagcagggaggagacagtccctctgcctccctgtcctccacaggacagctgggcccagcactgaggtgaagccatcgtggcctagaagccacaaatcggacatgcccccagggccttggtgccaatcacacctgaggacggccagcccttggcagctccctagggctggcattggctgcccaggtgccgttgggcccacag

SEQ ID NO: 15422 - DNA, 762 bp, Homo sapiens
  source 1..762: mol_type = other DNA
cctccctttcagggcgggcagctgacctgccccctgctgcggacaggcgaggccaggctgctggctcgcaagcatggcggagcccaaaccttccctgctgccgcccgcccagccacggctgacttggaagcttgaggagcgttcagcagcctccatcctgcccgggaggaccggggacctggaagggcctggccctcgcttccctgcagcgccctagggggacgtctcagtgcctcccggagcccggaccgccgggcagtggccccgaggacggcgccccacaagtttgcggccagggcccagcaaacccctaggggtgggaaagcgtcggcccagctagcgggtccagcagggctgcccccttcaccgtggcccagcggtcacgaccccacgtccgggaccgtgggatcctggggagccccgcctcggtgcactgacagagcccagaaggagtgacggttaccgcttccggtcaggaccggaagtgccgggaacggcattcgtccgtgcggcgcacttcctgcctgaggcggccgctgttctcgcggcttccggcaggtggcgctgagaccacgggaagccagcctggctgtcggttagccctccaaatgccgtcgtttccggggctgcttccgagccggacccaagggccggggcgtggagcgagcgcatgcgcacaggactacacgtcccgacaggcgtcgggagcggcggcccagttcagccgtggtgctcggccggcagagcactcggtttcccaga

SEQ ID NO: 15423 - DNA, 568 bp, Homo sapiens
  source 1..568: mol_type = other DNA
aactgcccaggcagccccgcctgctatgcccggcagtcaaaccaggtccagaccccggctgtgccgccacacagctcccactgggaggtacctgacagtggtggtcatctcaccctcccggtccaagggccctggtgggaagcgacccgagcgtattcgccgcccgcagctcgcgcgcctgggcacccgggggcgctcacagtgatcgcggggccagcactccccccaaccccaactccggagtggctcagagggagggaaagtagatgccggcaccctaccccgcccctcgccaggccttaccccttcctccctggcgcagctggggtcctcctccgggccaggcagagcaggcgggcggacaggccaagccaggcagggccaggccggtccgtggggagagggcgggccaagccggtgggcgcgggcagggacgccctgtgcgcgccggaccggcgggggcggggcgtgcaggcgggggcggggcacgccgtcccatgggaccggccctcggccactgccccctccggccccgccccgagcgcccgggctgggccggcagcggccc

SEQ ID NO: 15424 - DNA, 637 bp, Homo sapiens
  source 1..637: mol_type = other DNA
gggagggaaagtagatgccggcaccctaccccgcccctcgccaggccttaccccttcctccctggcgcagctggggtcctcctccgggccaggcagagcaggcgggcggacaggccaagccaggcagggccaggccggtccgtggggagagggcgggccaagccggtgggcgcgggcagggacgccctgtgcgcgccggaccggcgggggcggggcgtgcaggcgggggcggggcacgccgtcccatgggaccggccctcggccactgccccctccggccccgccccgagcgcccgggctgggccggcagcggccccccgcggcggggctggcagcagtggctgcccgcactgcgcccgggcgctcgccttcgctgcagctcccggtgccgccgctcgggccggccccccggcaggccctcctcgttatggccgcggcctcctccccgcccagggccgagaggaagcgctggggttggggccgcctgccaggcgcccggcggggcagcgcgggcctggccaagaagtgccccttctcgctggagctggcggagggcggcccggcgggcggcgcgctctacgcgcccatcgcgcccggcgccccaggtcccgcgccccctgcgtccccggccgcgccc

SEQ ID NO: 15425 - DNA, 479 bp, Homo sapiens
  source 1..479: mol_type = other DNA
ctccaaggcccacagtagaaaggctccagtctgtgtccaggcctctcaggtacagggactgtcagcccagctgtaagtgcatgggcccctttgccaaagccctgtgcccactgctggggaacgctggggacgtggggctgggtgggagcaaccccccatccgggtggctgtggccgaggtgtctccacagtgggggaccagatctctctctggccccaaagactgcttcaagcctctggaggagcactttgccccaggctggggcccctgtcctgggtggtactgctgcaggacctgggtttccgggagtcggagcctcactctcctggcctccactgggtccaggagtggcgatctgtgagccaatggccgtggctgggggcagcctggggtgttgagaggccctgggcagccaccttgcctgtggggccatctgatgccccccttttcttcagcgagaggatggggtgagccggccg

SEQ ID NO: 15426 - DNA, 359 bp, Homo sapiens
  source 1..359: mol_type = other DNA
cctgcagcggcgtccactgcacaggaagaactcaagtgctcataggcagtgagtcatttccttagcatcctccccgaagcctgcacccaggcggtcagctttgccagctgacgtcccaaacagctggcatggggcatgcacacagtaggtgctaggggtcagctctgaagctggcctccccctcagaggtcccagcctccaggatgcagtgttcagagcaatacttctcagtgcacgtctggctgtgggaggcatcctctgagtccagccctggggctggggacgcacaggctcgctggcccacaaccaaagccgcttcctctggaggaggaagtccaggggtgccagggttccacttg

SEQ ID NO: 15427 - DNA, 458 bp, Homo sapiens
  source 1..458: mol_type = other DNA
gggccacctggctctggagcctgtgcccagcccttgcctggggaggaggtggggcaggagtctccctacttagtgacagtcaggaatggtgcccaggccaagggcagggcttgggccaagttcctgctgctgctcctagcagccagggaagtgaggaggggcccagagctgtctcctggtcactcttcatcaggcccaaagtggacaccggtgctgcctgagggtcagagtgtccacctccagcagcccgggcaccgggcaggattcaagctggagggggctggggcgggcgaagccgggcacggggcgagcccgctggtgggcggggcaggggcgggtccttcgaggggaggggcgggctcggccagtgagagcgcagaaaccgtggcacgggcgctcccggaactggcgattgcaaagcgcgagggctggccagaggggcggtccctgttctcccg

SEQ ID NO: 15428 - DNA, 773 bp, Homo sapiens
  source 1..773: mol_type = other DNA
ccagcctggacaggcagatcccggggctggagtggtctggcccaaggctgagaagggctgggacccccgaccatgatgggctcagccccagatagcggcttcagactccagctccagggggctggtgggagtctctcaaggtgtcccacacatggtccctcggggaaagagtggagctgacccctgtcccccctcccgactcgagggccttagggccagcaggtgtgtgagggctccaggcgcgcggagccctcgaagggacaccagcccagcagcagcaggccgcgcgggggcagccgaagaccccatccggcgcaggccagggccgagctggcagcggcgggtccaagcctcgtcagctggcgcaggaggcccacgggcgagcgcgggacggagctgggcgccggggtccggaccgggccggggtcgagttgggcctggccggacaccggacccgccaggagccggcccctgccgcgctgggctgaggcccccgcctgcagacaaaggagccggcggggggcggcgagggggcgggcgtcgcggtgtcacgttaccgcccgcagcgcccctacagcgcgctcgccccgcggccgccaatcagccgcgcgccccggccgcgcgccccgccccgcccccggtgggtgtgcgcgcggccaatgggcggtgcgcgggggccgggccgcggcggggcggggcagcggggcggccgccaatcgccgttaatcgcggccgggcccgcgcgcacgggggtggggcccgcgcgtataggc

SEQ ID NO: 15429 - DNA, 584 bp, Homo sapiens
  source 1..584: mol_type = other DNA
tgatgagaaaagcaaggctcctgcccagccttccccacgggtagggaggagattcagggcttggccccagccatttagcaggagtgggcggggcgcctgaggcacggcggggagggatccttaggctcaccctcgggctgggagcctctgccaggcccggaatggtgccaaaggcccaggtccaggctctgagggctgagaggaggagggcagctgtctgagcccacgcacgccgggcttcccagaagcaaacacaggaagggccgaggttggccctgactctgcctgctctccagacttggtgaatataatttaatcattactattacagctacactgtggtatagactactgaatgatacactaaactaacatgaatttgaatgttaataagacagcattctatctcttgcaagaaaaagcttgagggtgcaaggagagcctctctgaggggtgatccgcccagagccacaccggagcccttggggccccccaggagggaagtggggtggctccccatggcttctcccggggctggcacactcagcttaccaactgggaggggccctggcagcatgaaaccc

SEQ ID NO: 15430 - DNA, 637 bp, Homo sapiens
  source 1..637: mol_type = other DNA
cccctgtgcgtgtggacccccagctccgagggagtggactctgcaatatttcaggttctgacatcagggtcagctcctgggcactcagcacggagttactccccatgactgaagccactccacctgtgctctgtgcccagctgtgggatgatgagaaaagcaaggctcctgcccagccttccccacgggtagggaggagattcagggcttggccccagccatttagcaggagtgggcggggcgcctgaggcacggcggggagggatccttaggctcaccctcgggctgggagcctctgccaggcccggaatggtgccaaaggcccaggtccaggctctgagggctgagaggaggagggcagctgtctgagcccacgcacgccgggcttcccagaagcaaacacaggaagggccgaggttggccctgactctgcctgctctccagacttggtgaatataatttaatcattactattacagctacactgtggtatagactactgaatgatacactaaactaacatgaatttgaatgttaataagacagcattctatctcttgcaagaaaaagcttgagggtgcaaggagagcctctctgaggggtgatccgcccagagccacaccggagcccttggggc

SEQ ID NO: 15431 - DNA, 672 bp, Homo sapiens
  source 1..672: mol_type = other DNA
ccctcgcccccaggctgatcccagagagcgggcgtcgcggcccagcccgaacccctcagctcctgggacctctctccggtccgggtcgtgggggcgcggtcggagcagtccgtaccccagttcggagggcgcagggaggagaacgggcttcctcttccccttccagttcccatttcacagaagcgaaagctcggtccgctagggcagggccactttcggagagggtctctgggcggccctgggaaaggcccccgaacaggactcgggagtaaggaagggggcctcgaccctccttctgccccgggagcccgagagcggcagggctggacttggggcgcctggagggtgaaggtctggtcccggctgtctccccacggtgggccggccccgggcccgcgggtgcttcccggggctccccggcgtgagtcatcgcgggcagggctggctgcagcgcattcttccgcggggccggcctgcgagacggtgcgggcgagcgcccgggcggggcgggacctcgagtcaccccacggggccggacagctggggcacggggcggccggggaccgaccagagcgcggacgcgacggtgcgggcccggacggctgggctatggcccggggcgcgcggggctcaggcgggcggggtggcccgagggccggggctataaaggcc

SEQ ID NO: 15432 - DNA, 580 bp, Homo sapiens
  source 1..580: mol_type = other DNA
cacaggctggggctggtaccttcaccccagcccagagggcgggagaacagggcgggcgaaacaggccagctcctccccagccctctgccctgctctgcttcagggggctgatctgagggcccagtgcgcactgcgtctcccgcaggccagaactaggctgctgggacactggcagtggctagtcccgtcctgtccgcggaggtgacccagccccgacctcttcgcagaggttaggcttacgtcccaaccactaacgttgaaaacggctcccaggcggaggggccctccgcgatgttctcaaggagtagcgcgaggcgcacggagtgctgggcaccgacccgccgcgccggggcccaccccagcgtggtgccacccggggaaggtcccgggagcggggacccgggaccccccggaaccacacccccgccccatttaaagaggcggaggaacgcagggcgcgcgccgcgcggaggaatatttgcatatactgcggcgcgaagcgcagttgacttgcgccgcgctcggcgaatcgcagcctgtcttgctcgcggagggagccggcgttgttggaggccacggc

SEQ ID NO: 15433 - DNA, 424 bp, Homo sapiens
  source 1..424: mol_type = other DNA
tttattatgaaatggttccaaaaagtaactagaagattttttactttttattttttgaggcagcattacaggcatgagccactaatcctggctaataatttttcttgacatattaaaattctgtttcttaaatagtggcagggcggtccctaggcctggagcgctcttcccgcccatccccaggccctgctccaggtcggcctcctgggctgtcccgaggccgcctctgacctccaggctgggcctggtccccacggcgcttagcgcaatcatgacacaccagcacggccatgaacgcttggccgcgcgatgctccggagcgcgggtctcccagcatgctccgggccggcgacatccggagcccctggtagttgcctagcgaccgggcgtgtcccggaagacgggcccggcgtggggcgcgact

SEQ ID NO: 15434 - DNA, 424 bp, Homo sapiens; identical to SEQ ID NO: 15433
  source 1..424: mol_type = other DNA

SEQ ID NO: 15435 - DNA, 419 bp, Homo sapiens
  source 1..419: mol_type = other DNA
tttattatgaaatggttccaaaaagtaactagaagattttttactttttattttttgaggcagcattacaggcatgagccactaatcctggctaataatttttcttgacatattaaaattctgtttcttaaatagtggcagggcggtccctaggcctggagcgctcttcccgcccatccccaggccctgctccaggtcggcctcctgggctgtcccgaggccgcctctgacctccaggctgggcctggtccccacggcgcttagcgcaatcatgacacaccagcacggccatgaacgcttggccgcgcgatgctccggagcgcgggtctcccagcatgctccgggccggcgacatccggagcccctggtagttgcctagcgaccgggcgtgtcccggaagacgggcccggcgtggggcg

SEQ ID NO: 15436 - DNA, 370 bp, Homo sapiens
  source 1..370: mol_type = other DNA
agtagaatttagaatttatttatttattattttatttatttatttatttatttatttatttgagacctgcctcagcctcctgagtagctggtttattatgaaatggttccaaaaagtaactagaagattttttactttttattttttgaggcagcattacaggcatgagccactaatcctggctaataatttttcttgacatattaaaattctgtttcttaaatagtggcagggcggtccctaggcctggagcgctcttcccgcccatccccaggccctgctccaggtcggcctcctgggctgtcccgaggccgcctctgacctccaggctgggcctggtccccacggcgcttagcgcaatcatgacaca

SEQ ID NO: 15437 - DNA, 339 bp, Homo sapiens
  source 1..339: mol_type = other DNA
tcaccagcatcggctggtgtgggacaccagctcatttcctccatgctctaggatgggaaggacaagagggcgtgactcttcccagagtcctcgtattccttctaaatatgtacattcttagggattcggcaggcagctggtcaggctgcctgtcgccttcccttcatccaaggccaggggagatgggggacagcacagagggagctctgtcgcccgtgccagctgcttcctcgcggggaagggccttcctcggccaggggagggagagctcagtatcccggcgttgcggaggtggtgttggggcggagcatccgcatctccgcgcccccgccgctgtgg

SEQ ID NO: 15438 - DNA, 438 bp, Homo sapiens
  source 1..438: mol_type = other DNA
gtgtcagtggcagttctgcctggggcccagggctctctgcgtggggatggacctgcagtgcacctcaggacgccctggggccagccctgggcccacacccaattctcagctcccaagaatgtcttttatatacaagagaactgaggggtcttcttggacgtacagttagagtgtgactgagggtccttctcagatgtcgggagaggaggcgcctcgcaccctggctagggtgggctgggggcctgcacccctaagttggcggagtgtcccgacctctggccgcccgggtgggtgtgagccccggagcgcgcgcggggggttggagaagcggcagccggtggggggcagcccctgggcgcccgctccgcgcggcgattcggcccgggttttgcggccgccgcgcctccccgccgcgccctcgctccgcctcgcgcgggg

SEQ ID NO: 15439 - DNA, 566 bp, Homo sapiens
  source 1..566: mol_type = other DNA
ttcctccatatctaaatgttggaggtcaaggctatggacagatctgaagatgttccacccttcgaccggaggagagatgtttgtagcaagaggctgttccctcacctctggctgaaaagggactttcagaccctccacttcctgacataagggaggttagacctcagagctgcactttagtgtgtaccccaaaatatatacttccttaccaattgtatattgaccatagaggaaaatggttacatactgggttaaattattacaatcaacttcacctgtttcttagtacattttaaaacgtggctactagaaaatttaagattcacacatggcttacattttaattcttagaggcttgaatcctttttgaaatttcaggctgtctgttcaaaggaccaaaaggccataaaatataaaaattcaaaatgattgtctttattttcttctttccattggtgaataacatatatttattatttataaataaacataaccgccgcggccagcacccctgtcactcagggcctgagggggcggggcgtgatgcatctagcggggcctttgtc

SEQ ID NO: 15440 - DNA, 572 bp, Homo sapiens
  source 1..572: mol_type = other DNA
tcggcgaccctccggccgctgggggaaggaggggtgacaaccccacctcctcctggctacctggtctgagcggccacgagagcggtctgggggaggggccggaccctgtggatctgcgaccaagggctctgtctctggcccaaccccactgaaggcgaatggggagagggcccatgctggagcacgtggcccagggtgtgggccaaatgcaaactcagtgctccgggggcgacctctcggccggcgggacccccgcggggcccctggcctggtgggccggggaccaggggccgaccgggtcagggcccgcctgagggagaggccgagtctcacccctgccctggcgcgcccgctcccggccccgcgtgcggcgctgggaaaggggtgtcgcggactccggactcctccggggacagcgcagcgcccgccagagccctcggcgctccctcccgctggcggcttccgcagccttcaagtgggtgcggagcgcggccccgcctttacagtctcggaaaggtccccagactggaggctcggggcggggggcgggcaataaactcccaggccccgcc

SEQ ID NO: 15441 - DNA, 415 bp, Homo sapiens
  source 1..415: mol_type = other DNA
ggattctgggagataatcctagctttcggcgaccctccggccgctgggggaaggaggggtgacaaccccacctcctcctggctacctggtctgagcggccacgagagcggtctgggggaggggccggaccctgtggatctgcgaccaagggctctgtctctggcccaaccccactgaaggcgaatggggagagggcccatgctggagcacgtggcccagggtgtgggccaaatgcaaactcagtgctccgggggcgacctctcggccggcgggacccccgcggggcccctggcctggtgggccggggaccaggggccgaccgggtcagggcccgcctgagggagaggccgagtctcacccctgccctggcgcgcccgctcccggccccgcgtgcggcgctgggaaaggggtgtcg

SEQ ID NO: 15442 - DNA, 409 bp, Homo sapiens
  source 1..409: mol_type = other DNA
tgctgggattacaggcgggagccactgcgccctgccctggagctgtttttcggattctgggagataatcctagctttcggcgaccctccggccgctgggggaaggaggggtgacaaccccacctcctcctggctacctggtctgagcggccacgagagcggtctgggggaggggccggaccctgtggatctgcgaccaagggctctgtctctggcccaaccccactgaaggcgaatggggagagggcccatgctggagcacgtggcccagggtgtgggccaaatgcaaactcagtgctccgggggcgacctctcggccggcgggacccccgcggggcccctggcctggtgggccggggaccaggggccgaccgggtcagggcccgcctgagggagaggccgagtctcac

SEQ ID NO: 15443 - DNA, 249 bp, Homo sapiens
  source 1..249: mol_type = other DNA
actgggactcagaatacagcctgctgaagcttcctcctctcttcctcctccttggctgaccagagtacaggaccacagccagtgaggaggcagttgtcccagcctggatccccatccgagctgagcgagcaattcctatcccttttaagggctcacaactctaagggggtccgcgggacagggatcttcacagtgcttttttatacaaataaccgattaggccaggcccagggtgtggcgtggttctgg

SEQ ID NO: 15444 - DNA, 444 bp, Homo sapiens
  source 1..444: mol_type = other DNA
acatttgtgattcaaggcattgaatccagccctcatggatgctttatagacaagcaaagaaagcagtttcttgagatggaatctactcctggtgaagatgctgtgaacagcaaaggatatggaatattacttaagcttagttgataaagcagcagctgggtttgagagaactgacttcagttatcttattttaagaaattagcaatgacttgctgaaggctcaagtgattaacatttttagcaataaaatatttttaaattaaggtatgtatattggttttttattgcacacttaataagtgacagtggtatagtgtaaacataacttttatatccactggaaaaccaaaaaatttgtgattttattgtgatacctgctttattgtggtggtctgaaatgaaacccacagtaactatgcacttgtgcagacattgtgctcaata

SEQ ID NO: 15445 - DNA, 511 bp, Homo sapiens
  source 1..511: mol_type = other DNA
agtaactctgaatgcaaatgtcgccctagacatttttgttgtaccttgctgcaggcctgaactgggctaaagtgattctctagcttcaacctcactagtagctatagagacagacaagcttgtctggctttaagcagatcatcctgcctcagcttcccaaagcattgggatcctagaaccactggttttagtgagctttgtttaatcaaaggagttactcagtttttggatattgagataaagaacttaagtatttgattttttttcctaggaaatttcaggagagagaatatttctgtaaagcatttatttgatactagaatttggggaagacctcaaaatgcaatatttaattctattatatgaacacgtttcctagaagaaaagactactctttacatacattgtgtggctataatagaaaaatcatcatctctgtcacagaatccagatgagcatgattgttatgctgaaagtagtttacttattaatttattgtctgctagcagaa

SEQ ID NO: 15446 - DNA, 422 bp, Homo sapiens
  source 1..422: mol_type = other DNA
gtagggcatctctaatgctcctaatgtccatcctagaaattcggacagacagaccttccaagagggccctcaggctccgcacgtggtctgggcgggaagtgcgggcagagaaggaagccttcccagcagcgccggcggaccggggcaaggaaagggtcgaatagttaccatgccattctggggccgtccctctgattggcccgagctccctcagcccgagtcgcggcgctccaaggaagggggcggagtctctatgttgcgtcaccacccagaggccctgtgtgacgtcacgacacgctcccgccaaccgcggcggcgaggggcgggactccacggccctctcaccgctcggtcgacccagagtggcggccgcgtccaccaattcgcggacggcgagggcggagcgtccgcaacgagcctct

SEQ ID NO: 15447 - DNA, 322 bp, Homo sapiens
  source 1..322: mol_type = other DNA
ctctctaactgtagggcatctctaatgctcctaatgtccatcctagaaattcggacagacagaccttccaagagggccctcaggctccgcacgtggtctgggcgggaagtgcgggcagagaaggaagccttcccagcagcgccggcggaccggggcaaggaaagggtcgaatagttaccatgccattctggggccgtccctctgattggcccgagctccctcagcccgagtcgcggcgctccaaggaagggggcggagtctctatgttgcgtcaccacccagaggccctgtgtgacgtcacgacacgctcccgccaaccgcg

SEQ ID NO: 15448 - DNA, 646 bp, Homo sapiens
  source 1..646: mol_type = other DNA
catgacggtcaaggaagtgcggggcagaccgtattcagggtttcaaggcgctgaccccggaaaggccagcccaccgtggggtccttggagacctccaggcctagacccagggcctccaaagccgggcctcccgggctccgggcccccgggtcctcagcaccgcccctctctcaggccagaaggtgcgcgcagcggcgctagacttcgaagcggagaggccctgagacgccccgcgcgtccgcccgcccggaaggggggagaaacctgccggtctcggccgctgcagctcgggctcccgacttaccgcggttcggtggggaaggggaagtgtcaggagtcccctgctgccacccgccgctcacagagcagcgcgcggcccccacgaaaccgtcgccgccgccgctaccacccctgccaccgaccgccgcttcgggcgcagcgcgcagagggcccgactgcgtcacacgccgcccggcgtcagaggctcgttgcggacgctccgccctcgccgtccgcgaattggtggacgcggccgccactctgggtcgaccgagcggtgagagggccgtggagtcccgcccctcgccgccgcggttggcgggagcgtgtcgtgacgtcacacagggcctctgggtggtgacgcaac

SEQ ID NO: 15449 - DNA, 150 bp, Homo sapiens
  source 1..150: mol_type = other DNA
ctaacttagaggtcctagaggggtccccctgctacgtaggacagggcgccctctgccagagtttcccaaccgccctcaaagttttccggctgccctcacgcagccgcggaggatctgggcgcagtttcctctctaagttccgccccgaga

SEQ ID NO: 15450 - DNA, 189 bp, Homo sapiens
  source 1..189: mol_type = other DNA
cagagtgctgggattagagatatgagtcattcaagtgaattaactcatgtaatccagcttttacagagaacttactatgtgcagggtgccatgtatttttatatcaacggcctaacaagccagtcagaggagggactgggcctgatcctttcccctgcgtctggtgccaaggacagggttgctgacagc

SEQ ID NO: 15451 - DNA, 617 bp, Homo sapiens
  source 1..617: mol_type = other DNA
attcctggaatcaatccgtttatttgaaaagcttctggaagacagggatcctgtcttaaacgctgtgtttctagcacttagcggtaggcgctcagaaactttgtgcaccagagggcgcccatgagcccgcccacccgcgggtcgccggggcccaagctggacctcaggcctgggtgcggctcttcagccccaagcagctgcgcgccccagcagaacagggggcgagggggcgagggaagccccaagtcctccgtccgccccgccccctccccagagccaggcctcgcagggctgcacggtgctgaatgacgtccccaggggtctggggcctaccaccacctcgcactcccccggggctcagggcaggggcggggactgccccagcctcggccaccactctatccctggggttgactgaagggaccaggcccaggggcgcctttctcagcatcttcccgcggaggctggtggggggcgcccagggtagggcctccgtggcaagcccgggactgggccgggggcgaggctgggggcgggccggggctggggggagatcggccctcggacttcctggtcgggccccgccccggcccgccccgcctcgccggcccgccccc

SEQ ID NO: 15452 - DNA, 544 bp, Homo sapiens
  source 1..544: mol_type = other DNA
catcccacttagctaacactcgcaggccccagtggccctcgtgggcctcccccggggcgggtccctccaccaggggccgctgcgcatgggcgacgaagcgcgcgggttcccaagccagcctgggaactggccgggagttgggggctgggagctcgcccccgggccgagccgggtcaggctgttgtcgcctcaggcagctcctgggaggctgtttagacagcagaagcagcaccaaggcccggagatcggggcagggcagctgctgtcgccgccgccgcaggcctgagttacctgagtaactgcgggtcagggacccgcccgacggcccgcggttggcgctggagactttgcgcgggatcctggcaaagactagcgcgggccgggggtccgggagagcccgctaggggcggggattccggggagccgtcttcaccggttattccgggatccagctgggcgctggggctggcccgggcttcgctggggaccgggcggcgcggggcgggcgcggagacgcacgcccccgcccgccccgggcccgccc

SEQ ID NO: 15453 - DNA, 419 bp, Homo sapiens
  source 1..419: mol_type = other DNA
ttttgaaattacttcacagggagcctgggctttgggggctctgatttgcgtcaggataaaatccaaacgccatcggtaaaagccctggggctccaagctgcccacggctgtggagcctgggctggagcccacagcggacggcagtgttagtattattataataaatgtcagagcaagaaaaacgttcccgccggttaggttttgttatttcaaaaataaattaaccgcctttcctccggcggagacgcgcaggtgagagggcggcgcctgacccagcgggctctaggtgctacgccagggccccgagggtcccgaagcatttccgccgggcatgtccatatccaatggggcccatggtgcccagaccagtctgtgaagcctaccccgggcgtgggccgcagcgtcgagtaacgtcattc

SEQ ID NO: 15454 - DNA, 376 bp, Homo sapiens
  source 1..376: mol_type = other DNA
aatgaataagatctagtattttatagcataacaaggtgaatacagtcaatgataatttatcattttaaaataactaaaagcatataactggattgtatataacacaaatgtgtatgtatcaaaatatttcatgtaccccacaagattgaaaattaaaaaaattactttggtaaattttatgttctatatttttacgattaaaaataaaaataatataaccttgacaagaacacagttggttgtcaaatgtcaatttccttctcaccactcactggtgggatattagtcacatcagtcacatgaaaataattagctcttctctcatcttccagacatgagaagcctcctgggcatgcagagcctctgaagcctcctc

SEQ ID NO: 15455 - DNA, 419 bp, Homo sapiens
  source 1..419: mol_type = other DNA
catggccggggctcagacactggcatgagcattctggagtatctgtcctaacaattaagatattatataatttggaaccgagcttcaattggaagatttcctgtattttctgcttattaaaaccatcactgtctagtaaaaacgaaaaaagagagggttttgttttgttttgttttgttttgtcagtatttaaagatgggtcacagaaccagacttggccaatctcaggcttctgagtttaacaagtcaaactggcatcctagaaccctctacagtttaagggaatctaccaattggctaggggtaccctggtccctgcctgtgattggctgcccccacaaacacaccgccccctgggcgaagccaacctgggcccagccggccgctcattggctgccgtcccgcgagcggggcctaga

SEQ ID NO: 15456 - DNA, 342 bp, Homo sapiens
  source 1..342: mol_type = other DNA
atgttttgaccggggggttctcacgctcccaaaagctcttgaattgatcaatttgatctgctactccatagggatggacttctgaactggttaaggggacattcacaaagccaatgccccctcctcctagaggaacttcccttaagggaaaaaggtttgcagccaatcctctagaggtagtggggaaaggccttcctaagggagggctggtagaggatgacaatagtctatttcctccagataggacttttgttattgacatactctattaaaagttgaaggtttgaggataggttctttggtccaaataaaaaatcaatattttatcatttgctgcttttt

SEQ ID NO: 15457 - DNA, 400 bp, Homo sapiens
  source 1..400: mol_type = other DNA
aacctaataagtaactaatgcacagagcacattgatttgtatttattctatttttagacataatttattagcatgcatgagcaaattaagaaaaacaacaacaaatgaatgcatatatatgtatatgtatgtgtgtatatatacacacatatatatatatattttttcttttcttaccagaaggttttaatccaaataaggaatctggagacgcattggtagacaaaactcttccacttttagtgcatcaacttcttatttgtgtaataagaaaattgggaaaacgatcttcaatatgcttaccatacgtaaatacactttttagtgctgagggtttgaagtccaactcctaagccagtgccacaccctagggttggccaatctactcccaggagcaggg

SEQ ID NO: 15458 - DNA, 565 bp, Homo sapiens
  source 1..565: mol_type = other DNA
tttgaattcagaaaagagtgaaaaacattccacatttttttttaagaacacatctgtaaaaatgttctgtactagcatattcccaggaacttcgttaaatttaatctggctgaatatggtaaatctacttttagtcataccataattttaaacattcaaaatatttgtatataatatttgattttatctgtcattaaaatgttaaccttaaaattcatgtttccagaacctatttcaataactggtaaataaacactattcattttttaaatattcttttaatggatatttatttcaatataataaaaaattagagttttattataggaagaatttaaactgcagcaatagatttgtccattctctctagagagaagaactttatattgagtcaacttgttaaaacatctgcttttagataagttttcttagtataaagtgacagaaacaaataagttaaactctaagatacattccactatattagcctaaaacacttctgcaaaaatgaaactaggaggatatttttagaaacaaatgaaggttcatttttcattctcacaag

SEQ ID NO: 15459 - DNA, 486 bp, Homo sapiens
  source 1..486: mol_type = other DNA
gtaagattccctgagaagtgaacctagcatttatacaagataattaattctaatttctaccatcatctttactgagcatagaaaaatacacatcatctggtgtatacatacatacctgaatatggaatcaaatatttttctaagatgaaacagtcatgatttatttcaaataggtacggataagtaagcattaggtcttatattatgtaacactaatctattactgcgctgaaactgtggctttatagaaattgttttcactgcactattgagaaattaagagatagagtatattcaaaaagaagtatagcactttttccttagaaaccactgctaactgaaagagactaagatttgtcccgtcaaaaatcctcaatccctgaacttttcaaaaattggtacatgctttagctttaaactacaggcctcccatgggttggccagccttgccttgaccaatagccttgacaaggcaaacttgggccg

SEQ ID NO: 15460 - DNA, 225 bp, Homo sapiens
  source 1..225: mol_type = other DNA
tgttgcctttagtctcgaggcgacccagtggcaatgttttagggcctaaggagtgcctctgaaaatctagatggacaaggaaatgaggaaaatgacttttctttattagatttcggtaaagttttaaaacatctatctgcatataaaatgctgctaatgcttcattacaaacttatatcctttcacagctcctgggaaatgtgctggtgaccgtttccatttcgg

SEQ ID NO: 15461 - DNA, 244 bp, Homo sapiens
  source 1..244: mol_type = other DNA
gataagtatagcacttcttatttggaaaccaatgcttacaatccctgaacttttcaaaaattggtacatgctttaactttaaactacacccatgggttggccagccttgccttgaccaatagccttgacaaggcaaacttgggccgttctggaacgtctgaggttactgtgcctggcaaaagtccaggtcgcttctcaggatttgtggcaccttctgactgtcaaactgttcttgtcaatccgg

SEQ ID NO: 15462 - DNA, 225 bp, Homo sapiens
  source 1..225: mol_type = other DNA
tacactgtaacagtttcagctttaaataatttcaatgtcccctgtggtcataagagaggattctctggaagcactggatgtaatcttttactttgggattaaggctttagtcccgtctccctagagaaactaaggtacagaagttttgtttacaaaggcaaatgttaaatgcgctttggctgtccggacctgactccacccctgagggacacaggtcagccttga

SEQ ID NO: 15463 - DNA, 425 bp, Homo sapiens
  source 1..425: mol_type = other DNA
tgttttccatgcaaatacatgtcttatgtcttagaataagattccctaagaagtgaacctagcatttatacaagataattaattctaatccatagtatctggtaaagagcattctaccatcatctttataaaaaaaatacttttgctgagatgaaacaggcgtgatttatttcaaataggtacgataagtagatattgaagtaaggattcagtcttatattatattacataacattaatctattcctgcactgaaactgttgctttataggatttttcagataagtatagcacttcttatttggaaaccaatgcttacaatccctgaacttttcaaaaattggtacatgctttaactttaaactacacccatgggttggccagccttgccttgaccaatagccttgacaaggcaaacttgggccg

SEQ ID NO: 15464 - DNA, 350 bp, Homo sapiens
  source 1..350: mol_type = other DNA
gtaggtaaagctttcaaggcggagggaagagctttcctgcagaagagctattatgtacaaaggcactaagttgggatctcagactagatccttgtttgcattcaaggatgccttccattaaccatgtacttctagggtaaaagtgatgctttccagtcccacttaaatatgtcttcacatgggtatattctatgtacatatgtacaagcatacatacaaaacacagtctgttaaatcagagtttttcacagtattttcctatcaagtgtaacttagagctgctaggatttggctctgtggccccacccatcccacctgttgtgggacgagatctgatggttttaaaaacc

SEQ ID NO: 15465 - DNA, 435 bp, Homo sapiens
  source 1..435: mol_type = other DNA
tgcttctcttcacagatgttgagaaggaacactgagtatggttactcctagatatataaagagtgtactaggagactcctcttccacagctttggatgtgtgcacagatttcagtctgaagttgatagaacttcaaaagcaattccaagtgctaccttctttcctttctaaaagatgaacaggaaggcacctcttattctactacattttactttttaaacaaagcagagaaaaattatggctgtaaatgttagaagtttatctgattttctttcttctcagaaaccaagagccatagctgcattaccaggtatactttaagttgcaggttattattggcaaaatacaatcattgcctttagtgattcatcacttgtgctgcatattctctgataagaaggaatttttcacaaagtttatctttgcgtctagtaa

SEQ ID NO: 15466 - DNA, 350 bp, Homo sapiens; identical to SEQ ID NO: 15464
  source 1..350: mol_type = other DNA

SEQ ID NO: 15467 - DNA, 401 bp, Homo sapiens
  source 1..401: mol_type = other DNA
tgctaataaactctggacttataatattaaactacaatactacatctccatttgtatgtaaaatagacatctcaaatgtatgtaaaactgtttaacaacctgctaatttagacaaagtgcttattcccaatcttttggggataacaatttcttttaaagtaaaaaaaaagttatctcatttgaaaatacgtaaagaattcatggttaatgttgactgagagatgttttataacattccaatcccagtctgagcctccacagaagtctccacaggaaggcacttgattcccagggatcccgagctccttagagaagtctcaaaatcttctctgtgtgaggctgtgacgtcagcactgaggtcacagaagggaccagctgactggtatgtacaccccagctgg

SEQ ID NO: 15468 - DNA, 441 bp, Homo sapiens
  source 1..441: mol_type = other DNA
tccagatttctaaatgttatacagccacaaaactcagattttaaaatctctatcatttttagctaatatgctaataaactctggacttataatattaaactacaatactacatctccatttgtatgtaaaatagacatctcaaatgtatgtaaaactgtttaacaacctgctaatttagacaaagtgcttattcccaatcttttggggataacaatttcttttaaagtaaaaaaaaagttatctcatttgaaaatacgtaaagaattcatggttaatgttgactgagagatgttttataacattccaatcccagtctgagcctccacagaagtctccacaggaaggcacttgattcccagggatcccgagctccttagagaagtctcaaaatcttctctgtgtgaggctgtgacgtcagcactgaggtcacagaagggacc

SEQ ID NO: 15469 - DNA, 487 bp, Homo sapiens
  source 1..487: mol_type = other DNA
ggtgataccttacagagtttctgtgagttctgaggctcaataagctttacatgtattcatcagacctaaataaaaacaaagattgtcttctagttatataggtcaaaattacagatacacacacacagctttatacatacatacgtgtaattttaaactgatgaattttaatgatcgtttggcaaaacatgccattatgcaaaggggcttttactcgtataactttatatgtttatttagacattttaattaatacgtctatatggagtacaggtgtattatcagtgtaattaaactctgatatgatattagaaagctacagtacactgcagacaatgagagagagtctcgctctgtctccaggctggagtgcaacctccaagcgattctcctgcctcacctcccgagtagctaggctgaggggtcactggtgaccacacccatggaatcggctggatctcctgcggggctggacaatttgaccctc

SEQ ID NO: 15470 - DNA, 339 bp, Homo sapiens
  source 1..339: mol_type = other DNA
atgagagagagtctcgctctgtctccaggctggagtgcaacctccaagcgattctcctgcctcacctcccgagtagctaggctgaggggtcactggtgaccacacccatggaatcggctggatctcctgcggggctggacaatttgaccctcttcccccctgagtctttcggcctgggtggaggacgcggctgcttcaagtccttggctctgatccaggccacagattccaggttagtctggccagctgtctggagagtttgacccgctctgcaggtcttctgcagagttaaacctctattctacaagctgaagtatgtagaggaggcagctctggaaa

SEQ ID NO: 15471 - DNA, 372 bp, Homo sapiens
  source 1..372: mol_type = other DNA
ctgaggggtcactggtgaccacacccatggaatcggctggatctcctgcggggctggacaatttgaccctcttcccccctgagtctttcggcctgggtggaggacgcggctgcttcaagtccttggctctgatccaggccacagattccaggttagtctggccagctgtctggagagtttgacccgctctgcaggtcttctgcagagttaaacctctattctacaagctgaagtatgtagaggaggcagctctggaaagcggcccgactcctcccagaaggagttgggagatgagcctccgtccgttcaacggccaaaggctggcggaggagggatcccctgcctttctcggaacggaacggagcaggccga

SEQ ID NO: 15472 - DNA, 269 bp, Homo sapiens
  source 1..269: mol_type = other DNA
cccaggctgatctcaaactcctgagctcaggcgtggtcaggcaccttcccaagggggatggagaatcagcctatcccatgtatatatataaaagatttgctaacagcttttctgagggcaaaggagtccttgtcctgtctgtccccatggctaggggtcgccccaattccttttcccttgcattcagagtacaaatgcaagggaatctgagacaggttagtcacaggccagtgatttacgtcacccaggaatcacagttgatgtctaga

SEQ ID NO: 15473 - DNA, 339 bp, Homo sapiens
  source 1..339: mol_type = other DNA
aaagattggactataaattctattttaagctttgtacaattataagacatatatcactcacatgagcttcatgtcatatgtagcaagtggacttggtactcctattacctaaaaagagcctctgcaagtacttattgacaaaagttgacatctactctgcataccataaaggccaacagattgccattatcaatattttgatgtcctcaaaacagtttcagtggtaaccacatgagttgccagagaagtacaggaatcttcagttctttgtcttatttggagaaagcattctgctttctctctctgccagaaaagaaaggatctttttcttggctttcc

SEQ ID NO: 15474 - DNA, 373 bp, Homo sapiens
  source 1..373: mol_type = other DNA
aatgtgaccaaacgagtggctcaaagcagccctttgcaatttactacttacaactagtggttctcagcattacctggaagacttttcatttttaaataatgttactgatatatatgttatatgcaataatatgcactactgtgcacagtttgatgagttttgaaaaagttttaccccttttaaagatttagagcatttccaacactcccaaaagtttcaaattttaaacacagcactattgatgtttggaatggatcattcttgtcccatacattgtagaatgcttaacattgccaaatgtgccatctagtgcaagagtttctcaggcagttcctcctcaggagggagggacttcttcacacagaggaacctc

SEQ ID NO: 15475 - DNA, 274 bp, Homo sapiens
  source 1..274: mol_type = other DNA
ctaccatcgaattgggtgatctttgtaaatcatttaattttatttattcatctgaagaaagggagtactcttatttctcaagaattatgaaatctccatatacttcttcactggaaaccacatctggggttctaaagttcagctattgaagaatttccaaataatggagataaagttttagaagttttttttatatgtttatcaaacattgtgcttctctgtgttctaaacactgaggctatagcagtaactacatgtagattatgttttagaa

SEQ ID NO: 15476 - DNA, 293 bp, Homo sapiens
  source 1..293: mol_type = other DNA
acttcttcactggaaaccacatctggggttctaaagttcagctattgaagaatttccaaataatggagataaagttttagaagttttttttatatgtttatcaaacattgtgcttctctgtgttctaaacactgaggctatagcagtaactacatgtagattatgttttagaagcaattagaatgctttttatttgtaatctgcctggagctgttgacagaacccttgagtctagactgtggccacagcctctgccgagcctgcactacaggctaatcagcatctggccaaca

SEQ ID NO: 15477 - DNA, 346 bp, Homo sapiens
  source 1..346: mol_type = other DNA
tagactatgaggcttatcacaaaccatggatttcttatttccatatttaaatcctagaaaatgtggagtagcacctcttgtccaggtgcatctcatacaccagtaaaatgtaataattgccttgtgccatattgtccccaatattttattgacatttgatagcaatttttttcatcattttccgtactcctaaggaaaactgacctataggtgaagatgaagaaaagcttttcaacagccttaatgaatgagttaaagagaaaatatcataaatggtatactcttaagtatagaggttttgtatctagaggatctcagttcaactcctgctggagtgcaatggcac

SEQ ID NO: 15478 - DNA, 310 bp, Homo sapiens
  source 1..310: mol_type = other DNA
aggtggctgtttcatctcatcattcagcaatttacttagggcatacctactctttccctaatctggagagaaaatgaatttcatttcagagctgacagaagtcacattatcataagccaccctgcggcttatcattattattataagatttatgattctccttccaagttatcaagatttctctcatatcacaaataaagttacattatatcccttagctgacctgttaatttttctacagttgatgtgacagtggctccaaacaacatttcatgtgctgtcatttctgaagataagccacagataatat

SEQ ID NO: 15479 - DNA, 421 bp, Homo sapiens
  source 1..421: mol_type = other DNA
acttattatgtctatttatacatttgatgaaacagtcattcactctgctgataataagagcaatcattgcaaacgtacagtgcatggtgagatttgttacactgcatttttgataatataacatgtaaggagagaatttaataaaatcgtactaacatcaaacatttgatcttggtagaaaagacctcagtctgttttctattcattgaaagtaaagaaaaatgataaccaatagataagaacagaatttgtcatatgacatgaactgaaaagcccttattactttctaattgtgcacaatagctactatggcttctggggaggaggtgacctgccctgagcctggactgcggccacagcttctgccgtagctgccctgtgtgaaagttgatcattgtgcacgccatggagagaaacttct

SEQ ID NO: 15480 - DNA, 277 bp, Homo sapiens
  source 1..277: mol_type = other DNA
aagaaataatgtggtatttctttatcgctcctcactccagtggcgcgctcacatagctgtcttaataatatgaaggtcctataagatttttaagtccagaccagaaatgccatatctgtcacccagaagcagaactcagctgtttggaagaatttcgaaaaagggcaccttttctaatttttaatactttgatcagtgggaatgcctctagttccggcccggctgattcattcagagggcgggccattggtgccctgagtgtgagcaagaatttcct

SEQ ID NO: 15481 - DNA, 606 bp, Homo sapiens
  source 1..606: mol_type = other DNA
atctcagtttcctgagtagctgggactagtcctgagtccacccacctgggcctcccagagtgctgggatccacaggcctccatcagtttttgatggcattatctggcattaattgattgtgtaaaaatgaccaaacttttcttagagaaggtaactcaatgaatgattataattaaacagcatcatctgttaacttcattctcacctgcctcagtggctgggtaacatgacactgacacagttttgtgataattaattgatggactcttaagatttaatgacattttgagaacatttttttcaatgggctcacactaaagatccttttatttataaaaataatttttttaccattcacaatgtcagctgctaatactcatcttgtcagcccaaatttgtagagctttataactgagtatctcgtcagactgcatttcaagaagctaggtcccaagtctctggatctttattttcctggcttaggtcttaaatataagataaattcgactaataattataggactgcattggaattctaagtattcaggcaagctgtataactgtaattcacattctttttattcaaatattcttgcttgagtaaac

SEQ ID NO: 15482 - DNA, 564 bp, Homo sapiens
  source 1..564: mol_type = other DNA
ccacaggcctccatcagtttttgatggcattatctggcattaattgattgtgtaaaaatgaccaaacttttcttagagaaggtaactcaatgaatgattataattaaacagcatcatctgttaacttcattctcacctgcctcagtggctgggtaacatgacactgacacagttttgtgataattaattgatggactcttaagatttaatgacattttgagaacatttttttcaatgggctcacactaaagatccttttatttataaaaataatttttttaccattcacaatgtcagctgctaatactcatcttgtcagcccaaatttgtagagctttataactgagtatctcgtcagactgcatttcaagaagctaggtcccaagtctctggatctttattttcctggcttaggtcttaaatataagataaattcgactaataattataggactgcattggaattctaagtattcaggcaagctgtataactgtaattcacattctttttattcaaatattcttgcttgagtaaaccagatgctagaacataatgtagcatta

SEQ ID NO: 15483 - DNA, 344 bp, Homo sapiens
  source 1..344: mol_type = other DNA
cccttaaaagggacttgctcactcgaggagctcggctcttgagacaggagtcttgcctaagttccctgtgactggacgatgagcagcagtctgcccgtcctgcggcctctctagggctatcaggaaaccttcaaaagggccttacttctgaagacgataagggctctcatccctgctgaacctcatcatgaggttgctttatgaaaagtgaatttgctgcctctgaataaaagaaatgcctagacatgtcacagtatttggaagaagattagttatctaccttatctaaagaaagttaaaatgtttagccaactgagtctagtttagattgtgtataaaaactt

SEQ ID NO: 15484 - DNA, 366 bp, Homo sapiens
  source 1..366: mol_type = other DNA
agacttctcactgtgaccacttcaagttagatgtgaagtataaagggactaggccaagactgcctcccaagagaggcaggaccacgttcctatctcaggatacggatcaggagcccaggtgatctcagcctgaccttcctgcatggttaagacatggtctgacccaaaagcggccagtaattattcatcaccaggagaaagaaattcctggcgcgccgggcaggtctccctgcttgactcctggcagactcaaccggtcaccagggccccgcggcgtaggctgcgggctgttctccttccggtagtctccccgcagctgaggtccgggccgggtcagggcgctagctggttaccagcgagcggacg

SEQ ID NO: 15485 - DNA, 514 bp, Homo sapiens
  source 1..514: mol_type = other DNA
tttcattgcaattgtaacccacccattaataatggttttcaacgtaagttatgcattaaaattgcctgaagagcttttagaatctctggcaccagtaattgatccaggtaattaaagtgcagccaaggctgggaccactgcttggttctcagtatatagtcatgcattgcttaacaaatccttaggcaattttatcattgcgcaaacatcatagagtgtacttacacaacctagatggtatagcctactacacagctaggctctatggtatagcctattgctcttgggctacaaatctgtacagcatgttactgtagtgaatactatatgaaattgtaacacaatggtatttgtgtatcaaaacatacctaaaccatggcattatactcttatggcgtcagaaaacactgttaggtctgcagctaactgatcctgtttccttaaagaactcagacctgcagtgaagctaggaaagtcactgtcctcccccccttgtagtggtttagggcccaag

SEQ ID NO: 15486 - DNA, 298 bp, Homo sapiens
  source 1..298: mol_type = other DNA
cctaggtggcccccgtagtaatgtacttattactccggaatcccacttattccgtgttccttgactaagtgctcaaggggtgacggagcagcacagcacagcggtgttgggggagcagtcaccgctgggggtcagccctctcagaggccttcgcctatgacacgccggagtcgagaggcggtgctcctccctcggatagccgtcggcgacccgctcagccaatgagctggcacgccattgcccagtcgtgcgacgccgggcggttgcgtgtggtgcgcgggggcgcgggctgcgtgtg

SEQ ID NO: 15487 - DNA, 350 bp, Homo sapiens
  source 1..350: mol_type = other DNA
cagagtactcatcagcagcctggcaatgactgctgctgtttatggcccctatcacactacctatgaaaaatagagctcacttctcatgtgagaggcatctctttgtctgagccattcagtaatagttgttaaataaataaataaacagagtgtttgatcctacactaaaactgaggtcttctgacccagaggacacctagagacaagactcaggcttccctctgaggatctcattagaggtgtttagctgggcaggtgtaagcccaggccctgggagacagggcagagtgctagagctagactgtctccaccccttcagtagcgctagctctggttgtgttgctaagagc

SEQ ID NO: 15488 - DNA, 401 bp, Homo sapiens
  source 1..401: mol_type = other DNA
caggcagctctgcctgcactgagagcaaacggagacggtggagaaagccaaccttctccttctcttttgcctgcgctgggccggcgttagaattatatctcctcccgggagcccttttccctggcaaggcttccctggagccaaatctcggccccggccccacccccactcccgcccagctgtggagggctccttgggacccttaagtgcaagcctgagtgttaagcctcaagctaccccaggcccgcagcgaggagctgcagggaactacggtagcaatagtgtcacggtcactgcggccactgcgcacgcagacctggtccctgatacaccagagaaagatgctggatccctctctctcattcctgggaatcgggggtgggggactcccgagccaggga

SEQ ID NO: 15489 - DNA, 385 bp, Homo sapiens
  source 1..385: mol_type = other DNA
ggagacggtggagaaagccaaccttctccttctcttttgcctgcgctgggccggcgttagaattatatctcctcccgggagcccttttccctggcaaggcttccctggagccaaatctcggccccggccccacccccactcccgcccagctgtggagggctccttgggacccttaagtgcaagcctgagtgttaagcctcaagctaccccaggcccgcagcgaggagctgcagggaactacggtagcaatagtgtcacggtcactgcggccactgcgcacgcagacctggtccctgatacaccagagaaagatgctggatccctctctctcattcctgggaatcgggggtgggggactcccgagccagggagcgcctgggctggg

SEQ ID NO: 15490 - DNA, 285 bp, Homo sapiens
  source 1..285: mol_type = other DNA
tgctgacattagaaattcacaatctagtctaacgcttttaaggattttaaaagaggtgaaggtgtgtccaagtcacaaagcggggcctcgggccttgacagttcgcgatagggcctccctgtcgcctgcatccagcctgggggcaaggggccgatttggggccaacaggcttcccagcaggcccccggcgcgggacagcggaaggcgaaacgctttcgccccagaaggccaactccgcctgcctgagtcacagctggagctggggaggagggcccctgaccgtag

SEQ ID NO: 15491 - DNA, 467 bp, Homo sapiens
  source 1..467: mol_type = other DNA
actagcacattatcatgtgaaggggtctgttaaaaaggcttaacttagtaagtcaaaccaccatattttgggtatggatttctgagccccaatataataggttgaagattattaattataaagtgcacataaatgctcgcttttactgtcgtggatacacggaggtgggagacccaattgggttcccgcccatgtttctgaatcacaggtgagtgattctcttcctgtcagaggcaacacacccagtgggaggatcctgcccgccctgctccaaagcacgagcacggcctcccgcggctgtgacctcaaggcggagcccctggtgacctcaggggagtccccacccccgcagcccgtgcgcccggggcagggcgggggcagggagagggggcggaatcggggcggtcccgggagcgccccgccccctccgcctccgcagcgccaccgagagatcagctgtcagctgc

SEQ ID NO: 15492 - DNA, 487 bp, Homo sapiens
  source 1..487: mol_type = other DNA
gaggctttctggatggtaatataacctctcattactgactgtgacctcttaatcttagcctcagcctctgaaaaatgaggataataattctggtgattttacagagattaatcgcgttacctccccaccaggacgtcagggagcggtgcagcaggagcggcgcagagtgcctcccgggaatccttccccgcgcggccgcggcgccgcacagccgccgccattcgggctccagccccgtccgcgcgtctcccggcgtgggtgcgggaccagggcgctgcggggcgcgcacggcgccgcgctaggcgggggtcccaggctggaccgcggggctcaccgaggtccgagggccgcccgcagggtgaggcccccaagaagctgcggcaagtgccgcgcccgccgagctcgctcccgcgcccgccccaagatggcgcccctccccctccccttgcgcgcgcctccgccgctcggggcgcggccccgcggcccg

SEQ ID NO: 15493 - DNA, 402 bp, Homo sapiens
  source 1..402: mol_type = other DNA
tgaagagggttctttttcaccccagtgaaactccttaaaagactaataaagggggacactgtgtctggggaacacagtgagaccccctctacatgtctgtggcccaggtactccgggggctgaggcgggaggaatctgagccctggaggctgaggcttcagagagccatgatcttgcccctgggtgacagagtgagaccctgccttgaaagaaagaacgaactcagatttggatatctttgaggctttctggatggtaatataacctctcattactgactgtgacctcttaatcttagcctcagcctctgaaaaatgaggataataattctggtgattttacagagattaatcgcgttacctccccaccaggacgtcagggagcggtgcagcaggagcggcg

SEQ ID NO: 15494 - DNA, 303 bp, Homo sapiens
  source 1..303: mol_type = other DNA
atttcaagttttagtaagtaaaatggcttcattgagtggttaaataaagctttttcccccaaggtggaaactaccaagaaagactaattactagtagtggtggtgctctctggaagagagacacctcctgttgcaaagccctttgccagtcagggaagtgtgaagaggcttgggcatgccccagaaatgtctctttgtggagataaactcagctggacgtcagcagtgtagcccacagatttctgatgtaatcagccaatattggcttagtcctgggactgctgccaactctatatagggagt

SEQ ID NO: 15495 - DNA, 488 bp, Homo sapiens
  source 1..488: mol_type = other DNA
cacagctgtccgcagcaattgccttagtcgggggcatcagccagcagctgcaggagcgcaaggcagaggccctggcccagatcagtgcagcgttcgaggacctggagcaagcactgcagcagcgcaagcaggctctggtcatttgtggggccaaacagaagtgctgtgggcatctgtgtcctctgtgttcatcggcagtagctgcagctttgcagagcaggcactgcgcctgggctcggccccggaggtgttgctggtgcgcaagcacatgcgagagcggcctgcggcgatcggtgctcaatctgggcgcactgctcaccacgagcggccacgggagagggcctgcgccaggcgctagtgggccagcctgcctcgctcactgtcactaccaaagacaaggacgggcggttggtgcgcacaggcagcgctgagctgcgtgcagagatcaccggcccggacggcacgcgccttccggtgccagtggtgga

SEQ ID NO: 15496 - DNA, 288 bp, Homo sapiens
  source 1..288: mol_type = other DNA
ctgagggtgggggaactgggcatgggccctcccaggctgcagcccacagggagaaccccttcagggtgggcccagccctacccccagcagcactcacctgtggaggcagcctaacccctctctgcactggggagaatgccttcgtgctcccccggggaggtctgttcctcccttctgccctcaggagcatcaacacattggtcaccaagaccatcgctagctgagtctaggcccccgggatgcagggacacgtggtctgagagtgcccaggccactttccaggcccat

SEQ ID NO: 15497 - DNA, 367 bp, Homo sapiens
  source 1..367: mol_type = other DNA
cgtccagagctcggtggtgcaagctgggcacacagcgctggaagcagagttctgtcatccgattgtagaaggtcgcgccgcccaaagtttcccaggcccgcgcgccaaatccctggccctgtggggttcgcagttgctgttgctgctgctgctgccgctccatcacgcccggaatctcgagagctagctcgagccggcttcttctgcccggagaggacgtcatttccgccgagtccctgacctgctgctaggatcgcgacgggaactggagcccgaggtccccgcgcggcccgggcctggcgccctgaggggaagagcggcccggcccgacctgtccagagggcaagatgccccgagccccggggaa

SEQ ID NO: 15498 - DNA, 490 bp, Homo sapiens
  source 1..490: mol_type = other DNA
ctggttgtagggcctaaaaacagggctcaactccaggttcatccctattttttcccattgtaaaattgggctaataaaagatgctacctactgactattaaataatatatgtaaagtggctagttctgtggcacatactgttacaattctgagaattgtccctcaggagggggctcctgaagcgcccatagactagcacataggagggaaagggcgcctccaggaggcaggcggcccagacaggctcccagagtctcccggagccggaggcagctggcggagatccgggatccgagatccgggatccggctcgccggcccgccggctccctagcagcaccaaggaggcagcgtccgcaggcggggtgggcggggcctccgcggcggcgggcggggcgtgggtgggtcttccctactggagtcaccccctcccccggccggtccgcagccccgccccggcccctccctccggcctgtgcggctagtccggc

SEQ ID NO: 15499 - DNA, 407 bp, Homo sapiens
  source 1..407: mol_type = other DNA
gggtcctttagctgcctgatggagagaccccaggctgttcagcagcaacgcctggcacagccgaggcagcctcgtagtctgcgatgcggcgcagcttcccagcacagctgtgcagacactcctttcttccccatgcccagcctaggggtgagggtcgtggggggaagcagtctaccgctaaactcttctcgtccagagctcggtggtgcaagctgggcacacagcgctggaagcagagttctgtcatccgattgtagaaggtcgcgccgcccaaagtttcccaggcccgcgcgccaaatccctggccctgtggggttcgcagttgctgttgctgctgctgctgccgctccatcacgcccggaatctcgagagctagctcgagccggcttcttctgcccggagaggac

SEQ ID NO: 15500 - DNA, 347 bp, Homo sapiens
  source 1..347: mol_type = other DNA
gcctcctctgctggtgattatttctacactcattcagcagacatttagtgagtgcctactatgtgtcaggcactattttgctctcttagaacttatctccatgcaggcgtgtttatgctgaggagatgaaccctttccagggctcaggtttccccggggctcggggcatcttgccctctggacaggtcgggccgggccgctcttcccctcagggcgccaggcccgggccgcgcggggacctcgggctccagttcccgtcgcgatcctagcagcaggtcagggactcggcggaaatgacgtcctctccgggcagaagaagccggctcgagctagctctcgagattccg

SEQ ID NO: 15501 - DNA, 428 bp, Homo sapiens
  source 1..428: mol_type = other DNA
gcaggtcagggactcggcggaaatgacgtcctctccgggcagaagaagccggctcgagctagctctcgagattccgggcgtgatggagcggcagcagcagcagcaacagcaactgcgaaccccacagggccagggatttggcgcgcgggcctgggaaactttgggcggcgcgaccttctacaatcggatgacagaactctgcttccagcgctgtgtgcccagcttgcaccaccgagctctggacgagaagagtttagcggtagactgcttccccccacgaccctcacccctaggctgggcatggggaagaaaggagtgtctgcacagctgtgctgggaagctgcgccgcatcgcagactacgaggctgcctcggctgtgccaggcgttgctgctgaacagcctggggtctctccatcaggcagctaaa

SEQ ID NO: 15502 - DNA, 212 bp, Homo sapiens
  source 1..212: mol_type = other DNA
cgccgcatcgcagactacgaggctgcctcggctgtgccaggcgttgctgctgaacagcctggggtctctccatcaggcagctaaaggaccctgtccttaagtctgactgacttcagtggctcataaccgtgacatcaaaaaaccacagggcttttgggcactgcctccttgtaagaagtctggagtctttttgagcagtaaaacctttgaac

SEQ ID NO: 15503 - DNA, 408 bp, Homo sapiens
  source 1..408: mol_type = other DNA
aacatgttgacttcaggcttatggacatctgatctacagaactgtgaggtactacataggtgttattagtttgtaataacttgttatgcagctccagaaaacttgtgggggttctccagagaaacagaactgataaccaggaaatctggtggtggaattcaatccaagtttgaaaaaacagcaagtccaccagctgcctgtttaaattctgtttaggcaacagattgtacaatgcccatccacattggtgaggatgatctttagagcatcccttatagctcgcgcctgtaatcccagcactttaggggtgaggtgtcgagaccagcctggaataacagtcataacttgtgtatctcctaactgatacacaagcagacagcacagcttgtatgtagtctgtccttcagc

SEQ ID NO: 15504 - DNA, 164 bp, Homo sapiens
  source 1..164: mol_type = other DNA
ggacattttaagtttgagatacctataagctctccagggcagtggcgccagtagctgggactgtctcgatcttaatttttaaaaatgttgagctccttgagatcaaggtttagatactcagcgaatggatataaacagtactgcacgtgcagttcagactggtc

SEQ ID NO: 15505 - DNA, 140 bp, Homo sapiens
  source 1..140: mol_type = other DNA
cagtagctgggactgtctcgatcttaatttttaaaaatgttgagctccttgagatcaaggtttagatactcagcgaatggatataaacagtactgcacgtgcagttcagactggtccctccttaggctgtgggcgaagac

SEQ ID NO: 15506 - DNA, 404 bp, Homo sapiens
  source 1..404: mol_type = other DNA
gctatgcttctagcgtagccaggagatctctagccacaggcgaacggcgactgcgttgcccgcgtcccggcgccgagtcccctggattggggaaaccccaagctttatcctctacaggagagaagtgagaccctatccgcgaacagagtactctgggagaggggaccgggggtcctccccagggttggctccgttccttacttgagtgaggggtgacagggggcgcgggtcctctcgcactcaccgggactcgggctgcaggatccttctccggggaactcccgtccggccgcgcccgcagcccgccgccggccccgccccgcccgtggcgctcttgggcagcgcgggcctccgtcccctagccgcgcctggctaaactcgatggttcgctgcgccgcgccggc

SEQ ID NO: 15507 - DNA, 457 bp, Homo sapiens
  source 1..457: mol_type = other DNA
tctgtgttgcagtcctacctgaagaaataattccattgcttaaaaccttacttgaacagcatatatgcccctttcatatgtatttcaaccacaaggaccacttgtgtttgtgactctgacagaacatgctctcttgtcccagggcggatcttcagatcacagcgctgggatccaccggcggaggtcgtgagattacgggcccaaggcccgcggctactggggccgcctcggcccactcaggctcttcgaacatgagggtcgggagggcagggtcgccgagtccccgctcttctccacgtgcacagcgctcctctggaagtcggagcgctcagacctgccagaaccgagccaggggttgctagagcggccggcgcggcgcagcgaaccatcgagtttagccaggcgcggctaggggacggaggcccgcgctgcccaagagcgccacgggcggggcggg

SEQ ID NO: 15508 - DNA, 341 bp, Homo sapiens
  source 1..341: mol_type = other DNA
gaaaacccttcaaggattactggatagaattcattaagtaaaaaatcaattcttgcaagactcagtatggctgaaaaatcctagattttctaaacaaaacctgtttgaatcttggttctgatatggagagagactgggtcaagtaagcttatctccctatatcaatacctgcctttcataatcactagtattgaaatggccagtttcccaggtcctagctcaggagttggcaaataagaatgttgactcaggctgaaactcctctacagcagcactgtgtgccgccccactgctgcccccacctctcggggcagctggcggagaagagaggggtccttaaa

SEQ ID NO: 15509 - DNA, 358 bp, Homo sapiens
  source 1..358: mol_type = other DNA
tggctgaaaaatcctagattttctaaacaaaacctgtttgaatcttggttctgatatggagagagactgggtcaagtaagcttatctccctatatcaatacctgcctttcataatcactagtattgaaatggccagtttcccaggtcctagctcaggagttggcaaataagaatgttgactcaggctgaaactcctctacagcagcactgtgtgccgccccactgctgcccccacctctcggggcagctggcggagaagagaggggtccttaaacgctggttccggtctggacggaatcgccgcggagcacggcaggtcgtgggcgcgtgacgtcaccccggggtgtgcgcggcgcga

SEQ ID NO: 15510 - DNA, 199 bp, Homo sapiens
  source 1..199: mol_type = other DNA
ctcccgatctctaccctcaaatttgggataaagagaaagaaccgggacgggggcgcggcgcggcgctggggccggatccggagccggggcctggggccgggaagcgcggcggcgcggagcgcgggtgggggcgggggcgggggctccgcgggcggaggggcgggggctcgggttaccgcgcggggggagggggcgcggg

SEQ ID NO: 15511 - DNA, 495 bp, Homo sapiens
  source 1..495: mol_type = other DNA
taatctataggttaatggaagccagtggcctgtttaaaatgacactgctgacaccatcttccatattgaatcctcagggttttaactctcattgaaactcagacctccttgtgggctccaaacaggaccccagctgattgtagatctccatttgaataaaaggatcctggtcttgcaaaagctttactctgttcataaatgtagtcgtaaaatgaagacaaaattaaagaggaaaaaaattttttcactgcaatctttcgaggcagatcacttttatataagtctccatattgtaaatgaaccccagtctgtgggtctctacagcccactcacttgtggtgattcccaggggaccaggctcaggacgcaggtggggagccctgggcttactcagtgcttgactggccagaggggagaatccgggtggcggccccacccttgcctagcatttgggaccacccatgcaagggaggagccagtaccgtcactagttac

SEQ ID NO: 15512 - DNA, 555 bp, Homo sapiens
  source 1..555: mol_type = other DNA
ggcctgcatatatgtatgtacgtatatatgtgtctatctatctagctagctagacactaggcatgacatctgcaatgaccctatttccacataaggtcacattctgagttactgcaggataattttgacagtcattgccaatttaggctcaaaaacaaactataatattattgttcattaacacataaatgtgtaggtatgttttttccccttaaaaagacacactggtgtaattaaaaacaatctactacttttccctttagtgctgtaatttttttaactggagtgattacttcaataaaagaaaaatttcacaaatcactgtgttaaaaacaatgcgtacaggtgtcaaccaggccagctggccactgctggacccggtagggccgtcagcccgcaggaccccgaaccctccgggtgccggagtctccgcggcggagcgccccatcgagggggcgcctggttcttcggccgccacagagcgctctggatgcctgaagcccgcccttcccgagattgccaacgaggcaggctctgatgcgcatgcgcaaacat

SEQ ID NO: 15513 - DNA, 480 bp, Homo sapiens
  source 1..480: mol_type = other DNA
accccatttaattaagaaactatgaaatgttaattcagtataaagggctattatcctcagaggtgaactcaccggtttcttggaagaaagctagacttagagttctctgtctgcttcctatcttgaaaatggccattaccaaaaccatttctcattaagatgatcaactgacatattttagttttctattgctgcataacaaattaccacaaacttagaggtttgaaatggcacacatttattattttgtagtttctgtaaccagaagtccaggtaaagtacagctatgttctctactttaggatgtcaccagattgtaatctagtgttgactgagatcatggtctcattagatagtattaatgctgttataaaagggtgatttcagccctcaatgtaaacatggtccagttcccatatgaacatggtgttaaccttacagcaggaagttttgcactgctctgaggataaactcagtttc

SEQ ID NO: 15514 - DNA, 232 bp, Homo sapiens
  source 1..232: mol_type = other DNA
attaccttctcaatttttccaaaactgtaaatccaaaactgctctaaaaaataaggtctatttaaaaagaaataaaagaaactatatggtgtgtccttgtttttttgtgatcatattatcatgtacttaatgccaccaagcatttgtgacacactagccccagacatctctaaattgaatggaccatgtaagagacaatgtcttgtcgaaattgtcattgtttttctcaccg

SEQ ID NO: 15515 - DNA, 253 bp, Homo sapiens
  source 1..253: mol_type = other DNA
ttcaatctaacaagtctgttacatagttactattattattggctatcaatattacgcctattaagatttgaatccaaggagtcccttgcttgtaatattttcctaatataacacactcagctatacacttgcaactctctgtggtcccaggacactgaggaggggcttctaaccttgagttttaggtttcctcgcccgagcgcccgcagctcccgcccgcgcaggaatgccagcggccaaaggtcgggaggcg

SEQ ID NO: 15516 - DNA, 524 bp, Homo sapiens
  source 1..524: mol_type = other DNA
ctcattggtaaaatgttgggctatgtacagaattaaatgagattatgtacctaagcttgtggcacagtgacactatttctaggctttactgcttgaaagggtggatgagaggtgccctgaggttccttccaactctcactttggcaatgtttggatttccaaacggttgcttagaaaactaaaaccctgcatttgggcatctgacacccataggcccatggttcaaacccaggcggctctttccaagttcgaagcagggactagcgaaagcgcccggagcgcgcactcactcacactccccaagccagggcgcggccgctctgggcgcgaggtcccaagccaagtctcgcgctcggccaggagccggggagtaccccaggtccccggtctggggccgccgctcctgcggcgcgcactcctgacctggccccgccccccggcggccgcgagtagcgggcggagcgcaagcagagaggcgctctgggctgtgcggcaccgcctctcctcggtgtctggggagggac

SEQ ID NO: 15517 - DNA, 312 bp, Homo sapiens
  source 1..312: mol_type = other DNA
agaaatatgatttctatctcttttaaaaaaattttgtggatacatagggtatctattagcagaaccccaaggcgtcctggcctttcccatggaaaggctcaaagattttaccaccttgtcctagggttataatttatcttcaattggaccagggcctgcaggagtttagtcctacatatttctggcctgcagctagaagcatcactgtatcaatgattgttgttagctccatcctgagatgtttcagctgacagcctggatggccaggcctgtagcctgcccaaggggcgatgtagccctgtgcactgtgga

SEQ ID NO: 15518 - DNA, 376 bp, Homo sapiens
  source 1..376: mol_type = other DNA
tctcttttaaaaaaattttgtggatacatagggtatctattagcagaaccccaaggcgtcctggcctttcccatggaaaggctcaaagattttaccaccttgtcctagggttataatttatcttcaattggaccagggcctgcaggagtttagtcctacatatttctggcctgcagctagaagcatcactgtatcaatgattgttgttagctccatcctgagatgtttcagctgacagcctggatggccaggcctgtagcctgcccaaggggcgatgtagccctgtgcactgtggaaaaggatcctgggaatttttgccagaaactaaactgagagtccaactttaagggaagggaacggggggaagccatcttca

SEQ ID NO: 15519 - DNA, 401 bp, Homo sapiens
  source 1..401: mol_type = other DNA
tttgtcgacactccagcctgtagagaactaaaggctagggctgtggtgactcctgccagagctggggactatgcgagtccctccttggaggcctgggcagggcccacacgctggaggtaggggctggaccagatctccagcttcagtcctccttggacctaaggtcccagaccttggcgctgggcacagggaaatgaacttttgtttggtgccaaccactagagccaccccaggttggattccctgtgaccggagagactgggagccggagcgccgggtacccacccgggcctccccgcaaccggagctgtgcggaggaggaggcgcggcgaacggggcggggctcccggaagggggcgcggtccgccgagagaggcggggctggggcccggacgcgcggc

SEQ ID NO: 15520 - DNA, 420 bp, Homo sapiens
  source 1..420: mol_type = other DNA
ctgagccacagctctatgtctgatgagagcagccacattggccaccttctcttttctaaggaagagcactgcactcctcccaggagaggggagaattttccaccatcctgtagaggcataccatatgataattcttaacccagggcatgaagtttttggatgaatttcttcatttgacttgcctgccatagcacgggcagggaacctgggctgggtgggtcacactgtgctgtctgggcagcaaagcctgcttgtgggctggcccagcctgccggggactgtgctgtgaggggcatgcggcatgaggggcatgaaggactgctcttcagactgggagttccaggaaaccccggaggtgacccccggaaggcccaggcagtcacaagctgtgcatctgcaagtcctttgccacagcagagc

SEQ ID NO: 15521 - DNA, 531 bp, Homo sapiens
  source 1..531: mol_type = other DNA
tccttggaggcctgggcagggcccacacgctggaggtaggggctggaccagatctccagcttcagtcctccttggacctaaggtcccagaccttggcgctgggcacagggaaatgaacttttgtttggtgccaaccactagagccaccccaggttggattccctgtgaccggagagactgggagccggagcgccgggtacccacccgggcctccccgcaaccggagctgtgcggaggaggaggcgcggcgaacggggcggggctcccggaagggggcgcggtccgccgagagaggcggggctggggcccggacgcgcggcccagggggtggggacgaggcaggttcgaaggggcggggctgaccaggccggtcccccgggaacaggaaccctggtggacgggtcccagcaggcttcttcggtgccctggcggtcccggggtgggggcgcggcgctccgggaagagccttccgcaggtccccgccccgtcacgtgggcgccggccccggccgctgcggtcggtccgctggtt

SEQ ID NO: 15522 - DNA, 442 bp, Homo sapiens
  source 1..442: mol_type = other DNA
cccgccccggaccaggcccagggtaggcgccctccagccttgccgagcttaagtaagctgaggggcgctcagtgggggcagcgcaggagcgaggacgccacggctcagcgccccgccagcctcatgatggagcgctgccctgggggcagggctgacccagagccagcggctcgtgagtgagagccccccgaccacggcccttctcggggagcgggccagccgccggggtcccagcctgcggggtccgcccgcgcttttgtcctcccgggcgtgcgtgtccgggtctcggccggttccccgtcggccaggcggagctgcggggcgacgccacgagtctgcgggcccgcggcggggagcggcccccggccaaccccagttcgacgacgtgttgggcgtctcactccgatatctccgtcgggacggcgaacgtccgacccgggcc

SEQ ID NO: 15523 - DNA, 295 bp, Homo sapiens
  source 1..295: mol_type = other DNA
aaaatttttctcatttctcatgtggaacagttcctgagacgatttctgagatgatcaaaaattaggaagggacagtctcacttttaaaacttaaaacttggccccaaggcgggcagatcacctgaggtcaggagatcgactgcaattccagctacttagatcatgccactgctccccagcctgggctccaaaaaaaataaaataaaaaacttagacttttttttcttaatccatccgtctaaggaggcatacagacgtgtcacctgactaagaggcagaggggaatgactaggaa

SEQ ID NO: 15524 - DNA, 277 bp, Homo sapiens
  source 1..277: mol_type = other DNA
actgctagctttttccaccttctaatagcctcccaataggctgttttagaaggccaatacctcagctctctaggccagaggactggtacaggcatgcactcaccatgttgatcaggctggtacaggcccatgttcaatgtttctcaacttcaacatttgaaaaaatgaggtcaagtttcccactggtgagcaattgcccatcccattgacagtcatcccactgacattcagtggggcagatggggaggggcccttctgttccaggcctatatactag

SEQ ID NO: 15525 - DNA, 353 bp, Homo sapiens
  source 1..353: mol_type = other DNA
ctaagagctttacaaggcaatacctcatataatcctctcctaaagtacagactagtttatttattacaactccacttgaatgtgtaatggacatctcaaaggtgacacattcagaaatgaaatcaggatctgctcctacagcctattgaaactaccttcaaaataggagaaatccagctgagcttctgggctcaaacgcctggccttaaaatcctttttaaaggcactttgacatccattatctcatttaagtctaaaacacgaattctggttccacctggcggcagctgcacaaaacgccgtcccaagttttacccggaactacttagcccagggtttcctgagtgctcctt

SEQ ID NO: 15526 - DNA, 182 bp, Homo sapiens
  source 1..182: mol_type = other DNA
tgatgccaagatctgggcaacagagacccctcccagcacacagcctgagccctagcacagagctggccgcatagtaacccacagatgcagagagacttggcctccgtgttgccatggaaaccagcaattgtgtccctgttggccactgagaccttgaggattcagtctggtcctgaagggtt

SEQ ID NO: 15527 - DNA, 300 bp, Homo sapiens
  source 1..300: mol_type = other DNA
cggggcagacaagaaggcgcgagctggctctccctgccccacgtcagacaagctcttccctggctgagccattccaaaggatttttagtagtaagacttccacccaaggagggcgcctctgcggaagggccccgagtggcgacagcggatccgggactcccccctgtcccgggaaggcgcccaggctgccgcagccgcgcccccgcgggacccgagcgagggggagggggcctcacgggcccgggtccccgcagtcgcgcgtccccgccattggcagagccggagggggtcaccccccgg

SEQ ID NO: 15528 - DNA, 314 bp, Homo sapiens
  source 1..314: mol_type = other DNA
agattacatactagaaatttgcaattccccaggaggtgggggtgagggaaggccaacctccacgcttcggcccggaggtgggaggcctggggactggcccggctgcagcgccgccgttagccgaaggtgggagccggcgcggtcacgcagggggcaagggcgctccgcaggccctgagccggccggggggtggggtctctgcgagggagaaggggcaggccgccgctgccacgcagtactcccgccttggcgccagaggggcgcgggacggtgcggtcggcctccccgcctccacgcgcgcgcacgacccgcgc

SEQ ID NO: 15529 - DNA, 237 bp, Homo sapiens
  source 1..237: mol_type = other DNA
ttttttgtttggataattatctgtcctacaaagggaatccattttattaaacgtttcgagagagcagtgtttttaagctgttcttcagagaagtttttgacaattaactattgttctgaagagaccgccgtcaactcccgacagtggaggtgaagatgcgtgcgcctcgcgcaccttgtccctcgcgcgacgccgtccgcgccgcccgcggttcggtcgggagcggcagcccgtgct

SEQ ID NO: 15530 - DNA, 501 bp, Homo sapiens
  source 1..501: mol_type = other DNA
gcagagcccaccaggagtgctccccagctggctagagctcctcccctggcagttcagggctggcctccctccaccgggagctcgaggtgggacaagctcgggtcttgttccctctatgtattccctaatagaaagcacaatgctttaagcagcacggagtgcctcggccctcacgctccagcattagcaggaggggagtgcttctgcttccttttttttgccaaatcatgcagaagatgctggcagctgtaaatccgttaattagctaattaatattcaattggggcttaatagaacctttcttggagacccaagaagcgagcaggcccttatcgggctgccagctgtccccgaacaatgcgggcccttatcagctggggcagcagccctggccgctcgctccggctccctccgcccagaggagcacgcagcctctcggcgggccccctgattgattgccattggccaagtttctgctgtcagaaggaccagccaatggca

SEQ ID NO: 15531 - DNA, 348 bp, Homo sapiens
  source 1..348: mol_type = other DNA
tagaactgtgcttggcacataatacatgctcagtaaatatttgtagaatgagaaaagctttcaaggccatgcctgtgcttgcttcgagagaagttgagataagctctcccgctccatctagaagcctccaggtggcgctgcggagccggacagccgtgcgtctccactccccattaacccgggagggtccatctctttgaatataattttagattgagattcagattaaatccgatgtgtcgttgccagagacattatactgggcaaattgagccatttagaaggtgagaatcaaagaaacggctctgatcctcttccttccaattctgaggcacaaaagtaggtgag

SEQ ID NO: 15532 - DNA, 359 bp, Homo sapiens
  source 1..359: mol_type = other DNA
gagaccagcctggccatcccagctactcggctggagcttgcagtgagccgagatcacaccactgcactccagtaggtggccttcctagggtaggcagccagaacatcagccccaggattctggggagaagcagggtccaggagaagagggcactgtctcttttcctgcctttagaactgtgcttggcacataatacatgctcagtaaatatttgtagaatgagaaaagctttcaaggccatgcctgtgcttgcttcgagagaagttgagataagctctcccgctccatctagaagcctccaggtggcgctgcggagccggacagccgtgcgtctccactccccattaacccgggagggt

SEQ ID NO: 15533 - DNA, 194 bp, Homo sapiens
  source 1..194: mol_type = other DNA
gcactgtggcccagcctgggtccagacccccgtggggctgagcatgccgcgggccacgccgggtcccagtccaggcccactgtccccagacccgccctcacacgcacacactctggctgtgcttttgtgttttgtaataagctaatggatctgagcataatgaattgatttaattaacaggggaatctgagggg

SEQ ID NO: 15534 - DNA, 460 bp, Homo sapiens
  source 1..460: mol_type = other DNA
cagctaattttagagaacatctgcctcaaataattaggctagtattaggagtcttctcactgcagttcaaggcttgcagcccttgctccaactggctggggatcacctcagtactgtgatcctgctacaaagctttattttacgtaacacgtgctgcccttgggcgcgcctggggctgcacctgggtcacgtgggcgccgttgtgcagccggcacctcccggccaaccccgcggcttggagaaggggctttgcgccgcggttgctctgcgggctgaaaagtttctcccggtgcagaattccgggctcagcgacagcctgcgccgagtgtgcgcacctgtcggagacccgccagtccgccggccgcggtgagtggtccctggagtcactggctcagggcgggcccgcgggatggggcgggcggcccggggcgcagccggccaggccgttgctatggcaacg

SEQ ID NO: 15535 - DNA, 262 bp, Homo sapiens
  source 1..262: mol_type = other DNA
ctccccagctaattttagagaacatctgcctcaaataattaggctagtattaggagtcttctcactgcagttcaaggcttgcagcccttgctccaactggctggggatcacctcagtactgtgatcctgctacaaagctttattttacgtaacacgtgctgcccttgggcgcgcctggggctgcacctgggtcacgtgggcgccgttgtgcagccggcacctcccggccaaccccgcggcttggagaaggggctttgcgccg

SEQ ID NO: 15536 - DNA, 439 bp, Homo sapiens
  source 1..439: mol_type = other DNA
ccagcatatattatactctttgttattttagagtctcctcttttcacttattaaaaaaagttaactgttaagcagcctcaggcaggtccttcaggaggtatcagaagaggatcataggagatgacagctccgtgcttgttattgcccctgaagaccttccagaggaacaaaatgatattgatgatccttatcccctagatgtgtatgtgtcttagtttttaacaagaaagtttaaaaagtaaaaaaattatagaataaggatataaagagataaaatatttttgtaaagctgaacctgtatttgtgttttaagctatgtgttattaaaaagaagcaaaaagttaaaaaaatgtaaaaagtttataaagtagaaaggtcgtttcctccagatgcactccatagaaccatggggaacaccagggctctccaatcagcaggg

SEQ ID NO: 15537 - DNA, 343 bp, Homo sapiens
  source 1..343: mol_type = other DNA
ttctggagaaaattcaaaaatagcatttatttttacttatttactttaatgtggcatttagaaaaagtatttacaacatctgccaatttaagttgctcaaaccgggagccgcccgagcttcaggaaacgcctcgcggttccgcactgcggccgagtgcgcggggcggctctcagacaacgaggcccttagggtcggcttaggcggttccctgaccaaggcgccagaaaagggcctgggcgtgcagtacagcacaccacactccgtgatgggggatcacccgcgcaatcccgcgagaccaggaggccccgcccgaagcccggcctctgtgaccggaagtgaggc

SEQ ID NO: 15538 - DNA, 283 bp, Homo sapiens
  source 1..283: mol_type = other DNA
agaccctgtctctgtagtcccagctacttcagaggctgaggcaagaaatttaagaagaataataaataaacttgaaaaaatggtcataaaaatatctgtgcagtgtcccagggactgtgctcattttctgacaggagcaatattattaccgactgtgacagcagctcccactaagcctgcaccttagctgcagatcctggtccttggtccctcctacccgagctccaggacccagaggaagctgggtccccttcaagcgcttcagctagctccgagaaaacaa

SEQ ID NO: 15539 - DNA, 355 bp, Homo sapiens
  source 1..355: mol_type = other DNA
cattacacactggttccttagaaatgtaaatttgtaaagtcaatgtaaaactgaaacttcaaaagtcaattttcattgctgctgattatcaaattttatttacagtgatttacgtgagtaaaaaatggattacacgatttcctaacatctttggatcttaagtaatttattgattttaataaatcacagattctcagtgctgttattcaaccagtggagtatttaaagtaaaatttcagaatcccttgggagttctgctgctgctgcagtaccaaaagtagcttctttgacccgaggcccgcggtcaggcagctttgaagagccgctttttattgaaaccatctggactccaggg

SEQ ID NO: 15540 - DNA, 289 bp, Homo sapiens
  source 1..289: mol_type = other DNA
aggcacttgtcttccctggagtgcagtggcgcggtcaccccgagtacctgggactacaagggccagccccacgcccagaggctcctctgacagcgtggacagatgccctgggctgctggctcgactcagtcgcccccgacccccgacccccggcccccagcgcccggcgccccgcctccagcgctccaaggctgggacgcagaaggcgtgtttggccgcccagccgccccgcctccccccgccaatggcccagctgcgccggcgccgccgggagcgctaggcctggtcc

SEQ ID NO: 15541 - DNA, 502 bp, Homo sapiens
  source 1..502: mol_type = other DNA
tcccaaaaggctgtcagaggctctcagaactatcagctttcttattcaggcataggaagaaagagaaaggagaggttcaggcgccactgcctgaccaacccctggggccagacggggatggaaggggtgactgacacccactctacccctggaggtggtactttggcctccctatccacatggatctgccaactgaaacaggatgtgggggagacacatccaaacgtgcctgcataccaggctgttatagacaaacaggcccattagactaggacaaattctatcctagagtccccaggccgccagtggctccccctgcctctagtgtgtacagggaggacgccctcagtttctgcggaggtggctcctccctcacaggagtctcctgggatccgtgagggctactgactcttccagcagtggagcagcctggtgcactcactggccacagacgacagcgtccccaggctgcacccatggtaaccggcgtggcaaccaggaa

SEQ ID NO: 15542 - DNA, 562 bp, Homo sapiens
  source 1..562: mol_type = other DNA
gtcaaatgtaaagcgttttgaaaggacttttccattcattgtaagggaaggtttgcttctgcgctgcgcacccctggctcccagcgggctaccgcggcgcgaaggactggggcggcccccggcacagcgaccctcacctctcccgggagaacgcgctgcgggccggctgccggctgtttctctaggtggggcgcctcccgggcaaggacccccatgcagcctttgggacgctccagggcatgcctccagcacttctagagccagccttgctgaacgctgcagggaacgtcgtcagcgctgcggccgcccagttgtccatggctccctgagtgggcacaacgccggcgggtcagctgggccgcggcgaccctgctccaaatccgggtgggagccccagcctcgacctccctggagaccactccagcgggagcccagccaggactaggcctagcgcgcccgggaccaggcctagcgctcccggcggcgccggcgcagctgggccattggcggggggaggcggggcggctgggcggccaaacacgccttctgcgtcccagccttg

SEQ ID NO: 15543 - DNA, 558 bp, Homo sapiens
  source 1..558: mol_type = other DNA
cataatttgaaatccatagggaaatatttcaatgcttgacagccctggggagacaggtcggcagccctgaacaggcactgccttgggcgtagtgccccaattcgccacctcttggagtcctaggcggaggatactactggggctcccggagcctggcctggcccagcccagccccgtcgctgtgacccacttcctagctgcaggctggaccaagggggggagctccacagggagcgagggcaacccccaaccctttgactggcggtgggcatcccggaaaggcatggctcggccaattccagcacccgccctgcctgtgcgcgaacggctccggcccgcacgggtcgccagaggcgactgtgtgacactcggagtttgctggggtctccgtgggcgggaggactttccagcgcaatggcgactcgccaccccagaggcccccttccgtcccggggccggggctaggccaaggcgggcaccaggactgcccagcctcccggcccttcgcactggtaaccggttccggggcggatgctttttgcatctgacccggcgcgc

SEQ ID NO: 15544 - DNA, 440 bp, Homo sapiens
  source 1..440: mol_type = other DNA
ggctaacacagtgagaccctgtctgtgcgggtggcgggcgcctgtgtcccacctgtgagccgagatcgcgccactgcactcatctgtttacagaggtaaaaacggtattatcataatttgaaatccatagggaaatatttcaatgcttgacagccctggggagacaggtcggcagccctgaacaggcactgccttgggcgtagtgccccaattcgccacctcttggagtcctaggcggaggatactactggggctcccggagcctggcctggcccagcccagccccgtcgctgtgacccacttcctagctgcaggctggaccaagggggggagctccacagggagcgagggcaacccccaaccctttgactggcggtgggcatcccggaaaggcatggctcggccaattccagcacccgccctgcctgtgcgcgaacggc

SEQ ID NO: 15545 - DNA, 740 bp, Homo sapiens
  source 1..740: mol_type = other DNA
aagccctagcacttagagaaaaactagggctcgcagccgcgtgcgctcccgcggaggcgggggaccctcgccactcccccgccccacgcccacccgcgactgcacctgctcccccggctcggaaacgcgggccgggtgccgggctgcaggcagagggtgcccgggggaggaggtcccgaaagcctcctccacacgccggctgccccctccccagtcacgtggcccggtgggtggggaccgacctgaagttggagaaatccggagcgctcccaacctcggagggagtcgccagtcctccgggcccgggcggtggaccctggagccccggctggcggcgtggcgtttctgagaagccgagcagcggcgcgggcggcgggactcgaggcatggcccggctgtcggtgatccccgggtcggccacggcgtggacaggtgagcaggtacccgcggccagcggcagagatggccggggctgccagggcatcgggccccagagcccacgccagtccaggggatgcggggcccccacgcaggagggggcggtggattctcggactgccgggtcagtccccaccagcgccgccgcctcctcgccggctttgccaccgggtgagcaggggacgcgggacgcgggacgcgggacgcgagggagccgcgcggggcgtggactctgtgccggccccgccccccgcgcgcgcactggctgctccccgcgacgtcacgctcggctataaaaggcg

SEQ ID NO: 15546 - DNA, 269 bp, Homo sapiens
  source 1..269: mol_type = other DNA
ctgggattccccagcatgcaggatacgggtggagcatcaccctagttcaggcaggttagatacagggaggaacagagcctaggctcagcctttggggaagccagctgccttctacagctcttagtggcagcctcccaaatccaggctggggtgcactccagacagaactccgtcttgaaaaaaaaaatctgtaatatttactgagtgattttgtaattgtctcaaaaattaacttgctcaaggtcaaaagtaaatgatcgtcaggattg

SEQ ID NO: 15547 - DNA, 415 bp, Homo sapiens
  source 1..415: mol_type = other DNA
tgctcaaggtcaaaagtaaatgatcgtcaggattgaaatccgagcatttttgtcctaggacaaggaccaataggtaagtttcccttcgcctcctccctctcctggcaggcgcctctggaggcttcctcagtttccccgtctgtaaaataagggtaaacagggagaaggccctgtctggggagcttccgagctcctcatgctgcagagcatgggccaaatgcccggctctgcaggcgagtctcaatcccgggggagtggcagttgcgggcgaccaagcagtcaccggctgcgctgcggcgacctcccgggaagctgcggccggcggggtccgaagagcatcccccaggagcccgccccctcccagacggcgcctgcgcaggcgcggtaggaggagggtcacggtgggggctgtcca

SEQ ID NO: 15548 - DNA, 514 bp, Homo sapiens
  source 1..514: mol_type = other DNA
cttgcaaggactgtctttcatggaaggctaggtgctaggccctgcctgtttgaagctagccagacctgatgtttatgagttcaggtgatcgtaaatgcggattctaggcccagtgtgccccacagtgggacaagtggaccagtgccctcagggctgtgggatggaggatcccagaggcaccttcgaattggaagtcccacctcccacgtggaaagccccaagatggctttggggtttggcgcggcaccgagggctccgagcgttggagcgcagcgggctgggtgccagggctgcgcggggcgcgaggcacggtgctgccgccccgccaggctgacagccgcgctcgggccaccgcggccgcgccccctccacccgaggccggggaggggacgggaggaggccgggcggggcggcactgctcccgcctgcgcttcccgccccggcccgggagggaccgtgtgaaaatgaggccggggctcggggggcgggcggggccgggccgggggtggcagcg

SEQ ID NO: 15549 - DNA, 425 bp, Homo sapiens
  source 1..425: mol_type = other DNA
agtctcgccttggcctcccaaagtgttgggatggcatgtttccgcttagcttagggataagctaaatgtagaggctaatgcaaaaccgttagctttgcattagtttcctgaaattcaggtaggttttgccaaattgaagacagcagctgcggaattgatgtaatgggctgaatcagcctcagcctttgaagtccctgggaccgcacttccgggacgctttagacgccagggccagcgagtcgcagccgggtgactcgagtgccgcgactgcgcatgctctcgccccagcgcccggcggccacctctttcccgcgggcgggccggggcggggcactgaagggggcggtccaggaccctgacttgtctcgcggttactgggccggcgcgagcacgcgaggctcgggggcggcacggggcgttagggg

SEQ ID NO: 15550 - DNA, 500 bp, Homo sapiens
  source 1..500: mol_type = other DNA
gtgcagcggtgcaatttctcaccgcaacctcagcctccggggttcaagcgattctcctgactcacactctcgagtagctgggagtctcgccttggcctcccaaagtgttgggatggcatgtttccgcttagcttagggataagctaaatgtagaggctaatgcaaaaccgttagctttgcattagtttcctgaaattcaggtaggttttgccaaattgaagacagcagctgcggaattgatgtaatgggctgaatcagcctcagcctttgaagtccctgggaccgcacttccgggacgctttagacgccagggccagcgagtcgcagccgggtgactcgagtgccgcgactgcgcatgctctcgccccagcgcccggcggccacctctttcccgcgggcgggccggggcggggcactgaagggggcggtccaggaccctgacttgtctcgcggttactgggccggcgcgagcacgcgaggctcgggggcggcacggggcg

SEQ ID NO: 15551 - DNA, 510 bp, Homo sapiens
  source 1..510: mol_type = other DNA
ttggcctcccaaagtgctgggattacagtctgcattaagaggtgatttatatgaagtcccaactaaaatttggatactcaataaaaagccatgatttcagtatttggtaattactaatacgtaatgtgataaaaacctttcacacataaagttcatttaatcttaagtgcaatggcactagcgagcctccctagtagctgagactacaggcgcgtatctcgtgatccgtgctgggattacaggcgcggcagtttaaatattttagtggctatcagaaacacatctcaaattgcttttcagaaagtttccttcaatcacatgaacattgtggatatagtatgtgaatgaacatttttcgtttttgaacagaaagacttgtctgtaggaacgacagctcaggcagccacgtgggctgcggactgtgtttgtccaaagtgctccgcaggcgcgcccacaggaagtcgccggagcatctcccgcctccacgccgaggcgaagaggttctatccg

SEQ ID NO: 15552 - DNA, 423 bp, Homo sapiens
  source 1..423: mol_type = other DNA
aactaatttgtatccattcttagtaacttagggaacagactcacaagaacatacaaaagtggtgtctccccgaaagaccccccggccggttgccaagccgccggaatttcagcaggagaggaaggctcaccctcccaccgcatggcgatgcccgggagactggaagcatacagcagctctcgggaatgcagagccctagagcaagaccaagggcctcggccgacactgagagcctccagggagaggtcaggtctctctttccccttctggtctgcagaacgcactccggcaagccctcgcccctgtggggaaaatggcgctcgtctcgctagtcagtgaggtccgtcggataagcggttatgtcaagcgggctgtaaagtcaggcttggctgacgtcagcgggcctcagacacactatgcggg

SEQ ID NO: 15553 - DNA, 409 bp, Homo sapiens
  source 1..409: mol_type = other DNA
cacaagaacatacaaaagtggtgtctccccgaaagaccccccggccggttgccaagccgccggaatttcagcaggagaggaaggctcaccctcccaccgcatggcgatgcccgggagactggaagcatacagcagctctcgggaatgcagagccctagagcaagaccaagggcctcggccgacactgagagcctccagggagaggtcaggtctctctttccccttctggtctgcagaacgcactccggcaagccctcgcccctgtggggaaaatggcgctcgtctcgctagtcagtgaggtccgtcggataagcggttatgtcaagcgggctgtaaagtcaggcttggctgacgtcagcgggcctcagacacactatgcgggttgcggggcctgttggaaaattttctc

SEQ ID NO: 15554 - DNA, 528 bp, Homo sapiens
  source 1..528: mol_type = other DNA
agggacagattaaatcagtttaacgaagcactagggaaattttttaaaattgcgttgccaatcggttttgccaacgcatgcccacgtgcgccgcggacaaggtcggcagaggtggacccctgcttgggagagctctatggggctcggaggcctcctccgccacgcccactacgccccagtggctcgccccaggggacgaggggcaagaagcggcctccgagggcagcggccgaaggccattcggtccctggctcttcccagctcgcagagacccggaggcgctgcccggccgcctgcccctcttcagatcccccagcaccggaggagcagcgaggggggcggctttcgggtcggcttaggcgaatccaccctcccagaaggcccagccccgtccgggcggtgttcgggcggcgccgggccgggccccccgccgccccaggctcgctcaacagcccgcccagacttggctggcgccgagccgggggtggagccagcgggttcccgccagccgcggagcccgaacctgag

SEQ ID NO: 15555 - DNA, 640 bp, Homo sapiens
  source 1..640: mol_type = other DNA
gccgcggacaaggtcggcagaggtggacccctgcttgggagagctctatggggctcggaggcctcctccgccacgcccactacgccccagtggctcgccccaggggacgaggggcaagaagcggcctccgagggcagcggccgaaggccattcggtccctggctcttcccagctcgcagagacccggaggcgctgcccggccgcctgcccctcttcagatcccccagcaccggaggagcagcgaggggggcggctttcgggtcggcttaggcgaatccaccctcccagaaggcccagccccgtccgggcggtgttcgggcggcgccgggccgggccccccgccgccccaggctcgctcaacagcccgcccagacttggctggcgccgagccgggggtggagccagcgggttcccgccagccgcggagcccgaacctgagactggacctgaggagacctcagcctcggtgctcgggccgccccgcctctgccggaaagtccgcgccgccgctgccgccaccgtccgcagcccgagcgccccggagccgcaggccgccgccgcgcagagacgccgcggctgcgactaggcgcgcccagccgcacgtggcggacccgcccccaggcccgcagtgtcctggacc

SEQ ID NO: 15556 - DNA, 311 bp, Homo sapiens
  source 1..311: mol_type = other DNA
cgagtagctgacccgccttggcctcccaaagggctgggattacaggcgtgagcactccatctgaggtattacccaggtcaaacccctccgtgactccgttcccaggacaggaccagggatccctttttcacggctgggaggaggcgggtaggctgctcaccgtgttgtactcgagcacccaaaatggcccgaactggtctgggaaggccaagcattcttgccaccaggcgtggcttgactcgcagaacccacactctggcggctgtgggcgcggcactggaccggcgccggcagcagggcggggcctggcg

SEQ ID NO: 15557 - DNA, 502 bp, Homo sapiens
  source 1..502: mol_type = other DNA
gagatttccaaaactttggtctaccacttgtacaaattctactaaaacttcgtgagatattaacaaatgacaaagtgagttagtccacctgctcgggctgcgagagccctgggaccgctgcgagggaagcaagccgaggcgtgcggggctccccagggagaggccagcccagttcgggaggatcccggggatgccgcgttcctcggtggaatctggctctcccgggcgctccgggggaagcccaggccgaccgcccccggcccacccggcattgaaacccgaggctccttggaggtgtcgatgcaaatgaaggcggaagcccctgctttgaaccacctccaggggccgcggtggcggcgcgtggcgggaacacgcccgaccgcccactcccccagcgcagcagtccgcgaggcccgcggagggtggaggtgggctcgccgcccgggcttggggcagccgagccagcgcgggtgggggcgggggaggagcgggcactaggcgc

SEQ ID NO: 15558 - DNA, 518 bp, Homo sapiens
  source 1..518: mol_type = other DNA
tgggcgggggctaggactctcctcccacgccgcgccccagtcggccgtgctagcgtgtcgggccgagtagggactctgctgcttcctacctgcagggtgactttgaaatgggaaaaggaatgttaccttccttgcctgactcaaggggcagtcagtcctcctcaggttatgaccttataaggcataataggattacaaggaggcaaaatgaaacagtatatttcctcctaattttggttattcctatgtttccaaatagaaatgaaaattctgaaatttcagataattcctcaccctgccccggcccctccgcgggagtctggggtcgcggcccggtcaggcgccaagccggcaggggggcgcggtccacttgaggccacagctccccaggtccagggctcgggccatccgcgctgtcccccgggccgcatgggtcctggataaggatactgtctgaaccctgtgcccaaagagggctgtggcagttcctgcaccaaccgcctggagcccataccagc

SEQ ID NO: 15559 - DNA, 480 bp, Homo sapiens
  source 1..480: mol_type = other DNA
tcccggctgcgagcacccgggccagctgcaccgcccgggcggggcacggagggcgggcaggggccccggcgaggcgggtttagcccgcgctttccctggctcagacgcttatctccctccgcgcagagaggcgccagaggcgtttgcacgcgccggccgggtgacaggccccgcaggggaggccgctgcaccccgccaggctcccagagggtctccagagggcgggtctctggacctccagcctcagagaaccctccggcagcccgcagggtctgcggcagtacttgaaggagaaagtctcagacgtcccactggaccactgagtggccagctctggttcctgtgctttataagcgggtgggggagcggcggggcggggcctgggctgcccggttgccttcgcgctcctgcgagaggaggtccctcgtgcccagagggctggtatgggctccaggcggttggtgcaggaactgccacagc

SEQ ID NO: 15560 - DNA, 507 bp, Homo sapiens
  source 1..507: mol_type = other DNA
tgaaatgggaaaaggaatgttaccttccttgcctgactcaaggggcagtcagtcctcctcaggttatgaccttataaggcataataggattacaaggaggcaaaatgaaacagtatatttcctcctaattttggttattcctatgtttccaaatagaaatgaaaattctgaaatttcagataattcctcaccctgccccggcccctccgcgggagtctggggtcgcggcccggtcaggcgccaagccggcaggggggcgcggtccacttgaggccacagctccccaggtccagggctcgggccatccgcgctgtcccccgggccgcatgggtcctggataaggatactgtctgaaccctgtgcccaaagagggctgtggcagttcctgcaccaaccgcctggagcccataccagccctctgggcacgagggacctcctctcgcaggagcgcgaaggcaaccgggcagcccaggccccgccccgccgctcccccacccgcttataaag

SEQ ID NO: 15561 - DNA, 519 bp, Homo sapiens
  source 1..519: mol_type = other DNA
gaagaaggaaacaccgagtctctgtataatctatttacataaaatgggtgataggaagggagggtgccctggtcccggcccgcccaggagccttggggtcccgccgccgggcttgggaaggtgggacagcggcgcgtgcaggtgctggccctactctgagcgggctgagctgtcacgagctctgttctctgtgtggggcgcgcagaacacgtgtcctgggtgcgaatcagggcttcgcggagacgcccgaggtcaccgcctggcgtggcggccggcggggggcgagcctggactctcgggttgcgcaacggacacccctagtaaccccgggtctgcccgggcctgagcgcccgcgggccgctggctcatgggcgaggctgtagcgccccctgcaggcagctgagacaggcgcaccgcggctccctgttctgggacagtgactcagcgcccacacgctgcgctgcgtgcagctgccggctggaggcgggcaggacggacgtgccggcggaaccgtgagcc

SEQ ID NO: 15562 - DNA, 278 bp, Homo sapiens
  source 1..278: mol_type = other DNA
taggaagatctagaggagatgttccctagcacggtgggaccctggggtgggaccacggccgcgggtgccaactctttgcgggttgctgcaactacagggagcaacctgtgcggggccgagacccccagagtctcgcgctagcccgggcggcacgaagcccggcggggccagcgcagttgaggtctggggagcccggctggcatctgctccgggctgcggcgcgggccccgcggagcccaggaggcggcgggtgcttccggccaagggccctggcggcc

SEQ ID NO: 15563 - DNA, 473 bp, Homo sapiens
  source 1..473: mol_type = other DNA
ggccgcgggtgccaactctttgcgggttgctgcaactacagggagcaacctgtgcggggccgagacccccagagtctcgcgctagcccgggcggcacgaagcccggcggggccagcgcagttgaggtctggggagcccggctggcatctgctccgggctgcggcgcgggccccgcggagcccaggaggcggcgggtgcttccggccaagggccctggcggccgccgcgcccctgctgctctcaagtttcccgttggcggcgcggcccgggcgcttcaggtagcctctcggctctctctgctccgctccgcgcccaggtagggcaccgacgggggctgcacgcggctggccggcttcctccctgctgaggcggccctccctcctcccgcggggccctcctggccggggatccgcagcgctgcgccctctgaacgcccggcccccgcgcctgctgcggggcgcggcctggccggg

SEQ ID NO: 15564 - DNA, 353 bp, Homo sapiens
  source 1..353: mol_type = other DNA
acccgatgcaatgggtctcatacctgtaaactgggctccaggaaggcagctttctctagatattaataggtgtttttttcctatgacagcagttaggatgaacaaagttaagcagctttctttactgctctgcagactgcactttgaaaaatgcttgtttagatttctcatactgtaagttcatttaattgtttaatgaataaatattaccagtttatgaaacagctgagtgtaatactgctctgtgcacacaggaattatgatgtgagctcagtaagaccctcacgattggacatgcggaggtgactcaggcccgtaaatagccattttgctcatggttatttcccaggacc

SEQ ID NO: 15565 - DNA, 251 bp, Homo sapiens
  source 1..251: mol_type = other DNA
aaatagccattttgctcatggttatttcccaggaccctgagccttcccactctcctaaagggcagatgaagatcagagcttatgccattttaatcaaccctgtaggtcacttgaggcaggctccaccttccccaggaggagtggcagagtccagccagcgctcggagctggaggcccgtaaagcttatcaggcttcgcggtgggaaaggtggaatctttccctttccagaacggaagtgatgattcgctgt

SEQ ID NO: 15566 - DNA, 642 bp, Homo sapiens
  source 1..642: mol_type = other DNA
atcgacttttctaagcctgtgtcttagtgaaggtattaataatacctactcacaggattgctgtgaagattaaacgaattaatacctttaaagtccttaaaatacggtttgacatatagtaaatggtaagaattagctcttcacaaggtgaatctacaagtgatttaactgctaagcatagaggcagcagtgtcagctgtaccttgctgtttattgtctaggcaactttgaccagacgtactatatcactaacattcatcatatctatcatttatcaaagctcaggattttgaaccttgtaattacttatgcttaacaaagaaacaagatgacctcaactgttgaccaaaccagggctctcagtgcggccttggtcgccagcggggcgctccactttccgctccggagatggcaccggagtctgccaggctgtttccatggccacctcatgagcccctgctccgggagcgtgacaggcgagactctccttcgccgccacctctcgtctcagatgaccatctgggctcgaaagccctcaggagctgcggagcgcgggtcggtaggggcgctgcagagggcgccgtctcccggcaacgcgcggggggcggggctttgcgtcacagaggtgcgaccgggtcccgg

SEQ ID NO: 15567 - DNA, 343 bp, Homo sapiens
  source 1..343: mol_type = other DNA
ttatgaccagtaccacttatataaaaaagaattcgttatccatatacttttcctataaaagacattcattttggaaaaatctcataaacctttgcccacctcatgttcatcgaacaacaaaggtggagtctgacttgaattctggaaaggagttattaagagaaagttatttcataaaagacccctgtggtgattactattgtaaagttaaaaatccttggggaaagtgtaaaatgtttaattttgtaaattgcccttttctttgaaaaaggaatcacctgtttcaaatcataccctgcagatcactcagtctcctttatagcagttcacactggctaaattt

SEQ ID NO: 15568 - DNA, 321 bp, Homo sapiens
  source 1..321: mol_type = other DNA
ctggagtgcagtggtgcgatctcagctcactgcacaggctcaagcgattctcttgcctcagcctcctgaggattacaggtgtgtgccaatctcaggtgatccgcccgccttggcaagtgctgggaactgtacagaatttctttcataaaagttattatttgtaattaatcacatattttttctaatgtgcccccagcacattacaatgtgcccctttataaaatcttgtctcaggaaaaaatctgaaagttactgaaaaagcctgagtttcctcactcctaatcaggaatcgggccaaaaacatggttttgtttttaggcc

SEQ ID NO: 15569 - DNA, 178 bp, Homo sapiens
  source 1..178: mol_type = other DNA
cactgggccaggtcatatattactctcttactttaagggagatattcaatggaggactcttattcagaggataaaacctcacaaactcttcagagggcagagtcttgtccctgcccagaccctaggtcagagcaaaccaatggcccatgcgctccttccccgcaggaatggagtttaa

SEQ ID NO: 15570 - DNA, 411 bp, Homo sapiens
  source 1..411: mol_type = other DNA
ctgagatctggaagggtgtcagtgggcatgccagcccagcagagtgtcaccctgatggctgcctcagacagaagagacgatcaggcctaatagatggatctataagctaagctacctttccatctttacaagtaatttaaaaattagctgggcatgatggtgtgcacctgtggtcccagcttctcaggatgctaaggtgggaggatcgcttgagcctcgtgctgctgcactccagcctgggtaacaggccttagttcccatatctttaatgtggtgataaggcctataagttacgtcgtttacagtaggtgcctaataaaagggatctgtacacagtagattgacactcaaccttctagtgaactctccggtagtgcgaaggctggaaagctaaaaactacgtttcccact

SEQ ID NO: 15571 - DNA, 471 bp, Homo sapiens
  source 1..471: mol_type = other DNA
tgccatatatttatgcatacaaacacatacacatacatacatgagtacatatagtactctgcaagattcccatcttagagagattaaataacttgtccaaagtcacgccgtaagagtcagtatctcgcaaggggacattgcatctcacagttcaccctccactcactgaaaaggaagttgaggtaagtgactcaagtgtgtctctagctctgacatttttagacaaaaatgagaaagagtgactggaagattttgacaaatttgggcaaaaggattttacattcctgtaaggattgtttatattctttaaatgtacgacttagatacacaaaagcagaattgaatcaaatttatttcaaaattactgaaaaatggtcagatttcaagttctaagctcctcctcagttcagctacaagaatgccagctcagcggagccgggaagctgtgctgtcagcaatccagccttccgg

SEQ ID NO: 15572 - DNA, 648 bp, Homo sapiens
  source 1..648: mol_type = other DNA
cagtattccacatgtggctattgaacacttgaaatatgactaatccaattaaggaatttaattaggaatttttttaatttaaattttggaaaaactaaagtgtgtgaacctattttttcaactgcaaactttataaaatctaaacacagatccaatatttccaattaaaatcaggcaactgagatcagtgtatgcatgtgaaatacatatcgaattttcaagactcagtataaaaaaatgtaaaaattatctgaatttttatattgactacatgttgaaatgagattttggatatattacgttaaataaaatatattactaaaattaatttcctctttttttttttttctcgatcgatccccagtctggagcgcagtggctgatctcggctcagcgcaacgctggtagccaaaggctgggattacaggcgattttacttaaatcacaaatatactagatcttcttacatgcttcgaagaactaaaaaaaataagacatgaattatcacaatgattaccgaattaattgtaaatttttttatttaaactagtcacaaagcctaacaatcttgggaagaaaacaggattggccaggcccatcccgagaggtccacgtcaggcaggggccccgcccaccgcgggaccaagc

SEQ ID NO: 15573 - DNA, 632 bp, Homo sapiens
  source 1..632: mol_type = other DNA
tgaaatccaaatttaaatgggtcacagaaggggctgaagtccccatgtggcttgcccccagcttggagctccatgatcctggccttgggtaggccctatacccaaggcaggtgaagtggaagctcattcatagatctggcagtgtgttaaacacttgactaacatctcatttaatcccctgactacctagtgagtcgggcattatcattattatttccactttagagatgaggagactgaggctccccaagagtttaacgcagtgggagcagcccctgcccccgacttggcgctggcccagggtcttctccaggctcacatgcttgctggaggctccaggcgggtggggagattcccgtccggccaggacagtgtccagtggcactgccatggggactgccatctgctgtgtggatacccatcggaggggcccagggtgagcgactgccccaaaggcccagcctgccctgagccctgaggccagctggtagccaggccggagtggggctcccagaggagctctcggctctaagtcccagcccctctcagaggaggcgtgcggccgaggttctgcagccagaggcttctcggctctgagctccggagccagatgtaacattgaccttaaatgg

SEQ ID NO: 15574 - DNA, 587 bp, Homo sapiens
  source 1..587: mol_type = other DNA
ctcagtataaaaaaatgtaaaaattatctgaatttttatattgactacatgttgaaatgagattttggatatattacgttaaataaaatatattactaaaattaatttcctctttttttttttttctcgatcgatccccagtctggagcgcagtggctgatctcggctcagcgcaacgctggtagccaaaggctgggattacaggcgattttacttaaatcacaaatatactagatcttcttacatgcttcgaagaactaaaaaaaataagacatgaattatcacaatgattaccgaattaattgtaaatttttttatttaaactagtcacaaagcctaacaatcttgggaagaaaacaggattggccaggcccatcccgagaggtccacgtcaggcaggggccccgcccaccgcgggaccaagcttcggggccgcgccagcgctgaggagagtcagacgccagatggttccgaaggtcctgcaggctctcggggcacccgagctcgcgtagggcacgctcccccgggagtgcttccgggacagggggcggggtcgccggaagtggccgtccgccgtccgctgctcg

SEQ ID NO: 15575 - DNA, 477 bp, Homo sapiens
  source 1..477: mol_type = other DNA
agcttaatcctatttcttatggtgaaccttaaataaaatgaaaatacacaactgacaatgtttaacgtgcacttgaagtctgacacacagggtgttttcctcggtgaccgccagccggacattcctatgggaaaagcagcttcttctgtgcggtttcactctgcagggggtgggccaataaggagctgaatgaagctccggctgccgaagccgaggacctggagccgggtagtgtcccggcgctgcgcccgggggctccaggcctcaacccgaagggctcagccccgggagaggccagttcgggggaggtaagggtgcgttttcttcccatattcccggtggctcagcctcagagacttcgggctttgcgcactgcggcggggctgcgccgcaaccgagctcagccctgtggctcctcctcgctgccctgcgcggattggtggcagacggcaaccgggccgctgattgggcggcgaa

SEQ ID NO: 15576 - DNA, 462 bp, Homo sapiens
  source 1..462: mol_type = other DNA
gcacacaacccgcagcctttggctgtggtgtttttgaaaacaaggaaggggtatttcagcctgcaggcaaaccggccgggctgcccccagcctaccccgggccgaccaagaggtccggcggggtctgcgccgcatcagcgcccgctcgtcaggcctagccctccgcacagccaaggccgaccagacctctagacactccgtcgtttttcttcctagattccagtgggaaccaagaatctgcgtgctcctttggggccactacgaatccccgtgaatcacccccggccagaaatgacaagcgtccgcgccgacggggctagtccagccgctccgctatcacctaggtagcacggccgctgcggctgaggctgtgactgcggctgcggctgggccgcgcctcaaccgatcccgccccgctgctcagcgcggattggtggcgggacgcaaatctggcgctgattg

SEQ ID NO: 15577 - DNA, 462 bp, Homo sapiens; identical to SEQ ID NO: 15576
  source 1..462: mol_type = other DNA

SEQ ID NO: 15578 - DNA, 462 bp, Homo sapiens; identical to SEQ ID NO: 15576
  source 1..462: mol_type = other DNA

SEQ ID NO: 15579 - DNA, 541 bp, Homo sapiens
  source 1..541: mol_type = other DNA
ggatgccgctggggctggcacttccttggcttctcagcgtcctggcaaccaagaaaagattccaggagtcgactggtggcggaggaagctgccgacctaagggctgggactggcagcgcgccctctccgggagcttcaggtctggggcagcctgtgcaggcgcgggtggaggcccgggcgcgtccctgggggcgggagccaggggcggccagcaggtggggcctgggagctggactccgccccccgctccctccccgttggtccgctgccgctcagcaccggcccctctcccgagccggagcgcgattggtggcagcgcttgtcgctcggagggggccgggccgctctgcttcgcggctctccccgccgccgctgccgctgccgctgttctcctagcagcgcgggccggtcggaccgccaaggcagccggcgctggcgatgggaagcggcgtggccgccgacacgacgcgcggctgccggctacccgtgacccctagggttcagggatttttaatttggaaaaaaatccacctggtttcct

SEQ ID NO: 15580 - DNA, 411 bp, Homo sapiens
  source 1..411: mol_type = other DNA
tgcgtctggcctcctcctgtgctcaatgatagcaatcataaacaacatggatgccgctggggctggcacttccttggcttctcagcgtcctggcaaccaagaaaagattccaggagtcgactggtggcggaggaagctgccgacctaagggctgggactggcagcgcgccctctccgggagcttcaggtctggggcagcctgtgcaggcgcgggtggaggcccgggcgcgtccctgggggcgggagccaggggcggccagcaggtggggcctgggagctggactccgccccccgctccctccccgttggtccgctgccgctcagcaccggcccctctcccgagccggagcgcgattggtggcagcgcttgtcgctcggagggggccgggccgctctgcttcgcggctctcc

SEQ ID NO: 15581 - DNA, 565 bp, Homo sapiens
  source 1..565: mol_type = other DNA
acatgacaagattatattatctcagcatgctgtaagatcactgtatatgaaagtctccataatggagagaaatgacttctgcaaactttgtttagtataacacaaagcaccatgcttactactagagaagattaaaattctctaaaaaccttgttaacgaggctagctcagtctcagacttggccctgatggagaaggaagttccctggaagagggcaggggagcgcctctccaatgtagttgcgggggcgggcggtgaggacaccgcttcataagggaaggggtggctgcctccccaagcagggggtggcccctgaggtccctccagctgggggcccttgagagggtctttccctgcagggcagagagaggacagtgggcctggtccttccccggccggcagagggagtcccgagatggaacccaattctgtacctcccggggctgaggaagagccgaggtgactagaagctagcgacaagtgccggccacctccgacgccaggcgccgggcttggagcccgacgggccgaattctcgcgagagcggccgccgccatttttcca

SEQ ID NO: 15582 - DNA, 479 bp, Homo sapiens
  source 1..479: mol_type = other DNA
acgtttttgagacttgtcaaagttttatatgctggctgcaggtgtctggtcctgaccactcctctaatcctggctggagcaactaaggccagcggtgatggcttcctgaggatttcacaggacagaggtagaccaaggtgggactgaggaacattccccctacccccaacctcggtgggctgttgcagcaggcgtggggcgtgaggtggccggcgccccggctggccaatggccgggctgcggcccctccgcggggcggggtgggcctggtgggcgggcggggcgggcggggcgcgtcttgcgggctccctcgggtaccggcgctgccgcaccccgccgcgctcccgcacccgcggcccgcccaccgcgccgctcccgcatctgcacccgcagcccggcggcctcccggcgggagcgagcagatccagtccggcccgcagcgcaactcggtccagtcggggtgggtgaggggcggggcg

SEQ ID NO: 15583 - DNA, 360 bp, Homo sapiens
  source 1..360: mol_type = other DNA
agctccaggttcctggacgggctcagccacccccagggaatggggctttccttgcagttcaggagggccctgccccaggacgtttttgagacttgtcaaagttttatatgctggctgcaggtgtctggtcctgaccactcctctaatcctggctggagcaactaaggccagcggtgatggcttcctgaggatttcacaggacagaggtagaccaaggtgggactgaggaacattccccctacccccaacctcggtgggctgttgcagcaggcgtggggcgtgaggtggccggcgccccggctggccaatggccgggctgcggcccctccgcggggcggggtgggcctggtgggcgggcgg

SEQ ID NO: 15584 - DNA, 517 bp, Homo sapiens
  source 1..517: mol_type = other DNA
cctcggtgggctgttgcaggcgtggggcgtgaggtggccggcgccccggctggccaatggccgggctgcggcccctccgcggggcggggtgggcctggtgggcgggcggggcgggcggggcgcgtcttgcgggctccctcgggtaccggcgctgccgcaccccgccgcgctcccgcacccgcggcccgcccaccgcgccgctcccgcatctgcacccgcagcccggcggcctcccggcgggagcgagcagatccagtccggcccgcagcgcaactcggtccagtcggggtgggtgaggggcggggcgctcgagtaggacccgacgccaaggggagggggctgacctgtgcttggtccaccccaggttcggttgctctgggctccagcatcacaggtgaggagcagagctcagcttgtgctcggtttcctcccgtctccgggcgggtgcgggaaagaggggcgccaggggcgggcggcggggcggaacggggcggggcggcgggcccagcgagggggg

SEQ ID NO: 15585 - DNA, 328 bp, Homo sapiens
  source 1..328: mol_type = other DNA
cccttaagaacctagagcaagttatctctgaggcctcaagggtgtcagcaagctcagggtcagaaaccctgcactcaactcctttgctagggatttgtgctgggcaatgttggctggccaagcttgcagggagctcagagcagcctaggccttgatcactgactttcatgtggtgcaatgaaatcaccctatatggcttgagaggaaattctctgcaaggagctgcatgcaaataggtcctgcatccccgtgttccctgtggccgggatcaggcagggacacagagattgcttgagacactttctggtgactaatgcagtatacttga

SEQ ID NO: 15586 - DNA, 341 bp, Homo sapiens
  source 1..341: mol_type = other DNA
gctggggaaattccagcagcctggagccacaatactgtttgcttacaccgggccaagccctgtgatgggccctgcaagagccgtttaaacacaaggtgttttacagtaaccaagaagcgtgaggcccaggccctcgccgctcccttccctcccctggtctccgccctgtgcgggtcagggtgggagcgcccggccactccctgcgttctgggccgggctacagcccacgtgcgccggcggcagcggcggtgacagccggccccacgggggcggggcgggctccgtgctgtcctgtcattggccgcgccgctgtcgggggcgttccccagcccggtccaccg

SEQ ID NO: 15587 - DNA, 289 bp, Homo sapiens
  source 1..289: mol_type = other DNA
ccatgctgccaggctggagtgcagtggcaccatctcggctcactgcacaagcggttcttgtgcctcagactcccaagtagctgggaaaacctgaaggtgcagcttcctttcctgaagggaattaaaaccatgctattagtaatattgtttagcacaatgctttgtgacagggactatagtcgtccctattaagtcagaatctgatgttttacagcctgttggctggttgtcaaggcaaatcttgccctcaagagtagagctctttgagattgaaataactaaggtcttg

SEQ ID NO: 15588 - DNA, 174 bp, Homo sapiens
  source 1..174: mol_type = other DNA
acagctggccctggcaggaagtgcaagttgattgcgaatgatcatcagtcacgagcgtgcagtcttaactggggccagctgatcgtctgctcttcagtaaagcagcaggtgctgtgagtctgtgtgtgagagacagacagaaggacatggaagtgcactccaagcttctcagtc

SEQ ID NO: 15589 - DNA, 201 bp, Homo sapiens
  source 1..201: mol_type = other DNA
caggtgctgtgagtctgtgtgtgagagacagacagaaggacatggaagtgcactccaagcttctcagtcgcgcaagacgtgagtgctggggcagagcgagctcaccagccgccggctggaagacccccctgcttggggcaacccaggggcgcaaggcgcggccccgggagcgcagctccttccagggcagagggcggcgcg

SEQ ID NO: 15590 - DNA, 445 bp, Homo sapiens
  source 1..445: mol_type = other DNA
aaagcatgcatggtctccatgggtaattttgattatggcacatttaggactaagccttgcatacagatattagcaatttttgaaagaatgctattaatacatcgaaatcacctgatgtagtctgtttaaaaaactgaagactgtgatgcacgatcgagtttgaaaaccacttacatttcattttgtagatgaggaaatggaggcttttggagatgtcctatatctgatatcctgaacaaaaatgattaatgatgtaatcaaaacacacttatattttgagttgtagtaatcttcccaggctagcagacatcatgacttttctgctgttaagtacaactaaagcagattttttttttttttaaaaaaggtaaaattaagactcttaagataaaatgaacctatacggtgttgagaatcacagctggccctggcaggaagtgcaagt

SEQ ID NO: 15591 - DNA, 638 bp, Homo sapiens
  source 1..638: mol_type = other DNA
gttaaaatgattcctttaataatgaaatgaagtttctcaataatgaaagggctaacttaaagatgcagcatttcaaagtttaggaagttacttttgaaaagtacaaccaggtttttgctaagctaaaggttttcctttcccatgtctggcccggagacggcgtccaccgcgctcgagagccttgcagacttccgcgagtccgggagcactcaacgcagtcacccgcgcttccgcgtcccggactagggaaactgaggcacggtaggcgcgtcgcgcgcaactcccgcctcggcgcctgccccctggaagaaacccaggcttccagagttcttcgcgcgagcgcagggacttccaagccgcgcagctcccgtccgccccgccccgccccgccccggctcgggacaaagcccggagcccgcgccgggagacggagggcggctcccgcgcgagccacgctcccccgtgggcgcgagactccgcccagctgccgaaagcccgcgccccaacggcgaagcagccgcgccggtccgccccgattccccatgacgtcaccggcggcggcaggccccgcctccagccccgggcggcaggccgcatgacgtcaccgaggccccacccctccggagcgagttcggtcc

SEQ ID NO: 15592 - DNA, 395 bp, Homo sapiens
  source 1..395: mol_type = other DNA
tttgcagcagagagcgctgccgcggggctggtgtctactctgctgcttttcgtcgtgagggcgggcggccaaacgccagccggcaggggacatcccgggcgaccccgaggagcgcggcttgggcaccgcagtggccgcggctaacccagggagcgcgcgcggattggtcctctcctcggggcgtgcgctcctgtgcgccaggctcccgccgcctcgccattggtcagcggcctctctagccgccacacaactggccagcgggctgccgagccgcgcgcggattggctgggggcggccgccgggaccggctcccttcgggcgttcggattggcggcgggaagaggcagggcgctgcggctcctccagggcggggggccgggcctgggccggcgggg

SEQ ID NO: 15593 - DNA, 864 bp, Homo sapiens
  source 1..864: mol_type = other DNA
aagccgcgcagctcccgtccgccccgccccgccccgccccggctcgggacaaagcccggagcccgcgccgggagacggagggcggctcccgcgcgagccacgctcccccgtgggcgcgagactccgcccagctgccgaaagcccgcgccccaacggcgaagcagccgcgccggtccgccccgattccccatgacgtcaccggcggcggcaggccccgcctccagccccgggcggcaggccgcatgacgtcaccgaggccccacccctccggagcgagttcggtccagcatcgctcgcgccgcgccgcgccgcctgagccgagccgagcctctgctgccgccgccgcggccccgccgcccgccgcgggcgcccaccaagcagcttccaccctgcgggccattccgcgcggcggggcccgggcccggggcggccgcgtccaggcacaggccatgcagtgacgccccccctttgcccggagcgcgggcagcagcccagcgcgccagccggccccggggcaggagcggtgctaggcaggggtggggtggccgggcccagggaccgggagccggggagggagccgggcaccgagcgggcgggggaagcggcgccgaagtttgcctcggactcgccgggcgctgcggtggctccctgggccgaggtaaggcgcgcggggtgcggggggcgcacggggcagcggggggccggcggcgcgtccctcgcgggccgctcttttgtgtgcgacggcgggcgggcacgcggagggccgcggccgggcccccacacccgcctccccgcgccccctccgaggtgagcggccgggcgccgccgcgcgacttgccaggacgccaagttgggccgcgcgct

SEQ ID NO: 15594 - DNA, 397 bp, Homo sapiens
  source 1..397: mol_type = other DNA
cagtggttaaaggtttttcaacaaagttcttgctgcaatatctgttcttatgcttaagatcttaggcctccccgtctgctcccagagctcatggcaagcagctcggcttcgaagaagggtgtccctcacgacgaccgaagacgctgtccacttttctctaacggtgacaggaagcaaaggttcagccactcgggctcgaggcccgcggttgacccgagctgatgtctgtgaggagaggtcgcgcggcgccttcctctccacgcgcctgtcccacccgtggccgccgcgcccccgcccacccctgggcggagagcaccgttctcgcgagaacgctggcctcgcctcttcgcattgtgagctctcgcggtaagaggctgaggagccggcctgcaacctg

SEQ ID NO: 15595 - DNA, 611 bp, Homo sapiens
  source 1..611: mol_type = other DNA
acccctaggggaaaatgttgcaaagagcttttgctgtgttttcagatgactttgcaaattaaagtcaagaaaagtttcctcatgtaaaaatggggataagcacttaactttagtactttaagtactaactttaaaggactgctagttagtgcttatcaaatgttattattatagattaagatgcacaaataaaatataagttaaataaattttaaaataatttcacttttgaagcttttaaagtaattatgtactaagagcattttctcaaattattcttaacacttcctttaagaaaagggctatatctgttttttgaagtaagcctaacatttatgatttattaccataaaaactgtaccaacagtacggttataacaaatacacttatttttgggttttattttcaagtaagataatgactttatcataaacctttgaaatcagtctttttacagtataaattcagattcattaatccacatagaatttttctcgatggtataattctgtatttgttaaaagtctttgcataagcccttccaattatctgaaacttaagaaacaataaaagagcctctcttggtaagcagaagacctatatataaaag

SEQ ID NO: 15596 - DNA, 607 bp, Homo sapiens
  source 1..607: mol_type = other DNA
caaagattgtggtaatattattacagaattctcatgatccttttattattttttaaaaatgagccgtatgaattcctccatgtgtacattattctaactcctatcactaccggtaagttttccacagtcccctgggactgggcgagacccgtggaggctccaggggtccgtagagctcttcgctctcaccgacccggggcccagcaatggccggagggcccccgggccccaccatagccacaatggcagccccgctgtctcccgcgcgggcctcgctgcgtgctcccaaccttgggagttggcgcccctcccgcgcgacggacagccgggcgtggccctgggcgcgacccgacaggacgccagcagccggcgggggcgctccaggactcgagatgtggggcgcgggcccattggctgagcattcccccgcgagcctcccggccgcagggcccacctcccggcggccgttcgcgttccgcgggcgtccgctcccgccccactcccgcccggagggaaaccgggttgggggtgaccgctccagccagtcacgtcgcgaggtgcggtcggggccggctgacgcgactgcgggcctcagccaatgggcgtg

SEQ ID NO: 15597 - DNA, 452 bp, Homo sapiens
  source 1..452: mol_type = other DNA
gtctcttcccagagagacactgggagagattcttgccccagcaggccctcaggctcagcacctctctgaacatctgtccctgttccttgtaggaggaccttcctgagccttaggccaagcatattttatgactgtggaggtataaatacaaatatattaacattatatagtaaaacattttgtttgacataaattttttcttctgatttttacagaaaacattttcatagatctccaaaagtaggtgtgcaacaaaagttatttctcaggctttccctcctctgagcgccgtcctccagagggtccggagtgtagctgggggttggagcagcagcctcctaggcgatgggacagagcccacagggtccggtatgccacggtttcttcgtcagaccctgggaatccaacgacagcgctgcgctgggggatctgggcaaaatcagcccttcgtt

SEQ ID NO: 15598 - DNA, 596 bp, Homo sapiens
  source 1..596: mol_type = other DNA
gaacagtacatggtgcacagctgttgctcaaacagctttgttccagctgcttttcttttaaaaacagaacctcttgtaatattctatacattattacttaaaatggatctagtaattagtatcaatagctgtttccaaaatgaattatgtgacatagatttcagccttgtcatatttttaattctttgaaaattaaagttgcagttgtgaaatatgtatatgagacaagttaagtgattaacatttaattatgtccaaataagtagctagtatctagataatgaaactaggcatcttctattttcttaatattaaccttgagtttgcattaatttcaatagaattatgaaatgaaaaggtataatatcatgttctatagcttgtatagaacctgtgtaactgaattatattacttgttttttaattaggagcaggtacctatgaaaaatacattgaagtaattatgactatttcattttctaccagttacatcatggtcattatttccatcctacagatgaggaaatgcaggcttgggaagaagggatttgcaagtaaaaagcgaagctgggatttaagttggtttttgtatttct

SEQ ID NO: 15599 - DNA, 743 bp, Homo sapiens
  source 1..743: mol_type = other DNA
atagacaattagggtgacacactctttcttgggggtctgaagcccgggttacctcccgaacctcagccccaagcggcgcggccccgcccctccccgcccagcctggcagcccggcccccagacggccatttgtggcggcgctggaggctgcgttcggcaggcgctgcggagacgcgtagaggagcgcgccccccggccgctgccgcccctggcccgtgccgtcacgcgcctcgggcggtacccagccagtccccagcgccgcgctaccgcgctgaccggccctcgcgcctcccggtacccgggaccccagcccggccgctcgcccgcagcccgccggccgcacacgtccccggagccgggcctagggcgggcggcagcggcggctcggcgcagtcaggctgggctctgtagcgtccccatggccgcggccggctggcgggacggctccggccaggagaagtaccggctcgtggtggtcggcgggggcggcgtgggcaagtcggcgctcaccatccagttcatccaggtacctggagcgggcctgcccggggcgccggagcggcggcgggcgggggctggcgctacctgtggcggggcggccgccgcgacctcgccccagaggcgcctcgcgggcccgggccggggccagggggcgggagggcgcggggccgactacgctcctgccctgcggccgcagcgtcgcgctcctgcctcctcccgggcgcggcgtcgcgggagtaggg

SEQ ID NO: 15600 - DNA, 439 bp, Homo sapiens
  source 1..439: mol_type = other DNA
tgtagcctctttagcatggcagtcttatgatagtcaaacttctgactttgttcctcccggagtgagaataccaagagactggaaattaggcagcatctcttctgctgcattcagtccaagaacttgcagtcatgttccaagattgctgtttatgtgctcatttaattcttattaaaaaccgggaggattgcttgaggccaggagttcaacccctcgcatgtactgacacatacaaaatctgtcacaaatcactgacttactgtgacacagctcctcaatcactgtcacatactgtttttcacacaaatatgtactctcctataaaattgagttaatatgcatagacaattagggtgacacactctttcttgggggtctgaagcccgggttacctcccgaacctcagccccaagcggcgcggccccgcccctccccgccc

SEQ ID NO: 15601 - DNA, 471 bp, Homo sapiens
  source 1..471: mol_type = other DNA
gaaagctcaaaagagctagatcctacataaatgaggtcatcttcctggcttaagctttaagatattttgttattaataattggccataaaacccttaagtactatggctgattgcagctgtaacaggtctttggagatacgtaaaatcctttaaaacagtgactgtctccctttatgcataaaaattttttctaatctactgggtccaatgtgactttggattttttaagaactgaaatggattttaatctagtgataattaataaaataactgaattaccttcccaatagtattagttacttttctagtccagagctctttttcacgggaacagagccctgtaaaagttgcttaactcagagcttggaaaactagaaaatacgtggtttcattatacttgcagcgcgcaagcgctgcacaaagaaagcatgtcctctctgagccacgtcagccaaggactctggagccgc

SEQ ID NO: 15602 - DNA, 615 bp, Homo sapiens
  source 1..615: mol_type = other DNA
aaattactaaactttttttgtttttgatacttgtgttaattattaggaatataataataatatgacataggtaagattgtgaaaactttaaaacaacaaattggattgctctttcattagcctttataagcaatttatatttgctagacaccatctaagcatctttttagaggggatttaaagtttcttaatggttctagatgtcccaagaaatcctagaccccttgtatccaaaacaaatcaggttttagatgggaagaaattattgtagaaagtcaaacattttatattaggccaaagaaatagtgtcctattgcattatttctctggtggattatgcaacaattaaagaataagccagagacctttgttaataatgtataatttgaaaataaagacagtacttcattccttgttaaaacaagctcgatatggccggagaccatatggtgttggtctcaagttcattgaatattgttatatgttaatgattttttttaattaactagaaatttttataatttttagttcaaccaaagtaaataattatgtggtgtatttatttctatttgccattggagcccgttcccaatcagctcgtacttacttggagag

SEQ ID NO: 15603 - DNA, 293 bp, Homo sapiens
  source 1..293: mol_type = other DNA
gctacgtgacaggggctgccccgcagctctcagccgccggcactcccgaggctccgcccgccgccgagcggtcggaaacctatcgatatctctggaataggatcgctgagcggctggaggccgcaaccaggccctccgcgtcgcccggtgccacgaggtgagcctcggcagacggccgggctccggcagtgattcagcatctccggcctggccgggctaggggttatcggtagccagtggggagcctggagtagattctgagcggtccagaatagctcagtattagaagaggc

SEQ ID NO: 15604 - DNA, 305 bp, Homo sapiens
  source 1..305: mol_type = other DNA
caatgagtattttgccaaatggcaaaaaccgcagttacttttgcaccaaccttaatgcagctacgtgacaggggctgccccgcagctctcagccgccggcactcccgaggctccgcccgccgccgagcggtcggaaacctatcgatatctctggaataggatcgctgagcggctggaggccgcaaccaggccctccgcgtcgcccggtgccacgaggtgagcctcggcagacggccgggctccggcagtgattcagcatctccggcctggccgggctaggggttatcggtagccagtggggagcc

SEQ ID NO: 15605 - DNA, 323 bp, Homo sapiens
  source 1..323: mol_type = other DNA
tattattgtagcgacgaggtcccactgtattaaaataatatagtgatctcccagtctcttttttacaaagaatataaatagccggtggatgtcagactatttcgttatggaaagatgctctcaaaagaaatagataaatcgaaagaaagtgtccattttttctccaatgagtattttgccaaatggcaaaaaccgcagttacttttgcaccaaccttaatgcagctacgtgacaggggctgccccgcagctctcagccgccggcactcccgaggctccgcccgccgccgagcggtcggaaacctatcgatatctctggaatag

SEQ ID NO: 15606 - DNA, 349 bp, Homo sapiens
  source 1..349: mol_type = other DNA
acagttcactctctggtcttggagaggattcctagttctctccgttacagtatcaatttgcattgcacagcaaatctcttgagcaacactcaagaacgtgcacgtggagtgctactagagtgcactccacgtgcacgttccgcaaggatcctgggcctgctgcgtggcccaagaatccacgttgcttctgaggctagatctagccttcccgaagaccccagtagtgacctgtgggattctggctgggtgtccgtgacttaccccaaagagaacctgcacgcctggggtcccaggatggctggcccgccgccgcgctttcctcggcctgggcacgctgggtcggcgtggt

SEQ ID NO: 15607 - DNA, 722 bp, Homo sapiens
  source 1..722: mol_type = other DNA
ctgccgcctccgggggcgtgtgcggggccgcggaccctgcgtcgccatccccccgcaggcgggcagcgccagcagccaccaggagccgcagctccggcccgggccgggtccccgcttggtccgggtgaggactgtgcgaacacacgctcagcagcgtccgcagccaggcggccccggcagcccagctctcgggttccgcgcccagcagcagggcgggcgcccagcgagaggcgcgcccggcagaagggggagcagcgccgcggctgctggggagaggccggcggcggccgcagctccacgttgcagaagcggcaggaagccgcgcggagggtcctgccgcaaggggctcctcggggggcgagccggccccatccggcggctgcagggaccgcatggcttcgtccctcctcatggctggggccgggggtggccacgggactcagcacaccccgctcgtaccgtagcggccgctcgcgctcccagaccccaacccccgcgttcggggcgccccctggttcgcaacccgtcagggctgcgccggccgccacggcccggggtccccaccgcgcggactgaggagcggcggagtccggcggaaggggcttctctccaggggactggagactcagtgtcgcaacagttacctcacggccccagcctggtccgttgggcgcgcgagcggcgggcgggcgctcctcccccgcgactgccccggccgggcg

SEQ ID NO: 15608 - DNA, 497 bp, Homo sapiens
  source 1..497: mol_type = other DNA
ggtcttggagaggattcctagttctctccgttacagtatcaatttgcattgcacagcaaatctcttgagcaacactcaagaacgtgcacgtggagtgctactagagtgcactccacgtgcacgttccgcaaggatcctgggcctgctgcgtggcccaagaatccacgttgcttctgaggctagatctagccttcccgaagaccccagtagtgacctgtgggattctggctgggtgtccgtgacttaccccaaagagaacctgcacgcctggggtcccaggatggctggcccgccgccgcgctttcctcggcctgggcacgctgggtcggcgtggtcccggctcgcgtccctgttgggcggccgcggcgcgggtggcggcgggacaagtcgtgagcgcgcgctgggcgcgcgcccggccggggcagtcgcgggggaggagcgcccgcccgccgctcgcgcgcccaacggaccaggctggggccgtgaggtaactgttg

SEQ ID NO: 15609 - DNA, 552 bp, Homo sapiens
  source 1..552: mol_type = other DNA
agactgcagtgttgatcatctctccagttttcagaccctgaggccgtcctgactcctggctcattggcctgagcgctcactcagtcagccaatggccgcctgggtctcagggctgctgtggagttcgcacctccagctcgggccgatgtggaagctttggagagctgaagagggcgcggcggcgctcggcggcgcgctcttcctgctgcgctaggggtccgccagctgctgaagcagaggcggccgatgggcttccccccggggccgccggggctgccatttatcggggtacagccccgacgggccccgggcagggagggccgccaggctggcccgggctggccagggccttcctggttggacttatggccgcccctgggccgactagtcgggacctctccgtgtgccggctgccctttgagggacacccgcttcccgggtctggaagggagaagtcctcgacgccgtgcccccttgcagggggagccccgcccctgccggtgacccactccgggccgaggctccgaggcgatccgctcgagctctgctgcg

SEQ ID NO: 15610 - DNA, 290 bp, Homo sapiens
  source 1..290: mol_type = other DNA
taagttatagaaaggactttgttgctcttattcacctatgtatctccattgcttaggacatgggaacatagtagacattcaataaatatttgttgtgtgaatgagtcgtaacaggacaaaacagtaaaattactttcttttactactgatttctactggaaattctgaaaagtatcaggttcagctaaagactgcagtgttgatcatctctccagttttcagaccctgaggccgtcctgactcctggctcattggcctgagcgctcactcagtcagccaatggccgcctg

SEQ ID NO: 15611 - DNA, 406 bp, Homo sapiens
  source 1..406: mol_type = other DNA
gcagccggaagcaaaggggcagctgcagaggtctggatggaggcttccgcatctgaagagtaccccgggggaaagtatccatggagatcttacagaatcccctgtatgagattgtggtccccatttcaaagatgagtacactgagcctctgtcttgggcccagagttggaagagtccctacaatcctggaccctttcactgagaggtgaaattcaccatgacgtcaaactgccctcaaattcccgctcactttaagggcgttacttgttggtgcccccacgaatacaagtgggacggtcctgctggatcctccaggttctggaagcatgagggtgacgcaacccaggggcaaaggacccctccgcccattggttgctgtgcactgtcccgacccacagcggcggga

SEQ ID NO: 15612 - DNA, 451 bp, Homo sapiens
  source 1..451: mol_type = other DNA
cgctgcagcacctgctcccctccgtgggtggcagctggaccccagcgcgctcagctctcaggcgcttcagcgaagtggggttctccgccaggcagcttggcaaacaggtggcagagttgcagggcagctgtgtaagccaacttcggcgcagcctcttcggctcctgcccgtcccagaggagtgaggtggagaagggctggctgccagactggcaccaaaacagccttctttgggtgcccaggccccaggtggtccaaaaagatcaaattttgagcgggtccctcactggcgtgacaggagggagttgagagcagctctggcccctcggggcggactgcccccgctccagagtaccagtgccggcagtgcgagctatgacgcaatcggagctcggtctggccgcgcgggctggtggggaccccccccctccagctatctctgtaataagagc

SEQ ID NO: 15613 - DNA, 432 bp, Homo sapiens
  source 1..432: mol_type = other DNA
agatttaggttagatgtcaaggagatctttctgtcagtaagagggagaccaggggctgcctttgcttgaggacctccaagaatagggctctatctggaagctttcttccaggtcaaaaatgccacattcccgaaacccctcgggaaacgaaccttgtgggcgaccccgcctggacggcttcgcggctcccgggcgatcaccctggtgcctgccgcctggcccgggggagcccggtctccagcgctcctgcagatgggagggagggccatgtttccccccccaggggcaccgtagcctcgtagtcccgcggagacagcaggcagccgtggctgacgcgggaccaaggcttggcagggagcgcgctgctgtggaaggtccttgggaggctgcgaccgcctcggagaggggcgggggccaggggcggcctctcgg

SEQ ID NO: 15614 - DNA, 415 bp, Homo sapiens
  source 1..415: mol_type = other DNA
cttgcttattcacatccaggatatgaaaaaggtacatacttttattctgaattctaacgttggagtccttcttaggtaagcttaagctgacttgtcaagtggatgcaagtgtttatagattgcatttgcagaaaattgccatgaaacatttattgtaggataagggaccatgtcactacaactgttgagagaggagacatttggaatttgaaagtcagacctttttactaagagaaaaatgtatgtcttgtgctcagagctgagttttgtttatctgcatataagaaagcaataacttttgtaatatctaacaaagatttataccttttagtgtaaggctgattattcttttatgaactatctagaaagttgattattaatccagctagagaagaaatatgcttttacttagcaa

SEQ ID NO: 15615 - DNA, 529 bp, Homo sapiens
  source 1..529: mol_type = other DNA
ttaattcttttttttttaaccaaagaagttcaaaagtgggaaaggaaaaaacaagctgtgtgcctttttacatgtgcttgaatctttagcaattgtacagaattcttaaattagcattattttttaaagtctccctttcagtgattaatttccttcctactgtagttagaaaagactgtctcttatcttatgttactgtaatgcaactgcttctaaggatttcaataaataggactttttatccagacaatcgccttttatgttacttttaaacaaaactactatatggccgcatatttttcaagtccacaacaataggttgttgattcaatggacaacaattaagttctctgtttagcagcagtgcagcattttaatgcccttctctaataatggtctcattattgttattctaagactgggcctcaggattagactaccagcttttgagcttatgagttaaaaggtagcatgtgagggaacaatggattctcccccacttttgttttgaaaggacagggttcttttt

SEQ ID NO: 15616 - DNA, 315 bp, Homo sapiens
  source 1..315: mol_type = other DNA
cttttgtggattgtacactttttaaaaaatggttaattttatatgtgaatttaacctcaataattactttttttaaaaaagaaaaaaaatagaggctggtcagtgaggagcactccttaacagatttccctcagctaagaactcatttctgtatgattcagtcagcctcaaacattacatttaaacataggtgcctagctacgatgatacatttggcagcgttgcacggtgccagccgaaggcggggcctctgagggcactcccgccacacagcgcgaattgagcctcgggggtgccccggggcggcgaggggcc

SEQ ID NO: 15617 - DNA, 436 bp, Homo sapiens
  source 1..436: mol_type = other DNA
gcaaccagaagcctgtgggttctttcccaggcaagctgcttcctgtctgccagaagtaacccctaaacactgtgattatgctggtatataattctatatactattttgatttatattttcttgagtttaatgtctttttaaaaataaattagataatattctcaaaagattccattcaatcaaaggcaatcaatgtttatcctcagagaatcttaggcagatggcttaactttcacacatcagtgaagattgttgataaaccttactttccaagagcttggagtgccctttcctgaactctgcaaaatagccctcacagaacactgtggacagggagtttcaaggaaaatgttgcattcatcacattctagggaatgaactgcatggtaggcagtgagtcactcatcctgaccgcctgttctgtctgagtcaggaa

SEQ ID NO: 15618 - DNA, 358 bp, Homo sapiens
  source 1..358: mol_type = other DNA
attgctaaaatctgactaataatacttcacagaattgttgtagagaactgttccctgataagatagaaacaggtttgagctcaggagccttccatatgtcacatgtataatttaagttacggagtgcctattccatactcagccaggtgggccactggccgaaaataactcatagtttattataagatcctattctaaattggaagtgcctgtgcaaaggctggtgattgagtgtacagtgcatttcggagcggcaggctgtcccccaggccaacctcacgaatgtggccgggtgggacgttgtcctcatcgtggccatgatgacattgtcaacttcctggagggcaagcgggaccgg

SEQ ID NO: 15619 - DNA, 310 bp, Homo sapiens
  source 1..310: mol_type = other DNA
tgcctgtgatcccagctattcagatcgcgccattgcacaaaaaagcttcttctccccggcgagcccagcgccccagagccctgcgcaggggaattcgagtgcggagggcctctcccctgacagattaggcgctggctgggcggtagccgctgccatggcttcccgtgaggcactggtgaatgagcaaacacctgtgtatggctgcttagggaatttcgacgcaagctggcgtcagcctcaaattcgcattacgggcggtggctgcgcagcgtagctccgcctcctgcgtgagaggaagcggggacgtgtg

SEQ ID NO: 15620 - DNA, 477 bp, Homo sapiens
  source 1..477: mol_type = other DNA
tgcagagggctcagggagggctccccgaggctgcaaagagctttgcagggccccctagaggccccgcctggccaccgctcttccagagatggacgtgttttctgttacttgacagaaactgaaggcaagagctttcatttaatctacacaacaatcccgtgtggactcgttggtcgggtccaaccgcgcgccccgaagctgcccaggcgcgcccgccagcggcccccgccagcggccccccgcgccgcccgggtctcccggcctcgggggcaaaggggagcgccggtgccagcaggctgggggcggacaaaggccgcgggcactgcgctgggttggccggagcggctgcgaactccgggcgccaggacccggccgggcggtcgctccctcaggagcccgcgcctggatggagcgcctcgcggcgccgccgggccacgcgcaggccgagcccccgccaccgcccccgcctccgctccc

SEQ ID NO: 15621 - DNA, 524 bp, Homo sapiens
  source 1..524: mol_type = other DNA
gagaaatgcagcctaaatcagtctgccacatacaatcttgttgtaaaacgatctgtaaatggggataattttcctatatcttcccatggttacgtaatttttagatctaacacgtgaggaccaaacgctttacaagcataatctcattaaattctcaataagaatatattattatggaggttgcatgtgaaaatactttgtaattttacgtgctatcaagcattttacagaaccacggcgccgccagcctcgtgcccgggccctgtttagcgggtcttcggactcagggcccgaggggcggccagctggggtgtccggagagctcccctccccaggtctggggtgtgcacggagaggcgtccagagcctgctcagcattcctcgggagagagccagaccctggtcccccgggcccgtgcgccccagcgccccagctcccttgctcacgcgagccccgcccgccagctcaggtaggccgtccgcgctccgggcggggaaggcggtgcttccctgtccggaagtga

SEQ ID NO: 15622 - DNA, 559 bp, Homo sapiens
  source 1..559: mol_type = other DNA
aagtattttcttcagactgaaacatcattgtgttaaagataaaaaagtaaaaaatattcttctcaaatttttgagctcaagggcctcccaaagtgctggcattacagggtgagtaaggtagatatgataccaatttttcaggtgacctgtggctccaaaagcttctggaaggctcaagctacccatgtgcatctttgagcctcagtttccccatctttaaaatgaggggccacagtggcctgtgggcgagaataggcctgacagccattctccgacctgcgtgggcgctgcaggcaggccagaggccggagaggcgatccctggggctctgcccgggtctcaggacggcacctcaccgagtcctgctccacaggattctccgggtaagctagggaaggaagaggcgcggcctcctgagcccgcatctcagagcgccccaggctccccggcgcggccttgtccctgctcccgccaatcggcgtcgtcagcaatcgcgaaccggaccaatcagcggccgcagagtgtgggaactgtcgccatggcagccaggaggcgggcg

SEQ ID NO: 15623 - DNA, 516 bp, Homo sapiens
  source 1..516: mol_type = other DNA
gatctatttgtaagattgagaactaaactttgggtagcatctttatagattagacatatgctgtacttaaatgggtgaattttatgacgtgaagtatatctcaataaagatgctaaaaaattggcataaagatagtaaaatgtaagttttacaatgtgtaagggaattggtttaattattaatttcttcatttgaaaagccatggctagattgaagcttttgtaattagccaaatgttttcttatactataaaaacaatataggcacctgaggtcaggaggtgtgatggcacatgcctgtaatccgagctggagcagtgatcgtaccattgcactccagcaaacaaacaaacaaaaacagtttaaaatattgtattctgtctttttaattttggctacaaaaacttaattgacaatttgttttattaaacctcttgagattaaatatatgattaatgtgacattcggaatgcatgtatatagagttaaaacattattcatgactttaccataatta

SEQ ID NO: 15624 - DNA, 390 bp, Homo sapiens
  source 1..390: mol_type = other DNA
tgagaatgtgactatttgcttagtcagtgacagtgtctctaaccctggaaaggaagcttttactctcgctggggatatgaggtcacttacccactgtcttataatcagtacattacatcctttttaatgatgcgaaggaaaaatgcagttgatttaaaaactggaggtggtaaaacttaatcaccgaaatacgcgcttggatcccggtctcattactaagcgaaccgtcctggaccgcagagccgctcgcgagaggcaccggggctgtaaccgcgcaacctcgtgccgcgggcggaggcgagggaggattccccggccggtgcccgcccccgggctaaagtgcggcgcgggtggggctggtcacgcgcctggcttcctgcagtgcgaacc

SEQ ID NO: 15625 - DNA, 438 bp, Homo sapiens
  source 1..438: mol_type = other DNA
actgtggcagcctcaggctgatgccccaagagcctgggtcccccagtgcccgaggcaagcaagtggcctcggctcaaaccttctttaaagtagggccggaggctgagaagatggagccgcccaggctgccccacagctccatcagattgctgcaggttgagaagtcctcggaccgcctaatttccgccagccctgggattggtggcgccgcctctcagcgcctcctttcccggggagacagggcggcggccccagactgggagggcgggtcacagatccctcccagccccccactttcgtagagcgtgggcaggaggaacctctgggttccgcggatcagaaaaactccggggaggggcgcgggaggggcgggggcttgctccggccccgccccctgcgctccggtgcaggtcgggctccccctggcggtccccggcc

SEQ ID NO: 15626 - DNA, 349 bp, Homo sapiens
  source 1..349: mol_type = other DNA
aggaagacataatgttgtctttacaattgcggtgaggttaagaatttcagcaagctatgcttccctgcttgctggcactgagaccttgggggaagtcatgttactggcctcccgtgtaaagcagtacctaggagtgccccacctgggaccacttttgaaagttgggtggagagcacgcgtgcatcagggcagcacgcgcctccacatctggaaggtgggcgcaagcgtagcagggccggtcgggttcctcgccgccccccggccccgcaggtggtggagcagggcggggtgagggaggccagcggggctgggcggggcccggggggcgggggcctgacggccgggccgg

SEQ ID NO: 15627 - DNA, 303 bp, Homo sapiens
  source 1..303: mol_type = other DNA
tgtcactgccaggctctgccaggcttcaggattgatttctccctggtggaaaaggccgggcgcggtggcccgcgcctgtaatcccgggcagatcacgaggtcaggagatcgagactcccagctactcgggaggctgatcatgccactgcactgtagcctgggcgacagagcgagactccgtctcaggcccataggcacactggggcccatttgctcccaggcttcagtgggaggcgacgactcagcaccttcgactccagcctcgcagcggccccgccccacagaggcctggccccgcccctc

SEQ ID NO: 15628 - DNA, 518 bp, Homo sapiens
  source 1..518: mol_type = other DNA
gaggtcaggttctcaggccaggtcctgaagtttgacaccttggtgaggcggagccaagccccggggttttcttcccagctgaagaggcagctcagcctagaccccaggcatggcactggacacccctgctgtggaaacattcctaacctgggcaggatccgagtttggagagattggcgcgaagctttagcagcaatctccgattcctgtacaaccatagctggttgggcccacgacctgctgagcaactcccaggtcggggactacccatgggtcaggtgagcgcgcgcagccagcgtttcccgcggatacagcgagagccaagtgcagccgcctagggctgccggtcgctccctccctccctgcccggtaggggacctagcgcgcacgccagtgtggaggggcgggctggctggccagtctgcgggcccctgcggccaccccggggacccccccaagcccccctcccccagctgcccgcctgggctccggggcgtttaggctaggataaatagccc

SEQ ID NO: 15629 - DNA, 472 bp, Homo sapiens
  source 1..472: mol_type = other DNA
aggaaggctttgaggttcaaactggaactcccactgctcagggaaactacgagcagttgctgcttctgacctctgagggcagaaggtccttttcatcccatggaaggaacatggggcctccacttggagcggtcagcactggtccgggccagggtgtcttgacaaaactccgggagagctttgtctcaccagggagaaggcaaggggagggtgccaacgcccttctcacctcagtctgacccgggggcgcgggcccagacgtctctcggagcccccgcccctggagtggcgttccccgagggcggaccgtgggcgggtcccccgggagcagcaggagccgcgcggggcgggcgcccccagcgccgaggttgagggaggccgggctcggtgcggggccagcgcggcgccttcctccgggggcgagtgcggctgcgcgcgccgtgtgcccgtgtccggagagcggcgggctgga

SEQ ID NO: 15630 - DNA, 531 bp, Homo sapiens
  source 1..531: mol_type = other DNA
gctggaggcccgtgtcaggatgatcatctttaatgcttcagataaattgaacttaattaactattttttattaataggagctcagggccgtgcccggagcgccgaggctgccccggcaggagtcgacgctaaccagcccagcgtcgcgaggcgcgggttcccgctccgtgccaggtgcagagggcgacaccggcgacgtgccactccactcgcctcccaaggcgccccctcagatgtttgcgaacgcacaccaagcgggcgacgccggggtgatgccatcgctgccctgtcagcccctctgggctgtcgtgggcctccaaggtgaactgtggcgcgcagtgcaccgaggctgcgggcggagacgctgcgagcgccgccggggcgggctgactgggaggcggctccggggctgtcgtccggccccgcccaccactgatccccagtggcccgagggcccggccgcaccctctctcccggcctgcgggccgcttcgcgtccccggtccggctccggcgctcacctacccccggc

SEQ ID NO: 15631 - DNA, 614 bp, Homo sapiens
  source 1..614: mol_type = other DNA
agcattatgttaagtgccaggagccaaaaatctgtacatatttcatgatttcatttctgtgacattccagagaaggcatcagtggctgccgggaaatttctcgcagtgatagaaatgttctatattttgatcgtttggtggttacacaactatacatgtttgtcaaaactcagaattgtacacctcacagggtgaatattactgtatgttaattatacatcaataaatcttacttttcaaacattggaggaaagaatgtcctataatatacttcgtataaggagctaatcgactgactactcaaccagtaatgtcctgttgttcacaatagcacgtaatatgattttttgctaatatagaatgcttctctgcttgcagcttaaaatttttttttaattagaagggcactgaacacttctcttctaaaaagcgagaagcactgcagtcctatagcagagaatgtccaactctggattgttcagtgttagtcagacttgtgtggttaaggacggcccgcagagattgaggcgtgcaagtctctgggagcaggcggacgcgactgcccacgccccacgctgcccagctgctccgacgcccgcttctataagagacag

SEQ ID NO: 15632 - DNA, 319 bp, Homo sapiens
  source 1..319: mol_type = other DNA
tagttagtgaactagtcactaataatttggtcaccagaaaataccgtagtatcatctgaacctacccaaataatttatgttcaacataaacatgtaacttcaataatgagatgactcattaatgagtccttctaagggacgtgatattgatatttttaggaatggcaacagttatattattagggttatacaacttttatataaaaaaagtggcttcaagagctcctggagacaagccgccttggcagctggccaggctccgaacaggctgtagggggagtcccaccgggtacgccgggcgctctggcactagggcgcc

SEQ ID NO: 15633 - DNA, 606 bp, Homo sapiens
  source 1..606: mol_type = other DNA
gaggttgcagtgagctgagatcatgccactgcactccagcctgggggacagagtgagactctgtctcaaacaaacaaacaaaaaatttataaaatctgatactttttcaccatcttctgtaggaatttatcctagagatatatttgtacatgtgcaagagacatatgtacaaggttaataaatgcaccattatttgtaatatcaaaaggttaataactgtcaaaacagccattaatattgtataaattatggtccatccacaatagtaagtttaaaagaaagtgcagaataatacatatttatatgaaaaaagagtttttatgcctcaaaggcctaatggtacagtcaagtcttgcttgttctgtgtccttacattctttagagagaagtcacaagagacaagcaaacatctcttttgctaataatattgatcacttcctacttttttgggaagacctcctactaaacaagtggagaaagacctctgtcttcccacactggattttgcaaatacaactcttctgtgatacaccaatttggaaaactacttctagataaggaaacactattacccaatatgttaatttttaaaatacccaaagaatt

SEQ ID NO: 15634 - DNA, 480 bp, Homo sapiens
  source 1..480: mol_type = other DNA
gagttgctgctatgtccatcagcccctctgcagagctaatctgaccctgttgatgttctcatgagagccctgcctggatgctgggcacgtccccagctggttggctcaggagccaacttagaaaaagcatttccaaattggctaagccagcggagcagagattttctgtgctgagaaatatccagggcacacatgagatgtggcaggggtaggctgtccgttttaaagcttaaagctttagacatgaacctgccatgtggcccagcagggcccatcctgaggaaatgaccggtatagtcaggagctggctgaagagctgccctcactccagtgccgccatcacggggctcccactggcatctctgcagctgcacttcccccaatgctgaggagcagagctgatcctgtccattgccaaggcacgttacacaactgggataaggaggggaaatgacctgcagggactttccccagggacca

SEQ ID NO: 15635 - DNA, 370 bp, Homo sapiens
  source 1..370: mol_type = other DNA
cagttgctgctattggcctcagccctgctgggtaattgactaggccagctgagcagggcttttctgtgctgagagccttccagggcacacatgagacatggcaggccaggctggagtgcagtggcgtgattatagctcactgcagcttgagtagctgggactgcaggtgcagccttggcctccaaaagcattgggattgaagctttagatatgaactcagagggacttcatttcagaggcatctgccatgtggcccagcagagccctccctcagccccctcaatgctgaggagcagagctggtctcctgccctgacagctgccaggcatgtaggggaaatgacctgcagggactttccccagggacagca

SEQ ID NO: 15636 - DNA, 570 bp, Homo sapiens
  source 1..570: mol_type = other DNA
gcagacaacaaggtgacagcttttctcttacagcacatttcctgacgggaagggcttctctgtctgggagaggcctctttgggtaaactgctctcaatttaagagcaggttcctttagacaagtgattaggggtcgcctcttcctcgcctcgggataagggcaaacaagacgccaggggggtagaatccacgccgtccagcggcccccaggcctgtcagctgtggactacaactctagacaggaagtaactaactgggttggatcccgcttcttagagccgctgctgggaagaggccgaaacccagtggccgcagcagtagccaccgcctctgttactagggggtctcgcctccatcgctggctgcgaggcaaggcgggccctgggcacgtgactcaagagcgcggccgcgtctcgagcggcgaagggtcctgggatcctggctggcccaaccatttggcctctccagcccgcaacggccctgcggtcgcaggccgtagagagcgtaatcgcgaccgcggccttgactcgtcacgtgatgactggatgacgtcagcaactgaagttcacg

SEQ ID NO: 15637 - DNA, 541 bp, Homo sapiens
  source 1..541: mol_type = other DNA
gcagacaacaaggtgacagcttttctcttacagcacatttcctgacgggaagggcttctctgtctgggagaggcctctttgggtaaactgctctcaatttaagagcaggttcctttagacaagtgattaggggtcgcctcttcctcgcctcgggataagggcaaacaagacgccaggggggtagaatccacgccgtccagcggcccccaggcctgtcagctgtggactacaactctagacaggaagtaactaactgggttggatcccgcttcttagagccgctgctgggaagaggccgaaacccagtggccgcagcagtagccaccgcctctgttactagggggtctcgcctccatcgctggctgcgaggcaaggcgggccctgggcacgtgactcaagagcgcggccgcgtctcgagcggcgaagggtcctgggatcctggctggcccaaccatttggcctctccagcccgcaacggccctgcggtcgcaggccgtagagagcgtaatcgcgaccgcggccttgactcgtcacgtgatga

SEQ ID NO: 15638 - DNA, 567 bp, Homo sapiens
  source 1..567: mol_type = other DNA
gcagacaacaaggtgacagcttttctcttacagcacatttcctgacgggaagggcttctctgtctgggagaggcctctttgggtaaactgctctcaatttaagagcaggttcctttagacaagtgattaggggtcgcctcttcctcgcctcgggataagggcaaacaagacgccaggggggtagaatccacgccgtccagcggcccccaggcctgtcagctgtggactacaactctagacaggaagtaactaactgggttggatcccgcttcttagagccgctgctgggaagaggccgaaacccagtggccgcagcagtagccaccgcctctgttactagggggtctcgcctccatcgctggctgcgaggcaaggcgggccctgggcacgtgactcaagagcgcggccgcgtctcgagcggcgaagggtcctgggatcctggctggcccaaccatttggcctctccagcccgcaacggccctgcggtcgcaggccgtagagagcgtaatcgcgaccgcggccttgactcgtcacgtgatgactggatgacgtcagcaactgaagttc

SEQ ID NO: 15639 - DNA, 367 bp, Homo sapiens
  source 1..367: mol_type = other DNA
tggtttaatatatgatgtttatggaaaccctacctttctgcaaagctgagtttaaatgttacttctgtgaaggcactctaccaattttgattagaatacgcgtctcctgaatccaaatctcatatgcaaacatgtttctcttttgccccagtaggtgcgtggaggaagattgcagactgcctcattttcatgcctcagacaaatggcgactgactcatttatacattcattcattcaacattctttaacagcagtaactttaatatcttgagatttcttgagagcggaggttcccggcttagcgccggggaactcaccgcgcactaagagcggaacgtgaacttcagttgctgacgtcatccagtca

SEQ ID NO: 15640 - DNA, 517 bp, Homo sapiens
  source 1..517: mol_type = other DNA
ctaaaattgcctcttaaaaaaaaataagaaaagtcacctccttatttaatttggccgggatttacaaaataattacatatatccaggtactcatggtctatttttcatcattacacgacaatcagcagacaacaaggtgacagcttttctcttacagcacatttcctgacgggaagggcttctctgtctgggagaggcctctttgggtaaactgctctcaatttaagagcaggttcctttagacaagtgattaggggtcgcctcttcctcgcctcgggataagggcaaacaagacgccaggggggtagaatccacgccgtccagcggcccccaggcctgtcagctgtggactacaactctagacaggaagtaactaactgggttggatcccgcttcttagagccgctgctgggaagaggccgaaacccagtggccgcagcagtagccaccgcctctgttactagggggtctcgcctccatcgctggctgcgaggcaaggcgggccctgggcacgtga

SEQ ID NO: 15641 - DNA, 412 bp, Homo sapiens
  source 1..412: mol_type = other DNA
atgcaaacatgtttctcttttgccccagtaggtgcgtggaggaagattgcagactgcctcattttcatgcctcagacaaatggcgactgactcatttatacattcattcattcaacattctttaacagcagtaactttaatatcttgagatttcttgagagcggaggttcccggcttagcgccggggaactcaccgcgcactaagagcggaacgtgaacttcagttgctgacgtcatccagtcatcacgtgacgagtcaaggccgcggtcgcgattacgctctctacggcctgcgaccgcagggccgttgcgggctggagaggccaaatggttgggccagccaggatcccaggacccttcgccgctcgagacgcggccgcgctcttgagtcacgtgcccagggcccgccttg

SEQ ID NO: 15642 - DNA, 398 bp, Homo sapiens
  source 1..398: mol_type = other DNA
gttgcagtgagccgagatcagcccactgcactccagttaataattgaggctgcaggaagccatgatcacgccactgccctccagcctgggtgacagagtgagaccctgctgacagttcttggaatgtacatttgactgcaaggcctgagaggccaaggcttcactgtgcagactgactgactgctaggcattttcttcctttccaggtttcatggatgaggcctgactcaggctcatggctccgaccccggcttctgtggagcagtctgccggtcggttgtctggctgcgcgcgccacccgggcctctccagtgccccgcctggctcggcatccacccccagcccgactcacacgtgggttcccgcacgtccgccggccccccccgctgacgtcagca

SEQ ID NO: 15643 - DNA, 390 bp, Homo sapiens
  source 1..390: mol_type = other DNA
gccactgcactccagcctgggcgacagagtgagactctgtctgctattataagaaaaataaattatattttggattttgaaaaaggttcaaatgcaaatactctacgtccccttctgtgagatatatatctctctcacaaaaaaaaaaatatatatgtaaattttttttgagatggagttgtagctggcgactaattgagttataaatattaacaatttcttgctgtaaattgaaagaaattctaactttatttcagcactcagtcctgaagttacagaagttaataattttttaaaatcctgcaaacaatgcatggatatccccgtcttccagggcagaaaagacgccccatgcccgcgcctgggccggcggggggcggagcttgcgtg

SEQ ID NO: 15644 - DNA, 369 bp, Homo sapiens
  source 1..369: mol_type = other DNA
tagctgggattacagttaataatgaattatttccaaattccttttgcatacagaagacagggtctcactccgtcacccaggctggagtgcagtggcttgtgcttcagcctcccaggtagctgggattacaggggaggtgtggccagagttttaaaattttactttttctactttagctcacatttgaggtggtaaaagtggaaaatttttacatccagacaaggtttggttagaaataaaagcccaacagcagaggccctgcactgcgttgtgcctgcagcacctcgtgcgccttctgcagccggccaaccacctacaccgcagcccgcccacccgcacgcgggggcggggcgggcaggcagaggcgca

SEQ ID NO: 15645 - DNA, 516 bp, Homo sapiens
  source 1..516: mol_type = other DNA
cttgtgaatgtgaccttcacttagaccatcatcaaactcaaaattttacaataccttgaatgacactgtgcttacaaaactgacggtgatgtgtaatgatgactaatgtaagtcaccatgaagaatttttatgggaagtaaaaattcaattaagatggaagtacctacccttgcattgtgcaaggcaatggctgccttcaagggctaccaggtaaaatacggcctgtattatcattcttacggaatgatttcctggagaagaaattacctttacccttgccaacgtatagtatgaaggtctttaagcttaaaaaaaatcattaattagaggaccactgggcatcatccgcctagtcagtgacagaacagttctctgaccgccagtgcagtgccctcaatcagtcattaaggctcactggcacgattcgtcctgctgattccggcactcgaggggcgggttggttggaacccaccccaccaggcccctcttgcccgcaggacggcggcccggaagtg

SEQ ID NO: 15646 - DNA, 495 bp, Homo sapiens
  source 1..495: mol_type = other DNA
actcccagctactcaatcgcttggttgcagtgacactatcgcactccagcaaaaaaaaaaaaaaaaaaaaaatatatatatatatatatatatatatatatatatatgtaaaatttattttaatatttataaatgttgcatttataaaatatataaataatatatattacctggcataaagggactcctggttaagccgtggctttaagaacagtttgaaaaccttcttgcttttaaaagacataaagacagacagacctctagtttggtttgactggagaaaaagaaaaacaatacctattaatagcctttatttgtgcgtgttagcaacagtttatcttgtgaatgtgaccttcacttagaccatcatcaaactcaaaattttacaataccttgaatgacactgtgcttacaaaactgacggtgatgtgtaatgatgactaatgtaagtcaccatgaagaatttttatgggaagtaaaaattcaattaagatg

SEQ ID NO: 15647 - DNA, 205 bp, Homo sapiens
  source 1..205: mol_type = other DNA
gatgctcaacaaaaactttctgaatgaatgttccctgggactttagtggctcaggccagggatactccttccaggaagatgggtcgtggtttccttcacttgcccactccggggtcacgaaggagaggccccggattccgggcgcagccgcggctgagcccggggcgttccaagcggcttccgtcctgcagcaagtccggaagaa

SEQ ID NO: 15648 - DNA, 308 bp, Homo sapiens
  source 1..308: mol_type = other DNA
gaaactggtgaaaactagtcttcttaactagaaaattggcggggattccctcagattgtacgtctcagaaatataggtcagatttctaggtcggccacagttacttagtacctatggtgttttgtaaatacataattactccacaatgtgataatcgatatctttcaaagttgattctcagcctccctggggccgcgccccatagccggtttcagaccagccgccccggctcaggccggtcccgagctaggtcccaggactccagcccccggaccttcttccggacttgctgcaggacggaagccgct

SEQ ID NO: 15649 - DNA, 286 bp, Homo sapiens
  source 1..286: mol_type = other DNA
ctggtgacagtgacctcacctacaggaaacactaatggcagtgcccttagcagaccacttaactcggagagttttaataatatactgattacatttctgtgaatgcattagcccaaagcagtcagaactttgtggcagtcctgaccaccctacatgttaagagtttaactgtaccattttataaaatgaaagatttcttttttgaacagcctaacaatagcatattaagttatttgccttttgataacaaccatcccataggtgctcatgctgtgtctgagctctg

SEQ ID NO: 15650 - DNA, 256 bp, Homo sapiens
  source 1..256: mol_type = other DNA
tccagtttggaggcatttccatcccaccgaaaatttgctaatcaaatatgaatatgaagcatatgtaagcgcgtgcccccatccccggcacgcgtgcatctgagtaggaggtacaagacaggaccacggcgctgctgtgtgcgcctgcgcagcttcgcgagcgccaccccggctcgagatccgtctgttcataagcgccccgcgcgcccgggccaccagggaagccgctcacgcgtttgtacgtgtctcggcctgg

SEQ ID NO: 15651 - DNA, 328 bp, Homo sapiens
  source 1..328: mol_type = other DNA
ataataacattcttttaaggcgcaaaataacttaaagttccaacagctttgattttgaattaagtaagagccagcagctttgtcttcgctctgtcccaggctggagtgcagtggcgggatctcggagtagctgggactgctagcatgttttaacagcttgacatatttacatactgtatcattctcagtgtacgattttccagtttggaggcatttccatcccaccgaaaatttgctaatcaaatatgaatatgaagcatatgtaagcgcgtgcccccatccccggcacgcgtgcatctgagtaggaggtacaagacaggaccacggc

SEQ ID NO: 15652 - DNA, 347 bp, Homo sapiens
  source 1..347: mol_type = other DNA
ctttagtctacgtaaaatcaacattaaatccacttgggacgtattttagcatattccaattgcaatcgtatccaggacagcaatgtgtttgtctctcagccaagctcagtcctcacccaggcaccggggtcacggtcacgttcacgttccgtggacgccttggcacggcctcccaagggggcggggcctggggggtatccgccttctgacccctgggagatgcctcctttctccgagcagcagccgggggcctggccggcgccgccagccgggccccgcccccccggctcccgcccgctcatggccctggcagcggtgacgtcacggggctagctgacagaaccccg

SEQ ID NO: 15653 - DNA, 295 bp, Homo sapiens
  source 1..295: mol_type = other DNA
cacgcctgtaatcccagatactcaggaggctgaggcaggagaatcgcttaggttgcagtgagccaagatcgtgccactgcatccagtctgggtgacagagactccatcgaggatgggccctcctctcttcgaagaggaaggagacctaacatttccctgttcttccccagggcttgtaaagatactcaggctgtgtatgaaccacccctggatttatgcacctgtacctgagtgtgtgcctgtgcacacacactaccctgagcccctcagctcagagaggtctggctgagacagc

SEQ ID NO: 15654 - DNA, 634 bp, Homo sapiens
  source 1..634: mol_type = other DNA
gggcacatgggcagctccctgctcgtccgggcccctggtgcccacgagagcgtgccccgcgccgcacgtcaactcagtggagggaggggctgtccactcgctctagctccccagaggctgaacagggcgcctcctcagcgtcctagaacgagtcctcggcacctggtattgcatgcgccctagtatggggccgctccacttgcgcaggtgttggcaacatgcggggagcgccacggcatgcccccaatcccaggttcagcgcgcacggccctgccggggtccctctggcagttgccgtagccgcgcggcccgacccggggccttgtccaagcaaccttggcatgggggcgacgactgcggagactccgcgcagagtttgatccggcccccttcgtgccccgggagcaggccgctctcccggtcccccgccccgccagccctgcgcaattcccggcgagcggcggaagcccgcccgggggcggggcggagccggggctggggggtgccaaacccacccggcggctgcgccagcgactctgcagctgaagcgcatttggtgaggcggagggagcgcgcacggagcgcgggacggagcgccaggcggacggaccgaaggacgggagctcggcgcggc

SEQ ID NO: 15655 - DNA, 581 bp, Homo sapiens
  source 1..581: mol_type = other DNA
aaccagggtggtagctacgtggcagcctcaagcccccatggggatggggcacatgggcagctccctgctcgtccgggcccctggtgcccacgagagcgtgccccgcgccgcacgtcaactcagtggagggaggggctgtccactcgctctagctccccagaggctgaacagggcgcctcctcagcgtcctagaacgagtcctcggcacctggtattgcatgcgccctagtatggggccgctccacttgcgcaggtgttggcaacatgcggggagcgccacggcatgcccccaatcccaggttcagcgcgcacggccctgccggggtccctctggcagttgccgtagccgcgcggcccgacccggggccttgtccaagcaaccttggcatgggggcgacgactgcggagactccgcgcagagtttgatccggcccccttcgtgccccgggagcaggccgctctcccggtcccccgccccgccagccctgcgcaattcccggcgagcggcggaagcccgcccgggggcggggcggagccggggctggggggtgccaaacccacccggcggctgcgccagcgac

SEQ ID NO: 15656 - DNA, 337 bp, Homo sapiens
  source 1..337: mol_type = other DNA
taaacagtgttgaatgaatgaataaatgagtgaataatttcttctgattgtcttaaatgcttcataattgttacttataactcaatttggttggctctagatgatctaaaaataatctagctaataaatatcactatattttataaggagactcaatatatctagttgttaacatcgataaatcaaaaatagaaatgttgttttattacgcaaagcttttttaaaaaaaagaatggaaactgtatttcattttatacaccttagtgtcatttgaaataaacctgattttgaaacttgatctttagctatgaaaggcaatgaaagacttcaggaagct

SEQ ID NO: 15657 - DNA, 527 bp, Homo sapiens
  source 1..527: mol_type = other DNA
ctatttatttattttatgatttagtattatttttataaaataaggaagtcataatgttttcagatcgttttcaaattagcttctaaaggtcttaaccattacaaagaactgtgttaagtgctgggctagaaaaaccccagtgtttactcggggctgaagtaggagagccccactgccccactggaacgtggaggtcaggggggaggtgcacttcaagtgggaggctctcgcccacacatttaaatagctaacatctattgattccttttttccatgaacccttattttcctcatttcacagatgagaaaattgaggtcacaaggtcatttagcaatccctggacgcacatctggggcccgtggcacctggggcagggaggggcgctcggtcctgggctggggctgggggagcgaccggcacgggcgggccgggggtggagcctctggcgagctgttcacagcgggcagtcccgcccctagccgatggagggctgggattggcacgagcggggaccgcagcggcggag

SEQ ID NO: 15658 - DNA, 425 bp, Homo sapiens
  source 1..425: mol_type = other DNA
catgaacctcccggttgggttctacatgtacctataacatgaagaattggtcttcataatttatatcagtccctggtgcttgatcaaatttaaacggtgacatatcaagatgttataaatataatgtgatgatgataaatatgcactgctgtatcaaattcttaaatagaaaaggataataaagtaaatcaaaactttttagagaaaacttcgtttcctaccaagcttctttgaagagattatctaagtatctcttcacgagtgtggtgacctcccagatatggcacatgactcatttgcaggtaccctgcaatgatttccagcttgatcagaaatgacacacttcataaattgatccctattcaaatagaagacaaaggctttctgcccttcccccagcaggccaaggctggtgacagccttca

SEQ ID NO: 15659 - DNA, 749 bp, Homo sapiens
  source 1..749: mol_type = other DNA
agttgctgaacttttcccccaactctgccgtagaggcgggagtggagggcggtgcctgcaccgattcgccggcggctacggtcgggaggctcggattggcgctcgggggccggggccggggcgagcgggcgtgggggaggggagcggccctccccgcccgcggtatcggctcgcgccgggagcgggttaggacggtcacgctccctctgcccgccagccggcccgccagtcccggtcccggcgtctctctccggcacccacctcggcgctgcggaaagactgactgccaggtacgcgggctcccgggcctgagaggggcagcggtgctgacgagtcccggctcagcccccgccggctcccgccgtgaggtggactgacaggtcagcgggacgcagaggggcgcggcgcccgggcgacacggcaccgggagagggctcgggagggtggcggcggcggcggcggcggccgtttcccgcctcccgcttcgccgggggccgtgagggaggagctgagctcccgcgcagaggggttccgggcgcgggtttgcccgcgctcaggccccgcgcagctaaggggaggcgccggccacgtccgactttccgcgccaaatttttaaatcgaaggcggaaggtccggccccgcccctggcgccgtcggccaatcgcaggcccgcttccggccctctgattcctggaaaccacgaatgctgtccgggaactgtcgggactgcggcgggcggatttggccga

SEQ ID NO: 15660 - DNA, 591 bp, Homo sapiens
  source 1..591: mol_type = other DNA
gccccgggcccagatcgagagaccggcgcccagatctcggcgcggttcgggcgcaaatgatccaggtgcagccgaggcagcgccgccgccccgggcctcggtgtcccgttctgcaaagtgaggacgaaggatcgaagtgtctccccgaccctgctagtgcctgaggcgaggacagggttggagggttttccgccttcctcctcttgttctcaccgctgggccaaggcccagagcccacggagcttaggcaccagtagccaagcttctccctcctcgcgccagtttctgcgaggcacggggcagacggtgggcagcacaatcatgcatgccaggggtgagtccgagggcaggtgagccggcctgccaagcggggaatcgcagggcgcctgcggcccagcccgcgagccccggacgggcagttgctgaacttttcccccaactctgccgtagaggcgggagtggagggcggtgcctgcaccgattcgccggcggctacggtcgggaggctcggattggcgctcgggggccggggccggggcgagcgggcgtgggggaggggagcggccctccccgcccgcggtatcggctcgc

SEQ ID NO: 15661 - DNA, 414 bp, Homo sapiens
  source 1..414: mol_type = other DNA
tagtgcctctccagttggacctgaccttaacttaggagaggagagaacattttttcagaagttcaagtcttcatgtgggcacttacgtactaggccactccagcctcccagattccaattgttcaaagagcttgctgtcaaccagagctgctccatccagagaggtgtttggacacaggctggacagctccctgatgggatcctgtccaggggattcggtgcccggaggcatcttctgactcaggtgcgtctggcatgtctctgcctggcaggtctgccattgaatagcagcagctccggagagaccctctctctttctctggtcccctagcctgggaaagggctcgggaccctggaaggggaccggggtggcgcagcgaggcgccgcaaggagcggctgcagcggcagcggcc

SEQ ID NO: 15662 - DNA, 416 bp, Homo sapiens
  source 1..416: mol_type = other DNA
tccgagcttctgtgacgtcagccgggaggtgactgatctatctgcagattcccaggcagggaatgcggctccataggcagttgcttcactgcctcctgcagctgtaatgaatattgatgctttgtgcttcacattcctctgatgatgatgatgatgatgatgatgatgatcatgcaccccatggaagtatcatccctcactatgtggctccagatggtgggaaagacagctcaaatctgtacttttctacaaaagacaaatctgactgttgaacgttttctcctcaggtatgggtcttacaccatgaaggaagatgacagcccaagcattaaatgcccatttacattgttattgacatataaattatctgtgccaaggagatgatgccggcagcagtcaccctcattgcaaaggca

SEQ ID NO: 15663 - DNA, 343 bp, Homo sapiens
  source 1..343: mol_type = other DNA
ggatcatatgatgccataatcggcttgctgagcctaggcaaagcctacattcccatggagatggaagaggcaataaacctgaacaatctgaaattattcagatttctgcttgtctgtgtcccaaaccactgatctgggctaggacatctaggtgatgaattaggccaggacctgggaggaatcctgatttctcgtgtgtgtgtgtatgtttatgtagggacagtgacacccaaggccaatatacaattgacattgctggaagggtcgcggctccgcgcacgtgctctcggggtcaccttccccgcgcctgtgagggtgccaggagttcgtctccaggtcccgc

SEQ ID NO: 15664 - DNA, 586 bp, Homo sapiens
  source 1..586: mol_type = other DNA
aggaatcctgatttctcgtgtgtgtgtgtatgtttatgtagggacagtgacacccaaggccaatatacaattgacattgctggaagggtcgcggctccgcgcacgtgctctcggggtcaccttccccgcgcctgtgagggtgccaggagttcgtctccaggtcccgcccctgtgggcggggcgaggcagcgtcgccgcgaggccacccggaagaccaagccgggtaggcgctgtctccgtcgcctccaacccccccggtccgaccagggaaggtgggatgctctgatggccgggcctgcggcgctgagcgcggcggcggcggctgctctggcggccgccctgctcctgctgcgtcgtgaggacccggggccgggggctggccccaggtaacccctccgcgtatgggaccgagctgggccaggtctcctggccgggccggggataccgtggggtatgcccagtgatgccagcagcttgtggcacctgggcgcaccctccagctcgggccccttccgatgggtctcaggtgcgggcgatggccggggagccgcgccccgcacgtgactcagcacttcccggactgcgg

SEQ ID NO: 15665 - DNA, 326 bp, Homo sapiens
  source 1..326: mol_type = other DNA
ctcagcctcccaagtagctgggattgcaggcgcgtgccacagtaacttgcccaagatgggtaggattcaaacccagcaggctgcctctaggggtttgaaggacctgggagcccagaaacctttggcctcctccgccaccagagggcgtcatgggccgatcgcccctccgctaaccgctcatcccaggacagcgacgtctctctgccttggggctcacagcagcgggccgcgacccagcgcgcactgcgccaaccctgcggcaggaggaggcggagcccccgctctcgccccgcccccacctcacgtgacccgcacggcgcctcgag

SEQ ID NO: 15666 - DNA, 468 bp, Homo sapiens
  source 1..468: mol_type = other DNA
ctcagcctcccaagtagctgggattgcaggcgcgtgccacagtaacttgcccaagatgggtaggattcaaacccagcaggctgcctctaggggtttgaaggacctgggagcccagaaacctttggcctcctccgccaccagagggcgtcatgggccgatcgcccctccgctaaccgctcatcccaggacagcgacgtctctctgccttggggctcacagcagcgggccgcgacccagcgcgcactgcgccaaccctgcggcaggaggaggcggagcccccgctctcgccccgcccccacctcacgtgacccgcacggcgcctcgaggccggaagcgattgcgagccagcgcgcgcgcttcggcgttcccggcggtctgcgaagtttccggagcccgggtcccgccgcgggttcgcgcttgtgctcgcgctcgttcctggagtcggcggccgctgcgcgcgctcgttgc

SEQ ID NO: 15667 - DNA, 388 bp, Homo sapiens
  source 1..388: mol_type = other DNA
gtgacctaagaactaggtctgtgttggaaaaacttcgtttttctttctctaaaacgtcttcagaaaagcttaaaaatacaatgaaaaaggtcagttatactcagaattttctcttgattgtgataacagaaataggactccaagactgactgtctggaagggtagggatgtgagaatctgaagtccacatacaatgcaggacccatgcctgcttcagtcatcgcagagctgtggggctatgcgcagaccctctttggtaattaggaggaggcaaacttctgtcttggccagcatactctaggctgttctttaaaattgaatccaagtaatgatttatcaaacttgtattatcaagaaaatgtcaaaccaagggcaccttgctttgcac

SEQ ID NO: 15668 - DNA, 463 bp, Homo sapiens
  source 1..463: mol_type = other DNA
gcccagcccagcttttctctccagagaatgttgtggtggttttgataataccattagagtactgtgagcagggactcagccatgagggggtccgtgcgcgctcggtggcgccgcctcggtctgggttcccccgaggaaaaatacccacccgcgagggctcggcggcttttcgactcgtcggcagcccccaccgcggtgcggagcgactgcggctcggaggggctggagcgcgtgaagccgtgggggcgccgtgcgcctcccgctctctcgtttcggccgcaggtcctgggactccgacttcggtgctccgggtgatagcggctgcggcgcctgcagtccagatgcccgggctcccagacgaacgcagccgcagcggggggccgggccccgagccccacgccgccgccgccgcgccagcggtggggggcgggctgggggcggggcggccggggctgccttcccg

SEQ ID NO: 15669 - DNA, 522 bp, Homo sapiens
  source 1..522: mol_type = other DNA
tcaacagtagattaacaactagttatttcctgttatctgaatcctaacatttacatcataaaatatatgataacctacacacatatgtttttgttcacagaggaaattattttcagtataaatgcattaggtgcctattaaataacaggcattgatttagttgctataatgtcccaggtttttgagtctttatattcaaataaaaaaaacagacaataaatatgtgaacagatttcaaataaacgtatgtagtgatgtgttttgaggacaataaaccaaaataataagataacaatatgtataccttatatacagtgatcaataaaggcccttctaatgaggagtcacttgaatcccaatatcagtaattctttcttagtaatagagctctaatttttagtgggcacatgatcaccaagaaaaagtaacacatactcttctgtagctaagtgttgctatataactgagttgcagccagtgcaatattaagaagtgccttttggtactactggaagttcttct

SEQ ID NO: 15670 - DNA, 325 bp, Homo sapiens
  source 1..325: mol_type = other DNA
ccattagacagtgaatctagtctctcaattattgtgtagttatcaatgtaatatgagttaattttcttttcttcagcctcccgagtagctgggaccacaggtgcctgcatgatgacaggcgaatagcagctaaatgtttaacacattctgtggcaaggactgtgcaccgtgcttcaacagcctaggaggtgggtactattatcattctcctttaaatatgtggaaactgaaacttagaggaccttcccccacctgtagagggcagagatcctgctgagccggccttaaaagggaggggttcctttaagggagagggacttttccc

SEQ ID NO: 15671 - DNA, 410 bp, Homo sapiens
  source 1..410: mol_type = other DNA
atgatgacaggcgaatagcagctaaatgtttaacacattctgtggcaaggactgtgcaccgtgcttcaacagcctaggaggtgggtactattatcattctcctttaaatatgtggaaactgaaacttagaggaccttcccccacctgtagagggcagagatcctgctgagccggccttaaaagggaggggttcctttaagggagagggacttttcccagtaactcccaactgggagaggggttctctccgaccaaccggctgacatcgggaccccctttggggggagggaagcggcagccctggggaaccaggattcctggggccggccaacagggccggggggcggcgggtcccgagggcgtggagccagccgggccggggggcggggagatggcggtctccgccggcc

SEQ ID NO: 15672 - DNA, 696 bp, Homo sapiens
  source 1..696: mol_type = other DNA
gttttgaccttgaaaatgtggttcaaggccagtctgttctggtttgtgattcatgtgaaagagattaataatttacattaatctagcagttttcttgcttgcttaatgagataaattcattgatgctgtacctgtatatataaagccaaaactcttacatgaatgtctttcaaaatttatgctttaggagaaggacatacaaagaaaaataaaataagatttgaatggaatatatgtaaattaaaataaatctttttaaaaataaatctttaaattatcaattacaatttgttggcaagcacaaggtatagctattttcagtatattggtatttcagtagtgtattgtaaattagttaaataaagatgcttaaaattccaaggaatttatattaaattaactgtattttatttaatcaacttcactgagttttcatctttttcctgtcaggagttaaaacaaacacatgaacaatgtaattatgtattttgtgtgcacatattttatattcaagggagcctaggtgtcttggaacaccacaagcataagttaaatatgttgaaatctttcttagaagtaacttgtgaatttttaataaagggagatgatgacatcttcccaatggtttccatagccttggtcagggcgatccgcccagctcccctagaaagttggcaacctagctagccaaaagaa

SEQ ID NO: 15673 - DNA, 583 bp, Homo sapiens
  source 1..583: mol_type = other DNA
attgatgctgtacctgtatatataaagccaaaactcttacatgaatgtctttcaaaatttatgctttaggagaaggacatacaaagaaaaataaaataagatttgaatggaatatatgtaaattaaaataaatctttttaaaaataaatctttaaattatcaattacaatttgttggcaagcacaaggtatagctattttcagtatattggtatttcagtagtgtattgtaaattagttaaataaagatgcttaaaattccaaggaatttatattaaattaactgtattttatttaatcaacttcactgagttttcatctttttcctgtcaggagttaaaacaaacacatgaacaatgtaattatgtattttgtgtgcacatattttatattcaagggagcctaggtgtcttggaacaccacaagcataagttaaatatgttgaaatctttcttagaagtaacttgtgaatttttaataaagggagatgatgacatcttcccaatggtttccatagccttggtcagggcgatccgcccagctcccctagaaagttggcaacctagctagccaaaagaatcagc

SEQ ID NO: 15674 - DNA, 456 bp, Homo sapiens
  source 1..456: mol_type = other DNA
agaacattgtaattttcattttgtaaactatatattctatattcaagtaataacacatacgaagagctaataagaggtccaggtctcccagtgacagaggctttgaaacctattgaccccagtctgttagcagaccgatagacagagaaaggcggctgcaacagcgcaccgctatcaccttcaggaagttgttctgaggcaagcgctcccacaggctgctgagaaacctggcgggacgctccgcttcggccttccccacctcctgcagacgctccagcagcagctccgcctgggtctgtgcaccgcagaccgccggcgggcaaggcgggccaggctctcttggagtgtctcctcatcggcgtcccggacgcccgggccgggaaagagttgctgcaccaggtggtaacgagctgcatccccgagggcccggttctccagcaggcgcagagagagcag

SEQ ID NO: 15675 - DNA, 344 bp, Homo sapiens
  source 1..344: mol_type = other DNA
tttgtgtgcacatattttatattcaagggagcctaggtgtcttggaacaccacaagcataagttaaatatgttgaaatctttcttagaagtaacttgtgaatttttaataaagggagatgatgacatcttcccaatggtttccatagccttggtcagggcgatccgcccagctcccctagaaagttggcaacctagctagccaaaagaatcagcctaccgcagagcagcattgctcacctgagacctgagatgctctctgctccttacagcaaagacaccatttttaaaagtaccattctttagagcaataagtcttcaaaaccgttaggaaacccgtgggttg

SEQ ID NO: 15676 - DNA, 437 bp, Homo sapiens
  source 1..437: mol_type = other DNA
agttcaaggactccaaacttttcaattaaatgtattgccactagaagcaaataactgatgcagtttctgccagataatggcaataataaaggtgaaatgtgaatattttttaaattatatctaaaatcatccacatcatttagcttgtggatgtacatcattataaaaatggtatccaagcactgccattgtaaacattaacaaaacaaaataaaaagtgtaatacattttatttatgctcttacaacagttggagacaattgtctctgacatatttcctttggtaaagcaaaagcctcttctaaaaatctgatatttaaagagaattgtaagacatcaaaatgttcaattcaattttaatattgtgctaaagttaaacctctagagggacaaggagggggctggagcttggccccaacctcggaatgctgccaagg

SEQ ID NO: 15677 - DNA, 454 bp, Homo sapiens
  source 1..454: mol_type = other DNA
ccgcagcagctggggtggccacatcgattataaatgcacacatatgcattcgtgcacaagagtatctgtaatgcatgctttgatgaaattgagttttatgtgaataaacaaacgctagccgatatatatcaacacactttggggagagtccaaagttgagactggaatctgaaattttgctttggagacattatttatactggcaaaattaaattctgtcaactcagtatggtaaattaccattaacttgttaacagattctgtttctacattctaaaaacatcttcttacagtgaagagtttgcaaaactttattcttataaaattatctcctccaaccctctccaacaaggttagatcagttgtgtatgagagatcttatgccaaggaaataagatctgcttgtgcacaggagacagtttggatgtaccagcctggcagaggaagtccactt

SEQ ID NO: 15678 - DNA, 380 bp, Homo sapiens
  source 1..380: mol_type = other DNA
ccttgtttttatagatgtaagatatttaagtacttctactctaaagatacttattccattttgtaaaaatgtgtcattacagaaagagaatatgaagactcaggttcaagcctagttctgtcatgacctaagtactttgcttaaccttttaggctatatttttaagggtaatgagagttgtaaaaatgctgtcattgccagtgttcagtcataaaatttggtgaaaatctatggttttaagttacttgcttagaagctggctctttccaagtatattgtacaaaccatggggttaataattaataaactgaactgtcatccagttcattataatgtcatgatgacaacattttgtgagagaagtctgtataaaaagcaat

SEQ ID NO: 15679 - DNA, 510 bp, Homo sapiens
  source 1..510: mol_type = other DNA
taatattatatgtaaattatacatctataaaaaattaatacctttttgtaatgtttgaaaatttttacataagcagaaataactaacaggtcccaccttatacttactaaatcagcaagtaaattttaactagttgcccagctgattctcatacttattaaaatttgaggagaatcattaaaacatttctcagtagatgaaactttattatttctctcggaaggataaatgacttctaaataccagaaactagtggaaatgtcaactaatgccacatttatgacgctagattcatcgtcataataatggactgttctgaattttggctttaatttctaggacaccagagtcccatctaccactcattcatttataaatggtaagctttggaaccgtagcgaagcttttccatcccttccctgcaggtgtttcctggaacctaggctttggccacaagcccagcggtcgcggggcggtgccgctggggcggagccgcggaggaccagggac

SEQ ID NO: 15680 - DNA, 538 bp, Homo sapiens
  source 1..538: mol_type = other DNA
attgaatatctcagtagcagagatagtagttctgtttctcagaattgcttttgcaaaatggtgttttggattataattgtgctatttaatttttctaattaaaatttctaaatagagcctattaaatattggatgcttatgatagaacatttgaaaatatactgttaacatttttggttcacctgaggaaaaggactccttcaggtgtgtgaacttgagccaccaggtccaaccccattttaacattgcaatgccatggcagttctaattagaacaatcttctaaacactctctccagagcgggaccctacgcgtctggaagtctctcccagtgtgccccgccccgcgccatcctggggagcagcgggaataacgcccctggccagtgctcacccgactgaccagagcgcagcccggtgaccgaagcgcacggggcgatcgcgaggcgccccctccctctccccgcgccgcctccagcgcgagtgacggcgcgccctccgggctccggagcggcggcgccgaacaatccccggcaggg

SEQ ID NO: 15681 - DNA, 523 bp, Homo sapiens
  source 1..523: mol_type = other DNA
cgaaatagtggtggcctaggcttgcacaacatactttgaatcagcaaagagtcagtttctttactcgtttttttaattattgtaactatgagtaatacatgtcaccttttgtccagaatacattttatattaacaactgacttgcaaactttataaatataaatataaatatacataaatgtataaaatatatattccatagtatatatctatatatacacaaatactcttataggtacatgtatatgtatctgtgtgtgtgtatgtgtaaagaatgctttaaatatgctgttcagcaaattaatgaataactaatggtttaaaatgatgataacttttactaaattagtctctgaataaaggtgaaatcttacattaaattttctaattgccaactttttagcagtttgctattttatttgaccaccatttaaaaagaaatcttttcttttccacaatcacttttagtattaacttccttccaattaaaacattcctctgatgagctgcccagtggaataaa

SEQ ID NO: 15682 - DNA, 438 bp, Homo sapiens
  source 1..438: mol_type = other DNA
acaatagctaatggctgctgggctcaatacccgggtgatggggtgatctgtgcagcaaaccacctgtcttaaaatacatggtgaagatataaataaataataaaataaatctcaaactaaacaaaaagagttacttcacttctttgggtagatcttaagtttctttttataatattagaatcatagtttacctacattacagggcttttatgaattataaatggtcctcagtcatcatcatcataaatgattcaactttctgccccctctacttaaatttaagaaagaaaaacagaaacgtttacctaccaacttttaggaaccacccctcactgtggcactggacgcgcgggggaggggagccggacgctagaccgccctcccgcgttcccatgacaacgacaccggcgggcgcgtagcctggagagcgaagtgccg

SEQ ID NO: 15683 - DNA, 460 bp, Homo sapiens
  source 1..460: mol_type = other DNA
gcccttggcgccatccccaaacgctgatgtgcggaagatccctattattacctgggcacttctgaaattctccagcgagaaggctcctaggataagtgaggatcacgtcagcaagaaaccgaatctcagtcatgatgattatttttcatgtaagggatcctatgctactaattcactttgtgttaagtaggagtttcttaaaaaaacaatttcattaggctttaagtacacaaatagggcaatctactagagtacagaaaaattgtttatgatttcagggcatgacttgtttggattcctcacctgcaaggagcagggggcccagcacatgtcagaaattcctgctataccagatgactttgccaaaatctttgtcctttttttcacttagggtgaaaaaaaaaattgatgacccgtgttttgctacccaaagctaaaacgatcaacctatgaaaactgg

SEQ ID NO: 15684 - DNA, 489 bp, Homo sapiens
  source 1..489: mol_type = other DNA
ccaattaactgggcagatttgtgcagcaggcccttggcgccatccccaaacgctgatgtgcggaagatccctattattacctgggcacttctgaaattctccagcgagaaggctcctaggataagtgaggatcacgtcagcaagaaaccgaatctcagtcatgatgattatttttcatgtaagggatcctatgctactaattcactttgtgttaagtaggagtttcttaaaaaaacaatttcattaggctttaagtacacaaatagggcaatctactagagtacagaaaaattgtttatgatttcagggcatgacttgtttggattcctcacctgcaaggagcagggggcccagcacatgtcagaaattcctgctataccagatgactttgccaaaatctttgtcctttttttcacttagggtgaaaaaaaaaattgatgacccgtgttttgctacccaaagctaaaacgatcaacctatgaaaactgg

SEQ ID NO: 15685 - DNA, 366 bp, Homo sapiens
  source 1..366: mol_type = other DNA
caaaatgatgcaatcaatattactgagctaaatattgaccattttgacctgcatatgcttattcaaaattatctaaagactcaaatattcttaaagaaattcctgaactgtcagctttcccgtttaaacagttaagaaaacgattgctgttttattttttttccacaactaagaactcacatatatgttttagaaatctgtgtgccactgtcacaggcagggtgtccagctcctgattcagcgaggcgcccattgccgctctggatccagctagatgtaatagagttccattccttggaatccgtgaggccaagaacaggcttgctgccatcttgggagcagcccgccccatcttgggagtggcct

SEQ ID NO: 15686 - DNA, 511 bp, Homo sapiens
  source 1..511: mol_type = other DNA
gaatttataactggattgttaccttcctttagcctgtgggtacagtgatagtttgaaggctataaataatttattaattaatggcaaattgatttttctaggtcctagaataaagaaatattacctttcattttacagatcaagacaaagagagtcaggaagtttaagacttaagtctttaaagaccttgtaaggtcttattatcagttcagaaatgttaaatgatttatgaaatgtttcatggcttgagccaggactcgagcaaccttcttcaagaggaagacactgctgaggattgtgtttgcattttacagattccatctcacgaattaaaaatgctgaggtggtaaattgttatcaattctatgtttcccagaaatgtttaaccttaagttaaaaaaaatctaagcagaaagaggagcagacagctcttagctaagagtcaacttttgagatcttaagtacacgttggtgtctgaagattcacacgagtgcctctggtaatcatttt

SEQ ID NO: 15687 - DNA, 431 bp, Homo sapiens
  source 1..431: mol_type = other DNA
tagatcttgtagaatacacaagaatttataactggattgttaccttcctttagcctgtgggtacagtgatagtttgaaggctataaataatttattaattaatggcaaattgatttttctaggtcctagaataaagaaatattacctttcattttacagatcaagacaaagagagtcaggaagtttaagacttaagtctttaaagaccttgtaaggtcttattatcagttcagaaatgttaaatgatttatgaaatgtttcatggcttgagccaggactcgagcaaccttcttcaagaggaagacactgctgaggattgtgtttgcattttacagattccatctcacgaattaaaaatgctgaggtggtaaattgttatcaattctatgtttcccagaaatgtttaaccttaagttaaaaaaaatctaagc

SEQ ID NO: 15688 - DNA, 378 bp, Homo sapiens
  source 1..378: mol_type = other DNA
agactttcttttaatgtaatctagactctgttaggacctaggactctccaagagtatgcctggcagtcaggctctgaatgctggcatggtgtgttgtgaatcaaatcactgggcaaccaaagaggaaagaagtgaactgcttgttcacttgctgctgttgccactgctggtacagaaatagaaggtaagacaggtgagaactgcttttccttctatcaagaaagattccaaactgaggcaatgctttgcattgagtcctggggttttgtggttttgggaaccaacagtactcaaagtatttctttcttttttttttttttttttaaaaaaaacacagcacaaaaaaacaaagactgtgtctgggggcagggccacagt

SEQ ID NO: 15689 - DNA, 463 bp, Homo sapiens
  source 1..463: mol_type = other DNA
aaacattggcatggtttctggatcaacaccgttgctcaagcataaccttaaatttgctggatttttttaataaaagtaagtcatgtaatctttcttgcagaacctaaggacttctatatttcattaagaaaatgtattgtaaaggtaaaaatgaattgaagaaacagtgcaatattctgaattacagtggtctttaagtaaataataagcattaatattctcttcataaagacgagtttactaatttagtatcataaaaacattttttttcaaaagccatgtccaagtcagttaacatttttcttccttaaacattccagagcttttatgcaaacataattattaaagtgcatatgtcattggttctgaacttaatatctgaattttctgtgagaaaaacaaggaattcttttcatttggacttacagtatgtgaaataccagactctgacagctgagttagt

SEQ ID NO: 15690 - DNA, 430 bp, Homo sapiens
  source 1..430: mol_type = other DNA
tcaaagtttagagtaatttgatcatctggtgaggaactgcgtttgttagttttccttctaacagagaggactctcagctgcaggtgcacctgctggggggtgcctcccagttaggcgggcggcagtctgcccgttctcagctgtcagacaggacatttaagtctgcagaggttatgcccccagaggtggagcctacagaggcaggcaggcctccttgagttgtggtgggctccacgtttacctaatcaagcctgggcaatggcgggcgcccctcccccagcctcgctgagtttgatctcagactgctgtgctagcaatcgcccttcagacccgtcacccctttctttgactcagaaagggaactccctgaccccttgcgcttcccaagtgaggcaatgcctcgccctgcttcggctcgcgcacggtgcgc

SEQ ID NO: 15691 - DNA, 417 bp, Homo sapiens
  source 1..417: mol_type = other DNA
gctaattctcctgtgttaaattttgcagatctagatttcatcaaagtttttgtatcactctggtcactaaaaagttttgtgtgatggtatttctaccggtaatatacattatgaactggacaaaagccctatttatttacaaatgtacagttttgtcagcgcatatcagcatatttactattcacatgtgtagacaaattaggtccaatgactgtcctaaaagtgcgttctgggatacacctgtaaggcaggtaacatatttcatgtacacccgccagccttcctgccgcggaggaagccaagctctgcaggccctgacaaagtcctcccggcctccacgcgtcgccatggcaacgcggggtctgtgctggccgggattggccggcctggcgcgcgcagggcccgctgggaaagcgc

SEQ ID NO: 15692 - DNA, 461 bp, Homo sapiens
  source 1..461: mol_type = other DNA
catcatgaagtgttgaaatgctggatgtaaggcttggataaatgttagtcaaatccaagtactaaaattcttcttggttcgcgaaaatttcagaagtgtcaaaaatctgtaatgcattaagaatattatttgcttcacaatatttcatttacttaagattttataagaatcagctgcttataaaattgttactttgtggtgcaccaaagcaccttcaccccttaacagatttggagggaagattcaagccgtggatttttaaatttaaagcaatgctgtcacaaattgagaactgacaacatgtcattacacattttaaaaattgtaaggcctaagagataggacctcaacagtcccaggtcacagagctgctaatgggcaaggtgggactagaatccaggcttgactcctctacgctgagccatcttcccaaccctaggaggccgggggacctcgtcacc

SEQ ID NO: 15693 - DNA, 299 bp, Homo sapiens
  source 1..299: mol_type = other DNA
gggtctattaggccattacctcaccaacgttgcaaattgtccagtgttcagaaacatcactttctctgaccttttacaaaattcctgtgtttcaggattttaaagtgcgtgagagacttagctaccaacttttaacttagtgtatagctaaaacccaaagatgtgtgtcagatcgagggaaacttttttctgcagagctccagacgtcctcgccctttggaacagcgtttaaaacttaactgaacgcgagggaagttctacttaccccgggccaatggcgctccgtttgcataagccag

SEQ ID NO: 15694 - DNA, 441 bp, Homo sapiens
  source 1..441: mol_type = other DNA
ccctcccccctttaattaagcgaagggaatcaataaaaaatgctgttattatcttgattgaattcctattaggcaaactctaaggggaaggtgtgtctgtggcccgggaaacgcacgccctctcccagagaacttgggtgcgcgagacctcggggcgtgcgattctcactcgctccctcccgccccagcgcccacagccggggtttctgcagagggcgcgggacgcggggttccccggggctgaggctggggctggaacacccctcgaagccgcgggcgtcctgtccaaggcgccccaggagggcgcaggactcgcagggcgattcgcggggccccaggccccgggggagcggggagttccgggcgcccctcggttccccgcgcgaggaaaagacgcggcgttccctttaagcggccgcctcgaacgggtatcggtagcgc

SEQ ID NO: 15695 - DNA, 367 bp, Homo sapiens
  source 1..367: mol_type = other DNA
ggaaactgtttataaatctttccctttagcaaaattaatgttttagggaaattcttacagcaatagacacacagaaagctgcctgcagaatttgggtgtgggcttaaatgtaatttattaaaattataacttttcaggaggagggttctttattctaaattttaaggtctgcacaaattggttgaactaacatcaaatggataattgaaaatgtcctctggacggcgggggaggattaactgagccagttctgcccccactgctggctggaagtgaaaacatctgcaaaagcatgcggaactcttctaataaaagatgtatcattttaaatgcgctgaattttgcaaggcaccgtggagccctctcg

SEQ ID NO: 15696 - DNA, 242 bp, Homo sapiens
  source 1..242: mol_type = other DNA
cgagccccagtttggtcccctcattgagctcgctgaagttggcttatgcaagtgtttatctccaggatctagccaccggggtgggttaacttggacctgcaaatgtctgattcaaatgtaagatttatctttcattactaattatgaagcttttgcaaaacattcgaattcctaaaatttgactttgtagcatttagctcttctagtgagaaggattcattctctctgtatagagggttccc

SEQ ID NO: 15697 - DNA, 635 bp, Homo sapiens
  source 1..635: mol_type = other DNA
tttataaagtgattgattccattgcatactattgtgtctaaaatctaaataattgctaaatggatacaataacagtaatatatagaacaatgaaattcagatactgttattaaaaacaccctgccaaataaagttattttagcaaacgtattctttttaaagtgtctatgctgaaataatatctataacctaataaaccaagccaaaatctttaaatttattttgttatgccatcattagacagagaatgtaaaaagacggtcagtactaatgggagtaggcctggaagtcctgaaatgaagcctgaggcctcaacattcaggtgaagagaccccacattttggcccatattaatgtgtctggaagaaacaggtccctacaacttcttgtagcagagggcataggccaacccctgcccgcagcgggaccgggccctgcacccgccggtctacaggaggcctggtgatctcaagtggctgcctccaccacccgcccactttggccaccgcctccggaaacggccgcgcgcgttgccacggtgacgagcaagcaaagagcttcccctgcgcagccaggctgagcttcttggcgccaagctgccgcgagccgtgacagcgtccgacgtgatgacatca

SEQ ID NO: 15698 - DNA, 280 bp, Homo sapiens
  source 1..280: mol_type = other DNA
ttctaaatgtttacagtttaatttcatctgcagagcattttcttcagacaaaaattttatgcagtgattaaagttctctgccagaaacttaagacttcctctcaggacttaaggtcttctagacctgaagcggtgatgtcatcacgtcggacgctgtcacggctcgcggcagcttggcgccaagaagctcagcctggctgcgcaggggaagctctttgcttgctcgtcaccgtggcaacgcgcgcggccgtttccggaggcggtggccaaagtgggcggg

SEQ ID NO: 15699 - DNA, 636 bp, Homo sapiens
  source 1..636: mol_type = other DNA
ataaaatcgagatgtctttatttccagtaagaactcattgtatagtactttacgtttgagacgtaggtaatattattttcatttttctgagagaaaactgaagttttcagaaaattcctaacacaaaattttgtcttgaactatacaggcaaggcaattcagaattgagtcatttgtctctgaaatactttctggattaagtgacattaagagaatatcttaatccagtctgaaaatatgcatattttgccaggaagaatagaagtgttttaaagtttgtcttttttgacacccacattgtataaggttcacctaatccaagtactttagatttcaaattcagtgttacacttgcatttaacagtccatattttaaaggaattgtacatttggttaaagcagagagatgaaattcccacttttagttaaaaattggagtataactgctgtgttatcagaatacaagtttaatatactttcattgtaaaccaatgaaaagttagatttaaagttgtttcagaccaaaaaataaaaatgtaaaagtgaatttaaacatggcaatagtgaggtcttatttatttcaccaaaggcagacggtcctcagttgcttgggcggacgtggacccaatctgtccg

SEQ ID NO: 15700 - DNA, 515 bp, Homo sapiens
  source 1..515: mol_type = other DNA
tgtgcgcacaagctttaattaaaagaaagaaagaaagaaaaccaaaaaaacttgctttttgctgcgatatcccttgatttctgtcctgaaggatccaaagagccctcaggacattcccctgcccgggcgcgcccctgaggcccaaccccggcgcgcgctctggcaggcacaggagggctccccgcccgtggcctcgccggagatgcacccggctcccaacccaacaaacccgctttgggaggggatggggtgcacctcccattggagctccccgctcccaagccctctggggactcccgcgctgccgtcgaaactgtggggaccacagccaaagactcctggaatcgatcccagatcctgggagtcggggggcccagccggggtgcggggagtcgcggcgtcgtgactgcacccgccccgccgcgccgggaggcgcccctggcgaccgtcgcgaacgccacaccctcggttcggccctggccccgcccccgcccagagcgcgttcgcggccaggg

SEQ ID NO: 15701 - DNA, 404 bp, Homo sapiens
  source 1..404: mol_type = other DNA
cttacgggagatgtgcgcacaagctttaattaaaagaaagaaagaaagaaaaccaaaaaaacttgctttttgctgcgatatcccttgatttctgtcctgaaggatccaaagagccctcaggacattcccctgcccgggcgcgcccctgaggcccaaccccggcgcgcgctctggcaggcacaggagggctccccgcccgtggcctcgccggagatgcacccggctcccaacccaacaaacccgctttgggaggggatggggtgcacctcccattggagctccccgctcccaagccctctggggactcccgcgctgccgtcgaaactgtggggaccacagccaaagactcctggaatcgatcccagatcctgggagtcggggggcccagccggggtgcggggagt

SEQ ID NO: 15702 - DNA, 457 bp, Homo sapiens
  source 1..457: mol_type = other DNA
agtcacactgtttgattagtaaatatttattaaacaaagcaatcctagtctccaaagagatcatagtttattggaggaaatgacaggtgaaactcccctggatgttgaaacattacatgcaaagatctaaagatatgaatcagcaacatatttatggaattacaagtaaagtagaaagttcttgctaaaacatcaaaaaataaaagccagatcatgaaatgtctcttggagcaatttattaaccatattttttaatgcatctcctgaacagagtcaaagcaatacttggactctgaatttcctgatttaaagatacaaaagaaaaatctggagtcacaattaatttgaggtgtgctactgtatcaaatttaatttgtacaaaatcatcatctctagtaacattattttttctaatctattaatacccaacttgcacatgattttgtataaaaggtga

SEQ ID NO: 15703 - DNA, 428 bp, Homo sapiens
  source 1..428: mol_type = other DNA
gaagcagaaataaattttgtttttgtctaatcattgcttaacaaagtgccaaccagaagaaactattcattgttttatcaaatcgcttgcctagtcggcgagcagtatgggagtttaaaacaagtttttgttttaagataattaaaaggccaagaatctttaagagactttcagttctcctggattctagtcatttctgttctgaaatacattttactcgaagtaatagctatttttatagcttacaataaaagatgcattttggaatatatttcgcttgaattaaagaaatagaatgtgagaccttaaacaaagggtccgttcttcagatccaatttagtggaaactgtgtcttgtaagagatggcccccagggacctcgccccttccgtccccggaggcggccagcctcgtgtccgctctaggcag

SEQ ID NO: 15704 - DNA, 410 bp, Homo sapiens
  source 1..410: mol_type = other DNA
tttacgtataacaaggttatctttgtaaagcctttgaataaattaaggatgccccagtgaagttgatttataatagtacatcaccaatgaaaaatgtataattgatttgagatgctgcgagggggagatcccgtggcctccacaccccctccttcctttctccgccgttccagggaaggaacctggcagcgcccaggcgtagagcagggaggaggcggcggccccgggctcgggctcagcgctgtgggttcgggggccaacgcgcccgggaggctgaggtcggggacgtggggctgtgatgcccgaccgagccattggccgccgcagcggagcccggggccgccagcgctagcgccagcagtgccagcaggagcggcggccgtgtgtgtagttcataaagcaccccccac

SEQ ID NO: 15705 - DNA, 432 bp, Homo sapiens
  source 1..432: mol_type = other DNA
agctgaatagaaatattaatgacaattcatcacagtttgccatgtatctaagaaaaaattaagtactgcccttgtaaattctttagtatttagtcgagtaaatcatgattataatgcaaacctgttttcatttaaaaaagaattccaggtataagtgtaccgacaagtatggaaaacgtgttaggtatttcacgatatatatttatactttaattaatgaacagcattaaaaaaaagaattttataatgaaccaggtggtgtatgaaccaaataaatttgattcttcctccagattgtctggagagcatcagctgtcccctgttattggagaggcgctgagacctcgcaaagacagagtgaaactctctacgcgaggatgcctgctgtcggccagaactccggaccggcttctttccgccggagtggcacag

SEQ ID NO: 15706 - DNA, 533 bp, Homo sapiens
  source 1..533: mol_type = other DNA
gtttgtacaaaattctgaaaaccttttcttccattttccaaagtagcagacaaaactggactaagtttgatttttaaaatgcttttgacatgcttatcttttggggaaaattttatccaaaagacgaaaatggaaacaattagagtctttgcctctatctgccttaattcatggaggtaaaaaaaatgaggccttttctttctcagcaacattgcgctctcccccacagcagatgggagggaacctagggtcgccttcctaggtctgagcgaagtgtcccagccgctccccttacccctgcggtgagccctgcgtcctggaacggtgccaggactcctgacagagcctgtcagcttcctgccgcctgcttgacccgggagcaccagcaggctaccgggcctcgccctccctcctcctctcgaaaccctggggcttcggggcaccggtgggggcgtgcaggggcgcggggtcccgccggggagcgcgcacggagcggcgcctcggccgccctgcttcctggagctgtgctcctt

SEQ ID NO: 15707 - DNA, 250 bp, Homo sapiens
  source 1..250: mol_type = other DNA
gaagaagaacagttcattctgctaaagtgggaataatggcacccttacttgtctcactagaattttggaacgtttttatgttgtttctaaaagaaatattaataattacgtcgaatatcttctgcagaaaaaattttagttcttttaattttcgaattagaacattgtaaaggaacgagtggcatcaggtcgaagccaaaggcgcctttcttcacagttagaagcggtgaccggtctgtgccactccggc

SEQ ID NO: 15708 - DNA, 219 bp, Homo sapiens
  source 1..219: mol_type = other DNA
atcaaatcataggaagaaaatatatttgccatgcattaagtgcaggtggatcattatacataatatagctttatggaaatacatactaatttgtcttctaaaaatgtttttgtacagtacgcagtcttgaataactggaagacttctgccagattgcctaatgtcagactgttgtaaatcctgcaggcatcattatactcacaaagagaaactatagtc

SEQ ID NO: 15709 - DNA, 418 bp, Homo sapiens
  source 1..418: mol_type = other DNA
tttataaggattatgtgtcaacataagcctttaacattcgctctcttaaagccaaaatgttttaagatttagaaccagaaatcattttttttctcacaattataaaaacttttgcaggctggtctaataaattaatgtcttcccttgactagaaagcatttcagggtaaaaagcatgtacgaattcctccgtaatactaaaacatgtttagttaacagcgctcatctcctcctccgaaggccctcggctgagcccagatctccgctctgaaccgacctaagagctggtctagggctgggagcccggttgataccagcagctgtccattccgcaccgacggtcgcgtgcccgcaatggacaccagtcgagggccgctgtctcttagagcctccagtgttaacccaataggaactcgccc

SEQ ID NO: 15710 - DNA, 418 bp, Homo sapiens
  source 1..418: mol_type = other DNA
atactttataaggattatgtgtcaacataagcctttaacattcgctctcttaaagccaaaatgttttaagatttagaaccagaaatcattttttttctcacaattataaaaacttttgcaggctggtctaataaattaatgtcttcccttgactagaaagcatttcagggtaaaaagcatgtacgaattcctccgtaatactaaaacatgtttagttaacagcgctcatctcctcctccgaaggccctcggctgagcccagatctccgctctgaaccgacctaagagctggtctagggctgggagcccggttgataccagcagctgtccattccgcaccgacggtcgcgtgcccgcaatggacaccagtcgagggccgctgtctcttagagcctccagtgttaacccaataggaactc

SEQ ID NO: 15711 - DNA, 418 bp, Homo sapiens; identical to SEQ ID NO: 15710
  source 1..418: mol_type = other DNA

SEQ ID NO: 15712 - DNA, 411 bp, Homo sapiens
  source 1..411: mol_type = other DNA
ttttgaaaaaaaaattaaatacaaaaatacaactcaaaatacatgttttttccacacataaaattggtattttagtaataaactctcgattcagggttcataaaataaagtaggtatacttctaattcttcctagcagttttttgggggaaagaaaccctaagtattttctgttatttgcagctgctttaacagcaaacgacaattaaatgttgtcagagtaacacttgtaattaaaattaacaaaagcttcttattagtttgtcgaaaaccagatagcctcaaagttcaagagttttcgctctaagaattgcttgataagccctaagggttgtttcaccaaccttttctttaactcaatgtgaatgaaggcacggtgggcctttctcacctgggccccgccgaagtgggc

SEQ ID NO: 15713 - DNA, 247 bp, Homo sapiens
  source 1..247: mol_type = other DNA
gcgctctggccctggcgtctcctgggcaagcaccagccggcggtatctgcggaggtgggggaattgcctgcttgcgctggtcccggccggagcccagagttgaggctccggcccccacccgcgccttggtgagggccccccctcagccccacgaaggggaaacaacacggtcccgtttgtcgtgatgtcgaaattaagctcaaacttgacgtgcagctagttttattttaaagacaaatgtcaggct

SEQ ID NO: 15714 - DNA, 457 bp, Homo sapiens
  source 1..457: mol_type = other DNA
agctgtgcctctgctccgctgcgcaccgcggcttcctctcggcctaggcttcgccgcggcctccgcagctggaatggagctgccaggacccagtgacgctcccgcccctttcctcttcttccaaggggccaggtggcgggcgggggcggggcggcaggccacgctgtcctggggactgggagtcccgagtccagcttagggggagtgggggcgcgacccccaacccagaaacccaagttcgcggcagcagggcgggccgcgccgaatctcggcgtgcgcggagcggggagatgcaggcgagcgccagagcccgggctcgggggccctgcgccggggagaggagccgggacccaccggcggagcatccaatcggctggcgcgaggccccggcgctgctttgcataaagcaatataaccgtggctcggcctcatttcccgcggccgggcgccggcacac

SEQ ID NO: 15715 - DNA, 481 bp, Homo sapiens
  source 1..481: mol_type = other DNA
agagagagaatcctcgctgcgaaaagcagcaggactcttcagggcttttcacaagaaccctctgtacaagctgtgcctctgctccgctgcgcaccgcggcttcctctcggcctaggcttcgccgcggcctccgcagctggaatggagctgccaggacccagtgacgctcccgcccctttcctcttcttccaaggggccaggtggcgggcgggggcggggcggcaggccacgctgtcctggggactgggagtcccgagtccagcttagggggagtgggggcgcgacccccaacccagaaacccaagttcgcggcagcagggcgggccgcgccgaatctcggcgtgcgcggagcggggagatgcaggcgagcgccagagcccgggctcgggggccctgcgccggggagaggagccgggacccaccggcggagcatccaatcggctggcgcgaggccccggcgctgctttgcataaagcaatat

SEQ ID NO: 15716 - DNA, 482 bp, Homo sapiens
  source 1..482: mol_type = other DNA
ggtttcctcccggcgctgcgagctcccggggaagggttagagccggcagccctccccagcccggggaggggagagggttatgcgaccccacctctggctagggccggggaggcctttgcttcccgggagccctgcccgggctccttggtcgcagggctgctgggtcccaggcaggaagtgaggcccacatgtggcccggcggcccagggcggcttgcagcgtcctcactgtcccggctgccaggggctgcggcgacgcggccagtcagcagcgagttcctggggtgtgtacagcagcccatccttcccggctccgtggcccgaagccgccgagagagctcgggacagcgcaggaccaggcagccgctcgctctcctcgagttctggtgtgtggtcagaagagaaaagccatttacttactttcctagctgcctccgtggactgagcagacccaggagagggagtagagagagaatccctcgc

SEQ ID NO: 15717 - DNA, 468 bp, Homo sapiens
  source 1..468: mol_type = other DNA
agccaggcctagctccgctaagccaaagtcagtgtcctaaggtaggccccctttagggcttccctcttgagaacccagcaggcctggagagacctttggcctaggccctgaaaaaggggtcgcggagcccccgtctgtgcccagctagtgacttgcgggctcgagggccaggttgagggtactcatcgagcctggtctctccgatgaagggactcccttagatcttggggccctagtgcccgaaggtgcggaggagcgcactcggcaagactagtatacaggacggcggcccaggctggaccgggccgggctagagcagtcacaggccgggccaaggaaggccaagcaggggttggagccggccggaccctgggtggggagaagcaggctcccgcccggccggaaaactagtcggcgcagagctgtgcccaactctagccgccatgacgtcacgcgggccgggcagcc

SEQ ID NO: 15718 - DNA, 424 bp, Homo sapiens
  source 1..424: mol_type = other DNA
tggggcttcaaaagatccatgaatcctccgactcttttcaatgagtgtcaaaaggctgagactgctcaccgtgtggctctttaagtttagatttaaattaaaatttcagtgcctcacttaagtttgatgggacagatatctgtattggtagcattaccaactgaatacaggtaagattggatccaactagtgcttttgtaaaatgagttaccaacatttagaaataaaacataaaaatctaaaatcctgattgatttcatttggactatctagcgtggggcctgcgttcccctggcagctggaacgcacagtaccgctccctttagagggacccaaatttggaagggcaacgtctccttccttacagttttcccggaactgtaggcagttcgcccgggcccgcccctagcaacaagatcgcggg

SEQ ID NO: 15719 - DNA, 578 bp, Homo sapiens
  source 1..578: mol_type = other DNA
ggctctttaagtttagatttaaattaaaatttcagtgcctcacttaagtttgatgggacagatatctgtattggtagcattaccaactgaatacaggtaagattggatccaactagtgcttttgtaaaatgagttaccaacatttagaaataaaacataaaaatctaaaatcctgattgatttcatttggactatctagcgtggggcctgcgttcccctggcagctggaacgcacagtaccgctccctttagagggacccaaatttggaagggcaacgtctccttccttacagttttcccggaactgtaggcagttcgcccgggcccgcccctagcaacaagatcgcggggaggggccgaggcgaaacacgagccccgcgcccaccaccccagctggcgacgtggctccgcggccccggcttcccccggcagctcagcgaccaatgggcgcgcgagcggggccgcccgcagcttcccagcccgaggcccaggcgcgcccctctgctccggctcggggcgggcactggcggagggactggccagtcccctcctccgcgccggccccaaccctgtcgctg

SEQ ID NO: 15720 - DNA, 610 bp, Homo sapiens
  source 1..610: mol_type = other DNA
cttttgtaaaatgagttaccaacatttagaaataaaacataaaaatctaaaatcctgattgatttcatttggactatctagcgtggggcctgcgttcccctggcagctggaacgcacagtaccgctccctttagagggacccaaatttggaagggcaacgtctccttccttacagttttcccggaactgtaggcagttcgcccgggcccgcccctagcaacaagatcgcggggaggggccgaggcgaaacacgagccccgcgcccaccaccccagctggcgacgtggctccgcggccccggcttcccccggcagctcagcgaccaatgggcgcgcgagcggggccgcccgcagcttcccagcccgaggcccaggcgcgcccctctgctccggctcggggcgggcactggcggagggactggccagtcccctcctccgcgccggccccaaccctgtcgctgccgccgggccgccctctcctcgggacgatggcgcgcggtggccgcggccgccgcctggggttagccctggggctgctgctggcgctggtgctggcgccgcgggttctgcgggccaagcccacggtgcgcaaagagcgcgtggtgcggccc

SEQ ID NO: 15721 - DNA, 259 bp, Homo sapiens
  source 1..259: mol_type = other DNA
aactcagaatgtactgagccatcaacttcgtctatattttcaaaatgctgcctaactggatagcacagtcagggaagggatgttttgggtaccaaagagcctctgtatgttccagatcggcattctgacatagaatgttttaaagaactcggaaacgcctttcttgaccgcacggtttaaaaacatttctgcatacatacatcctgcaggaaaccccgcagagtttcatgattcttcagatcatcacacctttaaaaag

SEQ ID NO: 15722 - DNA, 518 bp, Homo sapiens
  source 1..518: mol_type = other DNA
ccgtgacagagaaactgcctgcagggtatctctcttttccaaacacacaatgcaaaaacgtttcctttttcttttccttgccattttgtacaatggggataatgacccatcttgtagaattgttataaggagtactaaacacagtggctaagactctgggttgaaagcagagtgaccatgtgctcattgttttcatctgtaaaatgggaattataacagcactcactttgtaaggctgttatgtgaaaatcaaatgaaaactgtgtgtagaacactttatacagtatctggaccatagtgttcaatgttagtcattattagtagagggcttttacatcaaaatggcacatttgatcataatagccccatgatttataaattatcatctccattttacagacgaaacttcaggctcagtcactgaactaagtcaaaagccgggatttatcttttggcttcatcatgaataaattactgcatcattagtgggggaggtttaccttcccgtttaacgaatt

SEQ ID NO: 15723 - DNA, 483 bp, Homo sapiens
  source 1..483: mol_type = other DNA
tcacctgaggtcaagaccagcctggcccagctactcgggctgagctgagatcgcgccactgcactgcagcctggacagagtccactgatcccgcagccccgcaggctcgcagaaccctaaggcatgattaggcctgggatcatcaggccaccctagggtcaggtgcggaggcctgcgacgcccgagggccaaaggctccctcttccggtcacacaggagagggtattttgttgggggacaggttttccccagctctcacggcccggccaggccaggcggttcccggcttctctgcagccgccggcgggggaggagggcacagagcgcgtctcgcctcttagcgcacggtcaaggttgcgctcccctcccgggccgggactaaccgtgggaaaggcgctacaggcctgtacaaggagcctttgaacacgctctgcccccgcactctccgcgccaggccaagcgctgggcccagggacagcgcgc

SEQ ID NO: 15724 - DNA, 333 bp, Homo sapiens
  source 1..333: mol_type = other DNA
gcttaaccgtagaagaattagatattcctcgactccaattttaggtaggcggcaaccgccttccgcctggcgctacgcccggcttatcaaagcaagggtatacgcttctttgaagcttcctgaacggactctccagtgagacgagcacaccggccgaggagggtgtctccgagagggacgctccctcggacccgccctcaccccagctgcgagggcgcccccaaggagcagcgcgcgctgcctggccgggcttgggctgctgagtgaatggagcggccgagcctcctggctcctcctcgcagcgcccacacccgggggctctccgcaacccga

SEQ ID NO: 15725 - DNA, 372 bp, Homo sapiens
  source 1..372: mol_type = other DNA
ctccaattttaggtaggcggcaaccgccttccgcctggcgctacgcccggcttatcaaagcaagggtatacgcttctttgaagcttcctgaacggactctccagtgagacgagcacaccggccgaggagggtgtctccgagagggacgctccctcggacccgccctcaccccagctgcgagggcgcccccaaggagcagcgcgcgctgcctggccgggcttgggctgctgagtgaatggagcggccgagcctcctggctcctcctcgcagcgcccacacccgggggctctccgcaacccgaagagccgggacggcagcccaggcgcccgggccccgccgtctcctcgccgcgcaggacccggcttccacgtg

SEQ ID NO: 15726 - DNA, 361 bp, Homo sapiens
  source 1..361: mol_type = other DNA
cagggccacaggcagtgctcggcggagtggctccaggaggcgccaggatgctccggccggaatgcttaaccgtagaagaattagatattcctcgactccaattttaggtaggcggcaaccgccttccgcctggcgctacgcccggcttatcaaagcaagggtatacgcttctttgaagcttcctgaacggactctccagtgagacgagcacaccggccgaggagggtgtctccgagagggacgctccctcggacccgccctcaccccagctgcgagggcgcccccaaggagcagcgcgcgctgcctggccgggcttgggctgctgagtgaatggagcggccgagcctcctggctcctcctc

SEQ ID NO: 15727 - DNA, 284 bp, Homo sapiens
  source 1..284: mol_type = other DNA
ccagggccacaggcagtgctcggcggagtggctccaggaggcgccaggatgctccggccggaatgcttaaccgtagaagaattagatattcctcgactccaattttaggtaggcggcaaccgccttccgcctggcgctacgcccggcttatcaaagcaagggtatacgcttctttgaagcttcctgaacggactctccagtgagacgagcacaccggccgaggagggtgtctccgagagggacgctccctcggacccgccctcaccccagctgcgagggcgccc

SEQ ID NO: 15728 - DNA, 264 bp, Homo sapiens
  source 1..264: mol_type = other DNA
acccgccccaaacacctgctctggggcgcgggggctgaagctcttcgagctcccaccagggccacaggcagtgctcggcggagtggctccaggaggcgccaggatgctccggccggaatgcttaaccgtagaagaattagatattcctcgactccaattttaggtaggcggcaaccgccttccgcctggcgctacgcccggcttatcaaagcaagggtatacgcttctttgaagcttcctgaacggactctccagtgagacgag

SEQ ID NO: 15729 - DNA, 237 bp, Homo sapiens
  source 1..237: mol_type = other DNA
acccgccccaaacacctgctctggggcgcgggggctgaagctcttcgagctcccaccagggccacaggcagtgctcggcggagtggctccaggaggcgccaggatgctccggccggaatgcttaaccgtagaagaattagatattcctcgactccaattttaggtaggcggcaaccgccttccgcctggcgctacgcccggcttatcaaagcaagggtatacgcttctttgaagctt

SEQ ID NO: 15730 - DNA, 332 bp, Homo sapiens
  source 1..332: mol_type = other DNA
gaaaatgttctaaaattaaatagtagtgatggttgtgcaactctgaaaatactaaaaactactgaattgtgtatttattttatgagtctcgctctgctgggattacaggctttaaaaaatgaacattcttgtacaagtctttgtacggacatacgaactttttcagaaactgccgctcctcagcgggaggcaacatcaatgcaggctgagtggaggcccagtaagtcccacccactaggccagcccgagcgcgtctgccacgccctgctgcattccgcggcgagagcgcgcccgctcagggtgacccggaagcagttgcgccagcagcgtcg

SEQ ID NO: 15731 - DNA, 572 bp, Homo sapiens
  source 1..572: mol_type = other DNA
atcctagtagatatgaacaaacacctgtagtcccagctactcctcttgagcccaggagttcctattaagttcacaagtactgagaacaaattttattaatctctataaatctacataaatctctataaaatgtacatactgataatgtaaacatactactattattctattcaaatagcccctggaaatttccactgtacactcttgagagaatgaaagtgaaaatggcaaatcatttattgttactataatggaaatagtttttcttgcaattacttgtattcatttcttatcacgaataaaggagaacagttgacctaaggtaaccacaggactcctggcccagtgggacccaaagcgaaaagccctcgcgccgagggcgctcccacccgcgccgccaaggcggggccagaactggcggcaggcggctggcccgcccggggatggggcagaagctggggcggctgagagcgcagcgcgggctcccgggagacgccggcccactgcccgcccgctcgccgcaggtaggcccggcccccgggaggtggggcgcggccaggtgtccccaggta

SEQ ID NO: 15732 - DNA, 651 bp, Homo sapiens
  source 1..651: mol_type = other DNA
gcaaagcgttgacccggctacccctgagcagcgccctctccacttcccctcccccgcgcggggcgatagccaggcgcggtcccttcccacgcgggccgcggcgagtgcggacagctcccttccgggctgcggaaggcgggaagtctgcggttcgcgggctccggctggcgggcgcccctcggagtccctgaagtcggccgggccccgcaggacccgcgccttctcggccccaactgtccctcgcgaagcgtcctgcggtggcggaggcctcgcggccgcccgccagccccgcgagcggcaagcgcggggctcagaggggagcaacatggggcgcagcggccgccgccgccgccgccgtcgccgcgagtcccggccgcgggtgcctccgcttccctgacgcccagctggggcctcgccgcccgccgcggcccgggtctttgcggcccagactcgccagcgcgcccttctcccgcctgctcgccggggccatgtgagggggcagctccctccaccgccgccgccccacggagccctggaggatcccgggcttcaccgagccgccgccgccgccgccgcccgcgccccccgccgcccccgtccccgccagcgccgctgcgcagccccccgccccagcctgggcgtacgaacccc

SEQ ID NO: 15733 - DNA, 566 bp, Homo sapiens
  source 1..566: mol_type = other DNA
tccttttaggattataaaaaagaaattctggcttttgattaaaaaataaacaatctcaacagaccagtactatcagattattattgctaagattaataccttctgaaattgattttaaaaccataaagcacagatttttaaaaaacattattatatggtatatggagatgggccaaaagattgaataccatggcaagtgtgttgcgtagttcatgaaaaattaaaaatgatcactaaggttggatgaatataattttgttttgagtagctgggatggatgaatataatttttattgatacaatttacatggatgagtgaccattttaaatcgtacaattcaataatttttagaatactcacaaggttgtacaaccatcaccattatctaatttctagagcattttcattacctaataaatccatggatttgcttgtttgggacatttcatatatagccatgcatcacctagagaaatgtgtcgttaggtaattatatcactgtgcaaacatcttagggtatacttacacaaacctagatggtgtagactgtacacacctaggctat

SEQ ID NO: 15734 - DNA, 343 bp, Homo sapiens
  source 1..343: mol_type = other DNA
agatttcctggcagccagtctgaaaaactcgattattattgttattatcactattactactactactatgacataattttaagcacttacgttccggacgcagttactaaatgctgaggcagcttgcgatctcggcctcccgagtagctgggattacaggcgcctgtaccgcgcccggcctggtcccgagttaatctacggcaggccgcggttcgaatcccgctggtgtgagccgcgggccgcgtagtgccggcccagctcgcgtggcatcgcgcccgaggaaacttggatcgctggcgccgcgggctacgttcgacacgtgaccggcagcgggggcggggcc

SEQ ID NO: 15735 - DNA, 488 bp, Homo sapiens
  source 1..488: mol_type = other DNA
ttattattgttattatcactattactactactactatgacataattttaagcacttacgttccggacgcagttactaaatgctgaggcagcttgcgatctcggcctcccgagtagctgggattacaggcgcctgtaccgcgcccggcctggtcccgagttaatctacggcaggccgcggttcgaatcccgctggtgtgagccgcgggccgcgtagtgccggcccagctcgcgtggcatcgcgcccgaggaaacttggatcgctggcgccgcgggctacgttcgacacgtgaccggcagcgggggcggggcctgcagggagccacgccccgcacagttaccggggagcaagggccatggccaccgtgcaggagaaggctgctgcgctgaacctctcggctctccacagccccgcgcacaggcctccgggtaggtgccgaggactgccgccgcgcggggcgggctggggtgcgcgggctgggtcccggcg

SEQ ID NO: 15736 - DNA, 311 bp, Homo sapiens
  source 1..311: mol_type = other DNA
agaaacgaggtttcacgccaggctggtctaaaaagtgaatcttcaccagagaacttctgtttttgtctttttttttttttttttaaagcaaagactttaatgtgcaagttttgcactcggccttcaataacagagtctcggtctgtctccaggccgcagtgcagtggcgcgatctcgcctcactgcacaagcgattctcctgcctcagcctcccgagtagctgggactagcgctttgtgtagctacatcgcgtcacccgcaccagcggctgggatgcggcgcgcgttccgtctttccgtatggaaacatgg

SEQ ID NO: 15737 - DNA, 452 bp, Homo sapiens
  source 1..452: mol_type = other DNA
ttgcactcggccttcaataacagagtctcggtctgtctccaggccgcagtgcagtggcgcgatctcgcctcactgcacaagcgattctcctgcctcagcctcccgagtagctgggactagcgctttgtgtagctacatcgcgtcacccgcaccagcggctgggatgcggcgcgcgttccgtctttccgtatggaaacatggcgcctaggggcgggccatccccagcttcgagccaccgccagctgagactcatcggcgggcactccgaaaacatggcgcctcactgcgtgcggcgggcgactcttggctgggagccactggccacggagccccctgagcggtcatcggccaaacacggcgccgcccagctgcgagtcaccgcttaccggcaagcaggggaaagaccctcccgcctttccgtacgaagacatggcgctgccctatattgggct

SEQ ID NO: 15738 - DNA, 372 bp, Homo sapiens
  source 1..372: mol_type = other DNA
gagtagctgggactacaggcagccaggatggtctcatccgcctttggcctcccaaactgctgggattacaggcgtgggccaccgcgcccagtcaatctcatttaatatttcacttgcaggtactattattattcccaggtacgaagtttaattaccagagttacttatcttcgttaaaatctgttgagctgaaaacccaggtctcagacttcattaatgggggcttgatctatccctcccgtttagcattgtgtgagtagccaggctctaaagcttgataacagcttcccgccttccagccggttggagccggctcagcaagggcccgccccgggatctcgctgctttctgcacgctcggaataaccagagt

SEQ ID NO: 15739 - DNA, 362 bp, Homo sapiens
  source 1..362: mol_type = other DNA
aaaatatttagttgtcactcatatttactattaaaacagatgcttttatttacagtggccaaaacagacttctcattttcaacttatacctgcaatgtttatgtagctggaatcaaatatttctcaaactagtaacctatttctgggtacagtatatttggcggggtaaaagaaacactgtcaagtttttctaaaacgtagtcccatgaatctaatagaagtatttactcgtattcatgcctaagagagagaagtaaaaaaaaaaaaattaaatcttagatcttgctgaagaggtcgccacgaggctggctgcgcccctgccactctggttattccgagcgtgcagaaagcagcgagatccc

SEQ ID NO: 15740 - DNA, 582 bp, Homo sapiens
  source 1..582: mol_type = other DNA
atttcctaatctccaggaggaaagaaactagtctttgggagttaaaccactaagaacttcacaattatggggttttggacagtagagatgctcttaaaatttccaattttgggacctttaacgaccaaatgccgagaaacagatccttaattacggttccgggatctcgaaaggccttaaaaccgggttggggccgcacgggctggcaggcgggctccgggcaacaagggcgcggctgcggactggcgggcggaccccggggaggggcttcacggaggcgccgcggccggagcggagcggagccgcccgggctgggcgcgcagcgctgccgggcgggcggtggcgctgcggaggcggtggccgaggccgacgagcgcggaggaggggcccgaggctggggcggctggtggcagctgcctcagtgacgactgccggcatcgcggcgacctgaggagatcaagccgcaggccccgccgtcgcctccgctcccggccggggcgtcaggaatgggccccaatcgccgtgggccccgcaccctgcgtcgcccgtaggccccagtagccggaggccgaccggcctccc

SEQ ID NO: 15741 - DNA, 411 bp, Homo sapiens
  source 1..411: mol_type = other DNA
tgtttcctatgatttcctaatctccaggaggaaagaaactagtctttgggagttaaaccactaagaacttcacaattatggggttttggacagtagagatgctcttaaaatttccaattttgggacctttaacgaccaaatgccgagaaacagatccttaattacggttccgggatctcgaaaggccttaaaaccgggttggggccgcacgggctggcaggcgggctccgggcaacaagggcgcggctgcggactggcgggcggaccccggggaggggcttcacggaggcgccgcggccggagcggagcggagccgcccgggctgggcgcgcagcgctgccgggcgggcggtggcgctgcggaggcggtggccgaggccgacgagcgcggaggaggggcccgaggctgggg

SEQ ID NO: 15742 - DNA, 657 bp, Homo sapiens
  source 1..657: mol_type = other DNA
ggagaatattcttctttgtaggaactataaagtatacagatatcaacttctctgtaagattgagattgttttaaaattaaacacatgcacactaatctaggataactgtgatccatatgacttctttggaattagaatcttctcaagggaaatccatatgaaggtgcaacataatttatctaggaataatatgtttcttggagtacatttcccaaatgaccaaacacttttaagtgctgaaatgcttttacttgtctgccttttaagacagaatacactgaatttagtttaatctcttggatgactaatggctccaattaggtaaatatttattactgtattctgaagtaatatctaggtctagattcactttatgtatttaatgtcttaaaaacaagatgtatgtttttcctttttcaaaaaatgttatgttagtaaaactataaggtttattatagaaatgttgtactcatagtacccctttcagattaattcaggattatgtctaggtttcaaagagttctgaaatagtgaagagttcctatacatagaatgtgatacctctgtcattttaccaacttcctagaatgccagttgaaattaggtaattttagagaaaaaccaccctgatttttgttttaattttaaatttcagag

SEQ ID NO: 15743 - DNA, 397 bp, Homo sapiens
  source 1..397: mol_type = other DNA
tttctttctgaaatagcctaatctgaaagaaaatctcctttgctatttgacatggcatgaatgatagcacctggaaaggaagataaatatgtttcattggacctcaaatatttcatatgagatgcctcagcattggccatggcagttgaccatggtaccaaaacaattttttaatacacaagtattttcaacatcctacttgatattatgtaatttgcctgatattttgtttcacaggaacagacaatctacagatttcctcccgggaaattgtacagaatcaagaccgtgctgggacagtcctctgacaacattctcttcttccctttaccaaggaagcggacatagcgcctccctcgaaccttccaaggattctaccgagtccctggtccaaccg

SEQ ID NO: 15744 - DNA, 526 bp, Homo sapiens
  source 1..526: mol_type = other DNA
gacaaaatgtccaaatcgctgagaactaaactgcatttcactgaaaaggtctattacaaaccagatgaggatccccttttttggcagatacataggttggctctaacagccatccacagtagtggatgaaaaatcagacactgattttctcagacttctttgctgtgggcgcggccagtacttttctccctcatgggagaaagagaggaagcctgaagtaagctttcttctgcagccctgggtgcggccagccgaggtgggcggggccgcgttccgggacgtggtcgtccgggctttggaaccccgcctgttaggggccgggctgaggcgaaagggtggggccgcgctccatcggggcggggcttgtggaacctcgaaaccccggcgactcggggcctgagcgcgcgtctcccggcgcggggttcctcccacgcaaaggggcggcgcggcagccacagccccaccatgagccagcggtcggctcgacttcaacatctggaagaagctcttcgtgccgctgaaggcg

SEQ ID NO: 15745 - DNA, 251 bp, Homo sapiens
  source 1..251: mol_type = other DNA
tttctggcagcagcctggagtgatattttccaaatggatcctgttgggaaagactcccgtgttgccatggaggcatgccaaatgttccatatgtgggtgtcagtcacacttctaaaatcgagttttttatcttccactggaaaagtgtaatagcatacatcaatggtgtagttacagagtgaacactctactacatgtgactggcagtattaagtgttgtggttacagtttgagacttccaaaggtcatcc

SEQ ID NO: 15746 - DNA, 219 bp, Homo sapiens
  source 1..219: mol_type = other DNA
acccttgtgtgtgtctccccacagggttacaagtgtatgttggaagtttgagcattgcaatttcaatcagagaaaacagttcttctgctggtgtttctggcagcagcctggagtgatattttccaaatggatcctgttgggaaagactcccgtgttgccatggaggcatgccaaatgttccatatgtgggtgtcagtcacacttctaaaatcgagtttt

SEQ ID NO: 15747 - DNA, 213 bp, Homo sapiens
  source 1..213: mol_type = other DNA
atgtgtttaaaatcttggcagatattaccaaatttcctctatttagaggtgtatcattatttacttaacccttgtgtgtgtctccccacagggttacaagtgtatgttggaagtttgagcattgcaatttcaatcagagaaaacagttcttctgctggtgtttctggcagcagcctggagtgatattttccaaatggatcctgttgggaaaga

SEQ ID NO: 15748 - DNA, 254 bp, Homo sapiens
  source 1..254: mol_type = other DNA
gaacttgcattgtaaggaattctattgtaatttctttaacactttttaaaaattaatggactgatatatatacaatgtgtttaaaatcttggcagatattaccaaatttcctctatttagaggtgtatcattatttacttaacccttgtgtgtgtctccccacagggttacaagtgtatgttggaagtttgagcattgcaatttcaatcagagaaaacagttcttctgctggtgtttctggcagcagcctggag

SEQ ID NO: 15749 - DNA, 478 bp, Homo sapiens
  source 1..478: mol_type = other DNA
aggctggtgtcaaactcctgacctcaggtgatccaccctgtgctgggattacaggcgtgagccactgcgcctggcccagatagtaaatattttacctcaataataagaaacaaaattttcacagatttttttattgacaaaattcataacataattattgagtccagcataataatacacatctactaatgaggggaatagaattcttttcttaattggggttccaaatcaattgcagatgttcatctattaatactaatctgtgatgacattttacatatttcattttgaaaatgtattttcacgcagataggagactaatttgcaggttaggaggaagcttctcaattgcacagttagatggatattcaaatgtggatatttgtccaaaaaatgttgctggaactgttataactgctatacatttgtagtggaagtataccacaagttgctgactactgcaaaacagccgtcaatt

SEQ ID NO: 15750 - DNA, 444 bp, Homo sapiens
  source 1..444: mol_type = other DNA
ctgagtagctgggattacaggagctggccaggctggtctggaattagaagaacatcatggttaaccaagcttggattaactgacagcctgagtttgagctcagctcggtcacttagtacagttaagataattgagcctagttctcttaacaatcctatgaagagcttagcacatagatgcacatatatttgaacactgaatgaacatgtttgccatgaatatttttgcccacagacgttccaaatcttaagtctacaggtaaccttttaaaatggccctcaaacatggcgaagggaccaaagaaaaattgcatctttgcgccttctccttgcatgacagccacaggctagcctggtggatggggccctgcccacaggccccagggctgccgccagctctgctgctttgtagccaggtcacacctctccagacatctgtcttgtc

SEQ ID NO: 15751 - DNA, 257 bp, Homo sapiens
  source 1..257: mol_type = other DNA
attgtcagttccccagggaactctgcatttctgacttagggagggtagatgactcacccttccttgtacttaggcaagttcaaaacctccctaagccctctcttgctgtggctccgagaagtggccctctacagtggctatatgagtcaatttgctcatattgtcatttgactcactgaccctgatggggaagatagtgttattcccacagtgtggtagtacacacggggcatggcccagggattcagtgtgccttg

SEQ ID NO: 15752 - DNA, 176 bp, Homo sapiens
  source 1..176: mol_type = other DNA
tgctggagcccaggtctcctgggaagcattgtcagttccccagggaactctgcatttctgacttagggagggtagatgactcacccttccttgtacttaggcaagttcaaaacctccctaagccctctcttgctgtggctccgagaagtggccctctacagtggctatatgagtca

SEQ ID NO: 15753 - DNA, 204 bp, Homo sapiens
  source 1..204: mol_type = other DNA
gtagagacagggtctcactataatacccaggctcggagctctctgttcggggacctcagaccgccgctggcatgtgctggagcccaggtctcctgggaagcattgtcagttccccagggaactctgcatttctgacttagggagggtagatgactcacccttccttgtacttaggcaagttcaaaacctccctaagccctctct

SEQ ID NO: 15754 - DNA, 275 bp, Homo sapiens
  source 1..275: mol_type = other DNA
agcactagggggatggtgctgaactgttagaaattcaacatgagattttggaggtgtattatccccacgtgggacaaaatgagatttgggtgggaacacaaccaaaccatatcacaaggtatgggcccttaaaagtagaagcggctcctaaatatttaagaactaacagcttcttttataaccctgttggaagaaagcctgagtgctggcttctagggctggagtctcttaagagccctccaggtgattctgatgctccctaaagtttgagaacc

SEQ ID NO: 15755 - DNA, 527 bp, Homo sapiens
  source 1..527: mol_type = other DNA
taaatccaccagttagagctctccagaggacccagggtccgtaagtactaaaaactcttaaactttcacaccgctgtgttattccctgaggcgaggccaccctgaagggacagactcatgcaggcgcctctggtggctgctggggaacagtagctaccagctaagttgatagagaccagtaagcttttaaacgcataacattttgtttgggtctcaaacttggatgctgcccaagcctcgcagtaggaagcagcttcagactgcagcagggccgcatagcccgatagccaggccctggggcacccagggcaccgaaacgttttgaaaaacattttaatatacttaaaaaaaaagtaaaagggaaaatcagaagtctttggaagtttcctactgtttttatgtcccatagcaatttcccacccggccttctcagaacctgggccaggaggctgagctccgcgcggggccgaggtgcggctgcgcggtgcgggagccgggagccggggccggggggcggagccttgcgg

SEQ ID NO: 15756 - DNA, 527 bp, Homo sapiens; identical to SEQ ID NO: 15755
  source 1..527: mol_type = other DNA

SEQ ID NO: 15757 - DNA, 227 bp, Homo sapiens
  source 1..227: mol_type = other DNA
gtctgtctggattccccaaaccttggcaaagttttaaaaaattaagggacagcggctgagactcagactcactccgccttgggtcccgggctgggcaagtttgcgaagaaagcgggctgaactcgcactgcgccgctggctcccggctagcgggcggggtctccagggagccgcacctcagcccaccctgagggcggggctggcccggcggttgggggcggggcagg

SEQ ID NO: 15758 - DNA, 535 bp, Homo sapiens
  source 1..535: mol_type = other DNA
gcctggggcccgcagcccgtagcccgcagcccgcagagccgcgctgtccggggcatcccagtgcacggcgtccgtggacctgggacctcgaacctggactttctgccttagttaaaccaaaaggccaaggagaggtgttcgctgagcggctctcccttgtatcttctattgtatttgaatcgtgatcaggaaaaagcggagagagacgcacggtcccctccccgccggccgccgccccctctctgccctcggcggcgagcagcgcgccgcgacccgggccgaaggtgcgaggggctccgggcggccgggcgggcgcacaccatccccgcgggcggcgcggagccggcgacagcgcgcgagagggaccgggcggtggcggcggcgggatcctgagcagcagcagcagctgcagccgcctggagccaggctgcgcgccccggcccccgcctcggccgcggcgcgcccgcagcccggtgcgcggaggggcgagctcgccggcggagcgccggagcaagcggaggcgcaggagcggcgg

SEQ ID NO: 15759 - DNA, 422 bp, Homo sapiens
  source 1..422: mol_type = other DNA
ctttctctgtgcctgacccagggagttcttgaccattgaaaaagcacttttctgaagggaggggatcagccgactgagaggagccccggccccgcgtggtcccttaggcgtccccagcccgtgcagtcccggctggcgcaccaccatcgcctctgcagagcgcggccgcagcccggagcccgcagcccggagcccgcagcctggggcccgcagcccgtagcccgcagcccgcagagccgcgctgtccggggcatcccagtgcacggcgtccgtggacctgggacctcgaacctggactttctgccttagttaaaccaaaaggccaaggagaggtgttcgctgagcggctctcccttgtatcttctattgtatttgaatcgtgatcaggaaaaagcggagagagacgcacggtcccctccccg

SEQ ID NO: 15760 - DNA, 521 bp, Homo sapiens
  source 1..521: mol_type = other DNA
aactctcttctaaatctctttttcatagaatttaaattataaattggtcatttactgttgtcacacaatattgataattctcttggagcaaaaaaatcatctttttctttgtatttcattgaacgttctctttacagtgttaggtaaacctaaaaaaaaaggactaataattcgtaagcttggatttaaaaaccgtgtccgacacgttctacagctttttttcaaaagacgtttgctcgctctgcatacagaaggaattctcttcaaggggcagttgccagctccagagccagctgtttgggcgtcaaacgatttcgcctgaaggaccctagcgttgccggggccatccccacctgcgtccaggaggcgccccacagcgccggggccgggggacggcggagaagctagcgggcggcctcttccgggcaggcgttcgcgccgggcagcccgagcggccgcgaaggcccccgctctccgcttctcccgcccctcgcgacccagagggctgctggctggctaag

SEQ ID NO: 15761 - DNA, 691 bp, Homo sapiens
  source 1..691: mol_type = other DNA
tcttcaaggggcagttgccagctccagagccagctgtttgggcgtcaaacgatttcgcctgaaggaccctagcgttgccggggccatccccacctgcgtccaggaggcgccccacagcgccggggccgggggacggcggagaagctagcgggcggcctcttccgggcaggcgttcgcgccgggcagcccgagcggccgcgaaggcccccgctctccgcttctcccgcccctcgcgacccagagggctgctggctggctaagctaggagcggctctcggtgcagcgggacagggcgaagcggcctgcgcccacggagcgcgcgacactgcccgccagcggcctccgcgcgcgcacggtgagcgccacccgggaccgagccgctgcaggggaagagggccgctgcgcccgggtgtcctttatctccggacccgctggagcttccgaggggcttgcccccaccttctccggaagccggcaaaagccggccctccccggtagggaccgttgcagtggccgttggcggccggcgcggcgatgccccgcctccggcgcgagcctcggagcccccgggctggtaggccgagccggcggctccgcgggggaggggcgggtcggggggcggtgcgaggcccagccgggcgccccgctggcgggtcgcgcgcgcgcccgcgcactcttcctgccctcgagg

SEQ ID NO: 15762 - DNA, 337 bp, Homo sapiens
  source 1..337: mol_type = other DNA
ggacactatcccttgtgagcttttgctgaatgaactaaaaaatttcatgatggatgaacatcaagcagttgataatgttttttgaagttcagcaaagtcaagaatgcaacactattctgtagtcatgttcttggagttcactggaagcccacagtttttaacggggatcggttaaattgaacacaaatcgttggatccgtcgcgtttcgcgtaaccaggctgacgctgaaaacccgacctacgtgggcaggccctggagccgaggtactttagctgggcgcaaccgcagtggacatctaggcctcagctccgcttgcgacagccttgaggaaggtcc

SEQ ID NO: 15763 - DNA, 256 bp, Homo sapiens
  source 1..256: mol_type = other DNA
tgaggaaggtccccctgagagggacgcgtgccgcggagccaggcttactacgtgacccggacaccaggcatacgtggctgggatcccccgggctcggggcgcaggtacccaacgcgggagggccgggtagaccggcctcaggatgaaggctctgcatccggacggatacctggcctacgccgctctcggcgcgtgcttctcgagcgtcctcggggaaccacctcttaaataccttcttcaagaagaatgcaagctt

SEQ ID NO: 15764 - DNA, 375 bp, Homo sapiens
  source 1..375: mol_type = other DNA
ggaactgggtcccgcgggggcatacggctcgcccaccggcacgcgttaggaggcgaacacctgcatccagctaggtgttccgagctcagcccagggcgagggactgcttcctgtaagaagatcctcttgagaagagaggcagggactccctcctccctcccggagaggtggagcgcctggatggggccctccccattctcctggccccaaccccaggacgcctggctgcggagggctctgagctccggagctatcgtttcgtcggcctccagccccgcctccttcgccgcggggtttaacccgaggcagagtgaaatctgcctcggagatcagccccgcccatcgcggccggtgagcagccgggtacccagctgt

SEQ ID NO: 15765 - DNA, 678 bp, Homo sapiens
  source 1..678: mol_type = other DNA
atctttataattgtttttaatataggaaaagtatagggtgctgatcaatttgctttcttttcaagattcttatcatacttttgtaagatcaagaacaacatgtgaagtattatatatccacccattatatgtagttgtactggaaaaaattaaaagctgataacttttaatttgaagatgatggtatatactatgtatatatattaaggtgcttaaagataaatcctagattcaaactctttgattacaatgacaaactagtcagtaacttactaaatattgtactatatattactaagtattttactcttcaacatagctttttaaagacacaaagcttttcaaaattcctgcttggggtaaaatttggggaagcagatttctccagtgtttaaagttgaatacatttttcccatcacaagggaatacatttttcccatctaagttaagttgtttttctctggtaaaggaggaaatcaacacccagtttcagagtgtttttatattaaataattagtatactagtctagtaagtgataatccatcctttggttgcaaataatacttacattagcgtatggcaaaatttaattttgtacagagtaatttaacccagacttttttggcaggccaccaacggccgcgtcccagggcggcctgaaggctgataaccgggag

SEQ ID NO: 15766 - DNA, 676 bp, Homo sapiens
  source 1..676: mol_type = other DNA
acttttaatttgaagatgatggtatatactatgtatatatattaaggtgcttaaagataaatcctagattcaaactctttgattacaatgacaaactagtcagtaacttactaaatattgtactatatattactaagtattttactcttcaacatagctttttaaagacacaaagcttttcaaaattcctgcttggggtaaaatttggggaagcagatttctccagtgtttaaagttgaatacatttttcccatcacaagggaatacatttttcccatctaagttaagttgtttttctctggtaaaggaggaaatcaacacccagtttcagagtgtttttatattaaataattagtatactagtctagtaagtgataatccatcctttggttgcaaataatacttacattagcgtatggcaaaatttaattttgtacagagtaatttaacccagacttttttggcaggccaccaacggccgcgtcccagggcggcctgaaggctgataaccgggagccccgccctgggttcggctatcccgggcaccccgggccggcggggcgaggctctccaattgctgggccagagcgggacgctccgagcccattgggcttccaatcttggcctgcctagcgccgagcagccaatcagaaggcagtcctcccgaggggcctga

SEQ ID NO: 15767 - DNA, 467 bp, Homo sapiens
  source 1..467: mol_type = other DNA
aggattgaatatatgtattatgccccgtcctttgcatatatcggattgcatgatttaaaaaaaaaaaaatccccattttagagatggcatgaatatttatataccacatctatatgaaaaaaagcttggtaagctttgcatcgaagctttttggatcttcgctgcggaatcacttgacaagaggtcagcaaattggttgggttcctctcagcagtaagtgttgaaatactccactgggttctcctcagtgggccccttcttagggaggtccaagggctgggaaattgaccctcccttgctcacaagtcggaaaaccgattttcttcccaatgaaccactcagagggtggaggaagcccaatcttggctgatttggcccgtaaacagccaactaattgggcgtgaagttgatgatcaccaccagagtcaggaaggaattttcctcctctctctctgggaggctgagca

SEQ ID NO: 15768 - DNA, 260 bp, Homo sapiens
  source 1..260: mol_type = other DNA
actggggaaagggtctaggctatcttcccaagaaaacttcgctttaaagccctgtctcattgtgcagcctaaattaggcagactcagcgagaccctgagagctggcatccaaatgttagctacatttttctaggtagcacattgaatctaaaggcaactagctgcaattctcaccacagccagcctgggagagaggcagcgcagaccggcaccagggtggaatctctgtgtttcccctccagcttgagggtaaactttct

SEQ ID NO: 15769 - DNA, 334 bp, Homo sapiens
  source 1..334: mol_type = other DNA
ctccccatatgtcccttggcccaagggaatagaggtttaactcttatagggagtgtcaataaaccttttaaaaaagatcatgtaaccggataatcagctcttgcatatttgagaggctcttacctggggccaggggagataggcttttcaaagtccattgaattgccaagagtctctgtgctggagagggaacttgcagccccttcatggtgagcagggtgcttttcacctgaaacagcctctaggttgtctctctgttcttgagacacaggcattacctacacaacgtgtgagttggccaaatttaacatcctacaaaatgatttaaaattat

SEQ ID NO: 15770 - DNA, 493 bp, Homo sapiens
  source 1..493: mol_type = other DNA
aaagggcttcactgtgtaacaaggggacaaactaaccctttgtttactttgtgactcagcagcaacaaatgccttctgagacagaatgtggactacagtgggaaattaacttttggcgctgaggtgagaaagcgacattttcaccgtctaccatgctcccaggatggtggatctgcactcaccttggtaacagggagaaagtgagtgaatggattccaagaacttactgatggctttcaatgtgtaaaagggcaattagagagaaaaatttatttctaacaggatactatcagaaaaggctcttaagagattttaaggatgactttaatagctgcatttctaaaattctgggatgatgaaataactcaccaattccatcttcttataatatggagtcatcaccattttcacacaaatggctaatggtatttaaaaaccatgataccgtgtttccaaaatattttacagaggcattttaaatgaaagtcacttt

SEQ ID NO: 15771 - DNA, 345 bp, Homo sapiens
  source 1..345: mol_type = other DNA
aatttacaaatttaagtcttccacgagtcatggcgtggggtaaaactagtttgggaaccctctctgcttctctcagctgccaagaaagcccttcacccgagccactgcgtgctgtgacttcggcggccggggaccagcctccaggaggccgccatcttgacggccttctcactggctgcccgcagcacagcctgatgtccagcatcaaggccccgcctcccgcatggttggccacgcccttgcctcccgggaagtcaggtgcgccgctggatatctcagccggcggggccttaccagaccccggcccccgccccgttcgccccgcccccgggctgccctcagcgc

SEQ ID NO: 15772 - DNA, 619 bp, Homo sapiens
  source 1..619: mol_type = other DNA
cagctgaggcacagctccggttcggcaaacgtctcccgagtgccaaacgcccccacgcctaactggtcgtcagggcgcagaaaagaagcttggggggcgcggtcttcgccccagctcacccggtgaggtcacctttggcgcccagctcccgccatcggagcgccccgcccgagaccactgatctcctggggcctcgcagccttgcttccgaacgccaaggtcgcggtgcgccggggtagcgaacggccaggcccgaaaccccgccccgcagctaaacgcccggcccgctaccctgcgcccagctccagccgccgggtcccgcctgggcctctcctcctgggaataccgggcaccggtggccccgcccctacctgcgcgccgccccgcgcggcctccaatctccgcacggctttgcgcgcggcgcttagcctgggatacggcagcgaggccaggcggcgctgagggcagcccgggggcggggcgaacggggcgggggccggggtctggtaaggccccgccggctgagatatccagcggcgcacctgacttcccgggaggcaagggcgtggccaaccatgcgggaggcggggccttgatgctggacatcaggctgtgctgc

SEQ ID NO: 15773 - DNA, 351 bp, Homo sapiens
  source 1..351: mol_type = other DNA
atgtgtgtggagagaggtgcccattcacacttgcaaaaagaatgagctctccctctttccacttcccactgtgggcacggaggcactgcgccacccagggcaagacatcctgtgaaacccagagatcttgctccagccggattcagaggctgaacccaatggtgcaaggttttacgtcatcctctgtcctgacgccgcggggccagcgggagaagaaagccagtgcgtctctgggcgcaggggccagtggggctcggaggcacaggcaccccgcgacactccaggttccccgcacggggcgggggcagaggggcccgcccgggagggctgctacttctcgggctcgaataa

SEQ ID NO: 15774 - DNA, 448 bp, Homo sapiens
  source 1..448: mol_type = other DNA
accccggggaaaaagagagtctgtttaattctcctgtgcggcaagtagtgggaccctaggttcctgcagtattccagagataatcagtctctgtgcgccgcccccgggacacggaagcaggcggcgagcagcgccgagtgggtggagaaccgtcccccgccactcacccctgcccccagggagctgcattaatattaatctcgctgaataattgaaggccagagcgcagctgggccgcgtttaggctgcaccacccgcgtgtttcagccgctcgactccgctggacctgggacccccagacgccaggggctgctccagggaggcggagacggaggggcatcccgggtctccgcgcggtcgcctgcgcttcaccccgcacggggtgacctggggccacgcgggcttcagccaccggctgcccaagccttcccggacgagcggcggggcc

SEQ ID NO: 15775 - DNA, 599 bp, Homo sapiens
  source 1..599: mol_type = other DNA
agcgcagctgggccgcgtttaggctgcaccacccgcgtgtttcagccgctcgactccgctggacctgggacccccagacgccaggggctgctccagggaggcggagacggaggggcatcccgggtctccgcgcggtcgcctgcgcttcaccccgcacggggtgacctggggccacgcgggcttcagccaccggctgcccaagccttcccggacgagcggcggggcccgaggcggcggcgcgccagctccggcggggctattgcaatccctccctggccggcgccgagccagagcgcagcggcctccaccgcccgccgcgcccgcgagccccgcagcaaagcacaggtggcagcggctgcaggggcgcatcgccggcgtgcgccctcctgcagccctgggcgcatcgctctctcggggaagccaccctcggagcccccggagctccccgccaagcgccatccccgcgggcggaggggagcgcgggtcgcgcgccgtggagagccgggacgcggattagcgcccgcaggagcctcctgcgcccgttgaggcgctaaagggcttaccccggaggcgggtggagggcgggcagaggctcctct

SEQ ID NO: 15776 - DNA, 383 bp, Homo sapiens
  source 1..383: mol_type = other DNA
cagagatttattttttaaattttattaatgtgttgatattttgtccaataaactatcttctaaggactctgaaaatgcactgaatatttttggaggttctcttagcacagagaagtgggagaagatcagcgcctggctacccgggcagagagtttgcacgtgaccccggggaaaaagagagtctgtttaattctcctgtgcggcaagtagtgggaccctaggttcctgcagtattccagagataatcagtctctgtgcgccgcccccgggacacggaagcaggcggcgagcagcgccgagtgggtggagaaccgtcccccgccactcacccctgcccccagggagctgcattaatattaatctcgctgaataattgaaggcca

SEQ ID NO: 15777 - DNA, 333 bp, Homo sapiens
  source 1..333: mol_type = other DNA
cagagatttattttttaaattttattaatgtgttgatattttgtccaataaactatcttctaaggactctgaaaatgcactgaatatttttggaggttctcttagcacagagaagtgggagaagatcagcgcctggctacccgggcagagagtttgcacgtgaccccggggaaaaagagagtctgtttaattctcctgtgcggcaagtagtgggaccctaggttcctgcagtattccagagataatcagtctctgtgcgccgcccccgggacacggaagcaggcggcgagcagcgccgagtgggtggagaaccgtcccccgccactcacccct

SEQ ID NO: 15778 - DNA, 466 bp, Homo sapiens
  source 1..466: mol_type = other DNA
aaatacagtgaggaataattgagttaatacatgtaaggtacatgacacctggcacggaggagtttattttaaaaagtcacctattatgaaacatctgaattcaccatcgtggggatcacaggaagaggaaaactttttccagtatcatggaagaggaaaactttttccagtagcctgtagttgcaaaagataataagctttccaacctgtgatcacctggagcgtgcggagtggagggaggctccctttctcctcccatcagctccccgcgtgcagtcagagagggcaaagccagcccggcctcacctgagcgccccgcagccctgggtacctctgctcgccgtccgcgggtctccaggcgtggccacacctcccggggccccgcaagggttaaggcatgaaacccgagctcccgctcagctggggctcggggaggtccctgtaaaacccgcctgcccccggcctc

SEQ ID NO: 15779 - DNA, 470 bp, Homo sapiens
  source 1..470: mol_type = other DNA
attaaaacttttatgggggtaactgtccccatgattcaattatctcccatgacacgtggggtttatgggaaccacaattcaatgaggtttgatatcaaatggtgaaatacaattctgcatatgtagcatcctaagaagctctatagcctagtggctaagactatagcctgtgggcctaagctgcccgggttcaaaccctggctctgcccaaatacagtgaggaataattgagttaatacatgtaaggtacatgacacctggcacggaggagtttattttaaaaagtcacctattatgaaacatctgaattcaccatcgtggggatcacaggaagaggaaaactttttccagtatcatggaagaggaaaactttttccagtagcctgtagttgcaaaagataataagctttccaacctgtgatcacctggagcgtgcggagtggagggaggctccctttctcctcccatca

SEQ ID NO: 15780 - DNA, 456 bp, Homo sapiens
  source 1..456: mol_type = other DNA
tttttaaaaagtccatggaggatcttccaaaaccggcttttaaagaggggttcttggcactacagtactgctttataaacaacagttcccttcttttctcttagagcccagtgggaatctagagggaccaccccagaaattctgagatcctaggaggtacaaagcacagtattgctttggatcgaaaatatttgtttgactgtccgggcaccttgcccgtgaaaactcaagttgacacttccagggaggggaggtggagcccaattcctgcttctggagagagtaagagacttcctccactcctcctccaaggcacgctgagatttggagcggaggagctgccactttaaaaccggggcggcgcgggggccggcggctgccgcgatctctccctggtagcgggaggctgagcgggcggcgcgacgcgggggccgacgggggcgccgggtggccgcg

SEQ ID NO: 15781 - DNA, 320 bp, Homo sapiens
  source 1..320: mol_type = other DNA
tggagtttgtgtaaataaactcaacccttttgagggattgttttgacaaatgtatacagttgtgtaactacctctataatcaagattaaaagttttaatttattgatccatttatcaattgatggacacttgagttgttggcaattgggtcccaaacgttcaacataactcatgtggtccacgctaaagtttgagaagcactggtattccagctactaaaaatatactacaattttctcataagatttgacactcactttgtagtttgagtaaagaactccctcggctgaaccctccgccgcgctcggcggcccctcgga

SEQ ID NO: 15782 - DNA, 357 bp, Homo sapiens
  source 1..357: mol_type = other DNA
attgatccatttatcaattgatggacacttgagttgggcaattgggtcccaaacgttcaacataactcatgtggtccacgctaaagtttgagaagcactggtattccagctactaaaaatatactacaattttctcataagatttgacactcactttgtagtttgagtaaagaactccctcggctgaaccctccgccgcgctcggcggcccctcggagtcaggacacccagggtaacatgcgggtggccacgcgcagcccaggcgcttgcaaaacttagcggagccgggccggggccgggcccggggaaggcggggggacggcgcggcgaggggcggggtcagcgccgaggccgcgg

SEQ ID NO: 15783 - DNA, 404 bp, Homo sapiens
  source 1..404: mol_type = other DNA
gcttaccaatttctggaatttcacaaatgggcattctttcttaagctcgaatatatcagaacccattttttgagctggaatttgcttaaaaaaaagtggctgttttgattacggtctctgagaatcactctttacaattatattcattataattacctttttgaataaatgaactaaatcatttccatacctagctaggtagtagagttactaaaaaccctaaatgattatttcccaatctggataatactaggctgaaaaactatatacgcagaagtaattttaaggcgcctgccaagcttgcaggtgcattccccaagtgcgccagcccacgggaaaacctgtttccctgacttggtaagtagacaagtcaagccaatttgacagccacgtgacctcgcttc

SEQ ID NO: 15784 - DNA, 385 bp, Homo sapiens
  source 1..385: mol_type = other DNA
gatcacttgaggtcaggagttctacaccagcctttccttgaacccggggggaggttgcagggagccgagatcatgccactgcactccagaaaaaaaaaaaaaagattttgtttcccaggcatgtgttcctgggatgaaatttaaagcccttcataggttttgtaaatgaaaatgagtcttgctcagttttgagataaaaggacatgcacatctttttcttcagcaaagcgatcgggcagcatttttaaagtaaaacccaacagttttcaaaataattatgcattatttttaatttttggcttgtttcaaactctgaaggaccctctaattcatgaaaagaatttgcaaacaagaaagatttcacttgcattatattttcatcaat

SEQ ID NO: 15785 - DNA, 356 bp, Homo sapiens
  source 1..356: mol_type = other DNA
taggttttgtaaatgaaaatgagtcttgctcagttttgagataaaaggacatgcacatctttttcttcagcaaagcgatcgggcagcatttttaaagtaaaacccaacagttttcaaaataattatgcattatttttaatttttggcttgtttcaaactctgaaggaccctctaattcatgaaaagaatttgcaaacaagaaagatttcacttgcattatattttcatcaatgcggggcagctgggccgggggctcggctgcagatctccattttttttttttaagtcaaaaagcttggatttcctgaaagggcccccctctccgctctccccagcagggtgagagttgctgaagg

SEQ ID NO: 15786 - DNA, 307 bp, Homo sapiens
  source 1..307: mol_type = other DNA
tctcagaagctgctaatactttattgagacttctatagaggtaaaggattttttaaaaatttaagcaggtgtttgctccaaggagcggacaactgcaggaggcaatttccttaggggacagggaacggtgtccccgacctgtgggaatggggacagaggctgcgtcccgacctgcagggacaggggcggcgtccccgacccgtgggaagcaagcgggtaggggcggcgtccctgacctgtgaggggagcgaggggacagggactgcgtccccgacctgccgagagcgaaggggcggggggcggcgtc

SEQ ID NO: 15787 - DNA, 320 bp, Homo sapiens
  source 1..320: mol_type = other DNA
tcctggccagatagttttaaataatttctttacatattttatctcatcctaggtagatactattattatccccatgttaatacgagatgagaaaactgaaacaagtacagattaagtattttacctgaatcacacatttattgtaaggtggagaattcctgaaggtcaagcgatctagcccagctggggttaccaaattgctgtgcttcccaggtgggacacccgagcaaagccaggctgcggggctgggggcgccgcccggcccgcgccacagtccgcctggaggatcaccgccagggggcactctctccgaccctgcc

SEQ ID NO: 15788 - DNA, 522 bp, Homo sapiens
  source 1..522: mol_type = other DNA
gagacttctatagaggtaaaggattttttaaaaatttaagcaggtgtttgctccaaggagcggacaactgcaggaggcaatttccttaggggacagggaacggtgtccccgacctgtgggaatggggacagaggctgcgtcccgacctgcagggacaggggcggcgtccccgacccgtgggaagcaagcgggtaggggcggcgtccctgacctgtgaggggagcgaggggacagggactgcgtccccgacctgccgagagcgaaggggcggggggcggcgtccctgaccgctgggaagcgaggcggcggccgccaggaggaggcgcctgaaggagactcaccgttctagtgcgcggggaggccgaaccaggagggcagggctcccccaccaactcagccaacggcaaactctggaccagccaccttcgctggccgcccgcaggccaagccccagctgcggacgccactgcttccgccttctctgctggctgcggggagcgaggggcagggtcggagagagtg

SEQ ID NO: 15789 - DNA, 329 bp, Homo sapiens
  source 1..329: mol_type = other DNA
acacacaaagaaactgaggcctatctctatggatcagacactcctttgcttgttcccagaagacagggagattaatcaatcacataattattgctctatatgttatatacctccagtgtaaaaaaaatagaaaaaaaccttatatataaaattcacatgcaaaatatttacagatctcagttgtgcaaataagtccatttctttaaattaatctaatcagtgcctcgttttctctgtcacttcagatttgaacgagtcactatggcagaacatcctctcagggtctcagatgctggctgaccctctcagggtcttaggtatagccttga

SEQ ID NO: 15790 - DNA, 564 bp, Homo sapiens
  source 1..564: mol_type = other DNA
agacagaggtgtgtatacacctattcattcttgaattatccttagactattactacaatcatggtataatggagtgattaggaattggaattccaccccaccttcactaagtagtggctgtgtgaccatgtttagacataatattatcaaatgcgtatgactgttgtgaaaattaaatgacacataaaactctcaataatggggactaatattattaatcttaggtttcctaaagtttaagtaatgaatcaaaggcctgagtcaagatttaaatccaggtaatgtttaaacttacaccttcctcagcaagatttgaccaggttgaaaggttctgagattgtttggataacatttcaagataataataaaaaaattccatagtgttgttaatatctgatgaacatccaagtattttcctataataactgtcattgtataacattattgacagggagggaactggcagccagtggagccaggtggcagctggagctggggtctcctggcccatgattggctgccatcatttgtggttagccctccatggtgctgataaacagctca

SEQ ID NO: 15791 - DNA, 387 bp, Homo sapiens
  source 1..387: mol_type = other DNA
atgagcgtcctccaaagagaacctttctctgtgcagcgaaaagtaacctttttgttgttcttgcaaacaatagacatgacataaatcttatctgaaacctttgacatggttatgctttacatccagatggaaagccagcctttttgtccaaagaagaaaacttgtccatcaaaatcatcagtgagaagcctggctgaattaaggctatgttattactgactgttaccatctgcagagacatagtttctgatggtacgtagatttttgtctgaaagaattataaaataaaatgacttagagatcgcttcatataatcatcgtatttagattcacgcttgcagtgggactgaatgagttctgggaattgtagtccttttccgtaaagag

SEQ ID NO: 15792 - DNA, 424 bp, Homo sapiens
  source 1..424: mol_type = other DNA
ggcccagctattaatcgcttgaacctgggtagcagaggttgcagtgagccaagatcgtaccactgcactccagcctgaaaataaaagaaattataaaggtagtttttgctatcaagatcactatggaatattaaaatttaatcttttcccgacaactttttgaagtaaatatttctattatcctcatttccattacactgtattattactcagtagctgcctgatataaagttggtagagggcctgaatagcactggtattagtgaaatactttctcatttgattcaaaatagtgtttatttaaaccatagaaactatatgtatttcttctgtgtttttctaaaatgttcttaatttttaaaaatcaagttttgcccagatttctttttatctgtacaaatagtgaatcagtgttcataagaac

SEQ ID NO: 15793 - DNA, 249 bp, Homo sapiens
  source 1..249: mol_type = other DNA
taacacgagttaatggaaaagtccacatccaagctgtcctggatgtcttgtacaaactgaacaggccaacaatggccctgggattacagacgcgcgcgcccaccttggcctcccaaagggctgggcaaaactcctggatttctggatgaaaacaggcaagctttttgaaaaaactgacttctcccacacagcctgaacctcccagcgtgggggttgccctccaggtggcagcagagccacataattgac

SEQ ID NO: 15794 - DNA, 613 bp, Homo sapiens
  source 1..613: mol_type = other DNA
cccattctctggcagagtcaatgggttcatgtctaagcctcagagttccagctctttaacatgcttgaacatggaattggttgccttaagacatttttttgtagctatttttccaggcaatctgcaggcagaaattggacaagacaatttgtacttctccatattgacctgtcttgcaatatgtaactgttgaataaggagataatgtattgatggatgaatgaatgaataaataattgtgtagagaaaactatagccactaagactgtcttttcttaaggtgcaaacagatacctaggcaccaattagaagtctgcttctcagtagatttgaaactcagtctcttaatgaaagacctcaggtttattttttatttctttttgaaatatgataaaatcccctatatgtattgaaaaatccccttgaattaaataataaattgtaatcatagctagcgttttttaatgttcactctgtgccagtgctctgataaatacttgacatagattatctcatttaatccttacagaaaccaaatgaatactgtcattatccgtatttgatgaagaggatactgaggctcaaagagaattaataatttgttcaagttttt

SEQ ID NO: 15795 - DNA, 235 bp, Homo sapiens
  source 1..235: mol_type = other DNA
aaattaaatgccagttctaggcttctaaaacaaaacatttcgtcttctggccggagatggaaagtacacatttactgtactgcatgccgacggggagagggatccggaatctacctagtcctggggcccccctgattttggatgttcagatccttcacagatctgggccatctgcagcacacagcagctcttgctggtaggagatttcaacaacgtgacaatattctctaggcct

SEQ ID NO: 15796 - DNA, 271 bp, Homo sapiens
  source 1..271: mol_type = other DNA
tgccagctccaagctttatagtctggagctggtttttgaaattatttccatttaacagccacatgttaaaattttaaattaaatgccagttctaggcttctaaaacaaaacatttcgtcttctggccggagatggaaagtacacatttactgtactgcatgccgacggggagagggatccggaatctacctagtcctggggcccccctgattttggatgttcagatccttcacagatctgggccatctgcagcacacagcagctcttgctg

SEQ ID NO: 15797 - DNA, 540 bp, Homo sapiens
  source 1..540: mol_type = other DNA
atagcaatttaattcaacttaaagaatatagtgagtgttctctaatgaaaaggtattttaatatgaaactgaatcataatttagccctctagaggctgataacttatttagcatattacacatgtattttaatttcattgcttggtactaaaagagatgtatactttttttctgaaaactttaagctcgtttcaggcaaaaatgttatatattataatgcttacgatggacaattgtcaacctgattctctacaatttcatagctatgtgatttaaaagtgtacattaaagtaaaactgtgcaggtgtcaagtctaaattcatgtttaaaaatgaatgaactgtacctaaattgctatatacatcggatccatgtgccagctccaagctttatagtctggagctggtttttgaaattatttccatttaacagccacatgttaaaattttaaattaaatgccagttctaggcttctaaaacaaaacatttcgtcttctggccggagatggaaagtacacatttactgtactgcatgccgac

SEQ ID NO: 15798 - DNA, 367 bp, Homo sapiens
  source 1..367: mol_type = other DNA
caagaagctggcagccaagcttgacgcctgcctgcctgcctgttaatatgtataccagtcacctgaggctattgttaaaatggtttctggtctccagacctagacctctagcttagaaactatctcaatgatttgtacagaccacattgaattaatattttgtgtactttgagttaaataaaatgtactagtagggtttgtgacagcgaagcttccactattgtgagactttaagaataaaagctcttttgttccccaaaagatttaaaaaacaataaaattgagtcctttcacttctgcttaagcgccaaagcttcctggcggccgacctcttcaagatggcgggcgccggagactagcttccgct

SEQ ID NO: 15799 - DNA, 665 bp, Homo sapiens
  source 1..665: mol_type = other DNA
ataataatattaatatattaattatataattaatatattatatataatataagataattataatatataattgataatattgatatattaattaatattatatctcaatatatagatatattataattatattatataattaatgtattaattaatattattatcttaatatatattaatataatattattatatttatattatatattatatatttatatattaatataatattattatatttatattatatattatatatttatatattaatatataatgttatatattatataatatataatattatatattaatatataatattatatattatataatatataaaattattatatattaatatataatgttatatattatataatatataaaatattatatattatatcatattatatatataatttcatttaaacttgtatcttagaaattcttatcagtaagcgtacgttttctttacactggcagcataaggccaaatttgatttgtgacttctcatatgtaagatcttctatttcaaaaaggcgtgagctaattcaatcatcttgccgcttttttgctcctccaggctgtagagggcgacaaaaaccgtctactgaaggccgctcccgacgtgcgcgtctttacgtagacgtcgggg

SEQ ID NO: 15800 - DNA, 313 bp, Homo sapiens
  source 1..313: mol_type = other DNA
cccaaatcgttgggaactaagtgatggcttaacaatgatatatttattatataattatatcatatatgtaaaatatatatttatttaataaagagttgaaaataaaactgtggctccacacctatttctttgtggcgcgatctcggctcctcccgagtagctgagagagctcaaaccagcctgggtctgaccggccaatccgagcgcagtcttccgcagtcgcgagtacggctgcagccagggcgcctcggtggggtgagacagggcgctcactggcggaaccccgggggacgctggctgacgcactacccgc

SEQ ID NO: 15801 - DNA, 429 bp, Homo sapiens
  source 1..429: mol_type = other DNA
ttgatagtagcaacaatattactgaggtgtacctataatgagcttcctgaaggtaaacactcatatcaggcttattttaaagatttccaaatgacttgcataaaacagtcaattcagtgctactttgctattttcatactgtaaagtacatggtttaacatgaccattttaaagatgtttctcatgagctcaaatggggtgagcttttaaatgcattatctcacttaatcctcaaaaagagcgatacccattttaaaaagaggcagagtacttgcatacaactagaagcaaatttgcttagcactgtgaattaatcgcctaacacaaaggaggctcatttcaggctgtttttaggataaaatgcaaatccttttgcctaacagatgcggtgattaggaccggaagtagtggcggcgctgcgtaacgtcg

SEQ ID NO: 15802 - DNA, 380 bp, Homo sapiens
  source 1..380: mol_type = other DNA
agaactattcaaaatagtctttagtccttatgtttggatagctcacttttttctactataaaataattatgcaaatatccttttccactggaaaggctagcatttctgaggtgggcaaatcacttgagcccaggagattgagaagctgcattgagctctgattgcaccattgcactccagtctcggtgacagagtgagaccctgtctcaaaaataaacgtatttagctatttatattctagcagagacttagttcgctatagctacattttaaatctatttaagtctgataagattcataagtataccgttgggccccagtgcctgtggaaatactgatcctgtgatcacaagattctaagtggagttattttctttcag

SEQ ID NO: 15803 - DNA, 289 bp, Homo sapiens
  source 1..289: mol_type = other DNA
agtcccagctactggggaggctgctgcactccatctcaaaaaaacaaaaaaacataaaaacctttttttggtagagacacggtctctcttgcggtgggagccaggacatgcctccgacacggtttacaaagacaaaaggtatcctgtccctctgtctacctaaaagccctatttctttgtcttgtaacttaaaaaaattactgttctttgttgaagatgctataaaaactggaattcaatttctcatgtataaatgaaatacacatgtcagtaaatttctgtctgtttt

SEQ ID NO: 15804 - DNA, 464 bp, Homo sapiens
  source 1..464: mol_type = other DNA
aaagccctatttctttgtcttgtaacttaaaaaaattactgttctttgttgaagatgctataaaaactggaattcaatttctcatgtataaatgaaatacacatgtcagtaaatttctgtctgttttaaaaagccctttgtggggccagccaagcatactttgtggcagacccggcccggcggcggcccagcacgcgcaggccacccagagtggaggtgggaaacggcattacgcccctttcccttttcccccgccgagaccgcccccacaggcctggaagcccaacccggtgcggaccgccctcagtctcctagtccgggcgcgctgagcgcaggggggcgctgtcctcacccacgcgtaagtcgccgcagggcgtttccgggcggagaaaacctacacgtgatgggcgcccacccgccaagtaggtgggatccactactttgcagaggaggaagccctctcg

SEQ ID NO: 15805 - DNA, 423 bp, Homo sapiens
  source 1..423: mol_type = other DNA
gacacggtttacaaagacaaaaggtatcctgtccctctgtctacctaaaagccctatttctttgtcttgtaacttaaaaaaattactgttctttgttgaagatgctataaaaactggaattcaatttctcatgtataaatgaaatacacatgtcagtaaatttctgtctgttttaaaaagccctttgtggggccagccaagcatactttgtggcagacccggcccggcggcggcccagcacgcgcaggccacccagagtggaggtgggaaacggcattacgcccctttcccttttcccccgccgagaccgcccccacaggcctggaagcccaacccggtgcggaccgccctcagtctcctagtccgggcgcgctgagcgcaggggggcgctgtcctcacccacgcgtaagtcgccgcagggcg

SEQ ID NO: 15806 - DNA, 370 bp, Homo sapiens
  source 1..370: mol_type = other DNA
ttgctctatcacccaggctggagtgcagtggcacgaccacggcccactcttcttgcattccttccagaaaaaagttatacacatgcctgaatataagcacctaactaatatcttggagatatttccttacccaaatatattgcactatctcacattactcaaatcaatcaaattccataatttatttcgattgtgaaagaatgctgtcatggaactttttgacaaacattgttgagaatttatacgaactgattataataaaacgtctacatatttgttagttttataaaggattctttaattatgaaacactgcagcggtgctcggactcctcctgtccagcaggaggcgcggcccggcagctcccgca

SEQ ID NO: 15807 - DNA, 593 bp, Homo sapiens
  source 1..593: mol_type = other DNA
tcaaatcaatcaaattccataatttatttcgattgtgaaagaatgctgtcatggaactttttgacaaacattgttgagaatttatacgaactgattataataaaacgtctacatatttgttagttttataaaggattctttaattatgaaacactgcagcggtgctcggactcctcctgtccagcaggaggcgcggcccggcagctcccgcatgcgcagtgcgctcggtgtcagacggcccggatcccggttaccggcccctcgctcgctgctcgccagcccagactcggccctggcagtggcggctggcgattcggaccgatccgacctgggcggaggtggcccgcgccccgcggcatgagccggtgaccaagctcggggccgagcgggaggcagccgtggccgaggtaagcgcggctctccagggcggcggccgggcgggcgctgaagcgagggctcgggcctccgggggccgctgctgggtcgggacaagggccgagggagcgcggccgcgcggaggctccgtggaggcccgtgggctgcgagaggccacccccagccccgccggggctgtgacaatgactgcccgggcg

SEQ ID NO: 15808 - DNA, 437 bp, Homo sapiens
  source 1..437: mol_type = other DNA
cggcctctagacgggagcgcagagggcagcgctctaaagcttctgaagccgggcccagcccagggcttctccagggcttgagggagccagcgggaaggcccgcagcggcgcccgcgagctcgcgcgcaggagtccgtaggactcgcttgcatccgcaggcccgtggtccccctggcttttgccctaaggcaactcagcctagcctcgggagccctggggatcctggcatctccccagccccgcctagaatcggaaaagccctcgggcgcctccgggttcccagcaaggcagggaaaaaaatttacttattttttttttccgctgcaaaaccttaagagggtttgggagatctggtcaactttccgaaacatcttccgttctttccctcggctagctgtggggagggaggaaagaaggccgggcaaggagtgcacagc

SEQ ID NO: 15809 - DNA, 603 bp, Homo sapiens
  source 1..603: mol_type = other DNA
cctcaggcagctgctgggcactgccccagcactggttgttctgggctacttccccaggggccagtccaggcaagctggggcagctcaagcctgtgactcaggacctgaggctggatcccgctcacgcccccatgagttgtgggaattcaagggctagaactgtattcagcgcttggcatagagcctggcccctggcaaggattcaatcaatggctgggcccaggccgcctcctgatagaggcccccccggcggcacccggatacacccgccctggaatgccagcgtgggggccccagggctacccgcccgagatgcccaggctggtgcggggaggggcgtggcctcaccctactagggccggccccagtgtaacctgggggcggggccgagactccgtagcggggcggggcctcagctccagctgggcccgggggcgaggctggttggggtacggccatagtgggcggggcctggccggcgggagcgcaccgccttcccaaagggctcgggggcggggccggcggagggggcgtgtcttctgggggcggggcctgccgagtccgcggcgttccccggctgcagccgggagggggccgaggagt

SEQ ID NO: 15810 - DNA, 337 bp, Homo sapiens
  source 1..337: mol_type = other DNA
tgagtctctcctcagagccgttatgaagaaaatgtgaaaataacgaatatggaatgtaaacatgtcttgtgcagagcagatgctgtcagtttcccctgggtgcagccccggctgtgcctggcaagcagcggatgcgctttggggcaccaagcaaccgccctggtctgttcgctctgggccttggttttctcatctatgaaatggccagctcagctgagcacttaccagctaggaggaacacaggctggccttccagcctttgcaagggtggggctggctgcggggaacccctggggaggggctggggttcttcctgggtggggtcccccatcgggaa

SEQ ID NO: 15811 - DNA, 790 bp, Homo sapiens
  source 1..790: mol_type = other DNA
atcctgggcggcgcgggccacgccagggtctccccgcgcggcttcctcccccggcgccttctctcgggcgcgcgtgcgccccctgcaggcggcccccgggagagcctcgcgggggagccgggagcctggtttccccgccaacccccatcccgcccgccccggcggccaccctgggggcgaggcagcccggcgcgtgggaggggacggcgcgccattggcttgtgcgcggaaccgagggagggaccagcgcgggccgccagactcggtaagccccggccgcgcagggcgccgcgcgcagtccagccggcccggccctgccctgccctgccctgtcctgccctgccctgccctgccctgccctgcactgcccggcccggcacgggcggcgcgatgtgaggcgtccgagcccggagcctccgcctggcatcagctccacgtagcccagcgccggcacgcgcgaggcccgtaagttctgctccccgccgccgcttccgagccgcggaccccgccgcccgccgcctgcgcagcgcaacccagcggggctcctgcggccgacgggaccgcagaggggcggccgggaccccgcgcgcgctaaccgggcgccccgggacatctcggcacccgctgagcccgctgggaccccagggggtcgcctccccagctccccaaggcgccctcgagctttctgcttcagagcaggagagaaacggagcgaaagcagtttctgtctccccggggtctgactcgcctccccctcccgccattgttcccggcaggaggagtgcgcggc

SEQ ID NO: 15812 - DNA, 382 bp, Homo sapiens
  source 1..382: mol_type = other DNA
agggagaatgactgtcctgaggttcccagtcggccaggcttgtgcccctggcatgcccctgagctcagctgatctagctccttgttcaggacaaagacatgagctgatgcatttcttaattggcttcaattaagtgagccaggaggaggggctcccaggggcccccagggatccaccctcccccctgtaccctgggaaagggtctcctcctctgtagaatggagagaggaaaggaatttccaaagccctgggggtccacagaagtctggggtgggccaggacccaggacagacccttacagagttcagctagaatagctcatatttgggctccaggcagatttcccccatgttctcgtgatagtgagtgaattctcacgaga

SEQ ID NO: 15813 - DNA, 274 bp, Homo sapiens
  source 1..274: mol_type = other DNA
ctgttgtggatgaaatcacctacatctgctgaattaaattcaacactccatataataaacataagcctcaactatatataaaggtgcgaattaaggggatgcagctgtattgtccatcttcagcaggacacgaaccatctcccaggttggggagctgggaaatctccagctttacagccagcttggccagctgctggggtaagtgactcctaggggcccagtgccttccacctggaaggctccggctgctgcgggtccagcctcctctgacgtc

SEQ ID NO: 15814 - DNA, 448 bp, Homo sapiens
  source 1..448: mol_type = other DNA
ccctggttctctcaggttgacacgccaccagagagcctcctgacagcgcaactgacagcagcatctcttgaaaatcaaatgagttaatacttgtaactactgtgttattacacacttgagtcccttccatttcaggcaccggcctgggcccgggagtacgttgatcgtcccaagaaaggggcaccgtctgcagaacttgccaggaaagtcatcctgggcggcgcgggccacgccagggtctccccgcgcggcttcctcccccggcgccttctctcgggcgcgcgtgcgccccctgcaggcggcccccgggagagcctcgcgggggagccgggagcctggtttccccgccaacccccatcccgcccgccccggcggccaccctgggggcgaggcagcccggcgcgtgggaggggacggcgcgccattggcttgtgcgcggaaccgaggg

SEQ ID NO: 15815 - DNA, 555 bp, Homo sapiens
  source 1..555: mol_type = other DNA
gaggaaacaggccactggggtgggcagcctcagtcatgtcagatgtggtggcagagctgggactcctggccgtcctctccagcccaggggccactgagccaggccaggcccaaggtgctcggctggccagctctgtccccctccagattgccacctagaaagccaggggcagagcggcctagaagacggtcagccagcaacaactgcagcggggtgattcatccccacacgtgccgctggctgggcaagaggtaaaggacagctgggccaggggccaggctgggactccagcaggacttccgcggcgaggggcgctgggggggcgaaaggctttggcggcccggccagcagcgccctcgagacagccggtgcccttgcccgccggccgcccgaagtccgggtggtgggcgtggctgcccccggcgggtgggtgggggcgggctccggagcctggctgcggagtgggtgtccagggcgctcgcggctggggcggcgcggggggcgggaaggcgcgccgggcggctcgggggtggagccgggaccgcagcgcctgcc

SEQ ID NO: 15816 - DNA, 555 bp, Homo sapiens
  source 1..555: mol_type = other DNA
gctgtttacttcactgcagcctgcagccagcccacccagggctgcgctcagctccagtgaaggtgagagtttaagcgtactatataggttttacctttttattctggaaatttgcaaatgtacacaaaagtaaggaaactcttataatgggtccttgtgtatatcaatggcttatcttatttaatctatcaaccttttaaaaaaaatctttttgaggtctcacctgagaaagaataaataaataaaaataaaaaatatttttggtaagtattcttagtattttaaaacaaatcccatcatcatcttacccgttaattaaatggcactaattaaatggtgcttgaaatattacaaacatctatgttcgaccataccacctagagttctgggcaagaaggttgggacccacaggtcaagcctagccccttagttttaccatgaagataatcctggtctccccggctgcctggtgagtggcagaccacaggctagacttcccaggccccggccctggaaggggcggggaaccctccccctcactgccagctggaagaa

SEQ ID NO: 15817 - DNA, 614 bp, Homo sapiens
  source 1..614: mol_type = other DNA
aaagaataaataaataaaaataaaaaatatttttggtaagtattcttagtattttaaaacaaatcccatcatcatcttacccgttaattaaatggcactaattaaatggtgcttgaaatattacaaacatctatgttcgaccataccacctagagttctgggcaagaaggttgggacccacaggtcaagcctagccccttagttttaccatgaagataatcctggtctccccggctgcctggtgagtggcagaccacaggctagacttcccaggccccggccctggaaggggcggggaaccctccccctcactgccagctggaagaatccgagcggtccccgcacgcacttctggaagtgcaagccggtagcgcggcgggccagggatacagccaagtcccgggacgtgccagctgcggtaactgaagccgggtcccgggcgggcgggggtaccagggaggagagggcctcctcccacgcctctccgccggcacccccggggcccatgccgcgaacaggccggcgaggctggcaaggtgcccgggcccggggcggaaagcaggaagtcgatcccgcgggcgcggcccagggtgcggcgctgcagatgcagcacg

SEQ ID NO: 15818 - DNA, 609 bp, Homo sapiens
  source 1..609: mol_type = other DNA
ccgggtcccgggcgggcgggggtaccagggaggagagggcctcctcccacgcctctccgccggcacccccggggcccatgccgcgaacaggccggcgaggctggcaaggtgcccgggcccggggcggaaagcaggaagtcgatcccgcgggcgcggcccagggtgcggcgctgcagatgcagcacggggtcgcggggcgggcgcccagtgcaccggaggaggtgagcgccaggtcgccttcgcggcccggggacacaggcagggacgcgggagctgatgcggctggaccggccggggaaacgatccgggccgcccagaggacagagaggcggcgtggcctccggcctcggggagcgctgccgggggtctgtagcgccgcccgggtcctgggtcggggttccgggaagtggacctgcgagccaagcctagcgagcccttccaggaagctgtggctgccgaggtcccccgccagcagcgggcagcggagcgcaggggcggggctggggactggcgaactccgcctctctggggctgtcgctttaagggcaaggcggggcgtgcgggccctttaaggccacgtgggggcgtgtcaggaagtgagtccagggc

SEQ ID NO: 15819 - DNA, 411 bp, Homo sapiens
  source 1..411: mol_type = other DNA
gtgctaaaagaaaataaattcatctgatggcataattacttaaacgaaaacaacagcgaccgtctacgtaaggagatgatcatgtctcttgccatataaagtgcacttaataaatggcgtcttgcaagtcactggctgtagtcacagcaacccctaccagcccaggcagcttcttctagaagcaggccctgatggcctactcccggcactccgcggacagccccagcctgcggacagccccagcctgcgtcacttgtcctccacccgggcggacccacacatggtaggaacgtgagggggcgggcctgttccggcgcctctgggccaatcgccaggtggaaggcactcagccaatggcagaggggctctggggccctgtgggcgggcggggtccacgtcgcctaccggggc

SEQ ID NO: 15820 - DNA, 337 bp, Homo sapiens
  source 1..337: mol_type = other DNA
ggacttgaaggcctggaagcccaggaataacaccctctcgatagggctcaattcaccacgagtagcaagacagcctctagggagagtcttgggagggtccccttgtgttaccaaaccttagtgctctgaagtcactaatgcaaggccccactgcccagtcacttgtggagccagtgaattcacacacctggaccttggggtccagtgtcctggggctgaaccaagcccagggccgcgggggccgtggcttcagcaccgcggagagcgccatctccgggggcggggctggcggggtgggggcggggcctgggcggggcgcgcgagaccccggccgggt

SEQ ID NO: 15821 - DNA, 258 bp, Homo sapiens
  source 1..258: mol_type = other DNA
tgccacccgttccagggaggctgcttggtttgggaagatactccccaggggtctccccttcccttgggggcgcagctgaggaccgcgagccgagagaagcccgggccagggctttcttcgcgtactacctttgttgaggaaacggagaagacacagtagtctctcggcgttccattggaaagactcggggctttaactgcgcaggcgcaagggcagccaacgctgggtggttcaccggttcttcaaaggaagcagggc

SEQ ID NO: 15822 - DNA, 268 bp, Homo sapiens
  source 1..268: mol_type = other DNA
taaaataatgtattacttggcccgctccctcaggccactggccctgccacccgttccagggaggctgcttggtttgggaagatactccccaggggtctccccttcccttgggggcgcagctgaggaccgcgagccgagagaagcccgggccagggctttcttcgcgtactacctttgttgaggaaacggagaagacacagtagtctctcggcgttccattggaaagactcggggctttaactgcgcaggcgcaagggcagccaacgct

SEQ ID NO: 15823 - DNA, 751 bp, Homo sapiens
  source 1..751: mol_type = other DNA
cccttccggaggaggagcaaagctgcttctgcagcaactctccgggggagaattagcccggattaatcgagattaaatccacagggcctggcacgctgtgctggtttagggtccagagcgccccccacccattccctggcctgctatggggtgcgcgggggagagctccaggccggtgcgcccgggcacaatcacgacgatctggacaagagtggggatccccggccctgcccaggcagcctaggccgcccgcgtctggggcccctcgccagctcccgggcgggaggcggccttcacaagggcgctttgtcctggcggcgccggcagggcccggccgggccacctggactgaggtgctccgcggctctggcgcaggtgtcggccggctccgcccctgtccccagagcaggtgtcccagaccctgcggcctgcattccgggtctttgatcccgggcccggggacactggcccctccccttggggagtgaggggaggagacgcggccccagagcgggggcagggcagggggtcagggcaggtagcggggcccgggccttcgcgggtggctgctcccgctcccccagccctactcagcccagaagggggcttcgggggctcctcgcgggctggggaaccgtcggatgccggcccaaggggcggggccaggaccccgggggggtcaccccgccccttcgcgctcagccccgctgaggtgaaacctgagcccaggtcgggggcgggaccggcccgc

SEQ ID NO: 15824 - DNA, 376 bp, Homo sapiens
  source 1..376: mol_type = other DNA
gggggaagggctgggcccctgccttgagctggtctgaccatcgcgtctccaggatgtttctggccacggcgtcaagcgccaaagagctttttcgctctgtcccaggctggagtgcagtggcgggatctcgagtagctgggactgtgcccttctaagggaggaaggggacactgtccccgcgtcacagatgaggaagctgaagctctgagaccagcagcctgtcggacacctggctgtacctgtagaagagcatggacttcaccagggtgatgacgtctcgggggagggacgcccaggtcggcagcagccccccttctccgctaggcggtggctgccccaccccgcagcagagcccggaacagtgtgcggagggggc

SEQ ID NO: 15825 - DNA, 549 bp, Homo sapiens
  source 1..549: mol_type = other DNA
ggctgccggcaatgggtgccgcagcacaccccgttccttaggcaagccagtccgcccgcccgagcgccgccgcgggcccccgtcgccccccccgccgacgccccaccgcccccggtggggggacccgagcgtcccgggagccgcgggccgaggcgcgggggcccgggccggccgccgtaccactccgcccggcggccccctccagccccagtccctctcgcccggctctcgggagcggcgggggcgcgcacggcggcggcggcggcgggccggcggggccgcgcggcgggctcccgcgcgggcgagtgtgtctgggcctgggcggagggatccccgggctgaggcggcggaggtgctgcggcccggggcccgctgctgctgctgagaggaggaggattccggcccggggcctgtgtgtgtccctcctggaggaggaggaggatccagttcctccccccaaccccctcctccccacccccccttgcctggggaagaggaggaaagagcagcagcagaagcagcagcagcagctccagcttcttccctccc

SEQ ID NO: 15826 - DNA, 634 bp, Homo sapiens
  source 1..634: mol_type = other DNA
cctcggctgcggctgcacgggagccgagctgcggcgctgcacgggccccggagtttggctgccttcgccgccgctcggtgctcggccccatcaccgccgccgccgccgccgctgcactggagtttggctgccgctgccggcaatgggtgccgcagcacaccccgttccttaggcaagccagtccgcccgcccgagcgccgccgcgggcccccgtcgccccccccgccgacgccccaccgcccccggtggggggacccgagcgtcccgggagccgcgggccgaggcgcgggggcccgggccggccgccgtaccactccgcccggcggccccctccagccccagtccctctcgcccggctctcgggagcggcgggggcgcgcacggcggcggcggcggcgggccggcggggccgcgcggcgggctcccgcgcgggcgagtgtgtctgggcctgggcggagggatccccgggctgaggcggcggaggtgctgcggcccggggcccgctgctgctgctgagaggaggaggattccggcccggggcctgtgtgtgtccctcctggaggaggaggaggatccagttcctccccccaaccccctcctccccacccccccttgcctggggaagaggaggaaa

SEQ ID NO: 15827 - DNA, 625 bp, Homo sapiens
  source 1..625: mol_type = other DNA
attgcatgttgcattcgacttgagggcccccccttcaaactgctgttgcactggagggagttggggccgctctggagcccctttgcagctcccgccggcgggaggggggagttgggctcgggccgcggagttgggggggccgccgcgggctccggcctcgcctcggctgcggctgcacgggagccgagctgcggcgctgcacgggccccggagtttggctgccttcgccgccgctcggtgctcggccccatcaccgccgccgccgccgccgctgcactggagtttggctgccgctgccggcaatgggtgccgcagcacaccccgttccttaggcaagccagtccgcccgcccgagcgccgccgcgggcccccgtcgccccccccgccgacgccccaccgcccccggtggggggacccgagcgtcccgggagccgcgggccgaggcgcgggggcccgggccggccgccgtaccactccgcccggcggccccctccagccccagtccctctcgcccggctctcgggagcggcgggggcgcgcacggcggcggcggcggcgggccggcggggccgcgcggcgggctcccgcgcgggcgagtgtgtctgggcctgggcggagggatccc

SEQ ID NO: 15828 - DNA, 374 bp, Homo sapiens
  source 1..374: mol_type = other DNA
gtccttgccctgaggagcctcacagctcagtggggcccccggatcacctgaggcgcgcctgtaattccaggtgctcaaaaaaatagtaataataataaataaaatttttaaaaagctgaaaatctcccccgttgaggggagatctgttgcgtgaaatggaattccctgctccctcatcaatttacgggacagtggttggtgaagccttaaaatgccaatgttccaggaacactgttatcggttccaggactattgttgctttatgtctctttaaaaaaggagagaggattcctcgagccacgccctcttctcattaatattaaattattgtgaatattgatgggcgtggcgccttggccagctgggctagccag

SEQ ID NO: 15829 - DNA, 627 bp, Homo sapiens
  source 1..627: mol_type = other DNA
ggcgcgcctgtaattccaggtgctcaaaaaaatagtaataataataaataaaatttttaaaaagctgaaaatctcccccgttgaggggagatctgttgcgtgaaatggaattccctgctccctcatcaatttacgggacagtggttggtgaagccttaaaatgccaatgttccaggaacactgttatcggttccaggactattgttgctttatgtctctttaaaaaaggagagaggattcctcgagccacgccctcttctcattaatattaaattattgtgaatattgatgggcgtggcgccttggccagctgggctagccagccaggggttccgaggccggcagccacccagtctcgggggagcacttagctcccccgccccggctcccaccctgtccggggggctcctgaagccctcagccccaaccccgggctccccatggaagccagctgtgccccaggaggctgaatgcccacggtgcgcccggggcccctgagcccatcccgctcctagccgctgccctaaggcccccgcgcgccccgcgccccccacccggggccgcgccgcctccgtccgcccctcccccggggcttcgccccggacctgccccccgcccgtttgccag

SEQ ID NO: 15830 - DNA, 404 bp, Homo sapiens
  source 1..404: mol_type = other DNA
acatacatatgtgtgagcctggtgacagcagccctcgcgagtgtacacttgtgagcgtgctggatgcgcgcagtgcgatgtgccaggccgggagattcagtcccatccaggcgggccgggccgggctgggggcagggctttctgctgccccgcccattcgtcgccccgcccctcggaccgccccagcgggctgcagcgcagcgggcgtccggcagagggcgctgcgggcccggtgccaccgtgcggccgagggggcgtgctcggcggcgggcaggcagcggcccggccagctatgcggggtcctgcggccgcggctggcggcacttcctggagcggcggcggcagcggcttcccgggcacctgggcgtggggagcgggggcgcgcggcgcggggcgggcggagc

SEQ ID NO: 15831 - DNA, 440 bp, Homo sapiens
  source 1..440: mol_type = other DNA
gtgcctgtaatcccagctactcgggaagctgggccaggagaagaggttgcagtgagctgagatcacgccattgcactccagcctgggtgcagctgccactccagaccctagggtaccatgtcaggactggcttggcagagccagaagcccagcaaatcggagttgtgggcagtcacgggcttccacaagcctcgagttgccccaaaagtactttgtaagttgtgaaacactccacagatacttatttttttgtagcttccccagacctcagaaagggcattagtggggggccccctccctaaaagggcctggctccagcgggtggaagggaggccactgggttgtcacccagcctggctcgcacgctcgtgcgctgtgtgcccgtccgcccacccgtcgcctgctgcagggcctggagccgctgctgggagagaggagca

SEQ ID NO: 15832 - DNA, 346 bp, Homo sapiens
  source 1..346: mol_type = other DNA
tttctggatgggagtgtgtgcatatgcacacacatacatatgtgtgagggatgtggcaacccctggtgacagcagccctcgcgagtgtacacttgtgagcgtgctggatgcgcgcagtgcgatgtgccaggccgggagattcagtcccatccaggcgggccgggccgggctgggggcagggctttctgctgccccgcccattcgtcgccccgcccctcggaccgccccagcgggctgcagcgcagcgggcgtccggcagagggcgctgcgggcccggtgccaccgtgcggccgagggggcgtgctcggcggcgggcaggcagcggcccggccagctatgcggggtc

SEQ ID NO: 15833 - DNA, 458 bp, Homo sapiens
  source 1..458: mol_type = other DNA
cgccccctaaggagccgcccagacctagggctggactcaggagctgggggggcctcacctgttcccctgaggaccccgccggacccggaggctcacagggttctggggcagggcgctccctggccgcagcagatgccctcccaggagtggaggggcccttcgggaagaggcttcctgggccccctggtcttcggccgggtccccagcccccgctcccatcgcggactgactggacgctgtcgacagcaccttcctggggccccggctcccgtttggtggttggtcccagggcctgcccggttcctgacctctgcccggcggccgcgctcgtcggggccgggggcggggccgatccctccggcttcccgcttcccagcccgtggccttgagcaagcccctcccccaggcctcgggggctctcccggtttgggggaaccggttgcagctgccgatgctgg

SEQ ID NO: 15834 - DNA, 618 bp, Homo sapiens
  source 1..618: mol_type = other DNA
tccgccctcctccagggcgacactccccggcagcgggctgagaaggctcaggacaccgagctggccgcctacctggagaaccggcagcactaccagatgatccagcgggaggaccaggtagcgggccgcccacgggcagcaggagggacaatgcggccaggggacgagcgccttccttgcccacctcactgccacattccagtgggacggccacggggggacctaggccccagggaaagagccccatgccgccccctaaggagccgcccagacctagggctggactcaggagctgggggggcctcacctgttcccctgaggaccccgccggacccggaggctcacagggttctggggcagggcgctccctggccgcagcagatgccctcccaggagtggaggggcccttcgggaagaggcttcctgggccccctggtcttcggccgggtccccagcccccgctcccatcgcggactgactggacgctgtcgacagcaccttcctggggccccggctcccgtttggtggttggtcccagggcctgcccggttcctgacctctgcccggcggccgcgctcgtcggggccgggggcggggccgatccctccggcttcccgc

SEQ ID NO: 15835 - DNA, 550 bp, Homo sapiens
  source 1..550: mol_type = other DNA
cagggcctgcccggttcctgacctctgcccggcggccgcgctcgtcggggccgggggcggggccgatccctccggcttcccgcttcccagcccgtggccttgagcaagcccctcccccaggcctcgggggctctcccggtttgggggaaccggttgcagctgccgatgctgggtgctcccggaaaggcactgggcgaccgcacccgtggctttctctgggcgaccgggtcccagactccccccagcacagcatgcgcggaaaccgccccaggtgggccgcgccccctccccagcagccagcagggcgccagggctgagccggccgtgagcgggtcccgcgggttatacaggcgccggggctccgcggcaggcaagaaagctgaggcctgagaacggcccgggccttggcgtacggcaggggacgacctggggggcagcgggcggcggcgcagggagtgggccgggggccggtgtgcgcgggcgggacggggcccggggtcgggagaccaccgcgaggccgccgtcgcagcgcagagggcaccggcgggga

SEQ ID NO: 15836 - DNA, 697 bp, Homo sapiens
  source 1..697: mol_type = other DNA
tgctcccggaaaggcactgggcgaccgcacccgtggctttctctgggcgaccgggtcccagactccccccagcacagcatgcgcggaaaccgccccaggtgggccgcgccccctccccagcagccagcagggcgccagggctgagccggccgtgagcgggtcccgcgggttatacaggcgccggggctccgcggcaggcaagaaagctgaggcctgagaacggcccgggccttggcgtacggcaggggacgacctggggggcagcgggcggcggcgcagggagtgggccgggggccggtgtgcgcgggcgggacggggcccggggtcgggagaccaccgcgaggccgccgtcgcagcgcagagggcaccggcggggagggcccatgtgaccggctcagaccggttctggagacaaaaggggccgcggcggccggagcgggacgggcccggcgcgggagggagcgaagcagcgcgggcagcgagcgagtgagcgcgcggcggcccctggtccgcccggccgcggccgatctaggggctgggggctcctgggctcgaggcgtcccccggggagtcgcctcttagcggtgcgtccgggctagcggcgaggggccgccccaagtcttcccaccgccgccaccttagcagcccgacttgggcgcggaggtgggagggccctgcacgcggcccccggtgggga

SEQ ID NO: 15837 - DNA, 416 bp, Homo sapiens
  source 1..416: mol_type = other DNA
cctcctggctgagggttccgcgctccggagctgcagtgaccgtacaggcttcagaagggtcctggctcgcaggccccagacgtgcgagtgttaagcggtcaccccgcctccgcaccataaaagttgatatctttctaagctactcaagataaaacaaagacggcaggtagccgcggcagcggcagtgagggcgcggcgcggggcgggcgctgacgcggaaggggcggtgccgctgttgcgcgccgtggcggcctctgtgcagtcgccggttccggaggagggcccaacccggctgggtgggtcctggcagcttttagggtgccctttaaaagtggcaacctggttcggccagcctggccctcaggttcagagtgagggaaaagccttttgttacagcacacagtgtacgtccataa

SEQ ID NO: 15838 - DNA, 427 bp, Homo sapiens
  source 1..427: mol_type = other DNA
gtctcctaaagtgctggacttcctctctgagtagtggggaagggtgtatagactatgattgctcacaattggtaaccatacttgcagtgatctttgtgatttattgaatcacatctaggatgtacatattaatccatatttgtgctgagcatattcatttatcaactaagaattgttgtggtgatgaaaatgtcaacactttatcaggttctgaacccaaagagacttttgcttattatgtaagaagcaaaataaaagagaaaagcaatccgtgtgctttttttccccctgccttaaggtcaggcctcactgctctgttaggaaactaagggtcaaatgaggttaactaatttgctcaattgggagttgggggactatagttacacaacaagtgttattgcgctatgatttgatcttcaacacaaac

SEQ ID NO: 15839 - DNA, 475 bp, Homo sapiens
  source 1..475: mol_type = other DNA
tctgccatttataatcttctctctgtaaatgttaaaagaaaaaacattaggaacctaccaaagactttaaagtgactcaaaggctggagccaaatttccattttgttgaggcaaaacgtactgtacttacaacttcatttaatgcttggcatttcaattgagaacaccaaaagaataatataggtcggcttctaactatataggccaagaagcagctgacatatgtcataaccaccttatggacgtacactgtgtgctgtaacaaaaggcttttccctcactctgaacctgagggccaggctggccgaaccaggttgccacttttaaagggcaccctaaaagctgccaggacccacccagccgggttgggccctcctccggaaccggcgactgcacagaggccgccacggcgcgcaacagcggcaccgccccttccgcgtcagcgcccgccccgcgccgcgccctcactgccgct

SEQ ID NO: 15840 - DNA, 404 bp, Homo sapiens
  source 1..404: mol_type = other DNA
catttaatgcttggcatttcaattgagaacaccaaaagaataatataggtcggcttctaactatataggccaagaagcagctgacatatgtcataaccaccttatggacgtacactgtgtgctgtaacaaaaggcttttccctcactctgaacctgagggccaggctggccgaaccaggttgccacttttaaagggcaccctaaaagctgccaggacccacccagccgggttgggccctcctccggaaccggcgactgcacagaggccgccacggcgcgcaacagcggcaccgccccttccgcgtcagcgcccgccccgcgccgcgccctcactgccgctgccgcggctacctgccgtctttgttttatcttgagtagcttagaaagatatcaacttttatggt

SEQ ID NO: 15841 - DNA, 321 bp, Homo sapiens
  source 1..321: mol_type = other DNA
aagttgaactgaggccgggcgcagtggctcgagaccagcctggccaacatgtcggaggcggaggttgcagtgaaccgagactccagccaaggaggaacacttcccccaaatttcttcgatctggcccgccggcttgctggatgacagcgatccggcctggactctgccctggggaactcaatggggcagaaaccctgcaggaaggccaggcctctgagcccagtccggggagaccccgcgcccagcagctcaccgcgctcgggcactggcggtggaacgggaaccgccccgttcctgcctcggggaggtaacagctccgac

SEQ ID NO: 15842 - DNA, 377 bp, Homo sapiens
  source 1..377: mol_type = other DNA
cccccaagcgctgttccttggcgagtgaggggccaagggccaagccccggggaaggctctttccaggcgcggctcgcgggctcaggtccaggtgggcctgcggagcccgagggacaggtgagctaaggagggccctgaaagttttgaggaggctcaagggctcttcagaagcccccagcgactctgagggcactggaggatcctgggatcagaaagcctccctacgccggaagtgaaatttttttctcaggaaagaaaatgcgaacctcggattccggaggtgcaccagtgattcgactagctgggaaagcggaactaattgttccagtcggagctgttacctccccgaggcaggaacggggcggttcccgttccac

SEQ ID NO: 15843 - DNA, 383 bp, Homo sapiens
  source 1..383: mol_type = other DNA
cccaggggagtggctaatcccttctacttccacgaagcagcagccaaggggccgcagatccacagcctcccacccgggggcgctgagagatcttggggtcattacggaggccgggacctgggaccgaccagccgcgcctcctggctgagggttccgcgctccggagctgcagtgaccgtacaggcttcagaagggtcctggctcgcaggccccagacgtgcgagtgttaagcggtcaccccgcctccgcaccataaaagttgatatctttctaagctactcaagataaaacaaagacggcaggtagccgcggcagcggcagtgagggcgcggcgcggggcgggcgctgacgcggaaggggcggtgccgctgttgcgcgccgtg

SEQ ID NO: 15844 - DNA, 443 bp, Homo sapiens
  source 1..443: mol_type = other DNA
actccagcttgggtaacacagcaataccttatctctaataataataataaaaattttaaaatctaaaaaactaaaagacttcaatctggaagctaatttagtgtaaaggaagagcttgttgtttcttattataatacatctcccactaaatccaataaattctatcaccttaggagatgagttttaaactaagtgtaatgagaaaataggtaattttttaaaatctcttttttctttttggctgcggggtggccagagaacgaagaagcttagcactccagtaagaagacagtcgtgaaccatgggtcccttttttcactgcactcagcaaatcttgattgaatgaaacccaggggagtggctaatcccttctacttccacgaagcagcagccaaggggccgcagatccacagcctcccacccgggggcgctgagagatcttg

SEQ ID NO: 15845 - DNA, 362 bp, Homo sapiens
  source 1..362: mol_type = other DNA
tcggaggcggaggttgcagtgaaccgagactccagccaaggaggaacacttcccccaaatttcttcgatctggcccgccggcttgctggatgacagcgatccggcctggactctgccctggggaactcaatggggcagaaaccctgcaggaaggccaggcctctgagcccagtccggggagaccccgcgcccagcagctcaccgcgctcgggcactggcggtggaacgggaaccgccccgttcctgcctcggggaggtaacagctccgactggaacaattagttccgctttcccagctagtcgaatcactggtgcacctccggaatccgaggttcgcattttctttcctgagaaaaaaattt

SEQ ID NO: 15846 - DNA, 308 bp, Homo sapiens
  source 1..308: mol_type = other DNA
gcctctctaggcctgccatggggcaggcagccagggagaaggagggcccctctggagacccagggatttcagtagcccctgttccgggacaggcgcaggtcctgggaggcccaagagtccctggacctgactcctagaaatgggcccctcctccagtggctgagtatctgtgtattatgattatacaaacccccacattggcctatatgtgcagatctgagctcccaggaggacctgtcctcccagatggtggagatggacaggaggactatctacttcttcatgttagttcaacattaacccagagg

SEQ ID NO: 15847 - DNA, 341 bp, Homo sapiens
  source 1..341: mol_type = other DNA
cctcagcttcccgagtagctgggactacgcctggcagactgcaatatatttatatttatattttttgccaggctggaatgcagtgggacaatcttggccagactggtcttgaactcctgatctcaggtgatctgcccacctcagttacaggcatgagccaccactgtgtcctgtcttttgagtgactttaaaaaaaaaattggatcacgaggtcaggatcgagactgtcctggcttagtcccggctactcgaaagtcctgttaattgaattagatttttactcttgttgttgcatgaatgataaaataataatctcagaaaagttatttttgtcttaagag

SEQ ID NO: 15848 - DNA, 454 bp, Homo sapiens
  source 1..454: mol_type = other DNA
tttttcatctttaagatgtattaaagctttataatttaatacccaaatatagtccaaagaaatgtccttatcttaaagatgattgtcatcattgcatatgttatttaaatttagcacagttcttgaattatgaaaagtactgatttcatattggaaagttagtgcttgagactaatgaaatcagtaagcctgagatcataaatgataacagtcttcatttgaagttggctggctgagaaactatgccttgccattcttcatgatgcatttaggatatgatgctactgctgttaaaagctattaaaaaatatatttaacatgggcatcccaacaaactctgtcttaaaaatatatatatattaaacatgaatttatatgaggaaaaaaccatattacctcctgtgagtctcaatttgaaatcgtaacaagcaaaaatgtgaccttctagaatgat

SEQ ID NO: 15849 - DNA, 437 bp, Homo sapiens
  source 1..437: mol_type = other DNA
aatccgtattattaatatgattttatgcagtaaccctcccttccttgtcaggatcagaaagtcaaagaaatctgggcctctgagctggagcaacccagccctgatgtcccttgtttgatgtcaataaagacccaagaggattatgcatccacaagccttgcgtattcgcagacatagtctgggctattttttttttttaagttagggaaatttaagcaggggagggggctctctctcgggccggcctgaggaggagcggggccccgcgcaggaggcgccggcgggtggggtcgggggaccagggagccggggccgagggcgggaaggggccgggccggcgctgggggcgggcccaggcgcggtggcggtggccggggctgcggcgcggggggcggggcggtcgggcccgggacaccccctcccggtcccctggcggg

SEQ ID NO: 15850 - DNA, 506 bp, Homo sapiens
  source 1..506: mol_type = other DNA
ctctcaataaccaactgttactgaaaattgtttctgaattaaatgccctttatattttttatatctgtttattcaatgagcagtgacagagtttctataaactacagcgattgttgtttttaaattgtctctagacaaatgatacttttcccaggattacttttttaaaattatttttattgttttagagatatcccgggcgtaactgggactatagatgtgcattaatgcacttattttaaaaaactgaaatctaaaatctctgtctcctaagagacttaagaaaagcttaataaattaacttaaatattcttaagaaaatattccccaaaaaataattcaggacagagcctaaattctatctagtttaggtttatgtcctttgatgtccccctcaaaacaacaaatactagattctagttgcccttaaggactatatggaactatcatcaatggatttatctaaacccattttgaagctgtgtggatataagtctcacgagatc

SEQ ID NO: 15851 - DNA, 355 bp, Homo sapiens
  source 1..355: mol_type = other DNA
tgggaggcctgaggcaggcggatcacctgaggtcggcggatcacctgaggtcaagcccagctagttgcagaaatggcaattagttcagaggacttaatgagtaccttttgtgtgtccagccgtcataggcagaaaagacacattctagacatccagggtatatgcatacgtaagcactttgtagcaatttaagatagtaaataccaaacggattcaaaagaattcttcatctcagattcctctaaaaccaagtcttcaagaaggaacttgagtggccagctccactttgcgacacggagactgtttgtgtgacacccgtcccccttccgccgcgtgggtgccatggcaacggaga

SEQ ID NO: 15852 - DNA, 230 bp, Homo sapiens
  source 1..230: mol_type = other DNA
agatctctgaaatattctcttaaatgggaggcctgaggcaggcggatcacctgaggtcggcggatcacctgaggtcaagcccagctagttgcagaaatggcaattagttcagaggacttaatgagtaccttttgtgtgtccagccgtcataggcagaaaagacacattctagacatccagggtatatgcatacgtaagcactttgtagcaatttaagatagtaaatacca

SEQ ID NO: 15853 - DNA, 577 bp, Homo sapiens
  source 1..577: mol_type = other DNA
agagccggaccctcagggccctgaaccgtcgcgtcccttgagggaggaagtcctggttcaggggtgcctgggcctccccaggagctgtggactcagttcgcctagcagcactggcttgttctagcgtgtattaaaacttgacacacacccacacacaaaaacaaaaacaccactgtcgggctcatgtgcatttttttgccaggccaccagagggcatctagagagaggccctgaaggctgggcggacgcgggccaatgcgtctgcccgttcgggccggagggacgaggagtgcagcctaatccttattcatattagctggagtgggggtccccgcccccagcctcccgcagcctgcgcggcgtgggggcgactccacctgggggttgccgcgcgcgaggaggtttgggccggtccgcgcgccgtcgccccgccccggctgcggattggcccggcgcggcgttgattcttgcggccgcggttgtcgtcgccgcccccgtcccgccggctacccctcggctggcccaggcaccgctgaggccggcctggtgagcccgccctccccgccgtggattggcc

SEQ ID NO: 15854 - DNA, 451 bp, Homo sapiens
  source 1..451: mol_type = other DNA
cagtccttgacccagttgcaggaacagggcctgggccagggccactggcagtgaccaatcccctttcccccaggggaggagtctcctggagagccggaccctcagggccctgaaccgtcgcgtcccttgagggaggaagtcctggttcaggggtgcctgggcctccccaggagctgtggactcagttcgcctagcagcactggcttgttctagcgtgtattaaaacttgacacacacccacacacaaaaacaaaaacaccactgtcgggctcatgtgcatttttttgccaggccaccagagggcatctagagagaggccctgaaggctgggcggacgcgggccaatgcgtctgcccgttcgggccggagggacgaggagtgcagcctaatccttattcatattagctggagtgggggtccccgcccccagcctcccgcagcctgcgcggcg

SEQ ID NO: 15855 - DNA, 475 bp, Homo sapiens
  source 1..475: mol_type = other DNA
ctcctaagtagctgggagccaagctggtctggaactcctgacctcaggtgatcctgccctggacgccaggcctttggagggcaggcccgggttgttccccacggagccttgcgggctgcttggtttgagtttcacaccagccctggcatggcagccatcttagagggagctggggcctccttaggaggaggccaacacagaagccaggcctcttggttcccttcgtgccctcctcagtacagggagctactgggatgtggccaggcaccctctgacttggagggttgtcttgtcactcaagggaaggcaacagaggccctagcctgggcaggagtcctctcatcggcagttgggggagtggggccttctgcccaccgcccacccccgcctgccatttaatccctggctggatcgtgtgacctgcctggctattgggggtgccgggcaccgccctggacgctctaggcccccaccc

SEQ ID NO: 15856 - DNA, 442 bp, Homo sapiens
  source 1..442: mol_type = other DNA
cctggtcttcaaggctcagggcaccgccgctgggtcaccgggcccaggagagagtggccgctctgcaaaatctcacccccgggggaaagcgggccttagaaggcgccccagattagcagggcagctgtggaacggtagggcacggttggagtcccagcccctgtacagtgggaatcctaatgcccgtgccggcccggtcggctctgcaacggtccgggagaggcaaagccgaaatctggctccctgcggcaccggggcgcaaccctggggagcccgcccaggcactccgcacacggccacaagagccgctggtcgccgcgatgcctgcagccccgctgccccgccgcgtggggttgaggcagcggcggccaggagaggggcggggccgggggccgggggccgggcttcccgggggagggcccggcgcgctccgggaggccgc

SEQ ID NO: 15857 - DNA, 328 bp, Homo sapiens
  source 1..328: mol_type = other DNA
cttagggagactctgtctcttgagtgttgcggcgcgcacctgtagtcccagctactcgggaggctgaggtgggaggatcgatgtccaggaagtccagcctgcattgagatcctgccactgcactccagcctgggtgacagagagaggccctgtctctgcaagccttgaggtcaaggctgcagtgagctgtgattacatcactgcactccatcattctcccttcacagagaagcagcttggattcgatggggatccgactgcaaagctgaccgctggtagagcccagcttctaacttaggaacgggagacagagccttggctggcaccg

SEQ ID NO: 15858 - DNA, 378 bp, Homo sapiens
  source 1..378: mol_type = other DNA
ctgcaagccttgaggtcaaggctgcagtgagctgtgattacatcactgcactccatcattctcccttcacagagaagcagcttggattcgatggggatccgactgcaaagctgaccgctggtagagcccagcttctaacttaggaacgggagacagagccttggctggcaccgggcctcctccccggacccgcagaggcctggcagcgccgcgtttgtaaagaccaccatctttgctccagggaggtcagctgacccgggctggcactggccctggcgcagttcccgcccctcccgggagcgctggcaccgccccttggcaccaccccctccccgcgcccccgccttccaggaaggggcggggtctccgagacgggtg

SEQ ID NO: 15859 - DNA, 294 bp, Homo sapiens
  source 1..294: mol_type = other DNA
tttgcttccagtaggcagatctgaatcaaagtgctttgggtttgtaaagtctgaacatcctcgcatgacatgacgtcttgactctaaagggttgtttacatactgtgtcctgcaccccaagcaaaacatctcctggagaacaggaggggcgtggagagaagcgacctctactttcccatccctcgccacccgatctagctatggggtcaagcctggaggggaggcggcgaacgcacttccggcgtgtgtccttacgggtgcgtccgggcggctgcttgcaggtgccacccagcg

SEQ ID NO: 15860 - DNA, 350 bp, Homo sapiens
  source 1..350: mol_type = other DNA
gacgtcgctcattctgcagctcatcctgaggaaaggctggctatccccttgatagggacccagagcctaccttttgccccatgttagggaaggaagtctcattcccttaggagtcagtcacttctctaacttagctaagcaatgctactttagggatgagtcttaaccacgaagcgcagactccgggcccgggtgggcggcatcaccaccaggttcacgccgagaaggagctggaggagagccgcccggctccagccggaccgcttcaagctggaacccgctgggtggcacctgcaagcagccgcccggacgcacccgtaaggacacacgccggaagtgcgttcgccgcc

SEQ ID NO: 15861 - DNA, 325 bp, Homo sapiens
  source 1..325: mol_type = other DNA
agacgagaataatatttctttttttttttctcgctctgtcactcaggcaggagtgcagtggcgcccgagtagctggaactacaggcgcctgcggggtttcaccgtgtatattatatttttcttgttattcattcaacaaataggaacacagtacctactctgttgccacatctatgccagccctgtttcaggggtggagaaataaaatatgatgtctactttcccccgcagggcacccactttcagaaactccctggaagggcttggctgaggcctggggctagtggggagagcttcttggcctcttcccagaggcaagggagga

SEQ ID NO: 15862 - DNA, 276 bp, Homo sapiens
  source 1..276: mol_type = other DNA
atattatatttttcttgttattcattcaacaaataggaacacagtacctactctgttgccacatctatgccagccctgtttcaggggtggagaaataaaatatgatgtctactttcccccgcagggcacccactttcagaaactccctggaagggcttggctgaggcctggggctagtggggagagcttcttggcctcttcccagaggcaagggaggacttttgcaagagctgctaggaaggaggggtggcctgacccctcggcagtccctcccct

SEQ ID NO: 15863 - DNA, 406 bp, Homo sapiens
  source 1..406: mol_type = other DNA
cttccctggggacaggcaaaagctgtgtttgtctctctcctttgctaatgaaactggtgagcctccggaccctgagcagcgtccactcagagcaagtgtttgcactgcgtctgcaggacaaaaagctcccaccgctgctctctgagatctgggatgggcctgggggccactttgcacagggttctccagagccctggggccccaagaaaaattccactctgtggtatggccataaatgcctcagcgccgcctcactgatctttaggatccgcctccaggcccagaggagggagacttggccgtgagagggggcctcttcttactaacccccactgcgccatatgggtaaatggaatgctgaggcttaggcgcccccttcccctgctgggatccgggtaggatccgg

SEQ ID NO: 15864 - DNA, 426 bp, Homo sapiens
  source 1..426: mol_type = other DNA
gggcctgggggccactttgcacagggttctccagagccctggggccccaagaaaaattccactctgtggtatggccataaatgcctcagcgccgcctcactgatctttaggatccgcctccaggcccagaggagggagacttggccgtgagagggggcctcttcttactaacccccactgcgccatatgggtaaatggaatgctgaggcttaggcgcccccttcccctgctgggatccgggtaggatccgggcggtgcacctcacgtgcaggtttttcctttggcatctgaaaaaggcacaggtccccaggccctttgggcctgaggcggggctgtcctcgcggactgactggactccatctcccagcgggcgccgcggcgcggccacgcccccccactccccgcgcgcgcccggtggaggtaacc

SEQ ID NO: 15865 - DNA, 695 bp, Homo sapiens
  source 1..695: mol_type = other DNA
atctttaggatccgcctccaggcccagaggagggagacttggccgtgagagggggcctcttcttactaacccccactgcgccatatgggtaaatggaatgctgaggcttaggcgcccccttcccctgctgggatccgggtaggatccgggcggtgcacctcacgtgcaggtttttcctttggcatctgaaaaaggcacaggtccccaggccctttgggcctgaggcggggctgtcctcgcggactgactggactccatctcccagcgggcgccgcggcgcggccacgcccccccactccccgcgcgcgcccggtggaggtaaccgcggccgcgcgcccccctctgcccccgctgcccagggctccaccgctcggcagccggcttccctgctcggacgccgagcaccgccaaagcgcgtgagttcatgtcgtcgaaacgggcgctatgaccccgtcgggtgagagtctctctgagcaacccaaacagaaggtactgctgtgggtcccccaggcacgcgacggcgctgggtcggcctggcgcgccctcccgcgcccacgggcgctaggctaggtctgtgcgcagccgctgtctcccgaggtcggccccgccccgcggcgctcggctcggtgcagccccggccccccgggctgaatggtacggccccggccccggcctccccctccgcaccccgcgcg

SEQ ID NO: 15866 - DNA, 401 bp, Homo sapiens
  source 1..401: mol_type = other DNA
gtagctgggatacaggcacgtgggattacaggtgtgagccacggcccagcctgaaattccttattttatcttaaaaaaatcatacaagtttgcatccttctctttaatgtgtggggatttccctcccctgagtggatgttccgagaagatacacccgggttatgtcctgaggctgcctccaggcccttcaagccccaggccctgggccacctggtctgggcctgccagctgtcatggcctggggctggcccctcccgctaggagttctcaggacacctcacccctccctttgtccactgaggggccttggttctgctgggcagcctgaccacaggcctgaagggaaggccgcggggcacccgggggctgctgcctggcaggtccccatgcccaggcaaggg

SEQ ID NO: 15867 - DNA, 211 bp, Homo sapiens
  source 1..211: mol_type = other DNA
accctacacctgagcccagcctcagcctagggatagcctaggcagtgggggtgcagggtggaggccccaagaggccaccccttccagctctgaccccaatgaggtgactgttggctaagcttcctctgggcagggggcctggaccccatggcttcccaggccagccctttgtgatgtcaccccaaggggactatctcccagcggcaggccc

SEQ ID NO: 15868 - DNA, 655 bp, Homo sapiens
  source 1..655: mol_type = other DNA
gacggacacccaggtttgaatcctggctctgccatctgtgccactgtgtgaccctgggccagtaaattgcggttataagaactgctatccagtctccaggtgagggaagcacagagccctcgcctcccaggtttggagcatgcattggaccccaaagggttacaagccctggaggatgagtagttcccggggccaggcccctccctgcggcaggcacttcccctttcccttgctcatggaggagccaggccgggctgactcagagcaggagcgcacagtagtcctcccagcccgacctgggcggcgtggtctggcggccgggcgcgcccccgtgcggccacgggcagactgcggccctggacgggaagcggcggccagatccgcaagccccgcagcctggtcgatcgcggtccccgcagagccgccgcttccgtccctgcccagcctggctgagcgcggtgcgtgtggctctaccctcccctccggcccgcaggggtcccccaccgccgcgaggcggaagcgccctcccgccgccactccccccgaccccgcggcacgcggcgcctcgggttccggacaggccccttgtgacgtggccgcgcgccgggggcggccccgggccgggggccgggcggccgggcggccgggcggggca

SEQ ID NO: 15869 - DNA, 214 bp, Homo sapiens
  source 1..214: mol_type = other DNA
cggctcactgcatcctggctcagcccggagtagctgggactacgggcgcagacggggtccccggcccgataaaaatgcgtcacggtctgagtttgaacgaacgcgcgtgtcggccaatagcggccccacctctcgcgcccggcaaaaataggacgcgggcgggagagaggcagattcgctgctccgcagcacggccggagctggtcggaatctg

SEQ ID NO: 15870 - DNA, 299 bp, Homo sapiens
  source 1..299: mol_type = other DNA
gttccctttaaaggggctccagggctcacctcaaaggacggacgctctgctcactgagattactaaccatggtcagagaaaacaaacaattggagacataatttttttcgctcctggagtgcagtggcgcgatcacggctcactgcatcctggctcagcccggagtagctgggactacgggcgcagacggggtccccggcccgataaaaatgcgtcacggtctgagtttgaacgaacgcgcgtgtcggccaatagcggccccacctctcgcgcccggcaaaaataggacgcgggcggga

SEQ ID NO: 15871 - DNA, 357 bp, Homo sapiens
  source 1..357: mol_type = other DNA
gaaaggataaacttttgccctggggcagtggcctgctagcgggggcccccttggctagggtccgttcgaaggaagccaggctagagctcaggcctctcaccagctggaggtctatgagtgacccacggtgcagggctgggcgctcacctggcttccccggacctgcaggtccagcctcaaggcctgcccacttgctggagctggccccttggcaaggctgctgggagggcccgtgctgccagggcggtcaggggacgccagggaagccacgtcccagctcgcgggtgggtgcagcagaggcccacgtgaccttgctgcctcagaggccatgtggccccaactggcagcgacagctgc

SEQ ID NO: 15872 - DNA, 546 bp, Homo sapiens
  source 1..546: mol_type = other DNA
tgggcttgatcgaagtgagtggatcacttgacccgcgcactaagtacttcagtaagccaatcagccatgcatttcttattgttggaaattttcacatacttcacattgaagtgaatctaaatgaattgttctaagtaaaataatttttggaacacaaatatttggcttctggttatcctcagacatagattttaaaaattatattagagtttattttaacttgtatcaaccataaaataaaaaagagatgagaccttcattctgaaatagtgaaagttaacattgttcactcgaatggagaataacctttttttgcatgttaaattttaggatttaaatgataaattgagcctcagaatctgacctagtaaaggttttcaaatgtcagtgactgaaattatttggaagttccttgactgaaatagaatatctcaaactaatggcccccttttccctgctcctccctctctgagcacggagcagaatctgttctgctgtttagcttgctatatttgtacagcaacagcaggggccgtgtggccaccc

SEQ ID NO: 15873 - DNA, 512 bp, Homo sapiens
  source 1..512: mol_type = other DNA
aatagctgattatccttcaggttctaaaggtaataaaactgaaataggagaattacaagtacaatgacagaaaatctaaaatgatggtaacattgtttatgttcatcgcatggtctggagacctaactcgagcattatgattatacatgagtcagctacattcaaaggccagcattctagtccttagtttaatccttgaaaatcaagtgcttcttcacctgtcattgtatacattgaagtgttcaagtgtttgttttgttaactatgcttaaaagttattaaaacttgatcttgttttgggagagcatggtaattctcatgctagataagaaatgtacactgtcagttccctggtaacagctgggatgtcccaatcagaagtagtgaaagaagtagattttttttcccttacgttctcagaactagttaagatcattaaagaaaagaaaatttcctctggaaagcaacattattacataatagaagtttcattttatctcacacaatcttga

SEQ ID NO: 15874 - DNA, 463 bp, Homo sapiens
  source 1..463: mol_type = other DNA
ccatgttgcccaggctggtcaggaactcctgggccttgagacacctggctccggtgcttctctagccgtcccaggctcagggcggtgggcgagggggagcgggcccccgagcctgcccctcggcccggtccctcgaagagttgcacaggaacctcgtcctcgttcatggtgatcagtggagaccccagcggcccgacagggacggagcggcggggacggggcaggggcccgggctccccggcccggctcacctggcgcgtcaagctccgcaacggcagcgcgcccagcagcacggtggggtcgatgcggtggtaccagtcccggtgcgcccgacccggcaccttcccgcggaacagggtacccgcgccaggccggcctccagcagcgcggtggccgccatcccggcccggcgcagcggcgacccgtcggcccccgcgctcgcggtccggacccgcgagaagag

SEQ ID NO: 15875 - DNA, 509 bp, Homo sapiens
  source 1..509: mol_type = other DNA
tttgtgggtataaaaattatattctctgggaagccagatgagtagaaacgagttatttgcaaaaaacaacaacaacaacaacaaattgtactgcttgcgttcagcccagggattccagagtaactcaggaggaagtctttagagacctaacctgagttaagaaaaaaaaatatatatatatatttttttttcggtaaaaggggcgtgccatgtgcccaacgctggccaagcaagtagggcctccttgcccaccagggtcatctagagctcctgtgggggctcttcccggagcccctgcagctccctaggttgagggctccgcccgcggccccaggggcttaggtgcggctgctcctccacttcccagcccgagggggcgctgcagcgcccggcgctcggcccgcccctacgccgcgctccgctcgcatcggcgctgcgggcggcgccgcggtgatacgttccccctcgccgcgctcccctctgccctccccgccggtggtaggtgccgg

SEQ ID NO: 15876 - DNA, 582 bp, Homo sapiens
  source 1..582: mol_type = other DNA
cccagctactgagtgagactctaaatagctggcattacaaccattcttcttaccttgagctcttcataatatttttcttaaggatatattaatataatgtatattttcctattttttcctgctgacaggggaggggaggagaaggcgacctcaacccaggacccctgttcaccctgggatcaggccctgcggggtcacacccgcacctgggtcactgcccccttcctctggtcgagggttggggggagtgtcccctcctccctcggccggagtcacagttgggtcacaacccccctccctcggaggagggaggtcaccggccacaggcgggggcctcagtttcccacgctacagggctcacacgtgtctggcctgcgacgcgctctcccttcgccggggtcccagtttcccgcccaggaaacctcggtccctcctccgaggccgccgggccctcctccagagtcccgccagtcccccagagtccaggccagtccccgccgtcacccggtgcgagcccgcgagaggcctagtgcagctggcagccccgccccggcacccgcctgctcttctcgcgggtccgga

SEQ ID NO: 15877 - DNA, 744 bp, Homo sapiens
  source 1..744: mol_type = other DNA
tgagctcttcataatatttttcttaaggatatattaatataatgtatattttcctattttttcctgctgacaggggaggggaggagaaggcgacctcaacccaggacccctgttcaccctgggatcaggccctgcggggtcacacccgcacctgggtcactgcccccttcctctggtcgagggttggggggagtgtcccctcctccctcggccggagtcacagttgggtcacaacccccctccctcggaggagggaggtcaccggccacaggcgggggcctcagtttcccacgctacagggctcacacgtgtctggcctgcgacgcgctctcccttcgccggggtcccagtttcccgcccaggaaacctcggtccctcctccgaggccgccgggccctcctccagagtcccgccagtcccccagagtccaggccagtccccgccgtcacccggtgcgagcccgcgagaggcctagtgcagctggcagccccgccccggcacccgcctgctcttctcgcgggtccggaccgcgagcgcgggggccgacgggtcgccgctgcgccgggccgggatggcggccaccgcgctgctggaggccggcctggcgcgggtaccctgttccgcgggaaggtgccgggtcgggcgcaccgggactggtaccaccgcatcgaccccaccgtgctgctgggcgcgctgccgttgcggagcttgacgcgccaggtgagccgggccggggagcccggg

SEQ ID NO: 15878 - DNA, 329 bp, Homo sapiens
  source 1..329: mol_type = other DNA
ggatgataaagttccaactctgggtgttttcctgagaaaacacggaataattcctttccataatgttaacaaaagacttgggatttaaggacccctggccccggcctagtggccaggtcctctccatgtccatccgcccccaggccggggcactgggaggcccatcaccctgtggaaacggtcgccagggaaacccccgcccgccctcgtcaaaagcttggctcagagagcgggggaggggtgtgtagcgtagaacccaaaacgcccgccccctcggagcccggaacctccgcttccggctccacgtccgcccggaagaagatctgctg

SEQ ID NO: 15879 - DNA, 396 bp, Homo sapiens
  source 1..396: mol_type = other DNA
agtccgtgtatcttgactgtaacataatatgtacatactcattaggtgtttctgcctctggcagcaggcaggcctactttgtcaaagtaagatgctatctaccccataaggctgttgtgaggaattaacgctaggtactattattacagggcgctgacagtttaatcagactgcatgcaggggcctgcccgcacatactcacggcgcgtgtcggccccggcgctctcccgggatgagccctgaggagctctctgcactgggcacgccgctgcgcctgaccccggtctcagctggctgcccgtgctcacccctggtcagcgccgaggccgcctggctaccgccgccgccgccatgttactcagatgcagactaggcagcagcagatcttcttccggg

SEQ ID NO: 15880 - DNA, 354 bp, Homo sapiens
  source 1..354: mol_type = other DNA
cgtggttcactgcagtctagactgcctgggctcaggtgatcctcccacctcagcctcctgagtagctaggaccacaggtgtgtaccactggtctagcctgcggcagagtggctctgcctgtctgtggggccgcccagccagcccaccatgcagttggaagcttgcagctggctgggctgggccagactgggtgtcggggctgctgagctctttcctaccctttgggagggccaagctacagctatttgctaccaaacacctcaggaacaggctgagggcctgacaagcagggagccaggctcctgggaggtgaccgaggccacagccagcccctccctgttcagcactgaagac

SEQ ID NO: 15881 - DNA, 375 bp, Homo sapiens
  source 1..375: mol_type = other DNA
ggctctgcagcctcttggctgctgaaagtagagctcttcaaaagtcatccactcagtcagcatctactgagtgccaggcagtgtcgtaaagggagtctgagcccccatcccacgggctcgaagcccagagtagaggccatgggaacccagcccgggtgccctgctggactcttgctagcctggccccagcgaggcagggcatcagtccggggaacgcaggctgcccctctgatgcctgcgaggtgaggaggaaaaactaggttattttcagctcttggctctggactgtagagcgctctgggccaccccgcgttagctgctgcggtccagtgctcggcgcagactccgtgcggagcccctaggccccgcagctcg

SEQ ID NO: 15882 - DNA, 328 bp, Homo sapiens
  source 1..328: mol_type = other DNA
gggttctgcaggggtccaggcctctcagggaccacagagcctatggctctggagtcagcctcttggctgctgaaagtagagctcttcaaaagtcatccactcagtcagcatctactgagtgccaggcagtgtcgtaaagggagtctgagcccccatcccacgggctcgaagcccagagtagaggccatgggaacccagcccgggtgccctgctggactcttgctagcctggccccagcgaggcagggcatcagtccggggaacgcaggctgcccctctgatgcctgcgaggtgaggaggaaaaactaggttattttcagctcttggct

SEQ ID NO: 15883 - DNA, 437 bp, Homo sapiens
  source 1..437: mol_type = other DNA
ggctgtcacggttcctgaactcatggagcttttcggtggccaggcgcgatggctcctcactcctgtaatcccagcactttgggagccaaggcgggtgaagctgaggcagcattgcttgaaccgtcgggccactgcactccagcctgaggacagagaaggtttttttgaaaagataacattaatcaaacgaataaatgaatgaaaagccactcgctagcggattcattattaagcataatgaagaatccttttcaatttctttttccggacacttgcggcctggaagcgcatgttcctggtgaagggcgagcccccggcagaacgcaagcgccccctcgcgagcgcctgccgtttctcggggcgggacgggggggcggcggagaggcgcgtgctgctgcgtgcgtgcgcgcgcgccgcgggcgggccagtgaaaccgg

SEQ ID NO: 15884 - DNA, 461 bp, Homo sapiens
  source 1..461: mol_type = other DNA
taatattatctataatatctagattggttaatagccatattagataatattttacctacttaattcctggcaatgatgtaatatggttaacatttcagaaaaaaaggtgctttatagcttttttccccccactgataaaagtaacagatacggttatattcatatatagttaaccaaagacacgtgtttgaattttattgtagtacccgagtagctgggatcccaaagttctgggattacaggcgagcctaaatttctatgcatataattgatttttttaaacctaatcaaaatgtgtgatttgaatttgttcagtgtagaaggtaatttttcctttctaaagccaacagcaaaccagcttggaagtatgttgaaggctactggcatcgtactcatcaatgcgcccgctccctccttgggggcgaggcctagctccccggaagcgcccgaccgccccgccc

SEQ ID NO: 15885 - DNA, 345 bp, Homo sapiens
  source 1..345: mol_type = other DNA
aaactggtaagcccaacaatttatctcgtgatttttcccagctaataagcgagaaaatatgagacatctatttgtgtgctgcagaaaccatttaatgttgagacagtctcactctgtcacccagggtggggtgcagtggcgcgatattcgcctgcctcagtctcccgactatcttggacaagctggtcttgaactccgccctttctcctggtgaggaggagccagaagagccgaagggtccgaggcgcttgcgcaagcgcgtgctccgctggttgaaagcggatcccggtgtcacgtgattacgcgtcgcagcgcccagggcccagcgcccagcctccagtgccc

SEQ ID NO: 15886 - DNA, 170 bp, Homo sapiens
  source 1..170: mol_type = other DNA
ggcctcccaaaatgctgggagccatgtaatagaagtgctttaacttctcgattttgaacatctttctaaacacccactatgggcccttactgccaaaggccttaggacgccgaaaggccgggactccccggacctcgcccctcctggtctgcggccgcagcaccgccctc

SEQ ID NO: 15887 - DNA, 506 bp, Homo sapiens
  source 1..506: mol_type = other DNA
tctgtgcatgggcacaggagtaatatctgcttcattgacctctttaacaacgtgatgaaagcttccgctgccacagctggggttctaatccctggactgggctctctgcctccctggccggcgctcgggggctgggggacagaacacaatgtacagcgtgccttctaagcccacccagggccaggtcaaacgcgccttcgccgggttgcctgcccacccgaacccggcgccgtggacctggtgtgaggctggggagcccgtcctgaggggtgccggctcgaggcgctagagccacggagcctggtcccgggctccaagtcccaggaatgtgggtgggcggaggggcgggcgaggcgggagcgcttcctctgcccgcgggaggggatccgcggccggctcggagggggcgggggcagcggcgggcggcggcgaggggctgcggagctccgcagccgccgggccggccggggcgggaggaagcgaggggaagggagggggccgagcgc

SEQ ID NO: 15888 - DNA, 594 bp, Homo sapiens
  source 1..594: mol_type = other DNA
tcattgacctctttaacaacgtgatgaaagcttccgctgccacagctggggttctaatccctggactgggctctctgcctccctggccggcgctcgggggctgggggacagaacacaatgtacagcgtgccttctaagcccacccagggccaggtcaaacgcgccttcgccgggttgcctgcccacccgaacccggcgccgtggacctggtgtgaggctggggagcccgtcctgaggggtgccggctcgaggcgctagagccacggagcctggtcccgggctccaagtcccaggaatgtgggtgggcggaggggcgggcgaggcgggagcgcttcctctgcccgcgggaggggatccgcggccggctcggagggggcgggggcagcggcgggcggcggcgaggggctgcggagctccgcagccgccgggccggccggggcgggaggaagcgaggggaagggagggggccgagcgctcgccgcggctccctgcagcagccccagccgcatgacgcgcggaggaggcagcgggagcagccgcgggagccgggaccgggtagccgcgcgctgggggtgggcgccgctcgctccgccc

SEQ ID NO: 15889 - DNA, 530 bp, Homo sapiens
  source 1..530: mol_type = other DNA
tgaattctcttttttaaaaaataattttcatataacaacaaaaagatttggtatagaaagaaaaatatagtccatctctatcatttggattctgtatttgtgaatttgcctatatcctaaaagttatgtgtaatccccaaaagtcattgtaggacatcatgcactatatggagaaaaacattaaaataataattcatctttcacccatgaaactggtgaagttttgtaaattaatcagtgatttctcttagagtggtagaaaacagaaaacaaaaaggaaagttttatcttccattggacttctctggaaatatcctataaatgtactaaagcaaggctgcatatgctactgcactccagaaggagaccctttctctagaataaataaataactcaataaacagtataaaatgcatcttagttaatttctagcctatgtatgctctgataggatttatgttacatatgattcattcaaatgcaagtgtgatgataatttaatcatttctgaactccacagattcttataa

SEQ ID NO: 15890 - DNA, 414 bp, Homo sapiens
  source 1..414: mol_type = other DNA
cagcctcctgagtagctgggactaccacgcccggctttaaaaaatggttttgtaatgtaagtggaggataataccctacatgtttattaataacaataatattctttaggaaaaagtggaaaaaaagcgcagctttttctgctctgcttttattcagtagagtattgtagagattgtatagaatttcagtggagagaggagagtctctttcttcctttcatttttatatttaagcaagagctggacattttccaagaaagtttttttttttaaggcgcctctcaaaaggggccggatttccttctcctggaggcagatgtggaccccaggtctggagcgaattccagcctgcagggctgagcagcagcacaggcgcgggtcccgggaggccggctctgctcgcgccgagatctc

SEQ ID NO: 15891 - DNA, 422 bp, Homo sapiens
  source 1..422: mol_type = other DNA
tggttaatccaaccaagattgattttatatctattacgtaagatggatatgaaaataaagtctcagcctcctgagtagctgggactaccacgcccggctttaaaaaatggttttgtaatgtaagtggaggataataccctacatgtttattaataacaataatattctttaggaaaaagtggaaaaaaagcgcagctttttctgctctgcttttattcagtagagtattgtagagattgtatagaatttcagtggagagaggagagtctctttcttcctttcatttttatatttaagcaagagctggacattttccaagaaagtttttttttttaaggcgcctctcaaaaggggccggatttccttctcctggaggcagatgtggaccccaggtctggagcgaattccagcctgcagggctg

SEQ ID NO: 15892 - DNA, 479 bp, Homo sapiens
  source 1..479: mol_type = other DNA
ttataagaacacagtttattttataaagccccttgaaatacgattattattattaagaatttatagcggggatataattttgtatgatgattcttctggttaatccaaccaagattgattttatatctattacgtaagatggatatgaaaataaagtctcagcctcctgagtagctgggactaccacgcccggctttaaaaaatggttttgtaatgtaagtggaggataataccctacatgtttattaataacaataatattctttaggaaaaagtggaaaaaaagcgcagctttttctgctctgcttttattcagtagagtattgtagagattgtatagaatttcagtggagagaggagagtctctttcttcctttcatttttatatttaagcaagagctggacattttccaagaaagtttttttttttaaggcgcctctcaaaaggggccggatttccttctcctggaggcagatgt

SEQ ID NO: 15893 - DNA, 657 bp, Homo sapiens
  source 1..657: mol_type = other DNA
gaaatctcttttcttttttaaattgtcacatgacaacaaaaatatttgttatagaaagaaaaatataatccatccctatcgtttggattctgtatttgtgaattagcaaaacttgtttataatccccaaattaattactatattgcatttctagtcatggcagaacatcatgcaccatgtggagaacgtatttcacttggcaaagttttgtaaattcaataagagacctcaaattagtagagttatttggttagtcagtgatttctcttagagtggtagaaaacaaaaaaaaaagttttaccttcctgttggacttctcttccataaatgtactaaagcagcatttaaggcccaagcactttggaagtctgactctatgaaaagtttttaaaaaaattagccaggtgggcccttgagccttggaattcaaggctgcagtgagctatgattataccacttttctctagaataaataaacccttaagaagctcaataaacagtataaaatgcatcttatttaatttgcagtgtatgtcaaatctgataggatttatgttacatatgattcatttcagtcatggttaaggagtgatgataatttaatcagccgtgcctccacccacttaaagaggtgggtgtggtcttcacatcttataa

SEQ ID NO: 15894 - DNA, 388 bp, Homo sapiens
  source 1..388: mol_type = other DNA
agagccggctctaaaaatacaaccttcagttgttatttgaaagagaaatagggacaagcatgtttcattctagaacttagattaaaacccgagtttcagctaaaaagcctaaagactctctttgacagaggaaatagtttgtccgcttcagaaacatgaattctggaatcttgcaagtcttccagagggcacaccatagactgtgggcacagcttttgccggccctgtttgtacctcaactggcaagacacggcagttcttgctcagtgctcttgtttgaagaacatggctttcattgccagaaaagccagcttagctctgaggagcaaatatgtgggatgcactctgtaccggactacactgtcccattgagtgggcttgaagatct

SEQ ID NO: 15895 - DNA, 312 bp, Homo sapiens
  source 1..312: mol_type = other DNA
tactgtattatgttcgtgtttggagaagaagaaaagcaaacaatcaactgtagcataattcactttattaccttgggcaaaacattgaccttgttgggcctttgtttccttccgcaaactgcaaactgcagtctacactagtgtaggggtatttctctagaaccctcctgtgacacctggtctgggggccgagggggccagacctgcctgccaggaggacctgccagatgccctgcccatggctccagctcaagctggattgcaatctgcataatgtgtcccatttagattggacaatttggtccacttgtc

SEQ ID NO: 15896 - DNA, 304 bp, Homo sapiens
  source 1..304: mol_type = other DNA
tggctactagtactgtattatgttcgtgtttggagaagaagaaaagcaaacaatcaactgtagcataattcactttattaccttgggcaaaacattgaccttgttgggcctttgtttccttccgcaaactgcaaactgcagtctacactagtgtaggggtatttctctagaaccctcctgtgacacctggtctgggggccgagggggccagacctgcctgccaggaggacctgccagatgccctgcccatggctccagctcaagctggattgcaatctgcataatgtgtcccatttagattgga

SEQ ID NO: 15897 - DNA, 415 bp, Homo sapiens
  source 1..415: mol_type = other DNA
tggtgacactgaatggaatcacagtaataataggcaacatttgttgaacacttattatgtgctaggcattgtgctaagcctatttcatgtactatcaataatcccatttttcagttggagaaactgaggctaagctcatgtgacaggcttctaccaccaggctgtgtgtggctgctccaccctgactgtcgtggaaggtggagccccagggaattttcccccgttctcccagcccaggcctgggccggctcctccttcctcttggctaggccctggaaatccagtgggaggccattgctatggcaacaggactaggccctggctttacctcatcaaattccaagctgaagcagaaattaaagaaaaaaatatattccagatgtttactttttattccttatcactcccagctgcg

SEQ ID NO: 15898 - DNA, 378 bp, Homo sapiens
  source 1..378: mol_type = other DNA
gctctggtcagactgggcagggccttcctggccagccgggaagcaagtctcgaggtacatcctgttctgttgcagctcttggctgcatccttacctatgagtcaagggtcttccaaatcaggattgactgtccttcccgcagccgggggagtggaggccacaggtggttgtatcaggaagccgcttcagtcagccggcggctaccttctggcggagcccgggaggggccgccaaggcagtttctctgagcgctcccggctgaattgcgtcagtttcgccccggtctgagactggggcgggcccctcatcccgggttccaaccggctcatgcatattcatgaagcgccctgggggcgtggacctgggcggagttggggc

SEQ ID NO: 15899 - DNA, 299 bp, Homo sapiens
  source 1..299: mol_type = other DNA
aaaatgatttaataaagggaactgactttggaaaccatgtcctcatgctgctctggtcagactgggcagggccttcctggccagccgggaagcaagtctcgaggtacatcctgttctgttgcagctcttggctgcatccttacctatgagtcaagggtcttccaaatcaggattgactgtccttcccgcagccgggggagtggaggccacaggtggttgtatcaggaagccgcttcagtcagccggcggctaccttctggcggagcccgggaggggccgccaaggcagtttctctgagc

SEQ ID NO: 15900 - DNA, 248 bp, Homo sapiens
  source 1..248: mol_type = other DNA
caaatgactttaataaataaagtgacagcgctgttcatgtcctttgcagggacatggatgaagctggactccatcattcacacacaccagggcctgtcgcgggagatatacctaatgtaaatgacgggtatatttggcacacgtatacatatgtaacaaacctgcacgttgtgcagcgaagctcattaccagctggagttttggagaccccacccctgctgtgacatcacaggggagtggaaaaaggg

SEQ ID NO: 15901 - DNA, 390 bp, Homo sapiens
  source 1..390: mol_type = other DNA
tgtttccttctaaatttgggatgcacccaagtcagagatggggtccctcaccactgctgaagcagcagggctgatggaccctgggagttcattcttgttggcctggggcaaatgactcagtctctctgagccttggtttatcttcaaaacaatatctacctcataggattattctaaggattaatgcctggcacttcaggtgctcctgccccaggggtcctagtgagcagcagaaatgagagcccctcttccctcccatgccccttgctcaggcagggtgagaaggcccccgaatcggtggactgctggtcaaagccgcgattttcagcgtagtctcattcacctaccccatttgacagactcagcagtgggcgcccatgacctagtcat

SEQ ID NO: 15902 - DNA, 383 bp, Homo sapiens
  source 1..383: mol_type = other DNA
caggattgaagctggtgtattgattgtcagggaaattatcaatagtcattctgaacatacagtcactgtgattatgacaggtctgggtcctacctagccttgttgccaaccctgggcaactcaccagtgaaaaactaaaacatcttttcctgatgtggtttcaaatcagttctggctccaaggtgaatctgacaccagcagtgggagagtcctttccatgacatagaaactattttgcagagatacacaatttctctttagtatctagtctcgactgaagaagtgtctgtagtttctaaagagccctacacacaggtgagagaggctccagagtcgctgacgctctatgcgactgtctcgcaggcgggcccgactcgcgtctc

SEQ ID NO: 15903 - DNA, 271 bp, Homo sapiens
  source 1..271: mol_type = other DNA
agagcaagattttgtctcttaaaaaaaaaaaagatgtcccagcattgcctgggcgacagagcaattggagtcaaaaagacttagaaattccagttcttccacttcccatggaaccttggcaagttgccccctaggatgggtgagagcttgggagcactgaagattccaccagcaggaggctactcctggagttaaggataaataataattatgccgaggcaggtccctgcagtcccagcagagagcagggcacagggttgagaagactggc

SEQ ID NO: 15904 - DNA, 449 bp, Homo sapiens
  source 1..449: mol_type = other DNA
ttttaaaatctgcatatttttaaaaatctttaataaggcagcctcaaaattagataaacaacaatctgtctcctgctttgctcacagataagcacctatgcgggggttttttttttccttgtaaaactattcacatactaaatactttcctcagtagctcttcttttcatagccatataacattctgtagaatagagaggacactcagtgtccgattgatggatatcaatattgttttcatttctacaaatagtcaaggaataacataactctgtaaaagttttattacttataggcgcatttatgcctaaaggatagtctcaaaagagtgaaactgatcaaatgtgcatttttttattttaatagggtttgttcaaaacaccactctccctctgacagaggcaaactctctctccctgggggaagttcctccaaggcctctatataag

SEQ ID NO: 15905 - DNA, 235 bp, Homo sapiens
  source 1..235: mol_type = other DNA
taggacctattttagattaagtccatcctaatgaattcatggtcccatctggatttctcgctgagaaagatcaggaaggttccaggggcagggcagaagcaggaactccgctccttctggagctctgggaggtagcccatctgcatgtcccagctgggaacacagagcctcccagcagggctgtacacaccagaggagggtcccctgcctggaagggagttttggaaacttctca

SEQ ID NO: 15906 - DNA, 416 bp, Homo sapiens
  source 1..416: mol_type = other DNA
gcacgaagactgtaggtcatcaaactgcattgtgtttgggactttcctaaacaagtagattttaactgctcttgtcacaaaacagaatggatatgttaatttgcttaactgtagtaaccatcttagtagctatatgtatcctatgacctcatattgtatatcttaaatatacagaataaaattgatttttttgtttttatttttaccatctgacaattggatccaaaacatgtatttatttatttattttaaagaaagaagaatagggttcttccaaaatcaagaggacattgaacttgccagggtgtaggacctattttagattaagtccatcctaatgaattcatggtcccatctggatttctcgctgagaaagatcaggaaggttccaggggcagggcagaagcaggaactcc

SEQ ID NO: 15907 - DNA, 305 bp, Homo sapiens
  source 1..305: mol_type = other DNA
gaggaagggcattcctttgcttatctccattttctaaatgcaaaaaatgaggctcagtgagccatctggaagaggcagagctggctgcttattagaatcactagattcacatagagatcttagaaaaggaagcctggcctccagacattcgattccaaagtgcggtggaatgtgggattcaccatgccctccagtctgagtctcatttccatagcctgtgccctgggaatggcaccacaaagaggagttcctttcagcgaaggaaggtgagccctgctggctaacccatctgccttaggcttccc

SEQ ID NO: 15908 - DNA, 298 bp, Homo sapiens
  source 1..298: mol_type = other DNA
ccaaagaagacgtcagctcacgtgctctgggcagcaattatatatgtctttgattaataaaaaatggggcaatgaatggttaatcattcacaaatagagtgtgtgtgtccaggtctgccccagccccttccgggcgggcaggagggggcggaggtgcgaacctggcccgtgcggaaagggcgcggagagccccggcgcggagcaggcgggtagggcgaagggtcccctttcgggcgccatggggcgccgagcgcggcctggcccctcgggctcctctgcggggagggcaggccgcagg

SEQ ID NO: 15909 - DNA, 259 bp, Homo sapiens
  source 1..259: mol_type = other DNA
ctctatttcttcctcttaaaaaaaagaggagtgggctggagttcctgggccctcaggggatccaggtagctggagtctgcagactgcatctaacctctccccaaaccaaagaagacgtcagctcacgtgctctgggcagcaattatatatgtctttgattaataaaaaatggggcaatgaatggttaatcattcacaaatagagtgtgtgtgtccaggtctgccccagccccttccgggcgggcaggagggggcggagg

SEQ ID NO: 15910 - DNA, 439 bp, Homo sapiens
  source 1..439: mol_type = other DNA
atgtcaagcttcacgatttcctttcccaaaagcctgtccttcctgaaagagattgtgctgaccagtcagccttaggattttctcagtgttaattaataaattgcatttcaggtttatcaatcagtctttatgagtttgtttagtgtgggtcatttcccctatacttaagatatatataggacttcttcccatttactggctgagtgacttggccaagttcctccttatggggtggctgtgggcatcaaataataatatatattacatatagctcttagcccagcactcagtaaatgactgtcattactgttgtcattattaatacccaaaagggtgctttcattgagaattctagaaaggcacacatttgatgcccctgaggcaattttgtcttaaaaggaataaggtgcggttttgcagcccacgaggagagctgccc

SEQ ID NO: 15911 - DNA, 264 bp, Homo sapiens
  source 1..264: mol_type = other DNA
tccgcccctctttaaaagggggtagagcacccccgcgggagataaggtctcccccgcttgtaaatcagcggctcacccgtgtgcacactcacgtgctgcacaagcatccttgcgcgcacgtgcacgctcatatgcactcgatcttgcacgcacaaacctgggacactggcgcgagggctcatcttctcctctctagcgcacagtcctccggggcggggtggagggggttagaaagccgctcccgcctcctgggggtggttggga

SEQ ID NO: 15912 - DNA, 441 bp, Homo sapiens
  source 1..441: mol_type = other DNA
ttggcctcccaaagttctgggattacaggcgtatcactctttttttaaaaaaattttatttttattttaagttctcatcaaccaaactcacatgtaatgagattacttctcattactccacaccatagtagtctattttacagatgaggatactgtgatctggaagcatccgatcaccaggtcttctgaaataatgacagcagcaacaattaacattatgcttactatgccaaatgctatgcttagcattttacctgcatcacaatcgcgaaggtaggttccattttaaccgaatttaaagaggactgggtaacttgccctaggtaacccagggtagtctgaatcgcggtcagtcggcttcagccgaatcgcacttgaccagcgggcgagtcacgtgcgcgtgaaactcgagcccccgcccccacctcggggcgcagctcc

SEQ ID NO: 15913 - DNA, 498 bp, Homo sapiens
  source 1..498: mol_type = other DNA
tcagcggctcacccgtgtgcacactcacgtgctgcacaagcatccttgcgcgcacgtgcacgctcatatgcactcgatcttgcacgcacaaacctgggacactggcgcgagggctcatcttctcctctctagcgcacagtcctccggggcggggtggagggggttagaaagccgctcccgcctcctgggggtggttgggaagagcttcctcgctgtccccactctccctcggctagcagcctgggcacacggacagacggactgacggactctcgagcggacagcgcagctagcggggcgcgggcgctgggcgtcgacggccagccccagccttccccgccccgtcgcgccccgccccgtcccgtcggggccgatggctcctcccgaggcccgcagcccgggcggcgcagggtagagcgccgcggcccggccacgcagcccggggactcccgggccctcccggagccccgcggggtccccgccgtgcatccggcgggc

SEQ ID NO: 15914 - DNA, 541 bp, Homo sapiens
  source 1..541: mol_type = other DNA
accagcgggcgagtcacgtgcgcgtgaaactcgagcccccgcccccacctcggggcgcagctcccagcttcgcagacctctggcgcccggcgggttcccagttcccccgcttcttccgaggagacagcggaggcgaggccaccgggctgtcaggctgaagctccgtggccgccgggtcctgcacgcagagaagaccccagcgccggcgcggctcagggctgggcccacgggactccggacgcgccgcgaaagcgttgcgctcccggaggcgtccgcagctgctggctgctcatttgccggtgaccggaggtgagcagcgtcgcgtagggtctccggctatgcgtcggctgagagacaccgaggccggctcccgccgacactgccaggcttcccaaggaaagaccgttacttgcgcccgcggtcccgcggcacagtgtcctgccagagttccagcggacctcctggagcgcgcccgcgttccctctcctcccgccgaggctgcagcggccgcggcggggggagctggggctctttcagtcag

SEQ ID NO: 15915 - DNA, 451 bp, Homo sapiens
  source 1..451: mol_type = other DNA
gagacagagtcttactctgtcacccaggctggagtgtagtggcatgatcttggctcactgcacagcctgctgggtagctgagactgcaggtgcacaccaccttggcctcccaaagttctgggattacaggcgtatcactctttttttaaaaaaattttatttttattttaagttctcatcaaccaaactcacatgtaatgagattacttctcattactccacaccatagtagtctattttacagatgaggatactgtgatctggaagcatccgatcaccaggtcttctgaaataatgacagcagcaacaattaacattatgcttactatgccaaatgctatgcttagcattttacctgcatcacaatcgcgaaggtaggttccattttaaccgaatttaaagaggactgggtaacttgccctaggtaacccagggtagtctgaatcgcggt

SEQ ID NO: 15916 - DNA, 412 bp, Homo sapiens
  source 1..412: mol_type = other DNA
ccttttccaatgggcaatgtgcccttaatttacatcttgtaaatttattttaccaggaaattgtgtgacaaatcaagggagtttccttgtttccttgcagtttgaagaacacattaagtcttgaaagttggaaagttcaccagttgttgaagaaaacatattttacacgtcttgtcaatcacctggggaattttaaattgtattgctgcctgaggaattttaaactgtactcccagagattctgatttaattgaaaaaaaacgttccaggtgattttaacgcgaaacaaaaacagaaccgcttgatttgcgcacaggagtcggcttgaattctcgggctgcccgagttcccggcggctcgttggtatttaattccggaagcgagtttgaatcaaagaagaggcgggactttc

SEQ ID NO: 15917 - DNA, 606 bp, Homo sapiens
  source 1..606: mol_type = other DNA
ggactccagctggcatgctaaaggaggctcctacagtaggcacttagtaaatactaaacgcgcctccttgcggtgctctgccccaagccacggggagaaacgttgcagcccgcgccgaacgccgggcagcacaaaggatccccgactgccggggagcggtgctcggagggcacaggtctacgccatcccccacgcagaggcggcaggctcggcggctccggcagcttgctggggcaggggctcaaggagagctcccggtgcggccgccggcggagcgaagactggaacccgtatgagcgccccccagcgcccctgagcgctcgccgccggtgcacggcgcaccccgcgggaggcagggatcagcaaagccgtgcgccccgaggcccgcccccgtctccgcacaaagaccgtgagtcccgggtccgagccttccgcgcggggatcgggcggttgtccggcgggtcgtccttcgacggcctcctggcctcgccggagcgggtgcggggaggcccacgcagcgacggctggaggggcggggctgccgggggtggggtccccggggcggggcggggcgcgctgtgtcgcgggtcggagctcggtcctgct

SEQ ID NO: 15918 - DNA, 484 bp, Homo sapiens
  source 1..484: mol_type = other DNA
gtgtctgcaactggtgctcgggtgagaaggaggggatcggccctcccaacaagtctcaagtactctgtccttgcacagagggttggggactccagctggcatgctaaaggaggctcctacagtaggcacttagtaaatactaaacgcgcctccttgcggtgctctgccccaagccacggggagaaacgttgcagcccgcgccgaacgccgggcagcacaaaggatccccgactgccggggagcggtgctcggagggcacaggtctacgccatcccccacgcagaggcggcaggctcggcggctccggcagcttgctggggcaggggctcaaggagagctcccggtgcggccgccggcggagcgaagactggaacccgtatgagcgccccccagcgcccctgagcgctcgccgccggtgcacggcgcaccccgcgggaggcagggatcagcaaagccgtgcgccccgaggcccgcccccgtctcc

SEQ ID NO: 15919 - DNA, 303 bp, Homo sapiens
  source 1..303: mol_type = other DNA
ctttcaagtttttaaatatttatttagttagttatttgttttttgacacccaggctggagtgcagtggtgcaatttcagctcactgcattagcggaaacggggtttccccatattggcccatccgttgtctgttatacaaagaactactgattatgagcaatttccaaaaagttcattcctttaaaaactgcggagcacattttgttgtgtaaagctgagaactgcacccaagcacctaccaggggatttgggctaaattcctggcctggcccaactgggcagtgtcccgggccagccaatag

SEQ ID NO: 15920 - DNA, 249 bp, Homo sapiens
  source 1..249: mol_type = other DNA
tgagcaatttccaaaaagttcattcctttaaaaactgcggagcacattttgttgtgtaaagctgagaactgcacccaagcacctaccaggggatttgggctaaattcctggcctggcccaactgggcagtgtcccgggccagccaataggaggtctagggagggggtctcctcacccccgccttcctgccccaggcctgttgtgacggaatgggggcgggccccgggcggggtgggggcccctgggctc

SEQ ID NO: 15921 - DNA, 332 bp, Homo sapiens
  source 1..332: mol_type = other DNA
cacaggaaaatgctgttaaagttcattgaattgaatgaaacaattaatcgttctgcaaaatctgagcagagaagtcatttggtttcaaaatacttggatactcaggaggccactgaactccagtcagggcgacagtgaaactctgtcaactggtgctcgggtgagaaggaggggatcggccctcccaacaagtctcaagtactctgtccttgcacagagggttggggactccagctggcatgctaaaggaggctcctacagtaggcacttagtaaatactaaacgcgcctccttgcggtgctctgccccaagccacggggagaaacgttgca

SEQ ID NO: 15922 - DNA, 482 bp, Homo sapiens
  source 1..482: mol_type = other DNA
gctcccccacctcagagccccttgtgggcgcacagcacgttggcccaggcggggcagggctggtctctgatcgggtcaggcctgccctgcagagctgccctcttcctggccagcccaagaagcgcgggcgttcaggaacgctctcccaccgccttggggcagaagtacttctggtcaccccttgtatcttccaaggtctccaaaaggggcatctgggactgccagccccaccttggggccgcatttggcgggaactggatctgccttcacctgcagccctgtgcggggcgtgacggaaagagggggctccgggagcgccctgacctcgcgggagggaggatctcgtttcaaaagggttaacccacagccaaatcagaggagagggtctccgcggcccaccggcctcgcaacctcggtcccggccggcgggtggcggggcggccgctggggatccaagcccggcccgggagaggggctggcgg

SEQ ID NO: 15923 - DNA, 275 bp, Homo sapiens
  source 1..275: mol_type = other DNA
atagtctgggtcaatcccttcttagcaagttggcttaaaagtaagaagagcccaaagtggccaggtggcaatcttaaatgcacgggtctgcactggacattgcagtcctgggatgtagagagtaatttcccagaaggcctgtctcaggaagtttagagaacttcatactgcatgcaaaatgtcacattgggtctattactccttcaggagtattaaaccaaggcttctcccagccctgctctgacgtgggaggtgagggggggtgtgttatgatg

SEQ ID NO: 15924 - DNA, 365 bp, Homo sapiens
  source 1..365: mol_type = other DNA
tgcagtccatgggcactgagagagtgagaccctgtctttaactgtcagggatttatcctaacaaaaataaatcatcggatttttattcttttattaaagaaaaaaaatttgaaatgccttgacagcttggtgaacaggcacgggacctagaccgagacagtgagtctctctttctcccgggcctcccttctgtttcctgggctgcaggggagcaggaaatctggggcgagattcccgccgcggacgcgcactgccgaagcctggtccctcgacctgtccctgcccagcgcgggggcgcaaccgccacgcctcgagcggcttagcgagtgcacccgctctcggctggcgcgcgaccgcgtgtcctt

SEQ ID NO: 15925 - DNA, 380 bp, Homo sapiens
  source 1..380: mol_type = other DNA
cacttgcaagtagctattgggatgcgggcgcccatcccacgtgtggaattcagggagttcacttcccggctcgcactccgggggcgggagggtgctgccaccgcctcaggtcgcgcgctcctttagcgcggcgtcctccatcgccctggattctgcccggaccagcgacctcgccggactgaagatttctccagcaagattgttttaaataaagtttttgccatcaaaaaaaaaaaaaaaaaatcgccaaatggttggccaatccgccgcgaagaaggtagctgcttgcttttgacagtgggaatacgagaagggaagactcgcctggccatttcctcaccttacgtgcgcgctctcgtcttctcgcgtgcgtacaggcc

SEQ ID NO: 15926 - DNA, 445 bp, Homo sapiens
  source 1..445: mol_type = other DNA
ggcgtcctccatcgccctggattctgcccggaccagcgacctcgccggactgaagatttctccagcaagattgttttaaataaagtttttgccatcaaaaaaaaaaaaaaaaaatcgccaaatggttggccaatccgccgcgaagaaggtagctgcttgcttttgacagtgggaatacgagaagggaagactcgcctggccatttcctcaccttacgtgcgcgctctcgtcttctcgcgtgcgtacaggccgcgaggtcgccgcggtcgccagggttcgcgcgcacgccccagatcggagtcggggtggggaaacgtgcgccgcgcgagacgtcgcgcgagcccggactagggagccgcactgagggcaacggccgcgcgccggctccgagacgagcgacgcctggcgggagcgcgcggcagcggggcgggcgtggagcgtgcgg

SEQ ID NO: 15927 - DNA, 456 bp, Homo sapiens
  source 1..456: mol_type = other DNA
gatgcgggcgcccatcccacgtggaattcagggagttcacttcccggctcgcactccgggggcgggagggtgctgccaccgcctcaggtcgcgcgctcctttagcgcggcgtcctccatcgccctggattctgcccggaccagcgacctcgccggactgaagatttctccagcaagattgttttaaataaagtttttgccatcaaaaaaaaaaaaaaaaaatcgccaaatggttggccaatccgccgcgaagaaggtagctgcttgcttttgacagtgggaatacgagaagggaagactcgcctggccatttcctcaccttacgtgcgcgctctcgtcttctcgcgtgcgtacaggccgcgaggtcgccgcggtcgccagggttcgcgcgcacgccccagatcggagtcggggtggggaaacgtgcgccgcgcgagacgtcgcgcgagcccggact

SEQ ID NO: 15928 - DNA, 330 bp, Homo sapiens
  source 1..330: mol_type = other DNA
agattcagtggttttaaatcatgggcacctcagtgttctaaggatttactcttcttccccaggcggaaattgaagtgacaacttagtactaagaagcttccatttttgtctgctaattgtgtactgacatatcaagagaacggatatttactatctaaaaagcctggcatataataaatactaaaaacttttcaaaatgaatggctccaaactgctctgagtcagtcacagaatcccagactgctgtggtttaattgctttgactggttcagataaaggggacaaggacagatgctgtcctcattctggagcaaagtagattagagtata

SEQ ID NO: 15929 - DNA, 345 bp, Homo sapiens
  source 1..345: mol_type = other DNA
ggaatattacgtaaaacgttatacacgtgtatgtacagttttgataagctgttgggccgttgactcgatgatggttcgccctgcacttaatagtctctaagtccgctacaggctcggaacctcaggtgtcccccagggtcgcgggaggctcacccagtcaaagtcacacgggttaccgtcttcgcgttgggtgggcagaccgtgtcttttcggccgtaacgggggctatatcgcacagaacccaaaaaagaacttaatattttattggttagtcttattggactgtagcaagcagagctagcagaagactctggttaaatagcacttcctgaacgttctcataag

SEQ ID NO: 15930 - DNA, 356 bp, Homo sapiens
  source 1..356: mol_type = other DNA
gccctagcagtgctttggttgaattcaactcatcctggttgaattcaagtcatcacctcctctctaagatttgattggctggcttttgaccacagccagctcctgacttgtccgcgccaggaggagccgtggccgcggtgggaggcggggccgtgccgggtcccccgcccgcaggaggcggtggcgggggtggaggttgggggcggtggtgggtcagcctgagccccaaacagcttatgagaacgttcaggaagtgctatttaaccagagtcttctgctagctctgcttgctacagtccaataagactaaccaataaaatattaagttcttttttgggttctgtgcgatatagccc

SEQ ID NO: 15931 - DNA, 324 bp, Homo sapiens
  source 1..324: mol_type = other DNA
cttggttagacctagatttaaccctaaggtaagatgctggggtatatcattaaaagtataagcctaactttgtcgctagtcctaaggagaaacctttaaccacaaagtttttatcattgaagacaatattgaacaacgaaactgtattagaaaagcctgacaactgcagaggaattgcccatcttaagggcaaaggccatcctatttggtttcaccaaatgccgggcattgatccccaggactggcaagtctagtttccataaatctagaatatccacccgaagcgatgggtggttccgtcaggcgcttcccgcaccttcccgc

SEQ ID NO: 15932 - DNA, 487 bp, Homo sapiens
  source 1..487: mol_type = other DNA
ctggccaacatggtgactccgtggtggcaggcgcctgtaatctcagctactcagctgttgcaagggccctggggaagcttctcaatgttcagcgttgagtcaggaggctgagcaaagatgcgcaggtgggccaacggctgagtgcttcacctcccggcttcagggagagccctgcaaagcggggtggcccgcacgcttgggcgccctggcccaggggatccgggaggcccaaagtcaggacttcccgtcacggccacctccgccagcatagactttgcaggcagcccctggcgcccttgtatccctgcgggcttcagcacccacatgcactgggtggtagtgatagcgagggttgtaaggccacgcggccagcgccacacacctcgtgccaccgtcctagcgcgctgcgcgtcgcagagccctacgcccctcctcctgagtcctcgggcctacgtcgtccggcatacgtcatccccattggccgagg

SEQ ID NO: 15933 - DNA, 356 bp, Homo sapiens
  source 1..356: mol_type = other DNA
ctgtattagaaaagcctgacaactgcagaggaattgcccatcttaagggcaaaggccatcctatttggtttcaccaaatgccgggcattgatccccaggactggcaagtctagtttccataaatctagaatatccacccgaagcgatgggtggttccgtcaggcgcttcccgcaccttcccgcctcggccgggctctaggcgccatggctccccgcgggaggaagcgtaaggctgaggccgcggtggtcgccgacagtggcgccggggggggccaggggccccggtttctaaccctgacgcgtctatgggcgcaacgccgcggccctgagccaggcgctgcgcctggaggccccag

SEQ ID NO: 15934 - DNA, 287 bp, Homo sapiens
  source 1..287: mol_type = other DNA
tattttgattaattcaaagtatggagattaaaactgttaacaagtctacgggtggatcacctgaggtccccagctactcggctggtgagctgagatcgcaccattgtactccacagtgaaactgagtttacaaatcagctcttttctatttccccactgggatagtacagaagattcctcagagattgtacagtctctccactttaaatataaatatataaatataaatatatatatgtataaacttccccctgttttaattttctataataaagtttcctattgga

SEQ ID NO: 15935 - DNA, 668 bp, Homo sapiens
  source 1..668: mol_type = other DNA
taaagggataaggaaattctaatcatgctttttatttcacctgagtaaagtggcaacatacctgaaaatattttcagctttttgcactctgaaagggccaagggtggaataaaattaggtttagaaaaaccatttatacaaagtttagtgtttaaaatacatttcagaaaacaagggagatttttatttttaaaccaacctgaaagttgttttttggagttgaatttattgtttagttaatttaccatgaaatctgaaatctcttagagctgaaggctttcatatcttatatttaatcttaagatttgttttgtttttgcaaatacattcttgcaaaagtacggattctagataattatatagccaactcatcagtagctgaaaaactagggtattctcttctctttttgaaaatgtgaattagctttaagactagacttccttgaatttcttttctagaatgagggtatttcttgaaagacgatttcatccttgtgaagttgtggcttcaggaggaaacagaactttgttcctccttcaaatacacaggaaatttttgatgtctgaatctcataattataacaagtacagttaaaaagaaagaaaaaatacaatgtgtataggctgttgaactgtatcttgtttaatattacactcaacctttaggg

SEQ ID NO: 15936 - DNA, 215 bp, Homo sapiens
  source 1..215: mol_type = other DNA
gcctaggctggagtgcaatagtgcgagtagctggaatccagactggtctcattagcaaattctgccacttcagcaataccagcagatttttttcagggaaaaataattgcactgcagtaaaaccattaataattgtagtgtgaagtgagggggtctctctcccctccgcccatggacgactcagaggtggagtcgaccgccagcatcttggcctc

SEQ ID NO: 15937 - DNA, 515 bp, Homo sapiens
  source 1..515: mol_type = other DNA
ttgcacgccagcctgggtgcttgtctttgcaattatagtaagtagcaaagctaccaattaattatcttagcaagttgctattacatgaacctatttcaccattggtaaaaagggggaaaaaatctatttcacagggccataattatagttccttacgtattgcttttttatagtaggccttttgtaaatgtttaattcaaggtgaataaatcacagtggtaaaaaaggtgaagagttaacctcagtgttactttccaaaggtttaacatctggtgtcaaacctcttttaaggatttacgttccatgcaggaaagcagataaccataatttctgaataaatatgcctctgtgtacctacacttggaaaaagcaagtataagtctgccattcccatgaatccaagatgaatcctggcagtaggtcctcaaattttgcaaaattaattttgaatctttatcatttctatgtcagtcacatttttaaaactgtgtaacctatgaaaaaattatagaggc

SEQ ID NO: 15938 - DNA, 354 bp, Homo sapiens
  source 1..354: mol_type = other DNA
cacccaggctggcgtgcaaaggtactatccactttggcatccaaaagcgctgggattccggggttaaaaaatttccattgacactatgccaatcgattattacaactgaaaatgacattagctaatactcagtagagaatataaaacatttgtctaatatgaagtggtatgaaaaatgtacttcagcacttgtctacagtttaactgaatgattaatgtgaaatttaaaattggatccccagataaggatgttcttgcaaatcgttccttgattgtaatggatgaaaagaaacaacggaaattccctttgatgaataacctctgataaagttgctattgtacttaagagaccct

SEQ ID NO: 15939 - DNA, 442 bp, Homo sapiens
  source 1..442: mol_type = other DNA
ttaaaaaatttccattgacactatgccaatcgattattacaactgaaaatgacattagctaatactcagtagagaatataaaacatttgtctaatatgaagtggtatgaaaaatgtacttcagcacttgtctacagtttaactgaatgattaatgtgaaatttaaaattggatccccagataaggatgttcttgcaaatcgttccttgattgtaatggatgaaaagaaacaacggaaattccctttgatgaataacctctgataaagttgctattgtacttaagagacccttcagcttcccggctccttggtgtcccgaaaagcaactttataattcgtttggccttgtgctagggctccgagggcccaaggaccccatggaactaggagctcacaggtgagtgactcacatgtcatctgacaaccaaggcaagtctgggca

SEQ ID NO: 15940 - DNA, 399 bp, Homo sapiens
  source 1..399: mol_type = other DNA
ccggcatcggggcttgtccgtcccccaccccctagtcctaggcggcggaggcggaggcggcggcctcggcgctgctccccccgccccctcgcctcccggctccgagggcgccccccccaaggtccgctaccgctggcggcgcgcgcgcgcgcgccacagacgctcagcgcagcggcgcggctaaaaggggagcgcgcgaggtttccttccccgcgcaccctccagacttcaacgcgcgctaggggcagtgcggaggcgggtgagaagaaatcgcacctctttccccgccggccgcagaagtagcctgggcgcagcgccgccagatcttgttctcctttaagaaaaaaatgtgggggcaacgagggcccgcctcttggcgcatgcgcacttatttcgcct

SEQ ID NO: 15941 - DNA, 356 bp, Homo sapiens
  source 1..356: mol_type = other DNA
acggcacgcgtcgcgacctggaaagtaaactacctttcctatttttcctaaagcctaggcgaaataagtgcgcatgcgccaagaggcgggccctcgttgcccccacatttttttcttaaaggagaacaagatctggcggcgctgcgcccaggctacttctgcggccggcggggaaagaggtgcgatttcttctcacccgcctccgcactgcccctagcgcgcgttgaagtctggagggtgcgcggggaaggaaacctcgcgcgctccccttttagccgcgccgctgcgctgagcgtctgtggcgcgcgcgcgcgcgccgccagcggtagcggaccttggggggggcgccctcggag

SEQ ID NO: 15942 - DNA, 362 bp, Homo sapiens
  source 1..362: mol_type = other DNA
gttcttgcaaatcgttccttgattgtaatggatgaaaagaaacaacggaaattccctttgatgaataacctctgataaagttgctattgtacttaagagacccttcagcttcccggctccttggtgtcccgaaaagcaactttataattcgtttggccttgtgctagggctccgagggcccaaggaccccatggaactaggagctcacaggtgagtgactcacatgtcatctgacaaccaaggcaagtctgggcaacggcacgcgtcgcgacctggaaagtaaactacctttcctatttttcctaaagcctaggcgaaataagtgcgcatgcgccaagaggcgggccctcgttgcccccaca

SEQ ID NO: 15943 - DNA, 524 bp, Homo sapiens
  source 1..524: mol_type = other DNA
caagatctggcggcgctcgcccaggctacttctgcggccggcggggaaagaggtgcgatttcttctcacccgcctccgcactgcccctagcgcgcgttgaagtctggagggtgcgcggggaaggaaacctcgcgcgctccccttttagccgcgccgctgcgctgagcgtctgtggcgcgcgcgcgcgcgccgccagcggtagcggaccttggggggggcgccctcggagccgggaggcgagggggcggggggagcagcgccgaggccgccgcctccgcctccgccgcctaggactagggggtgggggacggacaagccccgatgccggggcggccaaggcggctccggaggagccccaacaacggccccctgaggcggtcgcggcggcgcctgcagggaccactagcagccgcgtggaggggaggtcgggaccgaggccgggccgctgcggccgccgccgccgcagctgtgtcccgccggaggaaggccgagtatccccgccggcggaggagcagccccagcgc

SEQ ID NO: 15944 - DNA, 558 bp, Homo sapiens
  source 1..558: mol_type = other DNA
actaactagttgctgttacattttaaatgtaatgttgaacatttgtgttaacagcttaactgtcagatattaccccatgcagtaatttgatttgcatttcttgactgcagagagaaaatatcttatatctacactaataaaattttgtttttggctttgttttaggtaaaaaaaacattaatatttcatttttaaaccttgaagttgcttccatttgaaattattttgagctgtaagagaaattaacttcagttttgatactgcatttagattccatgttgagcttgattagaacttaaaccatgtaatctacttacatagcttagaaatcatgtcttttccatggtttagtaggtcttttaatatagcagatcaccagacagtattacaaagtcagttgtttcttaacttttaatgccattgatagtttcaattattattctttgtgataaaacagctagatttccaattaggtcattaggatgaaaatgcactttatcagtgtttggctacctcttaaaaaattcatttctatttacttatttttagtagtgaaga

SEQ ID NO: 15945 - DNA, 603 bp, Homo sapiens
  source 1..603: mol_type = other DNA
ttagtaggtcttttaatatagcagatcaccagacagtattacaaagtcagttgtttcttaacttttaatgccattgatagtttcaattattattctttgtgataaaacagctagatttccaattaggtcattaggatgaaaatgcactttatcagtgtttggctacctcttaaaaaattcatttctatttacttatttttagtagtgaagatagaaaggcatgtctcagattttactgcagacatgttaatgaaatataagtaggaaagcactcttttatttttaatgggtatagaattaattttaaatgagtaattaattatgcacttcttttgtaagtatttgtagaactttattttgattatatacaagtttttaacaaggtatcatgaattgcctgaatacttagaattttttaactaattgtctcgtttctctttacaattatagtgaaatttgatgagcaacatatacatatatttggatcattactatgcatgtgaaatcacatttcatgaactgagttttataacaaatcagtgataactctaagctttaatttgttgtcatagttccttgaaaagatcttttgtctagtattga

SEQ ID NO: 15946 - DNA, 459 bp, Homo sapiens
  source 1..459: mol_type = other DNA
gattttttttaaagcaatacttttcttttttaaattttgtttacccaaagtgtttatacattgaaaacagcattgcttttatacttactgtaagggaaaatatttaaaatagacagtattttcttcatagatcaaagggattatatctgtgaattcagtgagtattatatattagttgccactgctgtttactttcatcaaataaatgagtggatactctgtttttcaggcaaacagaagaagatcagattagttttccatctatccttcaaaagaagtatgttgtgtatgtatatatatgctctataagagcttgtcgacaaaaggcatctcttaattggcacatgaagaaacatgatgcagactccttctaccagttttcttgcaatatctgtggcaaaaaatttgagaattgcagaagctctggctgccaatgcaggcgccctcatcaccagagtc

SEQ ID NO: 15947 - DNA, 243 bp, Homo sapiens
  source 1..243: mol_type = other DNA
ggttctgtagattcagactctactttgtatttaaaagttaaaaaggacaaaaaaaaaatctaaagcatttaaaattaccagagcagcagcagctcttaaagtgagggttattctgcagaaccatagaattctaatctctgggtgagctgttaaaacagcacttcctttattcccccctgggtttcagaaaggaaggatatatggggaccacctcccccttctttgctcacttgcttggaagca

SEQ ID NO: 15948 - DNA, 390 bp, Homo sapiens
  source 1..390: mol_type = other DNA
accatagaattctaatctctgggtgagctgttaaaacagcacttcctttattcccccctgggtttcagaaaggaaggatatatggggaccacctcccccttctttgctcacttgcttggaagcaggctcccaatagggagggggctgccctctacagtctctttgactgtaagacagggctctgtatcagtgagacgatctaatggcagaaatttgcactttgaacatgtgtgtttattccttatttattaacaggaatcccttccataaccagccagcctctgaaatcatagctccagtggcttttacaaaatcactacaatagcctagtgctttttttgagatttttacagtgttgaaacttaagaattttgaaatctaaattacaga

SEQ ID NO: 15949 - DNA, 514 bp, Homo sapiens
  source 1..514: mol_type = other DNA
agaattcctatcctgtgtgcctcagaagctagaatcgaaggcttaccctattcattgtttattgtcagaaatgcatgttttgctggaaaaaaaaaaaagaacagtttgtgtttcacaaacatggcttatcaattttttcaaagaattcttttttcccaaaaagaggagtaacaaaatgtcatttctgaaagaggcttactttatactgtcagcatttgacaatcaccagtctcaaatgcgctattgtttcttttcagagtgttgcagatttgccatttctccataatatggggatagaaatctcgactttggtatattgactagatttgaaaatacaagattgattagatgaatctaaagcaaactgcatttttaaaaatctttctgagatgggagaaaatgtattctccaaaaaacaactagttagttctactaattagaaacttgctgtacttgcctacaataaattattgcagcagtttgcaatactaaaatattttttatagactttata

SEQ ID NO: 15950 - DNA, 354 bp, Homo sapiens
  source 1..354: mol_type = other DNA
gatttgccatttctccataatatggggatagaaatctcgactttggtatattgactagatttgaaaatacaagattgattagatgaatctaaagcaaactgcatttttaaaaatctttctgagatgggagaaaatgtattctccaaaaaacaactagttagttctactaattagaaacttgctgtacttgcctacaataaattattgcagcagtttgcaatactaaaatattttttatagactttatatttttccttttgataaggtgtaattaaacgagctcttttaatcttaaagttctaattggtggttctaaattctgaaactgtagttgagatacagctatttaatatt

SEQ ID NO: 15951 - DNA, 429 bp, Homo sapiens
  source 1..429: mol_type = other DNA
ttctttggaagagaacaggcctaatcctcctcctatgtagctaccaggaaggcaccgtgattgaaattagagatgcttccttgcttgatttttaagtataaattaaattacctttaaaaagtacgtaaggttaggagtgaaaaaaatcctgtttttaaaggacttcacacaccctttgtttcttgaacaagatgtgaaagaatcagacttctatttaaattcaagcctcgttgaagtttcagtttcttatatggagaaataacatttacctcagaaatattctgaagatcaaatggaattgctttaaagtatttagcgctgtgtcaataacaattttattgaatgaaaaatgaactaattctaagtgtgtgtgatagtgaccttgttgctaagtgcaaaagcaaaattaaaaagggccctttgattcca

SEQ ID NO: 15952 - DNA, 497 bp, Homo sapiens
  source 1..497: mol_type = other DNA
atctcctagaagattcattggaaacttgtggaagtgtcaaattcttgagctaattctggagttccagatttgaggggatccccatcaatttccacctctgtggaaatactccaaccccgttttgaatttagaactgatttatctttgtacagcctcaccagacagaaagaagttagagaaattctacaatggctatattccaatcttttacaagtatgtttaaaaatactttaatatgattaaaatattccagttaatgagagagtttgaagtgagaaggaaaaattcttctaaatcagttttcaacctttagaactcaataaaatctgaacattcttctaagaaaaatccatgggtctttctagtccagagcccaaattaagagttcctactgtagacatattatttactttactcctcggccaggtgaagcatcagggcctgaagccagtggcaagcactgatcagtggagtgagctgacaagcttctcctggaa

SEQ ID NO: 15953 - DNA, 407 bp, Homo sapiens
  source 1..407: mol_type = other DNA
acttgctctgtgctgatccattaagtgaaggaacacacacacacttaggacctggagagtgtcaaactccccatcttggctgttttacacagtgaaattgaggctcaaattaaaagtatagtagatctcaatggtccttctctataaaagtgagactaagaagtgctcacattgaatcattgtcagaatgtttttaaaaaggaagattctaacagctttcatactccatgcaagtaatttgctattttattgcattctgcaaatcagatatcattccactgccttgcttctattacagatacttgaatgggaaagaggtgatggtatttccatgacctgtgaggaccgtgagagaattcactgacaccagattcttttgccagcctagtacaaggctcagaaatttc

SEQ ID NO: 15954 - DNA, 490 bp, Homo sapiens
  source 1..490: mol_type = other DNA
atgctataaatgattacaatttgtgaagtttctttcacttccagaaagtgggtgaatttttttttaattagagatagtatctcaccctgttaatctggctaattaaaaaccaaaattttaaagactggggttttatcagtataaaaattttataacttatattttcccatgttttaatctcaatgtcttcaaaatgtaatgttgatcagattcttttagatagctttttataacatacagattgccaggcactctgggagccttgtattgttaacaaacaagcgaggaacacactttgaaaaacaatgtttgtctcctgagtaaatggttgaaagtattaagccaagtattttgcattgaaatcaaactttccaactgacatcatttaaataaggctgcagctgtgctatttttgccaacaatggaaaattgacttaatattgttctagaatagcctttcagctacaagaggttatatataaatcaaaag

SEQ ID NO: 15955 - DNA, 410 bp, Homo sapiens
  source 1..410: mol_type = other DNA
gggcccagctccccatccaaaacctccttggttttggcttttcccgcctggaagagcaggctggcgcgcgggagggagcctgggaattgacactctcgctggccaatagagtctctgggctctctcattggatggaaatgattcatcctctcatccactaattcgcatcactccagacagtgattgagagtgcacgcctgggcgcacgcgctcgcgggcgggtcagacggccaggccgaggggactgcgcgcccacccgcccaccctcagcagtcactgtcccctgtctcccagtggaagccaccttctgccgctgatgggtcggcggcggtggcgggacgtgcatccaggcgggatccagcggcagcagcagagagagctccaccctgatgatgcagaccagcttccag

SEQ ID NO: 15956 - DNA, 512 bp, Homo sapiens
  source 1..512: mol_type = other DNA
tgaattgcattttacttaaaggaattttgatgatatcgagtcataacttagcaattgactgcattaatcattaagatggcaacatctttagaagcagagacttaaattatatattttaaccatgtgcttaaagccacaggcagaaagtttatggactttaatctggaaaacagtcttgaaaacagtgactcactaactggggaacttaatttgggactcttttatgaatcaaagactatctgtaatcagtgggttaagacagtcattcatgcatgttttgaactcttcttcaccttttgagaagggcacaatattttcaccttttaattgaacaaatatcatttaattaggtttaaagttcttaatttattatctgaaaagaggtttttcaaattcttacattttacttaaattttagcagagaattataatttggaaattttgctgggctgtctgcaacgcaggcacccattggctgttcctggccagggtggaccccagcctccccttgg

SEQ ID NO: 15957 - DNA, 459 bp, Homo sapiens
  source 1..459: mol_type = other DNA
agtcacttatgactaatactgagtacaatgggactgatatcagaactaaggttgtgacacataaggctaaacctttgagttttgatccaagtggacttggagaatcccctgctggagtcctagagagtaaccactctgtcagatagcatgtgtctgagaggaaagcacaggggtctagttccagccgtatccctctgcactgagttctagagagactccagagctgagaggaagctattctcctggccaaggtcctgattcagtttgccagaatcataggcacactggcagtgaattgaaacctcccctgtagtcccatagagaattttttttgtataaacatagaaattgacccttctgatcttaatgcttgaaacttttatttgttttatatgaatttcatccttagtaaaggtttcttcactgctatgaaaactcataattttagttgatcagcaa

SEQ ID NO: 15958 - DNA, 318 bp, Homo sapiens
  source 1..318: mol_type = other DNA
ctgtcctctttagaaacatccttgaaaagatagtatgttttctcccattaagaataactccaagaatttttctttgaacaccaagagatgtcaaacaaatttgagtagtaatttaaatgtattagtcattggcaggtagattgattttaaaagagagtgtgttgtcttggaaaccaagtccattaatgatctattaaaataattgaccaggatttaataacacagagatccctgattttagatagcatgtatagacaatcctttcaataaattttgctacaaactgttgaaacaaactaattacaaggactctgtact

SEQ ID NO: 15959 - DNA, 369 bp, Homo sapiens
  source 1..369: mol_type = other DNA
gaggcctaagcagtgctggccactgcctcctccaggctggcattgtcgggtgcagcctgctctgggacttgaagtgctctctctgctgctgccgccaaaggatcccgcctggattggcgggctattcgccctgcagctgccgccagcgcgcggctcccgccagcgcgctggcctccctagcctccactgggagacaggggacgcccagtgggcgggttggcgcgcagtaccctcggcccggccttcagacccacctgcgcgcgctgcgcgctcatcccactgtctggaagtggattgagactctttggccacgagagtgtcagttcccaggctcctgccgcgcacgggcgagcccttctaggcgggaaa

SEQ ID NO: 15960 - DNA, 349 bp, Homo sapiens
  source 1..349: mol_type = other DNA
agaaaattttctccagatttaccctttgtgaatgtaggaatgcacagattccaaaagtgaaaaagtcagcattcaaatatgttttaaggttactcacagaagatgaagcagtaattttagcttctcttggtgtaacatgcatttaaggccagttccttccttcaaatgtgttttgtagttaccaacatatatacatcatatagcaggctgctatcataaacgtctccacatattgatgaacgtttggagaatcggcctatcccacctgctggggatgccgccccctcggaagtgcgcctcctgtgtgctgcagcagatggcgcgctgcagaccccagcctggtgcctcc

SEQ ID NO: 15961 - DNA, 455 bp, Homo sapiens
  source 1..455: mol_type = other DNA
gttgttttatgtggtttgcaatctcaacaaaacaaaatttgtgttctttgacaaggataatgcataatcctgacttctaaggttattttccatattaactattgatgatcaaaataagtctaactcgtgtttttcctagtgtttcataattttagttacagaaacgatgcagataaaattaatctaacatgcgtcttctctacgtgcgagtggccactggccggcacacgacacgggcgggtaagctccagggcactcgcccgagcagcagggggcgtgtcttctgcttccttgacggacagagtgcgtgcgcaagccccgagacaatgcgtgtctccagttcgcgctgcggacactcccggggccgaaccagggaaacacacgcgggcgcgggtttgccccacaggcagggggagctctcccagcggcggggactgcgcgcggccgtgcggcga

SEQ ID NO: 15962 - DNA, 545 bp, Homo sapiens
  source 1..545: mol_type = other DNA
gtggccactggccggcacacgacacgggcgggtaagctccagggcactcgcccgagcagcagggggcgtgtcttctgcttccttgacggacagagtgcgtgcgcaagccccgagacaatgcgtgtctccagttcgcgctgcggacactcccggggccgaaccagggaaacacacgcgggcgcgggtttgccccacaggcagggggagctctcccagcggcggggactgcgcgcggccgtgcggcgagatcccaccccggcgtctgcagaggccgaggcgcaactggtgcgagggctgggtccttgcctcgccgtcagccccagctcgcggccgccggggctcgggccgcgcgcccgccgagtggcttttgcaaggcgggggcctgtttgcagagagccgggcgagcagcggcagcagcagcggaccccggcggcggcggcggcgcgcggtcccagccaggcggccccggtgtcccggccccggtggatgcacggctggggaggagcccatgggccggagctgaggctgcccggggcggcggggcg

SEQ ID NO: 15963 - DNA, 349 bp, Homo sapiens
  source 1..349: mol_type = other DNA
ccctggaaaagctacttctgggcacccctggaatctgggtatccagcttcgcctcaggcggtcttcctaacaagaagctacgaagttcttattcagaaaaaggggatgtaaagacgagactccttccctttttcctcaactcgttcagtaaatggtagaaaacggcgatcagattggccgggcattcggaaacttcaggaaagcaccaatgagcttccccaaaagtctgattggcctttatctgaaccaatcaaaggtgggtctggcggacgcgtcccaccccaggctctcactgggtgacaggcccgagagagcggggtcttcccggcggccgagccctcctccccgc

SEQ ID NO: 15964 - DNA, 471 bp, Homo sapiens
  source 1..471: mol_type = other DNA
gaaacccaaaagaattcattctttgtgctgctctgtgggttcgatcctctaaggaagtggagtcacccagcggcgcaccacggcccgaagaccctgctgctgcgtggccagcggcccacggccgtgcggcccttcgaggctctgcagctcctcgcgcctaatgagcctggcgtcacagccctgacctgctgtggattcaccctgcgcaaggcgcagattgcaacggggggtatatcctgtgacaatcacaagggttttctccgccccacgggtgacggagaactcgtgaccggcccctgagctccaagccgagcgcctagacgaagacgggcagcgcgtgcgcagtctctcgccacgggacctccttcccgccgctgagactaggaagcgggacgccaatctgtccctgcgcagccgccgccgccgggcgccgagcggggtggccgccctgcctgaggcgcgcctgcgcac

SEQ ID NO: 15965 - DNA, 298 bp, Homo sapiens
  source 1..298: mol_type = other DNA
tccagagaagcaatggaagatgcttcaatactcagccaaataataaatacctgagactggatgacttataaagaatgacaatttatttcctcttagttccaagatcaagacacctgcagatttggtttccaagatggtgcctaaaagggcctaagccagttccctccagccctttcatgaggagcgctcctgagttactcaaatgattcttatgcctcagcctcctgagggccaggcaggtcttgaacacctggcctcaagtgatctggctattaagtttcaacatgaattttggagg

SEQ ID NO: 15966 - DNA, 327 bp, Homo sapiens
  source 1..327: mol_type = other DNA
accagggggcgcggaagccctcctggtactaaggggccgagacccgcggggccggctcaaagcccgacctcactgctagaattacaaagatatttacagctttttaacctgaaagcacagagcagatcctattcttcagaattaaatctcggaagcagaagccgcctgggaaccacctgcacaccaagcaggctgcgaggacggggagcgcacttcacagcgaactacgaagtgggtcatgctttcccaaccctgaggctgcgcgggatcccgctactcggaatgccttcctcctggccgcctagcaaggagtcggctaagaactgg

SEQ ID NO: 15967 - DNA, 382 bp, Homo sapiens
  source 1..382: mol_type = other DNA
tattcttcagaattaaatctcggaagcagaagccgcctgggaaccacctgcacaccaagcaggctgcgaggacggggagcgcacttcacagcgaactacgaagtgggtcatgctttcccaaccctgaggctgcgcgggatcccgctactcggaatgccttcctcctggccgcctagcaaggagtcggctaagaactggatcctagcagccagacagtcgctccggccctgcggcaggatccgccggtgcaggggcctctccccggactccacgcgtgtctggagggctctcgggttttggagacgccccgggcggccgggcggtggcgggacgcgggccctttggaggggcgggtccagggcggatcagcgctgcgccggcg

SEQ ID NO: 15968 - DNA, 155 bp, Homo sapiens
  source 1..155: mol_type = other DNA
aggctggagtgcagtggtgcgaactcggctctcccgagtagctggtacctttcatccaaagtgggtgatttttaacaactgttctgttgagattactttatctgaccatggaaagggtactcactgggcagctgaggactttaagtgatgatgaa

SEQ ID NO: 15969 - DNA, 486 bp, Homo sapiens
  source 1..486: mol_type = other DNA
tttacaacagtctttctctaaagtctgctatctaataaaattggtctctacaatcatttatgtttaacctgaacaccaattgtcaaccagaaaatgtttacatttacctatagcctaccaaaccaatgtatttcttaaatgcatttgattgatgtctcatctaatatgtatctaccaccttgggcacatgttctcaggaccccctgagggctgtgtcacaacaatattgttcattcactgagatctctggaatcacagactgtgctcaaattctgatagaacaagttaaattatttcaccctcctgcaaaataagtataatgacttatctcacagattcgttgacatgttaaaccattgcaatgtctttgaggggtcccctagaaaatcatctcaacagggcccctgggcgtggctgggcggacggcgcctttgccccgtcgctcgagtttctttcgcttccgtcgggactctgcggagtggaccc

SEQ ID NO: 15970 - DNA, 520 bp, Homo sapiens
  source 1..520: mol_type = other DNA
tcttctaaggtcttataggtcatgaatggagaatatccccttaaaatgagctactttacatgcaggaaaaaaacaaacaaaactcctttctttataatttcaacatacagttctcccttataaagaagtataatttgcattataatgtagctacacatctgaaatatgtattcttaatggatctcacattttctaattacttactttaaaagataatatctgaaagctttgttgagatggcttttatctccagataaggaaagagaaatagtctaggctaagccagatgtcacctggcagatccctgcctaaaatgagctgattccagtgaagtagttactaaaaagcagcctggtaactgaagaggtcttgttgatactagcacattatccaaacttcctgatgtctgacccaggcctttggtaaaggacatgtgcaacctagaagtcaccttcagacaccttggagggtctatagtcggtaaacttagataagcaaatgaaaatttacttacttgtat

SEQ ID NO: 15971 - DNA, 341 bp, Homo sapiens
  source 1..341: mol_type = other DNA
cccacaaataagtgagaacatgcaatgtatgtctttctgtgccattttgtcacaactgacaggatttcattcttttatatccattgtgtatatgtacatttgggttattgtaaagatatctcttcatatatagccctgagatgagaggatatctcattgtagctttgatttccatttatctgatgatcaatgatgttaagcaccgtttgcatgatcaaatctactttatcaggaaacatatataggaaacagtcatttgcctaatatatcttcactgcacggaaggcaaataaagttattgcctgaattgctcaatatttgcttctgcttaataaatagcc

SEQ ID NO: 15972 - DNA, 260 bp, Homo sapiens
  source 1..260: mol_type = other DNA
ttgcagctattgcagtaagccaagattgcaccattgcattccagcctggatgacagagtgagacgcaaatccagttaaattttaggaaagctgggtaacatttctataccatagttttcttaatagtatatgtaaagcattcagaacaatgacctgtatgtagtaaccatttaatacatttaaacaataattagcattattattatatctgtgatattgggcaaagtaattagctggcacatcttaagcaacatctgaaa

SEQ ID NO: 15973 - DNA, 472 bp, Homo sapiens
  source 1..472: mol_type = other DNA
actgtgtgggtcacagctttggatgtcatttgacagcagactgtaacattgaaaatataattcagatatgactaaaagcaataataggcatttaattcagcctctttgaattttattttgactaacattttaaaaaaatacaataaaaatctttggctggaacttttattctacttcagtattgaaaaaatcataaatataaattattatacatatacagttatgtgtatatatatgcatataaaatattctcttgtctcggaattgtcaactttcctaataaaacccatagaaatgaagaaataatagtcttttgatttcaagtatgaaagatctaggctgttctcatattagatggaaacttaaaaacagtttcctgtaatttagtatttactggaagcaatgtttgtaacaggacttgtaaagactgttatcaaataacacttttttcttgagagagtcttgacactgt

SEQ ID NO: 15974 - DNA, 537 bp, Homo sapiens
  source 1..537: mol_type = other DNA
aaaaagattttaaaaaaccacacatgattagaggtgtgatttttagtatcttaaatattattgaaagccattcaaggttatgtttataattaaactgaaataaaagagattaaaaccttctctgaattttatctgttttagccctaattctaatttaggcatactctaataatttagcagacaatggactcttcagcagttagaatgcagcctgttgtatttccaagaccatctgctgcagcgaatcatgtaaacactcacatacaacagcacttcagttttgggtctatgtgtgaaaagcatgccttaaacaaggaagacaagcttttcaaaggtgcaattggataacttctgccatagaaatggctgaattgggacatccagaagaagggcacatctctttcttttctcaggcaaaattatgctccaggagtctcaaattttcttatttatttagtagacttcttaatttttctattcatcacaagtaaaagccttaatcagccaagaaacttatctgtctggcaaatgacttat

SEQ ID NO: 15975 - DNA, 517 bp, Homo sapiens
  source 1..517: mol_type = other DNA
cattctggaagctcccccaactgatacattgaagtcagcttccaggggcacagtgcctctgtcctcacaaaaccagcctgcatatgagtttactgaattcatttagcaatcagtattgaaaggttgctttcagcctgccaaaacaaacaaactatatatataaaaaacaattttttaaaagtttttttatgttctatattactattagctatatattaatgaatgttcctttaaagcagtgtagtcattattgctattattattattatggttagttatagacagtggaatattgttctttctctatattatgattactagcactattactgttattagttacatgttattgaaagcttcaaagcagcataggctttttataaatatttttgctctatttaacagattagaaaactgcatgactcctgaactctcactgctagaagtttacagaaaaggaagtgcaggaacatttcacaaatctacaatctgtgagtatcacatcctgtatagctgt

SEQ ID NO: 15976 - DNA, 650 bp, Homo sapiens
  source 1..650: mol_type = other DNA
tatccaaccttgcagatcactgattataatgggttgtaatgatttatttattcatcagcagtaactggtgatttatttacttgtctatattgtcaagtagcctataaaatccttgagcgaaaatcatttttcaccattttatcttatagtagcttttctctaagaaaatgctgagtgaatgaaaattgcatgccactttgctttcctccatgtaaagaaggcattattttattttaccaatgaataatgattgccattgggtttgtcttagtcaaagaccagcttgttctatgataccagctgcttctttgattgtggctattcatgttgaacctccaaaggtgaaatatcatgaaaataagatatttaagttgtgtatattaaggcacaattactttttcaccaacctaatacaatagtaacagtagttctctgggaagaagagtactaattgtgaaagggggcatttataaattaccatttacttagttgtgtatataacaatctttgagcagagtctggcaaagtaattagcactattattttcataggaaagactggcagccactgctttttcaatacccatattgggaacgcaaaatcagttaatgcttccgataaaaaagaggaactagttgtgtgtctcagaa

SEQ ID NO: 15977 - DNA, 675 bp, Homo sapiens
  source 1..675: mol_type = other DNA
tgggttcattgatcctcctatgagctctcttaggatatcctactttaccttgcagatcactgattacaatgggttgtaatgatgtatttactcatcttgcagataactgatagtaattgatttatttactttttccaagtagtctataaactctttgagtgaaaattattttttaccatttatagtagtttttctaaagaaaatgctgaatgaatgaaaacgtaaagtaggcattattttattttacaaatgaatcttaggttcaggagatgtttgccattggtttgatcttagtcaaagaccagctcgttctatgataccagctgcttagaaaggtgttgttttattgccatacaaccaacttgttgcatctctaaaggtggaatttcatgtaaataaaacatttaagttgtgtatattaaggttggtgcaaaagttaattgtgattttggccataaaataatggcaaaaactgcaattacttttgcaccaacctaataaaatagtaatagtagtgctccagaaagggggtatttacaaaataccatttacttgtttatataacgacctaccactgatatccacagtaattagcagtattattttcataggaaagttgggaacaaaatcagttaatgcttccgatataaaagaggaactagctgtgcgtctcag

SEQ ID NO: 15978 - DNA, 290 bp, Homo sapiens
  source 1..290: mol_type = other DNA
aggtaatcttcccctggaatctggccgaggactagatgctacttatcaatgctactaaaagcagtataaggatgagaaacaagaacaaagttggaagcattatgcttctttatttaaaagtatattataaagttatagtaatcaaaacagtataatactggcataaccagaaataaacccaaatatatatggtttctatggtttgaagccttgaatgttttgatgttgaaacttaatctcaaatgcaatagtttgggcctttaagaggattaaggtccttataaaagagg

SEQ ID NO: 15979 - DNA, 605 bp, Homo sapiens
  source 1..605: mol_type = other DNA
ttgcagataactgatagtaattgatttatttactttttccaagtagtctataaactctttgagtgaaaattattttttaccatttatagtagtttttctaaagaaaatgctgaatgaatgaaaacgtaaagtaggcattattttattttacaaatgaatcttaggttcaggagatgtttgccattggtttgatcttagtcaaagaccagctcgttctatgataccagctgcttagaaaggtgttgttttattgccatacaaccaacttgttgcatctctaaaggtggaatttcatgtaaataaaacatttaagttgtgtatattaaggttggtgcaaaagttaattgtgattttggccataaaataatggcaaaaactgcaattacttttgcaccaacctaataaaatagtaatagtagtgctccagaaagggggtatttacaaaataccatttacttgtttatataacgacctaccactgatatccacagtaattagcagtattattttcataggaaagttgggaacaaaatcagttaatgcttccgatataaaagaggaactagctgtgcgtctcagaaattctcagcagggtctagaccaaa

SEQ ID NO: 15980 - DNA, 427 bp, Homo sapiens
  source 1..427: mol_type = other DNA
aaaataacaattggccatctgcatttgtttctgccgcagcttcaaaagccaaggtgggccacttacagatcctgaaactcagggtcagcgtagggcccagaagctacacaaaaaaatatcttgagcaacttccttaactttttgggttcctctctcttttcagaatgaagatagttaaatgtaataatggtgacaggatgagaaaatatatatatccgcttccctagatgatagagctagatgatagagctagccactcaagtggcttcctggtggaattatgcactcgatagctgggggcacatgcatttacacaaacacatgcacacacacaaaacacccttacataagtgtgtgctgggacaattgttctgtataattcagccgtgtaaagctagaggctaaattgtccctctagatatataac

SEQ ID NO: 15981 - DNA, 415 bp, Homo sapiens
  source 1..415: mol_type = other DNA
atgtgactgggggcagattccttcagcaatatcaaataccctccaagtagtttatgagttatttaaatcctgtatatggagcatgttgtgccgccagctgctgcatgtcccagtaagtggcaacagtgtcccctcaacaacaatattccccttgcctctgaggccaatccactggcatctttcccaagatgtgcctgggagagaatagattctccaaaattcaaaactaacattactattatcaatatttattgtctactttttattatatgacttaaataattctatgtaggagtagggaaaatgaattttaactgggaccgtacaaatcactagtcagaatttagaaagaggaagcagaggcactttttatatatcaactgtctgtaactacagcaaaattcacatcctgtgt

SEQ ID NO: 15982 - DNA, 599 bp, Homo sapiens
  source 1..599: mol_type = other DNA
ttttctgttgttttaattatcaaaccagatttgactatcattagattttgcttaactttatgaaagctaaaatattctctgttataaaggggtactgatttttttttgtttaatttgaaaatgcaaagaattgttaaatgttcttaaatgttctcactacaaaaaaagaaaataatcattttggaatgtatatgtatatcaaaacatgtagtacaccctaaatatatataatttttatttgtcaaatatacctcaataaagatggaaaaaaatcgaaattcaaagttatctactgatttttataatacagagaaatatggttaaacaactcctttcagtttaaaaaacatagattttggagacaggtcaagttgagtttgcccctcagtttcagtattgtagaactgttaaaagaatcataaggaatattccataagttttagttcctttataactcatgaacatatgtgtatgtttaccatatgtttgtaagcaaattgaagcatgctctagaattctaaaactctgtgactcactatgattctgagattctactactgagtagagtcatcactaagggctcatctctgagggctcca

SEQ ID NO: 15983 - DNA, 330 bp, Homo sapiens
  source 1..330: mol_type = other DNA
taggcaacagagctgcctgccatatttcatccctttagattaaataaacaaataattacctaactatagctctgtgtctctaatcccacatatgaacataaaagttgaatatctagtactgtgcttgatgaccctgcaaaaagtgctatttcaatttatatttccaaatatatgtactatggcactaaagtataattttaggccatttctgctaaatctgacacaagatatatacatggttcataagaaacttaagtgatttggggacccctaagtagcctcagtgattcttgaatctctgcatagcatgccaggagcagaagctactga

SEQ ID NO: 15984 - DNA, 314 bp, Homo sapiens
  source 1..314: mol_type = other DNA
gtgggggggtcagcccccgcccggccagccgccccctccgggagggaggtggggggcgcctccgcccagccgccccttctgggaagtgaggagcccggagatttcattttgttctgtactaagaaaaattcttctgccaggccgcagggtcctctgcctaggaaagccagagaccgagactataaacataatttgagtgtttagaaatttaaaaataaaatcccagtaaaaaaatgcagtatgatattgcaatgattgagcattagattccaaactttacagttgcatttacatctcttgaggtgaaagagaaa

SEQ ID NO: 15985 - DNA, 592 bp, Homo sapiens
  source 1..592: mol_type = other DNA
atgtaaagactttagaagaggctgggaagctagctgtgagactaaaaattaagattctcaatttacagttgatttttcaggctataaaagatcttgatggcttttagacacactcatgattgcaaatgaaagcatagaaaatttccttatgaaagaaaaatctgtcttgtttattgactaaaaatttacactacaagctggaattttaactattccacaatgtcaatttaaattttccatgaataaatgagaaatgccattgagctgcctaatcatctaaataaacactgttttataatttccttcttcagttacttatgtttaaagaaaaaaaaagtgagccattgatttcacttcactcgaaagtgcaccttccaaaggtgctcttgtggtcaaaatttttctttgaagacagaaaaggtgaagggcggacttctcctcagtgatcctggtcaatgcaccaatatgggcaatctcagaatagaggtttgcagaaaccgtttgtctgaccacatggctgccaggagcctagtgagtctgcgcacacgcactacctccgccccggcagttcctgagtgggtgcgcaggcgca

SEQ ID NO: 15986 - DNA, 278 bp, Homo sapiens
  source 1..278: mol_type = other DNA
cctgtctctacaaaaaattttaagatttaattcaggaggctgaggcaggtggattgcttgagcctgggagtttgaggctgcagtgaactatcactgaaaaaagtgaagtctgactccagctaccttttcatcttttgcaattcacacgatgtatgtcatagatatgtggaatgccctcccatggatacttggatgaaaatagatctaagttgattacaagtaaatacagcacaccctgggtgcccagttcatttctgggagattataccatagactct

SEQ ID NO: 15987 - DNA, 467 bp, Homo sapiens
  source 1..467: mol_type = other DNA
ctcagagcactgggaagcaatgcacatccccattgtaagtcactggcttagatatgttatatttaacaaaacatctcagccgcatcgtgttataacaagtcacgccaccaaactctatgagattggtattatccctatttcacggcagagggtgaccctctcgctcccgtgcctcacagtaacaagaggagccagaattcaaaccctggcttctatctgactgttttcgatctcattgtataatctggcagattgtttgcccaggccagccacacctaaagtgttggggtacatggcaacatatccaagcttatgtttgttatttgtaactccttgacgctgaaaacagcctcctaagaatgtggtttgagagcttttgaaaagccatctagtggatgtttgcaagggcgggctctcagaagagctgcccaagctataaagtggtgaccccgacgtgatcgccttga

SEQ ID NO: 15988 - DNA, 491 bp, Homo sapiens
  source 1..491: mol_type = other DNA
cacagagaatctgctgcacaatctgcaagctggtgctctcccgagcatgcatagtaggtctcagagcactgggaagcaatgcacatccacccattgtaagtcactggcttagatatgttatatttaacaaaacatctcagccgcatcgtgttataacaagtcacgccaccaaactctatgagattggtattatccctatttcacggcagagggtgaccctctcgctcccgtgcctcacagtaacaagaggagccagaattcaaaccctggcttctatctgactgttttcgatctcattgtataatctggcagattgtttgcccaggccagccacacctaaagtgttggggtacatggcaacatatccaagcttatgtttgttatttgtaactccttgacgctgaaaacagcctcctaagaatgtggtttgagagcttttgaaaagccatctagtggatgtttgcaagggcgggctctcagaagagctgccc

SEQ ID NO: 15989 - DNA, 315 bp, Homo sapiens
  source 1..315: mol_type = other DNA
tcacactgtgttggactgaggtgcagtggtgtgatcacagctcactggactcaagtgatgctcccactgttcaacagagctctgtaaactctttttttttaaagagtccatatcttttagagataaatactaaaatgcttacaaataaaatgggaagatatctgaagaatggaaccattctctctacttttgtgagtgcttgaaattttccagaattaaaagaactctttcaaaaggttcaacttctttatcaacatttcccttgccaaaggaaatttacaactgtcagacagcttccatgcaaccggggcatga

SEQ ID NO: 15990 - DNA, 254 bp, Homo sapiens
  source 1..254: mol_type = other DNA
agagtcttctctaggccttgggaggtccagaagtcaacacctgctcactgtgagcttagtaagcacccgtttctagaactggacaaaggtggtgcatctacttcccctccaggacccccaggtagcagtccctcaggtagtgcaggaaactttactgcgctcgcgcgaattgcgcatgcgcatgctgagccccccctcctgtgcgtcacggacgcggcgactcctgacgtcataggaaggcgccggtttcggcg

SEQ ID NO: 15991 - DNA, 148 bp, Homo sapiens
  source 1..148: mol_type = other DNA
gggtccctcatacagtgctgtcaggagctgactgcctccagggctggaatcctgtgctccctctgtgcccaggtaaggaggagtggccagctctcttattcacaagcagtctgggtgggaagatgagagctgggattcaaacccaggt

SEQ ID NO: 15992 - DNA, 151 bp, Homo sapiens
  source 1..151: mol_type = other DNA
tcccaagtagctggggttacaggcatgtgccaccacgcctggcgccagtctggtcttgaactcctgacctgttttaaataaaagctatatgacctttgccttagagcctatattcatttttccctcagaggagaaggggtccctcatacag

SEQ ID NO: 15993 - DNA, 321 bp, Homo sapiens
  source 1..321: mol_type = other DNA
acaggcaataagctccactttaacctttacaagaaaagtaattttgaaattaccaaatgaccaatccgctttttcattggaacaaccattatattttatagtatgaggcactgcccaattctatagtaagaaaaaaaaaatctttgaactaagtttgttgtgattttgtcttttgacaaagaagaaagggcaatgtgaattgccccaaatcagcgaaatggtagtagtcaggaccaaaacactttcttccaaggtttctggcacagtgccgcacagttgtcaaaacaagtgctgtccaatggaacgagccgagtcaatccg

SEQ ID NO: 15994 - DNA, 262 bp, Homo sapiens
  source 1..262: mol_type = other DNA
ccgtggacagcttaagtgttaacagctccgtgggcccgcggttgccctccaccagcaagggcagaggaggacaaatgcctgggattttattgagttacgccttaagctgtccctctgaagacaagctaggcacagatagaagttctcacttgcactgcctttgtggcagaaaaaggagagtgagagttggttcctctctttctctgaaattctgagatagcgcgaacatacatttgtagctctagaactgaggattagcttc

SEQ ID NO: 15995 - DNA, 189 bp, Homo sapiens
  source 1..189: mol_type = other DNA
agttacgccttaagctgtccctctgaagacaagctaggcacagatagaagttctcacttgcactgcctttgtggcagaaaaaggagagtgagagttggttcctctctttctctgaaattctgagatagcgcgaacatacatttgtagctctagaactgaggattagcttccactgcgcatgcgctcccg

SEQ ID NO: 15996 - DNA, 673 bp, Homo sapiens
  source 1..673: mol_type = other DNA
ccaatttctccctgtgggggcagtgtgaagctggtaccaggtacccttccctacgactggcactgctggaaatgcgtgtgcttgctgggcagaggggtcaccccttccctgcagtgtgctgaggtgggtgggcagcctggagaagacttgcctgccctccccttcccagtcggcccacaggctgcggagggcctcagacataattttttccccagggcagagagtgtgcagctggggcccctgctctgggcctctccccaaacacccttgaggctggccttccctcgggagtgttgggcaaccctcaaccctcctaagcgctgcaggacgctgcccaggtggagctggtcaagagactagagctgcctgcacctagagcccttcctccacggcggtggcctagctctgtcagggcaggcgaattctggttctgactcaggtgtcagatgccttcgaaagtggctttttcttccctgatcagaagcttccgtgagggagccacacagaactcaccgagtccctcctggcagaggcggccgtcctctgttgcttccagggacgtggccctcttcccgacctcggtcgcctgagcgcgcagggattggggatccgtagggcactaggacccggcggggcggagggggcagcccatgtgctgcgattcgctccctcc

SEQ ID NO: 15997 - DNA, 149 bp, Homo sapiens
  source 1..149: mol_type = other DNA
agcctctgtgcaatccgaattgcgctgtgaatttccctggggccgtggcgcctcgggtggaaactgaaagaaaaaattcctcctggaattttttggccaggagccctgtgacctgactggggcagagggagcccccaccccacgcccag

SEQ ID NO: 15998 - DNA, 214 bp, Homo sapiens
  source 1..214: mol_type = other DNA
tgtgccactgcatggcagcctgggcgacagagtgaacaacaacaaaaaatccctcgcttttttgctggtatcactactatttgccaagcaactgaacaagtaatatgtgctctgaatccccagatcccccgggctcctaggtttctgaggctgactctgatttagtctgaggagcctctgtgcaatccgaattgcgctgtgaatttccctgggg

SEQ ID NO: 15999 - DNA, 433 bp, Homo sapiens
  source 1..433: mol_type = other DNA
gggagtaccatgggaattaaagtctgctgcagtgcaatggggcaactcggggtttctcaggcagccctgggcttccagatgcctgactcccacggaggcatgcccagggatagctggccccactgtgccatctgacggggcggctcccacaaggccttggcacccttccctgtagaaggacttgtgggatggccatctctcaggcccttccagacttaggctaaggttaagataaaactcaggatttaccgggacaggcaatgggtcattcactccctcttccaatatgtactgattgagcagctactacattatcaattttttcttcaccagaaatgacttcttcttagaagaccccagcctggatgggtgggctcccagcacaggcagctggggctctccccaccagccccgtgagacactcacaggttgg

SEQ ID NO: 16000 - DNA, 212 bp, Homo sapiens
  source 1..212: mol_type = other DNA
aacatggagatctctctcaacaaagggacgcctgtcctcagcccagccctcagctgcagccaggccttcagccgcagccctgtccctccaggatgcatggccttgtcctgtgtgggggtggccgagagcactgccccagccctgggtaccttgggcaggaagctggcagaggacagttcaacttcaaacatgggtgacgcaggccccacccg

SEQ ID NO: 16001 - DNA, 459 bp, Homo sapiens
  source 1..459: mol_type = other DNA
ccatggcatcatcccatggcaagatccagtcagatcattgcttattgcaagattcaatcctgtcacagcccctggcttggggagacagatttgagcatgtctccttcccagttgacttgcacaaaatccccaggagacaactttaggctaaactggacacttctccccttcaacctcttgattttgagaggttggaaactttagacattgacatcagttaccattgtaaatagacttatttggtctcaaattcccctgggaaaattagttaacatcaggtcacttcctggactctcctgtttctcctcagtctgagctcagcccatctggggctcctccctctgagaagcctcccaagatcgagctgtgtacagagcgagtcctcgctggccactcggaaggcggcggacgtccgcgccggcgcactagcccagagcggcctggtctccgcccagtggg

SEQ ID NO: 16002 - DNA, 227 bp, Homo sapiens
  source 1..227: mol_type = other DNA
acatacctggcctgtctgaagtttgcctcctccaggaagggaaggcagcattctcccggtgctgtctaccccacacaatgacacttatgtggggaattgtgtcctggctgtgttaaacgcacttttaaccaactttgtcaaaatgctcagctggtaaagttttttttccaggtcattgagaaagaaaaaagcctcccggtcattgctcctctctgtatataaggggc

SEQ ID NO: 16003 - DNA, 215 bp, Homo sapiens
  source 1..215: mol_type = other DNA
accctcccccctccccatggtgcaaggttacaatggaaaggtatataaggggcagctcatgctgctgctctgtcttctccctcgagttgggacccgggaagaaccagctgcctttttgggaggcagccctgcagacatggtaaactcgggcccagcctgactgtggttcccagctgcagaagtggtggggcagaagagggggcgtctcctttcct

SEQ ID NO: 16004 - DNA, 191 bp, Homo sapiens
  source 1..191: mol_type = other DNA
acatacctggcctgtctgaagtttgcctcctccaggaagggaaggcagcattctcccggtcccacacaatgacacttatgtggggaattgtgtcctgagtcccactgtgttaaaagtacttttaaacaactttgtcgaaatgctcagcttgtaaagttttaaattaccctcccccctccccatggtgcaag

SEQ ID NO: 16005 - DNA, 567 bp, Homo sapiens
  source 1..567: mol_type = other DNA
gagcagaaggtaaaatcagttatcctttcagctttcccccagtctctgaccacggcctggggcagctgcagaaggggcaaagaggaggatctgctccagctgcttcctggtcttgccaccagcagtcgggaggccggccatctgccccctgggtgcccagaggagcccggggcttcaaaagtggctagggccccaggccagggagcggttggacccacagatcaacgcactccggcgttagggtgcagaccttctggcaggctgggggcaggcctagaactgctcagcggctcccaccgacaggggccatgcccggggcgcgcagcctctggtgctagccttgggcctcggtctgacgccttcagtcagcgcttcgcaggaagccgactcccaaaccggggcagggggtgtgggccgagggcgaaaccccgcccccaggggtccctgatctttgcccccgccccgggctccgcgcctctcggagaggcatcagcaggcgggcggcgctggttcgctccccacggcgccaggaggaggggcgagggccggcagccccctctcccgcgc

SEQ ID NO: 16006 - DNA, 525 bp, Homo sapiens
  source 1..525: mol_type = other DNA
ttaacatcatggggttgccaaaaacgtaatatttgtggccacctttaaaacaaatgtggttcaaaactggatgagcagaaggtaaaatcagttatcctttcagctttcccccagtctctgaccacggcctggggcagctgcagaaggggcaaagaggaggatctgctccagctgcttcctggtcttgccaccagcagtcgggaggccggccatctgccccctgggtgcccagaggagcccggggcttcaaaagtggctagggccccaggccagggagcggttggacccacagatcaacgcactccggcgttagggtgcagaccttctggcaggctgggggcaggcctagaactgctcagcggctcccaccgacaggggccatgcccggggcgcgcagcctctggtgctagccttgggcctcggtctgacgccttcagtcagcgcttcgcaggaagccgactcccaaaccggggcagggggtgtgggccgagggcgaaaccccgcccccaggggtccctgatcttt

SEQ ID NO: 16007 - DNA, 382 bp, Homo sapiens
  source 1..382: mol_type = other DNA
aaccacgatgactttctagctgagggtcttaggtaaaccaattcctccctaagggggagctgtggggtaccctggaggctgcagggctgacggctctccgccccgttcccaaaggaggaacagcccgagggctcctggagctgcgggcgagctcggaggacactggcgcacctcccccgccggctcacggccgcatccgccacatccgaaggcgccgcgacttcccggagaccccgaagcgtgcgctctcatccgggtcctgcgggcgctggcggaaagaggcgaggcggtgcctccgggggcggggcctccttcggttggcggcctcgggcttcgggagtcctccaagaggccaggtgaggccgtcccgtgatgccccgcg

SEQ ID NO: 16008 - DNA, 475 bp, Homo sapiens
  source 1..475: mol_type = other DNA
gtgtatataaacatgcaagcttggggtctgcatattcagctgagagggttctgaacatcggtgtccttaacaatccggccctcatgtaaacaacagccccaggcaaaggggttagcctgaagagggctcctctccctctgtgggacgtacagggacgactctttcgaggtcgcggtgctgggggaggttcctcggccgccagcgccgccgggcccactcctgcccggccgcccccggggcggcgggcctccctaggccgcggctccccccctcgccggggtctccggccccggcagcctcaccggtcacgcagccgttcacggcggtgggcttccgtcgggactctgccgctgcctccgccccagagacacgttgcaggccagagcggccggggcgcggggcatcacgggacggcctcacctggcctcttggaggactcccgaagcccgaggccgccaaccgaaggaggccccgc

SEQ ID NO: 16009 - DNA, 264 bp, Homo sapiens
  source 1..264: mol_type = other DNA
gggcggagagccgtcagccctgcagcctccagggtaccccacagctcccccttagggaggaattggtttacctaagaccctcagctagaaagtcatcgtggttcactctgtagaaaaactagacattctagagctctctgagtctgtttcccagaagtaaaatgggtcacaaacctcattcccttcccttttgcaacagtgaggagtagcccatgtactagagtttggacttggaccgaagtctggggcagctccctaattact

SEQ ID NO: 16010 - DNA, 453 bp, Homo sapiens
  source 1..453: mol_type = other DNA
gaattggagcccaagcctcaatgcaggaagccacactgttgccttctgctgctgaaagcagggccgctcagggctttaagcatttgccatgcctgaaaccagagttggtttctgggtttatcaaggacttgtggaaatctcaaaataaatttttttctctggactttccccagaggaagagaaagcagaatggagacagctgaggggcatcacctctccagtgaagattagccccatagagcttactctatggggaagaacttccttcttatcttagaacccaaggcctgggtgttgaggggagaggaatcccaggactctgggtcttgggccttggcatctggccttcgccagggccagccatagccttgagtgtctgggcagggtggggcctcagtcattgtgactgaagatcaggcccacccaggcattgaggcctcgggcggggggtgg

SEQ ID NO: 16011 - DNA, 411 bp, Homo sapiens
  source 1..411: mol_type = other DNA
gggaattattcctattctacaggagttatgcagaaacgagtggagactcacaagctctgcggacatcgtcccggcttccggaagccggctttaaattccggaagtaaatggaggaggcgggccccgtctgcgccgtgcggcctgcagtctggccgccatgttggagctttcgctgttcggggcccggcctgctccgggccctcccagcgtcgccgctagctgacttagggctcccgcccacactgcgcacggccttgctgagggccggctcgtagtggccgcctcgatgagaggcggggctgatgcatcgcagcagtcctggaccccagcttggcgcgctgggagccggccacccctggtctccggacttcacttcccaggaggcctcgcgcgcgactggaagtggaaggc

SEQ ID NO: 16012 - DNA, 431 bp, Homo sapiens
  source 1..431: mol_type = other DNA
aaaaaggctctactccaaactcttgcagtgttacttttataatttagaactacaaataaatgaaggggtagaaaatcagtttgttgctctccctccccgatggactgggggacttcaagaatcttgaggaccagatttaggatactgaggaaacctaggctgtgcctaggtccggctcaggtgtccaaagaaccgttccaggcacccgaggggtgatccccactttctaattcgaacccaggtccctgaactcccagccccgggatcccagtgggacgaagtgaggccgggatctccggaacccgcctctcgctaccaggcgccggagctgccgctcccgaggttcctaggactgaatgcctacagccggctggcaatgccgccccagagcagagcggcgggtgccgcctcgccttccacttccagtcgcg

SEQ ID NO: 16013 - DNA, 237 bp, Homo sapiens
  source 1..237: mol_type = other DNA
attaaattttagagagagagagagtgtctcgctctgtcgccaggctggcccaagtagctgggacgcgcccggccgcattaatagctactacaaggtgggaattattcctattctacaggagttatgcagaaacgagtggagactcacaagctctgcggacatcgtcccggcttccggaagccggctttaaattccggaagtaaatggaggaggcgggccccgtctgcgccgtgcggc

SEQ ID NO: 16014 - DNA, 556 bp, Homo sapiens
  source 1..556: mol_type = other DNA
gcctccggctcaggtgtccaaagaaccgttccaggcacccgaggggtgatccccactttctaattcgaacccaggtccctgaactcccagccccgggatcccagtgggacgaagtgaggccgggatctccggaacccgcctctcgctaccaggcgccggagctgccgctcccgaggttcctaggactgaatgcctacagccggctggcaatgccgccccagagcagagcggcgggtgccgcctcgccttccacttccagtcgcgcgcgaggcctcctgggaagtgaagtccggagaccaggggtggccggctcccagcgcgccaagctggggtccaggactgctgcgatgcatcagccccgcctctcatcgaggcggccactacgagccggccctcagcaaggccgtgcgcagtgtgggcgggagccctaagtcagctagcggcgacgctgggagggcccggagcaggccgggccccgaacagcgaaagctccaacatggcggccagactgcaggccgcacggcgcagacggggcccgcctcctccatttacttcc

SEQ ID NO: 16015 - DNA, 441 bp, Homo sapiens
  source 1..441: mol_type = other DNA
acagagtctcactgtcgcccaggctggagtgcggtggcgcgatctcagctcactgcaaagtagctgtaactactggcgcgcgccctgacctcaggtgatccatcacctcgattacaaaatccggatcaggcaggctttgaagcccagctcacaggccgtctcttggaaactaacttagatttccacctgggagcactttgtcctctcagctcccctggtatttcttgtcttccgttgaaaaaagagaatcgtgggagcaaggtcctcccccgcacccctgaggtcctgcagacgacggcgtcgtgggtggccgagcgagggccacttgcggccaggcccgagctcgtccagctccgggtgaccacagagtgccgcgggcgggcagaggggccggaaacccaggccgcttcgtccctgtttccggcagcgccgcgctgctcc

SEQ ID NO: 16016 - DNA, 302 bp, Homo sapiens
  source 1..302: mol_type = other DNA
gaggccattgcactcttaccctgattgaacgggctaacagccaagacagagtctcactgtcgcccaggctggagtgcggtggcgcgatctcagctcactgcaaagtagctgtaactactggcgcgcgccctgacctcaggtgatccatcacctcgattacaaaatccggatcaggcaggctttgaagcccagctcacaggccgtctcttggaaactaacttagatttccacctgggagcactttgtcctctcagctcccctggtatttcttgtcttccgttgaaaaaagagaatcgtgggag

SEQ ID NO: 16017 - DNA, 481 bp, Homo sapiens
  source 1..481: mol_type = other DNA
gtttatagtgtaaacgcctaaaagaataataagttccagtgttctattacatattagagtgactacagctaataacactgtactgtatatgtcaagatgctagaaaaagatcttgaaaagttattaccgtaaataaatgataaagatttttattcgatgtacacatgtattaaaacattatactcacgtacaattatatgtcaattataaacccgccttccctgggcctgcccttgccctgcgctatcgggcagacccgctgccgcccgcggaacgttctctctcctcaccagcgacgaagtcgagaacactgtcccacctgcaccggaaaccggctgcgcgggcacttccgggaactcctagccgcccggccagccgaccacggcagccacggaggagctgagccggaaggtgcgtccctgcgcatgccgcggtgcgtgtgacgccggcggcggggggggcgggacctggggcggagagc

SEQ ID NO: 16018 - DNA, 570 bp, Homo sapiens
  source 1..570: mol_type = other DNA
ggtaatgattgctaccatcctggcggccccagctcggccccacccgctccgccccgcccccggcctcgcgccgcccaccgctctcccaggccgccgggggtcgctgcccatcaccctcgggcccgacccgggtagcgccgcgtctgcgccgcagctgcctatggcgcgacggaaaagtcccaccctcgggtcctagtggccctaggacggcccgcggcgaagcccgcagcccctatccgctgcactgcctagcccccaaggcggctccggccagagcccccaggtgtcaagcagctccagccgccacccggcccggcgcgccgcagacgagtgccggcccggacccctcttcggcccaacctgcccccgaccgcgcgcccccgttaccgggaatatggcggcggcggcggcgagtccggactaggcccgaagcgcgcgaaccgctctccgccccaggtcccgccccccccgccgccggcgtcacacgcaccgcggcatgcgcagggacgcaccttccggctcagctcctccgtggctgccgtggtcggctggccgggcggctaggagttc

SEQ ID NO: 16019 - DNA, 205 bp, Homo sapiens
  source 1..205: mol_type = other DNA
tcgcgccattgcactctactcaaccctgggagaggccactgggctgtaggatcctctggatcagttccctccctagggagacttgagttctgttagcacttagattcaaacaaaacacattatacatacttttcggggaaggaggatctggggtttcctactccaccatcttcactgaggtcaccaccttgacatcatatcttga

SEQ ID NO: 16020 - DNA, 496 bp, Homo sapiens
  source 1..496: mol_type = other DNA
acctcactgtcccagtggtaaatggggagccaggcttgggacccatgaggctccccgtgcttcctttctaggccccctggggccctgccccacagcatcatgatggggaaactccccctgggggtcgtctccccttatgtgaagatgagttcggggggctacacggaccccctgtgcaccgcctacggtgagggtgcctttgcgcaggagcctctgcggaggggctctctctgagggaggagcagaccctctggctgtcacactgcagagcaactgctggtcactgtgattctgccacactgactttcctgccatcacagtcctgaaagggcaggcttgcaaagctcctgcccgtggctctgagcccttgtcactgtgacccctgtgcccctcggaggacgctggccctgcctgggaaagcccgtggtctcatgccaagccagtctggaggccttagacaacccggccagggggtacggtctgtatggccccttcc

SEQ ID NO: 16021 - DNA, 351 bp, Homo sapiens
  source 1..351: mol_type = other DNA
tctagctatgatggtacctctgtactccaacccaagagcataagatcctgtctctcttaaaaaaaaaaaagagcatttacgcagccctgtgaggtgggtgcagtcaacagatcagatttgaaaactgcgccctttgaatctcaacttgcattttgcttatctaagcctcatgttcccccagtgaaaatggggataatcatagctactgaagagctgctcaggggccggagccctggaagcagggccttgctcgggcagcttctgaccctcccctcctggccaggtcagcccctcagtgggccctggccctagaaggtctcagaagccttgctaggcaccagttgctactcc

SEQ ID NO: 16022 - DNA, 200 bp, Homo sapiens
  source 1..200: mol_type = other DNA
tgcaattgctgttgggtcagcctggccatcatggtgaaagtcccagctacttgggaggctgaggcacaagaattgcactccagccacagagcgagactctgtcggccagctcctccagttgcagctgtctgagggaggagtggtccaggcagtgccactcaggtccttgcaggccaccaggaggacgtggaattcccatg

SEQ ID NO: 16023 - DNA, 704 bp, Homo sapiens
  source 1..704: mol_type = other DNA
aaggagaaggagggatttccttcctaccctccctaggccaaacctcctaccgagggcagggatcttagccctcacctgtgtgcgagcttgcagaaagaccggactggcggaagtccgtctgccccggaccgccgcggtgttgagtccggagctgacgccctcgagggagtggatctccacgccttttggatcggagccaaagggcacctcggaggaggtggccggctctgcggccctgcccggtgccaggccgcggccatcgggggagcacgggctgggggtgggtcgcgcagcggagccggatcccctggccggacgagcccggccgtggggctcggcggccctccccgcggggactgcgaggcgggcggggcgcggggcggcggccgtgccctcggggcggcttcgggcggcggcgggcgcgggtgcagtgcggcgcgcggccggcagcgggcgcaggcggtggctgtggccgcggcgttcggcggctggcgggcggcgccggcggtgccccgggcgcgctcacacacgcgctccggcgcgcacacgcggcgcgcaggccggagggaggcggctcggcgctgttcggcggcggcggcagcgtgctccgcgggcgggcgggagggctggcgggcggcccccgctccccggctccgcggctaggtgcagcccgctcggcccccgccctcggacccgcccccggg

SEQ ID NO: 16024 - DNA, 311 bp, Homo sapiens
  source 1..311: mol_type = other DNA
cctactcaggctcaaggcacgagaatgtcttgatgagatcctgccactgcactccagcctgagtgacagagcaagactctctgtggggtgaccccagggaggtgatgtttcctccacctggtggagaggcttcactaagtacacagctgcggagtacgcccaccgttggccacatccagctgaggagcaggctctgttgcctgctcagcctccaggagagctccgaggacctggcgtgactcccacctgcctccaccctgccggctgcccgtcctctggcaggccacgccccaggcaagccacgcccctga

SEQ ID NO: 16025 - DNA, 552 bp, Homo sapiens
  source 1..552: mol_type = other DNA
agggaggtctctgaaatgagtaaggagaaggagggatttccttcctaccctccctaggccaaacctcctaccgagggcagggatcttagccctcacctgtgtgcgagcttgcagaaagaccggactggcggaagtccgtctgccccggaccgccgcggtgttgagtccggagctgacgccctcgagggagtggatctccacgccttttggatcggagccaaagggcacctcggaggaggtggccggctctgcggccctgcccggtgccaggccgcggccatcgggggagcacgggctgggggtgggtcgcgcagcggagccggatcccctggccggacgagcccggccgtggggctcggcggccctccccgcggggactgcgaggcgggcggggcgcggggcggcggccgtgccctcggggcggcttcgggcggcggcgggcgcgggtgcagtgcggcgcgcggccggcagcgggcgcaggcggtggctgtggccgcggcgttcggcggctggcgggcggcgccggcggtgccccgggcgcgctcacacacg

SEQ ID NO: 16026 - DNA, 380 bp, Homo sapiens
  source 1..380: mol_type = other DNA
caggctggtctcgagctcctgacctcaggtgatccacccgtcaatttcttttttaaagctactaagaaaaaaaaggttctgagagctcagtccctgagatttggagttcaagggccagaaaagtatctgaaaggagctttggctcctttgggggcccattaggaagccatcatcattcatgaatttaccaaaaaggccaccttcttgagtttctgctagctgctcaagctcagcatttccctgattaggaaactgagcctcataaagagtgactcatggctggctctctgagcttagaggcaacagcagccctttctcagagataagaggcaggagagagagggcaaagtccactctcagccccctctgtgaggaggaga

SEQ ID NO: 16027 - DNA, 217 bp, Homo sapiens
  source 1..217: mol_type = other DNA
cctgggtgatgggttcactccagggtgctttgggtgaaggtctcactcagcatcacctagtgacagagaagcaatttgcagctcctcctagagaagtcttacagtgtaggaattgccacttcagcaggtgacttcaccaggccctgagcgcacatgctcccggtgggggcaagtgggatctgttgacactgtgagtcagctgctgagctggaaccag

SEQ ID NO: 16028 - DNA, 503 bp, Homo sapiens
  source 1..503: mol_type = other DNA
agaatgagctccttgaagtcccccagttcagcacagtgctcccagggagggggtacccagggtacccacgggctctgtcgcccgtggggaaggatgggcatttacccttcccattcatcaggatgggagggccacggactccccccacggcagtgccgggtagacccctgcaccacaccgtgagagttcagtcaccccgaggaggtgggacccgtcaaaggaggggcaggcacccaggcggctcccttccccgcacgtccagcccctcccggccgcccacgggaccccagccgagcctgagccaggcgcccaccgcccccacgcgcagggccggcgcccgcggaagactcggctctccctggcctcgacgccgctcccctccctggcgccagggggcgctgcctccccacgaccgtcgccatggtcaccgctggcggcggagaggggtttacgtaaaggacgcagcgtcccccggggggcggaggcggccttcgcgccggcgc

SEQ ID NO: 16029 - DNA, 415 bp, Homo sapiens
  source 1..415: mol_type = other DNA
cccagttgagatcgcgccattgcactccagcgtgtaactgtttaattacaattaaacaaaatgaaaaaatcagtagtgctcacttgtggccagtgactacgtaaaatgcaggtaacaaccctggcacataacacacgttcggacggcgagggcacaggcccttcgcccccaccccgacccgggaaggccccgcgcccctcaagcctgggacggtctcgcgtcccccgacccgggacggccccgcgccccgcaagcctaggactgcccagcgctgagcgccgcctgcaggagtcgggagcgtggtgcccgcggccgggctgggcgcggcgcgggccggcagggggcgctgggcgcggcgggcggggcgcgtggggcgggcaggggccgggccagggacgcgcggggggcaagcgcg

SEQ ID NO: 16030 - DNA, 548 bp, Homo sapiens
  source 1..548: mol_type = other DNA
ctgcgtttgagccttgagcctgctaggtacccagaggacccgcaggccaggctcccttgacctccacactgcctgccccaggacgctgggccctgacagagagcagaggggtgggcctggctggcctggactccctggctccctcctgaccatgggttggggggtgggggctgacgccacggcttagccatgcagcggcctggcggggggaggctgcgctactccctccagagagataccgtctaggagggctgggctggaaacagctcccagcccctgcgatgggggaaggtgtgggtggcccctgaggcctagggtctccaggccacttgggaggggaaggcccatgtggcagtccctgtgctctcggctctgggctgcagcacagcgcgccccctcacctgacgtggtccccctccctgggcacacaccaagcataggtgctgggtcctgccctgtgccggtggtggctttggacctcaggtgggaggccgggacagagcggccccctcgaggctggtacagccgggcccccgtgaccgcccggc

SEQ ID NO: 16031 - DNA, 487 bp, Homo sapiens
  source 1..487: mol_type = other DNA
gtttattttctcgtctacagaagaagaacgattcagggctgctgccagggttaactgagacaacattgcctcaagccggccgcgctgctggagtgtggactgattattaccgcttttctacaatggaggaaagagaggctccttacgcgactggcactccagaccccggctccccacggcccccagcgccaagcggaccccgtcgctcccggaggcgcttcccatggggtgacacgcggcctcggcggctaaagcttggttcggggttgccccgggcaggcggtcctaagctcgctctcccttctcagcttagcggcgggtggcctgacgttcagccgccttcccacgtgacctgctcgccacgcacagcctcttggggcgcgtagtgcaggctgcgtcccctcagacggctgctctcctccagggagaacagagtctctcagcgaccctggcaagtccctcaatgccacttgcgccggaggcactt

SEQ ID NO: 16032 - DNA, 331 bp, Homo sapiens
  source 1..331: mol_type = other DNA
tttcttgcttccttcctaaggctgtagggaaacgtaaagatctgtacaaatgttaacttcataatcactgccatttattgagcttccaattacgggccctctgtttggggtctggccaaatttgcccagggcattgtaggatgggccttagaaatcgcgagctgagaaggatggcaaggggcttcccccttccccacccttaagccggaggttccaggagcgtctagccctctggatctccggcgtctgaggagataagcgcggtgtgggtcagaccccgaggggtcctcgcatctccccgctccgccaccggaaggaagtgcctccggcg

SEQ ID NO: 16033 - DNA, 398 bp, Homo sapiens
  source 1..398: mol_type = other DNA
aatcactgccatttattgagcttccaattacgggccctctgtttggggtctggccaaatttgcccagggcattgtaggatgggccttagaaatcgcgagctgagaaggatggcaaggggcttcccccttccccacccttaagccggaggttccaggagcgtctagccctctggatctccggcgtctgaggagataagcgcggtgtgggtcagaccccgaggggtcctcgcatctccccgctccgccaccggaaggaagtgcctccggcgcaagtggcattgagggacttgccagggtcgctgagagactctgttctccctggaggagagcagccgtctgaggggacgcagcctgcactacgcgccccaagaggctgtgcgtggcgagcaggtcacgtg

SEQ ID NO: 16034 - DNA, 296 bp, Homo sapiens
  source 1..296: mol_type = other DNA
gaagtgcaatactcttttgttataataaaagtagaaactgtttgcaatcctttttcaaggctgccttattagtcagggttctccagagactcaaaacaaatcagatctgtttgtttagctctcaagccaggccaagcatcctggccttcttttttttgtgtaataaataatgctgctaccttagaatatcaacagtatcttaagttggtgagataacaccagttataacctgacatcaagagctactttggccgtaaggtggccattgatgcctctatgagcatttatcagttcct

SEQ ID NO: 16035 - DNA, 471 bp, Homo sapiens
  source 1..471: mol_type = other DNA
gactcaaaacaaatcagatctgtttgtttagctctcaagccaggccaagcatcctggccttcttttttttgtgtaataaataatgctgctaccttagaatatcaacagtatcttaagttggtgagataacaccagttataacctgacatcaagagctactttggccgtaaggtggccattgatgcctctatgagcatttatcagttcctggagggtgagaccaccagccacctgatgggcatgttctaccgcaccattcgcatgatggagaacggcatcaagcccgtgtatgtctggcaagccgccacagctcaagtcaggcgagctggccaaacagcggcgggctgaggcagagaagcagctgcagcaggctcaggctgctggggccgagcgctggtgaaggtcactaagcagcacaatgatgagtgaggcagaggccagctgtgctgccctggtgaaggctggcaaagt

SEQ ID NO: 16036 - DNA, 509 bp, Homo sapiens
  source 1..509: mol_type = other DNA
tgacatcaagagctactttggccgtaaggtggccattgatgcctctatgagcatttatcagttcctggagggtgagaccaccagccacctgatgggcatgttctaccgcaccattcgcatgatggagaacggcatcaagcccgtgtatgtctggcaagccgccacagctcaagtcaggcgagctggccaaacagcggcgggctgaggcagagaagcagctgcagcaggctcaggctgctggggccgagcgctggtgaaggtcactaagcagcacaatgatgagtgaggcagaggccagctgtgctgccctggtgaaggctggcaaagtctatgctgcggctaccgaggacatggactgcctcaccttcggcagccgaattccacctgagccggattctgcaggagctgggcctgaaccaggaacagtttgtggatctgtattgggcccaagcgggctgtggacctcatccagaccagctcttcttggaacctgaggtgctggacccaga

SEQ ID NO: 16037 - DNA, 433 bp, Homo sapiens
  source 1..433: mol_type = other DNA
ccgccacagctcaagtcaggcgagctggccaaacagcggcgggctgaggcagagaagcagctgcagcaggctcaggctgctggggccgagcgctggtgaaggtcactaagcagcacaatgatgagtgaggcagaggccagctgtgctgccctggtgaaggctggcaaagtctatgctgcggctaccgaggacatggactgcctcaccttcggcagccgaattccacctgagccggattctgcaggagctgggcctgaaccaggaacagtttgtggatctgtattgggcccaagcgggctgtggacctcatccagaccagctcttcttggaacctgaggtgctggacccagagccgccaaggcagcacccagggccgcctggatgatttcttcaaggtgaccaaaggggaaaataaatgtgtttccccattaag

SEQ ID NO: 16038 - DNA, 296 bp, Homo sapiens
  source 1..296: mol_type = other DNA
gaattccacctgagccggattctgcaggagctgggcctgaaccaggaacagtttgtggatctgtattgggcccaagcgggctgtggacctcatccagaccagctcttcttggaacctgaggtgctggacccagagccgccaaggcagcacccagggccgcctggatgatttcttcaaggtgaccaaaggggaaaataaatgtgtttccccattaagctagacttgatcttaatggcaagaaggccacagaggtacttttccttttttagctcaggaaaatatgttcctggctggcc

SEQ ID NO: 16039 - DNA, 443 bp, Homo sapiens
  source 1..443: mol_type = other DNA
ctctggcctcgcccactaggctggtcgcgtcagagggtggggcgggtcttcgccccgcagcgtctaagctctgctgcgacgctggtgacccgcggcacactctggggtccctaggactgagtccccaggactccaacccagcagagaggcgccggggccttagctctgagggctgagcaggcctggggctggggcgcgcgccgaccccgcagtggcggtccgctccgcggatcgctggcctgcggctcagtggcctccccggcgattcgagaacagctctgggggccgcttgccctccccggccagcgcctctccgctcctgctggcgagtggagaccggcacctaggtccagacgcggctgcgctgcctctcctagccatcgagacaggatgtgctcggggttctgtccccgcccagagacctgaggctcggggctgcagag

SEQ ID NO: 16040 - DNA, 545 bp, Homo sapiens
  source 1..545: mol_type = other DNA
aataaaattttggacctaaactttttaggtgcgttctaggcgcctccaatgcctcagcttgaagacccaggcttttcaggtgaaacacctaaggatcgatccgtgaatttttcctgtggggcattttaaatgtttcattgaacaaattaaagcattagatatggcacaattggcggcacgacctggagggtcagcgtctggagaccccggccaaggcatccacaggtgtccgcgaccgcccgggcagctgcagcgcggccccgcacccagggcctgcactagaaccgctgttcctaccgcggcgccccctgggagccaacgccgcgatgcccgcctgacgtcaggaagtcgaatccggcggcgacgcctttagggagcccgcgagggggcgcgtgttggcagcccagctgtgagttgcccaagacccaccgggggacgggatctcgctccccgcgccacgaggctcggccaatgggaacgcgcgctgcgaggcccgccggtctgccctgcggtgctgaaaacccggcgcgcaggcggctggctct

SEQ ID NO: 16041 - DNA, 392 bp, Homo sapiens
  source 1..392: mol_type = other DNA
agagttcagagcacaggccagggtaatcttaattgttccaacctcatagggttgttaggagaattaaatgagttaaggtttgcaaaacgctaagaacagtgcctggcacacagtaagtgctttataaagtgtttgttgaataaataaaattttggacctaaactctgttttaggtgcgttctaggcgcctccaatgcctcagcttgaagacccaggcttttcaggtgaaacacctaaggatcgatccgtgaatttttcctgtggggcattttaaatgtttcattgaacaaattaaagcattagatatggcacaattggcggcacgacctggagggtcagcgtctggagaccccggccaaggcatccacaggtgtccgcgaccgcccgggcag

SEQ ID NO: 16042 - DNA, 372 bp, Homo sapiens
  source 1..372: mol_type = other DNA
acctctcagcctgtgatgagaatctaatgattagggtgtgctagcacacaggcacctgtaaatcccattgaaatctgagggccccgcccggcactaagccgccccatccagctggggtctgaggggcctgtctcttgccccaggagtctgcacaacatcactggggcaaggaccgcgccagaaagcagagcagaggttccgcaattcttttctaagattgtccccactggagtctcgactgccgcgcgccaaggaagggcccaagccggccctggagttgagtgccccgcagcccgccggtccacccgcccggccgcttgctggcaccctggtggccgcgccggctttgtgtcggcatcaggtgcaaacccc

SEQ ID NO: 16043 - DNA, 544 bp, Homo sapiens
  source 1..544: mol_type = other DNA
cggcactaagccgccccatccagctggggtctgaggggcctgtctcttgccccaggagtctgcacaacatcactggggcaaggaccgcgccagaaagcagagcagaggttccgcaattcttttctaagattgtccccactggagtctcgactgccgcgcgccaaggaagggcccaagccggccctggagttgagtgccccgcagcccgccggtccacccgcccggccgcttgctggcaccctggtggccgcgccggctttgtgtcggcatcaggtgcaaacccccagagcgccgggcgtgcgcgcacgcgccccggagcgcgcggagcccattcgttgcccccaccgggatctcctctaggatctcctccggcgcccggggccggagagtgggggagggaggaggtcggacacgtagcctgcctcgcagcagggctcgactccacgcgggagggcgggggagccggggacccgccgctccagcccgctggccttcctgggccaatggcaggcggggcgacgcgaccggattggtgcaggcgctc

SEQ ID NO: 16044 - DNA, 477 bp, Homo sapiens
  source 1..477: mol_type = other DNA
aggaccgcgccagaaagcagagcagaggttccgcaattcttttctaagattgtccccactggagtctcgactgccgcgcgccaaggaagggcccaagccggccctggagttgagtgccccgcagcccgccggtccacccgcccggccgcttgctggcaccctggtggccgcgccggctttgtgtcggcatcaggtgcaaacccccagagcgccgggcgtgcgcgcacgcgccccggagcgcgcggagcccattcgttgcccccaccgggatctcctctaggatctcctccggcgcccggggccggagagtgggggagggaggaggtcggacacgtagcctgcctcgcagcagggctcgactccacgcgggagggcgggggagccggggacccgccgctccagcccgctggccttcctgggccaatggcaggcggggcgacgcgaccggattggtgcaggcgctcctcccgcccgagc

SEQ ID NO: 16045 - DNA, 150 bp, Homo sapiens
  source 1..150: mol_type = other DNA
ggcctggacaggacaggaacaacccaacctcctcactgggccgcgtaaagggaatttcagtccacaccacctgtccattgtccagcttgggctccaggtggaatgatctacgtcaagttaggatttcagactggggtccccggtgcgtct

SEQ ID NO: 16046 - DNA, 665 bp, Homo sapiens
  source 1..665: mol_type = other DNA
cgcctgtagtcccagctggggactcccgagactgaggtgggggtatctcctgagcttaggatgttagccgacatcatgccactacccatggatggcagcgcccgcctccacgccacccctgggcatccccagccctgcagcgccgagggcggaggggaggccacccgcccccagcagagggctccgagagagctgcagcggcggtgggggccccgcagagattggggcccacacaggcaccccgagacagcgtcccccctctgggcgcactggatcgttgcaggacgcgcggctggaagccccccaggccccgctgctcacagaccgggactccgcctccggttcccgagggcgtggcgaggcgctgcgggacgcccaacaggtgcgtgttgtgtccccaggccccgcgctccgggtggagtcaagaacctggaagccggcagcccggggggcgggacggtgccccggggcagggctgggtggcggccgctgtcctcccgggaggggcgggccgcctcgacgccgccctccctggcggccaatggagaccgaggccccgcgcctggattggagcggacgcggggggtcagccagccttgggggccggggcctggccgggggcgggggggcaggcgaggcgaggcgggcgccgtccgcgcggtagg

SEQ ID NO: 16047 - DNA, 396 bp, Homo sapiens
  source 1..396: mol_type = other DNA
tgcacccccacacacatgtgccaggttggggtagggcccaggcagccccggtgcctgatgacatcatgggccttgctggatgtcctgacaagcaaaggcaggagctcctggtaccagggagaactcgccccctctagcatatcagagaaatatacttagggttttctaagtgcatccaccgaataaccctcctgggtggttctgatggaagctggaagtaactacttttaggaacaggtatatttatcacaaagaaggacttgaatgtatttaaattaaaaaaacgcctgtagtcccagctggggactcccgagactgaggtgggggtatctcctgagcttaggatgttagccgacatcatgccactacccatggatggcagcgcccgcctccacg

SEQ ID NO: 16048 - DNA, 331 bp, Homo sapiens
  source 1..331: mol_type = other DNA
ctgcggcctgagtcagtgggcctgggtagcactgggacctctggtagcacctaggggacgctcccagtcctcccctagacagggaaggtgggagccatggtacctgggacgggttctgctcttactggtccagtcaaaactcagagagtaggactcagaaaacttgtttcgagcgcggcgcggcccgcgggatgttgggggccgggttccctccgagcgccgtggtctccctgtcccggcgcggcgggccgggtggggccaggccttgggagcgcgcgccggatcccagcgccgggccggcggaggggcggggccgggcacgtgtcctcgg

SEQ ID NO: 16049 - DNA, 403 bp, Homo sapiens
  source 1..403: mol_type = other DNA
cccatctctccaaaaggcagtttgaggctgccctccagcctgggtgacgaaaataaagaaaaaaaataaaaaataacagttttttgtttgtttgttttgtttttcctcaggctcccgagtagctgagattacaggcagaactgctgacttcaggtcaaggcaggagggcctgtctagggctacacagccagctatgacagctatgagctggacgggctctttccaacaccccagcctgcgtggtgaggggacatctgggagcctggctgaaacacggggcctcccctagaggtgtctcacctcccctggcccagagcccaggaaggagggcccagtgtcttctgctgcctgaggagccacaggagtctgtcctgggaggtggtgcctccctcccaggctgctg

SEQ ID NO: 16050 - DNA, 369 bp, Homo sapiens
  source 1..369: mol_type = other DNA
atctgattcctgcctgtacgtattcatagtcaaaaaatttgtctgtgccaagtgcacagaggtcagggaaatttctattcctgaaggatgattcagtatcgcatgtttatccacattttacaaaggaggacactgaagctcaaggcctgccttgtccaaatggcttgagactaggatctaggtctacagtaaaggtcagtttctgagaggtagagtctatgaaagatctggagtgcagtggcatgatcttggctcagccactgtgcctggccgcatgagcagattccaagctctcgagctccccagcagagagccatctcttggggcagcagggcaatgctatggccttctcatcgagcatcacagagg

SEQ ID NO: 16051 - DNA, 377 bp, Homo sapiens
  source 1..377: mol_type = other DNA
tttttttttctaggcagataattatataaaggtatacctatgtaacaaacctgcacatcatgtatacctatgtaacaaacctgtacattctgcacacgtatccgacacaaggtcatattataaaatcagggcttctggaagttcagactctggcccgtttaatagctctgctctcttcattgaacaatacaagaggagtgtgtaggtagacacccaccacgtatggattgatgtattaaaatttattgaatcacatgctgagattttcaccagctgcccgtggggatctgggcatttattcccatattgcactggctggctggaagccagctcagcatatgcagaattctgtcattttactagggtgatgaaattcc

SEQ ID NO: 16052 - DNA, 438 bp, Homo sapiens
  source 1..438: mol_type = other DNA
gctctgctctcttcattgaacaatacaagaggagtgtgtaggtagacacccaccacgtatggattgatgtattaaaatttattgaatcacatgctgagattttcaccagctgcccgtggggatctgggcatttattcccatattgcactggctggctggaagccagctcagcatatgcagaattctgtcattttactagggtgatgaaattcccaagcaacaccatcctgaccagaaaccaggactgttgactgcagcccggagcccacagggctgtcaaagaccccagggcctagtggcctcaggggtcagattagaggggccatggccaggctgtgctagccgttgcttcagaagggactaagacaaggactcctttgtggaggtcctggctgtgacggcggctcagcactcacgtgggcagtgccagcctctaag

SEQ ID NO: 16053 - DNA, 386 bp, Homo sapiens
  source 1..386: mol_type = other DNA
tgatctcagctcaccaggctggtctcataggcatgagactgcgcccagtgctttcttgcgtttctacttccaaaaggcagtcagaactggcagggccctcctagggtcccagggaagggtcctgacaggctctgaccagggcctctgaccaagtggctaatgcccgcttaggccgcctgctgctgtgctggcggggcagcatctacaagctgctatatgggctttatttataggtatggggctgggagctcctgggggcctcccagccagctcaggtaagctgagctcctgaccaggtcctgggcactggagctgaggctgggctcaagccaggccagcagggttttagccaccctccaggaggacccctggagcccaggctttgt

SEQ ID NO: 16054 - DNA, 562 bp, Homo sapiens
  source 1..562: mol_type = other DNA
caccccagggttgtcctacagggccaccgaagcctgaagctcctgtgagtggggccgataagaggccattttgaaaagtcctttgggtgcgaagcgacaccagcgattctctcggaggccccggtggctcacccccacgactccccggggaggcggtccccatccctagggaaacccggcccgcatttgctttcagcagggcaggggcggacccgaaacccgccgtgcgccccactcgctccttcctggactctgaggaagagaaaatgtaacaccatgccccgggccaggagcctcagggtgcccgtcccccgccggttccaacgcccgggcgcccctagaccggggggggggttctgaggtggacttcctgcgcctccgccaccgctgtcccagaggcagtcggctaccggtccccgctcccgagctccgccagagcgcgcgagggcctccagcggccgcccctcccccacagcaggggcggggtcccgcgcccaccggaaggagcgggctcggggcgggcggcgctgattggccggggcgggcctgacgccgacgcggc

SEQ ID NO: 16055 - DNA, 341 bp, Homo sapiens
  source 1..341: mol_type = other DNA
ctgcctagaagcgaagaccagtgatgcctgtttgcctccagacaccccagcagctccttgggtaaaaaaagttgggcaatttaatcatcccatcagccctatgaggagatatctgaaacacgtgtggctgattgtcagacatgcagaatgagaacagggaacattgccagaggcacctggacactcacctggagcacagagcagagtttctgcagggctgccctcccgtgctccgccccactcgcagccctggctaggaagggagggctggaagccaggcctcatcacctgccagatgcccatgtgggcaggaccagccaggctccctaggtacaaatagc

SEQ ID NO: 16056 - DNA, 663 bp, Homo sapiens
  source 1..663: mol_type = other DNA
caacttgaaaccttgatttagtaaaacatctcaatgtttagatcctttgtccaatggtagtatttatcagatgtattcagcttgaagaaaaataagaaaacgtcccatgtttggatcttgttctacttgtaaagattaaattgaaatgattaggcttttcgattcatgagccaaataccgtaacaccctgagatttcaggaagtggggttacagttacactccttatagctgctaagtgtattaagttgaatgcataatattgtttgaattgagccccactaccaattctttaaaaaatggcatgaattcctatacgtaaatgatttggtggaactattccatcataatttctaaattgtttatataccaaggtagccttaatttgtatatgtttcagtacaatgaaattttatttctcatgggaagaggaacctatgacttctgtacctagataatttgttacattaaaaagctggtctttcagcaatgtaagtatatacatacatgtttttatgaggaaaaaaaaaaagccgcgcgtggccttcgcagtgctcgccgggactcgtagttccaggtctgcgggctcctcccaggcggggatctacttcctctctcggccgcggccgcagcacccggaagctgagggggcttaaagaatagcg

SEQ ID NO: 16057 - DNA, 556 bp, Homo sapiens
  source 1..556: mol_type = other DNA
atatattgtaaaataaatttgtaaagttgaattaacttagtgttgtaattcttaacaagaataacaagaagctttcagtagaggttagatattaatgttttccccaaaacttaaagcacttttcggggctcgccaggtgtcctggcgcatgcctgtaatcccagctacccaggaggctgaggcagagaatttctggaacggaggctgcagtgagccaagatcgcactgcctggatagagtgagactctgtctcaaaaaacccgcttttctgaaaaagaaatgtctatggattaggaaggtctgcctcccataggaagatgcagatatttgatgattccaggaccggcagatacacaagttatgaaactgtttgaacattgttgagaccaagccactgggttttgctttatattttggaaaacactgtcacatccattttactaaaagtttctacaaacagagcacaggctggctgtgtttacactattgtgtcctggtcccatgccaggttgacacattgcctcattcctgggagggactaaggtgcctccctggg

SEQ ID NO: 16058 - DNA, 257 bp, Homo sapiens
  source 1..257: mol_type = other DNA
tgggtatatacccaaaggattataaatcatgctgctataaagacgcatgcacacgtatgtttattgcagcactataaaaaatgatgagttcatgtcctttgtagggatggcacatgtatacatatgtagctaacctgcacgttgtaagagagagaaatttctagtgattgattttctattaaaaataggctgcacagctagatttgaagtgaagaggttggggggaagtgaccactcaccctgatcatatttatagc

SEQ ID NO: 16059 - DNA, 358 bp, Homo sapiens
  source 1..358: mol_type = other DNA
ttctattaaaaataggctgcacagctagatttgaagtgaagaggttggggggaagtgaccactcaccctgatcatatttatagctgcactcataaacaagactcaggtaacaggtgcagcagttgcttttccccaggagacttgctcaatgtgcaactgaaacaagcctactggttgtcagacatgcaggcccaggaatatttccagaggtgcctgaacattcacctggaacacagagcagagttcctgcagggctaccctcctgtgctctgccccagtcagagtgcagggaggcgtaggtgggctgggagccaggcctcatgaccagtaccagctagactccctaggtacaaatagc

SEQ ID NO: 16060 - DNA, 346 bp, Homo sapiens
  source 1..346: mol_type = other DNA
tgacctcaggtgattcacccacccatgaaacaatctttacatgaagcatccttatacaaattctgcatgccgccttttattttcttcaagtgatgaaaaggaatggcaggactgcaagttgcatccagggtccaataattcacagcatcctttgaatcacaaagaactaaacaaagttatcaattaatttataattaaccgagataatccttgtaaaaataactttactttcccagacatccctttctgaaaatgagatgtcaggtattgcacctaggcccactgctggtttcattctcaccttaaagaaagagacaggattctacatacaggctggctgtgtttc

SEQ ID NO: 16061 - DNA, 429 bp, Homo sapiens
  source 1..429: mol_type = other DNA
ggggttagggggaagtgaccacccaccctgcccctcttgagaaaaagagttaggttatttaatctaagcttgctttttatagatagaaaatgtgaatcttggccatatatataactgcacgtataaacaagagaacaggtgcagcagatgtttttcctcagcatatcttctaattagactttcccaatgtgcaactgaaacaagcctgcttgttgtcagacatgcagggggatcaaagcagggtctccttatgtccctgctctcatcccaggaacatttccagatgtacctgaacactcacctggagcacagagcagagttctcacaaggctgctgtcttgtgagcagccctggcttggaagggcgggctgggagccaggcctcatgacctaccaggtgccccggtaggtaggaccagccaggctccct

SEQ ID NO: 16062 - DNA, 203 bp, Homo sapiens
  source 1..203: mol_type = other DNA
gaacagacccagcctggggcagggctcggtcccttttattctgcttcaatccaggggcccccgccctcctcagaggggagcctatgaaaggtcgagtcctactgccccagtgcccaggttcagtgagtgacacaggcagctgggcaggttgtgtgagctcagtttcagtggggggttgagaaaagggaatatttacctatccc

SEQ ID NO: 16063 - DNA, 292 bp, Homo sapiens
  source 1..292: mol_type = other DNA
aagacagattctcttctggagcttcccgaaggaactcaacagtttgaatttctgccaataaatttgtggtaatctctaacaataggtcactagaaagggaatgactaagggaaaggactctcctatccacaggagatcggctggagtgcaatggcgcgattgcttttcaatctgcaattacaaaatcgtggcatgccactagcctggtcaggagcaggaggttccccgcgtgccaccaggaagctcgggccggccggaactgggccgtgcggcggtcccgccctcgtgcgca

SEQ ID NO: 16064 - DNA, 386 bp, Homo sapiens
  source 1..386: mol_type = other DNA
gggagtgtgtagccagaaggcccccgcaccccatcattaaacgtttaataaaatctcgaagcgtcccctgggcgtcgggtccgctgtccaacgcccggggtcctcacccccgtatgcccgcggcctgcgcagcaccgcggtgcgcgaggcactggtgaccccggctcctggggctgaatcacccagctcgcagttccagcagcaggtccaggtccgggacagggcggggagggggggaaagaatgtccccgcgtcccccagcggcccgggtccctccagggtctgccccgctcgccagtcccagccccgctccggccccgcccggccccgccctctccccacagctccgggcagacccgcccgcccgagccggagttacaagagcc

SEQ ID NO: 16065 - DNA, 416 bp, Homo sapiens
  source 1..416: mol_type = other DNA
tctccgcaaatttcctgccggcaaggtgagttgggggttctgagaaaccaaggcccccatctctaaaagggagtttcggtgattttattttgagataaatacagatttacatgtagttgtgaaaaaaaatacagagctattctgtgactttataaaattcacgagtttagaatgagttttgactaagcattttcagtgcaaatatatcagatatctgttatgagcagaattcttaccccagtgtgggtctgggtcacacactaatactttaacagatttcatacaaatatcctgtaatattcaaatctattgggcttcctagttaacattgtgaattcagattgcaaagtggttcttgagtatcaagagtttggatagtgagaatcatcagccttatataactccaggacctggac

SEQ ID NO: 16066 - DNA, 183 bp, Homo sapiens
  source 1..183: mol_type = other DNA
gtccgaagcctgagtgaagtcagaccaattggactccgctggccggcatgacggcatgccatcccctatctctggaagttctggatttcttccctgattacatatgacaagtactaattcaggaaagtcatcctggagagtggcattaaggactgggaactggagggccttcaaggctctcat

SEQ ID NO: 16067 - DNA, 415 bp, Homo sapiens
  source 1..415: mol_type = other DNA
tctcctttaaacgaggagagttcatcccgttcttaaactgggtaagagatttcaaacctgaacatcttccagcgtcagcccctccaggggccgagtccggaggaggtgggagggacagggcgcgttctccctcatgtccctgccctgcttcgggccggagggccggtgccctgctcgcagtaacagcaccctggagctgtcagcagaccggggcccctgttagacgctctgttcctcgctcccatgagtttcatagaatcatgtgagttgtccctgggagggccagagagggacgcccccagtagcactggccgcgccgggccaagcccgctgcacctggggggcgggccagtcaagagctccaatgcgcaggcccgagctttttccgcgctggccaactggggtactttgcggc

SEQ ID NO: 16068 - DNA, 473 bp, Homo sapiens
  source 1..473: mol_type = other DNA
ccctgctgtccctgcgggagggtcaggcactgcctgtggcagggggcctgccttctaatctctgggagggtctgcgcctgagtcacaatgtcgcagccaatgtgaccagccgggtggctgggcgcctacagaactgctgccgagcagcagccaattccagtaccagcgccgttcctcccggggtcgggactgggggctgctccctcttctgcagcccacccagctcactgctgccctggtgcaggtattcagggaagcactggggtgcaggactgggccatgcagagccctgggcagccaggggacctgcccctgaccactgggaggggcagcccagccacgcagccctggcagagcgggggccggtgaggcagggaagggggcatccctgccctcctcagcgagctggcgctgtgccttgtggcaccgagtgtggcaagggcggcggcgagcccgtagacgcttgcagcagc

SEQ ID NO: 16069 - DNA, 421 bp, Homo sapiens
  source 1..421: mol_type = other DNA
tgtgacttgttcaaggtcaaagaccttggtgttgtgggctgataaccacagcacaagctgctgagcccatctgatattgacagcattcgccccctccagtgtctaaactcagttacttgctctgaggtgcgccagtagctctggcgcctccggcgtacaccacgcagccctgggcctggctccaggacctcgtggagtccggaaggtgcccggtggtggcagagctccccaaccagggctagaagccgtcgcagaacacccgttttgcgggcaagcccaagccgccgatcctccgcctttattcgtcgggctgccgcaagatgccacccggcgccggcctttgtgggatgctttgggccaatcaacgtctgagcttaaagccgcatgcagatataacgcgccgcttttcctgaaacgggcg

SEQ ID NO: 16070 - DNA, 596 bp, Homo sapiens
  source 1..596: mol_type = other DNA
ggagccacgtgaccgcacgacgactcgcacctcgtctcgctgggcggaggacgccagcatcttccagtggcgagtgctgggcgctgggggcgcggggccggcgcccgccacgccctctcgaaccccccgctgcctggcgggaccgactggcccggcggcgtggccccgccccgccctgccctttcgagacattcccgatcgcgcattttcctggagggcgcgaacggcgcccctgcacacactgtttagacccgctggctgagccgggcagccccagcctaggccttgactcccgctgccggcgctgccgggcgcctccggggctctagcgctaaggcgcgcgagtctttggggcgcgaggggctccagcgaggacgttaagcccgactcctctcccgccctcggaaaagggggtggggccggaacttcttccggaagccgagcagtgggccgttctccggatcggccgacgaaccctgaggcgggcccggcaagccttccctgcggccggcagagcccaacgactagtgggccgcgggggcgggggtagctggagcctggctctggcctggcaggagccgagctcgttccggaag

SEQ ID NO: 16071 - DNA, 611 bp, Homo sapiens
  source 1..611: mol_type = other DNA
tgccgctcccacaacgagcgcgtggtggcggtggccgacgacttctgcaaagtcgtgccaaggtgaggccgcggggatcgccggggtgggaccggtgggcccgagggctcagccgccaccgcaactcttccctccggcccaggcgccgagccgcatgtacgggggccacggcagccacgtgaccagcggcacgacgactcgcacctcgtctcgctgggcggaggacgccagcatcttccagtggcgagtgctgggcgctgggggcgcggggccggcgcccgccacgccctctcgaaccccccgctgcctggcgggaccgactggcccggcggcgtggccccgccccgccctgccctttcgagacattcccgatcgcgcattttcctggagggcgcgaacggcgcccctgcacacactgtttagacccgctggctgagccgggcagccccagcctaggccttgactcccgctgccggcgctgccgggcgcctccggggctctagcgctaaggcgcgcgagtctttggggcgcgaggggctccagcgaggacgttaagcccgactcctctcccgccctcggaaaagggggtggggccggaacttcttccggaa

SEQ ID NO: 16072 - DNA, 611 bp, Homo sapiens
  source 1..611: mol_type = other DNA
tctgccggccgcagggaaggcttgccgggcccgcctcagggttcgtcggccgatccggagaacggcccactgctcggcttccggaagaagttccggccccacccccttttccgagggcgggagaggagtcgggcttaacgtcctcgctggagcccctcgcgccccaaagactcgcgcgccttagcgctagagccccggaggcgcccggcagcgccggcagcgggagtcaaggcctaggctggggctgcccggctcagccagcgggtctaaacagtgtgtgcaggggcgccgttcgcgccctccaggaaaatgcgcgatcgggaatgtctcgaaagggcagggcggggcggggccacgccgccgggccagtcggtcccgccaggcagcggggggttcgagagggcgtggcgggcgccggccccgcgcccccagcgcccagcactcgccactggaagatgctggcgtcctccgcccagcgagacgaggtgcgagtcgtcgtgccgctggtcacgtggctgccgtggcccccgtacatgcggctcggcgcctgggccggagggaagagttgcggtggcggctgagccctcgggcccaccggtcccaccccggcg

SEQ ID NO: 16073 - DNA, 558 bp, Homo sapiens
  source 1..558: mol_type = other DNA
agccagggctagcccgaggcagccaccagcagcgggcccaggacccctcgccagggagtgcccagagccaccgcgcccgctgccagggcagcctggggcaggacaggggcggatgcggggctgcaggggcagcaccaggggcaacaccggcgccatctcccatctctgcccaagggaatgcagagctggggcaggatgctgagtcagcccggcccggcttgagctgggctaatgccaccctgagaaactccgcccctaggccgagggcccgttttgtgaccccgcccctgcccctcgcggaagtggtggggttggtccgctcaaccctgaggggttaggggctggggggcggagatatcggggcgggcgctcccttccccgtcccctgggaatccgggggcggggatccgggaagggcctggagccggaggccgggagtaggccagggggtcagccggctagccccgcccccgtactgagcggcgaggcccggacagggaggggttaccaagcggcccggccccccctcgggcccgccccccctcccgcgcttcctgg

SEQ ID NO: 16074 - DNA, 519 bp, Homo sapiens
  source 1..519: mol_type = other DNA
ggcaggcgagaaagcctccgcaaagactgccgcactggtgagggcagggaccgcagccctccccacgcgcccccagcaagctcaggtctccagcgaaagctgagtatgctcggagcccctggggcggaggagcacgcggggacgcctccaacagccgtccagctctggcataacccgacgagccgggcgctccgggaaggggcacgccgcccgccccgccccgtactcaccgggccccgcggccccgtccatccggcccccgggttgctccgagcggcggcggcggaggaggcgtctaagccgcgggggccacggccggggaagcaccccggggcgcgcgcgaagggcgccgtaccaccaccccgagggggcgctgtcgggcgcggggaaggggcctggagggggcgctgtgggcccggggccgcagtctccagacccccccgggccctcggactctcccggggccgctctcggctcccgggggtggggtggcagggccgtccggtgccacagcgccgc

SEQ ID NO: 16075 - DNA, 758 bp, Homo sapiens
  source 1..758: mol_type = other DNA
tgctcggagcccctggggcggaggagcacgcggggacgcctccaacagccgtccagctctggcataacccgacgagccgggcgctccgggaaggggcacgccgcccgccccgccccgtactcaccgggccccgcggccccgtccatccggcccccgggttgctccgagcggcggcggcggaggaggcgtctaagccgcgggggccacggccggggaagcaccccggggcgcgcgcgaagggcgccgtaccaccaccccgagggggcgctgtcgggcgcggggaaggggcctggagggggcgctgtgggcccggggccgcagtctccagacccccccgggccctcggactctcccggggccgctctcggctcccgggggtggggtggcagggccgtccggtgccacagcgccgcagcacaaacaggcgccggacgcggagccgccaggaagcgcgggagggggggcgggcccgagggggggccgggccgcttggtaacccctccctgtccgggcctcgccgctcagtacgggggcggggctagccggctgaccccctggcctactcccggcctccggctccaggcccttcccggatccccgcccccggattcccaggggacggggaagggagcgcccgccccgatatctccgccccccagcccctaacccctcagggttgagcggaccaaccccaccacttccgcgaggggcaggggcggggtcacaaaacgggccctcggcctaggggcggagtttct

SEQ ID NO: 16076 - DNA, 445 bp, Homo sapiens
  source 1..445: mol_type = other DNA
gtgcagtggcatgatcacggctcatgggactgctgatctgaaactcctgggcttctaaagtgccaggattacaggcatgccactgggccgggcccttttttttttttttaaaggaaaaatgagaaggatgggggatgcattcatggaattccccagctcaggaactatttcccctgttgtcatctgttgaagaaatgtgggccagaggcaaatgacataatttttgtatctcaaagtattatatgagggtaggtaccacgtgcacctactcgaggccggccacgcgagtttggcacgccggatgtgacgtcaccacccggtggttcccggaacctggcggtgggaccccggaagcgtgccctggcggcgctgccagccccagctgggagctggtgggcggagccgctgcaggggcggggcctgcggacaggagccggggtttggg

SEQ ID NO: 16077 - DNA, 406 bp, Homo sapiens
  source 1..406: mol_type = other DNA
caagtcagagattattttaccagaaacttttttggtctcacccagtcacccaagctggagtgcagtggcatgatcacggctcatgggactgctgatctgaaactcctgggcttctaaagtgccaggattacaggcatgccactgggccgggcccttttttttttttttaaaggaaaaatgagaaggatgggggatgcattcatggaattccccagctcaggaactatttcccctgttgtcatctgttgaagaaatgtgggccagaggcaaatgacataatttttgtatctcaaagtattatatgagggtaggtaccacgtgcacctactcgaggccggccacgcgagtttggcacgccggatgtgacgtcaccacccggtggttcccggaacctggcggtgggacc

SEQ ID NO: 16078 - DNA, 462 bp, Homo sapiens
  source 1..462: mol_type = other DNA
agagctggcctggccccccgaggaacacgcccgggccaccgtggagcgggatctccgcattggccggcgcttccgcgaacagcccctgctctttgagctgttaaagctggtagcagctgcacccccagccctgtggctgcggccgccctcttgggccattgggaagcctccctggaggcatctgagggaagcctcctgcctccggccctgggtaatatgcatgaaccaactggcaccggagcatgggcccttgcctcagagtggaccccatctggctgtgctgcacagtgtcctccacctccttcgacaggggacgtcacttttttttttctaaataaaatttgccaacttgagaaaagctgagagcgtgcaaagtctgacagcgcctggctctggacgttcccgcccctggcctgacactctaccaatgagacagctgcccggcggcgctcaggtcgcgcg

SEQ ID NO: 16079 - DNA, 321 bp, Homo sapiens
  source 1..321: mol_type = other DNA
aacaaaaaaaccttcctatgcttcatttttttaaagttgaggccgggcgcggtgctcacgcctgtggtggcgggcgcctgtagtcccagctactcgggaggcttgcagtgagccgagattgcgccactgcagtccgcagtccggcctgggcgacagagcgagaaaaaaaaaaaaaaaaaagtcctgagttgaacattttgtatttttggcgttaggaaaaatgattaaaatacccccaggctggagtgcagtggcgcgatctcggctcactgcaatccccgggatcgggattacagcagcctggaactcctgacctcaggt

SEQ ID NO: 16080 - DNA, 302 bp, Homo sapiens
  source 1..302: mol_type = other DNA
ggagcacctgtaatcccagctactcgggaggcttgcagtgagtcatgccacttcacagactgtgcacttttctgtatgtaaaaataagtttacttataaaaatctgtgtgaatgtaacggagtctcactctgtggcccaggctggagtgcagtggcgtgatctcggctcactgcaacctcctcagcctcccgtgtagctgggactaccaaaaaggtgatccgcccacctcagccccccaaagtgctgggattacgctatcagagctgctgtgctccagagggtctagtacttacgcccgctt

SEQ ID NO: 16081 - DNA, 248 bp, Homo sapiens
  source 1..248: mol_type = other DNA
ctcctgggccaagcgatctgcccgcctcggcctggcaaagtagggtttgggggcggcacgtcccctccactagcgaaaggcggcgtacagcttccccgaactctgcagtccccgatggaggagccagctggatctcggttgtccttctccgagattcccggtgtcccggacgccgagggggccagagccctttccccgcaccgcggaccgcccccgagttgcgattggcccgcggaaggccggggcgg

SEQ ID NO: 16082 - DNA, 407 bp, Homo sapiens
  source 1..407: mol_type = other DNA
acggagtctcactctgtggcccaggctggagtgcagtggcgtgatctcggctcactgcaacctcctcagcctcccgtgtagctgggactaccaaaaaggtgatccgcccacctcagccccccaaagtgctgggattacgctatcagagctgctgtgctccagagggtctagtacttacgcccgcttctcccgattcaacacccgccggcgtttgaacagcttcttcttcagctcctgccggggagaaagatgcgaatcagatggagtgggctcgccgcgacccggggcccctccaccaggcagccccggcccgcccccacacagtcaccgttcggggccggcgctcagcgccggatccgcggggctccgccccggccttccgcgggccaatcgcaactcgggggcgg

SEQ ID NO: 16083 - DNA, 351 bp, Homo sapiens
  source 1..351: mol_type = other DNA
ctgggattacaggcgtgcaccaccacgcccggacagagtctcactctgttgcccagctggagtgcagtggcgtgatctcggctcaagcctcccgagtagctgggactacaggcgcccgccaccacggccgtagagaaagagggtctcacactaacatactgaattctgctttacagaagaaaacacctcttagctgttgcatcagaaaatgaagcttataacaacagtacttgtctcacagttttaggataattaaattagttatatgtaaagcaattaaaaaatattcattatggttatcacaactcttggcccacagggctttaatccaggtgaatcgcttaggggcag

SEQ ID NO: 16084 - DNA, 294 bp, Homo sapiens
  source 1..294: mol_type = other DNA
gagaccctctttctctacggccgtggtggcgggcgcctgtagtcccagctactcgggaggcttgagccgagatcacgccactgcactccagctgggcaacagagtgagactctgtccgggcgtggtggtgcacgcctgtaatcccagagtcgaggcttcatccagccctgggcgacagagcgaggttgtttgtaaaataaatgttaaagataagtaactattacccatttctccaagcgcgggactcggttacacagggtccccgcgctcagcccttggtgccatatagggcgc

SEQ ID NO: 16085 - DNA, 448 bp, Homo sapiens
  source 1..448: mol_type = other DNA
cggatcacctgggtctggagttcgagaccagtcttgatcccggctactcgggaaccactgcactccagcctgggtggggtgggacaggcagcagctccaggccgcgcccccagcaccgaccacgcgtctctaagccgactcgcgtctcggccctggcccgccttgcggacctcacaggaccccggagagtcctggcatggtactcggtccggactctccgctgggcccacgaaggagaaaggctgcctcctgcgcccaagcgtccggcgcccacggaggcaagtccggtctcacggtgacctcccgccggcgccgccttccagcaatagctgctgggtcctggccctgctccttgggtcctgcagtggcatctcctgagggcaggaaggggagttcgcaggagctccagtccggggctcaacgaggagcgcgtagcccacgccagccc

SEQ ID NO: 16086 - DNA, 236 bp, Homo sapiens
  source 1..236: mol_type = other DNA
cgcgccactgcactccagccatctcagctatgagcagagatcgcgccactgcactattgcactccagtctgggcaactgttttgcaaaaatccctttggcagtcaggcagaggatggctcaattccctaaggggccaaagagcaagacatttcttgctcctggcaccggtgaggcaggatgaagttccgggaactgtccctgttcccacccacggaaagtcctggcagcagggcca

SEQ ID NO: 16087 - DNA, 360 bp, Homo sapiens
  source 1..360: mol_type = other DNA
cttggttatccctgaccacatgacctgttttgaaaatgtggttcccagcactgctgagacgggtgaactgcctgaggtcaggagttcgagatcagcctggccacaacccgcctctactaaaactactaatatcagccgggcgtgcaagattgcgccactgcactcctgcccagcccttgccgaggcgggcggatcacctgggtctggagttcgagaccagtcttgatcccggctactcgggaaccactgcactccagcctgggtggggtgggacaggcagcagctccaggccgcgcccccagcaccgaccacgcgtctctaagccgactcgcgtctcggccctggcccgccttgcggacc

SEQ ID NO: 16088 - DNA, 386 bp, Homo sapiens
  source 1..386: mol_type = other DNA
gggaagatgcagctttgctgacggaggccaacctgcctgaacctgctgggggtgctctccgacagcgccccacctgctctagttcctgaagaaaaggggcagactcctcacaatgggttcagggccaggggaggtcttcttgtccaggggaaggcctccagacctgcattcataagcctaggaagtccaaggagggagaagctatcctggcccctagcaagctttcccactactttcatctcccccagaggagggggatggtgtaaggcagagctgggtcctccctttctctgtccattgggaggcagaagacaggaaaaacagcgtgggctccagcctcagtccctctgaagggagcagccctcttttttggttataaaagcttc

SEQ ID NO: 16089 - DNA, 290 bp, Homo sapiens
  source 1..290: mol_type = other DNA
gctggagtgcagtggcgcgacctcgcttcctgagtagctgggactacaggcgccgtccacctcaagagttggggtgactcttgagagacagacaacattgaggctgtggcatatggccctcccacaggagacttcccaaggtccttggcctttgttagaaccttgaattgccctagaaattatttctgggacatgagaaggggtagctacatgcagtgggtgtgggggggcatctggccccgacaccgcttctccaggtcgaaaggggcaaggacccccttttgtccctt

SEQ ID NO: 16090 - DNA, 397 bp, Homo sapiens
  source 1..397: mol_type = other DNA
tttagccacaagtgactcagtggaagatccagagagaatttcattcattttgaatagattacagcagtgtgcaaagatgtacacaacgaagactgccaaacccaggttgccgcaaactgcaacatgctctaggcggtcctaggagctgtgggcgatcgccagctgccgcctcactcggccgcttcgcgggtgccaagggagagccgagcggaggctgcagtcagcgcatcccctggggcggggcctgcagggaggcaggcgtctttcccctttggtcacggtaaccggagggaaacctggacctcgcagctcgggaaggctccgccccgtcccgccccgccccgccgtgctggaccccgccctgggctgaagccccgcctcccacggctacaaaagc

SEQ ID NO: 16091 - DNA, 445 bp, Homo sapiens
  source 1..445: mol_type = other DNA
tctggccccacgccacccctggccatgggatgcagcagctggtggttcctgctcctttccccagatatatacacagctatataacaaagaataagcaccttacgattcttagaaagacttgcctaaggtcgcacggcctgactcggctacaccccacgcccggcggagcgccctgcagccaaccgccgcttcccgccagtcccctccagctcgggggtgggcaaagcgcccggaaccagcccgccggctgccacagggctgccgactcaccagcctcgcgcgctgccagggcaaccgtgagacgggacttccggctcccggggaagtcccgcccctctccgccggccgcttttgtagccgtgggaggcggggcttcagcccagggcggggtccagcacggcggggcggggcgggacggggcggagccttcccgagctgcgaggtc

SEQ ID NO: 16092 - DNA, 471 bp, Homo sapiens
  source 1..471: mol_type = other DNA
acaagctggcttctcacctttcatcctggaaaaaagagggacctctcagcctcatggaaaaaaatagggtgggatgaggtgctccccaaactcacagatcattaaaccttacacaaatgatttaaggcttttcagcccttcaaaccatgtgtgttcccagctctgaagacctaccctgatgaggagggcacatcacccctgtctgctccacaggagtgggtgccccacccagtagggagttgcagctgaaagtatctgatgcagagagggccaggccagaggtctggtctcagtttctgtgaaggatgctagaaggagctgctcagatcctggagcataccaactgcctggccagtgggggagcctagctgcctgcatccctgactctgggctagagacctccccaacagagctgaggccaaggccgactccccctctcaaatggcgggcccctgcagtggagtctgtact

SEQ ID NO: 16093 - DNA, 347 bp, Homo sapiens
  source 1..347: mol_type = other DNA
gcatgttgcagtttgcggcaacctggtttggcagtcttcgttgtgtacatctttgcacactgctgtaatctattcaaaatgaatgaaattctctctggatcttccactgagtcacttgtggctaaagcgcatcacattttcctggatatggcccagctgatgtcagattgcagccagtacagactccactgcaggggcccgccatttgagagggggagtcggccttggcctcagctctgttggggaggtctctagcccagagtcagggatgcaggcagctaggctcccccactggccaggcagttggtatgctccaggatctgagcagctccttctagcatccttca

SEQ ID NO: 16094 - DNA, 392 bp, Homo sapiens
  source 1..392: mol_type = other DNA
tttggcagtcttcgttgtgtacatctttgcacactgctgtaatctattcaaaatgaatgaaattctctctggatcttccactgagtcacttgtggctaaagcgcatcacattttcctggatatggcccagctgatgtcagattgcagccagtacagactccactgcaggggcccgccatttgagagggggagtcggccttggcctcagctctgttggggaggtctctagcccagagtcagggatgcaggcagctaggctcccccactggccaggcagttggtatgctccaggatctgagcagctccttctagcatccttcacagaaactgagaccagacctctggcctggccctctctgcatcagatactttcagctgcaactccctactgg

SEQ ID NO: 16095 - DNA, 304 bp, Homo sapiens
  source 1..304: mol_type = other DNA
gccagcctaggcttttcctggtgagtcctggagatgaccatgacatgttaagccttaagtttggtccctgcccagacagcatgctctgctgtggctgattatccagctcctgggaagaccaggaagccgagacggacagggtcgggggttaaccccctgccgctaatatttccgctccaaagggagcctctcctttcttggcaacgaccagcgtcggccacgctgtacgactcaatcgggaggacaccgaaatccagatttcggggttgcagggcgcgggccccggcttggggctgccatgttg

SEQ ID NO: 16096 - DNA, 392 bp, Homo sapiens
  source 1..392: mol_type = other DNA
aaacaaacaacaaaactgtacattttttttaaagtttgttgaaaagaatattgtcttattctataaaacatttcaaacctagttagagatttgtaatcaaaaaacatttgcgcagaaagcagcacttagggctgcctgttctataccctacagtcagaaacccttctgacattctgagcgagggtgctctccacagcaaacgattggctcttatcaatcactttcccaggccaagaaagcctggggactgtcagcctaaagattgtgatttgccagtctctagtctctgtcttccaaggttgagagaggtgggagtcctcttacagtgcgagagaaggaacgtttctcagcccaggtgctgagaatagcaactagcaactattttctacagt

SEQ ID NO: 16097 - DNA, 407 bp, Homo sapiens
  source 1..407: mol_type = other DNA
cagactttttaaaagttcctggctggtatggtgagcgcgctcctcttccagtgggcgggcagcgccgaggctacgacaaccgggcctacgggcagcagtactgggggacagaggggtgagtgcagctctccttctgctctaatatgttctggaagatttactatgggaaaattaaaccaatttataatatatgtgtcgcatttaaactatgatcgatacaggggatgtgagtaggagcagaaggatgagtgttatgcctcttcatcctcagccagctctggctccaagtgatggggtctcttctagtggcagagttactactaccaccaaggttactacgggtaccaagggtatcggtgaagcccctgccatggtcaccgctgaatctctgggggtgccaggcaccc

SEQ ID NO: 16098 - DNA, 442 bp, Homo sapiens
  source 1..442: mol_type = other DNA
tcttgagggtcgcgcgcattgcgccacaccaatcgtctggggagcccttttgcttcctagccagaaaaacaattgctactaggtacatgttgcaacattttttttgtcgttactgctgcaagcacagacagtaggggagctccgggcggctgcgcagaactccccggctggaagtactgaaagaccggcgcgcacacgcttccgtgctacgaggcacttgagctgcggctgcgcgataaaagcaccggcggcgattggcccgggggcgccagagggcgggaggaagcgggaggaactccgtcgtcctccgcgcgcgcctgcccgcggctggggaaccaagggcctggactgcgcagcgggaccgtgcgcggcctccgctcctgcgtgcgtgcgctcgctcgcgcgggctcagtgctggcgcgtgaggcggaggcgggcggcg

SEQ ID NO: 16099 - DNA, 311 bp, Homo sapiens
  source 1..311: mol_type = other DNA
ggcttcattgttgacgtcagtctcctgggctttcttgagggtcgcgcgcattgcgccacaccaatcgtctggggagcccttttgcttcctagccagaaaaacaattgctactaggtacatgttgcaacattttttttgtcgttactgctgcaagcacagacagtaggggagctccgggcggctgcgcagaactccccggctggaagtactgaaagaccggcgcgcacacgcttccgtgctacgaggcacttgagctgcggctgcgcgataaaagcaccggcggcgattggcccgggggcgccagagggcgg

SEQ ID NO: 16100 - DNA, 296 bp, Homo sapiens
  source 1..296: mol_type = other DNA
cagctcaagtgcctcgtagcacggaagcgtgtgcgcgccggtctttcagtacttccagccggggagttctgcgcagccgcccggagctcccctactgtctgtgcttgcagcagtaacgacaaaaaaaatgttgcaacatgtacctagtagcaattgtttttctggctaggaagcaaaagggctccccagacgattggtgtggcgcaatgcgcgcgaccctcaagaaagcccaggagactgacgtcaacaatgaagcccccgcccactcccttctacttccaggtcgggggggggcg

SEQ ID NO: 16101 - DNA, 476 bp, Homo sapiens
  source 1..476: mol_type = other DNA
cgtcgaccgagtccgaccgcgcaggcgccgccgccgccgcccgcctccgcctcacgcgccagcactgagcccgcgcgagcgagcgcacgcacgcaggagcggaggccgcgcacggtcccgctgcgcagtccaggcccttggttccccagccgcgggcaggcgcgcgcggaggacgacggagttcctcccgcttcctcccgccctctggcgcccccgggccaatcgccgccggtgcttttatcgcgcagccgcagctcaagtgcctcgtagcacggaagcgtgtgcgcgccggtctttcagtacttccagccggggagttctgcgcagccgcccggagctcccctactgtctgtgcttgcagcagtaacgacaaaaaaaatgttgcaacatgtacctagtagcaattgtttttctggctaggaagcaaaagggctccccagacgattggtgtggcgcaatgcgcgcgaccctcaaga

SEQ ID NO: 16102 - DNA, 278 bp, Homo sapiens
  source 1..278: mol_type = other DNA
tagcaattgtttttctggctaggaagcaaaagggctccccagacgattggtgtggcgcaatgcgcgcgaccctcaagaaagcccaggagactgacgtcaacaatgaagcccccgcccactcccttctacttccaggtcgggggggggcgagtgtcccaggcgttctcacgcccgcaacaattccgagtagggccttgcttgagtctgcacttcttgagaaaaagatccctgtggggactctccaggaagaagggtaatttcctgcctccttaaattgg

SEQ ID NO: 16103 - DNA, 293 bp, Homo sapiens
  source 1..293: mol_type = other DNA
gtctcctgcctcagcctccctagaagctgggatttcaggcggcaaatcttagaatttttgcgtggggctattgcccacccaggctggagtgcagtggcacgatcttgactcactgcagctgggatacaggcgcgcgccccgcctcccagagtcctgggattacaggcgtgaagcactgcgccgctgtcagctcgggtccgacactgcaggtcccgacctccagcctccaggagagcgccgcgttcagcgactcggagccgggtacctcctgcctgctggattaggtagaagga

SEQ ID NO: 16104 - DNA, 418 bp, Homo sapiens
  source 1..418: mol_type = other DNA
actcattctgtcacccaggctgccaggctggagtgctcattgcaggctagtcttgaacttctggcctcaactcttgcttttgtctcccaaagtgttgggataacaagtgtgagccctcacacctgggcaaagcaatgacaaggattgttgtgtctgcagaacagcaattctgaagttgtggtccccaaaagaacctttctcaaattttcttcatgtatttcaatcaaaacaatatatcctaatagctaatagaagtgtgatattgtgaaatatacgtttctttgactggcaggccctaggtccctggttggggttttcagcccacccccaacttctggggagtggagggggtgctgaactgttgagttgatcaccaatggccaatcgtttcagcagtcatgcttgcataatgaagcat

SEQ ID NO: 16105 - DNA, 425 bp, Homo sapiens
  source 1..425: mol_type = other DNA
atttctacaccaatttctgtagattattatgagaattaagggagagaattatatcaagaaagtagtaagtgatagcatttatttatttatttattttatttattagcatttatcaatctatctatctatctatctatctatctattatctatctatctatctatctatctatctatctatctatctatctatctatctgttgagatggagatcccaacactttgggaggccatcccagctactcgggatgcagtgagccgagatcgcgccactgcactccactccgcctcaaaaaaaaaagttgtcgtttgatggcggggcttagtggttctcgcccacgacggcgaggcccaatcagacccgcggagctggtggagttccgccctcgcggaggaggtggtgttccgccctcctagtcgcagcaa

SEQ ID NO: 16106 - DNA, 399 bp, Homo sapiens
  source 1..399: mol_type = other DNA
gtgatcccccgcctcggtccgcgcccggccgggaaagaagtttaacctccaactctgccagggcattattactccatattaggtaatttgcccaaagagttcaattaagaactgcccaagtagctgctattgcagtgggagttggatgttcggccgggtcagaagtcccttctgccttcaggaattgctgcagtcgcgaaaatcgggtaaaatcaagacgctgtctttgagactgtttatttcctcgttactattgtggtggtaaaaaaaataaaatatgcttattaaacgtgtgttaaaacaatatcacgtgaccgccggtctctacagtctgttcacactggccaggaagcctcctggagggccggaaactttccaaggcgcccgccgactggggag

SEQ ID NO: 16107 - DNA, 630 bp, Homo sapiens
  source 1..630: mol_type = other DNA
gcccgcccaacaggggtggcccaggtggcagggggtgccggcgcctggacgacctgccatgggacagccttctgagtcgtcctccgggggcggtgcagaacccagctttgggtccggcctcccgctgccgccagggggcgcggggccggaggacccttgaccctggccgacatctaccgggtttggcaccggccagcctgcacccacggctccgcggccgcccggggacaagaaggagccggcggcagccccggactcggtgcggaagatgccgcagctgacggcaagcgccatagtcagcccgcacggcgacgagagcccccggggcagcggcggaggcggccccgcgtcggcctctgggcccgccgcctctgagagcaggcccttgccgcgcgtgcatcgggcgcgcggggcaccccggcagcagggccccgggaccggcacccgcgatcgccccgcgcggcgccccgcacgccgggcggcaggctgggaggcgctgccgcgggcgcctttccccgcgccgtacgggcctagcccggcctcgcgctacgtgcaggcccatgatcggccgtaccagccgccccgcccgccggtgggcgctctcggacgtctccaccttcgtgggtcgcg

SEQ ID NO: 16108 - DNA, 437 bp, Homo sapiens
  source 1..437: mol_type = other DNA
tgagcttcttgacagctatttaatattccttatctttgagaagccattggtagaacatctggacttttactaatgtctcatttgtataaatagtgcaaggatgtataagaatgtacatatttgttggcaaatctgcccaggccttcactcatctcaaggtatctgggcctccaggtggcccgaggccgccccgtgactgtgaccgagggagggagggctgcctgatccctctcctcgcctgccttctggaagacttcagaagattgagcctcactggtgccaggaagccaaagcttacgaaggacttaggtgctttgtgtacttaaccccaggacctccttactttttaatataaagagtgatgtcctcccagccctgagcgaggggggcgggccctctagcgggggcgcccagggagggcggaaggcggctctgcg

SEQ ID NO: 16109 - DNA, 435 bp, Homo sapiens
  source 1..435: mol_type = other DNA
gtccagggagattagtgtgctttggacatctaggagagcccaaggccctgatattttcctcctcggcatctccagcaagttgccactgctggtgaaaattcataacacaaattcatttatttcacaaatatatgttgagtttggtaggggtctgagccatcactcccacctggagtcactgagttctgggctgcggcggcagcactgtgctctagcactaactctgaagctgccagggcagcgtcagcggacggacatgctggctgccagccggggttccgcaagttcaggtcttgggcggggcgtggagggccaggccccgcccctcgaacgacggccttaagtgtgcgcacgcgcagggggccgcgctttctccgggcggcggcaccgcccacagcctgggacgtcagcggcgcgcgacgtgctttgctgcgg

SEQ ID NO: 16110 - DNA, 459 bp, Homo sapiens
  source 1..459: mol_type = other DNA
gctctcgggtttggagcagccccaaggagctcgcctgggtccaccagcccctgacgcgcgacgggatatctgatgtcacaaaagccgggcctggaggcaggcaggctggcgtgggtggcacggagtccagggccacgcggggccatgggctgctgccaagtgagctcagaggcctcgtcgtcccctcaggcgccgaagatatcgacttgatggcggcgactatccacgttcggtcgtcggggctcctcgcggcgaagggatgaccccagacctgctctcagctgggggactgggcgcggacaccaccgggcagctgaggctccttcccggaggcgggcccagccccctgagcgcctgctgtagtactctggggcggggtcacggtggcgccttagccaatgggagggcgggatcgttgaaacgcgtgggaccgccccctcgtcactgggggtggggtta

SEQ ID NO: 16111 - DNA, 394 bp, Homo sapiens
  source 1..394: mol_type = other DNA
agcacagagtatctctgacgcccaggctggagtgcagtggtctcctgcctcagcctccggagtagctgggactacaggcgccccaccgcgcctcgctgtccgcctcttgaagagtaaacgaggccgggcgcattgcactccagcctcaaaagaaaaaaaaaatcgtcggtttccttttcccatcttacatcattaatgatttgaatcgtttctaaagtgtttcttaaatcgtttcttaaatcgtttgttgtttcttgtctaacagtccagaacacataacctcctggtttcattttcgtaaagcaaaacaagcatggaagctttactgtttcggctctgcgctgcatcggactcgacgcccgctggtgacgcacacgctgcgccggaagtgtga

SEQ ID NO: 16112 - DNA, 455 bp, Homo sapiens
  source 1..455: mol_type = other DNA
cttgctttgatcgattaaaaaaaaatcgctccatttcaggagaggcggatgccttgccgcgtcggcggggctgaggcgtcagcacctttctcccaccgcgggatcccgggtttgaggatcaggagcctctgaaatggctttctcagggcatctttcccgtacaaatgcaaggtgcgggtcgtgcctcgcccctatcacaaactccggagagtgagtgtcaccatttcccccgtttaaatggggaggacggagagggagcccaacctccttttttggactcctgtgctttgacaccgcgccgcggcttctcccaagaaaggtcccggagaggggcgccgccacctgcagcactgtcccgccggctgctgtttccaaaatatagccactactataaagaaagaataatgaaaactgtgtttcggaattataatgtattgggagataatttaacattt

SEQ ID NO: 16113 - DNA, 471 bp, Homo sapiens
  source 1..471: mol_type = other DNA
aatgtttataaagtgtgcttgtacacgtagatgtttaccacaaacgactaatgttgtccggtctcagtaaaacagtctcaggagttgcagcaggcagcaccgccggagctctttggattaatcgattcagatcctgtcttcagtgaagcacttacgtcctgctcctcccgagcttagcccgggatccagtacctgagtcgtcccccgcgctgagaccctggacaccagcctccgaatgtgagccaggcaactggctcgaggcttcaggaggctgtagctccatggaggcggatcctgcacacagcagtcgtgaccgtcagtccaggatcgccgtagtgatctcaccgcagccagcacgctcccgtaggacgcatgcgcgccttttggtcgcatgcggtcaacgtatgcgcgtgcgctcgccgtagccccgcccccaaatcccgtgggcctctgcggcatggtatttaatcg

SEQ ID NO: 16114 - DNA, 328 bp, Homo sapiens
  source 1..328: mol_type = other DNA
acagtacagtgctactcagaattttctgttttctccactgcaacaacagagctctcttcggttccaacgtgccagggcatttcgaaaacgctattttctgaacagacggctcacacggagctcagtacaggtctgtgaaaaggtcctcatcgagcagaaggcatagtgcgtgctatgctatgttcgcacaatctccccggggagacgattaaataccatgccgcagaggcccacgggatttgggggcggggctacggcgagcgcacgcgcatacgttgaccgcatgcgaccaaaaggcgcgcatgcgtcctacgggagcgtgctggct

SEQ ID NO: 16115 - DNA, 342 bp, Homo sapiens
  source 1..342: mol_type = other DNA
acaaaaaaggtggatgcctctgagacctagctctgttatgttcattacaggtcttctggatgtctgattcctagctgccaaacatccaggtgctagcagctctcaaccttcctgcccaaaccattcattttaaagtactgtgaaaaattcaataaagttaacaaagcaaagtattgtagtgagtacacaataaatagttgctgcatgaggaatttcttgaaatgaattcaagatgagtgtgactggctgcctctgaaccctgagccgcccacggctggggcagtccccgaggttccaccttaaggggcgggccggggcggggctccgctgccccttcccaga

SEQ ID NO: 16116 - DNA, 512 bp, Homo sapiens
  source 1..512: mol_type = other DNA
accctgagccgcccacggctggggcagtccccgaggttccaccttaaggggcgggccggggcggggctccgctgccccttcccagaggccgcgcctgctgctgagcagatgcagtagccgaaactgcagagccaccatctgaccgcaagctgcgtcgtgtcgccggttctgcaggcaccatgagccagcgatgaacgcggcgtctggggcggccatgtccctggggaagacgaggcggaggcggcagccgcggctaagttcacgggcctgtaggagctgctgaaggtggcaggcagccccggctgggtacgcacccgctgggcactgctgcgagcgccgcgttgtcgcgagctaccggcgcagaagtggtggcacacgggcgccctctaccgcatcggcgaccttcaggccttccagggccacggcgcgggcaacctggcgggtgagtgcagcgcgcccccgtcccggggcccctcactccgtcacgagggtgggtgactcagcgtcctcct

SEQ ID NO: 16117 - DNA, 256 bp, Homo sapiens
  source 1..256: mol_type = other DNA
tgacaagctgggaggagagctgtctgtctgcctgtctgtcttccaagctgcctcacttgttacacgtgtgcacacgcgtcctagcccaatgctagcgcacacagcccagcatgcgggcacgttcactcagcccccgggcgggtgcgccagccctctgggtctgttccaagttggagcctctcacgtgaggcccaatggggctcaaattgggtgccctggtgaaggaggctccctccccgctaaggctggcgtgcca

SEQ ID NO: 16118 - DNA, 387 bp, Homo sapiens
  source 1..387: mol_type = other DNA
gaggcggtgcaggacccacatctctagggcaaacggccccccaggggttctatctctgaggaagtccagaccagcctggcagggagggatgctggcctcacccagtagggctgagggagattgggaggagggctcatctcctcccaggtacacacctgtgagccctgagtgggagtcaggggagacagagcttgacaagctgggaggagagctgtctgtctgcctgtctgtcttccaagctgcctcacttgttacacgtgtgcacacgcgtcctagcccaatgctagcgcacacagcccagcatgcgggcacgttcactcagcccccgggcgggtgcgccagccctctgggtctgttccaagttggagcctctcacgtgaggcccaa

SEQ ID NO: 16119 - DNA, 337 bp, Homo sapiens
  source 1..337: mol_type = other DNA
tgacccttgaggtatgacgttggtcttaggtcccactccaagagcggcctcttcttccaaatgaataaaaccatgaatttgcatttcaaatcaatgaagaattgcttagtataagtatgtctcatgcaatattagagacatactcatacttttaaaaactaaatttgactgggcaccctgtaatttcaggaatccttggagggttaatccttctttaacccaggccaaggattaaaaactgcccatgcaagggtcaggtctccagcagaccctgaaagccagccaaggaggctgctgtccccccacagagcagctcggactcagctcccggagcaac

SEQ ID NO: 16120 - DNA, 317 bp, Homo sapiens
  source 1..317: mol_type = other DNA
cccagctactcgggaggttgaggcatgataatttgccaccattgcactccagcctgacagagtgagactgtgtctgacccttgaggtatgacgttggtcttaggtcccactccaagagcggcctcttcttccaaatgaataaaaccatgaatttgcatttcaaatcaatgaagaattgcttagtataagtatgtctcatgcaatattagagacatactcatacttttaaaaactaaatttgactgggcaccctgtaatttcaggaatccttggagggttaatccttctttaacccaggccaaggattaaaaactgcc

SEQ ID NO: 16121 - DNA, 520 bp, Homo sapiens
  source 1..520: mol_type = other DNA
gtcttagactgaagtctctgctctcaggtgtatttcccatgttttatgcaggaaacacacattattatataattaaaataatattcagagtgaaaatacctgtgtcagagacacagacacggaggtcctggctgccccaggggcccaggagatggcagccctgcgtcctcaggtcctgagaggcaaatccccttcccctactcgggaggtgccaggcaggggaggtagcacacaggagaatgctgcctgcttacgggcaccagagtcctctgaacatcagttgagagggaccttgaaccctcagaggtcaatctcccctcggtgagcctgccagggctgctcgcgaaaacggaggcacgtctcagacttcccatttggagccagcagccctgctaggctcagccacgctgccccacccccagcggccctcgctgaggcagccctttgaggagagctgtggtgggtccacagcactctccctgccagttatataagcccccctgggggaggcacaaactgt

SEQ ID NO: 16122 - DNA, 705 bp, Homo sapiens
  source 1..705: mol_type = other DNA
tattaataaaatcagtagattgtatcagtatcaagatcctggtattatactacattgtatcatactagcatcttgatgttgatacaatattatactacagttttgtaaaatattaccattagaggaaatatttcttgcaactgcatgtaaatctataataatctcaaaaaacatttcattaaaaatctctataagaaacctggcatagccatgttaacgttaaaaaatatataattcaaaatagtttataacaataaaataaacaatttatctgatcttccaatgtgctatatataaatactcctatatgagctgaacactgcctttctcttctatttatatttcatataatttaaagttatgtgagttcctcatgtgatttaacctgaagcataatatcagttaacaaaagatagtaatggcatcacattccaatttgctttaaaaagcaaaacatggtaattgggatttgcatttattcatcattttaatctaaattcagtactaaaggagaaaaaccctgactttctgctcttttcatggaaaaattataaagcagtttacttttgtgtctctcaaatttcacttcctagaaataacaaatgtacatgccaaagtccaatgtaaatttcatgagagtaaacctttaaacggattttattgtcaacagctagaagtatctctatgaaataatgatctctatga

SEQ ID NO: 16123 - DNA, 493 bp, Homo sapiens
  source 1..493: mol_type = other DNA
gatcttccaatgtgctatatataaatactcctatatgagctgaacactgcctttctcttctatttatatttcatataatttaaagttatgtgagttcctcatgtgatttaacctgaagcataatatcagttaacaaaagatagtaatggcatcacattccaatttgctttaaaaagcaaaacatggtaattgggatttgcatttattcatcattttaatctaaattcagtactaaaggagaaaaaccctgactttctgctcttttcatggaaaaattataaagcagtttacttttgtgtctctcaaatttcacttcctagaaataacaaatgtacatgccaaagtccaatgtaaatttcatgagagtaaacctttaaacggattttattgtcaacagctagaagtatctctatgaaataatgatctctatgaaggatcaatacaagcttaatttgaattaataaaaggaaatattttctccctttgaacttat

SEQ ID NO: 16124 - DNA, 502 bp, Homo sapiens
  source 1..502: mol_type = other DNA
acttgaagtataatttaaaaaaaagaaaaagaaacattatgttaaatgaattaaagatatacaaagtcaagtattttatgattcaatgtataaatcaaatgtctatagtagtgatgattgcacaactctttgaatgatcaaaacacattcaattgtatactttaaaagggtaaattgtatggtaaatgaattatacttcaaggaggtttaaattttaatagaaattttagtcctaatcaaggtgacatttagtgcatctcacataatatttataatgttggagtgcaattgtttcaactataaggaacttgtcacacacgttactttaggaactagcttcacaaatactatctgaaaaaaggattgtaccacagtacccttattttagtttaacttcgacttttttagattaactcttaatcaaaaattggtacttaacaaggaaaaacttgccttctgttgttttcagagaagtaaaaaagtcctggagaccaaactttgg

SEQ ID NO: 16125 - DNA, 348 bp, Homo sapiens
  source 1..348: mol_type = other DNA
tttctccccttttcaggcatatacatggggcaaacaaaaaaggcggtgctttgtgcttgcatagatacataaccacagctgcgtaagacagctttactgataagagaagttactaagagattttcttgcaaaagcttttgaattcagctgtaacagggcaactgggtactttttcataagttatctattacgtaagtgtagatttcattttctatatatttttaaaaataaaacaactctgaattgttcaagattttaaccgattcccgggcctctaagcgacgcgctcactgcgcccgcgccactgtcgccaccccgcgcgcctctgccgtttgcagcccgcggcgc

SEQ ID NO: 16126 - DNA, 291 bp, Homo sapiens
  source 1..291: mol_type = other DNA
ctgtgtatgtattatagaaacaaaccatttgtcttagtccatttaggctgggaagtccaagatcaaggcaccagcagattcctgcaggacctcctttataagggctcttatgaatcctgggggttagaattctagcacatgaattttattttttataaagtttcagaagcgatttaaaaaactattttaaaaagtgataattacattatgtttccttttctccccttttcaggcatatacatggggcaaacaaaaaaggcggtgctttgtgcttgcatagatacataacca

SEQ ID NO: 16127 - DNA, 270 bp, Homo sapiens
  source 1..270: mol_type = other DNA
cacccccagatacaggcctcgctgtgggactatggtcactttctccatgtacagatgaacatgaagaggaagtcaagtttcaagtctccctcctgcagctgggccccagcatttccagctgatgctgaaatggagcctcactgtaatccccacgaggtcaggatatcgagaccatcctggctgcagtgagctgagatcgcgccactgcgctgcagcctggcaagagagcagggtggggctgtttctggaacctaagcacacgtaccacct

SEQ ID NO: 16128 - DNA, 331 bp, Homo sapiens
  source 1..331: mol_type = other DNA
tgaagaggaagtcaagtttcaagtctccctcctgcagctgggccccagcatttccagctgatgctgaaatggagcctcactgtaatccccacgaggtcaggatatcgagaccatcctggctgcagtgagctgagatcgcgccactgcgctgcagcctggcaagagagcagggtggggctgtttctggaacctaagcacacgtaccaccttggccccacaggagccagcctctggcttagccagagctctgctgtataccaccgggagtggggctggtgtggagcctggaggtcgcccgctgccctcctagggctgctccagacagcattac

SEQ ID NO: 16129 - DNA, 279 bp, Homo sapiens
  source 1..279: mol_type = other DNA
catatttcagactatcacatggggaagcatcttgagttgataacagaatctcaaggcagaagaatttttcttagtacagaacaaaatggagtctcctatgtctacttctttcttgcttttccccacaggtaagtgtaagtctgggaaccccagtttattgacattatctccaattagtgtcaaaattgaacagaatgatgtctgctgcagaattgatgaatgaatgagagaatagaaaaagcacgttgttttttttcatgcgcgtcaaacaggttttgg

SEQ ID NO: 16130 - DNA, 372 bp, Homo sapiens
  source 1..372: mol_type = other DNA
aatgcattttaatggggccatgagcccccttcctggagtaggaagagaccatgaggtgcctgtaatcccagctacctgggaggctgaggttgcaatgagccgagatcgcaccattgcactccagtctggaaagaaaagacctttatttctcaagcaagggcagaaattcagggctccccttcgactctggctgctcccaaggtggctttaaagcaccaatgagtccatggcttgtgtaagaaatgattagtccttccatctagagaaatagctcctttttaaacagttgtctcttttaaacagtgtttagtatttaagtgaggttgaaacagtgtcaaaaggaaagtgaaagtgaaattctctccttcagca

SEQ ID NO: 16131 - DNA, 509 bp, Homo sapiens
  source 1..509: mol_type = other DNA
atatacacacatatatacacacatatatatacacatatatatacatatatatacacacatatatatattttgagactgacagcccgagtagctgggacaactccttcagtttttaaactataagccatcatggccctgcagtgttcctggatgctgggcgcgcagggcggtgccgggggcgcgggcgtcctgcagtcgccgggctcgggaccggggccgggcgctctgcgaggctctcattagccggcggcgcggggaggggccgggtgacctcacgccggcccggccaccgcggccattagacccggtccaattgctggggctgcagcgctgcctccgagaccgcgacttctccccttccgcgtagactagcctgccgagccgcccgctggcacctgcagcctcctgggcgcccgccgggccccggcgagaaacctggggtccgaggcgcgcctctcacgccctgcccaacagaagccgcagtcccgtggggtctggagacgcagttt

SEQ ID NO: 16132 - DNA, 607 bp, Homo sapiens
  source 1..607: mol_type = other DNA
cacacatatacacacatatatacacatatatatacacacatatatatgcacacatatatatacacacatatatacacacatatatacacacatatatacacacatatatacacacatatatatacacatatatacacatatatacacacatatatatacacacacatatatacacatatatacacatatatacacatatatatacacacatatatacacacatatatatacacacatatacacacatatatacacatatatacacacatatacacatatacatatatacacacatatatacacacatatatacacatatatacacatatatacacacatatatacacacatatatatacacatatatatacatatatatacacacatatatatattttgagactgacagcccgagtagctgggacaactccttcagtttttaaactataagccatcatggccctgcagtgttcctggatgctgggcgcgcagggcggtgccgggggcgcgggcgtcctgcagtcgccgggctcgggaccggggccgggcgctctgcgaggctctcattagccggcggcgcggggaggggccgggtgacctcacgccg

SEQ ID NO: 16133 - DNA, 344 bp, Homo sapiens
  source 1..344: mol_type = other DNA
ccacctcccaaagtgctgggattacaggcgtgaggcacggcgcccggcctgggatcaggataaagcctcggcctggggcctggtctgcacgttaggcgccggccgcagctcgcaggaggacccgagccagcccgccccttcccgcacagtggccgggacccagtgagcgcgggactcagcgccccgccaacaggtacccggcggctcgcttcgcgcacacgcggcaggcggtggcgggattctgccgcgtgcgctttcccgccccgcctgcgctcgccacgcctcgggctgtccgttgggccacgcagaccgcgctgcgctcgctccgtcgcggctccgcgtgc

SEQ ID NO: 16134 - DNA, 227 bp, Homo sapiens
  source 1..227: mol_type = other DNA
ggtcttgaactcccgacctcaggtgatccaaccacctcccaaagtgctgggattacaggcgtgaggcacggcgcccggcctgggatcaggataaagcctcggcctggggcctggtctgcacgttaggcgccggccgcagctcgcaggaggacccgagccagcccgccccttcccgcacagtggccgggacccagtgagcgcgggactcagcgccccgccaacaggta

SEQ ID NO: 16135 - DNA, 259 bp, Homo sapiens
  source 1..259: mol_type = other DNA
ttcaatagatatttgagtctctattatctgccagcagtcagacaaaaattcctatctgtttggaacttacattcagtggaaaacataagtcagatagtagcaggaagtctttttttttttgagtgcagtggtgccatctccactcaatgcacgagtagctgggattacaggcgggtcttgaactcccgacctcaggtgatccaaccacctcccaaagtgctgggattacaggcgtgaggcacggcgcccggcctgggat

SEQ ID NO: 16136 - DNA, 390 bp, Homo sapiens
  source 1..390: mol_type = other DNA
gcccaggctggactccaagccgtagcagagactacggaatatagtcggaggaaaagaggcagttctgcgactgcattgcaatgtgattggaatgagggccgtgccatctctgcctctcggtgaggagatattacgacacagccagtgagatgcagagtgggccttatcccgcagctccacgattagccgcagtcgtgggctgcgtctggtccccaagggacgctccccaaccctcggcgcgcgaggcgccgcgtgaggccggctttgcccctccttccctgcaagagcgcagaggagcggttcttgcgcctgcgccctgcgccgctgcgcgctttggcacccgcttggggccctttgtgcgcatgcgcgctcgcgctcccgccctctagc

SEQ ID NO: 16137 - DNA, 383 bp, Homo sapiens
  source 1..383: mol_type = other DNA
agagcgagactctgtctcgacattcgaagatggattttcagtgtcagacattttgcattttctgagctgaaatctcatccatgtccccttggagagggggtccaaaatggtttttgaaagacctgcccggggcatctgctggcggaggaaggggaaaccccgggcttggcccgcagactgaggggcccgcgttgcgggttttgggggcccctctgcctctgcgcaccgggtggccccgggtcccctcggcccttcccgccgcctcccgggtccagggtttctaacggggccgcgtgcccggggcggggccacgcgcgattggccgcgcggcatcgggggcgggtccgcggctggccggccgggcgggcgccgacaatgaggag

SEQ ID NO: 16138 - DNA, 471 bp, Homo sapiens
  source 1..471: mol_type = other DNA
ctccctgtccttggtaacgcagaaggggaatgcagttgccatacagacttggacctccgagttcatgaatccaatggcttcactttactgaaagaaaagaaactttaaatgccttatcttgcagaggcattttaaaaggtaactggaattcagaaatgtcattttgaatgtcactcagtgatgttatgtgatttttccaagatcacgcaggcagggccctggacgctcccgcatccggtgcagaggacgctgccctgggcctgcctggggccttgccgagccctgcggtgttttgtatttagtcaaatcacaagccgagagccacccggggaaacgaccgggtgctcggagggcctcgggtgttgccggaaatggccgacgaccgccctcggcagggctgtgggagggggcgtggccggctcagcacgcggagcagcttcgggtatttccggaaactgccgaaagccccct

SEQ ID NO: 16139 - DNA, 496 bp, Homo sapiens
  source 1..496: mol_type = other DNA
tccatgtccccttggagagggggtccaaaatggtttttgaaagacctgcccggggcatctgctggcggaggaaggggaaaccccgggcttggcccgcagactgaggggcccgcgttgcgggttttgggggcccctctgcctctgcgcaccgggtggccccgggtcccctcggcccttcccgccgcctcccgggtccagggtttctaacggggccgcgtgcccggggcggggccacgcgcgattggccgcgcggcatcgggggcgggtccgcggctggccggccgggcgggcgccgacaatgaggagcggcggggggcaggggccccggattgagccctccccgcccgggctcccgacgcgccgaggtctcggggaggcccggacgcgccggtcgcaggcccggccggcgagcggcgggcgggcggcggggagggggctgcgcggggcgggcggcgggcccggcgctattccggccaggaggcgggaggcggttgcc

SEQ ID NO: 16140 - DNA, 450 bp, Homo sapiens
  source 1..450: mol_type = other DNA
aactggaattcagaaatgtcattttgaatgtcactcagtgatgttatgtgatttttccaagatcacgcaggcagggccctggacgctcccgcatccggtgcagaggacgctgccctgggcctgcctggggccttgccgagccctgcggtgttttgtatttagtcaaatcacaagccgagagccacccggggaaacgaccgggtgctcggagggcctcgggtgttgccggaaatggccgacgaccgccctcggcagggctgtgggagggggcgtggccggctcagcacgcggagcagcttcgggtatttccggaaactgccgaaagcccccttccgtaaacagagccgaagcttcgtcttcggaatcgaggaggagagcgcgtccccgggaggagaaggcgcgccccacctcccgtgatgtttccggctgctgccggcgaaaagagccgag

SEQ ID NO: 16141 - DNA, 688 bp, Homo sapiens
  source 1..688: mol_type = other DNA
tggctgggtctggctttgaaagtctctgcccaccctccggggggagggggccagctacccagtggggaggagacccagctcctctctcccctgcactgtttaggggtgcatactgcagcggaattggggcgacccttggggacccacagatccaccagaagccagcctctggctgggtagctcttggaggaattcattcctccgttctggcccccaagggcgcataaggggggtcccccctgcggaagggggggcgggggctccacccgggcgggcgggcaggcggccccagggcccccggggcaggcggcagtaacccgagcccactggtgtgggctgacccctggctactcctggggggcagtggggtctcccccaggggcaagtctgggagcccagggacgcgaggggagcccccgcagcgggacgcgcgccccaccagggtcctgatcccaccccctggaggtctggccccggccccctggccccgccccccgggccctccctcccaccccagggccagatgttcagctggcggaggcatcggctgggggaggggtgctgaggccgcagccggcactacttccctgccagcagctgcgagcaagcggcatcccgagcgcggcggggagagcgagcgcgccggggagggtgcgaggcggcacccgcggctgcgctccgcccgcct

SEQ ID NO: 16142 - DNA, 489 bp, Homo sapiens
  source 1..489: mol_type = other DNA
caggtgagggcaaggggaggccccccacccccaatcggctccccctcatggagtctgggctcagggaatcagatttcccccacgtgggtgtctgaagcctggagtctccttgctgacccccctccttgcacggccaccgtgccggggtggtgccaagcgccattcacaaccctgggtggggggcaccctgggccacacagcctgcccagggccccagtgggcggcaggggagggttcctgtctgggcagggagggtgggggccccagagggagctgccatggtccttccactggctcgctgtggccactgatggcctggccagggtcccaggcaacacaccacagcggccaggctcgctgggccggagctcgggacagtcccagtctgtctggcagggctggcgggcttgggattggctggagctgcccccgcctgcgggaggagggagcggcaaggggaggccggatggcttgcccaaggtcaccctc

SEQ ID NO: 16143 - DNA, 528 bp, Homo sapiens
  source 1..528: mol_type = other DNA
agtgtggcagcattcgctccctacctggggagcactaggaagtgcacccctggactgggggaggttggcagaggtgtgcacactgcggaagcgcccccggcggaaattaaacaaacagtgcttacgtgcccgtctcccctcggcgctgagatggcacctcgctcctctctgtgccccctgggctcagtgggaaagtttccaaagacttcccgcctgggaaggtggctgtgccgccggctgctacgcgcggggccaaggagtcgctggccgcaggggaggtgctgccaaccacccggcccccagcggcgcgcgactcacggcctgggtgagcagccaggcctggcgccgccgttgccatagttacagacgcagccctgcgagggggcgggctctggccgcacgtcattcccggcgcgacgctccttcggagaccctcggccagcctagcgggcgctccacctgcgcgccggctcaccgctgccctgcgccggttctgcgccggcgcggtacgagggcgcgcggttgagg

SEQ ID NO: 16144 - DNA, 160 bp, Homo sapiens
  source 1..160: mol_type = other DNA
ttctcctgactcagcctcccgagtagctggaatggccagtctggtctccaggtgatccacccgtgctggcaagactggtgtcaaactcctgacctcaaaagttctgagattacggcttctcgcgtacagcgccaaaaactgccaagggctgtgggaggtg

SEQ ID NO: 16145 - DNA, 420 bp, Homo sapiens
  source 1..420: mol_type = other DNA
cttgcaaaaatgttgtggatactgacagagtctcagctactcttcaggcagggcccgacttctttttttaaaggtcctgctttaaaaaccagaaggacacaagcccaaagttaggtcatgaggctttggccttggctgtctccttgccggaagcagcagaacccaggttccgtggggccacgatgtggggctccgcgggcgccccggcgctggccgactgctccgcactgcagctatggtcgcatgcagtgcctgccgaagcccgcagcaggaatgctgccttcgtttcaacggatctggggcggccggcctctcctacaggtctcaggtccgcaggcctggcgtgccagcacctgccacgggactggaagcccattccttgacaacgcctaaggggatcccgttgctagggccaaggtc

SEQ ID NO: 16146 - DNA, 621 bp, Homo sapiens
  source 1..621: mol_type = other DNA
cccaaagttaggtcatgaggctttggccttggctgtctccttgccggaagcagcagaacccaggttccgtggggccacgatgtggggctccgcgggcgccccggcgctggccgactgctccgcactgcagctatggtcgcatgcagtgcctgccgaagcccgcagcaggaatgctgccttcgtttcaacggatctggggcggccggcctctcctacaggtctcaggtccgcaggcctggcgtgccagcacctgccacgggactggaagcccattccttgacaacgcctaaggggatcccgttgctagggccaaggtcgcggcggaggaacctcagcagcagaagcaggagccgctgggcagcgtccggcccgggctagtgggggcgatgccgggccagctgctcccgaggagggggaggcagggccgctggggtcgaggtgcgcgaggggtcccttcctccacctccgctgcctcccctcacaatggaaggagccaccgccgcgacccccggccgggagggagcacgggcgaggcgggccaaggcccgcggcccttctccatcgtgtgcgcccggggcggggcctgggtcgctccgccctctgcccaacccctcggctcct

SEQ ID NO: 16147 - DNA, 492 bp, Homo sapiens
  source 1..492: mol_type = other DNA
actgagcctgattaactcacctccagcccgggcagcagtgggtcgataataattaggccaaataaccacatttgcttccccgggccctccctcgaccggctctgcctgctcacaggtggctgggccaggaggctccgggtgtggccagccatcgccgcaggaggggtcccagctggagcactgcgcagccccaggccacttctctgaggcggggacgggggcaggggtggcagcgtctctccaccacatcccaagaggggggcggggtggcggcgtctctccaccaggtgtctctggggctctgcagaagcagagcccgagtcgggtccagccctgcactcccagggagccctgaggtctgccctgtagggggcactatgacctcggcctaagactccagctcctggggcagggaagtgggcagtggcagcctccgctgcagggtctgcagcccacggagtgtgggacagagttcatcctgcctcagaagga

SEQ ID NO: 16148 - DNA, 528 bp, Homo sapiens
  source 1..528: mol_type = other DNA
taataggtgccaggcactgggccaggggagaggttcagcaacttggccaaggtcacgatgggagggggcgctggcatgggaccctggcactgcccccttaataggtgggagtggggaggcggcgcgtgagctagaacccctttctcccccgcctccacggtggaggttggctttgggagcctccctcccccaactccccagaggggtcggctcccccacccgcccttcccccagccagtttagccgagggcgggggaggggggcgcggaggccgcttctccccggctgggccagaatccccgcgcggcggcgcagcctcccgcgccgggtcccgccggccagtgcgcagcgcggcgcccccgtcctgctccgcgcctgcacgcacggcccccgccgccgccgccgcgaggggagaggcggccgcacagcctggttccccgcgccctgctcgccgccgccgctcgcgcgggcaccgccgctggtccccgccccgccgccgagcgcacccgcccgggcacacgcaccccg

SEQ ID NO: 16149 - DNA, 534 bp, Homo sapiens
  source 1..534: mol_type = other DNA
ctgccaggcaggcctcgaactcctgacccggtttttgtttaaaaaagaaaagaaattctgctccagctgagccttggccccggggctgttagaaggcagaggctctggggagaagtccccaaaccggatttacccgttcgtcgcacctgtccctaggagggggctgggccctgctgacccgcggggagagaagcccgggtctcccaggctgcaaaacgctcggcactgcggaagccgcgccaggctctcccagctcgatacgcagcggccggcgcgcctgctccgccgcggggccgagcggcagaggggcccggggctgcgtggaaggcccgggggcttcagcccgtgccggggaagccgacgctcgccgaggtctcgcggaggggaggcgcctggcggccacgggaggcggggctccatccgcgacactgggagcccgggcgggcgcgcacgtgtgtatacgagtgcgtgggcccatccggcggcccggactacaagttccagggtgcccagcggcgctcccgggttttctgg

SEQ ID NO: 16150 - DNA, 431 bp, Homo sapiens
  source 1..431: mol_type = other DNA
tccactgaggacgcccaagcgggacagccgggcccgccgcggtgagatccccggcctgtccagcccccgggccgaggccggagcgctggacaacgcgggtagctggcgctcgagggacaggcagctcccaccggctaggacccccatcccgatgcgcgggcgaagggctggggccctgtgccgctggcgatcccggggaccgcctggaactcgcggcactcgggccccgcagccgccggcgacacagctacagaccccgactgcagccggtttcaggggcggggcgaaacccggccttttgaagggcagcgatttaaaagagtggcaccgcccaattggaacgctctcattctgaaggcggttccgatgggcgcggccagcgcggctacgattgtactccccgagccggggtcccggtagcttctagtagg

SEQ ID NO: 16151 - DNA, 382 bp, Homo sapiens
  source 1..382: mol_type = other DNA
agcagctggctggacttcctgctagtggcgatgctcaggtagcctcccccattggcaggactctgcccccaggcttgcccaccagtgtgttcactggaaaggccgctgtcctgcgcagagctggtggcggacgtgccttgctctactgaagtccacatcctaggcagagacccctgaggtgtcacctaagcgaggctcctaggaaaaactgcaaaatggacttgtttccctaggctggtgacaggctgcctagcttcctgtgctctctggggacaaaggtgggggggcccctggaaccctctgtgggctggcagtgtgcttcctgcacccagcgccagcccgccctggggaggggctgaacccgccctgctcgtgataaggc

SEQ ID NO: 16152 - DNA, 730 bp, Homo sapiens
  source 1..730: mol_type = other DNA
gcctggaatctcacctgaggctcagggtgcccaccaggtacgtccaccagcccaggggcctcagccacctgccgggagcgggcgcccacccccagtgggtccgccagataggcctgcgtgtcaccccagtcggtggcaccctgctgtcgcagccaggcagctgagctggaccagttggcaggagcagctgtggcccccgagagccaataggcgccagggaagagccatgggccttagccgggtctcccagatggcagtgatggcctcgtccccacctggcagtgggcgacggtcatgggcggggctcagctcggcctgtatctgctcctggggcaggcccccgccagggcactgcagcagcaagggcagctctgggggaggatacggccaggcctgtcatccaggggggccactaccactcctgggctgcgcagcctctgtcgcagacctcctgagggtatccgcagcgcttcgcaggagccccgagtcccgcagggtatccaggacgcccgggcatccctaccatccagaggtcttgggttcaggcgccccaaatgcccatcccccaaacccaggggtctgcctccgacccggggcgcgcggggacccctttccagggcccggaagctccagcctccagcgggcgctcaccagccgccgggtccctcaggctccgccccttccccgaagcggaagtgcccgccccattggcgggtccgccgcggtcgag

SEQ ID NO: 16153 - DNA, 481 bp, Homo sapiens
  source 1..481: mol_type = other DNA
ccttaagtgcactctgtgccttcctcagggagcgtggagcttcaaggccccatggcgcagggcataggacagagccttggacagctgcacgtctcggtcctgaaagaacccagcggtggcccctatccaccgccccccagcaactcccagggagcctggactggtgggagggggtgcgcgcacctgttctcggggtctgggagcccttctacccctggacgaggggggactgctttaaggccccttccacaaactaaggcccagcaggccagacttgcccaaggtcgccaggagcgcagggaggccgagccccgcaccccagatcgctggtgcgccccgcagggtggtccgggaggcagggccgacgtgccgacggaccgggcggaagcgtcggggcggcggggacaaacctccaggatcctcgaccgcggcggacccgccaatggggcgggcacttccgcttcggggaaggggcggagcc

SEQ ID NO: 16154 - DNA, 426 bp, Homo sapiens
  source 1..426: mol_type = other DNA
ggccagatgcctgcaggcctcctgccagcccagacctgtagaattctggccaccagctgcccagcgaggtcctggtgctgggggctgccaccagggcacagggcctgtgagaggtcaggctcagcccctgctcccagcaagcctatacctgctggcctttgagtctggtgtcctttccctaattttccctttagctgcagctccctagcctggaatctcacctgaggctcagggtgcccaccaggtacgtccaccagcccaggggcctcagccacctgccgggagcgggcgcccacccccagtgggtccgccagataggcctgcgtgtcaccccagtcggtggcaccctgctgtcgcagccaggcagctgagctggaccagttggcaggagcagctgtggcccccgagagccaataggcgccaggg

SEQ ID NO: 16155 - DNA, 722 bp, Homo sapiens
  source 1..722: mol_type = other DNA
aaactaaggcccagcaggccagacttgcccaaggtcgccaggagcgcagggaggccgagccccgcaccccagatcgctggtgcgccccgcagggtggtccgggaggcagggccgacgtgccgacggaccgggcggaagcgtcggggcggcggggacaaacctccaggatcctcgaccgcggcggacccgccaatggggcgggcacttccgcttcggggaaggggcggagcctgagggacccggcggctggtgagcgcccgctggaggctggagcttccgggccctggaaaggggtccccgcgcgccccgggtcggaggcagacccctgggtttgggggatgggcatttggggcgcctgaacccaagacctctggatggtagggatgcccgggcgtcctggataccctgcgggactcggggctcctgcgaagcgctgcggataccctcaggaggtctgcgacagaggctgcgcagcccaggagtggtagtggcccccctggatgacaggcctggccgtatcctcccccagagctgcccttgctgctgcagtgccctggcgggggcctgccccaggagcagatacaggccgagctgagccccgcccatgaccgtcgcccactgccaggtggggacgaggccatcactgccatctgggagacccggctaaggcccatggctcttccctggcgcctattggctctcgggggccacagctgctcctg

SEQ ID NO: 16156 - DNA, 440 bp, Homo sapiens
  source 1..440: mol_type = other DNA
agtcactttggtgtacctgtaaaacaaacatatgctgggcaagtgggcagtggcattgataggtgggacctccccccaccccaccctccaccgcaggtgaacctgccgctgctcaccctgagccagcccctgctgttgggcatcgcccgaaatgagaccagtgctggccgagccagagtaggctcgggtacatgatcctgggttggctccacaggtaccccgcaggggctggtcacccactgcccacggccagggctggggcctgcagaggcctggcaatgaaaggtccagggacatgttcagccccttaacatgcctccctaaggacagtgcagaggtctctgaggctcaggaattctgggcacagccctggcaggagaagtggcaagccgagacggggctgaactctgcccctcgtcccactggagcggccctagggt

SEQ ID NO: 16157 - DNA, 395 bp, Homo sapiens
  source 1..395: mol_type = other DNA
agtaggctcgggtacatgatcctgggttggctccacaggtaccccgcaggggctggtcacccactgcccacggccagggctggggcctgcagaggcctggcaatgaaaggtccagggacatgttcagccccttaacatgcctccctaaggacagtgcagaggtctctgaggctcaggaattctgggcacagccctggcaggagaagtggcaagccgagacggggctgaactctgcccctcgtcccactggagcggccctagggtccccagccctacaataaacgactttattctggattctgtaacagagaggatgcaagcaggggataagttctttgctggctccagagaggctccggggcggaagcagctccgtaagatatacctcgctgcag

SEQ ID NO: 16158 - DNA, 445 bp, Homo sapiens
  source 1..445: mol_type = other DNA
gccagggctggggcctgcagaggcctggcaatgaaaggtccagggacatgttcagccccttaacatgcctccctaaggacagtgcagaggtctctgaggctcaggaattctgggcacagccctggcaggagaagtggcaagccgagacggggctgaactctgcccctcgtcccactggagcggccctagggtccccagccctacaataaacgactttattctggattctgtaacagagaggatgcaagcaggggataagttctttgctggctccagagaggctccggggcggaagcagctccgtaagatatacctcgctgcagaaagccgcagagagcgggctctgtcccgcccgctccccaggtgggcgcccgcgcctgtccagcgagtccgcaggctgggggaccggagtaggggctggcatccgcgggtctgtgagcagcgg

SEQ ID NO: 16159 - DNA, 528 bp, Homo sapiens
  source 1..528: mol_type = other DNA
ggctgaactctgcccctcgtcccactggagcggccctagggtccccagccctacaataaacgactttattctggattctgtaacagagaggatgcaagcaggggataagttctttgctggctccagagaggctccggggcggaagcagctccgtaagatatacctcgctgcagaaagccgcagagagcgggctctgtcccgcccgctccccaggtgggcgcccgcgcctgtccagcgagtccgcaggctgggggaccggagtaggggctggcatccgcgggtctgtgagcagcgggggcggggcctggttgtggcccctccttctcccgtccccaagttccctgggtgggaacggggtcttggggtccctggctgggtggccagaccccgaagccagcgctgggaagggctgcggatgcccgggtcagaggaaggggcaggtccaaggacacgcgggtctggtcctgggcaagaaccgccccctctccgaacaacgggccaggccccttccctctgcccccgggtgct

SEQ ID NO: 16160 - DNA, 848 bp, Homo sapiens
  source 1..848: mol_type = other DNA
tggccgcgccaaatctccaggccgcggagccgagcatgtttgggggctgcatgcagatcaggagcgcgcacagtgcccaccgaagcaggtcctgcaggcaccgagggagccccgcccccggcggtgcccaggggacggggtggggcggaggagtggccccagactggggctggcgggccagcggggaggggcacctcccaggggatgcacgcgccgggcccccgagacgcccgcgtccaaggccggaccccgcagatcccctcggccgaggccgcgggtcgcctcctcacttccgccaaccttgagagagggcacggcgggcgggcgggcgcgctgtcgggccgcacgtacctgggcgggggccagctgcaggagtgcggcgagcagcaggcggcggagcagagggctcatggtgcccgccggggccgcccgccgggggcgcccgcatcgccctagcccggcggcgcggggggcggcgacagccagagccccatggcgcgggcccgggcgcggcgggcgggggccgggcgcggggggcgactcctccgcggccccctcccgagccctgggtgcaggcagcgcagcgcagcgcagcggaggcggccggaggagccgggcgggcgggcggccggtggcggcgggcagcggcggcggggacggcgggggcggcggggggctgggcccgggctggcgggcaggcggctcatgtgacccagacacgcgctccccaccggcccgtggggcgggggcggggcggcggggtgggggggcgaggccgtcggcggggcccgcctcctccacacaccccctcccgcctcccgccgcggcaggggaaaggggacgcaccg

SEQ ID NO: 16161 - DNA, 638 bp, Homo sapiens
  source 1..638: mol_type = other DNA
atgtccacagctgctgtcacacctcaaagtgaccagggacttcggatgccattggaccctagactgagccctccctatctatcacaggaagggttagactgaggttcctaaccctgtgtaagggtaacaggaaggtgaagcagatgcaccttaacttcatggatgaaaaggatcggaaagcccgggcacgggccaggtctgtccctgctctattctgctcctgctcccaggagacaacggctagggcagcggcagccgccaccatccgagccaacccaaggccccgagatcgtgccccggggcgccggcccctgaggggctcacctggatggggcctgcagtgcacggcccgctccccgaaacgcgcgcaataaagtgaaggcccgacgcccccggccccggcctcgccaaggggcagcgccccgccctccgggtagtggcggcggcgactggggagcccagcctcctgggcggtgcgtcccctttcccctgccgcggcgggaggcgggagggggtgtgtggaggaggcgggccccgccgacggcctcgcccccccaccccgccgccccgcccccgccccacgggccggtggggagcgcgtgtctgggtcacatgagccgcctgcccgccagcccggg

SEQ ID NO: 16162 - DNA, 284 bp, Homo sapiens
  source 1..284: mol_type = other DNA
tccctgcagcctccagtgcccagggctgagtggtttggggctttgcctgctgaagcgggcagccactgggaggggcagccaccctaatggaggctttctgacagcgattactactttcaaatcattttctcagtcatgatgtcactggacatgcgggccccaagcatcatgattgtcttccttttacaattgaggaaatagggtttagctgcctctcaactgcaggttcagacagatgttgccagcctgcaggggccctgtggggtgggtgtcatcaagcccgt

SEQ ID NO: 16163 - DNA, 755 bp, Homo sapiens
  source 1..755: mol_type = other DNA
caggaaggtgaagcagatgcaccttaacttcatggatgaaaaggatcggaaagcccgggcacgggccaggtctgtccctgctctattctgctcctgctcccaggagacaacggctagggcagcggcagccgccaccatccgagccaacccaaggccccgagatcgtgccccggggcgccggcccctgaggggctcacctggatggggcctgcagtgcacggcccgctccccgaaacgcgcgcaataaagtgaaggcccgacgcccccggccccggcctcgccaaggggcagcgccccgccctccgggtagtggcggcggcgactggggagcccagcctcctgggcggtgcgtcccctttcccctgccgcggcgggaggcgggagggggtgtgtggaggaggcgggccccgccgacggcctcgcccccccaccccgccgccccgcccccgccccacgggccggtggggagcgcgtgtctgggtcacatgagccgcctgcccgccagcccgggcccagccccccgccgcccccgccgtccccgccgccgctgcccgccgccaccggccgcccgcccgcccggctcctccggccgcctccgctgcgctgcgctgcgctgcctgcacccagggctcgggagggggccgcggaggagtcgccccccgcgcccggcccccgcccgccgcgcccgggcccgcgccatggggctctggctgtcgccgccccccgcgccgccgggctagggcgatgcgggcgcc

SEQ ID NO: 16164 - DNA, 383 bp, Homo sapiens
  source 1..383: mol_type = other DNA
tcatgatgtcactggacatgcgggccccaagcatcatgattgtcttccttttacaattgaggaaatagggtttagctgcctctcaactgcaggttcagacagatgttgccagcctgcaggggccctgtggggtgggtgtcatcaagcccgtgttacacgcgtgagtgtcactgtgaagcccaggctccacagcgactgagggccgtgggccatgagggcgacttgaaatggcgcctcaagcggccggaagtgtctaccgctccgccggaagtgacgcagggcagcggcgtcgcgggggcggggctcgggaaagacccgtgccagcgggcgtgtggccgcgggtttcgcaagggcggcgtggcccggcctggtagcgacgagga

SEQ ID NO: 16165 - DNA, 522 bp, Homo sapiens
  source 1..522: mol_type = other DNA
cgtgagtgtcactgtgaagcccaggctccacagcgactgagggccgtgggccatgagggcgacttgaaatggcgcctcaagcggccggaagtgtctaccgctccgccggaagtgacgcagggcagcggcgtcgcgggggcggggctcgggaaagacccgtgccagcgggcgtgtggccgcgggtttcgcaagggcggcgtggcccggcctggtagcgacgaggacgcgcctgcgcagaggcggcagcaccaccggggttgactccgggggcgcgggggccacagcccgggctggggggagccggggtgcagggcaggctggatcaggccgggcagaagcggaccgggctccgagtgtcaccgcagggggagggttctcacgccgcacggggcggagtcctgggactcggggcgggacgtggaaccgggacgggtgggacctccgagctggtgccaggagcccggcggcggggggcaaggcggggctgcaggcccgggggcggtaccgcgtcctccgaagggc

SEQ ID NO: 16166 - DNA, 594 bp, Homo sapiens
  source 1..594: mol_type = other DNA
agggaggggcccgacgctcgcacgtggccccggcggccgccatggcggacagcggcaccgcggggggcgcggcgttggcggccccggcccccgggccgggcagtggcggcccaggaccacgcgtctactttcagagcccccccggggccgcaggagagggcccgggcggggcggacgatgagggcccagtgaggcaggagtggatcctggagcagctcacgcgcctctacgactgccaggtgtgttcccaccccgcgcccgcgccggtccgcctggcagctccactgtgagctcgcctgtcactggagtcaaagggcctagtgtcctccagacgcctcaaggggtagcctgagccttgggcaaggctggcagcggcaggaggtctcaccgcctggtgcccgcggctagcctggagctccatcttggcgtgcgtgcaggctagcccgcttttgactccctggttgttcagacggtgactcaggccccggggggcagggtggaggagtgggtttgcccggtgctgcctgcctaccctagcccagccctggaatgcagagggtgtggcagggtggtgggcatcccctccctcaccaa

SEQ ID NO: 16167 - DNA, 611 bp, Homo sapiens
  source 1..611: mol_type = other DNA
ctctgtgcgcactcgggtcgcgaggcgcagaggacgctttgcgcttcccggcctggccgcagggcgggggaggggcggcgccgggagcggactccgtttcccacaagcccgagcctcgcgccatcttgccggtgggcggtggctgcccggggttggccgtttgggccggccgggtgccaccgctcacccccagccccggcttcttccgctgggggcgtgggaccggagagtctagggacccgggtgtcggtccgtgcggaggagcccgttcgctcctcgctggccgagggctggaggacctggacatcggggaccgcagcgtcttgtctgatggcctcaatgaggacgaccctcccctacccctgcccgggggcggagtaggggagaggggcctgtaggggctggccctttaagcgcttcggcggctgcagctcgggcggcggccgcgggggacacggcggggagggggcggggcgcggccaggccaagcccgggggctccgcatgctgcagctgcccccgggcgcccccgccgccgccctcgccgcggagccgcgcggagcggagccggcgagctaacccgagccagccggcgggcgtcccggaggcggt

SEQ ID NO: 16168 - DNA, 553 bp, Homo sapiens
  source 1..553: mol_type = other DNA
ccgcagggcgggggtgcaggagccccggcacggcgccctctctgcggagccgactgggcggcggtcccgacgcacgctcctagggtcagccgctctgtgcgcactcgggtcgcgaggcgcagaggacgctttgcgcttcccggcctggccgcagggcgggggaggggcggcgccgggagcggactccgtttcccacaagcccgagcctcgcgccatcttgccggtgggcggtggctgcccggggttggccgtttgggccggccgggtgccaccgctcacccccagccccggcttcttccgctgggggcgtgggaccggagagtctagggacccgggtgtcggtccgtgcggaggagcccgttcgctcctcgctggccgagggctggaggacctggacatcggggaccgcagcgtcttgtctgatggcctcaatgaggacgaccctcccctacccctgcccgggggcggagtaggggagaggggcctgtaggggctggccctttaagcgcttcggcggctgcagctcgggcggcggccgcgggggacacggcgg

SEQ ID NO: 16169 - DNA, 520 bp, Homo sapiens
  source 1..520: mol_type = other DNA
gcctctgtattgggggggctcccacaggggcccccaggcaggaaccccccccaccagctaagccctgcgggaggggctgcagcccccacccatcccggaacgcagatttcagggcacctgctgtgggccaggcactgcagagcgcccctctgggcagacaacagcgttcccttaaaggaggtggcaggcgcccggcctccctgggctagggacgggggaggggtgcctgccggcgggaggtccattagccggctaagtgctcccagggaggggccgaagcttttcctgcattcagcgagggtgggcgacagggctgtgcagcgaccccccggcccaagtctagccctccgctggtactgcagccctagctcggaccgccttaagatcaggttctgctgagccccgcagcccccgctccggctgcagtcgccgccccggccgccagggggagccgacgcggtgggagggggcggggcccgggaggccccgccccgtccccgccccgcccgggccccgccga

SEQ ID NO: 16170 - DNA, 485 bp, Homo sapiens
  source 1..485: mol_type = other DNA
tcatgttgggtgccaccccagtgtctggtggacaatactattattatcaatctaagagtagcctgcccgagatcactggagccaggacctgcttgcaggcagtgtggttgcagcgtcctgtgacctgggaagcagggagcggagacttctgccaggctcccggctcctggcctcagccacacccggtggagaatggggattagccccacccatggcaggctttgcttacaaaagatgggcgttcatctgggaacagaaggcccccaaaatttggggatgcatgggcctccccacttcagtgtgcaaccctaccctgggcctgaggcccccgaatggggagtctatgggtactgcccctagtaggggtctggacctcaaaggcagcccaggtcccctgcagtggaatgaaaagaagaaacttttcccttcaggccagcctggggggaggggtctcccccggcccctggggcccccaggcaccccac

SEQ ID NO: 16171 - DNA, 700 bp, Homo sapiens
  source 1..700: mol_type = other DNA
ggggtccccgggtgggccgtgccccgtgccgcccgcctggggtcgtgccgcccggccgggggcggcaacggattcccgtcccagatggcccccgggccccgcccccgggcctgaacccgcggagccccgaatcccccgcgcgggcccgcccctcgccccggcgcgcccgcggccctgctcacctggccggccgcctgccaggcgtgaagcccccacgggccctacggtcctcgggtccccggccctcctcccgcgcccgggcagccatcccagccagggaggagagtgcccccgagatggcgcgggaggtgtcccccgaggcgggcggcgcgaagcttccgcgcctgggaggaggagcggggagcgggactttccgaccgggcacccagtccaggacggctgagcttcagttgtctggctcccgggggagctgtcactatccccacttcactggggggaaactaaggcccagaggggctggggtctccaggttccaaatggggaccccagagacctctcctgctcccacacacgcccaaggtgtgaggcagcgaggatgtgtccggcgggggggcggggccgggccgggttgaccccgcctctggacctacccgagtgacgttccgagaggtgattgggccaggtcgctgacagttcccgttgcccaagcaactagggcccggagcccggggtgctggag

SEQ ID NO: 16172 - DNA, 695 bp, Homo sapiens
  source 1..695: mol_type = other DNA
actggcgtcccacaggaggcctggggcctggcgatgatgcttgccggagcctgagggcccgtcccctgcggggctggggcccaggcccctctctgcagagctggatgaggacaagatgttacgtagtcaaggcacagctggggccaacggtggccctggaaggcagaggcaggtacccctggcttcctctcccaccgtagcgcccccaggcccgccaggcctcctgggccctcatctgtctgccgggtctggcctggcagggagctgaggctgtcggctcaggacctcagtctcccctcagaaccccggtggacccaggccccgccccgcccgtggtgacggcgcacagggcccgatctcgaggcccctgacccgggcctgccgcctccctccagcaccccgggctccgggccctagttgcttgggcaacgggaactgtcagcgacctggcccaatcacctctcggaacgtcactcgggtaggtccagaggcggggtcaacccggcccggccccgcccccccgccggacacatcctcgctgcctcacaccttgggcgtgtgtgggagcaggagaggtctctggggtccccatttggaacctggagaccccagcccctctgggccttagtttccccccagtgaagtggggatagtgacagctcccccgggagccagacaactgaagctcagccgtc

SEQ ID NO: 16173 - DNA, 739 bp, Homo sapiens
  source 1..739: mol_type = other DNA
gcctggggcctggcgatgatgcttgccggagcctgagggcccgtcccctgcggggctggggcccaggcccctctctgcagagctggatgaggacaagatgttacgtagtcaaggcacagctggggccaacggtggccctggaaggcagaggcaggtacccctggcttcctctcccaccgtagcgcccccaggcccgccaggcctcctgggccctcatctgtctgccgggtctggcctggcagggagctgaggctgtcggctcaggacctcagtctcccctcagaaccccggtggacccaggccccgccccgcccgtggtgacggcgcacagggcccgatctcgaggcccctgacccgggcctgccgcctccctccagcaccccgggctccgggccctagttgcttgggcaacgggaactgtcagcgacctggcccaatcacctctcggaacgtcactcgggtaggtccagaggcggggtcaacccggcccggccccgcccccccgccggacacatcctcgctgcctcacaccttgggcgtgtgtgggagcaggagaggtctctggggtccccatttggaacctggagaccccagcccctctgggccttagtttccccccagtgaagtggggatagtgacagctcccccgggagccagacaactgaagctcagccgtcctggactgggtgcccggtcggaaagtcccgctccccgctcctcctcccaggcgcggaagctt

SEQ ID NO: 16174 - DNA, 746 bp, Homo sapiens
  source 1..746: mol_type = other DNA
ggagcctgagggcccgtcccctgcggggctggggcccaggcccctctctgcagagctggatgaggacaagatgttacgtagtcaaggcacagctggggccaacggtggccctggaaggcagaggcaggtacccctggcttcctctcccaccgtagcgcccccaggcccgccaggcctcctgggccctcatctgtctgccgggtctggcctggcagggagctgaggctgtcggctcaggacctcagtctcccctcagaaccccggtggacccaggccccgccccgcccgtggtgacggcgcacagggcccgatctcgaggcccctgacccgggcctgccgcctccctccagcaccccgggctccgggccctagttgcttgggcaacgggaactgtcagcgacctggcccaatcacctctcggaacgtcactcgggtaggtccagaggcggggtcaacccggcccggccccgcccccccgccggacacatcctcgctgcctcacaccttgggcgtgtgtgggagcaggagaggtctctggggtccccatttggaacctggagaccccagcccctctgggccttagtttccccccagtgaagtggggatagtgacagctcccccgggagccagacaactgaagctcagccgtcctggactgggtgcccggtcggaaagtcccgctccccgctcctcctcccaggcgcggaagcttcgcgccgcccgcctcgggggacacctcccgcgcc

SEQ ID NO: 16175 - DNA, 729 bp, Homo sapiens
  source 1..729: mol_type = other DNA
atcctcgctgcctcacaccttgggcgtgtgtgggagcaggagaggtctctggggtccccatttggaacctggagaccccagcccctctgggccttagtttccccccagtgaagtggggatagtgacagctcccccgggagccagacaactgaagctcagccgtcctggactgggtgcccggtcggaaagtcccgctccccgctcctcctcccaggcgcggaagcttcgcgccgcccgcctcgggggacacctcccgcgccatctcgggggcactctcctccctggctgggatggctgcccgggcgcgggaggagggccggggacccgaggaccgtagggcccgtgggggcttcacgcctggcaggcggccggccaggtgagcagggccgcgggcgcgccggggcgaggggcgggcccgcgcgggggattcggggctccgcgggttcaggcccgggggcggggcccgggggccatctgggacgggaatccgttgccgcccccggccgggcggcacgaccccaaaggcgggcggcacggggcacggcccacccggggaccccctggatgcggcacggcccccgcaactcggccgccctcctgccgcctcccgtaaccccgggcgcccgccagcggcgcagctcgcgccttcacgccgggtgcggcgctggactgcggagccagccgggccgctgcgcaatttgcgtagcgaacggcgcccgcgcaggcgcg

SEQ ID NO: 16176 - DNA, 736 bp, Homo sapiens
  source 1..736: mol_type = other DNA
cagggccgcgggcgcgccggggcgaggggcgggcccgcgcgggggattcggggctccgcgggttcaggcccgggggcggggcccgggggccatctgggacgggaatccgttgccgcccccggccgggcggcacgaccccaaaggcgggcggcacggggcacggcccacccggggaccccctggatgcggcacggcccccgcaactcggccgccctcctgccgcctcccgtaaccccgggcgcccgccagcggcgcagctcgcgccttcacgccgggtgcggcgctggactgcggagccagccgggccgctgcgcaatttgcgtagcgaacggcgcccgcgcaggcgcggagggggaggggggcggagcagcgggagccggggagccggagccccgggtccccacgacctgagccggctctcccatcagcggcctgaggacctggcgtccgcctcctccctccccttgaggctggagcgtggacgcggtggggcagaggccctccccatccgcattattggaggagagagagcctcccccagcttggggagggggagagcggggcattgggcgcccctcgcagcggccgctgccctgacccgacgggtatcagccggctctccccacgaccgaggccagggagtcctctccttgggcctctgcatccccccatccttggctctggggtaggcccagggaggagacaccccgaggggcctggggcccaggctgcctgt

SEQ ID NO: 16177 - DNA, 446 bp, Homo sapiens
  source 1..446: mol_type = other DNA
ccatggccctgatcctgggcaccaggccctcagggcctccagagagggcatctgagactcatagtcagcttgaagctggacaatcactttttgttgaaataaaatttgaggatttctaaacagtgatgattaatcatcccttcgtttggtaacctgttcaggttccctaccagtagcgggtggtcagcctcaaagcccaggctgaaagccatccagcatgagggctgaggaccccagcaggcaccagagggtctgcggggcaagttcaggaccagccagggcctgggtgtatgctggcaccagtgccatgctgggatctgcaggcagcttcagccacagccttccggggctgctggagtgggggcaggaggtgctccagcagcaactcccccagaggtgggtcccaacctccacgtcggccaattccaggtggccccaccgggttt

SEQ ID NO: 16178 - DNA, 682 bp, Homo sapiens
  source 1..682: mol_type = other DNA
agtgatgattaatcatcccttcgtttggtaacctgttcaggttccctaccagtagcgggtggtcagcctcaaagcccaggctgaaagccatccagcatgagggctgaggaccccagcaggcaccagagggtctgcggggcaagttcaggaccagccagggcctgggtgtatgctggcaccagtgccatgctgggatctgcaggcagcttcagccacagccttccggggctgctggagtgggggcaggaggtgctccagcagcaactcccccagaggtgggtcccaacctccacgtcggccaattccaggtggccccaccgggtttcctccctcatgagtgctgagcccaagggccaggctgtccccaggggcggagagttgcggacccttcccgatccggtaatgggcctgggagagggccagctgatgcccaggtcggggccctgccgctggccacactgggctccggtccaaggctagaaggctggcccctgctgcactctgccacccacctcccggggctggccggctgtggggagccaggcggccgcaggtaaacggcttggggcggcgccggcggcgagggcgctgcacggagggaagcgcggcgccggagccgcgggaggaggggggcttctgccggcgggaggggggtcccagccccggcggccgcccgctccgc

SEQ ID NO: 16179 - DNA, 788 bp, Homo sapiens
  source 1..788: mol_type = other DNA
atgctggcaccagtgccatgctgggatctgcaggcagcttcagccacagccttccggggctgctggagtgggggcaggaggtgctccagcagcaactcccccagaggtgggtcccaacctccacgtcggccaattccaggtggccccaccgggtttcctccctcatgagtgctgagcccaagggccaggctgtccccaggggcggagagttgcggacccttcccgatccggtaatgggcctgggagagggccagctgatgcccaggtcggggccctgccgctggccacactgggctccggtccaaggctagaaggctggcccctgctgcactctgccacccacctcccggggctggccggctgtggggagccaggcggccgcaggtaaacggcttggggcggcgccggcggcgagggcgctgcacggagggaagcgcggcgccggagccgcgggaggaggggggcttctgccggcgggaggggggtcccagccccggcggccgcccgctccgcccctgccgcctccgcggcccagtcggcaccggcgaggccgtgctggaacccgggcctcagccgcagccgcagcggggccgacagtaagtgcggtgcgggctccggtgcgcgggcaggactcaggggcagggacgccccaggggcgactggccgggcggggtgcccacctctcgcgcgtgggcgcctccgggagtggtgtggccgccggtcccgccgcccgccacgctccgaggcgtcgctgtgcggacgcgggggaggcggtgggagcgagctgc

SEQ ID NO: 16180 - DNA, 698 bp, Homo sapiens
  source 1..698: mol_type = other DNA
cagcgcgcgtgacccagcgagccgggcccgccgccccgccgccggagaaggagcagccactgctgcctccaccgccctgtccagcgcagccgctgggcaggccccgatccccttcgccccccgagaaggctcagccgccttccccgcccacggcctcggccctggattatcccagcgagaacctggccttcatcgacgagtcctcggatacgcagagcgagcgcggctgcccgctgccccgcgcgccgagaggtcgccgccgcccaaatccccccaggaagcccgtgcggccccgcggccccgggcgtccccgagacaaaggcgtgccggtgtaggggcaggatccctggccgggcctctcaaatgcctggcttgtttgaccaaagagccctctttccacgagactgaagtctggggaggaggctacagttgcctctccgcctcgccccgggcgggtctgcaccgctgcgggcgtgacgctcccggacgcgagtggggccaccgtgggggcacctctggcctcccgtgacccccaggccgagggtccccgggcacccaggtcggtcaagtctcggccctctcaggcccgcgtctctgcctggaggagacagccaggatgggctgcgcgtctccagcctctgcacacacattggcggtcgcgtggagggctgtcgtttgaactctcccagcgcgagaga

SEQ ID NO: 16181 - DNA, 822 bp, Homo sapiens
  source 1..822: mol_type = other DNA
cgcggcgccgcgggaggaggggggcttctgccggcgggaggggggtcccagccccggcggccgcccgctccgcccctgccgcctccgcggcccagtcggcaccggcgaggccgtgctggaacccgggcctcagccgcagccgcagcggggccgacagtaagtgcggtgcgggctccggtgcgcgggcaggactcaggggcagggacgccccaggggcgactggccgggcggggtgcccacctctcgcgcgtgggcgcctccgggagtggtgtggccgccggtcccgccgcccgccacgctccgaggcgtcgctgtgcggacgcgggggaggcggtgggagcgagctgcgggcgctgcgcggtggccctgctgtctggcgtgtgcacgctagtgtccacacacgtgtgcgtgggctctgggtgccctggcgcggccggcacgcccatgggggccggggatgccggggcgtctgcgtgcagcggggcggcgcggcgctgcagcctcgggatggagcgtgggcgcgcgggtctttgtgcccgcgcttggcggcgcgtgccggggcgtgtgtgcgcgtgggcgccgccgcccgctgtctcggactgacagctgtctcgggggctgtcgccccggtgtgggaccccgccccgcttttccgggaactgggcgtccccagcacccctcctcgcctgggtgcggcggccgggacccgcccctgggttcctcgaaagcccggcggggcgcgggggcaccctggagggccagccagcggagatgctgtcacagccgcagcgggcgagcagggacccaccattcccctgtccc

SEQ ID NO: 16182 - DNA, 480 bp, Homo sapiens
  source 1..480: mol_type = other DNA
gcacttcctgactgctgcagggagcatgggctcgagcagcgacccgaaccagccccgtgcaggacagcccgcgtgaggcggacgcacgtggccccgcccttccccgtgaccttcattcggtcaccgcagtgaccttcattcggtcaccgcagtgggccctcttccgggaaaccccgagttccgcagctctgtggggaagggggtagggggaacggggcagcacctccctcctcgcgacggcgcgctaggctccgcgtccgttacgaaagagcgcttgcgtctccggccccgcccctcccaggggccgcgtacgcatgtgcgccgcagtggctcggcgggctgcggggcgggacctgcacgaaggcccgcccactggcgctgccggctccgccccgactcgtccgggcgcgcaggcgccgcccgccccgctggtctgattagcataggaccccgggccccgccccctgctttgcatgcgca

SEQ ID NO: 16183 - DNA, 659 bp, Homo sapiens
  source 1..659: mol_type = other DNA
ggccctcttccgggaaaccccgagttccgcagctctgtggggaagggggtagggggaacggggcagcacctccctcctcgcgacggcgcgctaggctccgcgtccgttacgaaagagcgcttgcgtctccggccccgcccctcccaggggccgcgtacgcatgtgcgccgcagtggctcggcgggctgcggggcgggacctgcacgaaggcccgcccactggcgctgccggctccgccccgactcgtccgggcgcgcaggcgccgcccgccccgctggtctgattagcataggaccccgggccccgccccctgctttgcatgcgcacggccggccccacccccgctgtcagctggaggaagcggagtagggcggccgcgtcctacaagcagccggcggcgccgccgagtgaggggacgcggcgcggtggggcggcgcggcccgaggaggcggcggaggaggggccgcccgcggcccccggctcactccggcactccgggccgctcggcccccatgcctgcccgaccgcgctgccggagccccaggtccgggggcggaggggagcgctgccgcgggggtgggcggcgcgggggccatgtgcgagcgcggcagggaggcgggcggggcgggctgcaggcggggtccgactctggggccagt

SEQ ID NO: 16184 - DNA, 529 bp, Homo sapiens
  source 1..529: mol_type = other DNA
gctgccgctgccgcagactgaccgccggccccaccgacgagtataagcccgctgagcgtctcacgcctcctggctggtgccaccgcagcaggcggggcaccgctagcggcacagcggcgacaccctgcggaaggcgggcctgggccgcctccactgcgcaggcgcgagcggccacccgcagaacagagcttccgggacccacgcctcgtttgcactgggtgctggacagccgactaatttgcataatttacagatagggcggtatttctgccccttaaccgaaagctcctgcattgcagctattttgcatatgatttgcatcttacgaagaatttgtggcaagccgtaggaacctcctgctgagacgcttccggtagcggcgcgtgacccgacaggtagttccagcaagttcgccacttccggttctcctggctatccaatagcatcgagagcgaccttatgtgcggggggtggggtcccgtggcttccccctgcgcctccaggtacccgccggcggcagtcctgcagg

SEQ ID NO: 16185 - DNA, 774 bp, Homo sapiens
  source 1..774: mol_type = other DNA
gtccgttacgaaagagcgcttgcgtctccggccccgcccctcccaggggccgcgtacgcatgtgcgccgcagtggctcggcgggctgcggggcgggacctgcacgaaggcccgcccactggcgctgccggctccgccccgactcgtccgggcgcgcaggcgccgcccgccccgctggtctgattagcataggaccccgggccccgccccctgctttgcatgcgcacggccggccccacccccgctgtcagctggaggaagcggagtagggcggccgcgtcctacaagcagccggcggcgccgccgagtgaggggacgcggcgcggtggggcggcgcggcccgaggaggcggcggaggaggggccgcccgcggcccccggctcactccggcactccgggccgctcggcccccatgcctgcccgaccgcgctgccggagccccaggtccgggggcggaggggagcgctgccgcgggggtgggcggcgcgggggccatgtgcgagcgcggcagggaggcgggcggggcgggctgcaggcggggtccgactctggggccagtccgggccacggttgggacccagtcgagggtcggactggtcgggttcaggcgggatccggcgtccgagtcctggtgggccggcctggggcaggatctggctctggctgcgggtcctgactcgggtcagggttgggcctccgatccagcccgctccggggcagggttcaatcccgcagggggcgctcgaaggggcctggggccaccctcctctctggg

SEQ ID NO: 16186 - DNA, 545 bp, Homo sapiens
  source 1..545: mol_type = other DNA
tctcagactagggggatgtcaggcccggccgggccagcggtcaccttgattggggccatggctgcagcggctctgctgaaactgctgctgccgctgccgcagactgaccgccggccccaccgacgagtataagcccgctgagcgtctcacgcctcctggctggtgccaccgcagcaggcggggcaccgctagcggcacagcggcgacaccctgcggaaggcgggcctgggccgcctccactgcgcaggcgcgagcggccacccgcagaacagagcttccgggacccacgcctcgtttgcactgggtgctggacagccgactaatttgcataatttacagatagggcggtatttctgccccttaaccgaaagctcctgcattgcagctattttgcatatgatttgcatcttacgaagaatttgtggcaagccgtaggaacctcctgctgagacgcttccggtagcggcgcgtgacccgacaggtagttccagcaagttcgccacttccggttctcctggctatccaatagcatcgagagcgacctt

SEQ ID NO: 16187 - DNA, 357 bp, Homo sapiens
  source 1..357: mol_type = other DNA
ccgcatctgtagtcccagctactcaggaggctgaggcagtagtgcagtgagcagagattgcgtcactgcactccaggactgtcccgggaggtgaggcccccacgattggcgatctcagactagggggatgtcaggcccggccgggccagcggtcaccttgattggggccatggctgcagcggctctgctgaaactgctgctgccgctgccgcagactgaccgccggccccaccgacgagtataagcccgctgagcgtctcacgcctcctggctggtgccaccgcagcaggcggggcaccgctagcggcacagcggcgacaccctgcggaaggcgggcctgggccgcctccactgcgc

SEQ ID NO: 16188 - DNA, 469 bp, Homo sapiens
  source 1..469: mol_type = other DNA
tcccgcctcagcccggctgaggtgtgcccgccccgcattccccgggatatgctggggcggggtacctgcaggactgccgccggcgggtacctggaggcgcagggggaagccacgggaccccaccccccgcacataaggtcgctctcgatgctattggatagccaggagaaccggaagtggcgaacttgctggaactacctgtcgggtcacgcgccgctaccggaagcgtctcagcaggaggttcctacggcttgccacaaattcttcgtaagatgcaaatcatatgcaaaatagctgcaatgcaggagctttcggttaaggggcagaaataccgccctatctgtaaattatgcaaattagtcggctgtccagcacccagtgcaaacgaggcgtgggtcccggaagctctgttctgcgggtggccgctcgcgcctgcgcagtggaggcggcccaggcccgccttccgcag

SEQ ID NO: 16189 - DNA, 281 bp, Homo sapiens
  source 1..281: mol_type = other DNA
cctctccgcatctgtagtcccagctactcaggaggctgaggcagtagtgcagtgagcagagattgcgtcactgcactccaggactgtcccgggaggtgaggcccccacgattggcgatctcagactagggggatgtcaggcccggccgggccagcggtcaccttgattggggccatggctgcagcggctctgctgaaactgctgctgccgctgccgcagactgaccgccggccccaccgacgagtataagcccgctgagcgtctcacgcctcctggctggt

SEQ ID NO: 16190 - DNA, 344 bp, Homo sapiens
  source 1..344: mol_type = other DNA
ttgtgatcttgcaactgcactccagactaggtcacagattcagactctgtctcttaacttggaatagataaaacatgcataatttccaatcttttttccaggatgccttggggttcaagggaggcttcttggaggagcatctgaaccaggcttccagagcccttttgaggccctcgaaggtcccaggctggggtcttgcccatggagccaggggagctgtgggccttccgccgccaacctctgggctagccctgcagagatggggctgaggtaggactcagactgcccaggcccgcctgcacccggaaggaggaagggtgtctgtggctggccccgggatcccc

SEQ ID NO: 16191 - DNA, 346 bp, Homo sapiens
  source 1..346: mol_type = other DNA
acctgtaatcccagctactcgggactcactgcagtccagtctgggacaggatcctgtaagatatgcctggcacctagaatggacctgttccatgtgtccactgggtgggaagcctcccaggcttggtggccagggcccggggctgggcgggaggttctattcaccgtgcctcctaccccagtacttgcgctagtggctgtcagccagccaggcagcaggtgcagtgccccttgggcaaggcctaagcaaggcttgtaggcttggtttccggtcatgggcagctgtccccgaagcttcatcctgccaggccccccatgtggcctctggggcacacaggctggcagcg

SEQ ID NO: 16192 - DNA, 743 bp, Homo sapiens
  source 1..743: mol_type = other DNA
cacaggacaggggcgtggggtggacaccctggcctctccagctggcagaggagctgagagcccctcccaccggcctcagggtgtggggcctcatggctgtcccactcgctcaggaggaccagtcagcaggggccctgggcctcatggggagagggggcagccccgtgtggcactgacatctcttcttgaggcctgctcagggctctaagctgggtactgcaccaggagcagaacacgtgaggtgcgcatggcacctggtgggctctgcacggtgactgggggctgaagtgcttctgcaggcaccccctggccccttgccatggggtcccaggccgggctccagccccctcttggtgatgaggctcctccttgcaaaggccagtcctctggggagaggggccctgctggccacccccaggacgatggagtggggtgggctccactgcctgagagttgggtgacttccaggatccagcttgggcagccactggctgcagccggcattcccgggcagaggcttggggactaatgccccagaggctccaggttacccacgggctcccgtaaggtcccggagcgcacggccctgaggcctggcctgggggctcgggagacagggcggccccagccggccgcccaccggcagcccggcgctgtcacgttccagccgcctgactcaggccgcgcagggcggggagccgggaggcggtgccggcgcccgcctcggccccggaggcggcacc

SEQ ID NO: 16193 - DNA, 276 bp, Homo sapiens
  source 1..276: mol_type = other DNA
cagctgcccaggggcatcagagaaagctcaggctgtggcgtctggctctgagcgagtgaccttgggcaagttgcctgccctagcccagagctggccatgggggagggctggcttcactctacctcgcccggagcctggaagcggggctgggctcagctgcgggcccatggtttctgcctggtagggaaggcccttcccaggccccacatctggcttcagagccttgaacagttggagtggctgaggcctcaggtcctgagacatgaactgccttca

SEQ ID NO: 16194 - DNA, 290 bp, Homo sapiens
  source 1..290: mol_type = other DNA
tacctcgcccggagcctggaagcggggctgggctcagctgcgggcccatggtttctgcctggtagggaaggcccttcccaggccccacatctggcttcagagccttgaacagttggagtggctgaggcctcaggtcctgagacatgaactgccttcactcagaaggtggctcagccctctggtccacacttggtgggcagctcggatgccccaggcagcccgggcacagtgattggacagtgccccacccccaatccggctgaggggcaggaaggcagaaggtcttggtg

SEQ ID NO: 16195 - DNA, 323 bp, Homo sapiens
  source 1..323: mol_type = other DNA
ccaaagtcaccaggcaaaactagccaggcttggcccctggctgggttccaagctccaccgaggaggcaggagccacgggtggggccaggccacacagcctgggaggcgcaggggctgggcagctgccagtgacccaagcccacgccccaaattagggggatcccctggcccaccttctcttggctcagccactctgggaggtgggcacacaggggcccgaagggagcaggcagccctggcatcccacaagcaggccggccctggcccccaagcagaggaggctgcacctccctcgcgtctgtgcctgcctcaacgcgggttaa

SEQ ID NO: 16196 - DNA, 619 bp, Homo sapiens
  source 1..619: mol_type = other DNA
gtgagtgaagggtgtcccccagtcccccagggggctgctgccaggtgccctcagtcaccaggcatgtgcaggcgcaaccctgcccccacacctactcgtacctcggtccagggttccaggcagaactgagagtttggcctcaaactctgggattcccatgaggcaggactgggaaacccccaagttcctgggggctccaagccaggggccctccggacggtgggaggtgggggccaggctaccgactgggctcctcgaagcccgggcccgcccctgggggtagccagcagagggcgctgcggcccaggccccgcatcagccctgctctgtcccagccccgcgctgcgcgaagacctgctggccgtggggggagggtgcgggacccaaggccccgaactaaggggcgaggtttggggcccgcctggttgggggcccgggcgcccgagaacctcgagaggctgggaggagcgcgggtgctggggccgggacgcctgggtcccgcgcgagggagggagtgggcctgtggagccgctggactggcggcttctgagcccttgcattggctgcgctgctcgcccgtcagcgcagcgtggtccaatgcgcgcgtctcgggggcggg

SEQ ID NO: 16197 - DNA, 619 bp, Homo sapiens
  source 1..619: mol_type = other DNA
cgggggcggtcctggatcccccgccccaaggctgggaggggcacgcctcggaaccgttacccgctctcctaggcccggctagtggggaccccaaccgcctgcggctgccccgagccaggcttccggggccccgttcctcctgtgtgaactgggccccccgcccccaggcctgtgccacccgctgcctgcaggaagacgcccggtcccgggccgggttagccccatgccgagctgggggctgggcggggcgccccttccccaccgcagtccgcccctcccggcttcctccgcccgacacccaggcagggcggggggcactggggcgtccgcggttgggggaggggctcttcgtttcggtcccccctccgcgtcccgggcggcggggcctccggtcgcccgccctcggggcagctagtggcgcagccccccgcccgcggccctggcctcccgggcggcgcggcaggggaggggttaagctgccgcagggaccgccgcgtgcggggcgagagggagcccccggtgggggtggcgcagccggcggtgcggagctccgcgcaggggcggagggggcagcctggcgcgggggcgggggcggggcggcggggagcggggccgcggc

SEQ ID NO: 16198 - DNA, 606 bp, Homo sapiens
  source 1..606: mol_type = other DNA
agtgcggacgcctgcacctccacttaggtctgaccccgccagtgaccggagttgctaatggtgtcatgaccccggccacccttggcgcgagcgcccccctgctccgtgcgcgctcacagttcgcctgtgcggggccggggccagggtcaggagccgggagccgggacccctgggacctttgcggaggtggcctgggagcgctcagttcccaggctcaggcttcccgctgacgcctcctggccgcagcgggctccccccgccccaggatccgcctcccctagggcaggccccctgggggctgccgcagccccgcctcgccttcctgggctcccgggagggggcgaggcgggcaggacgcctgggttctctccccccacctccctccgaggtcccctcaggctctgggcccaggcgccctgcggggggctgggcgccagccagtccaagcccctcggccttcccgcgactccgagggtgggccggaagcctctggttgcaccatcccgggccagaccgtttaaccccgggagtggccgcgggggacaactccgcccctgtccagcagggggcgtgcccgccccgccccgtttctgcccgcggggccgc

SEQ ID NO: 16199 - DNA, 701 bp, Homo sapiens
  source 1..701: mol_type = other DNA
ttcggtcccccctccgcgtcccgggcggcggggcctccggtcgcccgccctcggggcagctagtggcgcagccccccgcccgcggccctggcctcccgggcggcgcggcaggggaggggttaagctgccgcagggaccgccgcgtgcggggcgagagggagcccccggtgggggtggcgcagccggcggtgcggagctccgcgcaggggcggagggggcagcctggcgcgggggcgggggcggggcggcggggagcggggccgcggcgtggagagcgggcgggagccgcagccgcagcgaggccggcgggcgggagcgcacggaggtggggtcggccaggccggtgcgggctccttgcggcgggcggggcgccaggcgaaggagggcgcggcccccagcgactccccccccgcccagggcggcgcgggcgggctgggggcggcgagcggggcagcggccacgagagctaaggcgcgctggatccccggagggcggaggacctccacggtgcacccacccccatttggcagatgagaaaattgaggctcccagaggccaagtgattctcaagctctgggtggctcttaggaaaagtccgcctgagaactccgtacaggagctcccctgtcctccagcctgggggatggggccgcagggcgggccctgcaccgcgggcgtgcgcacccatgggggtgtgtgca

SEQ ID NO: 16200 - DNA, 497 bp, Homo sapiens
  source 1..497: mol_type = other DNA
ccaccctcggcaggtgcgtcccacggcgggacggtgatgggagggggcgacccgtgggggcggggcctaggcctctccagccccaggtcagcggccagcctcgctggccgggggcggggcgtctgcctgggtggggcccaccggggctgggagccgggaggcttcccggaccacggaggatccgcgctgtcgagggcagggggaggaagcagaggatgctcggcgccttcttggctccgcccttagccccgccctactgcggcgtttagaccgcctagtctaggccctcattatggggaaactgaggaacagaaaggtcctgtttctaagtcttacgactgaggtgcgggggcggtcctggatcccccgccccaaggctgggaggggcacgcctcggaaccgttacccgctctcctaggcccggctagtggggaccccaaccgcctgcggctgccccgagccaggcttccggggccccgttcctcctgtgtgaactg

SEQ ID NO: 16201 - DNA, 422 bp, Homo sapiens
  source 1..422: mol_type = other DNA
gtgctggggccagaacacaggggctcaaagctgtggggcgccaggtcacagagctggtttactcacttcgaacttactgtcattaaaccagtatgatgatggagtggccgagggcctataggactacagttcccagggccccgtgctgcaggctagcggcctcccgccaatgctggccagtaaggtcacttcagggctccttgagggacagcaacagggggagcctagagctgctggggtggagtgagggctgtggccctgcctcacacaacctccctcacacaatgcagggtcggcctgcaccacagcctgcagggggtcctcagcacaggcctgtgaacaagccaggccagtcttggcggccgagctgccaggccaagaccctcccattgcaggggaggcggggcgtgctgcccaggctt

SEQ ID NO: 16202 - DNA, 435 bp, Homo sapiens
  source 1..435: mol_type = other DNA
gccaggcttgaggagccctcagaagcaaggcaggctcacgtttcccatgggggcagggcctggggcctggctacccagctctggaagcggcaaagtggcgctatgtgggttttagaaataaaatcaataaatgacttagaggaagctgactaaggcatcagtctccaacaagcacttgcctctggcagaatcagagagagaaaggcctgcccacctgtcttaagacacctggggtgggaaagctgaagtagcagcactgtccccgtccctcaaggcctggcaaggcctggcaagagctgttactgaggttcagccaagggctctggagaaacccaggattggtccaaggaaggaggccgggtttctagttagaaacttaaataacctcggttcaggttgtaaaagtgcttcagggttcattaaacctgcatacac

SEQ ID NO: 16203 - DNA, 491 bp, Homo sapiens
  source 1..491: mol_type = other DNA
gttttatacgattttaagatcatttaattaaatcctctgaactcatgttgttgcatcagttcaaatactgttttaaatactttttttttttttttttttttccaaaaaaacaggaagtctttttccggcgcgcgccagcccctcccctgctcccgccccaaggttctgcgttaccatgggaacaaaggttgacgtcacttagggcttccttgctggtacgcccgccgtaaatctcgttccggctgggccttttccgccgcccggagaaactgccccctggggggattgattgagccgcagccaatgagagagctcgccgtcgctccgtcatatcggagctcagttcacgcagtaacaaatgaagtgcgcgctgcttggcctaacggttcggccaattccgccaatcggaggccgccgatttcgacccttcgcctcggcccggcccaatccaggccccggccccgccgcccccggcccgcccccgcggtgcc

SEQ ID NO: 16204 - DNA, 381 bp, Homo sapiens
  source 1..381: mol_type = other DNA
ctgacaggctcactggaagctgggattgcaggagtgcaccactacacccgttttatacgattttaagatcatttaattaaatcctctgaactcatgttgttgcatcagttcaaatactgttttaaatactttttttttttttttttttttccaaaaaaacaggaagtctttttccggcgcgcgccagcccctcccctgctcccgccccaaggttctgcgttaccatgggaacaaaggttgacgtcacttagggcttccttgctggtacgcccgccgtaaatctcgttccggctgggccttttccgccgcccggagaaactgccccctggggggattgattgagccgcagccaatgagagagctcgccgtcgctccgtcata

SEQ ID NO: 16205 - DNA, 452 bp, Homo sapiens
  source 1..452: mol_type = other DNA
ttaattaccagtctttaaaggcccagcccgttctcagggctcctcccagcttgtaggagctgaggtttcacccttaacccaagggagtctggggcccggactgggaacctcccagaggtccagcccatctcggagcatcccacatagatttatttttcagttccaagaaagatgaatacattttgttaaaaaaaatataatggggatggggcggggagtggagcgccccctcttccctctgttgcgctccctacctgtggagcgcgagcgacagtggcggcggaaggacgtaggctccgccccggccttggggcttccccgcgccgccgagggcccgtcccgcgggcgcctcctcccggactggcggtggggcatccccggcgcggccccgcccccgggcctcagccccgcccccgcggcctcagagccacgggcgcccgccccgccccgcg

SEQ ID NO: 16206 - DNA, 613 bp, Homo sapiens
  source 1..613: mol_type = other DNA
tctgttgcccaggctggagtgcagtggcaagattctggctcactgaagcctccgcctcccaggttcaagggattccccgcgcctcagcctcccaagtagctgggaaaaaaaaaaaaaaaaaaaaaaaatatatatatatatatatatatatgtgtgtgtgtgtgtgtgtgtgtgttatatgtatatatatttatgtatatgcacatacacacaaaattaggccgcacgcctgtgatcacagctactcgggaggctgaggcacgagaatcgcttgcactgcaaagctactcttagcacgtgttagagtatctcgcgcatctttatatgttaacagacactgataactctggcagtgtttaaaagtatcgacctcccaccccgagtctgcaggtagtgcccccggactacattttccagaaggcactgcgggcacgcttcctgcctggtcggcctgaagggaagggccgaggtgtccggagccgcggacctagagatcccagaagccacagcgcagcggcccggcccgccactatttccaggctcagcggggcaggggtgggcccagactccacttcccggcgggtagtgcgaccctaggggcgggacttcatgt

SEQ ID NO: 16207 - DNA, 513 bp, Homo sapiens
  source 1..513: mol_type = other DNA
cccatctacttaaaatacaaaaagttttctgggtgtctgttgcccaggctggagtgcagtggcaagattctggctcactgaagcctccgcctcccaggttcaagggattccccgcgcctcagcctcccaagtagctgggaaaaaaaaaaaaaaaaaaaaaaaatatatatatatatatatatatatgtgtgtgtgtgtgtgtgtgtgtgttatatgtatatatatttatgtatatgcacatacacacaaaattaggccgcacgcctgtgatcacagctactcgggaggctgaggcacgagaatcgcttgcactgcaaagctactcttagcacgtgttagagtatctcgcgcatctttatatgttaacagacactgataactctggcagtgtttaaaagtatcgacctcccaccccgagtctgcaggtagtgcccccggactacattttccagaaggcactgcgggcacgcttcctgcctggtcggcctgaagggaagggccgaggtgtccgga

SEQ ID NO: 16208 - DNA, 473 bp, Homo sapiens
  source 1..473: mol_type = other DNA
cctgtggtgttggtaccagcccagccaatcaaagtaagattcagaagctccggggccgcgggcgtccctagcccctctctcttagccaagggcaaggcggctgcgacccagggggcgagagaagttgcagtgctccgcgcctcctgggtcagggcccagggagggcccaggtaccgcgcggggatctggggagtctttccgaccccgcagaaccccaccgcgccccgcgcagaagtcagttgttctccccggcccgcccccgcacttcctggccgggagttgggcccgcccccgcgcgcctccgccccccggctcccattggccggcgcgcacctgcccgtccgtcggggggcggggcgcggcgcccaggtgagggcgcgctggcggcggcgcggacagagcctcagacggttgggcggacggacggcccgacaggcgggcatgcgggcggccagactgtagccgagcagcga

SEQ ID NO: 16209 - DNA, 483 bp, Homo sapiens
  source 1..483: mol_type = other DNA
ggaagtatttgggtttttaaacttccccctaaatagggaatttccgatttcccattcccaccccgtcggcctgaggggaggtcaggcacaaagacaggaggaggtgccgccgcctgggggtactccgatgcttccggggattccgagccagctggaggaccgcacgtggcgaacggcgggcgcggcgcgtagtcagggaaccagggtgcctgactgggtgtctcgtggagccatcccgcgggggtgtgggggggccacggtgccggaaggcgcgcggcccagaggccgtctccgccgaacgcccgctccgcgagcctccctacgaggggcggggcgaaacaggtgcggttgccacggcacccggaccacagcctcgccggaggggcggggctgggaggggctcctccctaccgcccccaattccgccctgcccccgccgcggcggcgctagccgccactgagggaccgaccctataaaggccg

SEQ ID NO: 16210 - DNA, 563 bp, Homo sapiens
  source 1..563: mol_type = other DNA
gccatgcctcctggccttgcccagcagatcagggcacagggggacccagaggcacccagccctgcacgcccaggaggctgccactccagccccactcctgatgtggcaggagctacgtggggctgccaggggagggagggatggtccttggagcccagctgaccctgcctgggggaaggctgtggcccaggccttggcgtcccagctccagcacttggaggggggaggggtgctggagcagcgctgcagccggaatcccaacccctgcttcccagtggcgctgcacagaggtgggttcagggaaccctcaccttgctaggttccgcaggccttagcaaaggtcccccagccctgctctgtggccccttctgagtgggggctttgtcccgagggaccctggggtcctggctgcccacggacagctggggcagcaggctgaggcagatggggcccagcctgatgcttcctggacccgccccaccctgcccgggcacagtccagggctgacggtggtgggataatcattaaccaccaccaggggctgggtcaacggctcaaaaggc

SEQ ID NO: 16211 - DNA, 473 bp, Homo sapiens
  source 1..473: mol_type = other DNA
ttatgtataaacactggaatgtgaatttcatatgatttttcacatgccatgaaaagttcattcttcttttgatttttcccctaaccatttaaaagacacccctgcttaaaggaggcagaatccattctttgattgagatatgaaaagctattattacagttaatctccctctgagcttgcaaaatgcgaatgtttactcacttaattagtactgtccctttaaatcctccccaaccacttaaagtggttggacgaatcagacatgcgcattctttgaggggccggcacctggagcaacagccttcccagagcctgtagaggggaggttaaaggtcctgcaagcgtaaatcatgattgagagccctcgaaggctccgccccgcgcagccaatcagtaggcctcgccctttgcaatagccaatgacggggcgtggctgggcgtccggaggcgcggcctggcgcctagagaagcgg

SEQ ID NO: 16212 - DNA, 373 bp, Homo sapiens
  source 1..373: mol_type = other DNA
ggggtccaggatcctaggacgggggcccaggactgcaggctgggaacttggttagcatgccaaactcctggactcccacctgtgccttgcatgccagcagcaggattcatcccaggggggctgaaaggtccatccgggaaggccaggctgcctgggatgaggtggatgatgtcactgcaggcctgaggatggactgcatctcccagcaggcttgggtgcaccacacccctcccagggcatagaaggcccaggccaaatctgtgacccccgagtctgccctcaggggtgtccccttgcgcggggactacatctcccagcggccccgggccttcctgacgcagccccccctttcagcccgcggggaggtgcgggc

SEQ ID NO: 16213 - DNA, 228 bp, Homo sapiens
  source 1..228: mol_type = other DNA
tcacttgagcagtgagccgagataacaccacctcaaaataatagtaataaataataataaagttaggggtgatcaggccctgaacagggaaatgttctgtccaaggtcaccagccaagagtcttgacccctgtgtcgtcagcagcaggagctgctctccgaggaccgcacctcaaagagcaagatcccccaggtgggatcgctctgagggtttgaaagccgatctcca

SEQ ID NO: 16214 - DNA, 395 bp, Homo sapiens
  source 1..395: mol_type = other DNA
ctctgtcgcccaggctagagtccagtagctgggacagccaggatggtctggatctcctgacatttttacaaaagtgctggaattacaggcatgagccaccgcgcccggccctgtctctacttttaaaaataagatttaaggaaaaaaagtgctggagtgcagtggcgcgatctcggctcactgcagcctcggctgagctcaatggggcattaatgcctgccgcagagcagtcgctagttcgacctgaaggcgccaaggcgtcctctcggtgtcgacaatgaaatgcgcacgcgcagaccgcggccaggccttggagctgcgcccgaaggggcggtgggaagcgcacttgcgcgtgcgcagaaggcctggtgggtgcgcggcacgagccccgaagt

SEQ ID NO: 16215 - DNA, 333 bp, Homo sapiens
  source 1..333: mol_type = other DNA
tgccattgcactccagcctgggcgacagagcaaatgagtccagggccgggcgcgggcctgtgcgggcgcctgtggtcccagctactcaggaggcagtgatcgagccactgcactccagcctgggcgacagagccagactaaagaactttgagtccttttcaatttattcagccctgtgagatgtggatataaaattctttctgcatttttaccattactgtcatcataaatggttatttagaactgcttctcagaaccggcgttcagcagaacagaacttaataaatgctgattcagggatcacagtgctcgtaggggcgagttctgggccct

SEQ ID NO: 16216 - DNA, 335 bp, Homo sapiens
  source 1..335: mol_type = other DNA
ggccaggctggtcttgaactcctgacccatggcgccgggtcccactcaggcagcctactaggcaaacttcatggaggcatgaagatttgaatctcacccatgcttggattccattatcatagctacgaaaagaatataaacagctattgtcctcagctggtgctgacagctctttcccaagcatgagagaggctcttccgtgttcttgagcgctaaagtaaagaatgaaatctaagccattcattcaacaacaaatatttattggcctcagtttttccatctgcaaaagtaggaactgtgcaattccgtcattggaacccagggacgcccccagg

SEQ ID NO: 16217 - DNA, 430 bp, Homo sapiens
  source 1..430: mol_type = other DNA
caggctggagtgcagtggcaaagctcactgcagccttgaactcctgggctcaagtgatcctctcatctcagcctcctgagtaactgggaatacaggtgtgtgccccagttattttttttatttttaatatagataaggtcttgagctcaattcctgccttggcctcccagagtacttggattaccatctggcctaacaaaattgtttttatccccactttacagatttggaaacagaaacccaagtcacatagcttggaagctgggctcctaaccactggacattgttgtatgaaaacagtaatgtatccatctgttctatccaacagctccaggctcagagaaggagagtcactttctgaaagttggacgatccagagttccagagctcaccctctgggggcggagtggccactggggatttaaagagc

SEQ ID NO: 16218 - DNA, 694 bp, Homo sapiens
  source 1..694: mol_type = other DNA
ctgcactccagcaaaaacaaaacagtcatgatgtgattattaagttatatgtgcaccagccattcccccgcggagcctggcacagagctgggggaacaggtgcgggcgcccgccaccccgcacgcccccgggattcggagctcgagggcggggccggggcctggaaccctcgggcccgggggaggagatcagagccgggagggcagcggccccacgcttgggccaggccgccgggtggtggcgtccgagttatctccgggacccaccacgccgcctagccccgccgctgcgcctgcaggaccgcttctgcggccctcggagctggcccctgccccagtcctggggtgcggctcctcccggcccgacggggcgattgatggggcccgcgtggtgacgccaggggcagttgggacgcgccggccgccgcgttccgctcccgacagggggcgcccggcaccgcctgcccggctggaccccgccaccctcgcggttccggcgtccggtaggatacagcatgagcagtcgcagctcccgctctttctgcttcaatggtcaggagccccatggtccccggagccccgtcccgggaccccgctcccggttcctgttggctatcacgctcgccgacggcatagtcgattggccggacgctcgtttggcccgcccttgccgcacgtgaccgcgaggtcgcccg

SEQ ID NO: 16219 - DNA, 600 bp, Homo sapiens
  source 1..600: mol_type = other DNA
agctattgtcctcagctggtgctgacagctctttcccaagcatgagagaggctcttccgtgttcttgagcgctaaagtaaagaatgaaatctaagccattcattcaacaacaaatatttattggcctcagtttttccatctgcaaaagtaggaactgtgcaattccgtcattggaacccagggacgcccccagggggcaccgccgccctgaactgagagccaccggagccgggtagggggaggcccaacttcggggcctacactggccccaggatgagttcgtccgtacctgggggccctgggttctgactctcaggtcagacgcagccaagatgcaactcaggaacttcaaggtttccgctccggccaagagccccagtccggcaggggaaagggtgggggagtcgcccttgctcccccagcctcagccctcgggaggcgcagcgtcagggcgggcggcagcacagaaaccccccgcgccgctagagggaccctcgcagcagctgcgcgggcgacctcgcggtcacgtgcggcaagggcgggccaaacgagcgtccggccaatcgactatgccgtcggcgagcgtgatagccaacagga

SEQ ID NO: 16220 - DNA, 346 bp, Homo sapiens
  source 1..346: mol_type = other DNA
actattttgagatttcctgtaaaacagagagatcaagggctttgtttgctcccaggctggagtactcccgagtagctgggactataggggcggctaaggctgggcctcaggggaaatgccctccacccctctcctgggcctaggtcatttgccccagctccgatgagcagggaaaggtggtcgagtccaggacccgcccaccccaccatgcccaactgagctgcagtccttccaagcacacccattaatagtagcaggtctggaatattccagaaacaaatgagggtggctgcctccagatatcagctccagacacctcagagaggtgaaagagcctcctccgatg

SEQ ID NO: 16221 - DNA, 546 bp, Homo sapiens
  source 1..546: mol_type = other DNA
ccacagcctgggcatgtgttgttcacaggctaacggtagccagcacaagtcagtgctttcagtatgctctgctccttgcatggattaactcatttcattctcacaaccacctcatgaggtgagaactatcagaggttaggtaacttgtcccaggtcacactgattctagtgctcaagcaccacagtgagaaagagcagggttaaaatcttggctctgctcatgagggcttggggctcctagcacgatgcccggatcctggtggatgctcaggagcccatgctgcatttacatcagggtggacagagagcccaggtgcccctggggtctgacaaactctccctgggaccggcggggcttcctggatgggggctgacggcaggcagggtctgcagtcactggccaccaccatcccaggtcctggagctggactccatccgcagccaccactggtgcatccagggctgcagcgccgtcaccggggagaacctgctgccgggcatcgactggcccatggggggttgggagtcagccggccaaactaacac

SEQ ID NO: 16222 - DNA, 261 bp, Homo sapiens
  source 1..261: mol_type = other DNA
atggccagtagtgctggacttgcccaaatcagatgctggagtgcagtggtgtgattgcagctcactgcagcctcaacctcctgggctgaagccatcagccagctcagcccctggagtagctggaattacaggcgtggccaaacccccattgttttcacgacacctgtgttctggcagcaatctactttccagaaaacatgaattagggttgacgttgtcctgtacatactctcccttggccgcgcacccgggatcggaaca

SEQ ID NO: 16223 - DNA, 417 bp, Homo sapiens
  source 1..417: mol_type = other DNA
cttggaagtgtcgcccagactggagtgcagtggtgggatcgcggctcactgcctcagcctccccagtagctgagattgcaggcacatgccaggccaggctggtctcgaactcctgacagagtggtttttactttttttaatgattaaaaaaatcaaaataatattctgtgacaatgacaggtgaaatttatatgtgacaagtgaaaattatatgaaatttaagagtccataaataaaatttgttggaacacaaccaggctaattcatttagtattgtgatagctgctttcgcgctacactggcagttgaaacagttgcagagttgagtctttgccgcctgcaaatcaaatcctgattgctcagcgggctggaaggcgtggcctcagccccgccccgccccgcctcaccacaaagcgg

SEQ ID NO: 16224 - DNA, 401 bp, Homo sapiens
  source 1..401: mol_type = other DNA
cccgagcctcctggaaggcctggctgcagggtgccaggacatcctgtcaccagctgaaggaccctaggatcaggagtcattggctccacggaattcacagaagtgagtggccagaacggcgcggggctgacgtcgcccctcgcacccgttcaacaagctgcaggagcgcacggtggcctacatcaacgtggacagaaggggctggggcccaaatagtctttctcccctcctcccacaccaacgctacccttagggtgcaggggacgccccctgtccagagcgtcgtcttctctgcaaccaaagaggtggaagggggcaggccgggcggggctgaactagctggggcgggccgcgtgcggcggacggggccgctacgctggggcaagccaccgcgcaccgag

SEQ ID NO: 16225 - DNA, 500 bp, Homo sapiens
  source 1..500: mol_type = other DNA
agagtggtttttactttttttaatgattaaaaaaatcaaaataatattctgtgacaatgacaggtgaaatttatatgtgacaagtgaaaattatatgaaatttaagagtccataaataaaatttgttggaacacaaccaggctaattcatttagtattgtgatagctgctttcgcgctacactggcagttgaaacagttgcagagttgagtctttgccgcctgcaaatcaaatcctgattgctcagcgggctggaaggcgtggcctcagccccgccccgccccgcctcaccacaaagcggttggttgcggcagggaccggtgtatcatgggagcggcccgggctacttggcgctcgatgggggccgttagccgccctagagcgcgcggctggactacaacgcagtgcatctcgggaggccaactcgacggcccgaaggccggggatcatggcgggaaggcgggcccagacaggttcagccccgccccgacccgccgggcc

SEQ ID NO: 16226 - DNA, 481 bp, Homo sapiens
  source 1..481: mol_type = other DNA
ctgtgaaatggaaataataatagtatctccctcaaggcattgttgtagggattggttccacgtggataatgccctaacaggaaatgttcctgtgttatcaccaagcccgagcctcctggaaggcctggctgcagggtgccaggacatcctgtcaccagctgaaggaccctaggatcaggagtcattggctccacggaattcacagaagtgagtggccagaacggcgcggggctgacgtcgcccctcgcacccgttcaacaagctgcaggagcgcacggtggcctacatcaacgtggacagaaggggctggggcccaaatagtctttctcccctcctcccacaccaacgctacccttagggtgcaggggacgccccctgtccagagcgtcgtcttctctgcaaccaaagaggtggaagggggcaggccgggcggggctgaactagctggggcgggccgcgtgcggcggacggggccgctacg

SEQ ID NO: 16227 - DNA, 434 bp, Homo sapiens
  source 1..434: mol_type = other DNA
gtcaaataacttgatttagattatacatttttggcagaaaaaattgtaaaaatgtataattgcaagcgtgtaatcacatcacactgaaaaattctttgaagtgggtggatcacttgagctcaggagttcaagactgatcgccggaccccaggaagttgagggtgtggggagccgagatcgcaccactgcactccaacctgggccacagagtgagactcagtccctcaggctggatgcagtggcacgatcgattctcctgcctgaacccgggaggcagagcatcctgcctgtgaaatggaaataataatagtatctccctcaaggcattgttgtagggattggttccacgtggataatgccctaacaggaaatgttcctgtgttatcaccaagcccgagcctcctggaaggcctggctgcagggtgccaggacat

SEQ ID NO: 16228 - DNA, 283 bp, Homo sapiens
  source 1..283: mol_type = other DNA
gccatattgtttaatgaaaatgacaccattcatcccagctgaggcgggtgatcacctgagatcgatcacaccactggactccagcctgggtggcagtgggcacggccctgctgtgaacacaggagctctgagttccagccctggcttggcgggacagtccctgggtgaccttgctgcccttggagagccattccaggcactcactctccctgccagctgggggtcaaagggcagtgccacccatggggtaatgtttaaccaacaacaccccctctatagggaa

SEQ ID NO: 16229 - DNA, 247 bp, Homo sapiens
  source 1..247: mol_type = other DNA
tttgtttaatcaataaatatttattgagcacatactgtgcactctgaaggccccaccttggcgtgattggctaccaggcacacttacaaagccccatgatcgatcctgggaaagggcaggttctggtggccaccacgcgcggaagggcagggaccactctccccagggctcctgcgcctctttccgggtgcggcgcgcgctgatgacgccatcgcgcccctgggccacgcctccgctgccgctagag

SEQ ID NO: 16230 - DNA, 235 bp, Homo sapiens
  source 1..235: mol_type = other DNA
ctggtgctggggctgctcggcctatctttgtttaatcaataaatatttattgagcacatactgtgcactctgaaggccccaccttggcgtgattggctaccaggcacacttacaaagccccatgatcgatcctgggaaagggcaggttctggtggccaccacgcgcggaagggcagggaccactctccccagggctcctgcgcctctttccgggtgcggcgcgcgctgatgacgc

SEQ ID NO: 16231 - DNA, 374 bp, Homo sapiens
  source 1..374: mol_type = other DNA
ggcaaactgtttttgcagtactgcaaaacagctccctgggcaggattctacttaattaagtagatgaaagtgaaaggatgctcgggagttcagagcctgatttccgctgggacctcgaggactctagaccttagagtccagagaacaggttccccaaacaagcccttttaagggcgcctcctccggcggcggcagcgggagggaagaggccatctttcctcccgcgcgccctccgctcaccggagcgctgagcggctcctccggaccgcgttcgcctccctcgagctcctccagcgccgccgccccgggcgcgcgccaaccgggaaggcctctagcggcagcggaggcgtggcccaggggcgcgatggcgtcat

SEQ ID NO: 16232 - DNA, 334 bp, Homo sapiens
  source 1..334: mol_type = other DNA
acttacacagcaggtaagaatctgggctctgagactcgggggactcactgtcctgctgcttgaggagggcctggaaaccagtcaccaagctggcccctgaggctggcctgatccccccgaggtgccaaggcctcaccatagcagacaaggcgggtcgtctctcggctggccctggtgctggggctgctcggcctatctttgtttaatcaataaatatttattgagcacatactgtgcactctgaaggccccaccttggcgtgattggctaccaggcacacttacaaagccccatgatcgatcctgggaaagggcaggttctggtggccaccacg

SEQ ID NO: 16233 - DNA, 321 bp, Homo sapiens
  source 1..321: mol_type = other DNA
acagagtctcgctctgtcatccaggctggagtgcagtggcgagatctaggcgtctccctgggctcaagtccccagtgctgggattacgggagtgcccggcgcagctcagcgcagagacttacaatgtctgatgcacgtcagaggaccaggccctaagaagaactgtagatgggataaactgagccactgccagtggcaggatgtgcaggttggggagccactacccgtcccccttctggccaggaaactgggggaattcgctctcccggaacctttgcacccggggaagacaggtgcgggggagacctagggctgcagttt

SEQ ID NO: 16234 - DNA, 327 bp, Homo sapiens
  source 1..327: mol_type = other DNA
ccaccaggtggggctctccgtgtacagcagctctgcagcagggccgctacgcccccagctatacccccaggtctggctggtcaggggagccgggctctgatgttcagccctgtggagttcaacaaggactcagacttccagggatcccggggagggttggctggagcagccccacacctgcccaaggagccccaggactctgtgaccaactgggggtgacccagtcttggtgtatgcccagcctgagtctgggtgctgggatgcctctgattgctgggcccacacacagtccctgcctgcaggtgtcggtgctgaccggcatcatca

SEQ ID NO: 16235 - DNA, 435 bp, Homo sapiens
  source 1..435: mol_type = other DNA
agtcttggtgtatgcccagcctgagtctgggtgctgggatgcctctgattgctgggcccacacacagtccctgcctgcaggtgtcggtgctgaccggcatcatcaagatcagcctgaagacgctgctggagtgtgtgcggctgcgcacctttgggcgcttcgggctgcagcaggtgcaagtggactgccactttctgcagcacgaagaactcgtgcacttgctgctggacgaagtggtggcctctgctgccctgcgctgcccagaccctgtgcccatggatgcgagcgcggctaggcgcagccgctgccatgcaccggtctgtccctgcaccccatggcacccgtgtcaggaccggcctgaagctgaggcttctgaggcgcccgcgtcgggtccgcccccgagcgccgattggctggtgtgctgggcccagcatg

SEQ ID NO: 16236 - DNA, 489 bp, Homo sapiens
  source 1..489: mol_type = other DNA
tgcttatggctcagagctgaatgtcctggcgcggcaaacgttcccggaggccagccagggatcactcgccctggagcgggaccagggcctaggcaacgcagcaggccagcaaaggtaccaatcagtggcactcccacacaacttgtgggggtgatcatggagaagacaaatttttgttttccgcatccagttctctcagagagtcaaactgtgactctccctaaatgtttaagaaaacatggtggtacagcccgcaagcggctccccttcccagctgctcgcggggccgagtcccccagtccgaggaggccactcagcctaataaataatagggggacctccgactccccccaccccagatacggtggtgacaccattgctatgggcccacgtagggcgcagtgcgagccagggcaggacgcacttggtacgacccacgccgcgccccgcgccgccggaagtgaggtgtctgacccccgaagttccggt

SEQ ID NO: 16237 - DNA, 352 bp, Homo sapiens
  source 1..352: mol_type = other DNA
tctgaactgaagacagtgagaagtactctattaccataggtgtgacactgcatgcggcctgctacttccagggtagtcagggcctccaccccgcactggcccagagtggcctcatcctccaggggcgcgcctgccaggagcacgacttgagcgttccctcgggccgccttgatctgggcgcctggccggtcacctcgaacgcgggtccagaaacgatcgcgacgggatggtggtcgcggcgggggaaggccaggcctcccggactggagcagggccacggagcaggccccgttcttcggttcccctcgcaccggcgaacctgcctgggcaggcagctcgcgcaggacggggc

SEQ ID NO: 16238 - DNA, 345 bp, Homo sapiens
  source 1..345: mol_type = other DNA
ctggggagggggtagcaccccctagctcataaaccttagtgattgatgattaaatgaatgcatttatttgcttatggctcagagctgaatgtcctggcgcggcaaacgttcccggaggccagccagggatcactcgccctggagcgggaccagggcctaggcaacgcagcaggccagcaaaggtaccaatcagtggcactcccacacaacttgtgggggtgatcatggagaagacaaatttttgttttccgcatccagttctctcagagagtcaaactgtgactctccctaaatgtttaagaaaacatggtggtacagcccgcaagcggctccccttcccagctg

SEQ ID NO: 16239 - DNA, 548 bp, Homo sapiens
  source 1..548: mol_type = other DNA
cttaccagctgagtggctggcaggaagttactcagcctgtcggtcagcaacccaaactctgtgtgttaaaatgaggcttctcatcattctcatcaacttcacgggcttgctgtgaggaacacgctgattccatcacagactcctcagtaggcagcagtaggtgtttagtgaatggcctgatgcagaccagctggtctagaaaggccttcacggcctcagggagcctgggaggcggcctggctgagagactcagaggcccactgagacccaggcagcggggggcctcagtgaaacctagagactcaaggaggccagggcagtccgggtgaggggaacagggatcctagctccctgcctgtcctatggggccttaggccctggggtccagctggccagaggctttcaaaccctggggagccacagctgggtgccgactggactcactggcagagaggcaggcggtgaaggccaagcctcgccccccaggaaggccctgattggtggacgggctgctttgggcagggccgccctcaggctatataagcgca

SEQ ID NO: 16240 - DNA, 553 bp, Homo sapiens
  source 1..553: mol_type = other DNA
aacccaatattgttaagattgtctccatttttaaaaaaaaaagttttatggtttggccatttatatttaggtgttaatcagtttgagttaaattttgatggtatcctaaatagctcagttttcctcttttgttaactgagggtgaaactcttaacttttgaggggtcgtgggccctagagtcctgggaacgctatgcagcaaaatgcttgcatccacaacatgcaagactgcagcagctgctgggctggggctgcgagaccagcccctgacttgggggggtctcgggagtctctgcagtctccccacccacaccccacttcttgcagcccgtgaagcaggatctcagggtcctgggggtggggagagggggctgccgtcctgctcgcagcctctgccgccctctcctgtgacacagggatgtccacctctctaagtttccaggttcaagaaaaacgtttacccaaggtcacgcagcgagcccggtccccctgcgttccccggggagcgctgagccgggacgcggcggtgagtgtccggcaggggtctgctcgc

SEQ ID NO: 16241 - DNA, 634 bp, Homo sapiens
  source 1..634: mol_type = other DNA
gaggggtcgtgggccctagagtcctgggaacgctatgcagcaaaatgcttgcatccacaacatgcaagactgcagcagctgctgggctggggctgcgagaccagcccctgacttgggggggtctcgggagtctctgcagtctccccacccacaccccacttcttgcagcccgtgaagcaggatctcagggtcctgggggtggggagagggggctgccgtcctgctcgcagcctctgccgccctctcctgtgacacagggatgtccacctctctaagtttccaggttcaagaaaaacgtttacccaaggtcacgcagcgagcccggtccccctgcgttccccggggagcgctgagccgggacgcggcggtgagtgtccggcaggggtctgctcgctgccagcccggcccctcctcagagcagctgccgcagcccgaggtaatctcggccccgcgccggggctggctgggaacggcgggagcagctgcggtcgcgcggagcgaggggagctggggaccgggcgggcccggggctgcgggaggcggcgccgccgcacaatcgccccggaatgcccgccagggcgcgcgtggggtgcggccgtccggccctgcaactcgagctcccccgcgctggccc

SEQ ID NO: 16242 - DNA, 494 bp, Homo sapiens
  source 1..494: mol_type = other DNA
agggatgtccacctctctaagtttccaggttcaagaaaaacgtttacccaaggtcacgcagcgagcccggtccccctgcgttccccggggagcgctgagccgggacgcggcggtgagtgtccggcaggggtctgctcgctgccagcccggcccctcctcagagcagctgccgcagcccgaggtaatctcggccccgcgccggggctggctgggaacggcgggagcagctgcggtcgcgcggagcgaggggagctggggaccgggcgggcccggggctgcgggaggcggcgccgccgcacaatcgccccggaatgcccgccagggcgcgcgtggggtgcggccgtccggccctgcaactcgagctcccccgcgctggcccctccccggggactgcattggcccccggcctgcggagggaggggcggggagcggggaggagcgctcttcctggttgggccctgccctgagctgccaccgggaagccagcctcaggg

SEQ ID NO: 16243 - DNA, 521 bp, Homo sapiens
  source 1..521: mol_type = other DNA
tgcagcccgtgaagcaggatctcagggtcctgggggtggggagagggggctgccgtcctgctcgcagcctctgccgccctctcctgtgacacagggatgtccacctctctaagtttccaggttcaagaaaaacgtttacccaaggtcacgcagcgagcccggtccccctgcgttccccggggagcgctgagccgggacgcggcggtgagtgtccggcaggggtctgctcgctgccagcccggcccctcctcagagcagctgccgcagcccgaggtaatctcggccccgcgccggggctggctgggaacggcgggagcagctgcggtcgcgcggagcgaggggagctggggaccgggcgggcccggggctgcgggaggcggcgccgccgcacaatcgccccggaatgcccgccagggcgcgcgtggggtgcggccgtccggccctgcaactcgagctcccccgcgctggcccctccccggggactgcattggcccccggcctgcggagggaggggcggggag

SEQ ID NO: 16244 - DNA, 534 bp, Homo sapiens
  source 1..534: mol_type = other DNA
gagctggggaccgggcgggcccggggctgcgggaggcggcgccgccgcacaatcgccccggaatgcccgccagggcgcgcgtggggtgcggccgtccggccctgcaactcgagctcccccgcgctggcccctccccggggactgcattggcccccggcctgcggagggaggggcggggagcggggaggagcgctcttcctggttgggccctgccctgagctgccaccgggaagccagcctcaggggctgggtagccgagccgggattccttgaccctggccactgctcctgggctgaggggctgccccagcacggtcccttctcgggggcctctgcggagcaggggtgggggctggcggagcggcacagcccaggcgcctgtcccagcctggctcaccgctgtccccaggggctgggctagggcccaccagcgctgcgggggcctgaggagggggaccccgaccgtctggggttttcagcccacggcaaggggccggtgcaccaggtgaacaaaggaggctccgccctgcccca

SEQ ID NO: 16245 - DNA, 241 bp, Homo sapiens
  source 1..241: mol_type = other DNA
ctctcaggcgcacccccttagagttgtgagcccttaaaagggacgctggtgagacaggagtcttgccgatgaccccagcgctcaaagaattaatttcaaggggagagggaacactgtggctggcaccacggtgataagcacgataataaccatggcaaccagttccctactgaagccattcttttagcgcacacagactcagtttccttgtaggcaactcccgggcgttgcgagtcacaac

SEQ ID NO: 16246 - DNA, 318 bp, Homo sapiens
  source 1..318: mol_type = other DNA
gctcaaagaattaatttcaaggggagagggaacactgtggctggcaccacggtgataagcacgataataaccatggcaaccagttccctactgaagccattcttttagcgcacacagactcagtttccttgtaggcaactcccgggcgttgcgagtcacaaccggcattctcgcgccgtgagagagaactgcgcagctgctgactggcgggccgccaggcgcgtgcgtagagacgcccacacgcccgctgatgcgcacgcgccctgggccgcgcgtgcgcgcgtggggttccgatgcgtgcactgcacaaaccatttg

SEQ ID NO: 16247 - DNA, 488 bp, Homo sapiens
  source 1..488: mol_type = other DNA
gccaggccaggtgtggtggctcacacatgtaatcccaacactttgggaggccaaggtgagaccagcttggccaacatggttctggttgtagctactcgggaggctgagacacaagtatcacggagatgaggttgcagtgagcccacatcatgccactgcactccggcctgggcgacagagtgaggctcaaaaaaaaaaaaaaaagcagtctcagggtctttttagtatgccttctccctaggaaaaatgccaccaaggtgtggcagggacactgttactgcctgcaggctacacctgcttagaaggtgtaatgagtccaagctttaaactctggctctgaggctgtctttttctgccaaaaaatagttcctttactcccagtgtcccatgggaaacagcgtctctgttcataacagagtgcagttctgagctgcctccctcggggtgggctctgcctccagcctgaggcatcccacctgttgcgcagc

SEQ ID NO: 16248 - DNA, 488 bp, Homo sapiens
  source 1..488: mol_type = other DNA
agtgcagtttccttcagtctgccagcccttcaaaacatgtttctgggccggattgcagcagttagccaggtgtgctggcacatgcctgtaatcccagctactcggcagaccaccttcactctggaagcctgacagcaaagacgggggtccaggccacgcggcctctgccttcaactagcttgtaagtttgtagtattctaacgtaggccggcgcttccccgacgcagccctgcagggaaggatccgtcttctagaaccgaagtgggcacagccggaggccgcctgcgccacccggccctcagccgcacaggactccagggcgcgcgcgaccgctggacccgggagcggcacctcccacgccgggagccccgggcggtgcccggagtggggcggggcctgggcggggatggggaggggcttggctggcgcggccccggcattggctccgcgggccggggcggggctgcggggtccgcggtgcactcttc

SEQ ID NO: 16249 - DNA, 543 bp, Homo sapiens
  source 1..543: mol_type = other DNA
tattttcagctttagtgattatatttatatatatatatatatatatacatatgtatatatatacatatgtatatatatgtgtatatatatatatgtatatatgtgtatatatatatgtgtatatatatatgtatatatattttttttccttttctctggctggagtgcagtgctccagtggctcactggagcctcaaactcctgggctcaagtgatcctctcagcctccctagtagctgggattacagttgagaaggagtgcagtggcgcgatctagcctcccgagtagctgggactggtttcaccgtgttacaggcgtgagccaccgcgcccggccccggctcctgctccaggcctcgaaccggagctccgggatgcatgccaatctccggttgcgcctgcgcgtcgggctcccgtggggtccacgcatttcctacccggcccccgttcagtgctcgctctagtgcgcgcgcccggacggcgcctgcgcagagggcaaggaacctggtaccccggtgcggtcccggcgcctgcgcgctgcgg

SEQ ID NO: 16250 - DNA, 499 bp, Homo sapiens
  source 1..499: mol_type = other DNA
tgcctccggctggggaggcggggcagacctcacccaggtggtgacatttgagccccagctggagggcagtccacaggcctggagacttcccctgggaagttctgactcacacgagccaggcctggtgagtcactcctgggagtggctcctccccaccctgccacgcagcggcaaatgcgggctgggcctaccccctggtggccacgctacgcctctgtggcatgggggcggccatgccccttgggcaggcaggggcttgcctcttgctgactaaggcagccctggaggggcccgaccatggggcaggaacccagttgccatcctcagagcgaggatcattggccgggctcggggatcagggcctctgtggtcccggcacgcctggcccgccaggtggccagggtcaccggaactggctcgctctcctctgccagttgccggaggtctgggcaccagccttcccgccagggttaaacggagaggggggaattcaactctg

SEQ ID NO: 16251 - DNA, 350 bp, Homo sapiens
  source 1..350: mol_type = other DNA
tgggggtggcccaaggagccccaggcagctccagaggcaggaggtaggaggtcctgtttcccgaatctgtccacccgggagaaagcagcagtcccccatgggaactggagccccaggctgccgctgatgctgctgggagcccgctgtgcacagaactgcctccggctggggaggcggggcagacctcacccaggtggtgacatttgagccccagctggagggcagtccacaggcctggagacttcccctgggaagttctgactcacacgagccaggcctggtgagtcactcctgggagtggctcctccccaccctgccacgcagcggcaaatgcgggctgggcctacccc

SEQ ID NO: 16252 - DNA, 301 bp, Homo sapiens
  source 1..301: mol_type = other DNA
acctcaggtggtctatcagttatagtttttgcaaaggcaagagaggccagtctttggggtgggggtggcccaaggagccccaggcagctccagaggcaggaggtaggaggtcctgtttcccgaatctgtccacccgggagaaagcagcagtcccccatgggaactggagccccaggctgccgctgatgctgctgggagcccgctgtgcacagaactgcctccggctggggaggcggggcagacctcacccaggtggtgacatttgagccccagctggagggcagtccacaggcctggagac

SEQ ID NO: 16253 - DNA, 497 bp, Homo sapiens
  source 1..497: mol_type = other DNA
ggccccaatcctcccagcctgggaaaacctcaaggtctcccacttctgatttagacatatatatataaattttttttttttttcagacggagtctcccgtcgcccaggctagagtgcagtggtgtgatctcggctcactgcaggcgtggtctggatctcctgacctcgtgatccgctattaataatcattagggacttgtccaggatgagtctgggccaggactcattctcctgaccactgccgagagcgccacggtacaggccgctgccagcgccgcatggatccctggcacgtgccaggaagtgtccatttcacaggcagggaacccagcgtgggcaggccaatggtggcggggctggtacgtgacgcggccaccccacgggcgtgatgagacacgcgaggctggcgtccgggcatgcgcgggccgcgcggggcggccctgggctcccattggctcccccgggtcgaagggggcggggcctcgggcgccgcgctt

SEQ ID NO: 16254 - DNA, 339 bp, Homo sapiens
  source 1..339: mol_type = other DNA
tacacagctcaggggctggatccccaccagtgtgatgtgctgattgagctaacaccactccatggctgccgggcagctgagcccaggagagcagggtcccctcccctgccccggggttgactcctccccggagcctggaggcacccacttgctggtgggagagagtgtctggcgtggggccagtctccctctctttaggatttaggcctctttagataaaagggctcacatgacttacccggcggcggagtactgatcttagtaccgcccgccgcgccccgacgtaggccccgccctggcccccgggccccgcccccgtctgacgcaggccccgccccc

SEQ ID NO: 16255 - DNA, 627 bp, Homo sapiens
  source 1..627: mol_type = other DNA
caaaggtccttactttggggccctgagacccccacgtttgcaggcctgggctccggctccacccggcctccatcgtcagtgtgacccggcagggaggcctccccgccccgccccgcccggaggaatccgcggccggccagacggtcccaggtgagggccctctggaaagggcccagcgcggccgcgggttccggcgggggcgggcatctggggtggggactgtccccgcgccaccccccagcctccgccagcctgcacaccctcgcttctccaggcggcagaggtgtccctggcccggggccagcgtcccagcccccctcgccgccgccgcgccgcgctccagccaggtccccgcgcgctccctgcctccccgcggccgcgggagaggagcccggccagggggaggcgcggagcgggccggccgcccggccttcctctccctcgtgcctgagttcggggcctggggctcccgccgggcccccgcggtcccctccggctcccggcctactcccttcgggcgcgggcccctcgccccgcccgggcgcgccccccctcccccgggtcctgcggccccggatgcccgggccccgaggggctgctggcggcctggcccctgagatgcgcggg

SEQ ID NO: 16256 - DNA, 357 bp, Homo sapiens
  source 1..357: mol_type = other DNA
tattcagcctgatagaaacgacttgtggtacaggccctaagtcaggtacgctgctgcccaagagcctgagtgtacaacctcaggccctgcagactgcacatctgaggacccctgcctgccctgtctggcttctctgaatccaaggtccatgttcagagagccctggtaattttaacttgcgcacccaagggcggctggaagcgcaatgcgcgtgcccagtacagcgctattcagtctgcaggctttttgtcaacttcaaagaacggtcggctgcgaactttgcttcagttcgcctagaatgcacccctcctggccagccttgccgggcgaagtgagaagtgacgccgctgccccgcc

SEQ ID NO: 16257 - DNA, 578 bp, Homo sapiens
  source 1..578: mol_type = other DNA
gtgtacaacctcaggccctgcagactgcacatctgaggacccctgcctgccctgtctggcttctctgaatccaaggtccatgttcagagagccctggtaattttaacttgcgcacccaagggcggctggaagcgcaatgcgcgtgcccagtacagcgctattcagtctgcaggctttttgtcaacttcaaagaacggtcggctgcgaactttgcttcagttcgcctagaatgcacccctcctggccagccttgccgggcgaagtgagaagtgacgccgctgccccgcctgcgccgaaagggaaaccccaggggaggcggaggccagcggggatttctcaagtggtccccttcatccacgacggacaggaagggcgacccccaaggagacgctcctcccgaggcctcgcgcgtcggaagcttctgtcccctggattccggttgacggacgcgtcccccgagcaggttctcggtagcagccgacacgccccaccccgggcgcgaggtctgaggaccacgctaaggcgtcacgtccgccctgatccgcggcagctatggaacgggcggagccgcagcggag

SEQ ID NO: 16258 - DNA, 595 bp, Homo sapiens
  source 1..595: mol_type = other DNA
gtgtacaacctcaggccctgcagactgcacatctgaggacccctgcctgccctgtctggcttctctgaatccaaggtccatgttcagagagccctggtaattttaacttgcgcacccaagggcggctggaagcgcaatgcgcgtgcccagtacagcgctattcagtctgcaggctttttgtcaacttcaaagaacggtcggctgcgaactttgcttcagttcgcctagaatgcacccctcctggccagccttgccgggcgaagtgagaagtgacgccgctgccccgcctgcgccgaaagggaaaccccaggggaggcggaggccagcggggatttctcaagtggtccccttcatccacgacggacaggaagggcgacccccaaggagacgctcctcccgaggcctcgcgcgtcggaagcttctgtcccctggattccggttgacggacgcgtcccccgagcaggttctcggtagcagccgacacgccccaccccgggcgcgaggtctgaggaccacgctaaggcgtcacgtccgccctgatccgcggcagctatggaacgggcggagccgcagcggagggcgctccgctttgacg

SEQ ID NO: 16259 - DNA, 312 bp, Homo sapiens
  source 1..312: mol_type = other DNA
ccctcttgcagaagctgacctgggcctctgctgaactgggctctagcacctccctggagactagcatccagctgttatccgcgcatgtgcggaggccctgcgcagcctgcagcagctccctctagaaaaacagctgttcctctgtgtggttttgacgccctgagatgagttgagtgccccttttctaaggaagaagccatagccttttcaaaggtaggcagaggggtggaccctattgtggtgaccccagcgtcaggtggcacgttaggcaccaagtgtggacttgaggcccggcccatccagagggggtgg

SEQ ID NO: 16260 - DNA, 454 bp, Homo sapiens
  source 1..454: mol_type = other DNA
cccagggcagctgacacctgcactgctagcatcccatttaataaggaggcatggcaaaatcagccaggctttctgctaaatgccttctgaggttcatcctctcagggattccctaaaaggcggaactacaattatccccatttaatagacgttgaaactgaggctcagagtgttagcattcacagtatgactctgagaaggtacgtacctcccagggctgcgggcaggaaggaaggcggcccgggcagcgctcagggtggcaccaagttgctggttgccctctctccacgcagcctctgcgcgcaccgagcgggcactgcggtcgggcgacaccgcccccctcccccgcccccgctcccgctcccgggtcgcggcgcgaggccccggaagccgggtcgccccgcccccgcgctcctgccccggcccccgccccgcgccggagccccgcccgcct

SEQ ID NO: 16261 - DNA, 307 bp, Homo sapiens
  source 1..307: mol_type = other DNA
ctgacgttagaggagttggaacccaggctcccccttcccctctccatggcagcccagactctgtgtctgcagttcaggggcaggggggtatcatctgcccgggtgctctgggcaccctggaagtagcccacgtaggtctaatatcacctccttagcagagctttcccagtgagattgacaatgtccaggaaggaaaggacctgtgcctgttccccttgaatgaatgaatgaatgaacccagctgctgtgaaggacctgggaagggtgatgcagctcacctccctcgccctgcccagcccctcccagg

SEQ ID NO: 16262 - DNA, 362 bp, Homo sapiens
  source 1..362: mol_type = other DNA
gcctgtagccccagctacttgggaagattgcaccactgcactccagcctgggcgatggtgacttgccatggcatctggcacccctgacagttctcttcacactgccatgggggctctggcactcccacaccataccctagggcagggtccctccctcgcctagggctgggtctgacgttagaggagttggaacccaggctcccccttcccctctccatggcagcccagactctgtgtctgcagttcaggggcaggggggtatcatctgcccgggtgctctgggcaccctggaagtagcccacgtaggtctaatatcacctccttagcagagctttcccagtgagattgacaatgtccaggaa

SEQ ID NO: 16263 - DNA, 380 bp, Homo sapiens
  source 1..380: mol_type = other DNA
tctggacaagtctcagagctctacgaggcagagctttctcgtcctcatatcatatatgaaaagaatggccaacactttggccagcatggccaacatggtgaggccgtggtgccacgcgccggtagtcccagctactcgggaggctgaggcaggagaatctcttgaacccgggaaccccgttttgctgccgccgatgcggatgcagagggatccagcagagcacgcagctgggggcttttctttctagatctcaaaagcctgccccgcctacccgggaactccccgcctggagcctctgggaggggagcggtgcaggccgcccgcgtcatctgatgctcctccacctctgcctcccgcccccggggccaaagtacaaaggg

SEQ ID NO: 16264 - DNA, 459 bp, Homo sapiens
  source 1..459: mol_type = other DNA
ctggttctgcctgtcacagcccgtgctgaagccgctggagtacagcggtgagtgcccacccctgatggccaggcctgggcagtggctcgggctgcagcctggctggtgggaggctcaggagtgccagcagggggcactcgctgcccgaagaattagcccagggccctgaagggatctcttgtccagaattaaacactgatcaccagtggaccagagctgcctggagcacatcttcactgggctgcataatggtttttaaaaaatcctggagcctctattttagcatctcgatttgagatatgaagatccatgtttcttgaccgaggggtctgccctttagaagggcccagctcacgggctcactgtgcactcaggccctagccctccccccagggtctccgaggagtcaggaccgcacagcctgccctcctagggaaggacttcctcagggaaggcagg

SEQ ID NO: 16265 - DNA, 420 bp, Homo sapiens
  source 1..420: mol_type = other DNA
tcatccccagtccagggcctgggctccccagatggaggcagtcagcctcccagccaggccctctgggctggtcccacttggagcctgtggccaggaccacctcagcccctgggcctgcactgcctgcaggtgtggcccccttggcctggacctggggcctttttttttttttgtgcttcggagacatcagaattaataacactatttttgattttcaggtagaaccgggtcctcttcccaccatatgaaagagatgacacctatctaaggtgcaagtgctcagactcttgagcacctgctggccgggagctggacgctaggtggcctccgctagccctcccggtggaatccccgctgctgcgcttcccgccgcagacagctcccggccggccccgcctcccggcatggccccgcctccca

SEQ ID NO: 16266 - DNA, 369 bp, Homo sapiens
  source 1..369: mol_type = other DNA
gctcagcccacaaggagcggggcttgcacagacccccccgagcgctgaatgtgcccagagcttggctcatggagccaggggctacacctcttctcagtctctcagcagccttgggaggggacagaaataattaaacccaatttttttctttgtttttttggagacagtctcactctgtccaggctggagcagtggctcgcctcctgagtggctgggactacaggtgcgcaccggtcttgaactcctgacctagaaagtgctgggattacagtggttctggaggccccagacgaagggtgtgtggagcccctcctccacccccctccggcccagccccgcatgatgttgctggatgctgcatgaagaccc

SEQ ID NO: 16267 - DNA, 643 bp, Homo sapiens
  source 1..643: mol_type = other DNA
ggatgaggcctggggtgggggtgcgtcagccccagcctccacacggacgcgccttgggcttggtcttgtgggtcccgcaccttctgagacacaagcgccaggcttcagagacgaggctccgggatttacccctgggggcctcctgctcccacagtggcgctttagctggagagggacgagccctcggccagctcgccagcgggagggcctcagtcgtcccatccgggctgggaggtccggccgctcccattcccccacagccgcatctagattggggtgggtaggcggttagaaacccgcgcggagttcaaccacccggcctctgcggagcagaaggcccggtcgggcttttccctgcgcggggcgggcggccgcagcccagtagccctggctttgctccagacccggcccagagtgacgcgcggacccaccctccaggcggggccgggacccgggagctagccgagccaccgggcacgccagcctcttcgtcctcggcgaggcgcgcacttggccccgacccccggcagcggctgtgcgtgcagcctcttcgtcctccgcgcggcgtgcacttgctcccggcccctgcgccgggcggcggcggggcagcgcgcaggcgcggccggattccgggcagtgacgc

SEQ ID NO: 16268 - DNA, 275 bp, Homo sapiens
  source 1..275: mol_type = other DNA
ctccaccggtgacaccttcacagttttgaggagtaaaatgcaggtgctgtttacacaaaaattttaaaaaactagccaggcagtcccagctactagagcagtgagcggagattgtgcctcgctggctgcactccagcccgggctcacgaggtcaagagctctagaccatcctggcctccagctaaatatatacctgagtcctcttgcctacggaatgaagtccacagacttgggggagcgttcgaacccttctctccagcttcgcacccggtggg

SEQ ID NO: 16269 - DNA, 406 bp, Homo sapiens
  source 1..406: mol_type = other DNA
ttacaaaaattttaaaaaactagccaggcagtcccagctactagagcagtgagcggagattgtgcctcgctggctgcactccagcccgggctcacgaggtcaagagctctagaccatcctggcctccagctaaatatatacctgagtcctcttgcctacggaatgaagtccacagacttgggggagcgttcgaacccttctctccagcttcgcacccggtgggcgtcacgtgacggactcagtagaccgccactggctgtgcacgttctagggctcggcctgaggccccccgagtcacaggggcagtcttgcccctcgcagctgggtcgcggtgtctctcaaaggtccccctctacaggggcttcgtgaggcccgggcccacagggcgctcggtcccggaagtgac

SEQ ID NO: 16270 - DNA, 300 bp, Homo sapiens
  source 1..300: mol_type = other DNA
ttccagcaggctgcagtgagccaatcaaaccactgcactccagctaacattttcaatgcatttaagaaaagatcaatataaaaagagtacttttcagaatcgttttagatttttacaacgacatgtgccattaaaagtatccaagtacttcagaaggctcccagctactccggaggctgaggcaggagaatcgcgtgcctggcactccagcctggttagggggtaaggggactacacttcccgtgaagctccgcggcggcttcccgtgaggccccgcggaggcttcctgagaggtcctgc

SEQ ID NO: 16271 - DNA, 395 bp, Homo sapiens
  source 1..395: mol_type = other DNA
tccagctaaatatatacctgagtcctcttgcctacggaatgaagtccacagacttgggggagcgttcgaacccttctctccagcttcgcacccggtgggcgtcacgtgacggactcagtagaccgccactggctgtgcacgttctagggctcggcctgaggccccccgagtcacaggggcagtcttgcccctcgcagctgggtcgcggtgtctctcaaaggtccccctctacaggggcttcgtgaggcccgggcccacagggcgctcggtcccggaagtgacgtagagcccgaggccccccagtagccgaccctggcgtcgcgctgtctccccagggggagataatcggggctgccgcctacccgtgctgcggcggaaccacttagctgctccga

SEQ ID NO: 16272 - DNA, 853 bp, Homo sapiens
  source 1..853: mol_type = other DNA
ggcccggcttggccccagatctcggttggcaaggccgccctcatcgctaggcatgcctcgagccccgtgaccggccaggccctgacagcccgccctgccccgccctcgccgtcacgacccctgcgggccgccagcgcggcctcgggcctggctggccgcaaccgcggcgccggctcctcgcccccaagccgagcgggctgggggcccgggcaggcgtcagggaagcgaagccaagccctgcggcgcccgccggaccggttcagctggggcgcttttcctgcgggcgccctgcgaccgcaccttggtcacccccaggggccactccgggagccccaggacccgcacccacgccccccggggccgcgcgtctggcgcagggtgcggtgtgcccgggcgccggcggggggcgcgctggctgccgccctgcgcggcttggcgggcgctggtgggaccgggccgctgtccgccgagggccgcgggatcgcagccctgcgccgcggtacccggcatctggggcccaggcccaccgcctttcctgccccggcctgcggcggtttcggggaagggggcctgcgcggcgggacagttagtcagcccccgcgaaacctgcgagtcgacacctgcgggaggcggtggccccgttacgccccgcccctccccgcccggactcggccgcccccgcgccgcgccccgccccgcgccgccagcccggaaggagccggccggcctgagtgcccgcggcggctgagtcaggcggcgagcgcggcccgttaccgccggcgccgggggccggggtggcgctgtggtttcggtgcgggccgcgggcgggagggaggcggcctaacgagctctc

SEQ ID NO: 16273 - DNA, 571 bp, Homo sapiens
  source 1..571: mol_type = other DNA
ccactgcagtattggagaccacaagtgaccctcagcctcaaggagtcaagactcaggcaggacgctgtcagaggctgagccggggccagagccagtgtcaggccccctgatcattcctgcctcaccgtgagggtggtgagggccggggatgtgcagttaccagcaccctctgggctcagacagagaaaccagactggctcctactgcaggctgcttagccaggctgcctcaccccacagcctcttgggtgggagttatcactcccattttatagatggggaccagggcctagaggagccgggaccgggccttctggctggacctgtccctccgactctccaccacctcccatctggagcaggatggggtagggagaggccagctggcactggcttgcatgggggctcaggcctgtttcctggaaaccggtggtctgtggggcacctgcaacctgggcctctggcctgggagagaccgccgcccagaccccaatccagcccactgaagtctggagtgctgggttccggcccggcttggccccagatctcggttggcaaggccgccctcatcg

SEQ ID NO: 16274 - DNA, 679 bp, Homo sapiens
  source 1..679: mol_type = other DNA
gggtcccaggctgaacctcagccctgggcaggccgtgggtctccgcggtggccgcagcagggcaaaggcggctgagcctttcccggtctgaggttggcacctgaaatccacccatttgggacaaggaggagtttgccaagacacgggggtctgtcgggctctcggcgcactccgcgcagttgaagccacttcctccgtgaagccctccgggcagaaggcgggttctccgacgggtactcggtcgcgcggtccgtgcctccccacacaccggccggggccgctcctgcggccctgcgtgccttttcacaaagccggcgcgcaacacctccccggctgagccacgagttgcttagccaagcctttgggatcccgcgccgcctgggcccaggcccggttcaacaagtgcggaccgggccgcccgttcccgcccggcggcttcgcgcctccccaggagcctcgggcgcgccgggttgggccggccccagtggggcgagatcacccgcggagcgtgccagcgccggtgcaaataacgcgccagtacgcctggctaggaggtcccgcgggggccgggccggctgggcagccaggggctgagtgcccgaagctcgccccccgaccccgccccgcccggccgccccgcccgggccgcgaggccacctcacccgcagcgaaataggtg

SEQ ID NO: 16275 - DNA, 569 bp, Homo sapiens
  source 1..569: mol_type = other DNA
tcccccatgtccctgtcctcctgggagaagaggtgagggcggcagccctcctgcccaggcccaagccgggatggcagggtgcacagggccgtgctcctgcaagatgtccttagcttacaggtttcaagtactgagctcaggctctttggaagaaaaatattaagttgaaaaaagcactgggctcagggtctgaagccaagcctccccggcccgttcggtgtgaggtgtctgcctcggggcgtggctgcatccaagggctgccaggtatcggtgctgccgctgctgagggagcccagcccgacatgccccggcgagcggtcctgccgagggggagggttgcataagcctgggcaggctgccgagactgttaggctgcattttccctgcagagctgggaccagctggccctggggtgcaacagcagggaccgggctggggtgggggtgggaggcagggctaggaccacccaaacccccaaggcaggcctggagtggcccagaccaccagggacccttctgatgaggctccaagagctgtccctgggcagaaggtctccactggtgcccttt

SEQ ID NO: 16276 - DNA, 185 bp, Homo sapiens
  source 1..185: mol_type = other DNA
actggacctcagcttcactccactggatctcatcttgtctacatatccattggatctcaagcttgtgatgcacttgctccacggtatagcatgccccgctccagtggcgaccgttcgcggaccccggcctcgcttggggcgccctggccgcgggacttgtggagctccctagtcctcctaggcct

SEQ ID NO: 16277 - DNA, 304 bp, Homo sapiens
  source 1..304: mol_type = other DNA
aagcttgtgatgcacttgctccacggtatagcatgccccgctccagtggcgaccgttcgcggaccccggcctcgcttggggcgccctggccgcgggacttgtggagctccctagtcctcctaggcctggtgggcgccaaactgggcgagtgcgcacgcgcaggccgcacgtggccgttggcccgtcccccggggactggagggagacgcggcacgcggcctctgcgaccctgccaatggcgtcacgcgcggtgccccgctacccaatcgaggaaccgcccccgactccaggcgactccttggcc

SEQ ID NO: 16278 - DNA, 429 bp, Homo sapiens
  source 1..429: mol_type = other DNA
gaggctctgttctagaacaacaaaatcatcccggagtcccccgctcgtttcttttttttcatgtacctggctatcaactcgagagcggcacgtaaaggcatgtaaagaagccttgaattgaatgcacacttttaaacaagaacaaagctctcagagatttccttgtaccgggattccaggctaatcaatagttgcttcgattcaccgcctcgccgggctcagagcgccaatgggctcgcgctgcgcgctgcggtgccgcccaggacctgggcctacatgcactgcagctcggagccggccggcgggaagactccgttacccagcgagcgaggcggcggcgcagggccagcggactccatttcccgtcggctcgcggtgggagcgccggaagcccgccccacccctcattgtgcggctcctactaaacgg

SEQ ID NO: 16279 - DNA, 239 bp, Homo sapiens
  source 1..239: mol_type = other DNA
atagcagctagaggccgggtgctgcttcaaaccctggctgaagccctttgtagggtttccatctatcccggggatgaggatcaccgtctccatctccagcctccttcaagcttgaggctgaagctgacaatcagaaagccctccccgtcacagggggaggagccggtccaggctccgggggctgggctgaccaaccaagcagcgcaggggtgggagggcggccgcaggctctcctctcg

SEQ ID NO: 16280 - DNA, 370 bp, Homo sapiens
  source 1..370: mol_type = other DNA
tcgagggggcggggccagcccgacagccggcttgaggctccttataaggccgcggcgggcgggaggcgggagccggagcccattggtccaatttagcttggctggggctactgcgccgtgggctaggcacagtcctgaggggcgggactggagctctggcgcccacctctcccttcctcgcaggctggagacctgcgtgttgcgacttccggcatagcagctagaggccgggtgctgcttcaaaccctggctgaagccctttgtagggtttccatctatcccggggatgaggatcaccgtctccatctccagcctccttcaagcttgaggctgaagctgacaatcagaaagccctccccgtcacaggggg

SEQ ID NO: 16281 - DNA, 529 bp, Homo sapiens
  source 1..529: mol_type = other DNA
ctcaggctgacgacccagggtgactgctgccggggaagtcttcctcccctggctggcaggccggagggtggccaggctcaggccctagtcttggcctggccaccactggccacttctggttcccttccaggaatgcacagatggctatgagtgggacccagacagccagcactgccggggtgtgtgtgcctgggggaccaaacacccccaggaacccggaaatagctgctttccgcagcagcccgttctatgcccagctctgctacacagaggccagctctggctctctggaggccagtcagaggagctggatcctgttcacaacctgggagggtagcgtccccaggggtgggtaaggaggccccccatcttgggctgagctagggctagggcaacagtgggaacagctgccccatctccagccttggccaaccctggggaggggtcgacagagaaggccgagctgggttcctgcctccgctccctccagggccagcccaggagactggctgtgcccagcaggccccaa

SEQ ID NO: 16282 - DNA, 536 bp, Homo sapiens
  source 1..536: mol_type = other DNA
gggccccaggcgggggatccccggacacgcagtgctttcccgcctggccccgcccaagacgtgggcccccaaggacacgcccccacttcgggcggaggcggaaaccgggcgggggtcgaggaggcgccttggcaccattttgtgccaaaagggaactgccgccctcgcccccaaacttgtagctttgtggatggagggggagcgagaaggacagttctgctcctgggagcctctcgttcctgggcgagggtctggggaccctctggggcccccacaatgagaatctgggggctccaggattgggggcccccgggtgagtctgggggcctggcatcaaggtcggggccccaggatcgagcactgggggaccctggtccggcgccgggaggcggctcctggcggcgccgcgggggaccgggtaggggcctgtggctggccgggggcggagaagcggggggtcggggtccctccccctggcgctggctcaggaatccgccgaagggcgggcggaggcgccggggtgggccgcgccgcgg

SEQ ID NO: 16283 - DNA, 512 bp, Homo sapiens
  source 1..512: mol_type = other DNA
ttaaagagctattattattattactatttttgagatggagtctcgctcttggagtgcaaattctgcctcagactcccgagtagctgggattagaggcacgtgccactacaccagcagacagattggccaggctggtcttgcccaccttggcctcccaaagtgttggggttacagggcctattattattattattattttaagatggagtctccctctgtcacccatggagtgcagcagtctgcctcaggctcctgagtagctgcgactgttgtccagactggtctcgaactcctgacctcaggcttctgccccagcagctgggaggaggagcgggcactgcgcagttcacctgagccccaggcgctcgccgcgggacccaccagcacgtcccctcctcggcagactccctccccggggtcacgtggagggcgagggccccaggcgggggatccccggacacgcagtgctttcccgcctggccccgcccaagacgtgggcccccaaggacacg

SEQ ID NO: 16284 - DNA, 360 bp, Homo sapiens
  source 1..360: mol_type = other DNA
ccagcactaacattctggatcttggctgagcctgggccccatctgtaaaacagagatgaggatgatacctgcctatagctcctgaaattatcctgagtaatactattatattgcattttatgtgaaagcatttgggtgtggtgacgcgcgcctgtagtcccacagtgcatcgagccactgcactccagcctgggtgacagagacccggtctcaaaaatataaagtaaaataaaatatgccaccatttttgtaactcactccacgaaggcccaggcctcgagagggctggggcggggcgcgggctctggcaggtgcgtcagtccgcaggggaacccggggctccacctgggcgcggcgagg

SEQ ID NO: 16285 - DNA, 507 bp, Homo sapiens
  source 1..507: mol_type = other DNA
atagctcctgaaattatcctgagtaatactattatattgcattttatgtgaaagcatttgggtgtggtgacgcgcgcctgtagtcccacagtgcatcgagccactgcactccagcctgggtgacagagacccggtctcaaaaatataaagtaaaataaaatatgccaccatttttgtaactcactccacgaaggcccaggcctcgagagggctggggcggggcgcgggctctggcaggtgcgtcagtccgcaggggaacccggggctccacctgggcgcggcgagggtcaggggggcgggcccgcagcctccggggaacgccgagccgggcccatcccggtgaaaaggctgcagccggacttggggaggcgtcgccaagttcgggaccgacgggccaaggcggcgcgtctcgggggtggagcctggaggtgaccgcgccgctgcaacgcccccaccccccgcggtcgcagtggttcagcccgagaacttttcattcataaaaagaaa

SEQ ID NO: 16286 - DNA, 313 bp, Homo sapiens
  source 1..313: mol_type = other DNA
cgctgtctcgaaaaaaaaaatgtatttaaaaagacccctccggatgtggacttccaggcagagctcggaggtgccccaaacccaggagaggtgctcatgcgcaggatggacaaaccagtctccgcaagagcccgaaagtcgggtcataccccatttttgcgggaggcactcccttcgtgctcctgcagacggccggggagggagacaggacgcaggagcccgggactccccctcccggcgggaggaagcggtgctcctccgcgcaggcctccccgtcccgatgccgcgagcggaatctcggcgctcccggaag

SEQ ID NO: 16287 - DNA, 128 bp, Homo sapiens
  source 1..128: mol_type = other DNA
gccttaatcttccagctaagccttgctcagttgtccaagttcatgatgatcaattgttcaaaactgaacacttctgtgggcacaggtgcagctgggctgcttcgaaggcttccccccagctaagcctg

SEQ ID NO: 16288 - DNA, 704 bp, Homo sapiens
  source 1..704: mol_type = other DNA
cctcccgtgtggggaccctcaccccctagccttcgaggcgaggcgcccacgccccttctgaagcagggtggacgttcgcgggtctctgctgcccgctgcgcggtgggggcaactggccccggacggcgaggggcaggatcctcgccccagcccccagcccggccccgactccggttccccgctccagtcccggagcgtgcgggagttgaccccggcctcccacgcgcggtcctcccgtgggaccaccggcgtcgggccccactcacctgctgggctgcctgcgctgcggccgggggctgcgcggggccgccgtacccgccgccgttcccggagctcgggccgggttccccgaagtctcggaacatgcccggggctgctggtgcggagtcttttctttttatgaatgaaaagttctcgggctgaaccactgcgaccgcggggggtgggggcgttgcagcggcgcggtcacctccaggctccacccccgagacgcgccgccttggcccgtcggtcccgaacttggcgacgcctccccaagtccggctgcagccttttcaccgggatgggcccggctcggcgttccccggaggctgcgggcccgcccccctgaccctcgccgcgcccaggtggagccccgggttcccctgcggactgacgcacctgccagagcccgcgccccgccccagccctctcgaggcctgggc

SEQ ID NO: 16289 - DNA, 357 bp, Homo sapiens
  source 1..357: mol_type = other DNA
ttctgaggacccaacctcctgtgtgctttagaaaccagatgctgagtcctgcaggctcttttgcaaaatggcaataataaatcatgtaggtaaacgcttagcaccgtgcctggctcttgtcatgaatgaggcccagagagagagtggctttcattcactcactcatttattcaagaatgtttggctgagtgcagggatcgcttgcgcccaggagttcaaagctgcagtgagccatgatcatgtcatcgcattccagcctgggcagcgcccttgtagtcccagctgctcgggaggctgaggcaacagaaaaaaaatgttaatttggcatctgcacggttgggccctatgccggatgct

SEQ ID NO: 16290 - DNA, 693 bp, Homo sapiens
  source 1..693: mol_type = other DNA
ctctaggaagagctcgagcgcccgggctgaccggggcaggagagggcgacccgctgcctccctcccccacgccgagacaggcaccggcctgcgggtgggggagcagagttcagaccccgtcgccaccgtcccctaagggggtgctgggggaggagggcatggagggggcggggcgtccaggcccccgaacaccgcggcgcgcccgcctgcccagcgggaactgggcccaagccacccgggagccgggcccactcctgccgggctctgccacgtgctcaccggcgggaaccgcgcggggcctctctcgccgcgtcgggtccagcgccgccgcccgcagcctcccggctcccgggcctgctcgccgcccgcccgtcgcggttcccctgggtcctggtgccgcccgctccgcccccgccgtttcccgcggagtcctagcgccgccggttaagacgccgctcgcagggccctagtgccctcctcttgaagcctcctggccggtgcgcgtccctccccagtctggaccgccgctcccgcccgcccagaagagcgaacgttggccccgccccccgcggcccgcccctcccggggttcccgcgatggccccgcccccgagtcagcaccccctgccggccccgccccacagcgcggccgctgcggccgctgaggcccgcggctccgccctgtggctgcgcc

SEQ ID NO: 16291 - DNA, 299 bp, Homo sapiens
  source 1..299: mol_type = other DNA
cgccaattacctcattcattcatgtaataacttacggagtcgccaagcactgtggtaggctctgggaacagggctgagatctagccactgttcctgcacagtggctcgagcagaaggaacagcccgaggcccagggctgtgcaccagcagactccatcctgcaggctgtggtgtgtgtgacacactcgaccctgcaaggccctggcagcccgagggaggcagagcaccaggctccaactcggagaccacccagctctggggacttcccaaggctgggcagagggggactcagccctggg

SEQ ID NO: 16292 - DNA, 670 bp, Homo sapiens
  source 1..670: mol_type = other DNA
cagttgcatctttacaatgggataacaactgttcctgtcccgtagatctgctatactattctccttgacaagtcacacctgcagtgcgtggcagggccgaagggtgaatccaggcgtgggagcaaccaaggcccccttttcctggcaggtatccggtgcgctggcatttaatagaggaacgcaaagaagcgcacgttcgcgcagctcccgaggccggctctgtaaggccaggcctcccaggcaggcgttatcggtcccagactcgaaccagggcttgttagagcctgcaggagagccaggctccggccgtgccgcgcccgccgccattaacgcccacgggcccgagctgtgctcccgccccggccctgcccgcccgcagtcacctccggccttcgctgcgttcgacgccggcccagccccgggcccggctccgctcctgccgtggctccgcgccaccgccaccgcgccccacccccgccacggccgccgccgccgccgccgccatcttagcgccgggcgcagccacagggcggagccgcgggcctcagcggccgcagcggccgcgctgtggggcggggccggcagggggtgctgactcgggggcggggccatcgcgggaaccccgggaggggcgggccgcggggggcggggccaacgttcgctcttctgg

SEQ ID NO: 16293 - DNA, 761 bp, Homo sapiens
  source 1..761: mol_type = other DNA
gtcacacctgcagtgcgtggcagggccgaagggtgaatccaggcgtgggagcaaccaaggcccccttttcctggcaggtatccggtgcgctggcatttaatagaggaacgcaaagaagcgcacgttcgcgcagctcccgaggccggctctgtaaggccaggcctcccaggcaggcgttatcggtcccagactcgaaccagggcttgttagagcctgcaggagagccaggctccggccgtgccgcgcccgccgccattaacgcccacgggcccgagctgtgctcccgccccggccctgcccgcccgcagtcacctccggccttcgctgcgttcgacgccggcccagccccgggcccggctccgctcctgccgtggctccgcgccaccgccaccgcgccccacccccgccacggccgccgccgccgccgccgccatcttagcgccgggcgcagccacagggcggagccgcgggcctcagcggccgcagcggccgcgctgtggggcggggccggcagggggtgctgactcgggggcggggccatcgcgggaaccccgggaggggcgggccgcggggggcggggccaacgttcgctcttctgggcgggcgggagcggcggtccagactggggagggacgcgcaccggccaggaggcttcaagaggagggcactagggccctgcgagcggcgtcttaaccggcggcgctaggactccgcgggaaacggcgggggcggagcgggcggcaccaggacccaggggaacc

SEQ ID NO: 16294 - DNA, 801 bp, Homo sapiens
  source 1..801: mol_type = other DNA
tcccagactcgaaccagggcttgttagagcctgcaggagagccaggctccggccgtgccgcgcccgccgccattaacgcccacgggcccgagctgtgctcccgccccggccctgcccgcccgcagtcacctccggccttcgctgcgttcgacgccggcccagccccgggcccggctccgctcctgccgtggctccgcgccaccgccaccgcgccccacccccgccacggccgccgccgccgccgccgccatcttagcgccgggcgcagccacagggcggagccgcgggcctcagcggccgcagcggccgcgctgtggggcggggccggcagggggtgctgactcgggggcggggccatcgcgggaaccccgggaggggcgggccgcggggggcggggccaacgttcgctcttctgggcgggcgggagcggcggtccagactggggagggacgcgcaccggccaggaggcttcaagaggagggcactagggccctgcgagcggcgtcttaaccggcggcgctaggactccgcgggaaacggcgggggcggagcgggcggcaccaggacccaggggaaccgcgacgggcgggcggcgagcaggcccgggagccgggaggctgcgggcggcggcgctggacccgacgcggcgagagaggccccgcgcggttcccgccggtgagcacgtggcagagcccggcaggagtgggcccggctcccgggtggcttgggcccagttcccgctgggcaggcgggcgcgccgcggtgttcgggggcctggacgccccgccccctccatgccct

SEQ ID NO: 16295 - DNA, 319 bp, Homo sapiens
  source 1..319: mol_type = other DNA
ggctaaaataataataatattattaacccctgaccaaaactactggtgttatctgtaaattctagacattgtatgagaaagcactgtaaaactttttacgtagaccccttagagttgtaagcccttaaaagggctaggaatttcttggggagctcggctcttaagacacgagtctgccgagccgggcgatgacgagcgcctgtagtcccagctacccgggtcgcgccactgcactccagcgtaactcctataatcttaagtactagtgtaatataaaactataaaggagtttgaaattaggtggccacatttctgactt

SEQ ID NO: 16296 - DNA, 359 bp, Homo sapiens
  source 1..359: mol_type = other DNA
tgccacattttgggttccagggatacactgaacggggccaggttttaaaaatccaatccagggccaggcgcagtgcctgagctcaggagttagtcccagctactatcacttgagcccaggaggtcgaggctgcagtgcgctgtgatcacgccactgcactccaggaagacactgacttaatgggctctaagtccttccagttctgggatctccgcttcccttgaggagcgcatgcgcaatgggaccaccgagacggcgcgaatgtgcagtcgagcgctgatcccggccttcccatgagcctctggggcaggctccaaggcgagcgacggaagcagcaacacgacagcggctgccgagcg

SEQ ID NO: 16297 - DNA, 526 bp, Homo sapiens
  source 1..526: mol_type = other DNA
agaaaacagttccagggagactcttccctactatttttaagaggagtttcttcctgcaggacctggattttgatcttgccccagaggaaaaatgcccagagtccgtagccagggctgcgcggaaccaagacgacactgcctgcctggaacggccacttggcgtgggaagcgcacacctagcgctgcgcacacccgctccccgcccgcggggttcacgccgcgccccagctccgcccccaccgcgcgccgctgcggcccgccccttcccgcggcccggctcccacgcgctgcaccccgccccctccccgcagcgcggccaagcgggccaatcagggccctgctccgcggctggcgctcacccgctgaggcgccccggacctcgacggcgtccttagtaggcgctcctttccggtccttcgcgggaagccctgccttctaaggtctcgcttctcgcgcagttctgagggagataggcctccagggagaggacttcctttctctgctgcccggacccggaactcaagga

SEQ ID NO: 16298 - DNA, 264 bp, Homo sapiens
  source 1..264: mol_type = other DNA
gatgacgagcgcctgtagtcccagctacccgggtcgcgccactgcactccagcgtaactcctataatcttaagtactagtgtaatataaaactataaaggagtttgaaattaggtggccacatttctgacttcagtacccttaagactgatggtttccgaaggctggacgctgagagaggatcgtccacgccggcggccgcgacggtagcgtcagtgagttcccaccagtccaactgcgaggagtgcgacgtgagtctgtcctt

SEQ ID NO: 16299 - DNA, 398 bp, Homo sapiens
  source 1..398: mol_type = other DNA
ttgatcaggcttaatctaggaatcccaaaagggttagaaaacagttccagggagactcttccctactatttttaagaggagtttcttcctgcaggacctggattttgatcttgccccagaggaaaaatgcccagagtccgtagccagggctgcgcggaaccaagacgacactgcctgcctggaacggccacttggcgtgggaagcgcacacctagcgctgcgcacacccgctccccgcccgcggggttcacgccgcgccccagctccgcccccaccgcgcgccgctgcggcccgccccttcccgcggcccggctcccacgcgctgcaccccgccccctccccgcagcgcggccaagcgggccaatcagggccctgctccgcggctggcgctcacccgc

SEQ ID NO: 16300 - DNA, 339 bp, Homo sapiens
  source 1..339: mol_type = other DNA
tgtaatataaaacaaggagtttgaaattaggtggccacatttctgacttcagtacccttaagactgatggtttccgaaggctggacgctgagagaggatcgtccacgccggcggccgcgacggtagcgtcagtgagttcccaccagtccaactgcgaggagtgcgacgtgagtctgtccttgagttccgggtccgggcagcagagaaaggaagtcctctccctggaggcctatctccctcagaactgcgcgagaagcgagaccttagaaggcagggcttcccgcgaaggaccggaaaggagcgcctactaaggacgccgtcgaggtccggggcgcctca

SEQ ID NO: 16301 - DNA, 350 bp, Homo sapiens
  source 1..350: mol_type = other DNA
tggcaattattggagtctttaaaaacacagtcatgggccttgtttgctggtacctccagcacatgcgcgtcagtaagatggcagagctgacatgactgacaccccctcgtgtcctgtgggctcagtctggtttaagaccacagatttgacaaatccattttcccttctctgtaaagtggaaactatttttttttgtgagacagagtctctctctgtcacccaggctagagcgcagtggtgccattttggctcactgcaaccagcaattcccctgcctcagccttctgagtagctgggaattccgacttgaactccttggctcaagtattacaagcatgcctaggtgcctg

SEQ ID NO: 16302 - DNA, 262 bp, Homo sapiens
  source 1..262: mol_type = other DNA
gagtggagatcatgccgctgcactccagcctgggtgacagtgagactgtctgtaatcccagctaatcgtgccactgcactccagcctgggaacaaaaaccatgtattatgctgttaatataaggcttacatatcttaacttattcccatacttggaccattttctttcggctaaagtagctgatgaagccatggcgcccccatggacttcttcatttacaatgaaggagtttgacacaataattcttgattccgaactatct

SEQ ID NO: 16303 - DNA, 389 bp, Homo sapiens
  source 1..389: mol_type = other DNA
gagacagagtctctctctgtcagcgcagtggtgccattttggctcactgcaaccagcaattcccctgcctcagccttctgagtagctgggaattccgacttgaactccttggctcaagtattacaagcatgcctaggtgcctggccaggtagaaacattgcgctccagagtgacttctccgctgcggttggtagttcgtcctctccctccccgggccaggtgtgtcctggagggcagggaagcgtcttggcacgcgggtgcgcgccgccccctcggcctcctgggctccctgaacctcgcaggaccccggcaacttcgagccccgccccagctccaggccgcgggggcgcatcgcgggcgtcgggcggggcggcccagcgggtaaaagc

SEQ ID NO: 16304 - DNA, 348 bp, Homo sapiens
  source 1..348: mol_type = other DNA
ctgcccagctcccaggtgaactctgggatttaagagcaaaccaggattgaacttgggttcttgcctaggcaggggtcccagcctcactatagctctggtcaggagtgacactgcttctctactggaggaggcacgtgtaccagcatctggctcacccaagcaatgcaggagtatcctcagtttccctgcctgagtgagagaagggagctggccacattagtgtccaactctgcaaggttgccagagtaagacaactgcatctgaagatgccaccctggccccgcccctcgccttcctccggtgtgcgatggggggcggggggcgggggccgggaggagcgagcctagc

SEQ ID NO: 16305 - DNA, 538 bp, Homo sapiens
  source 1..538: mol_type = other DNA
gtttatttttgagactaaaaaagacacaaatgctttcaccagaaacattgttcctttttttcgaaggtggaaaagggggctttagagtcgcccttcccccaggtcggcagctggagctcagcccgggcaggcctgctgctctcccggcttggatccccagcccattcatccgggcctgggccgggggtgggctccagcctcccgcttggcgcccgcaacgcggggccgccggggaaatgagtctctcgggactccctggagggccgggccggaaagcttgagagccttcgctcccgcaggtgaggcgcagaaggggaagtgccagccctcctcgcagccccgccctccggcccgccgccggccttcggggccgtagcggcgcgcagggcccgcagagaccgagacaggaggcctcgcgaccagaccgccgaggggcccgcccagcgcacggcagcgggtgtgcctgagtgcgcgtcgcccagagaggacgtggcatacggcgccaccggaagttccggcaagtgggccctgaggctgg

SEQ ID NO: 16306 - DNA, 594 bp, Homo sapiens
  source 1..594: mol_type = other DNA
cctgacagacctggctcccatgggcatttgccagctggactccaggtccctgagcccccgcttgccctcggggcgggaacttcccggatcacaggcacccgcggtggcagcgggccccgggtctccgccgacctctctgtttgccggggccgcagggcagggctaggtcggcaggcggagagccggcttccccgggcagacccccaccgctgggggcgggttccgcattggctccgaagacccgaggggccgaggcgcgctcccgcggcggccccctccctgcagggaccgaatcccggaaaagccgggtttccgctggcggggccgcggccggccgtgggcggggaggggaggcaggacccgtgggcgcgcgctggccacagaccaccccttctactccgcgggagcgaggggcgcgcgtggctgcacgcagggcgcgagcgcgcccggcccggcccctccgcgctgggtggggccgcgcgggccgggctccccgccccctcccggacacgcccacccgtgtcggcctcgcgagccgcaacaggcagcggcggtcgagcgcgaggcccgcgcgcccagaggccccgcgcgtgc

SEQ ID NO: 16307 - DNA, 189 bp, Homo sapiens
  source 1..189: mol_type = other DNA
cctgaggtcagcgtgagccgtgccactgctatgatctcactgggccctgggctgatcaccaccttctgagcaggacccacaagggagcagccttctttctgaagacagagctgctaagggcgctgaaccacctctgtcagagacggtgcatcccccaccggatgtgaccccgggatgcggagcctgggg

SEQ ID NO: 16308 - DNA, 475 bp, Homo sapiens
  source 1..475: mol_type = other DNA
tcactgggccctgggctgatcaccaccttctgagcaggacccacaagggagcagccttctttctgaagacagagctgctaagggcgctgaaccacctctgtcagagacggtgcatcccccaccggatgtgaccccgggatgcggagcctgggggagcattaagtcacagtaggcgctcagttagtggcgcctcacgtcctcgatggcgccatggcgccacactaggtacctgtcgacctcccgagcagctccacacgctgaggccccgcggcattttgcggccgagggcacccctcggggctggcgggccctgggaactgcgccccgggcgggtcctcgcaccgcccccgcctcgatggccccgccccgtccccctcccgctggagccggcccggcccgcgctcctttaaggcagcgaacgggccaaagcgtgtttcgccccctccgacgccaccgaggtagcggcttcaccttt

SEQ ID NO: 16309 - DNA, 547 bp, Homo sapiens
  source 1..547: mol_type = other DNA
acccggccccgcccaggcacggccgaccccgccccgggcaccgcccctccccccacgcctgcagcttctcgcgaggggcggcgacggtcccctggtggcaggaggggctccccctgttgcgggtgaggcggcaataaagacggtttaaatcgacggaggtcgggggcccccagcgtctctagactggggtggagtgagtgggggacagtgtgtctcgctcaaccgctgtccgcgcagctgggcccagatattgtgccccaccccggaattgcgtgaggggcccacaagtcaggctttccctaaaacactcacttgtggggttctggagaccgcgggctcttatgagctctgctcctcacaactccatctatgaaatgcgggtgatgacgcgcggacaaatgtacttttattagcgcggtcaggctgtcctcaagcatgggagtgggcgcggaggcgcgggctccccgactacgcctgcgcagcggggctgagttggagttgcgcctgcgcgtcgcgggcggggcctctggggcggagcggccaccat

SEQ ID NO: 16310 - DNA, 520 bp, Homo sapiens
  source 1..520: mol_type = other DNA
cttcctgcaagaaagcaagccctgggctgcccccttggggtgccccccgctcaggacaaaaaaaattaataaatttccattggccctcggtctaagcccagccttggggtgggggctgctggcaaaagcccttgaccccgtttcctgaggccaggaaagctgcttgttgtggtctgtccccaagggcccagcaccgttctgtcagaagaggcaggcggccattacctggcgtgccgccgccaactcccgcggggcacacggcagaggtgtggggtcgcgcagccgctgagagggcccccactgcacctccaggtgcttcttctccgacagtgacacgcacttcagcctttgccctgagcgcccgcccgagggggccgagtgcggctgtgtgccgggggcggccgcgtctacgctgtccgggggctgggggtggcgcccgagccgggcgggcagacgaggggcccgcggagacccagccccgcccgaggccgctcgcgcggcggccccgcccccggctccg

SEQ ID NO: 16311 - DNA, 395 bp, Homo sapiens
  source 1..395: mol_type = other DNA
ggggcctcaagtttaggctgcagcttcaggccaaatctgctggactacgggagagtctatgggacaggcccggggcaggatcctgccccactctcagacttcggatcctctgggccccagtgcgtgtgcgtgcggccacgcgctcgctaggagcgtgtggttcatacgcaggcccccgggagtctacaggatggcggctgctctgtcactgataggtccggcctcccacggcagggcttggttggaactcgaccgccccgttccggcagggtgcgtcaagtgcctcaccgcgcaggcgcgcaaataattctcgcgtgccgaatccgctcaggccagagctcgtcagtggccaattgggaggaggggcgagccggcgccgccgaagagccaatggc

SEQ ID NO: 16312 - DNA, 486 bp, Homo sapiens
  source 1..486: mol_type = other DNA
agggatccaaggctgctggaattcctggactccagtgatcctcccacgggattacagccagcttttatccccatttttcagatgggaaaactgaggttgagcatgctggcccaaggtcacgcagcctagggtcccttgtgtcctggccccagcctgcctgtcctaagctgagcccagcacccctgcccagccagtgagactcgtcatccttagagatgggaccccgcgacccacccttcctcgagggttttacagcccgggaagctcaggcgccagagggttagaccagctcaaggtcgcgagcgcgagcgcggccggaggagaacccaggggtccagccgcccagcgggggcttctcggggacgggcggagcgcccgcggtgccaggcgctgccggcggcgccgccggtgccgcgggggcggggtcagcggagggcggggcgcctggcacccgggccgccaacgccgccgccgccgctgccgccg

SEQ ID NO: 16313 - DNA, 450 bp, Homo sapiens
  source 1..450: mol_type = other DNA
cagattccaaggactggaattcgggcgctgggctgcctggcgctgggcagagtctgcacctgtcccagttgcctggcagattggcaaggcaggctggcagagcctgcgtgcgtgggaggcagccggcagcaccgccatgtgctgacgacctcacagccagactccccctggttagcactgagtgtcagaaccaaggttggtttccatggagacatggcatattttctcaattctctcccacaaggctgacctgaggccaggggcagatgagcaactgaccacagagccaaaggtgcccccagagcatggctggggcctgtggggactgaggccgcttaaccacttcccgcccacgtgtgcaggccgtgtgtggaggtggcatcccccagctggggccctcagagcagggctagcatggaggggacgccctcaggaagtgttactcactgg

SEQ ID NO: 16314 - DNA, 449 bp, Homo sapiens
  source 1..449: mol_type = other DNA
atgcctccaatggggggcttccctgactttctagaaggaagacttgggatcgaattccactctcagcaggatgtgaaaaaggcaggacgaggatgggattcgaacccacgcgtgcaaagcacaatggattagcagtctacgtgacaggtcgctgcagccgagctctgccgcggtttccctccgagtccggccgagcgcgccgcgcgttcagggcgcgcccggtccagggtgcgcgcgccggcggggagggagaggagtgcgtcccgggaagccggcggggcccgggcgggcgggcgtctgcacggcgcgcggccgagcggcggggccgtggctcctcctccctcgtagggggcgagccggcgcgccgggggctgggggcggtggcgggcggcgggcggcgggcggcgggcggcgggcggggcggcgctcggggctcggctggcctcggc

SEQ ID NO: 16315 - DNA, 842 bp, Homo sapiens
  source 1..842: mol_type = other DNA
gtagtcccagctactcctgaggctgaggcaccagaatcgcttgaacctgccaggttgcagtgcacttccgcctgggcgacagagcgacactcagtctcaaaaaaactagtttgtgttttggagcctcagcgtccccgatacgcccggggattgcagagaatatgagagtaggagcaaattaatgatttatagtcttttcaaatttttttttttaacagaaaaagagtagggagttgaaacccactcccggggacccagcgcggcgaagcccgccaggatcgcgggcgacctgtggcagctctggttcccccgcccgggcccggctcgggttacgctctgggcggggactccgcagcggctccctagttagggggcgccccggtgggttcctcgcaggagcggctctggcatcacctcggagctgacgaagcgggaagagccccgcaccagtgctgcccctacagagctctcggcggggggtggaggtgaggttacacctcgtccctacccccgccttcccctccgccgcagggatccgggacccgcccccgcggagaggacggggggctgcggggaggggctgtgcggggagcgggcgggttccgcaggcccctaggtggggcggggcccgagccagagtcgagtccctggtgggggaaggagagacgggtggcgcgaccctctgtccccgcctcggggcggagcccaggtcccagcctgcggagcgcgagacacgccgaaatccgcccgaggctacctgtgcgactccagccccggaatctggggagacccgccccccgccccaccggtctgcggccctccgccccagcgcaggtgcaggt

SEQ ID NO: 16316 - DNA, 795 bp, Homo sapiens
  source 1..795: mol_type = other DNA
gagaccatggtcaaaagatgagttcgagactagactggccacctcttcagtagagctggtgaagccccgtttctgtagtcccagctactcctgaggctgaggcaccagaatcgcttgaacctgccaggttgcagtgcacttccgcctgggcgacagagcgacactcagtctcaaaaaaactagtttgtgttttggagcctcagcgtccccgatacgcccggggattgcagagaatatgagagtaggagcaaattaatgatttatagtcttttcaaatttttttttttaacagaaaaagagtagggagttgaaacccactcccggggacccagcgcggcgaagcccgccaggatcgcgggcgacctgtggcagctctggttcccccgcccgggcccggctcgggttacgctctgggcggggactccgcagcggctccctagttagggggcgccccggtgggttcctcgcaggagcggctctggcatcacctcggagctgacgaagcgggaagagccccgcaccagtgctgcccctacagagctctcggcggggggtggaggtgaggttacacctcgtccctacccccgccttcccctccgccgcagggatccgggacccgcccccgcggagaggacggggggctgcggggaggggctgtgcggggagcgggcgggttccgcaggcccctaggtggggcggggcccgagccagagtcgagtccctggtgggggaaggagagacgggtggcgcgaccctctgtccccgcctcggggcggagcccaggtcccagcctgc

SEQ ID NO: 16317 - DNA, 559 bp, Homo sapiens
  source 1..559: mol_type = other DNA
ttaagaagtgttagcaacctgttaacacccttgacatattcagaggcttgaaagaaaatgggaagaataactttctctttcggtgtaattcctacagactctcagtattgagaccatggtcaaaagatgagttcgagactagactggccacctcttcagtagagctggtgaagccccgtttctgtagtcccagctactcctgaggctgaggcaccagaatcgcttgaacctgccaggttgcagtgcacttccgcctgggcgacagagcgacactcagtctcaaaaaaactagtttgtgttttggagcctcagcgtccccgatacgcccggggattgcagagaatatgagagtaggagcaaattaatgatttatagtcttttcaaatttttttttttaacagaaaaagagtagggagttgaaacccactcccggggacccagcgcggcgaagcccgccaggatcgcgggcgacctgtggcagctctggttcccccgcccgggcccggctcgggttacgctctgggcggggactccgcagcggctccctagttagggggcg

SEQ ID NO: 16318 - DNA, 413 bp, Homo sapiens
  source 1..413: mol_type = other DNA
tttctttaaataactcattttccataaataaattgatttttcaaagaaaagttgatatcataatcataaattgctataaaaataaatataagaaaaatacaagttaataacttttgataaaattgtcagcagaccctctgaggttaagaagtgttagcaacctgttaacacccttgacatattcagaggcttgaaagaaaatgggaagaataactttctctttcggtgtaattcctacagactctcagtattgagaccatggtcaaaagatgagttcgagactagactggccacctcttcagtagagctggtgaagccccgtttctgtagtcccagctactcctgaggctgaggcaccagaatcgcttgaacctgccaggttgcagtgcacttccgcctgggcgacagagcga

SEQ ID NO: 16319 - DNA, 387 bp, Homo sapiens
  source 1..387: mol_type = other DNA
attcccccggccccgcccccgcccccggcccgcggggagacagaggctggcagcagggcgggggggccggcaagggatgcctaagtgcagacccaggtcctcgccgtgcccccacagtaaggttaattcactgcagactacagcgctgatgttggtttacggaggccaaggaaagtcctccttccctgcatgtgaacgtgaccttgtctgtcagagggggatttgtagacaaccctgttctgcggactcctgccgcgggcttcaggccgccctaaacctgaacgcattcagacgtctacgtcatgagatgacgtcggaagccgggcgggaggaggagcccccctccccagtcagcggctcccgctgcagctcacgcctggcaggagc

SEQ ID NO: 16320 - DNA, 163 bp, Homo sapiens
  source 1..163: mol_type = other DNA
tcaccaggtaacaactcaggttttatcttaatcgtacggttgcactttgctaacttagtcctcacagcaatcctaggtaggtgctacataccaggctgtgtgcagcagatggcgccctggcgcactgcataaaacaagttaaaaagtgttttatcctcctctc

SEQ ID NO: 16321 - DNA, 373 bp, Homo sapiens
  source 1..373: mol_type = other DNA
acaagcaagtcacttttgtaaatctatttcctcataatttgctcaaagcactttgcagcacactgcagctgccccagtggtgcgtagtcccgggcctaaggctagggaaggggcctccagcgccgtgtgagggccctgaccgacagtggggaggggcgcccatgtctctgggagaaccccggagtccccggaaatggagtcctgagccggctaggaggggcaagggagtccctcagacggagtgcggggcttccctggtcaggaagggctggtctcctgcgaaggggcggagctccgcctacgaaggctgagcatcgccgcaagaggcggccggacagggggcggagcgtggctgttcgcgctcatccccctc

SEQ ID NO: 16322 - DNA, 363 bp, Homo sapiens
  source 1..363: mol_type = other DNA
atcatagccccctgctggcagtgggcagcacattttaaagaggggtgactttcctaaggacaccgaccaacttatcaaagctaacagcttgtaacactgttgttctatgcagaggctgtctggcctagacacagaccgtgcggtttcagtacccaaacgcccctcttcaattagcctggttttccggttcataaagcaagtggaccgcgggcccgcctctgctacaaactaccagcctgtttgtgggctccttccaggcccgtggcgcgcccctacacgggtgggaccacctcagccctggcccgacccggcaccgagagctttgcaacttccaagtctccacccccaggtcccgagtcccga

SEQ ID NO: 16323 - DNA, 431 bp, Homo sapiens
  source 1..431: mol_type = other DNA
taaagtgccaggccgccagctggaaggctcagcctttagccaggactcctcctctataaaagagagaataaatgattttgctgtgctccaccaggattttacagataggggaacccggggattccccaacccggggcattctccccgccacgccccgtcccggctgggacagagtgtccagcctcgccctccccggagcactccttggcctcgagggcgaacgattttgcgctcagtataagcccaggcgccgcgcctcacctgcagcagctgctccgttcattggggctctgcgaaccccgccccccttggccaactgcctggcctcggggtccggatgggcgtcagtaccagccaatagacgcgccaagacgagcttctcggctcgcccgctcccgcccccaggcgctacggggtggcgcgcggattgg

SEQ ID NO: 16324 - DNA, 346 bp, Homo sapiens
  source 1..346: mol_type = other DNA
tggagtgcagtggcacagcctcagcctcccgagtagctgggagacctcaggtgatcctcccacctcagcctaccaaggtgctttatttgattgactgaatgaacgaaagcagcaatgcatttaagtatttccttcctcacagggttactgtaaagagtaaattaagtaattaacctaaaacgtaagaaacagctgctttattaagatttttatctgagcgtttcccagaggatggacccgagttggaggagatcctcacacagctggccacagccgatgcccgattctggaagggccccagtgaggccccatctggccaagcttgaggtggcctagcttggacctt

SEQ ID NO: 16325 - DNA, 399 bp, Homo sapiens
  source 1..399: mol_type = other DNA
ggagggggcaaggagggccatttttagcctcccttccacaacaggatgttgacattatctctagatgaggcacaattttggatcacgaggtccgagaccggcttggccagtggcatgcgcctgtaatcccagctactcgggaggctgaggcaggagaatccctggaacccgggaggttgcggtgagccgaaatcgcgctactgcgctccagcgcaagcgacagagcgggcctggacctctacagtaacgcagcaaggcaggacatggtccttttcaccgaagccagagggctctgtggctgacccagaataaatatctttgaggaatctgagacagattcctcaacccaggaaggtggccagcgcgtcctcctgagcctgggtgggaaagcttggcgcc

SEQ ID NO: 16326 - DNA, 365 bp, Homo sapiens
  source 1..365: mol_type = other DNA
gccgcccgcaaacgggctctagggcccagcccagccccagatcgaattcgcactaagccgggaactgcgggactcgggggcgccgggcgtggccgcgggccgctctagaggctgccctctggagctcctcgtgagcctccccccgggcactcctggcccccgcgccagcgggcggggctccgacgggatgggaggagcctccagggtgggcgggtcaatcactccgcggcgttatccgggctccagcgccgcgggattccgagcgcctccactgctggtccgttggccagatcaactcgccgcgtgggccggccgttccctgagagtctgagcgctcgcccgtagcagacgtccgtctgccgcta

SEQ ID NO: 16327 - DNA, 312 bp, Homo sapiens
  source 1..312: mol_type = other DNA
ggctccaggacaaacagcccggcctctcaggcctcggttttgctgtcaggaaatgggcgttccgctgctgcttctcccaggccgggtccagcagcaggtcgcggtcccagtcctccgccgcccgcaaacgggctctagggcccagcccagccccagatcgaattcgcactaagccgggaactgcgggactcgggggcgccgggcgtggccgcgggccgctctagaggctgccctctggagctcctcgtgagcctccccccgggcactcctggcccccgcgccagcgggcggggctccgacgggatgggagga

SEQ ID NO: 16328 - DNA, 470 bp, Homo sapiens
  source 1..470: mol_type = other DNA
gcccacggccgcggcccacagcgcggtgagcacgagaggcagctgcgcgggcgccccgtccgtgctcccagccgcccagggctgccccatggcctggacacccagctgtcggagccggaggacttagcggcagacggacgtctgctacgggcgagcgctcagactctcagggaacggccggcccacgcggcgagttgatctggccaacggaccagcagtggaggcgctcggaatcccgcggcgctggagcccggataacgccgcggagtgattgacccgcccaccctggaggctcctcccatcccgtcggagccccgcccgctggcgcgggggccaggagtgcccggggggaggctcacgaggagctccagagggcagcctctagagcggcccgcggccacgcccggcgcccccgagtcccgcagttcccggcttagtgcgaattcgatctggggctgggctgggcccta

SEQ ID NO: 16329 - DNA, 330 bp, Homo sapiens
  source 1..330: mol_type = other DNA
aacgcagcactatttgtaatgcatcttgcatttcccttggtagaccctggactggatttaagtttagctcaattccttaccagatatttggcaaacagtttcaccacgtgtgccagactggtctcaaactcctgacctcaggtgatccacccgctttggcctcctaaagtgctgggattacagggctgagtcacagagcctcatgcctaacatataacaagcacgtgatagaggtcagtgactagctttagcctcaggccagcagcctcccgcaagagcgcgcaggcgccgcaaaccagcgcccattggtcggcgtgccgtcgccccgct

SEQ ID NO: 16330 - DNA, 592 bp, Homo sapiens
  source 1..592: mol_type = other DNA
tggaaagcgagggatggacttcaattccttcaagccagtgcagcttgaacgtcccagcggggcagacagggtgcacccagaggcctgctctgccctcagcagggcctggaagtcggcaaccaaccgggtgagggtggctgattcagtgaagacccccctgggagtcgaatggtcaccagcaggtggcaagaagagctgctcgctgctcagcagcacgtaggcctcgagccgcttccgcgcgggcggctcccgccagctgcacttcagctcgtccaggatgaccttgatgagacgtagtcgggcctcaggaggcactcccgctgctatcccgctgccggccagcagcttggccacctggctgcacagcgacgcgccagagggaaggactgcagaatccggccctcctgcggggggcgcttctgcagcggacgcagcagccggtggtaaaaccgctggagctcaggctcgggcttcgggggctccatcatagagccggcggccgccaccgggcaaccaggagcccgacggcccgagtgcgcctgcgcggccgccacccggtggctgacgaagcagggccttgcgtgcgcacgca

SEQ ID NO: 16331 - DNA, 420 bp, Homo sapiens
  source 1..420: mol_type = other DNA
ctaaaattttttttaaggtcctgcagaattaattttctcgtttattaaactgtttattatgaaaaccttcaacatacaataacgtcattccattatagggcttctccggggcctgcctcaggtcccctcgcggtgctcagcacagtcctgggagccgtgccaggcccggccttcccccgtacactcacgcggcaacccccaggcgcgggtttggacgggagcccgccggtcccagccccacccgggccagagaccgccttacagactaggcctctctgccgccggcgccgctcgcgcgccaaccccctctcccgccacgggctgtggcggttggtcgtggccctctgggattggctgtgcctgagcactggacgcgcgggatgcgagtccccattggctaggccagggcgcctgcgcggc

SEQ ID NO: 16332 - DNA, 610 bp, Homo sapiens
  source 1..610: mol_type = other DNA
ggccctctgggattggctgtgcctgagcactggacgcgcgggatgcgagtccccattggctaggccagggcgcctgcgcggcggggttctcggtcgccagccattcctgaggaggactgccggtcgttcggacgtcttgcctgtcgctggaggagaggtccgggctctcgggcggatacgactccggaggagctggcagttcgccttcgtgcacatgcgcgagaacgcgggcgcgctgcgcgccatcgaagccctgcacggccacgagctgcggccggggcgcgcgctcgtggtggagatgtcgcgcccaaggcctctcgcggacgcgtcatcgcgcggaggcgcgctcgggggcgggggcgcgctcggggcactctgcctgttagccacgccccttacccgggggtcggtcactgcgcgggggcgcgttgggtagagccaccctcctcccctgcggtccaggaaccgtccaccaagtaggaggaactgggtgggtgcggcggccactgcgagccaagctacggggccggggacgcgcctgagagccttgcgagtgttccgggggcgcgccttctcctggtctcctgggcctggcacccagcggagcggg

SEQ ID NO: 16333 - DNA, 288 bp, Homo sapiens
  source 1..288: mol_type = other DNA
tatgagtctcatttgtgggttgagagtctagagtcaaacatctgaagggacagtctccctggaaagtgcataactgcacatgatgtaaacatttgattagcaaaaatgattgttgtgtaacagagctcctgacatacttcgatgtaagagactgggaaagatttgaacatcaaaccagctctgttttatttcacaggaaaaaaaaacaacatagttgcttggttactccaggttgtaaccactcgttcaaagatgaacagcttccggaaacaaaagacaaaagaggaa

SEQ ID NO: 16334 - DNA, 290 bp, Homo sapiens
  source 1..290: mol_type = other DNA
gtgctgttgtgtgtccaatttgggacccatcaggtaggactacgcgtttgtctggcctggctgtccagtctggggaaaaccaggggctggggatacggccttccctggggcttttggcaacagcactggtggctttgatgggcaagcccgtcagcccacgtggctcctctgacggcccagccagctacctaccgggcccagccgtccgtgtcactgggagctgcctacaggggggcaccatacaggggccagctggctagtcctagctcccagtctgctgcagctgcctc

SEQ ID NO: 16335 - DNA, 270 bp, Homo sapiens
  source 1..270: mol_type = other DNA
aaaacaaaaaaacctttgctgctccagtttttccctgggaggctggttcccagagggaacttgtcctcagcgtctcctgccgggcctacttctggaaggccattacagaggtcctttcaccacctgtgagaactctcaaggctaccctgggttggcgccatgaagctaaactaccccggggctctagctcgctccgcctaatggcgggccgcaccccgccggcgaagcctaattggcgtccgtggtaaccaatcagactgctgcggccgc

SEQ ID NO: 16336 - DNA, 430 bp, Homo sapiens
  source 1..430: mol_type = other DNA
tcaccatgttggccaagctggtgtcgaggattataggcgtgagccgccgcacctggcacgcgggaaactcagttgcctagacttccagcttggttcccacccagactctggcgtgctcaccacagaccaggactgtgatggcgtagcctgggtagcaatgcctcttaggcacaaactttaaaataatgtttaaagcgctacaaaacaatgactagttttggccggccagcccgctacaaaagcccctttttagggcccctcaaagggcaagagcaggacccattgtggtgagcccaacagcagtggcgacccttgctggggctgggggtgggctgacctccgcggcgccgcgccaccaccaacaggccccgcccccgtgctgcgtggtcattggtcactcggctcccgcgaggggaaggggagggaagca

SEQ ID NO: 16337 - DNA, 525 bp, Homo sapiens
  source 1..525: mol_type = other DNA
gacgcccgggggtactctctcaggtgccctcagagcctgtgcttcggggcacacggggcgtggccggcgccaggcgctcagtgccgtcttccagagcagctccccgagcacaggtgtggcctctgaacctccacgtccagctcctcccagcacccggtgcatggaaggcgctgggctccggcaggcacctccgaggctgcgtcaggctctgcccctgggtgtccgccggtgctcggcaaacgccgcagctttctgagccgtaggctggagagagggcgtcgttcccgtgggagacgggcctcgattcccgttaggcgacacggccgtcccctccatgccgcgcagggaacagcggcaacgcccagtcgaagggtacccgcccgccgccgccgccgccgccgccgccccctcctcagcccgggcttggaactccgccagtgcccacgcccgagtccacgcccacgcccggcagcgcgagcccatcccttcccgcgcgcgcgcctgcgcccgcgcacgccccgccca

SEQ ID NO: 16338 - DNA, 469 bp, Homo sapiens
  source 1..469: mol_type = other DNA
gaggctgcagtgagccaggactgagccactgcactccagcctggggtgagcttctctcagggaaaagctcattgatctgcatccccaagacctctcgctttaatttgacaaatgaatcagttacaggaagaatctatacagaaagttactgagcggcctgagtcccccaagtgagggctcgggacaatctcccgcctgggtgagagaatagggagaccctgaaacgtctctgcagcctcgggctgctccagaagcgcccacagctgcagggttttggggatgcggtgggaagagcccctcggcgcccgttctcccaggcttccccttggccaagggtgctcctagcacaggcttgtttttctcctagataccagcgggcaagcagaaaacagcccccgcatagaggagatgcgagctctgcgctctgccagggccccgagcccgtcagaggccgccccgcgccgcccgg

SEQ ID NO: 16339 - DNA, 699 bp, Homo sapiens
  source 1..699: mol_type = other DNA
caggaagaatctatacagaaagttactgagcggcctgagtcccccaagtgagggctcgggacaatctcccgcctgggtgagagaatagggagaccctgaaacgtctctgcagcctcgggctgctccagaagcgcccacagctgcagggttttggggatgcggtgggaagagcccctcggcgcccgttctcccaggcttccccttggccaagggtgctcctagcacaggcttgtttttctcctagataccagcgggcaagcagaaaacagcccccgcatagaggagatgcgagctctgcgctctgccagggccccgagcccgtcagaggccgccccgcgccgcccggaagccaccgcggcccccctcactcctagaggaagggagcaccgcgaggctcacggcagggccctggcgccgggcagggcgagcctcggaagccgcctcaggaggtgcaggccacgggccgctgctgagaggtcctcaccccgggccccaggacgtgctgtggctgcaggaggtctccacctgtcagagtggctgagtcccagccctgggccctgagccgggtccccttccgcaagcgcccaccgatccggaggctgcgggcagccgcgcgtctgcttccgcgtcgggcccgggcggggcggggcggggcgtggagccgcgccgcggcctgacgtcacccacacctccctggga

SEQ ID NO: 16340 - DNA, 292 bp, Homo sapiens
  source 1..292: mol_type = other DNA
ggtcaggatcctggacctgaaggaatgtgcaggatccctccatagcctcgggttcgggaggccaagcaaaagatctaacagtgagctattgactaacactttgttaaatgaactatgttaagcatgtgaacatctgcttgctgataaatcgtaggtcaccagctcacactaatcaccaggtaacatgtgccctggtgagcggcccatgatgtcaccagttccccaggaaggaggaagacattagactccttcttttttcttctcagattggctcccaagcagcctctctctc

SEQ ID NO: 16341 - DNA, 803 bp, Homo sapiens
  source 1..803: mol_type = other DNA
cagggcggggcggcgggggcggggcgcctgcccggaggccaagccctctcggccccaccccgcagcagccctgccaggggcgccgccccagccccccccacggccgaaccccgtgccggttggggaccctccacgtgactcggtgcgcgctcggccctgcccgtgggtgcagcgacatgtgacaaagacgcccgtctccgggagatgggttcgcgccgcggcggcgggcgcccgtgcggtgcaggatgccggggcgccaggatggccgggggcgcgcgcgcctgtgccagggtgagtgcgctgcggcagcgccgggggacagcgcggagggcccgcgccggcccgggcctcgggcgtgactgggcgccacccgtgggcgctgcagcggccgcgtgtccccgtgacctcaggagccggcccgggcccgggtggatccccgcgcgcccctccccgtccgccctccacgtgcgtgtccgcggcgcgcgcgcccgccggcgcgcacccgctcgcctgtcgccgccgccaccgctaaccgcgccgggaaaaggtgccgggaaccgagcgagccggggccgcgggcccgagcgccatgggcccgagggtgggcggcgggcggccggtcatccccgggcctcgtccccgcgggagagcggccaggagtcggcgggggccggccgggctcgcagggaggccggcccgcgccccctgagcgacggacaccaggtgagggggccgccgggcgcagcgcgggggccggccagggaggggccacggactccacgggaggttcggggggcgccttc

SEQ ID NO: 16342 - DNA, 222 bp, Homo sapiens
  source 1..222: mol_type = other DNA
cctggacttccagtgccccaggcactgtgataggtacctgtcctcccaccaccactcatgggggctctgggaccagtggcctaatagtgccaggaacaagcagtacagtggcaccatcttggctcactgcagctcaagtgattcttcctgacttcaggtgatcacctgccttggccaaagtgctgggattacaggcgctcacccagaggcctccttcacagc

SEQ ID NO: 16343 - DNA, 276 bp, Homo sapiens
  source 1..276: mol_type = other DNA
ttcggaaaaacaaccacggatgtgtctgtggttcgttaataagcctcgatgacagagacttatgcctcagtcacttgttccactcaatttgacaagtgtcttgggtcttgtcaagtgtcttgttccggccacttccgcctattgcgggcgtcggctagggtccggcggcccacgtgaggctccggagacaagggagtaggcggtggtgcgccaggggcgggctctcccagcctcgccacttatccaggcgctcgccggggacgggaggggcggtcg

SEQ ID NO: 16344 - DNA, 695 bp, Homo sapiens
  source 1..695: mol_type = other DNA
tgcaagccgtgcctcactgccagactgcgcgggcagggagggacctgtcccctgttcccggaaggcactgtgcccagcccctgcgggtaaatatctcctgaatgattcattcattcctttgggagagaaagcagctctgtgaccttggtctgagcctgtttcttcatgtaaaaaatggagtcaccacacggtgaggactgagatgatgttgtaaggcaccagcacagagctgacctacagcaattatccattcagaaaaggggaaactttccgctgcgcaggctggggctagaacccaggccggctggctctgagtccagtgcttggcctgcctctcagaggcctgtgggcacgtccccacccacccctgtccccaggcgtgggagcgaggggttgggcttggcctcagggcgtccctggatcccggacgcgcttggggatctccggctcggaccccaggagcagagacagcgctcgagcttgtcactttaaattcaagagggagcgggcgggcaagcgggcgagcgcgagggagcgcgcggcgggctcctgggagcgtgcccggactgcggcgcagctccggtccgccgccccggcccggccgagcccccggcccgcgccgcgctcctcggaggcgggagcccggcgacactgcaggggtggcgttgccgccggcggccgggctaggcgcaggt

SEQ ID NO: 16345 - DNA, 524 bp, Homo sapiens
  source 1..524: mol_type = other DNA
aagcgagcctcaccctctgcgggggcggggtgggggggcagcattccgctccggcctccgcagcttcgcacgtgcgtgggcgaggactaagccgtgggcttctcaaggcagggcctggattttgtcttaaacagttcagggtccccgggcccttgggcaccagggggagagggaaggttctatcgcttcctagatcgtggccagccacggtgtcaggtggctgcccacctgcagcagagcttcctggtgctgcgggagggggcaggccaggcctggtggggccagtgaagggggtcatccccttcccacctggcggaaatgcaccattcattcattcattcattcattcactaaaggtcactggctcctgcctgggatctgggacccagcccctgagcacccgtggccccagcgcggccagctcacagtaggtgctcgggcagcggacggcctggagaggaagggccccagcccagccgcccgggcctctcacctggctctcggggcgcccggctcgccctgcc

SEQ ID NO: 16346 - DNA, 384 bp, Homo sapiens
  source 1..384: mol_type = other DNA
cttgacaggatgcaggactggctgcttcatctggggaatccaagagtacaatactggtattctgagggtaggataatcttacaggatcagaagcaggcatctgttttagattttattgaatatctcaatattggctgacatgggccatttcactcagctcctgtgcctagttcatccagagcgggcgaccccctctacttgctgagaggggagagagaagtgtgcagtcagccagagagctctggcagtaacagtggtacctttggctggcgccttcagaagtctgccaccgggagccctcagggggctggccctagggcgggggctgtggctgagctctcctccctggcagggcctcttccggctctgcagcagaacggctgg

SEQ ID NO: 16347 - DNA, 716 bp, Homo sapiens
  source 1..716: mol_type = other DNA
gcgcctgcagcacccccggggaccagggctactcctgtttcctgccccttcggagcgacgagcagtgggtgaggcggggccaggccgctgcaccgaggagcccccgggcccagggcagacgggccccgtggcggcggcgccggggcctgcccgggaatggcgggcaagccggcctcggcccaccggccggcacgcgaagggagggcagccggcggccatgcgccccttccctgcgccctctcgccctgggcaggcctgagccgggagcccaggtcccgcgggcccagcccggcggcttgaccccgggagaccctgctttgaggcgggtatcggttgccctggcccaggcctcccggccctcaggggcagcctgtggggggtcgggggtcaccaccctcccaggggggtgggggagggcggccagcacagctggccgcgaggggcgcgcgcggaggaggatcggtgccctgcgcgcaggcgcgagcagccagccaggcccgagccctggaagaacgccgacggggagcgggggcggcggggggcgggcggcctgacgcgagggggcgcagggagccgcgtcggcgtcgcggggcgcgggcgattcgaggccgacgcatccgcgcgtgcgcgcgccggcggtgtgtccgcgttagaggggagtgacgcgtgcgcgttcacgcgcgcccgggagagcggtaatggcgcctgcgcagtgc

SEQ ID NO: 16348 - DNA, 402 bp, Homo sapiens
  source 1..402: mol_type = other DNA
ggattctgggtccagtgtgggtcccagctgggtgttgagtctaggacagtgatctggagttgacagtccaatctaggtctgagtcctgaccccaagtctagagttcacagtaaccaggatgggatcgaggtcatggtccaaaatctggatctgggggtctgacatccgtgccgggtccctgtcgtgttccaggcccgggtctccgtccagcatcgagggccgaggtcacggccagggtctgagcccgcggtcgcaggtctggttcggggtcagattccgcgcggcctccagggggcgccgtcgcccgcccggctcggcccctcgcgggctcgctggcgttgtgcgcggcaggcggggccggaggcggcggcggctccggggcgcgggcgcgcgggcggcggc

SEQ ID NO: 16349 - DNA, 271 bp, Homo sapiens
  source 1..271: mol_type = other DNA
gctgggatccctgggcacagagcagtctctctcccagggatgtgggggtcagatggtcagaagccttcgggctgctaccaaccccccatagcgtggggtggcaaagtgaccccagatggcacaggcgccatgtgactaaccagggccccagaccccaggctgggcctccagtaatcaagggccggaagaggcctgcaccctagttccggtgtgggtggaggggccggccctgatttcgaaaccgcgccaaccgcagcctctgcaaaaggga

SEQ ID NO: 16350 - DNA, 767 bp, Homo sapiens
  source 1..767: mol_type = other DNA
aaccagggccccagaccccaggctgggcctccagtaatcaagggccggaagaggcctgcaccctagttccggtgtgggtggaggggccggccctgatttcgaaaccgcgccaaccgcagcctctgcaaaagggactcgtgcggcgggcgaaggcagccgttcgccgcgggcggtcctccgccgggacggctctgccgctgcctgggcctgcgccccctgacttcagggccccgggggccgcctccccgcatcgctgggcctgcagacaccggctcccaggggaaggtgcttcccgctcagccggcaagcacttagtggcgtctgctcgttgctcgtctccaggccgggtgaggggagccggggcgccccacttcacccgcacaccccagcagagtcggtgaccgcgggaccgcaggcatcacggctgcagcaggaccgcggcccgccgcgcacgcgcgtgcactaccgaggggcccagtgcccgccccctccggccccgccttcctcttccggacccggctccgggggtctgcgcagggctcggggcgcctcctgcgggccgcgggcggagctgtaaccgggcaccgccctccaggccgccccagcggacccgggcccgaccgaggtcggggcgcagacccaaggccgggcatctcctcgggcgctcgcggttgctctgccgcgcgctggcctggccgcggttgccatggttgcggggggacgggggcgcgcgcgaagccccgccccggcccggcgcagccccgccc

SEQ ID NO: 16351 - DNA, 848 bp, Homo sapiens
  source 1..848: mol_type = other DNA
aggcctgcaccctagttccggtgtgggtggaggggccggccctgatttcgaaaccgcgccaaccgcagcctctgcaaaagggactcgtgcggcgggcgaaggcagccgttcgccgcgggcggtcctccgccgggacggctctgccgctgcctgggcctgcgccccctgacttcagggccccgggggccgcctccccgcatcgctgggcctgcagacaccggctcccaggggaaggtgcttcccgctcagccggcaagcacttagtggcgtctgctcgttgctcgtctccaggccgggtgaggggagccggggcgccccacttcacccgcacaccccagcagagtcggtgaccgcgggaccgcaggcatcacggctgcagcaggaccgcggcccgccgcgcacgcgcgtgcactaccgaggggcccagtgcccgccccctccggccccgccttcctcttccggacccggctccgggggtctgcgcagggctcggggcgcctcctgcgggccgcgggcggagctgtaaccgggcaccgccctccaggccgccccagcggacccgggcccgaccgaggtcggggcgcagacccaaggccgggcatctcctcgggcgctcgcggttgctctgccgcgcgctggcctggccgcggttgccatggttgcggggggacgggggcgcgcgcgaagccccgccccggcccggcgcagccccgcccgctccgccgcccgccccgccctccctgccgcccgcgctgccgccgccgccgccgccgccgctactgctgcgggggccgcggggggcgcagctggggcgcggctcggaggggaggctagggggccgtgccagg

SEQ ID NO: 16352 - DNA, 631 bp, Homo sapiens
  source 1..631: mol_type = other DNA
cagccaccctccgcccctcagggctgaaaggagctggcgagagtcacgtgtccttaccaagcaggcgtcgggacggcccacgtgcctgctggggaggaaaagcctgggtccccaggcaccattcacctccagtgcagccaagcccaggccctggccctgactgcggcttgttgcaagtcacttccgcctgcgtagctggaagccctgccctgctcgcctccgaggtggacctgagagcccctcatgggcttcctgggttacaggccgttttccccggaagcctgtcttccagtggttcctgggcccttggccgagggcgcgcctccctaggacccgcctctgcagggcacaggacgctggaggcccagaacagctcaggtgctcccgctgggccggcccgggccgggcgcttcctgggagggggaccaaactcccggtccgggctccgcacctgcgcccgcccccggcctcgcccctgacctgtgcccaggggctgggcgggccgaacagcggagaccggaggggcggggcccggccgccctgagaagctccgcgggcccggctgggcgagtgtctggccctttaagggccgcccccgaggaggtgccaggcccgggtggcgccgtccgtc

SEQ ID NO: 16353 - DNA, 287 bp, Homo sapiens
  source 1..287: mol_type = other DNA
cccaggtcagagacaggccgggagggctttcaggggagccagggccttctccaggcactgtcaccctgctgtcctgactataataattctgagacagagtcttgctctggcagtggcgcgatctcggggaactacaagctagtggggcagatccagggactcaacaactgattctctgtttctctcggacagaagcgagagcccattgctcctgctcagctcagcccggctgcggaggaacccttggcaggcagaaggctcccagagtccccggaagagcctgcgca

SEQ ID NO: 16354 - DNA, 503 bp, Homo sapiens
  source 1..503: mol_type = other DNA
cgggacccacagcagaccaatggccggggaaggtggtgaagtcggggcatcccgacaggtcccccgccccagcctgcgctgaggctagcgccagggccccgccccgcataggcggcctgccattgggggggtgggggaggcgtccctccctggaccccggcgtctctgcctgcctgggtggccgccatgggccggaagcggctcatcactgattcctacccggttgtgaagaggagggaggggcccgctgggcacagcaagggggagctggcacccgagctaggctagaggaggcccctagagggccgatggaaagggaaaggtggcctgtcctcccctcccgacaccaggtctagctgcggggtggcaggggaggagccccagccccgcgacgaggaggaagcggagctggagctgctgaggcagtttgacctggcctggcagtacgggccctgcaccggtgccccacggaggcgcctcagcgcttgcgtgactctgaccct

SEQ ID NO: 16355 - DNA, 454 bp, Homo sapiens
  source 1..454: mol_type = other DNA
ttctccagccaggtctcctggggccagtggggtccagacctgcccccacaaggcggggcgggccaaaggccagctggagaagtctctcgggacccacagcagaccaatggccggggaaggtggtgaagtcggggcatcccgacaggtcccccgccccagcctgcgctgaggctagcgccagggccccgccccgcataggcggcctgccattgggggggtgggggaggcgtccctccctggaccccggcgtctctgcctgcctgggtggccgccatgggccggaagcggctcatcactgattcctacccggttgtgaagaggagggaggggcccgctgggcacagcaagggggagctggcacccgagctaggctagaggaggcccctagagggccgatggaaagggaaaggtggcctgtcctcccctcccgacaccaggtctagctgcggggtgg

SEQ ID NO: 16356 - DNA, 437 bp, Homo sapiens
  source 1..437: mol_type = other DNA
tcctactcagtatggaatcttcctgactggtggggcgggccggacacgacttgggaccccgcacagactgtcagaacccatgggcttctccagccaggtctcctggggccagtggggtccagacctgcccccacaaggcggggcgggccaaaggccagctggagaagtctctcgggacccacagcagaccaatggccggggaaggtggtgaagtcggggcatcccgacaggtcccccgccccagcctgcgctgaggctagcgccagggccccgccccgcataggcggcctgccattgggggggtgggggaggcgtccctccctggaccccggcgtctctgcctgcctgggtggccgccatgggccggaagcggctcatcactgattcctacccggttgtgaagaggagggaggggcccgctgggcacagcaaggggg

SEQ ID NO: 16357 - DNA, 463 bp, Homo sapiens
  source 1..463: mol_type = other DNA
tatcagcagtgatactttcaaaaactttttgacatctattttaattaacatgtgggaaagtgcttagaacagtacttggcacatggttattattaatattttctgctcagactcacattattgtgagagacatcctactcagtatggaatcttcctgactggtggggcgggccggacacgacttgggaccccgcacagactgtcagaacccatgggcttctccagccaggtctcctggggccagtggggtccagacctgcccccacaaggcggggcgggccaaaggccagctggagaagtctctcgggacccacagcagaccaatggccggggaaggtggtgaagtcggggcatcccgacaggtcccccgccccagcctgcgctgaggctagcgccagggccccgccccgcataggcggcctgccattgggggggtgggggaggcgtccctccctggaccccg

SEQ ID NO: 16358 - DNA, 392 bp, Homo sapiens
  source 1..392: mol_type = other DNA
atggcttcagagtcagaggcccagaggctaacatgagactctaaggcattgcaatgatcgggagagtgggcaagagaagaccctcctctccatcatctccagatagaatgtaaggattagaaatcttgtcatcatcttgagtgctcaacctctgatactcagatcttgccagttttccacttttgcaaagatctcatgatatgagaggcaatggggaagggcaaagggaggccctctgttccccttaacctagagggcaaggggatgggcagctccctctcagctgagttcagggacctgatggggtggaaatggttaactagaaccttcctcccacccagcttctgacacctggtggccaaggtgagtaatggccagaaggccccttttca

SEQ ID NO: 16359 - DNA, 467 bp, Homo sapiens
  source 1..467: mol_type = other DNA
ctccccgcctgggggcagagactctgcccagggccactgttgacttggaggtgtggcgaagcctcaatgacaaactgccactgctgagctgcgccgcagcctggcccacttctgcaccagcctccagggcctgctgggcagcattgcgggcgtcatggcagctctgggctacccactgccccagccgctgcctgggagacttcctccagaagatggacgacttctggctgctgaaggagctgcagacctggctgtggcgctcggccaaggacttcaaccggctcaagaagaagatgcagcctccagcagctgcagtcaccctgcacctgggggctcatggaaggagacagaagctgtgagcctcgaccccacctcccaaaggtctaccgagctggggaggaggtacagtaggccctgtcctgtcctgtttctacagggtgcccacccagcccctcaggtggcacatc

SEQ ID NO: 16360 - DNA, 160 bp, Homo sapiens
  source 1..160: mol_type = other DNA
agccacactgctctccccgcctgggggcagagactctgcccagggccactgttgacttggaggtgtggcgaagcctcaatgacaaactgccactgctgagctgcgccgcagcctggcccacttctgcaccagcctccagggcctgctgggcagcattgcg

SEQ ID NO: 16361 - DNA, 84 bp, Homo sapiens
  source 1..84: mol_type = other DNA
gtctctccccagcccctcagctggtgggcctgggtgtgtcagcggcaaatggggctctggttccaatgggccagccacactgct

SEQ ID NO: 16362 - DNA, 328 bp, Homo sapiens
  source 1..328: mol_type = other DNA
ctgatggaaagggagggctgactgtgctcagcctgccagactcccctcaagctgcagtgggactgaagactggtggaacacaggcaggtcgacctgcagtccctaggcctggccccgtccctccatgtacacacatatacatgttggcacacacacagtgtgcaaagactctctcagctgcccaaggtggggacagacacctgaggggctgccagctgcttccccgtgtgggcccgggccgcgtgcccacaggggactcgtgggggatgttagcgtgcctgtgcacggtgctctggcacctccctgcagtgggacccagggcctggcc

SEQ ID NO: 16363 - DNA, 738 bp, Homo sapiens
  source 1..738: mol_type = other DNA
tggggagaagcccacccgaagccggcgctgtcccccggctcctgggagtcctcagacggactgatggcctccccgccccctcccccaggaggcccagggtggtaccgccacagcctcgcctcacctcaccccccctcggtgctgtgggagggagagggagccccagaagccctcccttccctcctccccccccaccccggggagggccgcatttgtggccggagccgcggctcgccctcccactccgccagcctccgggagaggagccgcacccggccggcccggccccagccccatggacctccgagcaggtaggagccaggcggccgaggccccgacccccgccccgccaagcagcccggttcccgtcctgccctgacccccgggagccccgcgccggggccgggccagggagctgggctcgggccgggggaggcacggctgggcgccctcgagaggggccgggcggggacgcggcattcctggagtccgcacggcggggccaggaggtggccgggagcggcggggagcccggacgcctggggaggcggcaacctggagccccagcgaggcgggccgtaggagccgcagccccagagccccgcgcaccagtcggggccagagagtccgaggcgggagcccgaggccgggcggcgggaggcgaggggaggccgacacctcgggccgcgccgctctccctccccggcccgccgggaggggtaggagggcgggcgggag

SEQ ID NO: 16364 - DNA, 567 bp, Homo sapiens
  source 1..567: mol_type = other DNA
cctgccccagccccagcgcctcgcagctcgctggcatttgggagaatggggacagggggcagggggcggtgtcccaggccaacgcctggggagaagcccacccgaagccggcgctgtcccccggctcctgggagtcctcagacggactgatggcctccccgccccctcccccaggaggcccagggtggtaccgccacagcctcgcctcacctcaccccccctcggtgctgtgggagggagagggagccccagaagccctcccttccctcctccccccccaccccggggagggccgcatttgtggccggagccgcggctcgccctcccactccgccagcctccgggagaggagccgcacccggccggcccggccccagccccatggacctccgagcaggtaggagccaggcggccgaggccccgacccccgccccgccaagcagcccggttcccgtcctgccctgacccccgggagccccgcgccggggccgggccagggagctgggctcgggccgggggaggcacggctgggcgccctcgagaggggccgggcggggacgcggcatt

SEQ ID NO: 16365 - DNA, 440 bp, Homo sapiens
  source 1..440: mol_type = other DNA
cggtccatgtacattctccctggtcactggaggaagaaagggaaaaagtcccgccaagtggcctcttctcgcctctgggccgggcagtgggcctgcagtgccctcttcctcccccgcagggggcattgtgagctggcctgccccagccccagcgcctcgcagctcgctggcatttgggagaatggggacagggggcagggggcggtgtcccaggccaacgcctggggagaagcccacccgaagccggcgctgtcccccggctcctgggagtcctcagacggactgatggcctccccgccccctcccccaggaggcccagggtggtaccgccacagcctcgcctcacctcaccccccctcggtgctgtgggagggagagggagccccagaagccctcccttccctcctccccccccaccccggggagggccgcatttgtgg

SEQ ID NO: 16366 - DNA, 559 bp, Homo sapiens
  source 1..559: mol_type = other DNA
ggctggactggcagagtgccctcccattccaggggcaccaggaaggagtgggagacaaatctctgatgccactccagggagaggcatcaccttccaggtctggcccaacaaaagcaacttattacccagtgatttaattggtggtgtggcgggcacccaagccttggggaccacatgactctcccccaggaaaatcatgaagcagggcagtccccagccctgggttagagctgcctcctctgagcgtgttctccccggcagcccttggagagggaggaggggaccccctctgggagggtccaggcatacccccaggcgggaaggagggggagccctcaccgctaagccaccccttcacaaatggggacgctcgggcggtccatgtacattctccctggtcactggaggaagaaagggaaaaagtcccgccaagtggcctcttctcgcctctgggccgggcagtgggcctgcagtgccctcttcctcccccgcagggggcattgtgagctggcctgccccagccccagcgcctcgcagctcgctggcatttgggagaatg

SEQ ID NO: 16367 - DNA, 503 bp, Homo sapiens
  source 1..503: mol_type = other DNA
gggaggatcccttgagcccaggagttccaggcggcagtgagccgtgttcgcgccactgcactccagcctgctctctgagactcacagacaccctctccagggggcggagcccgtttttccttaaaggatcctcgaagccggaaggagcagccacctcccactcccggctgctgcaagcaagcagtccgagtctcaggcccagagtgggtagacgcccgggaactctacgtgggtgaccccgactccgagtccagcactcggtccactgcacagggacctcgccaatccggtgcgcggcccgcggaacgccccgatctccaggggcacggaaggccgaggcgtgccgggggagccaggagcagctggctggcgggcgccgcgggcctccccggtcacgtgacaccccggacaacgtgcgccgtcacgtgacggcagagccgtgagcgtttttctcacgtgacggaggcgcctgcacgtggcggggccggcaggggcggtgcgcg

SEQ ID NO: 16368 - DNA, 574 bp, Homo sapiens
  source 1..574: mol_type = other DNA
tcccagctactccagaggctgaggcaggagagtcgcgccactgcactccattataagaaaatattaatttagcatgccctgggcgccacagagacccacgcggttattaacatgttcacaacaccttccacccagggaaggggtgggaaagtctgttgggcttttgaaagagaaaaacaacttcgctgggcgcctcctctggggcgtaaccagcttggtcacgaccccgcccccagcccgccgccgaggccccgccccccgggccgccgcgcctcacgtccagcgggggcgctagagggcgggggactgggcggggcgggcccgggaggcctggaggcggggccgcgggccgggggcggactggcaggagcgggccaggagctgctgggctggagcggcggcgccgccatgtccgacagcgagcaacctggactcgatcatcgggcgcctgctggaaggttggtcggggcgggggaggcccgcgtccgccgcgccctggccccctgcccggcccggaagtggcgcgcgggcgggcccccggggccagcttagactgggcggggacgggcagcga

SEQ ID NO: 16369 - DNA, 448 bp, Homo sapiens
  source 1..448: mol_type = other DNA
gtgcccagccacgtctgctcataaagtaattatttttatgtgcacgcaatattaccaggacgcctgtaatcctagcaaggcctggtcccagctactccagaggctgaggcaggagagtcgcgccactgcactccattataagaaaatattaatttagcatgccctgggcgccacagagacccacgcggttattaacatgttcacaacaccttccacccagggaaggggtgggaaagtctgttgggcttttgaaagagaaaaacaacttcgctgggcgcctcctctggggcgtaaccagcttggtcacgaccccgcccccagcccgccgccgaggccccgccccccgggccgccgcgcctcacgtccagcgggggcgctagagggcgggggactgggcggggcgggcccgggaggcctggaggcggggccgcgggccgggggcggactg

SEQ ID NO: 16370 - DNA, 224 bp, Homo sapiens
  source 1..224: mol_type = other DNA
cccagctactaattggtctcttgcgtccagcctgggcaacacagcgaaacccttgcgcgcctgcagtcccagctactgtggaggctgacgcacacctgaggtcaagagtttgaccaatgtggcaaaaaccagaccgcgccactgcactccagcacagagcgagactctgtaggtggcccggcccctgcgtctaacagtcctgggaagcctgcagtcactggggc

SEQ ID NO: 16371 - DNA, 446 bp, Homo sapiens
  source 1..446: mol_type = other DNA
cgagcgagagagataggctctcactgtattgcccaggctgggcagtgactgcagtctcgacccccggggctcatgtggattataggcagccaccgcaccaggagaggctggatcttatagacatcctggcccctgtgcactggtggagaccctggcccaggagggcctctctgggagctgcagggctgggacctccggcctccatccaaaggtagggctcagggctgtgtgctccaggctgctctcccgggcaccccacccctaagggcgggccctaacgacagtcgtcccgccacacgcccccaggtctgggacgttttcgtggctgacgggcgggggggggggggggcgcgtccccggcgggtccctatcggtccctgtcggtccgtccgccccgcgccgcccccgctgggcactgggcatgccccaggcgtttctatataaag

SEQ ID NO: 16372 - DNA, 684 bp, Homo sapiens
  source 1..684: mol_type = other DNA
acgacagtcgtcccgccacacgcccccaggtctgggacgttttcgtggctgacgggcgggggggggggggggcgcgtccccggcgggtccctatcggtccctgtcggtccgtccgccccgcgccgcccccgctgggcactgggcatgccccaggcgtttctatataaagcggcgccgcttgggccgggcgctgtgccactgccaccgccgccgccgctgcatcccgcccggtccgagtccgcccgccacgcccgccgagccgctgccgccgccaggtaccccagctccggccccgccccggggagagccagggaggggggcggccggggcaggagtcgcggggacgaggaccccgggcgcccgctccccgcggcgggaccctcgacgctacgccccccacccccgggacccggtgcccccaactcccccccgcgctggaggggcagagccaagcccggaccccagggcaggaaggacctgtgagccgcactggggcaggcagaaatccctccctaccttcggggtgggggtggggctgccttggtctctctgcagggacaggtgtcggccacctctccactcccaaagtctaggggctggaaggccaggcagggacttggctgccctgactatggtgagtctctcccccacaaggcccaagtccctgggcagagagtgggccca

SEQ ID NO: 16373 - DNA, 354 bp, Homo sapiens
  source 1..354: mol_type = other DNA
cccgagtatctgggagtacaggtgcgcgccacaggctggtcggatctcactgtgtcacccagcctggcagggtccgagccagaggcactttgaccctgatgcagccgcctccctttctggagtgaaccgaaagcaacgcgacctgcctttcatcacgcagccggcctggcagtacccgtctccaacagggctggggattgcattttcccagaaagccttgctgggaagaccgagggtcctgcggaaaggattctgcaggctgaaggctaggcgcctcgccactctaggacattcccgagaggccttccggagggggcttgcgtcaccggcgcgcgcagctgccgtcgcggagag

SEQ ID NO: 16374 - DNA, 666 bp, Homo sapiens
  source 1..666: mol_type = other DNA
cgcaggcaggggtggtgctgggagccccaggtgtggccctggcctgctgtggggcttcagcctgggtttgggagggctatggcttagcagcccctgaccaccgccccctacccctgcttcatgtccccacaggaggctgggaagctggaggaggtgatgcaggagctgcgggccctgagggcgctggtcaaggagcagggcgaccgcatctgccgcctggaggagcagctgggccgcatggcggggatgttctgccagcgggtcgcaccgggctagctggctgcccagagcctctgaggcagcgcaggggtcagttcccacccccacccgtcccaggcccaggccgaggaggatgtctacgcccaggcgagctcctcgacctcgcccagccctctgctccctccccagaggaggcgggagggtgggctcattttcattccaaataaaattctctttctaaaagccatgtgcagaaggtctgggggcagtgagcagccccacaggcattgctcccctggattgtcaggcagggaaactgaggcaatgcaaggctgcatccagcttcaagttggtgctgcttcttccttggaggacaggcccggcagcccagcctcctccagagagactggggagggtctggtgtgggaagcctgggccacccttcac

SEQ ID NO: 16375 - DNA, 701 bp, Homo sapiens
  source 1..701: mol_type = other DNA
ggggagggatgaggggaccctgatggggcctcctaactgcccgacacagccgggcccgaggcagccctggaggctgaggagtgggtgagcgggcgggatgccgacccgatcctcatctcactgcgggaggcctacgtgcccagcaagcagcgggacctgaagatcagccggcgcaacgtgttgtctgacagccggcccgccatggccccgggctcctcccacctaggggcccccgcctccaccaccactgctgctgatgccacccccagcggcagcctggccagagccggggtatgcacgcgcaggcaggggtggtgctgggagccccaggtgtggccctggcctgctgtggggcttcagcctgggtttgggagggctatggcttagcagcccctgaccaccgccccctacccctgcttcatgtccccacaggaggctgggaagctggaggaggtgatgcaggagctgcgggccctgagggcgctggtcaaggagcagggcgaccgcatctgccgcctggaggagcagctgggccgcatggcggggatgttctgccagcgggtcgcaccgggctagctggctgcccagagcctctgaggcagcgcaggggtcagttcccacccccacccgtcccaggcccaggccgaggaggatgtctacgcccaggcgagctcctcgacctcgcccagccctctgctccc

SEQ ID NO: 16376 - DNA, 611 bp, Homo sapiens
  source 1..611: mol_type = other DNA
aggggaccgggccacatgtggcttggcctcagatgccaagagcctcggacacgcttccctctggccgagctgagctgatagggcctgctccaggagctcacagtccatgggccccagaccacatagtggcccctgtgccttgcaggggaaaaagcttccgggggagggatgaggggaccctgatggggcctcctaactgcccgacacagccgggcccgaggcagccctggaggctgaggagtgggtgagcgggcgggatgccgacccgatcctcatctcactgcgggaggcctacgtgcccagcaagcagcgggacctgaagatcagccggcgcaacgtgttgtctgacagccggcccgccatggccccgggctcctcccacctaggggcccccgcctccaccaccactgctgctgatgccacccccagcggcagcctggccagagccggggtatgcacgcgcaggcaggggtggtgctgggagccccaggtgtggccctggcctgctgtggggcttcagcctgggtttgggagggctatggcttagcagcccctgaccaccgccccctacccctgcttcatgtccccacaggaggctgggaagctggagg

SEQ ID NO: 16377 - DNA, 291 bp, Homo sapiens
  source 1..291: mol_type = other DNA
ttgcttgagcccgatcgcctacttgggaggctgaggcaggaggatcccttgagcctaggaggtcgagcctgtagtgagccatgatcatggcactacattctaaaaaaaaaaaaccaccccaacacctgctgttgttttctttacattgttaaccaagagcatgaacacgaggtataagcctgtagtcccagctactggggtgagtgggccgagatcgcgccactgcactcctttgataacttaaaaagagtcacgtgaacatatccactgtgtcgggggccgggaaggcgg

SEQ ID NO: 16378 - DNA, 560 bp, Homo sapiens
  source 1..560: mol_type = other DNA
ctacttgggaggctgaggcaggaggatcccttgagcctaggaggtcgagcctgtagtgagccatgatcatggcactacattctaaaaaaaaaaaaccaccccaacacctgctgttgttttctttacattgttaaccaagagcatgaacacgaggtataagcctgtagtcccagctactggggtgagtgggccgagatcgcgccactgcactcctttgataacttaaaaagagtcacgtgaacatatccactgtgtcgggggccgggaaggcggggcctcacccaatcctggagactcggggcctcgggtccgctgtaaggctgcacccgcacctgcggcgcctctgcggcggccgccgtcggccctgccccgccccgcccccttcttccggaggagctgcggtgggggcgctccaccgggtcctaggaaaggggctctctctggccccgtccccggcggccccgctcccggccccccggcgccgctcagcctcccgcccagcccctccgcgcgtgacctcggccccgcccccgcgagcccctgccccgcccccgctccgg

SEQ ID NO: 16379 - DNA, 535 bp, Homo sapiens
  source 1..535: mol_type = other DNA
gcctgtggctgggccacagaatctgactgtggctgccgtagggttcagctgtggctgagcgaggctgggccacaggatccatctgtgactgggcctctgccatcggctctggcagagttggaccctcagaatctagctgaagctgcccggccgctcctcgcagagagctgccgcgaaggacgagagcacgggggcctaggccaggtagagcagctgggccagctggtagggcagcctcaggaccacataggctgacaggtcctggccacacgggcgaagccccggcaggctgcgggctgctgttggcggtggcaggtgcgacaggctgtggcctccccaggacctccagcatcctcagcgacagctcctcgctgtcccagaggtcgtaccaccagacggcagcctcggggaagaccagccagggcacgctgaagagtgtggccacgcgacccgggcaggcggactgggcggtgcccagggtaccagtgtgggcacagcgccagcaggcagcggtcgaggctgagggcgagcggca

SEQ ID NO: 16380 - DNA, 515 bp, Homo sapiens
  source 1..515: mol_type = other DNA
tggccaggctggcctcccaaagtggaaaaccaagggaaggtttttttgtttggcccaggctggagtgcagtgggcctcagcctcccaagtagctgggactatatggtcttgaactcctgacctcaagtaaatttttaaaaagggttttcagaaataaaaagatttgttttaaaagatcctctgagcctcggtttccacatttgcaaaaatggggagagcacccctccggtgcgggttcccaggagtctccttggcactcgaggaacaggccctgtcagggacctggaggttggggcgtggaagcccctccaagcccccgcacatacacgcctgggggatgtgtccgagcccggcacgggctgtcgcttgccatggcggccactgagtggcgtcacggggcgggcgcgctccgtctggaagaggctcccacccatcagcccgctcagggctcggcaactctggcctgcttagggcggacgggggcgggaccggcgcgtggggcggagccagggtcg

SEQ ID NO: 16381 - DNA, 452 bp, Homo sapiens
  source 1..452: mol_type = other DNA
cccagctgctcgggaggctgtgccactgcacaaaacaaaagttgttttagccccaaagtacctcatagcctggagtgcagtggcactgcagcctcgaactcctgggctcaagcgaggggttacagggccaccgcgcccgcgattattccctaatattaattgggcacaactatgactcatcttcctctttttattttttgaaagaggaagatccaggaaacactttgagggtgatcaattcaatgacaattgttagggacgtcctcgtcccgcccggcccgcggaccccggcccttcctccttgacaggctggggtccagccccgagacattcctaggctccgcccccgagcagacgcgcgcgctcagccccagcgcaccctcaaccaaaatggcgctagctcggaagctgccgaggtgctaggagttgccgaagcaagtccggaagctacc

SEQ ID NO: 16382 - DNA, 426 bp, Homo sapiens
  source 1..426: mol_type = other DNA
gcggatcacgaggtccggagattgagaccatcgcgggcgcctgtagtcccagctgctcgggaggctggtgccactgcacaaaacaaaagttgttttagccccaaagtacctcatagcctggagtgcagtggcactgcagcctcgaactcctgggctcaagcgaggggttacagggccaccgcgcccgcgattattccctaatattaattgggcacaactatgactcatcttcctctttttattttttgaaagaggaagatccaggaaacactttgagggtgatcaattcaatgacaattgttagggacgtcctcgtcccgcccggcccgcggaccccggcccttcctccttgacaggctggggtccagccccgagacattcctaggctccgcccccgagcagacgcgcgcgctcagccccagcgca

SEQ ID NO: 16383 - DNA, 727 bp, Homo sapiens
  source 1..727: mol_type = other DNA
cggcgggcgtcggggagggactgcaggggcgccggcgggcggatcgagaggaaggtcggggccatgggccggcactgcgcctcgggagggtccggccaccgctggaacccgaggccggggctgggggcgctccgggctccgacccacgggccggccggccctgcccgggctgggtgaggggcgcccgcctcaagctagaggtgagccggggcgtcggcaggcgggccaagagcgcggcaggggaccgggacgccggcgtctcgcttgctcgcggggtgcgagtgggggatggaggggtgcctgcagcggaacctcggtgccagtctggggcgcaggtggacggagcgggtctccagggccatggcccgtgggataccaagtggagccactctggcctcagcctgaggagggctcaccccctggcctaggcgcgtggagagccggcggcagagatgctgggcgcactgggccactccgcgcagagacactcggggccgccgactccgggcaaggggcgggtccccgaggggccggtcgcggaaggcgggcccggaaggaggggccccggggcttcgggggcgcgcccagagggatgccgtttcccggggtgtcgcagcgggagaggtgaggtggccctcccgcccgccggccggagcctggcgctccggggggcccgcgtcagcgcgcggttgccatggcgacgggcgggcggggggcgggggctgcg

SEQ ID NO: 16384 - DNA, 652 bp, Homo sapiens
  source 1..652: mol_type = other DNA
cctctccgccccagccgtggcgctgagagccctgggccttcctgtggtgccaccagggggcagcacagggcctggctgcttccacagcccttggcgctgtgggcagcctgggctctctgacttctcagagagaaagggcactgctgcttccagcacttggcctcagtgtcaaggggaggggctggcggggtgctgccgtcactgccccagcaccttgtagcaggctgggtgggatcccatgaacccagccttgggtgcccagactccgggtggctgggtgaccggacttctttgtggcaccatgcaggggctagcccagccactcacagtgacagcccgtttctgcctgggcgtgtagctggaggcctggggccctggagccgagcccagccctaggtggaggcatgtcagagccaccagcttctggctagactggtggggaggcatttcctcaacccaccccccatatcaaaccaccctgtgactgcacacaggtggttaggcaatggcctttttcccactgcccgggggaaggaaggcaggggcctccctccctgcctcctccgctgcaggcggggctgcccggaccccgccggggtggggagggccagccgggcccaggaagggggcggggcggccgcagtgacgcggc

SEQ ID NO: 16385 - DNA, 580 bp, Homo sapiens
  source 1..580: mol_type = other DNA
ctttatgactattcatttaccattttacggatggggaagttggctccagtcggtgctcttgaccagtttggtccggggcccggcacgcaagtaatccctgccctacggccattgtcactaacttaggcagcagcgctttgaggtcgcccttagacctgaggacgaggaacaaacgcaggcctcgggcgggcgcatgcgcagcagggctcgggacgtcaaagccctgcgtccttcggcccccagagcggagaagcgcgcaaggcaccggtggcagcggcgacggcagctgcgacagcaacccctgctgggccgcgcgagtgaggcgcgagggtagcgcccgcgcccgggaagacccctcggcgcgaaccggcagcccagccccgggtcccggttcccaaggccccgcctctagggcctggggactagattgagagcgcgccggcccgggccgcgaactcgccaattgcggagggcggtggccaccgcccaatccggagcagaatcggcggcggttgcgacctgctggggcaggtctcgcaatcgggagtgagggagcattcgtgcccgctcgcccttccag

SEQ ID NO: 16386 - DNA, 225 bp, Homo sapiens
  source 1..225: mol_type = other DNA
cactttatgactattcatttaatccattttacggatggggaagttggctccagtcggtgctcttgaccagtttggtccggggcccggcacgcaagtaatccctgccctacggccattgtcactaacttaggcagcagcgctttgaggtcgcccttagacctgaggacgaggaacaaacgcaggcctcgggcgggcgcatgcgcagcagggctcgggacgtcaaag

SEQ ID NO: 16387 - DNA, 311 bp, Homo sapiens
  source 1..311: mol_type = other DNA
tcaatatctagaataaatggagatctgcaaacgtgatcatgtcctttgcagggcgcatggtctcacttataagtgggagcgaacaatgagaacgggtgatgggatgatctgtacagcaaaccatcaaagttggacggccaggccgaggcgtgcagatcacctaaggtcaggctgaagcagaatcactccaaataaaataaaataaaataaaataaagcaatttcctttcctctagccctgtgaagcgggtgtgcaagctccgggatcgcagagggaatttccccccgcgatgtcccggcgcgccagttcgc

SEQ ID NO: 16388 - DNA, 573 bp, Homo sapiens
  source 1..573: mol_type = other DNA
cggacggagcagcgtccctcagccaggaggcatggcccagccccagggcccagcagagggcagcctcccaacgggggaccccagcccctctgagggcactccaggaaccagccaggcccctggcagcccagcagccacccggcgacgagagcttctccgggagctcgaggcccaggtgcaggcagcctaccccccaccccaactgggggccccggagctgtccatgggagactctctgaggtcggcagggccggggtggcttcccccagtccaggaggggcaattggggctaccccgagtgaggagcccagggcccagctggggtcctggcagggagaggcaggggcttcctgggctgagccaagtggctgcctccgcgtgtccataccaaccctgtgccattcggagggcccagcccaccctggcacctcctgggacccaggccctgcttctgaagacattaaatctcccctgattgggaggggcgtctggaagaccctcaggaggcagtctggggaggctgtgctctccagggggccttgggcccaagtggctcccctcagcagcggagac

SEQ ID NO: 16389 - DNA, 440 bp, Homo sapiens
  source 1..440: mol_type = other DNA
gggtgatgggatgatctgtacagcaaaccatcaaagttggacggccaggccgaggcgtgcagatcacctaaggtcaggctgaagcagaatcactccaaataaaataaaataaaataaaataaagcaatttcctttcctctagccctgtgaagcgggtgtgcaagctccgggatcgcagagggaatttccccccgcgatgtcccggcgcgccagttcgctgcgcactaggccccgctggggacctgggaaagagggaaaggcttccccggccagctgcgcggcgactccggggactccagggcgcccctctgcggccgacgcccggggtgcagcggccgccggggctggggccggcgggagtccgcgggaccctccagaagagcggccggcgccgtgactcagcactggggcggagcggggcgggaccacccttataaggc

SEQ ID NO: 16390 - DNA, 249 bp, Homo sapiens
  source 1..249: mol_type = other DNA
caggcttccaagacctcctgggacggggtgaaagtgctggactctcctgacaagagcgtgccgtgcagagcacacggacgcccggggtggggaagccaggcggaccccaggccggtgggaccacatctcccagaagccccggcgccaaggcactggcctctcagtcctcccccgaggaggcggggccgctggcgaagaaggggcgcagcgataccggtgcgcggcgctggcgtcgggcgcgtgacgtct

SEQ ID NO: 16391 - DNA, 557 bp, Homo sapiens
  source 1..557: mol_type = other DNA
tgggggcggcgcgcgccacccagcggtatcgggagggaggaccggagggagggctgggccggacgctcctctcgcgcaccgatcgacctcgggttcctggaggggcgtccccgtgggatcccggctccgtacatcctggagcccctaggggagggacggaccagtgggggccggcggggcctcatcagacaccccaacgaacgggaccgaggacggtcgccgggcgcttcacggttcgcgcaggtcctgcagccgcggccacacccccggccacggcccggccctgccggaagcacagtcctctggccgtccgagtccggctcccgcgcaggccccgccccgccccgccccgtccgggggactcaacgcgtcccaccgaggccccgcgtcccgaggaccgtcccaccgaggccccgtctccgggaaggccccgcccacggccccccgacgccgctgccgctctgcagccccccaggcgggacgcgtcgcgcgggctgccccttctccctcttcggagggacccgggctgagcgccccgccccgcctcgccccgcctc

SEQ ID NO: 16392 - DNA, 399 bp, Homo sapiens
  source 1..399: mol_type = other DNA
tcgagctgctcagagtggctcctgcagggcccctgcagactgtgaagatcggtgtcgagagctgaaccagctgctggggcccaaggcctcgggccaggcctttgactttgtccttgacctgcacaacaccgtgccgccatctgcaggtggccccggccccaagcacacagctccccagaggggagtgggagggccttcccctgggctccagtccctggggtctgccactcgccagcactccaggcccccggtaccccctcccctaccctgccagagggtagagggagacctgctgtgggggctgtcctgccaggtcttcctgtaccagcggtctggggtgggccgcagccttctgagaagtgggcggggggcagggcctcttcaaggagtatatgggtc

SEQ ID NO: 16393 - DNA, 499 bp, Homo sapiens
  source 1..499: mol_type = other DNA
ccccagtgacttcggaactggcctcagctcctcccagcagacagctgagcctggtgggaggtagaggccccagggctgagtgcaggggacctcaccttcatccttccccacttgattggacgcactgagtgccacctacagcccgcctctagggctctgtgcgccacctgcagcccgcctctagggctctgtgtgccgctgaacagtctgcccctagggttctgtgggccacctgcagcctgcctctagggcgtgcctgcagatgagttacactgtccttgaaaatgactgaaatcccggatcaaacattttaaaattttgcttaaaggtgaccacagccctctccgggctgcaaggacaatcttggtggccatcaaggtgacacctctatagtaactttcgctctggtggtgaccaaaaccaagtcaccaccccactgcgggcccctctggggcccactcgttgggccgtggccggagcagtggagcagaccccagca

SEQ ID NO: 16394 - DNA, 569 bp, Homo sapiens
  source 1..569: mol_type = other DNA
ttggcctcccaaagtgttggggttacaggtgtgaagctcttgaacaaattcatttaatgagattctctagcactaaaatagtcctacctcattgtaatgttttgtagagtatcttataaaacaatgaaaaaaaaccagtattttaatacatatttttctgtatatttccttctagcctttgtacatatgatcacatatttgtaaaaagttgtatgtatatatatacaactttacccgctttggatgatatgacaaaaacatttatctgaaaaaagtatttttttcatcaaatggcagagctcctgtttctggtaacccggggtatgaaaaattctgtttctctaaaaaagaacaaattctggctaacacggtgaaaccccgggcgcctgtggtcccagctactcaggaagctgtgagccgagatcgcgccactgcaccccagcttgggtgacagagccagactctgtctacccagatccgggatccgggttgcccttggcctggccagagatagaatttaccctttcagtcaacccacggggcaaagtccactttcttccctgaaggag

SEQ ID NO: 16395 - DNA, 298 bp, Homo sapiens
  source 1..298: mol_type = other DNA
ctgccaagagactctctacagccctcaggacctgagctcattctgctggtgctcagcaaaagcgggcaacattgaggggcactgattttgtgcagagacgttaagtaacctacccacggttgcatctacactgagagtgcacagtgctcatcttgacctgtgggaggacttcctggcgaaggcagcatttgccaccaggatcctgctgtgtggtccctgggggcagggccctggaagaacagggcagacagaattgggaggtgcagccctgccccacgcctgttgggtaacactcccc

SEQ ID NO: 16396 - DNA, 545 bp, Homo sapiens
  source 1..545: mol_type = other DNA
gtgaagggactgcattctctgcagggggagagaatctggatattttcaaaagtggccccgtggctccagccaggtcggtggtagccagtgctttggagtgtcggccccaccacaggctcccgctgcagcccgggatccagtgcccagcaggatgggggcaggtggctctgggccccactacatggttgtggcagggtcccccatgtagttcagtggggatcacaacccaaactggctgtcaggggacgacccaggcaaccctgaggggagcttaagggagccaggcaaccctggcacttttccaaggctttgcaaactcaatagttccgccatggccccgggggtagtgccattttgctgagtggggattcgaactcacaccccagagggcacacacaggcaggcccctgcacacacgcgcgcgcgcgcgcgcacacacacatacacacacacgtgtcgaggcggcccgcagggcgggacagggcggggcgggggcaggtcccggccgccgggaggaagtggccgggcggtcgcagggactccgg

SEQ ID NO: 16397 - DNA, 569 bp, Homo sapiens
  source 1..569: mol_type = other DNA
gccgggcacttggaatggtcacagttccgggcccacgtgtcccacctaggtcacacaggtaaccatgccaggtgctgagatccccccattctcacatgggaacactgaggcaaggaggaggcagggcaggcggggccgcagctgtctggcccggagccctgagcaacccctcccctggctggcctgggccttggcagacctcaccccagagctctcctggtgccctacccagagggctccccatgggactcccaggccctactgagtgaggggcacccaacccagagtggggagggcccagccctcctgggaggtgtgtggcctcccttggggggagcctcactcccagggaaggctaggagttctgtcccgggaggacaggcctcttcgggggcctcctcccaggttgcgggaaattcttcaacagctccctggccagggaggggaccctcgggatcctctgggcctcactcccagctgagacctacaggctcagcccctgcccagccctgcctggcacccgctcaatctggctgagctccagagaatggcagggctgggctgtcaca

SEQ ID NO: 16398 - DNA, 372 bp, Homo sapiens
  source 1..372: mol_type = other DNA
gtgtagcaagacaagccacgacattcttggcctttttaaaggcttacaactttaaggggtccacgtcagaacagaaagttttgcagtgctttctcatacaatgtctggaatttacagataacattttcctcctgtcttgtaaaccaggcaaggtggtagttctggccataacattccacataatattataatagaatataattaatacaataatagtttggccctcagctcagtgctcagccctgctgggctgcccctcagctcggagctcagccctgctgtgtggcatcttggcttgcagcctccagcccgcccagagccagagtcaggcacgaggctagggcaactccgccccacccctcccccggggac

SEQ ID NO: 16399 - DNA, 325 bp, Homo sapiens
  source 1..325: mol_type = other DNA
acacacatgcaggcagcctcggggcctctgcgggtccctctaccacagcattcccggggaaaggcccggcgtggtggctcacgcctggatcgcctgagtccaggagtcagacagcctggctgctcgggaggctgagaagtgaggatcacccgagcctgggaggtcgaggctgcagtgagccgagatcgccatacagatcaggtggatcaggcggccgcacaccgcagctctacggcccggcttaacgtggtaacacgttactgtagtttctccacgcagagctgctgtgaggattaaaggaacccgctggcccaatggcagcgtc

SEQ ID NO: 16400 - DNA, 198 bp, Homo sapiens
  source 1..198: mol_type = other DNA
aggtcaggtcacatcatctgcccaaggtcacgcgctcaggccttgaagagccagcagggcagggctgggttccgatcctcggcccaccgtgcaagtagctgggattataagcgctttccacccctgggcacggttcctgggggaggagagctcagccaagctgaatatctgtgcctctgacagcaatggggaagtgac

SEQ ID NO: 16401 - DNA, 764 bp, Homo sapiens
  source 1..764: mol_type = other DNA
ccacagctgagcttggctgtgactcagtttccaggcccggctctggggctccacttgtccacccctgccgcagccccacaggcctgtgctcgctgtgtggggcttagggatcaccagagctgaagggcccctggcctccagtgggaatgccccaggcctgtccaaagtgcaggcagctggacggtcgtgagtcccagcttccaggcactaggacctgatgacgcccatggtgctgacctggagcaaggtcacagtgacacccccctctaccccccgcggctgcagctgcaggtggagctgacagctggcctctggccccagggtatctcccagggcctgctgggtgcggggcgctgggcagaacaaggcagcatggcctggccctgtgtcctgctgccagtgaagcaggcccagagtggggcagccacccacccaagggccagagcggggcctctcaccggcgggtttcactgccgcccaagggaggggtcccggaggtgggggagcatcctggggaccccaagcccatgagcctgcgaatgttggggtcccatcagccagaggctcgaagtgagaggagagcagggtctcatctcctatcctgagctgggcctgagcggagctgcccctgcatcggggccagcatagacgcgcgcgccagacttcctggactccagtggagccttgggccgggggcggggcgtccctggcccctccccgtcgtcccgcctgcccggaaaggagtgagcggcgcctagtcccgg

SEQ ID NO: 16402 - DNA, 709 bp, Homo sapiens
  source 1..709: mol_type = other DNA
ccaaggctgcccgggggacgggaggctggcaggccagagtgggccccagtgagcacacctccctcttgcccgccaggcactttggccagaggcaccggctgctgctggagacgctgccggagctcacctgtctgggctgccagggccgcctcggcccccagcatccagcaacaggctgctctacccccggcaggtgggctgcggctggtgggggccgggctcacacggcctcatggggaccccgcggtcacagggccactgggagctgcaagatcctcgtccgagaaacggggatgcaggccccgggccgtgcagacagggccggcacaactggcactgggaaccgggggtcccttccctcaggagtccttatggaggcagaccctcacccagtgagggcacggagcccccgggggccctggagggaggagcgaccgcaggctctctgggccccgtgaacagcagggacgccctgactctcgccctctccctggcaggaggtggtccaggccacgctggtggtcctggccttggccatggtgcccatccctgcacctgctgcaccgccaccgccgccgcctgcggaggaggcccgctgaccgacaggtgggaccggggcccactctcctcgcttcctgacagactcctgagtggccaggagcaggcctggcgggtggtgggggacctcctggggctggagtgctgccaa

SEQ ID NO: 16403 - DNA, 691 bp, Homo sapiens
  source 1..691: mol_type = other DNA
tgtggcaaacggtagcaggggcccttgcccctctaccccggcaaaggtgcgttagtcatggggaggcaggggcagcgtccacaacgccagtagccccgtggcacgcacctttggcctgtgctctgggcagttgcggcggccccatggcggggatgatgcccctccctcgacggtccctgggcctccagccctgaacttctaggcccgagcatcctgcgggaggcgtgcagagggctgggccccggtagccggcgtgcagccgggcccagcctggcccaccgtgtggccgaggctgctcgcaggtcacgcggagagggcagtagcctccagacacgtttcctgcctgcccctgccaggcccggcctctgatgtcacggggcttccgagggggccaaccccggggtcctccgaggctcaggagcctccctcgctcggcccagtccggctccgtcccaccgcggaggcgctctcccggcgccccccgcgcctcgcgaccgccggggcgccccctcgacgccccgcccccttcgcccaggccccgctcacggaggccgcagcgctctgggttgggggcggcgccgcagccaatggggaggcggtgtggcgagggcggcggcggttatgatgcgccgggccggcggacggcggccaatcagtggcgagcgcgagggcgggctgtgacgcggccggc

SEQ ID NO: 16404 - DNA, 389 bp, Homo sapiens
  source 1..389: mol_type = other DNA
agagtctcgctctgtcaggctggagtgcaggtctcctgcctcagcctcccgagtagctgggacaggttttacaatttcttcactgtgctattgcagaattaagccactggctctataggcaaagtgcttagcacgggcgtggcacgctgcgggtgcacagaacccagcgccccgccagggggtgcccgcgaaaggtctcacgaggcgtttcgaggtcgcctcttcaggctcggctgccgaagcgggcacagctgggctctggcgcgcgcaagtggcccgagccggccccggggaggcggggcctgagagcagacaacccccccccccgccgcagccgctcttcgccccggccagcaggcccgccccgccctccgtgacgtcatttccgg

SEQ ID NO: 16405 - DNA, 859 bp, Homo sapiens
  source 1..859: mol_type = other DNA
acgctcagcctgcccacacggtcttagggtgcatctgctgccgggccacctccctcggagcaactgggacgcgcggcgggaggggggggggtccccttccccagggctgcagtccgagaggctggctctagagccgtccctggtaggggcaggtgtgcaaagacccagggcccgggacagctgccgcggtcccgcggggaccgggaccggaatgcggtcgcgtaagggccgcaggggaccctaacgtggcgcccgcggggcgcgggcgacgccgcctcagccgcgatttaaagggcagcgagggcggagggatcccagccgcctaccggccggccgcgaatccctccgccacgaggggaggcgacggctcgcttccgccgtcgggagcgcccggcacagaactcgctccccgcgcgtgcccgcgtcccgcacagagccccgtggaagcgccgcggcggctgggcctggcgggaggcgcgcgcacactgtggcagctgcgccgcacggtgtccctccgccgtcgaggccgcggcccaccgtgcccgggcggggtccaggcggctcaccgggggcggcgacgcggcggcggtgcgggcggcagggcagcggggcgacgcccgggaaccggaggcggcaccgcgcggcgcacggacctgggacgcggagtcctgaagccggcggacggttttcgtacgggcggccgtgcgcgaggcgaggtgaggccccgggtggcggggcgcgggggcgggcgccgggggcgcagcgagccgaggccgggggcgcggggggcgcgacggcggcggcggcggccggttgggggcggggggctcggacgctgcgtcagcggagggagcgagcg

SEQ ID NO: 16406 - DNA, 575 bp, Homo sapiens
  source 1..575: mol_type = other DNA
gcctgactccagcctggcaaagctgtcaactcagttctgtgaggtactgcaagccctctctgaacctgcaaggtgccattgctgtccccactttacaaaggaggaaagagtgttctacttagatgggagttccaaagaggccctggcgggcttgttgaaggactcaaaggtggcgtctgggagcctggcggtaattcataactaaggtagagggtacacatttagtttacagtaaaactctgccctccacaggtgagaacaagtgtccggggccgccccgtggggccccaggctgcccgccctgctgtgtgcccttgggcacacaggtgacacacctggctccgggccccgatcggccgccgggccccgcggggcggaaaccccgcgccaagcctcccggaggcacctccagggcagggcggggagcgcggggaggggccgcggggacctgcgccgctggggccgcctggccgccggccggctccggggggcgcccgcgggagggcgcggccggtgcggggggcgcgggtggcggcggcggggggcggagacgcggcgcggcttccgctcccgcg

SEQ ID NO: 16407 - DNA, 617 bp, Homo sapiens
  source 1..617: mol_type = other DNA
tctacttagatgggagttccaaagaggccctggcgggcttgttgaaggactcaaaggtggcgtctgggagcctggcggtaattcataactaaggtagagggtacacatttagtttacagtaaaactctgccctccacaggtgagaacaagtgtccggggccgccccgtggggccccaggctgcccgccctgctgtgtgcccttgggcacacaggtgacacacctggctccgggccccgatcggccgccgggccccgcggggcggaaaccccgcgccaagcctcccggaggcacctccagggcagggcggggagcgcggggaggggccgcggggacctgcgccgctggggccgcctggccgccggccggctccggggggcgcccgcgggagggcgcggccggtgcggggggcgcgggtggcggcggcggggggcggagacgcggcgcggcttccgctcccgcgcgcccagctccctcctccccgtcgtcctggtccgcggcgcccgaggggggaggcggaggcgccgggagccgcgcgaggagccgccgccgccgcgccatggagcccgagtgagcgcggcgcgggcccgtccggccgccggacaacatggaggcagc

SEQ ID NO: 16408 - DNA, 259 bp, Homo sapiens
  source 1..259: mol_type = other DNA
gtgcacttgtaatcccagctacacgggaggctggtcgcaccactgcactccagcctctcccaggacaaggagatcgcaatgggaaatcattctgataaaaattcccccaccggtgtcccccgccgccgcccggccagacggctccggccatcaatttagttttaaaaagtccgtcaagcggaggacctgctgttggctccggggtcctagaggttccggatccgtcaagtcccgcgcttgactgacgaggcttgcgggc

SEQ ID NO: 16409 - DNA, 653 bp, Homo sapiens
  source 1..653: mol_type = other DNA
tttgccttgggcacaaggacagccccgcccaccccttggcggcctctgggagtctgggagctccctcttacaactggaccaggcagccaggggaggcactgagaggccgagcttctgagctggtgcctgtggatgctcgacggtcccgcagctcccacaaccccctttagtgaaacaggagggaggtcgctgggcacagggagccgggaacgcctgccctccccgccatcgacggctcccgaggcctgaaccttcgctccagccccagcacaagccggccagggcgcagggccaagtgttgcccgccattccccgggtaccccatgacctcccagctggggctggctcggactgaggagtcgtccctgcccgggtctccagtgctgcggagctcagctggctttgggaccccggggggagcagtggggttgacgccacagcgacttgggccacgggtctgggggctctcccgcggggggagtctctcccgcgggatgagggggggctctccgccgcacccgcctatgatggcccagaggacccgagctcgggtcactcccgtcgccctcggggctcggcgagggtgcaggaggcgggcgctgagccggtgacgcgactccgggcggctcccgggtgcgccgcatatatagcag

SEQ ID NO: 16410 - DNA, 280 bp, Homo sapiens
  source 1..280: mol_type = other DNA
aggctggtctcgaactcctgacctcaggtgatccacctgcaaggctgggaacgtgcggtgcaagcccctgccctcccaggccgggatcagtgtagaaaaatgttttattttattttatttatttcagtggcgggatctcggcccaagtagctgggattacaggcgcgtgccactaggcagtcccacttagcgctgcgagcctggatcggctgaacctgggagtgcctcccctgacccgctctggcaacagcggcagtccaggccccgcccactgcccggg

SEQ ID NO: 16411 - DNA, 307 bp, Homo sapiens
  source 1..307: mol_type = other DNA
gggtggctcccggtcaggaagaccccctgggtcccctgcagctgcgctcgccctagactcctgggaccggtggatctggaagaattttaaccacgctgtggaatcagatctggacccaatggagtagctgggatcttgtctgcatgaaagctgaggctcggagggtgaggaatctcgtcctagaccccattccggcagaggtcgaggacgcgagcacccgctcgagcctagccccgcggacgccccgccccgccgaggccccgggcccgccctccgcgcgccgggagtcacccgcctgcaggcgccg

SEQ ID NO: 16412 - DNA, 299 bp, Homo sapiens
  source 1..299: mol_type = other DNA
gtttaaaagagtctttgttcataacatcggtttatggagcacctgctgtatgcagagccgccagctcgcgcctggaagcattgcgggtggctcccggtcaggaagaccccctgggtcccctgcagctgcgctcgccctagactcctgggaccggtggatctggaagaattttaaccacgctgtggaatcagatctggacccaatggagtagctgggatcttgtctgcatgaaagctgaggctcggagggtgaggaatctcgtcctagaccccattccggcagaggtcgaggacgcgagc

SEQ ID NO: 16413 - DNA, 438 bp, Homo sapiens
  source 1..438: mol_type = other DNA
tgaccctccccagggaagggccttcctcctccaggctttccggaggggaagggactctctgcttatgcccagcccgccgctggccggatcgggggcagccagtgcacctgactcatgctgccggggcgggccagggccaggggacggacgatccctgcccctgactcgaagggtcggagacgaaattcccgccccagactatgaggccgagcccctcggagactctgcccgggacacggcgggaccgaccgcgagggagcggcgccggcggcctcccgtacctgcgctcctcaggtcagttgcttggtcacgaagctctccacagctgccgaggccatcgccgccgccggcctgggcccctagaagccgacgtcccgcttctgcgccgggccggtgttacagcggaccggtgttccccgccgggcccgtgcgttacgc

SEQ ID NO: 16414 - DNA, 331 bp, Homo sapiens
  source 1..331: mol_type = other DNA
agtaacatgtatgtaagtttatatggtactattcttttaatatcaacgagatttatagagtttttaaagcacaggctttggagccgaaatgactgcgaacatagggcctataccaaagttcaagggctattgtcagtattccgtggcgagaccgcagggagcagcgctcgctctgcgtcctcccccgggccccgaaggtctcaggatgctgtggctgcacgcggacgccagccgccctaaggtgaccgtcagggaagatgctgccatggccgcagcctcggccggcgcgaaccgcgtgcgtaacgcacgggcccggcggggaacaccggtc

SEQ ID NO: 16415 - DNA, 486 bp, Homo sapiens
  source 1..486: mol_type = other DNA
caagagggccccgcgaccccgagcagccctgggacccccagcagggaccggtggcccagcccctgccccctacccctgcgcagacagagcagcctcccagggagcagcgtggcccagaccagcctgatctgaggacgctgcacctggagagactgcagcagtgtcccctcactggggtgctggccccacttggagcccacctgccaccatcaacagaaggaagggcttcctcctggtggcaccgttgacaggtcacccttttcccagaccctgtgtggatggctccctggagcccctcgggaatggagcgatcacggggtcccatgcaacatgtggccctggagtgcacagcgaaagggtgcactctgcctggaagttgtcctgggcaaaatgctcccgtttgccacatcctgcattgtgcccaccccgcaggagctggctaggcgtgcagatacgctggcagcagcaagagcatgcaggagttcc

SEQ ID NO: 16416 - DNA, 550 bp, Homo sapiens
  source 1..550: mol_type = other DNA
aggcagctcccagcgcaggtgcaggggcagctccgcttcttctctcccagtctgggagggaaagttcagaattccctcgggcttcctggaccctgagaaagttggcccagggtaggaggggagccttctcatcaccccctcctcccccccccaccgcccgcctccaggggctcaatggggaagggggacctgactcatcctcccgctgagcagcgccacgggctggggaaaagggaattcctggttccataagcccccagggggcccaggccgagtccggggtgggaagggggcttgggcggtgctgaccacctctgccagttctgcactgcccggggtggggactagcccctcctgggccagcctgccccgaaatgcccactgggggcagaccaacggtgctccctctcctgggcagccctgccgagcagcagagcagtgctcgggccaacgtgacgtcaccaggcggaggggggctcctgagcggggcattccttcctgaagcctcctccccctccccctcctgccgggccaggaattgggtttgggg

SEQ ID NO: 16417 - DNA, 442 bp, Homo sapiens
  source 1..442: mol_type = other DNA
ggacttcagtcctaggcccaacatcctggatgaagagtctgcagataagagcccacggcagctgacatgcctggccctgagacaggaggtttcctgcttttcagattgtggtaattagtcactgtagcaatagaaaacgaatacaaggtctttatgcattaatgttgaaaacactttttatatacgttgtaaatattttttaagtgtgtcatatgtttttaaactttccatcagagggtaacgaatgcttgttaaaacatctggccggaaagacatcctttgagaacatatttcctcccagaacgctgccccgccctgggtggaacgaagctgagctccaccctagaggggcggggccctttagctccgccccactcatggctgggactgcagggatcccctgcgccacagtgccgtgcgcgccagggacggggtctccgcg

SEQ ID NO: 16418 - DNA, 424 bp, Homo sapiens
  source 1..424: mol_type = other DNA
cgctggcattgacgacagtgtcctggagagcccttagcaagtgctcagtacagtgctcaatgaagagagggacttgagcaagtactcatttttagtacttcccaagatgtgtacaagaggcctggggccagcagaactccttgcagctgcccagctgtgaggcctccatggctcagctcctcatctattaagtgaggacagcagtcgtcccccgaggccacttttcttagggtgcctggcctgcaagaaacccctaagaatgttttattcttaatattaatccttcctcaggtaggacctaggtgagctggggagtcttaactcacccagggcaggccttaaggttgggcacacccatgtgtgggctctgccctggaaagccctgcccaccaggcagccccacccacctgggctgggttagtcc

SEQ ID NO: 16419 - DNA, 364 bp, Homo sapiens
  source 1..364: mol_type = other DNA
cagggcaggccttaaggttgggcacacccatgtgtgggctctgccctggaaagccctgcccaccaggcagccccacccacctgggctgggttagtcccaaagcaggaaaggtctccctcacctgactttttccccaccttggacagagggcgggagatgccatccccacttggaagcctcggccgtcacacctgcagggccggggcgtgcatggcctcaggccaggtgcctcaccacctgcaagaagcagggtctttcttatgttccagtgggacccacagacggctcgggagtgaccaagcctctgctgagctgcccaggtcccctctggtggacacctcctacccggagccccccaaggtgg

SEQ ID NO: 16420 - DNA, 356 bp, Homo sapiens
  source 1..356: mol_type = other DNA
ttccagcaatttaatttcttttttaattaaaaaaaatgagtcagaatggagatcactgtttctcacaaggaaatgctggccaccatcttgggctgctgaagctgaaatccaaaacttgcacagggggttcttgcaatttacacgtgttaatgaaaaatatggggtgtcgccgcgccccagtcaccccttcccgggggacccactcgaggcggacggggccccctgcacccctcttccctggcggggagaaaggctgcagcgaggggcaactccgccgcagggcaggcgcggcgcctcagggatggcttttgggctctgccggcgtttggcgcccgcgccccctccccctgcgccat

SEQ ID NO: 16421 - DNA, 353 bp, Homo sapiens
  source 1..353: mol_type = other DNA
caaatagtcacgtgaggttttactactgaactttgaaatccctttttaaaaatcgtgttcagaaagcacatctcacctggcctggagcctcctgaggcgtcgccagtctggagtgcagtggtgcgatctcggctcactgctcccgagtagctgggattacaggcgcctgccagatccgcgcgcctcggcctcccaaagtgctgggatgacaggcgtgagtctccacgcgcgcggccaatggacgctcccagcgcggacagacaggccggaccccagggcggggcttcagtcgaggccggccccgcccaccgctgcagccgcgcatgcgccatgtacaggctgctttgggccct

SEQ ID NO: 16422 - DNA, 562 bp, Homo sapiens
  source 1..562: mol_type = other DNA
cggaggcccaggcctccctccctcgagaagctggggttcaccatcccgcagctggcctgcatctcgcgcacagccgcggggccggggcgagcgcggagcaggcaggggcgcggggccaggagcgcaaagcccaggcggacgccgaggctgcggcgccacctacagtccgcgcggcttccagtttccccgccggccgagagcgcgcccggccccccgtcggggggcaatttacccggataaaaaaattctacggtgaagggggcaaaactcggtgccccccaacctctggccccggggttcctgacgccccacgccgagtgcatccactgggagcctgaggcctgggggaagggccccgccaagaacctcggggccgctgcgcggtggggaggagttccccgaaacccggccgctaagcgaggcctcctcctcccgcagatccgaacggcctgggcggggtcaccccggctgggacaagaagccgccgcctgcctgcccgggcccggggagggggctggggctggggccggcgtggggcccgtaaggcgctactatataaggc

SEQ ID NO: 16423 - DNA, 506 bp, Homo sapiens
  source 1..506: mol_type = other DNA
acctaggtgggcctgcatctagctaggacagtccccatcaggccataatggggcttccagaggcctggcctgggtccctgcgcttcacggaagggtgtgtggtaggggcctcaggtggacgcgccaagcctgtggggccaagacctagggggtgggggtggcctccctcccgcctgtagccaaagggtcctcccttgcccagccagggcgaagggcaggcagcagccgctggcttctgcgcccactaggagcttcggatgcccgagttagggctgcgccaaggcgccaaggggcgggacgaacaggtccgtgggccgggcggagccaagggtgggggccggggtccctccaggtggcactcgcggcgctagtccccagcccggccctgattggcaggcggcctgcgaccagccgcgaacgccacagcgccccgggcgcccaggagaacgcgaacggccccccgcgggagcgggcgagtaggagggggcgccgggctatatatatag

SEQ ID NO: 16424 - DNA, 495 bp, Homo sapiens
  source 1..495: mol_type = other DNA
acacacagcgtgggggtccctggtctagaaagccttcggatgatgtctccctcagtcattaacgccagtcactgactggggaatgaatttgcgctgggccaggagggctctgcccccaaaaccagcctcctggggccccacatccaggagctgggggtttgggcacctgcccggacgccaggggcgcccatcaccgttcctgggcccccaggtaaggcgctctctgttcctcctgaccccgtgcgcagggactcggggactcacggaggcccaggcctccctccctcgagaagctggggttcaccatcccgcagctggcctgcatctcgcgcacagccgcggggccggggcgagcgcggagcaggcaggggcgcggggccaggagcgcaaagcccaggcggacgccgaggctgcggcgccacctacagtccgcgcggcttccagtttccccgccggccgagagcgcgcccggccccccgtcggggggcaatttac

SEQ ID NO: 16425 - DNA, 445 bp, Homo sapiens
  source 1..445: mol_type = other DNA
ctggaccgtcactgggacgggacgggtgcccagttggtgtgcgcaaaaggagatagcatctccagacccggcctgccccgcgccttgcaaggctgaggacagcgccactgctcctgcaggaagcgccgggcgcagacacaacccggagctccccacgcgtgcccgcgccccggagcctccctgccggggtgacagggcctggggcggcctcctcaaggcctcggcgtggggcgcgctgcggagcggagccgcggctcgacggcggtgcgctggcggcgagtgtatgcagacggcgcccggcccgaaccccgagccccgcggggctccccacccgccggcctcccgcccctcccgcgcctccgcctggggttgcgcagcaacggaaatttcatgggtggaaattaaagggaccgcgaagccggagtcagcatctccaggcgcggga

SEQ ID NO: 16426 - DNA, 319 bp, Homo sapiens
  source 1..319: mol_type = other DNA
ggtcaggctggtctcaaaccggggcaagcctctggcctgcacactgaccatcagcaagcaaaccaggccaggattcctggcctgctggacacaatgtgcagctgtgacccccgtgtatccgttgaggaaacagagaccccaaggaaagaaagaacttgccctgacgtgttttcggcccaggcccctcaggccctgccacgctgcttcatgagatggagatatacagctcctgatccttgggcactgaccctggctgtccacagctaaatgatcatgggacacccatgaccatgggcgtggctggaggaggccctgccct

SEQ ID NO: 16427 - DNA, 623 bp, Homo sapiens
  source 1..623: mol_type = other DNA
gccggcactgcagttccccacgcccgccctccgtagggcccacaagggctggagaggggcaatcccggcttcctgccctgagcccatgaggcggggaagaggaagggtcggggacaggctgtgcatcagagtccctgcctcgtccctggatgcacccccgggtccagtcctcttagccgcagttaactggaatcttcacataacagttctacattctgcacagggggtcctgccgcctgggggagggggccagggcgctcttctgatgcgggaaccagggccactcacggaaccgccccgcgcccagggctgcgcccgtctctcgggggctggctcaaggccccagtcaacaccccttccctggggccctggctgggggtgcacctcgcagggccgctcggggccccactgcccgccccaactgataagacggtctgggagcggtggagacgcgccccgcgcagcgggaggccgggggcgggccgggacctggggaccagccgctgctcctctgcagcgtcccgcgccgctcgctgggagtccggggagcgcggggcggggcgagggcggtgtccgcaggtaacccccggggggtggggaggtctgcccgggacccccagacc

SEQ ID NO: 16428 - DNA, 395 bp, Homo sapiens
  source 1..395: mol_type = other DNA
agccagcatggatgcaaacctgcctctacgtccctgggagaggcgctccctgagcctcagctcttgaagacttgaaaccaggaaacccggttttttctgcttgttgagtactcactaggcgctgggctctgggcaagtagtttaccacagagaaacttgtctatggtcactcatcttattccatggcagggtcttgaattacaaggaatggagaagttcttcttcaaagtttcttaaaaccataaagagcttgtcatttgctctatgcatatctatatatgttccgcattcttggacaaggttaagcaagacccagaaaagtttcaagctgttagcaagcttagaatgtgagtcccattccgaccaatggaaatgtgacacagccataggcaatt

SEQ ID NO: 16429 - DNA, 426 bp, Homo sapiens
  source 1..426: mol_type = other DNA
gttccatgcttggaaccatggcacgctgacgacatcgtggcctttaaagacaccccagtggccatttaacaatccagcaggacttcctgcaggaggtgctatctgatgcacaccgtgccagcatggcccctggggcttaacctgagtatggtcgtcccctggggacctgccttattctccttaggggaaggacccctgctggtccgggggtaagagagatcgcaggacagccttgcccagcagtggggaaagctctgcaggagccccgccccacctcagaggatgcggagtgtcctctgcaaaatgaggacccgcattccaacccgtcagtgggctccagggagatgactgccccgggagagactcccccaggagcgcgggcagctggagggggcgggtcggcaggaaccaggcaagctccccgga

SEQ ID NO: 16430 - DNA, 499 bp, Homo sapiens
  source 1..499: mol_type = other DNA
gccagcatggcccctggggcttaacctgagtatggtcgtcccctggggacctgccttattctccttaggggaaggacccctgctggtccgggggtaagagagatcgcaggacagccttgcccagcagtggggaaagctctgcaggagccccgccccacctcagaggatgcggagtgtcctctgcaaaatgaggacccgcattccaacccgtcagtgggctccagggagatgactgccccgggagagactcccccaggagcgcgggcagctggagggggcgggtcggcaggaaccaggcaagctccccggacttcactccccccggaggcggaggtgacgcgccacagaagcgcctgccactcgggttcaggtggggctattgaaagttcccccctttcactttttgaccggcgcggccaccgcccctgccataggcgggcggagagcgcttaagaaaggcgggccggctggcgtccaagttcctgaccaggcgcgggcc

SEQ ID NO: 16431 - DNA, 436 bp, Homo sapiens
  source 1..436: mol_type = other DNA
agacgggcaggcagtgcgggcattgcaggctgagccaccacggccgccacgagcacgcggattgaataaacgactgctactttggaaatcatgtattatttaaatcacatgtttaaacgcacataaacttctgagtagtgttttctgcacacacaagatctaaacgttaatgcataagtaacttgagggcacgtgacgttcgggctgcgccctccccgccccggccctgcacacagtagggccgcaccgcgcgactcggcagaggcgcgaccgccctcaccgcagagagctgggccacctgcaggctcttacgccgggcgcaggcgcagaagccgcgcccgtccgcggcgccgccagccagggcggaaacggctgcggcttcgctagggacgcatgcgcgggtcccttagttttcgcgagataacggtcgaaaacg

SEQ ID NO: 16432 - DNA, 567 bp, Homo sapiens
  source 1..567: mol_type = other DNA
gcaggacagccttgcccagcagtggggaaagctctgcaggagccccgccccacctcagaggatgcggagtgtcctctgcaaaatgaggacccgcattccaacccgtcagtgggctccagggagatgactgccccgggagagactcccccaggagcgcgggcagctggagggggcgggtcggcaggaaccaggcaagctccccggacttcactccccccggaggcggaggtgacgcgccacagaagcgcctgccactcgggttcaggtggggctattgaaagttcccccctttcactttttgaccggcgcggccaccgcccctgccataggcgggcggagagcgcttaagaaaggcgggccggctggcgtccaagttcctgaccaggcgcgggccggcccgcgggaccagcagccgggtggcggcgcgatcggccccgagaggctcaggcgccccccgcatcgagcgcgcgggccgggcgggccagggcggcgggcggagcgggaggcggccacgtccccggcgggcctgggcgcggggaggcccggccccctgcgagcgcgccgcga

SEQ ID NO: 16433 - DNA, 702 bp, Homo sapiens
  source 1..702: mol_type = other DNA
tttgaggttgcagtgagccgagatggcgccattgcactccagcctgggtgacaaggcgcagtgctgcccgtctcacatctgattcatgtcttaaagcagcctcgccggaggcgctgaagcccaggcgggtttcccgagtcgcccgggcccacgctgcagagtgaaagccacagcggcaaagcctgcactctggacgctgcgccgggacgtccccaggtgcggcaggcagcgctccgtaagtgggtcctggcgggaactccgtccttctgaacccagatcaggcccagggagaccgtaggggcgccgcggcgggcggggtctgggtcctcggtggtgactgaagcctcggttcgctcttctgtgcgaatccagagcctccagctcgggagggacctgacgtgccggacgcgtccagctcagaactcgaggcaaaggcctccggcgtccctgcagccgtggggggaaactggggacgcccggaggaagacgctgacccggcgagcacctgagcgcccacctcccggagaccgccccctcccccgcgacccgggcggggcctggggggcgtggctcccgtctcgctcagccaatcagtgccccggggccgcctcccgccccctcctgaggagacagcgcttgcgtactcgggccaaggtgctcctcgggccccgcccccggggcggtgctgacgctcgcgccgac

SEQ ID NO: 16434 - DNA, 393 bp, Homo sapiens
  source 1..393: mol_type = other DNA
ggtattacaagcctggccaacaatccttgtgcacagaaaatgcaaattagctgtgtccagttaaatgcaattgacctttgcactagatccttttgcctcagcctccagaatagctgggacaggtctggctaatttttttcttaaaaaaaattttttttttttggtagagacagcctcccaaagtgttgggattatctggccaaattctttaaacaatttgtaacaacttatgatgtattcattatcgagttaaataaaatatttgacgtgttcattttatatgtgtatgaaggtcatgattttacctttaaaaaaatggtcaacacaattcaaacttcattatgtcttatcccatgtcagcctccacaggcgtgggccactgcgcctgaagac

SEQ ID NO: 16435 - DNA, 322 bp, Homo sapiens
  source 1..322: mol_type = other DNA
aattcaaacttcattatgtcttatcccatgtcagcctccacaggcgtgggccactgcgcctgaagaccgaggtcttcgctgcaagaccgttcctgccttgtctggtctgaggtgactgtggccggggctcgcgtccctggcacgcatgtggcagaggctccccgctcccggactcagggcacgtgcgtctcggcttccttcccccggccccgggcagcgccgcggatcctgagaccccgccgcgggctgtgtgctgctcagcgcccatcctctgcgcgcgcaacgccgggcgagctctgcagactcgccacaggccgggcta

SEQ ID NO: 16436 - DNA, 405 bp, Homo sapiens
  source 1..405: mol_type = other DNA
cccatgtcagcctccacaggcgtgggccactgcgcctgaagaccgaggtcttcgctgcaagaccgttcctgccttgtctggtctgaggtgactgtggccggggctcgcgtccctggcacgcatgtggcagaggctccccgctcccggactcagggcacgtgcgtctcggcttccttcccccggccccgggcagcgccgcggatcctgagaccccgccgcgggctgtgtgctgctcagcgcccatcctctgcgcgcgcaacgccgggcgagctctgcagactcgccacaggccgggctagcgcttagccagctgcgggcggacccccgggactcttgcgggccaagacgcgggaggaggcggggcagggggcggggtcgcgcggggacccggatgcggccccgccc

SEQ ID NO: 16437 - DNA, 540 bp, Homo sapiens
  source 1..540: mol_type = other DNA
caacttgtttgtatgctgaacatttttcaaaacaaaaaggtgcagggaaacatgatgtctctctgagggccacagagacgtggcaaccagatcgctctgacagtaaggcctgtgggtgtggggtcagcagacaccttcagctgccccctcgcaacgtggcccgtgcgcaggccaagccctaggaccaaggcgtcgcgagccgctgaagccccatttgccgagggggaaactgagcagtccaggtgatgagcctggcgcgttctccgcgcggcccacgtggccactccgccacgccccacccccagctggtcagctgggatcccgaagagcgccagaggctgcgcccacccactagggcccgggcgggccggtggggcggcagggcggggcctgggccgtcaatctcgagtccggccgctgccgaatggcgggcgcggtgggcccggagtcagctcaggctcctcgaccaatcacggggcgcggagccgccgggcgtgcagggtccgcctccgattggcaggcaatcgctgacatcatccg

SEQ ID NO: 16438 - DNA, 638 bp, Homo sapiens
  source 1..638: mol_type = other DNA
agcagggcaccgtcccacacactctgggtgcctcgggagcttttttggtttctttccttaaaaaaaaaaaatgccatggctagaggcaagcagttgtggctttagctttgtcataattcatcatccccagagggggctggtgtcctcaggggctccggccaccggccaccttccaaggctgcaagggaccggggggacgctggagggggggatgcagagagagccccagccgctccccctccccgccctctcccagcccagcctgcggatgctcgcgcgggatgacgcccaggcagccgccgggcgcactgtgggctcggctcctgcctgccgcacaccgccggcgccgggacgggagagggagggggcgctggatgcgacgcgcaggtccctgcgtctctggtgcctgctgccggctcgtgcggggagcagataggatttgattttattttaaacccccttcaaggaaaagcaaaacaaaacttccttcccgggcttccctggaagatgcgtgtggtcgggacaagccggaggagctcattcccgacgccgccgctgctgaggccgccgctgccgccgccgccgttcgggccacctgggcggcgtcctggccagccccccttcaggcagccgcccca

SEQ ID NO: 16439 - DNA, 413 bp, Homo sapiens
  source 1..413: mol_type = other DNA
ctatggaatttcaagtgcagttcctgtagtttcagaaaaacctgagctacttacacacgtggtacaggaggcgccatccgcccagggtggcgggattcccagcacgggcacgatggagcgctatgccgtattaaaataaaacatgctgcagctgggcggtgagccccctgcacctgtgcacctgaacgggtttgcccgcaagggccgggccggggccggggcctgggacgtgggtggagccggggcgggggcggggcccttcgcggtgccgtgaacgctgaggccacctcgctgcgcaggcgcggtcgtgagctcctcagacggggcggggcgatccgtaggcagggcctgacgccgcagtcggccggagcctcacggatgggcggggagggggcggggccgggcaacccgga

SEQ ID NO: 16440 - DNA, 477 bp, Homo sapiens
  source 1..477: mol_type = other DNA
cacagcagaagggaacttttccttcttgaactgcaaagctgctgtgcctggctcagcgccgcggagcgcggcatggggccaggagccgaccccggagccaggcagccttcgcccggggaagctccagaagcgcggggacagagcatccctcagacgccggctcgtgggggagggggactatccacgcctccgccccgcctccccggagccccagcggcccctcgcctgtgagctgctcgccctgtgagtgggcacctgctcacctgggcaagcgccccccactgcgcctctagccaggggtcggagtcacccgcagggcaggggcgcccgcccccggatgatgtcagcgattgcctgccaatcggaggcggaccctgcacgcccggcggctccgcgccccgtgattggtcgaggagcctgagctgactccgggcccaccgcgcccgccattcggcagcggccggactcgagattgac

SEQ ID NO: 16441 - DNA, 422 bp, Homo sapiens
  source 1..422: mol_type = other DNA
ccggggaccctagccctaacggccccgcctcctgggccccaaacccggactcggccccgcccgaagctccggatcctggggcccgaccatggccccgagtcggcagaccgtggactcgctcctgggcctcccagggcccgcctcctgagcgcagcccgcagcccggactcggccccgcctcccggaccctgggcccctccccacgtcggcccgtcctaagctccgcctcccagagtccgagcagcgcctggccacgtgctacgacatagccaacgccccgccctggtggtctccccgccccaagacctgtctctggaccgcctccaggacgcctccaacctggacgcttgccctgtcctggccccgcgccccggtgcactgccctgggcccgccccccttcagtccaggcccggcttccgcc

SEQ ID NO: 16442 - DNA, 437 bp, Homo sapiens
  source 1..437: mol_type = other DNA
tgcagtgagccaagatcgcaccactgcgctccagcctgggtctgtctctaaataaaaaataaataaataaataaagtttactcataccctctttcctctctgtcagaactctcatattacatataactgatgtgaaaacaatttgtgttaacttaggtttcaatataaaaattagtttatctcattcgatcgattggacagaaagataatcaaataaaagtttttctgtatctcactataagcatgctaaaaatagtaataaatagggtattacgtggttcttcccattatcagaaaaataaaatgaatgcttttcctctatagaaatgtactttaaatgactgatagtcatgatgattgcatgcttatataaaatctcattgaaacacagaaatgttattgctcctgaaaggttcaataatcactcattcagagga

SEQ ID NO: 16443 - DNA, 227 bp, Homo sapiens
  source 1..227: mol_type = other DNA
gggctgttcccctcctcagagaggggaatggggtctcgaagacagagtcccaggcagcttctcctgcatcttacatgctagaagcccctggtagtatcctatgtctaaattaggaatatgaatctggtttttcccacttaatatatgcatgcattggatcgtcatagactctgttgccagagccagtgttgagccagtccgcctcttccccgggaagtgcctgccct

SEQ ID NO: 16444 - DNA, 376 bp, Homo sapiens
  source 1..376: mol_type = other DNA
gtgggtgccctggaggtcccgcaaggctcttcagctctgggagctcaagccgacccgggaccgtggacctcgaggagccaccgttgcctagaaaaatacatttccgtgtgttttaatatttattttcactcactacaactctttggagggagcggaatttaaaagtccccacgtctcgctccttggagcccagactgagggagcgtcgcgaaagttgcccgttttggaacgctcccatttggctctccaaagggttgcactgaaaataatgcgattcaaatttctcattttacccttgctgaagcttgcaagggcacggtactgctggagtccgagccgccgattggctaggagcacttcagcagctggctcgcgc

SEQ ID NO: 16445 - DNA, 324 bp, Homo sapiens
  source 1..324: mol_type = other DNA
gtcatagactctgttgccagagccagtgttgagccagtccgcctcttccccgggaagtgcctgccctctagacacagctaacttgagtcttggagctcctagagggaagcttctggagctctagtctgggactactagcctagacctgtggctctggccagaggggctaggatggtccaacttggggttccccattgatctgtgagagactcatctagttcataccctaggtgaccctgggggtggcatcctcgtcccagaaggtttctggccactgaactttggctaaagcagaggtgtcacagctgcttcccagaaggattg

SEQ ID NO: 16446 - DNA, 331 bp, Homo sapiens
  source 1..331: mol_type = other DNA
agtctgggactactagcctagacctgtggctctggccagaggggctaggatggtccaacttggggttccccattgatctgtgagagactcatctagttcataccctaggtgaccctgggggtggcatcctcgtcccagaaggtttctggccactgaactttggctaaagcagaggtgtcacagctgcttcccagaaggattgctcggcatcctcccagaagcagctctggtgctcaattttgccttccctaatgaaggggtaagattggtggggaaggattgtcacttgacccccccagctccgggagtggtttaccattctctaaagagc

SEQ ID NO: 16447 - DNA, 393 bp, Homo sapiens
  source 1..393: mol_type = other DNA
tgcagatgacctctccactctgcagatggctgccaccagcaagaggtggcccgcttggagaccttggtgcgcaacagttctgcagcacacaggcagcgctgcaggctatgctggaacggctgcgggccgcgctgatggagagccaggggcagcagcgcggctgacccaggagcggggccgtgcccaggctgaccttgccctggagaaggcggccctgcagacgccctcaacgagcagcgtgtggagttcgctaccctgcaagcgccaagcttcgtgtctggctcaggagcccaatctgaggctgctggcaggacagagccaacaggccccaagctggaggcactgcgggcagaggtgagcaagctggaacagcagcaggctgacagcctggaa

SEQ ID NO: 16448 - DNA, 366 bp, Homo sapiens
  source 1..366: mol_type = other DNA
ttgcactgctagaagcctaatggtgtagagctcttgctaggtctagagactttgccagttacctaaccttggggaagttttctcatttgcaagatagagtattaataactatttaaaaggttatcgtgatgctcacagtgagacactacataaatatttgaattaaaatatttgaatgccttccagtggcacggtcagctcactgcagcctcccaagtgggtgggacccaggcactgagctcaagcccaccttggcccaaagatttaccactcctggacaattcagagtatattctgttggcttacctaacagggcagggccttcacagtgtggcagtcttgccacagaaggccagaatttctgcc

SEQ ID NO: 16449 - DNA, 181 bp, Homo sapiens
  source 1..181: mol_type = other DNA
ggttgcagtccgagatcgcgccactgcactccggcctgatcaacccagtgggctcccgtgttatctgtgagagtcctgtttacatatatgaaaagtgagggccaagctaaacattataaacctcaggctccccatctttaaagtataacaggtggttataccataactactgctattgtta

SEQ ID NO: 16450 - DNA, 241 bp, Homo sapiens
  source 1..241: mol_type = other DNA
tcgctctatagcccaggctggagtgtatacggctcactgcagcttgcctccctagtagctggggccactggagcgcgccaccaaggacaggcgtgagccaccgctcccggccctgggggtggttcttaagcatccccaaatctgtatggatatatatctcaacccactgcctcagggttactcagagcaactccatggataaagcccttaagcgggccccgccgacagaggccaatcagag

SEQ ID NO: 16451 - DNA, 294 bp, Homo sapiens
  source 1..294: mol_type = other DNA
ctctagaattagggtagcgactgcgatttatcaactcagttcctcagaggaaaaccaaccccattttctctggaacttgaagcatccgtcgctctatagcccaggctggagtgtatacggctcactgcagcttgcctccctagtagctggggccactggagcgcgccaccaaggacaggcgtgagccaccgctcccggccctgggggtggttcttaagcatccccaaatctgtatggatatatatctcaacccactgcctcagggttactcagagcaactccatggataaagcc

SEQ ID NO: 16452 - DNA, 258 bp, Homo sapiens
  source 1..258: mol_type = other DNA
ggccaagctaaacattataaacctcaggctccccatctttaaagtataacaggtggttataccataactactgctattgttagaggagaggcctgagcacccgcaggggtgcccaggccgcacgccaaacgcgggcccgcgccggttacctggctgcgcgctcccgctctgcttcgtgggctcgcgccagcgctgtgagcgcacactctgattggcctctgtcggcggggcccgcttaagggctttatccatggagtt

SEQ ID NO: 16453 - DNA, 258 bp, Homo sapiens; identical to SEQ ID NO: 16452
  source 1..258: mol_type = other DNA

SEQ ID NO: 16454 - DNA, 232 bp, Homo sapiens
  source 1..232: mol_type = other DNA
ccccagaacatgcagtgggaccaaaagcagagaggtcagtgaggtggcttctatctcctcggtggagaatacaccctctgtgtattcacccccagcccagctgggcgatacaccctctgtctgtgtgtgtgcacccagaccgtacgatctggagcaggcctggagagactggaaagatgaagtcatgtgcacgcgctagcgggggttgcctgcgggaggccgccgcgggtca

SEQ ID NO: 16455 - DNA, 264 bp, Homo sapiens
  source 1..264: mol_type = other DNA
actcacacatctggccaggacagtactggaaatgcggataccaggccagcaacagaatgctgtgcctgaggctgtacataattccctggactgtgaggtcttccagggaagcgaccatatgttaggcctggaatatagtaatattgtaactctaatatttttgttcagagcaaaaataaaaaagaattgctgtcagctcttcttcagaagggccaggatggagacgccaggtaggcgcggcacacttccttccctaacaatgtg

SEQ ID NO: 16456 - DNA, 264 bp, Homo sapiens; identical to SEQ ID NO: 16455
  source 1..264: mol_type = other DNA

SEQ ID NO: 16457 - DNA, 345 bp, Homo sapiens
  source 1..345: mol_type = other DNA
taaataaattcagaattcaacagccagagtaactcagttaaactgtaaatcagattgtgttacaactacatattttatttatctatcttctttattgttgaaatgtttactattgtatacccactactaagaatagtgatggacatatactaaggcactcagtaggtatttgttgaatgaatgaaaaaggtagtcatttccaagaggcaaagtttactctttaatgaaaaactataacaaacagtgctatttggcaatataatcacattcaatatgcacagtacacgacctcttgaacaattcttatccaatcttcacatcagcccaggatagaaggaaggctgg

SEQ ID NO: 16458 - DNA, 337 bp, Homo sapiens
  source 1..337: mol_type = other DNA
tttttacagagaatttattattattattttttacatctgtctagacatgggagagactccaccttcccaggtgggtgggaggcgagatagcgcccactgttctcgctcagcccccctgcctaggtaatttcccaagacccagaaggggtgaagggtgaggtgtgattgcccccacctccttgcctcccatctgctccgggaccatagctgacagcatctcagcttccctgggcatctaaacctcagctgccatggggtaggaggacaggctgaggaagcagaagcctgaggctgtctagagtctcactcctgcatcagcttgtgcaaatttgaaaag

SEQ ID NO: 16459 - DNA, 193 bp, Homo sapiens
  source 1..193: mol_type = other DNA
attcattcaacaaatacctactgagtgccttagtatatgtccatcactattcttagtagtgggtatacaatagtaaacatttcaacaataaagaagatagataaataaaatatgtagttgtaacacaatctgatttacagtttaactgagttactctggctgttgaattctgaatttatttagatctgtagtt

SEQ ID NO: 16460 - DNA, 250 bp, Homo sapiens
  source 1..250: mol_type = other DNA
acaaaacagtgttctactgtggtaccaccatgggctcagagagcttctgtcattaacaattgaagatctgatcaaaagattcagaacatctgtgattttgtggttggaagcctgggctctagcccttgccttcctcatctgcctaacaggacagaactgatgagattagctcaaaggatcctggcagctcaggctgcaagatttttttcagacctcagtgtttgggaaaaaattgtgtcccctggaataa

SEQ ID NO: 16461 - DNA, 465 bp, Homo sapiens
  source 1..465: mol_type = other DNA
ctccccaaggccccagggctgtccagctggctgtcccctgccccaactaaaacatttttataaactttttttttttttttgagatgagtctcgctctgtcacccaggctagagtgcaatggcacaatcttggctcagccaggctggtctcaaacttctgacctcaggtgatccaccccatttttgtaaacttttacaatgaagtaatttggtgtcaaaatctgacctgaaaattaatgtgagtttatgtatagttttaatttatcccactagtgtaactgtttcaccccagaatatacacttgattattgggtatatgaaaattatattttctttgaatcacctttgatgaaatcctaaaaaattttaaccctgaaacatttgaattgcattttgcccagggaggggtggtgtctaatcctaccttatgggggcagggctctatctgccccaggcttccgtccag

SEQ ID NO: 16462 - DNA, 253 bp, Homo sapiens
  source 1..253: mol_type = other DNA
tgtgtttttaccacaatttttaaaaggccatcaaaaattgcttaattatgttttcagaaatgccagatggtaatatattgctgtttaacatatttgagacaattttaattgtggtgcgatctcagctcactatacaattgtgaacaattttctagtgagcaaactgaagctcagtaaggtccagtgacttttccaagaaccacttggggtatctataaaatccagatgccccctggtgatgagcaattctcta

SEQ ID NO: 16463 - DNA, 465 bp, Homo sapiens
  source 1..465: mol_type = other DNA
gaaacccttaagggcttcccggggtcaggagcctctggcacctttttgcaaagccctcgggagctgtccccagagaggcccaggtaagtctctgagaacaccctgcaggtaggtggcccagctaggactagaacccaggtgtgcagactcccagtccagtcatcttttcttatacttgacccgggctcggcccaggagatggtggcggcgggcgcccggctggaggcctgcgcctttaaggagccagggggcggaaggaagacgactccccggagacgccgccaccggctaggggagggggcgggccagacccttttatgggctccgccccctgccgcgtcccccttccgccctcggctggaggggaggaagctaggggggcgttgcagcggaccccgtctgggagctccccgctgggcgtccggcccgcggaggcgcgagggggcgagtgctaataatacccgt

SEQ ID NO: 16464 - DNA, 437 bp, Homo sapiens
  source 1..437: mol_type = other DNA
ttattgtcccaggagggggagaatcctggcctcattgcctggctcttccccgcatctcaagagcctgggggtaatccaaacctgtatacattccgggtgttcatggatacagcaagctaggatactggccctggcttctgactgggtacccagcgtgtcacagataggattcaaatggtatgctattgtaataaacacagatagtgtttgtaatagtctctcaccagccaggagagtcacctagggtgactcctgggtgactccttggggaagggcagaggatcttccatcccccgctagtgcacctggctcagctgcttggcttggggctcctagaggcccaggtctcccatgggggccctctttggtgggaaggcctagggtgatgcccccacacgcatacacacgtgttagcacgttgcccgtgtgtgcaaatg

SEQ ID NO: 16465 - DNA, 531 bp, Homo sapiens
  source 1..531: mol_type = other DNA
ggctccgggaccgaggcgcggggcggggtgaggcgaggcgcggtgctgcccccggctccccggggcggcgcggggcggggcgggcggcgcggagggcgggggcgcgcgcggatggccatcttaagtggccgcctggagcccagggccgctgtccggggaagggggcgccggagcagcccgggaggggtcgcggccgggatcccggctgaaccccctcaaggcccggcctgcgggtgtggggggtggcgtgagaggctcgagaacgtcgcacctcgtctgggccccccgcagccagggaatctccccgcaggctttgccgggggacggttcccggcaggagttgggggccccgcccgcttggcgcaggtttggggaactcgatgcagccactctgggaggtcccgggcccttcgggaaggtgggggcaccgtccccgcaggaggagctgggggcaggggcggcccgggctgcgggccgagcggagggggagggggcggcagccggccctgcgctccgctcctgcccctcccc

SEQ ID NO: 16466 - DNA, 346 bp, Homo sapiens
  source 1..346: mol_type = other DNA
ccgcctccgcagtctccgccgggatgggacctcgctgggggcgggctcggttatcagagcgaattgaattagagcgccgccaggcctgcctcccctcccttccgcggggccgcaggtggggaggcccgggaaaagggtcgggaccctctggcctcggacgctggggactccggggatagggtcccgcgcatcccagctccacacctctgagccctaagacggcggcggggacccttcggggtgggggtcggggcggctttgggcggtgtctgggcctcctaggccccgccccttcggagctcgccccgccccgcccccctccgcggggtcctgcgcgttaaaaggc

SEQ ID NO: 16467 - DNA, 330 bp, Homo sapiens
  source 1..330: mol_type = other DNA
agtataatggagttgagaatactactttctccataattaagcacttagtatatcgtcctcttgaagaggaggtcaggtcttgctctagcagagagcctccaaggaacctggtacctactggaggctatggtcagcatctctccagaaaatgcattactttctgacccagacagtggaagggcctgccatgggcttctgcagagcagaagttcctgagtgctcatcctggaaaactttatccgaaatctgctctgggcagctttccatgccagctaatcagattaggcagcactaatggtagaaacatattgtatacttagtgataattat

SEQ ID NO: 16468 - DNA, 310 bp, Homo sapiens
  source 1..310: mol_type = other DNA
ccagcctggccaacgtaatcccagctactcggtaggctgaggtgtggcgccactgcactccagtttgggcggcagagtgagattctgtctttttgaaaggccgcccaggctgaaaaaagagactaaataagcataagtttcataatatgcctctgctgaagattcttgggtaatttacaccagtcaaaaattgtgcgaatcccagccgcgccacggcactccggcctgtgagacagagcgagactccggctggggactacctctcccgtgaggtagtgcgcaactccaccctgttcgcggcgtcttcgaa

SEQ ID NO: 16469 - DNA, 230 bp, Homo sapiens
  source 1..230: mol_type = other DNA
ttcactaggttatagctttatcctagggaagcagggtgggggtgcaacaggccttcccccatgcctgtatgtggcctaggtctgggccctgtgacagcagctccaggctggggctgtgcatggaggcctgatctctcagacttgagggcacaagcgtgtcccctcatcctgaaggcttctgcgatggggcagcagagggtctgggtctgctgcccctcaagtccccagcc

SEQ ID NO: 16470 - DNA, 468 bp, Homo sapiens
  source 1..468: mol_type = other DNA
atagagactaagtctctctctgttgcccaggctggagtgcagtggtgccatgatagctcacctgctgggactacaagtgtgtgctaccaaatttttaaatcttttgtaaatgggctcaagcaatgctcctgcctcgacctcccaagggattaattaatttaagatgctgagaaacttgcccagggaagccggtgcccagaccctgcctcctggcttcaggtcaggtctactcagctcttaaatgccgcagacatgagatacctggatgcctggaggcacctcaagaaggcagctgcccagctgggcccttgactgccctgcagtccagccaatccctggtcttcctggagggccagggcagaacttgcgcccttcagagagcctcttagcctcttggtggagaggccaccgccagggcttgtcagtcaggacttcctgggcatccaccctgtgagggcctgcaagccc

SEQ ID NO: 16471 - DNA, 646 bp, Homo sapiens
  source 1..646: mol_type = other DNA
agaaggggttcaccgttaacttccaggtccccgctggggacttgcccctcgcgcgcagggtcccctcccagggccggcgggggcgggcgctaggaccctgcggggtggggcggggcggggctcggagatccgtcagcttcacctccgcagcctggaaaatcccgagccgcggccgccgagcccccgagcccccgagcccccagcctagccgggaggggcgcgcggggctggggcccggggcggggccgggcggcgggacccactgctcctcccaccagagcccccgcgcggccccgggtctcccgggcagctgcggcggcggcgctggcaccccggccccggcgggccccggcggagcggcgggcaaaggtgagcagcccggcctggagggcgcccctcctgccccgccacccgccccgcgcccgcccggcgtcgctgcgagttagttgagcaggtcgctccgcgggccccgccgcaccgtccctcccctcgggtcccggccagtccctgggtcccgacgggcgcccgccggccaccgcgtcccatacgcagtccccacgccggccccagggggtctggggcgctcctcgggagggggaccccgaggctgtccagcgcccgtccgcccaggaaggtggcgtcagca

SEQ ID NO: 16472 - DNA, 462 bp, Homo sapiens
  source 1..462: mol_type = other DNA
gctatggagctctggccaactctgcctggggaggtaagagagcccagagccctgggccagatgctcttgagagcctagtgtgtgtacacgcgcggtcccggttcaagctcccaggtaggagactggggtggagattttgcccacatctggccagctacagcccagtggctgtgggcatctctgagaaggggttcaccgttaacttccaggtccccgctggggacttgcccctcgcgcgcagggtcccctcccagggccggcgggggcgggcgctaggaccctgcggggtggggcggggcggggctcggagatccgtcagcttcacctccgcagcctggaaaatcccgagccgcggccgccgagcccccgagcccccgagcccccagcctagccgggaggggcgcgcggggctggggcccggggcggggccgggcggcgggacccactgctcctcccaccaga

SEQ ID NO: 16473 - DNA, 400 bp, Homo sapiens
  source 1..400: mol_type = other DNA
actgcgacagactgctggcctggcctcagagaagttgagctactggcctcagttcaccccagggggcaggggggagcctccctggctgggctatggagctctggccaactctgcctggggaggtaagagagcccagagccctgggccagatgctcttgagagcctagtgtgtgtacacgcgcggtcccggttcaagctcccaggtaggagactggggtggagattttgcccacatctggccagctacagcccagtggctgtgggcatctctgagaaggggttcaccgttaacttccaggtccccgctggggacttgcccctcgcgcgcagggtcccctcccagggccggcgggggcgggcgctaggaccctgcggggtggggcggggcggggctcggaga

SEQ ID NO: 16474 - DNA, 402 bp, Homo sapiens
  source 1..402: mol_type = other DNA
acctgcagcacattgtccaggatcactttgcaggatgtcatttttaaaatgtggcctaatttacaaacatctcagtgctttaagcacttcaggactgattcccttttctggaaatggaaaactgttagttgctcatccagaggagctcaccacagtcactgcgacagactgctggcctggcctcagagaagttgagctactggcctcagttcaccccagggggcaggggggagcctccctggctgggctatggagctctggccaactctgcctggggaggtaagagagcccagagccctgggccagatgctcttgagagcctagtgtgtgtacacgcgcggtcccggttcaagctcccaggtaggagactggggtggagattttgcccacatctggccagct

SEQ ID NO: 16475 - DNA, 421 bp, Homo sapiens
  source 1..421: mol_type = other DNA
cagctgacagctgagccctgaggttgtttccttaaccttaaccttaaggtccatcgtacaggccttgaggcgggaggccagcagttctggggccactgcactccagcctgacagacagagacccaaggggcatttgtcttgatcgctcagatcactaataagtgctcctgagaaatgtagtttttccagcggcccgcgccattccggtggaattcaccgcggtctccgatgggccgttgttgggctgtggagacgtctcaaccaaagtgccccgggagccgtggtgacagagcggccacaaccactagggggcgggaggcagagcggcccctagtccgcccctagtccgggacctctgggcggtcccgggcgggaagcgcacgcgcaaacgcggggcttcgcggccgctgtacgcctgcgc

SEQ ID NO: 16476 - DNA, 318 bp, Homo sapiens
  source 1..318: mol_type = other DNA
gtacgcaggaggattaggctttagctcttgctcacagcctgctgagacctggggcaagcccgtttgcaatttgcagaatgaggaaatgggttcctcaatctacaatcaactataataatattttgctttatataccgcgtgggtaaattcctgaaagtaaactaagctgttttcacctgtttgcatttacaaatgagaaagctcagttccctaagggaaccttgtgaatcaaaaagaaaggagcgcaggcgtacagcggccgcgaagccccgcgtttgcgcgtgcgcttcccgcccgggaccgcccagaggtcccgga

SEQ ID NO: 16477 - DNA, 374 bp, Homo sapiens
  source 1..374: mol_type = other DNA
tatatagaacactccacccaatgaagtagagtgtatatttttctcaagtacacataaaacattttccaggatagatcatatgttagattataagcaattatcagttaattttaaaagatcaaaatcatataaagtattttctttacccatagaggaatgaagctaaaatatgcaaatatgtagaaattaaacatattcttaaattaaagaagaaagatttcaagttaacaacctagctttataccctaagatggtactttgattcagatagcaagactctgtctctaaaatagatagacagagtaaatagattatgataacatgaataataattcttcaaaaattagataattcaggtgaaatagataaatctt

SEQ ID NO: 16478 - DNA, 582 bp, Homo sapiens
  source 1..582: mol_type = other DNA
ctggctctctagcatctagctagagagatgtgtctgctcctccagacgccgcccaatggggtgaagcgtctggccctgagtcaggatgctgggtcccggccaggggctaaaatttcggcgttttcgtgtcacggaacgtgttctcgaggcctagagtcctccccggaaagcggggattcctcccttctgcgccgcgccctcagtgtacgcgcagagcccggggctgagggcctctgggtccctggctgggtgcgcggccaggagcgcgacggcctgggaagcaccagcggctctcgaactcggcccgggcgcggcggggttaagacacccgggccttgagggccccgcctccggagcgctccacccgcgtgggggaagcctccccggaggctccgacctcgcttcggacggggccccggcggttcagacccggaggcggctcctcccggaggcagatcctcccggcgtcggccttcggctccccgcctcttgggacaagccggggattccccgccgccgcccgccccctggcgtcacggagtccccgcgaggccccgccccggcctggcgccgtcctgggcg

SEQ ID NO: 16479 - DNA, 338 bp, Homo sapiens
  source 1..338: mol_type = other DNA
cctccgggtggtcatgaggccgagattccagactgaccgttaacttcgaaccctggggccccggcctggcgggcgaggctctctggccagcaggcatagtggagcctccacggggatcggcttcccggggtcagcacgattcaggcatattatcatgattgtgttgtctttgaatcttttttagaaatagaagacaggctcttttaaaactgtattggctttaatttttcattaaataagtatcttcaataaataaaactagatggcgaatattattctgacagatgtattttcctgaagcaatttttttgggttaaatttgtaaaaagaccttcata

SEQ ID NO: 16480 - DNA, 641 bp, Homo sapiens
  source 1..641: mol_type = other DNA
cggccagccgcaaagcgacttgtccttgctcgcctctctcgcgcacatctagctggtagggagccctgcgagcgtcgtccccaggcaggaggcgggggcggcctgtgcgcgtgcgtcggcgcggagccctctcccgcccacgtgcgcgcccccgagcggagacgcgcgcgccggggcgagctggcgggaaagcgcgcgggaagcccccggctggctcccagcgtgggggagggagggctcccgcggtacgaagccccgtgccgtggcctagctccctcctggcagcccggaccggcccctcgaaccccgctctggacagagcggttccctcagcatccggagcggggcgctgcgccgcgcggcgaggccggaaattcccgcgggccctagcggggagagcggcgccaccttcctcctcccgggcgggcgggggcgttaggcccagcgagggccgggccgcctgggggtgggggccgctgcgtccgccgggagcggcggcgcaggcggccgaccgggagcgcggacaacgcggctgcggctaacccgccgcccggccggctgagaccctcgcgcccctgctcctggggcccccgcccacacccccgggccgcccgggccgcccgggccccaagccttcccgg

SEQ ID NO: 16481 - DNA, 364 bp, Homo sapiens
  source 1..364: mol_type = other DNA
tcacctagctttcttttttaaaataacctgcgtttcctttgcagagcaaccaatggcctggcacctgcggccagccgcaaagcgacttgtccttgctcgcctctctcgcgcacatctagctggtagggagccctgcgagcgtcgtccccaggcaggaggcgggggcggcctgtgcgcgtgcgtcggcgcggagccctctcccgcccacgtgcgcgcccccgagcggagacgcgcgcgccggggcgagctggcgggaaagcgcgcgggaagcccccggctggctcccagcgtgggggagggagggctcccgcggtacgaagccccgtgccgtggcctagctccctcctggcagcccggaccggcc

SEQ ID NO: 16482 - DNA, 324 bp, Homo sapiens
  source 1..324: mol_type = other DNA
aaattttttacaatttggacatgtatcaatgggataaaaaagcaaattaaaataaatattaaaatacattgaacaaagctgattaaggatccatgtgcaggaccacggcctctctcagtgggagtgagggaaggcagcccagggcccagatacatccctgatctctgtgcacctgataacctctcttgagggttgttatggtgtacagcagttccagcacaggcctctcccacaacagatgaggctattccaggcaaaagcagctgggatagtgcccagccccagcgggtggagcaggctcaaggtcggctgcggagatcctgg

SEQ ID NO: 16483 - DNA, 322 bp, Homo sapiens
  source 1..322: mol_type = other DNA
gccagcctcagcctttatttattctgaatatttcacatagatggaatcatataatatgtgaatatttttttgcagtatcagaactttactgctcttacggttgagtaatatttcattgtatgaatgccacattgtttatccatttatgaatagtgctactatgaacaattcatgtataggtatgatttcaattattttgggtgaatattaatgcatgccagggcctggaggtaattatttcatcaacaatttgcttgcgtgtgatttcttcaaaagattgcccaaacacaggctatgggagaactagagaagggactgccct

SEQ ID NO: 16484 - DNA, 641 bp, Homo sapiens
  source 1..641: mol_type = other DNA
gggcccaaggccccgaaggcccggggcaagttccttggctacaggaagaggcctcctctgcacttgtccagcagcggagcgattggctccatttcacaggaaagaagaccctgccagggaatggaactgggtcaaggtctcccagagtcagtgctgaactcctaatgattcattcatccattcacaccttcaaggattgagcagcaggaagaaggcagacctggttcctgccctcgacgggagaggcgggatcctgagtaccctgctttcctaaccacggtaatggagagaggcacccccttcccccactttcaagcaagggaggtacgtccttgcaggtatctcccagtaggtcccttcctggccagccgggctggggcaggggcgggagcggtggctgggcgcaaaggtcccgcagtgggccacgcaggcaccgggctgaaccagctcccttctagcgtgagggagccgggaggcctccttctggcccggcagtgagagcgtcgccgcccgaccctcccgttgcagcaccggtacagacacgctgaccccgcggccttgtcgctgggcggcgtcccggagcgggtggcgcggtgtctacccgggcgggttgagggcggtgccagggtcagtcaaaagtc

SEQ ID NO: 16485 - DNA, 309 bp, Homo sapiens
  source 1..309: mol_type = other DNA
gtcccactagctgagtgacccagagcaagctaatctccctgagcctcagtttcaaatctcaggtctgtgtgtgacctaataatacctccagaattgctatgaggattaaatgaggtatgcaccttagctaggtgctcaaggaaataataattaaaattattcctccctcctcggattctggactggagtccaccggtcccaggtcccagaccaggagcggtccccagaggcctgcagcctcacctccccgtcatcccacgagggcgggccgctgggcgggactccagcggtgcggaggccgcttggcca

SEQ ID NO: 16486 - DNA, 406 bp, Homo sapiens
  source 1..406: mol_type = other DNA
gtcccactagctgagtgacccagagcaagctaatctccctgagcctcagtttcaaatctcaggtctgtgtgtgacctaataatacctccagaattgctatgaggattaaatgaggtatgcaccttagctaggtgctcaaggaaataataattaaaattattcctccctcctcggattctggactggagtccaccggtcccaggtcccagaccaggagcggtccccagaggcctgcagcctcacctccccgtcatcccacgagggcgggccgctgggcgggactccagcggtgcggaggccgcttggccacagcccctcccctggctcctctgggttccagggacgctggggccggagctgctgccgccgtctacacggtcccctcattttagcagcgcctgggcga

SEQ ID NO: 16487 - DNA, 376 bp, Homo sapiens
  source 1..376: mol_type = other DNA
ctggggtcagcctttcccccccggcatcaccctccatcttcggtgctgtagcaggacggctagcatcttaaaatctgagctcgtcaggtgctcaacttctgtcccttttaagggctcacagctctaagggggtccacgtgattccatacaatctctggaatctatagataacaacagctgctagtaggtcaggcaggcccaggcctggttaaaacagtatgagagggtctctgccatcccggtgggagttgtctggatccatagggttggagccacagataacagagccattaatctcggggtctcagcctctcttaacggaccttccaggcactgctgagaaaaccaggttcctgcggcagtctccagactccag

SEQ ID NO: 16488 - DNA, 336 bp, Homo sapiens
  source 1..336: mol_type = other DNA
gcatcttaaaatctgagctcgtcaggtgctcaacttctgtcccttttaagggctcacagctctaagggggtccacgtgattccatacaatctctggaatctatagataacaacagctgctagtaggtcaggcaggcccaggcctggttaaaacagtatgagagggtctctgccatcccggtgggagttgtctggatccatagggttggagccacagataacagagccattaatctcggggtctcagcctctcttaacggaccttccaggcactgctgagaaaaccaggttcctgcggcagtctccagactccagtctgtggcaagtgccagaacat

SEQ ID NO: 16489 - DNA, 350 bp, Homo sapiens
  source 1..350: mol_type = other DNA
cctggaatctcctggaccctggggacctgattatcctgaccccagccaggcctctggcccagcactgtcccaggaggaccgcctgagatcccctagtactgagagggggaacgggccactgagctgctccctccagtcctaccctgtagcacaactccaggggacacgattcggagtcggaatacagtgtgaatactgccacctgtcctgctggagggactaactacaggagacgcctcctggaggatttcactaggccttgaaggatgtgccgaagcccaccgcctggccaccaactggcagtgctgagaggacccagaggcaagaggccctctgggcaccgccgccca

SEQ ID NO: 16490 - DNA, 353 bp, Homo sapiens
  source 1..353: mol_type = other DNA
cacgccgcgtcggagccggacaggggggagtagggcgcgacggacccttcagttagcccgcggctccccgggctctccctggcgccgagtcccacccctcccggccctgggtccgcgcggaggctggtggcccgcggtggacgcggcgccctggctgcgagtctgcggagctgagcacgctcagcggttgtgtgtgtctcagcgactccctgggggcagctcggcctgctgggctcccgagggacctctctggagggccagagggtcgcctcagtctgctccaggctcgcgcacgcccggagcccaccccctcttttgggcgcgaggccccgccccccgcccccttgcctctg

SEQ ID NO: 16491 - DNA, 535 bp, Homo sapiens
  source 1..535: mol_type = other DNA
gattatcctgaccccagccaggcctctggcccagcactgtcccaggaggaccgcctgagatcccctagtactgagagggggaacgggccactgagctgctccctccagtcctaccctgtagcacaactccaggggacacgattcggagtcggaatacagtgtgaatactgccacctgtcctgctggagggactaactacaggagacgcctcctggaggatttcactaggccttgaaggatgtgccgaagcccaccgcctggccaccaactggcagtgctgagaggacccagaggcaagaggccctctgggcaccgccgcccagtcccgcgcagccccctgcagttcccaggggcgcgagagagggcgacgtagagcagcaccgcccagcggcagagcggcgagcccctccgcggctcggggtgagtcgggcgcggggcgcagaccgcgctctgacgtcgggggcggagcggccgtgacgcgcgggggcgggtctgcgcaccttcccggcccagccggcgattcattcaaaaggcg

SEQ ID NO: 16492 - DNA, 595 bp, Homo sapiens
  source 1..595: mol_type = other DNA
agtcggaatacagtgtgaatactgccacctgtcctgctggagggactaactacaggagacgcctcctggaggatttcactaggccttgaaggatgtgccgaagcccaccgcctggccaccaactggcagtgctgagaggacccagaggcaagaggccctctgggcaccgccgcccagtcccgcgcagccccctgcagttcccaggggcgcgagagagggcgacgtagagcagcaccgcccagcggcagagcggcgagcccctccgcggctcggggtgagtcgggcgcggggcgcagaccgcgctctgacgtcgggggcggagcggccgtgacgcgcgggggcgggtctgcgcaccttcccggcccagccggcgattcattcaaaaggcgcgcaggctgcgcggctgtccgggcgctcgccgagccgggccgcggcgccgagtcgaacggggagccgagctggagctgccgcggcgcagccaggtaaggagggcgcgcggagcgcccatccagagtctgctctccgcggccgggccagcgggatacggaccctagtggcgccccctgcctccccgtgtctcggaagttcgcgggct

SEQ ID NO: 16493 - DNA, 338 bp, Homo sapiens
  source 1..338: mol_type = other DNA
taacttattggccccaagatttcagtggtttaatataaaaacgatttgttgaattctcgcttcagtcttatgatgctgccatctcaacatgagatagaagagtcatatactagcttttaaattcttttgatcacaaggtggagatcgagaccatccccagctactcggtgagctgagcgcactgctgagacatgtcatttctgatagtcagtgatattgaatatcccttccctagggcaatatctactgaatgccttgaggtcagggattaaattaataaatgggcatatttttcagttcaattcaactaaatattattgaacatctgcaattccagg

SEQ ID NO: 16494 - DNA, 325 bp, Homo sapiens
  source 1..325: mol_type = other DNA
gtatatgtcacgtcttatttaagcacttttcgaaattgttcgatcatctttttaaggtaaattcttaaaagtagccgaatcgtcctcaaatttggatctagcccatcaaggcccacttctttttcttaacatggaggaagaaggaccacactccctgggaactgtagtaccgcggccccttgtccgtgaccggagagggcgcggcccctctgcaccgggctcgcggcgggaggcgcaggccgcgcgcgggctaaagcagggcatgccgggcccggcgctctgaggctgtgggacgtgtcgcggcgccgcgccggctcctccttcc

SEQ ID NO: 16495 - DNA, 276 bp, Homo sapiens
  source 1..276: mol_type = other DNA
ggggagagtcttcccctgaagtctccactgctgctggagatgccccactgcccatcggggaggggagcagtgggtcggggcaggacccaggcgcagatcctccgaggcactgggacgttccaggaacctggccatggcgatgcgcagccaggactggggtgatgggcgctgtcctgccagccccgcccccaacctagggaggaggaccagcccggttcctgtcctgcccccaggacgggcgacctcccttatctctaaggcgctcagggaaatgcc

SEQ ID NO: 16496 - DNA, 347 bp, Homo sapiens
  source 1..347: mol_type = other DNA
agaagtcttttaggccctgacatagatacagaaagtcttcctttctccggtaggggaaatttcgggtcgcctaggaaactgtgggaagccttcctgttgagaaaagtcaggctcatcttttccattgttaaatcacaccttgtgctccaattgaaactaggagcttggcttcctttttttctaggaactgagttcaatgattcttaagaaaaagtatttcatgataaatgagtgaacactgcccagctctaaagcgtcactccccctccctggggtgggcaggtccggagggcggggcccgggggcagctgggctctcaggcgctgctccggggcacacaaagcgca

SEQ ID NO: 16497 - DNA, 335 bp, Homo sapiens
  source 1..335: mol_type = other DNA
aagcgattctcctgcctcagcttcccgagtagctgggactagcaggatggtctcgatctcttgacctcgttgcaaaattgggaccatgattctggggggtgagaggcgctccacagctcgagggctgcgcgcgctctcacgctgccacctcactcgcgtgtgggctcgccctcaatgtaagtgacgtaaggggacgccagaacctaacctgccccgtcgccgccgtgcgggaggagccggtaggcgatggcgatggcggtggcgcgcacgcatgcacgcacgcacgcacgccagcggccggcggggccgcaggctcgcgcccgggctcgccccgc

SEQ ID NO: 16498 - DNA, 425 bp, Homo sapiens
  source 1..425: mol_type = other DNA
attttttttttcttatttaaaatttcacttctaaaaccccaatagcatttattaggcaataatcaatgaggtatgcctggtccattatatttccaagcataattaattgtgttacctcagtactttgcacacaattctggtatttcacttaccatactagatactaattatttgttactagatactaattattttttgctattatttgattgagttcctcaaggactgagatcctgactaatttattaatctgacttctaaactcaatttaagcacctgtaatcccagctacttggaatctcagtcttttaagaactttcaaatacagagaagcaaatcattagtgtataatattgtaagcgaaaaattagaattgtgtgctgaatttctagactctgaatttcagaagcttccggaactaaaat

SEQ ID NO: 16499 - DNA, 235 bp, Homo sapiens
  source 1..235: mol_type = other DNA
gtagctgggattacagcctggcatttgtccagtatgcctaatatagcattaggggcctaggaacttctggaagtaactgacgactaatcaatatttgctaaatgactgcttggccagctcatgtgctcccttggcctagtgagggcccttcccggaagtgagtccccgagacaccaatgaaaacgtgactttttcacattccccgccccttccgtgtgcacgctccccacgaggg

SEQ ID NO: 16500 - DNA, 432 bp, Homo sapiens
  source 1..432: mol_type = other DNA
ccagcctgggcaacactgtgagccgtgatcacgcactgcattccagcctgaagagttcaataaatgatagttttctcttcctaaatacactgttaactctttaaatagggccaggattttagttttcccattaataatatttaattcgcacaattagaatgaagattaatgaggcctgaggcgcctcaggcgaggacgcatgcgcgcgcgcggccgctgatcgcagccccgttgtgcccgcaacgcctcctgaagaacgcggtacgcgatgctcaccgaacaggtgggagaagagggcccgaacgcacgctcctacgcggcggcttgggtttcgcaggcggtggaaccagcccctcgtggggagcgtgcacacggaaggggcggggaatgtgaaaaagtcacgttttcattggtgtctcggggactcacttc

SEQ ID NO: 16501 - DNA, 440 bp, Homo sapiens
  source 1..440: mol_type = other DNA
tgaccattattacttaaactgtcaaggtcatcaaaatattaggttaaaacaactagtaaatctgaataaaatgtggattttagttaataataatgtatcaatattggtcattatttgtgacaaatgtaccatactaatgtaagatgttaactccaggcatggtagtgcacgcctactgcagtgatgtgatcctgccactgcccaccagcctgggtgacagagtgaagaccctgtctcaaaaacatgataatgataataataataataaaatacttttctaaactctaaaactgttctaaaataaatgtatttttaaaaaattagccaaatgcatttcttctaaaacctttttattaaaactaattactgctctctttaaaaacaaaaacaaaactacaactcccagagtgcagcaaccaaggaagcactaacagccttgc

SEQ ID NO: 16502 - DNA, 449 bp, Homo sapiens
  source 1..449: mol_type = other DNA
tgctgttgctcagcaatctcacagcaaatttgccgagcctctccggaatcagtgccacaaaaaaactttatcttttctttttttttttctggcaagatctcctcatggcagaaataatctgcctcctcattgtaaaatggaggttaataccagccttcttctaagagggcccaattgttggctgttcacgcgtcagttaccgtcagccgcgaaccaggcccgtcccagggctggacaggcagctggcctgggcccggctctgccttgtcacgtgcgggggccggcccgtcgtgaggtcacgctgggtgctcccgccccgccggggcctttagtgtcctggtccctaaacgccaggccgctccaccgggggagaaggcgcgaaccccagccgagcccaacggctgttgtcggttgccgggcatcgacagcgaggccggtcgcgaggcccc

SEQ ID NO: 16503 - DNA, 564 bp, Homo sapiens
  source 1..564: mol_type = other DNA
cctcattgtaaaatggaggttaataccagccttcttctaagagggcccaattgttggctgttcacgcgtcagttaccgtcagccgcgaaccaggcccgtcccagggctggacaggcagctggcctgggcccggctctgccttgtcacgtgcgggggccggcccgtcgtgaggtcacgctgggtgctcccgccccgccggggcctttagtgtcctggtccctaaacgccaggccgctccaccgggggagaaggcgcgaaccccagccgagcccaacggctgttgtcggttgccgggcatcgacagcgaggccggtcgcgaggccccagtcccgccctgcaggagccagccgcgcgctcgctcgcaggagggtgggtagtttgcccagcggaaccgtcctggtcagtcttgccatcctcacagaggttggcggcccgagcctaggcggggcggtccccgcggaaaggcggctgctccagggtctccgcacccaagtaggagctggcaggcccggccccgccccgcaggccccaccccgggccccgcccccgaggcttaagccgcgc

SEQ ID NO: 16504 - DNA, 255 bp, Homo sapiens
  source 1..255: mol_type = other DNA
acatggatgaattttgaaagcattactaattctaaaaaccatttgaattgtgcacttgaaacagatgaattgtacggtatgtgaattctatatcaataaatctgtaatttaaaaaaaaaaaattctctactaaaaaattttaaattacaaaaaaaaaaatcctaatagtacctatctcataggattgtggaaaatagtagtaatgtatgtaaaatatttagcacatagtaggcacaaacctttggactcaaaagt

SEQ ID NO: 16505 - DNA, 276 bp, Homo sapiens
  source 1..276: mol_type = other DNA
agctgtgcccagcccttactctgagtgcccacagatggagcctccagtagcttctgtggatgctggagtcaggccccgccacgtgtacatggatgaattttgaaagcattactaattctaaaaaccatttgaattgtgcacttgaaacagatgaattgtacggtatgtgaattctatatcaataaatctgtaatttaaaaaaaaaaaattctctactaaaaaattttaaattacaaaaaaaaaaatcctaatagtacctatctcataggattgtgg

SEQ ID NO: 16506 - DNA, 525 bp, Homo sapiens
  source 1..525: mol_type = other DNA
aaatatttagcatagcaagtatttgataagaaaaatacccttaaaagagtattgttaaatgtatttgccaataactcaggctttggttttgacacacagagcaacaaattgaattgacaaaggattgcccttgcacagctgcaagggttggaaccaagagaaatgaaaataaacttctcaactatactctataatgtatgcataaggaatctcagatcatttcagaacagtttaacttctggtattttcttaaccaaagttgagaaaatggttcgttttcagcatttgttaatactgtagtgaaaagcatgtaggaattattattagaagacttgtgattgtgttcaatatgagcatcactgctgttctgaggaactggggttgctgcaagcagagttggtaaatgactttaggcaaattacttgacatatcatacaacttgatatggtttggctgtgttcccataatccccatgtgtcatgggaatatcctgttctcatgatagtgagttagctctcacgagat

SEQ ID NO: 16507 - DNA, 362 bp, Homo sapiens
  source 1..362: mol_type = other DNA
taccattctccaacggctggggcctggcccatagggagaaggggtatgggtcacgtaccccattcgctctgactgcccccgctgccgggtagaggtgggcgagagggcatgctcttttcgagggccgacatcgagcgaagcttcgtcccacgttgagtgtggcccaaccggtcacactccgcagactcccggctgggaacccgacgactttcaccggaaggaggagcgctcttcagggcaatgcaccctgcgcaatggagtccacaaagggcgcatccctatgcgcttgcgcagctggaggcgccccccagccaaccccggagactgttagaggaagacctgcctcccaggctgcccagcgg

SEQ ID NO: 16508 - DNA, 349 bp, Homo sapiens
  source 1..349: mol_type = other DNA
cacagtgcagatattagaactctgataataccattctccaacggctggggcctggcccatagggagaaggggtatgggtcacgtaccccattcgctctgactgcccccgctgccgggtagaggtgggcgagagggcatgctcttttcgagggccgacatcgagcgaagcttcgtcccacgttgagtgtggcccaaccggtcacactccgcagactcccggctgggaacccgacgactttcaccggaaggaggagcgctcttcagggcaatgcaccctgcgcaatggagtccacaaagggcgcatccctatgcgcttgcgcagctggaggcgccccccagccaaccccgg

SEQ ID NO: 16509 - DNA, 235 bp, Homo sapiens
  source 1..235: mol_type = other DNA
catttaatgtataaacaaatgatattgtttcttcctgtccctgtggacctcgaaagctacacacacatgatgagcccgagctcttcttcaccacacggcgcctgcgttccccggcaaccggcgccgctgggcagcctgggaggcaggtcttcctctaacagtctccggggttggctggggggcgcctccagctgcgcaagcgcatagggatgcgccctttgtggactccattgcg

SEQ ID NO: 16510 - DNA, 203 bp, Homo sapiens
  source 1..203: mol_type = other DNA
cacagtgcagatattagaactctgataataccattctccaacggctggggcctggcccatagggagaaggggtatgggtcacgtaccccattcgctctgactgcccccgctgccgggtagaggtgggcgagagggcatgctcttttcgagggccgacatcgagcgaagcttcgtcccacgttgagtgtggcccaaccggtcac

SEQ ID NO: 16511 - DNA, 303 bp, Homo sapiens
  source 1..303: mol_type = other DNA
tgtataaacaaatgatattgtttcttcctgtccctgtggacctcgaaagctacacacacatgatgagcccgagctcttcttcaccacacggcgcctgcgttccccggcaaccggcgccgctgggcagcctgggaggcaggtcttcctctaacagtctccggggttggctggggggcgcctccagctgcgcaagcgcatagggatgcgccctttgtggactccattgcgcagggtgcattgccctgaagagcgctcctccttccggtgaaagtcgtcgggttcccagccgggagtctgcggagt

SEQ ID NO: 16512 - DNA, 262 bp, Homo sapiens
  source 1..262: mol_type = other DNA
gtgttgactctgtgtaggcagcacagtaacacaggtactaataaatatttgttgcatgaatgaatagcctagtaggctataataataataataatatttttatttgcttaagtgactctaagtatattgtgtaaagcagtgactttaggaccccagagcttcaggttctgtaagtccccaccacccggtggacgggacgggccgggccggggccagagggcggggcctgagccgggcggggcaggcgagggcgggagcggct

SEQ ID NO: 16513 - DNA, 506 bp, Homo sapiens
  source 1..506: mol_type = other DNA
ttactatagcagcagagatattagattggtacaaaagtcattgccgtttttgccattacttttaatgccattatttttaatggcaaaaacagcaattacttttgcaccgctcacgaactcggcctcttaggagtttctttgtgtgtgaaacggaaaaggactacgcccctgtaccttactgcactaaacggagaactacctcgaggtagatctttttctagtctcggcggcggtctccgctgagctcagactgaggcagtgcgcggacagctcgcactgcccctcctcccccaaccggcgcgtgcccccaagagaaactgggggcctgcgcgcgcgctggggacctgcagggcaagcgcaaacacccggacgggctgtaaacccccactacttcggaggcgtggggagcgcgctcccgggctccagggcctaaggcgcggggcggggccgtaggcggggcgggcggcggcggcggcggcggagccaggacccagacatgttctctc

SEQ ID NO: 16514 - DNA, 505 bp, Homo sapiens
  source 1..505: mol_type = other DNA
gagtaaatctctcagtttggctcgactgggatattagatcatcttaaccgagtccacagccttctctatcttgggatttgagaagctctagaaagcccccaaacatggtttcatgattcgtatcatcacagagctgagctggtcaccgtaaagtgagggcatatagcctagatgggctctgaaggcccttccagagtgtctagtgccaagcactacatgatgttatcctgtctatctgaatagattgggtggtaacacatcatttgttcctatgtaaaatatcaacccagctgccagttggcattcccttgggattcgaaaaggaccttgctaaggtaacccttaggaaagggaatgtcacattttaaacaggtttctcatgaagtcacccagtgaagacatttggtcactgctgcaaccctaggctggcctgacccagctgctgcaggaaggggaggggccgcaggactgttgcataatccttggggcctggccttgggcaatc

SEQ ID NO: 16515 - DNA, 349 bp, Homo sapiens
  source 1..349: mol_type = other DNA
ataccaccttgtagtaggtctttttaaaacgatctgtaattgagagtatgtgcttcagatatcctggagcagacctttgagggtcccccggagaaattctaagaatcatattattttgctgttgaccctttggttttaatactttggactcaaaggtctcgtgaggggcagcgactcgccccggcctcatgctgggcttgctgaggcccagcggagcgagaggctttcggtctctggtccaggaagcaggcgctgcatcggagcccacagccgggggaggccaaggagctgggcggaggcactccaggccagcccggggagaagtgggtgtgctggggcccgggcgggg

SEQ ID NO: 16516 - DNA, 455 bp, Homo sapiens
  source 1..455: mol_type = other DNA
gaatgaatgcattattcccattttatagataaggaaataggctcctagtcccagtaagtctgactttattaaactaggagaaatttgagttgaaattccccaacctgatctcaactctgagggattataacaggcagtacggcagcactactaaaattgggtttcatcacgcgcagccaacctcggtagggaaatattatacccaatgacatctgttgagagaccatattcactaatgtttattacagtataataataattgttctattttatcgttagttatttttgttaatctcttactgtgcctaatttataaattaaactttatcataggtacgtaggtataggaaaaaaccagccaggaggccccgcacttcggtgttttctgagggccgccgtagtgcgtcgcctccgttgccggggaaacgacccgggacctgggagggagcaaagac

SEQ ID NO: 16517 - DNA, 527 bp, Homo sapiens
  source 1..527: mol_type = other DNA
agatgactgaaggtgaccatcactcccagagaagtgcaggcctcacctgcaaaggcaaaggagagatcttgccaagatagtagagatattttaagatcttaaaatgcccattttaaagctgggatgaattaagaacgccagtgtgagttccgggcacgcaccgccgagcgaccctgagccttcccggcgtcgcggggagtcaggggttaaaccccgtggcccgcgtggcccctcgcctccactcggcgccgcgcctggagcgtccgtcccggagacccgcacccaccgagcccgcggtgccccagaggaggcgccagcgctaggccagcgccaggccgggctgcctgcttcccgcggcatgcgcccgagcgcggcgcctgaagcccttggcgagcacagccggcccgcgctcagcctccctccgcggccgccgcgccgccgccgctgctgggaccgccgccccgccgggccccaggcccccgcggcccgaccccgagcccaccgagcagggggcgccggccgcctct

SEQ ID NO: 16518 - DNA, 482 bp, Homo sapiens
  source 1..482: mol_type = other DNA
gtgcatgtgttcattcaacacaagagatggagcaccatttgaggagggtgtcagggccctgtcctcagggagctcccctgtgggaaagaaaactctttgacaatcagctctccctaaagatgactgaaggtgaccatcactcccagagaagtgcaggcctcacctgcaaaggcaaaggagagatcttgccaagatagtagagatattttaagatcttaaaatgcccattttaaagctgggatgaattaagaacgccagtgtgagttccgggcacgcaccgccgagcgaccctgagccttcccggcgtcgcggggagtcaggggttaaaccccgtggcccgcgtggcccctcgcctccactcggcgccgcgcctggagcgtccgtcccggagacccgcacccaccgagcccgcggtgccccagaggaggcgccagcgctaggccagcgccaggccgggctgcctgcttcccgcggcatgcgcc

SEQ ID NO: 16519 - DNA, 141 bp, Homo sapiens
  source 1..141: mol_type = other DNA
ttggactcaggaggcctgggctgcagacagcaactgagtaactcctctttcagttcagtaagaggaaactggcataataaagaataactaataaatattaatgaagtatcccgtctgaggagaaccctctttgggctcaca

SEQ ID NO: 16520 - DNA, 202 bp, Homo sapiens
  source 1..202: mol_type = other DNA
cagttaaaaaaaatttttttggatgaaaaatcttaaaggcttcttgtctcaatactcaaatattttcagtattcgcctatcatgatatgggcactgacaacgggatgggaaggttggctcgccgcctcccaggcctcccctccgacttgtctgaagccgattggctggagctgacagcgtgacgcgccgcgcggagtcaatc

SEQ ID NO: 16521 - DNA, 403 bp, Homo sapiens
  source 1..403: mol_type = other DNA
aatattggtgctcaatatacatttgtgaaaaaaattaattaaaatacaacgtaatagagcatggtataatacaatactgctatttgataactctgtcatggagtagtagtccaccacaatattggtgctcaatatacatttgtgaaaaaaataattaaaatctagaatactattacatcctaattttttttaaatgccggcttgaaaaccgagttcagatacgatactgcctggcagactgtacctccggcgtcgcttcagcctccgaggggtctgcggaggcgacgtcccagtcaggagggatgcgcgcctgcgagccccccggggatctcggagccgctccactgccgattgactccgcgcggcgcgtcacgctgtcagctccagccaatcggcttcagac

SEQ ID NO: 16522 - DNA, 423 bp, Homo sapiens
  source 1..423: mol_type = other DNA
acaggattttttttaatgagaaaaatatcacgaattcaaatttacagaagctttacatttttatgtgtaaaatttcttctttttaaaattgttatattttagagacagggtctcgctctgtcacccaggctggagtgcagtggtgcaatcacagctcaccacaggtaggcataagccaccaggcccagccttacctttacgttgtacttagtcccagataaaaaatgaccttagatcagtcctttcctagaagaatggactcagtgctatgtgacaaatctatgtatgtaaatgtgtgtatatacacacacataaattatatatatgaatatattttcattttcatattttgggcgtgccggtcccacgccgtggtggggaccgagctgcggtaggccaacggttggccccaaccgccactga

SEQ ID NO: 16523 - DNA, 512 bp, Homo sapiens
  source 1..512: mol_type = other DNA
agaaagagagagaaagttttttttcacaccaattcttaccaaagaaagaagagttagttagtcttcttcacaccatccagaagtaaacattattactgatttggtgtttttcttttaatgtaaattgaatcattctgtatttattgtatagcatattttaatttaataagtctaggaatgatatttggcattttgtagtacagatacaacatagtttgtctaataactcatctgttgatgaacatttaagttctatctcattcttgctattatgaaaactattataattaatttccttttaacatgcatttggggtcacatgtgctcaaatatttctcaaatggaatggggtgtgcatgtgcagggactatcccagcttcaaacccagaagctttgaggatgctgagtcacagtgatgactgagatgaccctgttacacccggcctgatgcttctgcccaggaccaggggaaaacccatgcatgaagggttcatttcagcctgcagaagaga

SEQ ID NO: 16524 - DNA, 341 bp, Homo sapiens
  source 1..341: mol_type = other DNA
taaaatcagggaatgggaaaggcaaagtggatttgctttcccgggattactgtcccttctttatagatgagagaatggacgctctgaggtgggacccagatctctctggctcaggaaactctgagaatttcatattttctgatggaccttctaccatgagctccacccaggcaggctgccactggatacctctatggggccctcctatcattggggagcttggggagacccatcagcatcccccctgtgcccccacctctctgctgctaacagagcaggggggctgaggctgagcctcagggaggcggggtgcagcttcctcttcacagagaggctggact

SEQ ID NO: 16525 - DNA, 623 bp, Homo sapiens
  source 1..623: mol_type = other DNA
aaggaggcagaatcctgggctcctcatcacccagactcaggtggtgtggagaggctgactctacccatgaagggcagccccttgaagggtgagtctctgactgaccaagtttgtggctgacagactttcaggaacttgtctgactgtcttatgaggagctgcaggcaggtggctgactgacggcctgaacggacagctctcctgaaagacagtagcccgccggctggctggcttaccagcaggtggagtgaccgactgacagtcagacacacagacccattgcgggccagctcgggctgtgggtccctagcccctggagccacctggcctacagagagggactgggttttttaaactagggcctggctctctgccctcctgtcaggggtggcccctgacaaaggccccacagcacagggcagggtctcagtgcccttccacaggaggacacgcagtcctggactggaccatccttccaaggggagttccgccctgagtcttgctgtcagcgcgtcagcagagaccccagcccgctcggagggggtgggcagcctgcctgacaagccccccagtgcttccctcccctgcccagaggcacaggctgtggacaggataaagtactc

SEQ ID NO: 16526 - DNA, 232 bp, Homo sapiens
  source 1..232: mol_type = other DNA
gaagggcgggcccatgggaccttctgggacttctgttacattagttgagacagagtctcactctgtggtccaggctagagtcctcccacctcagcctcccgagtagctgggattacaggtgcagtgtccaccctgaaagtgtattgcttgttttgaaactatgagaattgaactctaaggtcccctgaagtttagaagcaggcgtgcacgcagcgcagccctccgtcgtcgc

SEQ ID NO: 16527 - DNA, 490 bp, Homo sapiens
  source 1..490: mol_type = other DNA
tccggacatgggttctcagaagctgtgcacagggttggagctgggcatgggcgcacggtgctacccggtcacagcagcgggccagctctgccgggcggcctcctgcagcccctgctggccgcgggtcgaaggccttgccaggcatcccggggtctccagctaagcgaggggccgcagggagcgcggcctcggggtcgccagaccctcggcttccaaccacccgcacggctgccccggcatgcgcgggagagcgcgctcgcacccacggccgtgcgcacacacgcacaggggccctgacgcgtcccgccgcgctgccctgcctcgctgggcggcgcgcgcacacgcagacgccccgcgcggttccacgcccctggccgcggcccgggcgctgcgctgctcgacgcggcgggcggcgggcggggaccgggggcgggggcggcggcggcggccgggagaggcggagcagggagccgggagcgggctggcccgc

SEQ ID NO: 16528 - DNA, 558 bp, Homo sapiens
  source 1..558: mol_type = other DNA
actgggtctctgtggggcagcctgagtcccttgacccagggcttcagctcctgtcacgggacaccccggggcggccaaggcgccctgcagatatagggctgtcgcctctcccgggcgcagccaggtggcttccccggcaaggccatgcgccggaggagtcggagccgggctgcgaagcgccgtgcgcgggtccgtgccacgcgcagcgcgtgctgcaggccctgaacgcctaccggcggagcggcaccctcaccgacgtggtgctgcgcgccggcgggcgcgactttccgtgccaccgcgcggcgctcagcgcgggcagcgcctacttccgcagcttgttcgcggccgggcggcccgagcgcggcccggccgtggtgccagtggtgccagtagctcccgaggcgccaggcacgagcccggccggggcggcggcggcgctggccgtggtgctcggagcgggcgtgcggctgcgcgcggaggacgaggcggcggccgtgctggcgctggcggagcggctgggcgtggcgggcctgcgcgaggcctgcgtgcgctttctcg

SEQ ID NO: 16529 - DNA, 326 bp, Homo sapiens
  source 1..326: mol_type = other DNA
gcttgacaacccgagtagctgggagtccatcagctgatcaatggataaacaaaatgtggtagatccatacaacagaattgatccatgctacaacatggatgagcctacacaaaaggtcacatattgtatgattccatttatacgaggtcttacaacttgtgaatataccaaaaattgaatactgtatattaaatactgaattgtatactttaaaagggtaaattttatggcatgtgaattatatctccattttttaaatgccctctcagggccctaggagcctttgtgtgtcctgctcacattgtctccagggcctcggacagggc

SEQ ID NO: 16530 - DNA, 359 bp, Homo sapiens
  source 1..359: mol_type = other DNA
tttggacctgcctgaggagggcccatgcccatgcccaggactgggggcacctgagctgaaagccaaagtacagccctgggaccacaggtgtcctttcctgacctctgctgtctgtgggcaggagtcagtggtggtgtcagagcaggcctgtaactcccctccccagctccagcctgcatcatccatgcttcctgggagccaagggacgtgtctcttactgggcccccacaacctcgaggaccggtggcaagtgctctgcttcctggggcagaggtcagctcccgcctctccctgagctcaagggaatgagactcagagccactgtgccccctccctcccagggctagtccaagagtgga

SEQ ID NO: 16531 - DNA, 248 bp, Homo sapiens
  source 1..248: mol_type = other DNA
gccaagattctaacttgtgtagttcgactcctggtccagggacctgcaggtccaaggccccaggaaatataaagagaccatggcttctcaaacattaaagtttagaggagaagccacttaataaactgtaaagtgctgtacattcagggcactgctctggttcacacacagaggtgtgtgtcaggtcccagccctggctctgcctctgatgtaggtaggcctccgaagcctgcaatgctggtctgcaa

SEQ ID NO: 16532 - DNA, 465 bp, Homo sapiens
  source 1..465: mol_type = other DNA
tcgaggctgcagtgagccgtgatagtgccactgcactccagcctgggccacagagcgggaccctgtctctcctgcacccaacgcgcggggtgggaaggggccagatgcatcacgattcgaagtgtgtgtcctcacacaaccacgacgctcctcctcggggatgggcgttcgctcatttccaaaaacttatttttctgagcgccgagcacggcatcccaccactcaggagggctcgctccagcgtccctgggacccctgaccccggtccgcagggcgccgctccgctcccaccctcggattggctcctgcggccccacgcgcgaggcccgggaaggggagagggcgcgcaccccgcccctgcccgcagccggccgggggcggggtctctgctgactccgccccgtccgggcggggccgcgcaggctggcgctggggcgctgggcggcgctgtttcggctgagctcg

SEQ ID NO: 16533 - DNA, 300 bp, Homo sapiens
  source 1..300: mol_type = other DNA
catcgcacagggcaaggactttgttcagctctcagctgtgtcctcagcacctagaacagtaatgcacgcaccttgctcagtggagagccaggttttctttccgggtgccgggcaggtaccgggtctggtctgcttgccttcagaagcctgaacgtctcccctgagagggagggctctgcttggggcagagcccctgcggaggaagctcgcggacacgctgatccccgtggggactcccggcgccccgcagcccgggccgccgagggaggcagtaggacccaggggccgggaggcgccggc

SEQ ID NO: 16534 - DNA, 319 bp, Homo sapiens
  source 1..319: mol_type = other DNA
ctttgttcagctctcagctgtgtcctcagcacctagaacagtaatgcacgcaccttgctcagtggagagccaggttttctttccgggtgccgggcaggtaccgggtctggtctgcttgccttcagaagcctgaacgtctcccctgagagggagggctctgcttggggcagagcccctgcggaggaagctcgcggacacgctgatccccgtggggactcccggcgccccgcagcccgggccgccgagggaggcagtaggacccaggggccgggaggcgccggcgggcgccctccggaagcgtttccaactttccagaagt

SEQ ID NO: 16535 - DNA, 407 bp, Homo sapiens
  source 1..407: mol_type = other DNA
ctctgcttggggcagagcccctgcggaggaagctcgcggacacgctgatccccgtggggactcccggcgccccgcagcccgggccgccgagggaggcagtaggacccaggggccgggaggcgccggcgggcgccctccggaagcgtttccaactttccagaagtgtcgcggctcgagagcgagagtcacgtcccggcgctagcccagcccgacccaggtgaggggcgggagacgcctgcgtgcgtgcggcccgggggagcgccgagcaatctgggggccagagcctacaaattggagtcctcggcacgcccagggctagcctgagggctaggagtccgtgcactcctggtgcctcttcccgcagggaggataggccggcccaggggcagcggtgattggtggcccag

SEQ ID NO: 16536 - DNA, 501 bp, Homo sapiens
  source 1..501: mol_type = other DNA
ggaaagggcaccaccagccctggtgctcccattgtcaaacacagcccgccggttttgaccaattttttaaaattgggacagaaagtcctcacgagcttgggacttgacctacgtccccagattctgctgttgcccgggagcagcgcaagctgacgacagcaggtgttttgctgagcagcacgcttccctgcagcagaggcagaggcggcggcggcagcggctgcagcatcattcgcgggcagcggcggagaccggagaagaggcggtggcggcggcggctgcggcatcctcgcgggcagcggcggaggcagcaatgctcggtctccgctggaggtgatggcctcccagccctgctaggtggccggctgcactaggacgccggcaggaaggagactcgagcccggtccgcggaccctgcggccacaccgcccggcccctccgaggtctgtgcgccgccgcagccgcagggaggggcgcgtcccagacaccctcgccggggac

SEQ ID NO: 16537 - DNA, 364 bp, Homo sapiens
  source 1..364: mol_type = other DNA
ccggcccacaaaaccatttttgaggcaggtagtatttcctccattctacagatgcgacttcaaaatctcttctgctttgaagatagaagagaaggcccctgcaggccaggcactgccgtttcctagggcacagtgtggcacctgaactgaacagaccttcgcaaagattccctaggaaaggaacatccagggcaccaccagccctggtgctcccattgtcaaacacagcccgccggttttgaccaattttttaaaattgggacagaaagtcctcacgagcttgggacttgacctacgtccccagattctgctgttgcccgggagcagcgcaagctgacgacagcaggtgttttgctgagcagca

SEQ ID NO: 16538 - DNA, 251 bp, Homo sapiens
  source 1..251: mol_type = other DNA
gcagagctgcacagatttggaagtctttgctaatacaatgcaaggtgtgagcctggatgagatctcagagatgctgccaatagatgagatcagggaacttgccaaggcctgaagtgtggaccaccatttgtggtaccacagatgggacaggacaaggttatcctatccattgaccttggggccaggctgcctagttataggaaggacaagatttaagcagctgggtgtggcactctccctgccagcttcta

SEQ ID NO: 16539 - DNA, 500 bp, Homo sapiens
  source 1..500: mol_type = other DNA
ttaatgggcaaaccattctggaatgcacttctcaaagtacctcacaaaaataataattattattcccattttacagatatggatggactcctagtctatcccccagcccagggcagagtcttctctactcccagtgactgtgtgcggctgtctctgctgccccccagcgtgagcatcccaagggcagaacctgggctgatctggctgggtccccagcacccagcagggtatctttgttccccgcccgggtactggccgccgggccgtaccaatctccgcgggggagcgcccggggtcggactgagggagcgaggggaataaccgggcgcgccccttggaagcagggctcagagctgctctcctctcacgcattccccggatccgcgcggagcaggctgctggccagccccgggcccgcgccaagcagagcctcaggtgcggcaagtggcgcgggcggcggcttagaacggcccgccccgcccgccgcgtcggcgcctgcc

SEQ ID NO: 16540 - DNA, 583 bp, Homo sapiens
  source 1..583: mol_type = other DNA
tggactcctagtctatcccccagcccagggcagagtcttctctactcccagtgactgtgtgcggctgtctctgctgccccccagcgtgagcatcccaagggcagaacctgggctgatctggctgggtccccagcacccagcagggtatctttgttccccgcccgggtactggccgccgggccgtaccaatctccgcgggggagcgcccggggtcggactgagggagcgaggggaataaccgggcgcgccccttggaagcagggctcagagctgctctcctctcacgcattccccggatccgcgcggagcaggctgctggccagccccgggcccgcgccaagcagagcctcaggtgcggcaagtggcgcgggcggcggcttagaacggcccgccccgcccgccgcgtcggcgcctgccccgttgtgagcgctccgggacgccagcgccgcggctgccgcctctgctggggtctacgccaccactggccgccggccgcagctccaggtgtcctagccgcccagcctcgacgccgtcccgggacccctgtgctctgcgcgaagccctggccccgggggccggggca

SEQ ID NO: 16541 - DNA, 186 bp, Homo sapiens
  source 1..186: mol_type = other DNA
actccagccagagaggctcagagaagccttttggaagccgacggttctcaggtcccaaagcatcagcgatcgccacccagctggcttccgagggtccccgccctccaccggaggcctgttaccacggcaaccagtgagtccccgcccccttgagggctaagccaatgagcgctccgggtctcagcg

SEQ ID NO: 16542 - DNA, 345 bp, Homo sapiens
  source 1..345: mol_type = other DNA
agcatctgtgagatgaggcagcgatagaggctagagtgcagtggcgctcccgagtagctgggattacaggcgcccggtctcgagctcctgacctcaggtgacccgcaccctgcccggccagggaacgttctttaagccccagctccggggtccctccttccggctgccccggccagaggggctcgaaggcgcgttggggcccggggccacgctgggagacacgccttcggccgcgcctaattcgagccaggcgcgggacgcgtcccccggccgggcggagcgggaggggacgcccgccgcgctcggcctccccgggccccgaccccgcgcgccgccttaacccgc

SEQ ID NO: 16543 - DNA, 283 bp, Homo sapiens
  source 1..283: mol_type = other DNA
tcttcatgagaccttcaataattaattgaactaattaataaataacataaattataagctttctgcaagcagcattgattttaaacagtggccacaaccatagagtcctgctctcttgccacggcgagaccccagcatcccgcgtccgcgcgccgccccagctccctcgcgtttggggtggtgtcctccgcgcagagcccccaccagcgcacgtgctccgaggtccccggacgcccgcccgcccacggctcggggccggctccccatctcggtccaacgctgg

SEQ ID NO: 16544 - DNA, 418 bp, Homo sapiens
  source 1..418: mol_type = other DNA
ttttaaagcaaaatttgatactaatatcaatctttatagggctgcaggtgtaatcatatcgctcttcttgctcttctcgaggctgggcgaattctgcaaaaggcccaggaaccgcctgctctagcgtcccgggagacaggcgcgcatgcgcaattctctctccccgcggattagactgtgcgcagtcgcactgcggcggcgcgcgccaggtcccgcctccgcctcgccacaccccggcaggcgcgcttccttgcgcgtgcccgcctgctgagaaggcggcccccgggcgtccagcgtctcgggcgggcgggaggtgcaccagcggcggcggcggcggtaaatcctcccggccgctcacagcactgtggagccgcgtccccagcccggcctcggaccgcggcacccctcctggccctcg

SEQ ID NO: 16545 - DNA, 408 bp, Homo sapiens
  source 1..408: mol_type = other DNA
tgactttcctgtaggaaacttaaatgctgttatttaccttctaacatgaagcttacaacgtttacgtggtgcatcacaaaaactatgtctggaaattgtagaatgcacattaaaaactctttctgacgagcgtttctgaagtcaatcacaagatttcattgaatcttcagtatcaggcaactggcttctattttatggccgcaaataactatatattgggccccttttctcacctgtaaaataggaacgacccttgacagagatagcacgagatagtggaggaaatccaacgcgagaacgctcggatttccccctcaagatgccatctggggggctagaggccactaataattgccctcctcttggccgctacgtgtgacgccacacgtagcagagagcgcagccgag

SEQ ID NO: 16546 - DNA, 807 bp, Homo sapiens
  source 1..807: mol_type = other DNA
agtggccacaaccatagagtcctgctctcttgccacggcgagaccccagcatcccgcgtccgcgcgccgccccagctccctcgcgtttggggtggtgtcctccgcgcagagcccccaccagcgcacgtgctccgaggtccccggacgcccgcccgcccacggctcggggccggctccccatctcggtccaacgctggggtcgacggcagtgcgctgcgcccgcctcctgcgcccctctcagccagcccgggagcccgccaggggccggcggctggcagcgctcaccgcgaaggtgggcccgggccgcccgctctgcgcccgccgcttacctggcagggtcccgcgggaacctgaagaaggccaagtcggactgcgtgctcttccgcgtgcagttgggggcagcgcagaagttcggcatcgtcgcccgcccgccggccggcccagccctctccccgcctcctcagggcagtccgcccgcccgtcggggccggggaggggagccaggccggccggccggctcggcagggccgacgcgcgggggaggggcgggcgggctcgagggccaggaggggtgccgcggtccgaggccgggctggggacgcggctccacagtgctgtgagcggccgggaggatttaccgccgccgccgccgctggtgcacctcccgcccgcccgagacgctggacgcccgggggccgccttctcagcaggcgggcacgcgcaaggaagcgcgcctgccggggtgtggcgaggcggaggcgggacctggcgcgcgccgccgcagtgcgactgcgcacagtctaatcc

SEQ ID NO: 16547 - DNA, 424 bp, Homo sapiens
  source 1..424: mol_type = other DNA
cattaaaaactctttctgacgagcgtttctgaagtcaatcacaagatttcattgaatcttcagtatcaggcaactggcttctattttatggccgcaaataactatatattgggccccttttctcacctgtaaaataggaacgacccttgacagagatagcacgagatagtggaggaaatccaacgcgagaacgctcggatttccccctcaagatgccatctggggggctagaggccactaataattgccctcctcttggccgctacgtgtgacgccacacgtagcagagagcgcagccgagctaaagaggttggagtttggattcggaccacaactcccagcatctgtccttttctttcataacgcggaggaaaagaaggacaagatgaataggccttttggtgtcgactggccgcgcgcggct

SEQ ID NO: 16548 - DNA, 478 bp, Homo sapiens
  source 1..478: mol_type = other DNA
tgtaggtgagctaaatttgagatgatagaacagatttttctattattttgttaactcttactttatagttattatcccattaaaaaaacaaaacctcttaagttttagaggctaatagcaggatccaagcgtgattcttgattcagtttattttctgcattatcacccagacctttagatttttaggaactgtaaggttgtgatcacttaatacaaaggagtgaatgctactaatgtttttattgcataccaagagattaaagaatgtgtattgccttactttccttaaagatattattttgggattacagaaattgattactgctttgttaccttaatgggatgaaagtctgttattggaaacagtctcagagaagataagagactttcttagagtcacacagctcatagactgttgtggtgatttctggagaaatatcatggaccctgctccagcatgtggctcagtcacagaccg

SEQ ID NO: 16549 - DNA, 652 bp, Homo sapiens
  source 1..652: mol_type = other DNA
cccgccggctccggataaaccgaggcacggggccaggcgctaggaccccacggcctcgccagaggggggcgtggcggggcgggccggcggttgcagccggagcgcgggggctccggtggggcagctgagcggcctgctcctcctcgggccgtgaccccggggtctggcgcggggtgggacccgggggcgggtttgcgcaaaatgtgccgagactgcccgggagaggagctgcggccgcgctgagccaggtaggagccgccgggcaggcgaggctggccggccctcggggggcgcactgtcgcgcgcctctagcgagcgcaaggcgggggctggtcccaagggacgccccccaaacactcccctcccgccatccccactgcgcgcgtggagccggggctgaccctccctcggtccctgggagttccccagcctttcccgcaaaggggtgaggccggccttcccatttgacagctgggaaaaccgtgacttgcccgggaaccggaatttgaattcaggtttcctgcaacgctccgatcccagccaggcgtggggctgcccatcccacagcactagatggcctgcccatttctcgtagtggggtagggggcacccaccgcttgtgaggggcccccacccccagaaattccgacct

SEQ ID NO: 16550 - DNA, 544 bp, Homo sapiens
  source 1..544: mol_type = other DNA
tatttgcacagtactttaaaaattcgggcaagataatgcccaaactgaatcagacttagctttatgaacagattgggctcaaatcactgattcaggttccccagctataaatagggaccttactagtctcagctttgatggtgccgtttcacaggctgggacggcttggtgcggggaaccccctccgcggccgccccagggccagcgaagggtctgtttgcccccgcgttaagtgcggcggcgccagcagctgggaaatcggggccaggccggatttcctctgtggacctgcggctcctagagccaccgcgcccccctccggaccccgcggggccgcgaactgcacgtgcggcggccgctgggatgggcctcgctcccacggcgcggcccccgccccttcccggccgaggtcccagggtggtgaagatgcttcgccgccccacccccgcccccgccggctccggataaaccgaggcacggggccaggcgctaggaccccacggcctcgccagaggggggcgtggcggggcgggccggcggttgc

SEQ ID NO: 16551 - DNA, 384 bp, Homo sapiens
  source 1..384: mol_type = other DNA
cggggtgtgtagactgggagccacccacacacctgccctttttttttttttttaacataaagaggggtgagctgaaactgctgccgaactctaaccagaagccaatggtttcctcctaaaagaaaaactcaatctgttacctctttcactctttaaaaaaaaatggggagcgggagcagcgcacttttgagacgctccctagagtggaacccgggctcggctcaggctccgcgggcggggcgcgcgccgagagaggctggcactttggcgacactccctgagccgccccgcggccggcccgagccgccacccggcgcccggcaggggggagcctggctgcgggcggggaccggggggcgggccgcgccgcgcggagaaaagcgc

SEQ ID NO: 16552 - DNA, 486 bp, Homo sapiens
  source 1..486: mol_type = other DNA
ctcccacctcagcttctcaagtagctgggaccgccgtctacgatactcccagacgggggcttggaggcccaaacgaagcagggaacagaaaatcacggtttatttcctgagaatcacggggatccatttgaggcctgtggctcaatggaagacatagagatcaagcaagggcttgatagaagtattcatctcctgacagaatatagcggccattggcgtgtctgcaccggccaggaagcccaggcccccggctccttcctggatcacgcccctgccccgcccaagggtgaagaggggcggggccagccggcgccctccgagtgggccttacaccaggtcgggcctggcccggccccgcggcccagcggcgccggtgggcggggcctccgtcagggcagtgtcagtaacggcgccaggccccgcccctcggggaggcagggccgggcggggcgcgagcgagcgcgcgggctgggccggagccggcct

SEQ ID NO: 16553 - DNA, 705 bp, Homo sapiens
  source 1..705: mol_type = other DNA
ccaccagcgagtgggccgatgggctcatcagatcagatgggcgtctgtcctgctgcctcagggcggggggtggtggcacccctgagaggaaatgcaggctccgtgccatctgagcccgagcccgggagcccatggcagcacgggattaagtcctcaacacgggccggggtcagttttcccatctgacagaggccctctgctgctcacaggggcccacttctccatccgaacacttgggatggatgtgaaggtggagcccggaaagggaggggcgccgcccaccaagtcctggttctggcaggcaccctggcccttgcgggtcctcggtatacacgccggccccaagtcagccgcggccccggcccgccctgtgggggctgaaccccagccccggcccgatccctcacggtgcagccagcccttgggaggctgcccatggggatgcgcaccaaccgcaccgagccggtagaggcggtgggtgccgctaggggccccaagtccgcgttcaacacaggggctggaatgagaccgctcctctgagcggccgcccaccgcaccagtgcgcatgggcgcacccggccaccgggccgcccaccccgccccacgggagaccacgcctccggctcgcaacgggcaaatgggcggaggccgcgggcggggcggggcggagccgggcccagctggccgaacccggggaatgcgagc

SEQ ID NO: 16554 - DNA, 479 bp, Homo sapiens
  source 1..479: mol_type = other DNA
cccgcctgacggaagcagctgggcagtggggcctgtgaccagcaggcggcgctggcgagctatagcgcccctttgggcccccagggcagcttccctgcagacaccccagttatgggggctagggaccctgccacccagagctgccctggcgaggtgcactatggggccgccgacagctgcgtggctgccgagggcgccacccaacccgcagagcaggttgtgggggcaatgttggcgcagaaggcagggctttagctcagcactctccctcccctctctgagtcccaaacagccaggtcggtgcggtttcctgctcaggtgctgagacagcagaggcacctgaagctagcctggggggcccacgcccaggtgcggtgctgtcggcagccagtgctctgcacagagccctgagcagcctctggacattagtcagaccttggaggccccctccggctccgcctcctgggagaaggctctgg

SEQ ID NO: 16555 - DNA, 654 bp, Homo sapiens
  source 1..654: mol_type = other DNA
gaccctgtttcaatattaataataataataaattaaagtgtctctttgtcattggcttgataaaatgggaccccatgagcccccattttatagttaatatggcccggattaaaactcattataaaaaaccttagttttaaaaagggtgattatcaattttgcctatgctcaaatctggaaatatatatatatatatttatgtatatacattttaatatagatttatatttttgaatatatttatatattttaatatataaatgtaatatagattttatctctattttaaatatataaatgtgtatatatggtaccctgtgatggatcactacaacttaacattgtgatcctaatattaaaattaaactgattttattcaatcaacaacaataaatactttttccaggcaacttgcagggggcctccacatgagggccgtcatcacacactgtctttacagacaagatgcaccttctccaggagcacaggtacgatactgcacctggattccagtgattctcctgcctcagcctcccgagtagctgggatttatttttagtagagaatctcctccaaggatattcaagtcactggtggctaaggaaggctgccctccccctcttcaccttacccctaaggaggaggggtgatgtc

SEQ ID NO: 16556 - DNA, 431 bp, Homo sapiens
  source 1..431: mol_type = other DNA
attttaattacttattttttcatacatttattcattcaacaaataccttttgaatgtctaccttcatgtatgtgacaggcctgtggggcaggcagacagaagttatgtgccttgcccaaggtcatatagctaggaagctgggactcagcctgaagctgaatacgggctggtgagcctccccatgggctgctcttcttccagccttgctgccatggcagtgggactggcctgcacccaggcagcacagcctggcctcgttggcctcctgccactgccctggccagcctccagaccgaagtctggatctgttattagagatctcagacatgcagcagctgtctcttgggggccccaactcaggggccagcctgtctgagagtggaggccggtgccatggaagctcctgcaggcagggtcaggacagcaggctc

SEQ ID NO: 16557 - DNA, 521 bp, Homo sapiens
  source 1..521: mol_type = other DNA
gaacatttttaaaaattgcagtggtgctatctcggctcactacaacctctgaggttcaagtgattctcctcctgagtagctgggattacctcaggtgatacacattgtatacctttatcagaatatctcatgtattcctactatgagttgtataaataatacacttattatgtacccataaaaattaaaaatttgttttaaaaaggcagaaaaaatagttaaacttcaggctgaggcaggaggctgcttgagcccaagtttgaggcccagactgggcgacaagaccccgtctcttaaaaaatatataaatatatagatagatgtatatatatatatggcaattttatgaataactgggatacaaaaaattggtaatgcttgaactaagttattaacaaggactaaacttaaacagtcaagttctttttgtaagaacggtggggctctgagccaaggctgggggtctggccttagcttcagcgcacggggtgtccttgaccacgcccacagccccgccaggc

SEQ ID NO: 16558 - DNA, 373 bp, Homo sapiens
  source 1..373: mol_type = other DNA
taaaaaatacttattataagagagagacataacatttataaagtacctagtacataatagttcttaataaatgggtggcaggtacctgtagtcccagctacttgtgcagtgagcttgtctcaaaataataataataataatgtagcagctgctgagctgtttgcttagaggcagctataggggcccacctagcatgcctaatctgaatcgtaggtctgacctgaggaaagaagggactcctctatactgtagaaactaaggcacagaggagctctgtctttgggtgggaagatagctgtctccccgccctcagctctgctttgcagaaaaggagaagcgcgcggcttcctcccgcctcccaaccccgacgcgg

SEQ ID NO: 16559 - DNA, 501 bp, Homo sapiens
  source 1..501: mol_type = other DNA
gcgtgagccaccgcgcccagccgcgcccggtttttgtttctaaaaacagcgtctcgctctgtggcccaggcaggggtgcagtggcgcgatctcagctcactgcagcctggaacgtgctgggactccggacgcgcgcagccgtattcctgctttcaaagcaggaagaggttacctgttgtttcctcttcacgaagagtgcatgtaacagtaagacacaactgtttcatattatacgtatcgatgccactgaaatatacacttaaattgattaaagtggcgaattttatctggcatatattaccaccatttttagaaatgttttcggttttacagtgtggagcggggatcctcgctgcaaagcaaccatcagagctccgccgcgccgtgccgctcctctccgccccgtggtccgggtgtcaccgcccgcaggggcgcaagggccgcagcacgcgtgcgcagtgggcaccaagagcgctgcgtcgaccgcgccgcgccggccct

SEQ ID NO: 16560 - DNA, 427 bp, Homo sapiens
  source 1..427: mol_type = other DNA
taccatggtaaaactgaggcttaggaagacctagttaaggtactacttattattacagaaaaattacggcttagaaatgtcaaggtcctatcactaatatttgaatagctaggatttcaagctcagtttcgcacatgttgaatctgaggtacgaaatacatgtctggctgtgagatcatcggatagttttaaatacaacgcgacgcgatgacgtcacgcagcaagcgggtgattccccagcctctggcgtcacgcgccgatgacgtaatcccaggcgttcgccctcatgcgggccagggtttggcctcgctcccacgggtcggtcaggccctccccgccccctctcacctgcgggaggcggggcgggcacggctccaccggagccgcagccgccgccgccgcgccggggagggggagtgggggaggg

SEQ ID NO: 16561 - DNA, 548 bp, Homo sapiens
  source 1..548: mol_type = other DNA
ttacctgttgtttcctcttcacgaagagtgcatgtaacagtaagacacaactgtttcatattatacgtatcgatgccactgaaatatacacttaaattgattaaagtggcgaattttatctggcatatattaccaccatttttagaaatgttttcggttttacagtgtggagcggggatcctcgctgcaaagcaaccatcagagctccgccgcgccgtgccgctcctctccgccccgtggtccgggtgtcaccgcccgcaggggcgcaagggccgcagcacgcgtgcgcagtgggcaccaagagcgctgcgtcgaccgcgccgcgccggccctccgccgccgcgcccgcctacaaggccctgagggagactgcggcggtgggctcggctgaccgttggccctgcggccggcgccctaggctatccaacaccccagcgccaagccggggaggcggggaggacttcttaagtgtgccgctcgggagcctcccgctcgtcccgccccgaggggcgtgaggaggggaggggctgcggacttcggactcgggc

SEQ ID NO: 16562 - DNA, 209 bp, Homo sapiens
  source 1..209: mol_type = other DNA
ccagtagctgggaccacaggcgcctatcacatagccagtttatccatctggtggtgccagctgatccatcaagtgcaggcgtagcttgcagctgtaatttctaatctaaaccataatttctttttgggaaaaatcatctttgttttaaacttcaaactgtaaactaagttcactgtgacaatcctgagggacttcccacagaaccctca

SEQ ID NO: 16563 - DNA, 681 bp, Homo sapiens
  source 1..681: mol_type = other DNA
cataactatgattattttaagcaaaatattttacaagtcttttgctagtctatgggaatttatcataatcaaaagtgctacttttctttttaatgtatttaaacgatcagatacgacctatagtgtaggaataaactaaaacaaagctgttagtcacattataaatttgctctctgaatgtatatatttttacatttgtcaggatttttatatgcagttctggcttatttaaaatttaaaatttatctctaatacaggattttaaatttttacatgaaaatatgtgagaatatagtcatcattctcttacaaagcatttaaaatcctaaccacagagatgtgtgtaaaaatatttgtaaagatacagtacagaggattagataaaaacagttatgtaatggcatttatagtaatgttaggagaaggaaaaatataagaccaaatgttcattataattcggttttaagaaaaaagtaaacaaaaatgtagaaaaaatagtggaaatatataccaaaatttaaccatagctatatctgatgatgagactataataattttctcctctttttttggtatattggctgaatattattatacaatggacatgtaatcaggagatttttaaaagacattcttatatcaaattatcccaattttttttattttatacaaggtaaaacc

SEQ ID NO: 16564 - DNA, 643 bp, Homo sapiens
  source 1..643: mol_type = other DNA
gagcaagaaaaatatccaagtgagttttctcagttgtaagtggcatttaaattaaccataccacacctttgtttttgctagtaaaaatataggattttatttgccagatacagggatatacaactgtagtcctagctacttggtgatcaggtcactgcattccagcctggatgacaaagtgagaccatgtctcttttttaagtagaatttataggttagacttttattttggtattgtggaatcagttataaaccattattaacaaaataaaatcagctaccaaaattttttatgtttttaaattgtgttcagaaagttctcaaatgctattatctctaaggtagaaaagaattatttccaaatgaaagaacaaaacaaaaaaatacttttgcaatcaagttttacattgatttcatctccttagagattacatactatttttaaagttatcaaacgttgatttttgtgtatattcattgtcattccaatcagtagagaggaaaatctaatattcttctctgaagaacagtatattttaatgtgtttttctaaatttctattggtattattcagaaagttctctagaacaggaaaaaggtttttatgctgtcttatttttttccttgtttagaaatcgaaacg

SEQ ID NO: 16565 - DNA, 292 bp, Homo sapiens
  source 1..292: mol_type = other DNA
ctggtcagagcctggtctttttccagcaaagctgcgattcctgctaattaagggctgctctgcccgcacttacgctcccagcgctgcttcgggatctgcgctcccgaacagcgcgaggccccgccccctctgcccattggccctgtcacacgaggcaaggcgccgagggccgctctgtctcccgctccgggccgccgatgtgtgggatcgcggagccgtccctgagacgctgggatccgcagaggagcccacttgagagcgcctcctgtcgaaggttgccttgccatccctc

SEQ ID NO: 16566 - DNA, 221 bp, Homo sapiens
  source 1..221: mol_type = other DNA
cgtatgatgtaggtactattatcaccccactctcgctaggactcaggcctggctgaatccaaagctcaggcttctaagcatctggtcagagcctggtctttttccagcaaagctgcgattcctgctaattaagggctgctctgcccgcacttacgctcccagcgctgcttcgggatctgcgctcccgaacagcgcgaggccccgccccctctgcccattgg

SEQ ID NO: 16567 - DNA, 228 bp, Homo sapiens
  source 1..228: mol_type = other DNA
ctggtctcgatacaccttacagtccgtaaccagagcttatagctatcagagatgccttaaaggatggcagcttttgcaaaactgctctgagttttttcacgagtcgtaaaccccttacagagctccgggtttgcgccgcgccgcgctgttcttccggcgtaggccgccaaatcgagcaacaggaagcggtcgctctttccccaaatcccactgccttgtgggatcccc

SEQ ID NO: 16568 - DNA, 633 bp, Homo sapiens
  source 1..633: mol_type = other DNA
ctgcgctccccttcccccgccgccaagggggagacggggtggggggccgccctccgccgcggagaagcagtccccggggctgccgaccggcagctccccgcccggccgagtggccctagggggcctccgccccgcctccccactgcccaagaccccgggggctgggcggagaagaccagcccggcggagttgcgtcccacagagccgcggaggcccgagccgcgaagaccggggcgccgcagagcgccagggccgcttcccgccgggcgttcgggcccctcgccgttgccgacgtccggcggcggcgcctgcagcacccgctccagctcagggaacggcaactcaggcaggtctagcagcggcccgtagcgctccggcagcccggaggagccatcaccgccgccgctgccgccgccgtcgccattttgaactggaggatggaggaggagggatggcaaggcaaccttcgacaggaggcgctctcaagtgggctcctctgcggatcccagcgtctcagggacggctccgcgatcccacacatcggcggcccggagcgggagacagagcggccctcggcgccttgcctcgtgtgacagggccaatgggcagagggggcggggcctcgcgctgttc

SEQ ID NO: 16569 - DNA, 396 bp, Homo sapiens
  source 1..396: mol_type = other DNA
actcaagtatactcttaaaaaagttttgttgatcctcagactttatctgtaaaatggggatctttcactccctaggactgtagggaatagaaagtctctggttgtcaatgtcagtcaatgtcatcactactgggaactccgaggcccactttaataacgggattcaagcaatatgtttaagtaatttatttaagcgtaaaagaaaatatcccaccactttgggaggctgagggaggatgttgcagtgagcctgatccgccactgcacttcagcctgagcgatagagtgagaccctgtcttcagggcctaacaacttttagaagccccaaatagacagactgtcaagccacgcctggctcagccccgtcccgccttgagcctcggtgttcccaccta

SEQ ID NO: 16570 - DNA, 315 bp, Homo sapiens
  source 1..315: mol_type = other DNA
ggaagcggtcaccttcccagctaggcttagggattcttagtcggcctaggatgctgtgttcttgggtctccagatccagccctgagcgccactgcgccagtgccgccctggtgagtcatcagacccagtgtgctggcccctggggtgatagagcctctaatggaagcttgacagactgtgtgtctcccaatccttgaagcccagagtgcctgggtcaacctggcttaccaggcaactccacctggttggagaccagcttggccaacatggtgaaaccccattccattgcactgcagactggggtgccttctctcc

SEQ ID NO: 16571 - DNA, 229 bp, Homo sapiens
  source 1..229: mol_type = other DNA
cagccaaattatatttcttgtctctacaagaaataaaaaaattagctggcacatgccggtagtcccagctatccagcctaatcctagctactcggaggagaatcacttgaaccaggttgcagtgaggagattgcaccactgcactccagcctgcctgaacctgtaaatgttaggttacatggcctaatcagctgaccttaagatggaaagattatcctgaattatccag

SEQ ID NO: 16572 - DNA, 507 bp, Homo sapiens
  source 1..507: mol_type = other DNA
gactgatacaaagcatttttattagttacttgtatgactatgtaacctcatgtcagtccacagcactgcctggaggtgggtagaggtggtcctgggctggaatcccagccccagtgggaccttgagcaagttactttagctgtctgcacctaaatttcctcactggcaaaacaggaatactggtggttcacacctgcaattccagcacaaaaattaaataaataaaacatttacaagggttgtgctcagcagaccctgatgtgcagtattgcagtactgggcttctgatcacaatggagtcaccccaggttggctgccctaagcagcctgaaagaattatttattgccctgaagtccttccaactggctcagcaagctgacagaggaagagtgtctctgggcagatggatcacctgatacagatgctggggcctgagccctgggattggcccaaaacagggctgtgttgacccaacagctgggcattggcatcctgtcaatctgccg

SEQ ID NO: 16573 - DNA, 389 bp, Homo sapiens
  source 1..389: mol_type = other DNA
agtcttcagtctcagacctctggctctttgcctagacatagttcgcagccaagagccaagttattcttcagtcaatgaaagaaaatccttcagtgattacaagaaaataaggaaattcttaggggtttgtcttagtccgtttggcctactataacaaaatgccttaaactgggtaattaaaaaaaattttttaactttgtttttcttaccacctgaatagactgggtaatatataagtaatagaaatttattgcttgcaattcggacagagcctttgtgacctgagtgttaattttcgtttaggaaatacaatttttaaaacatatttttaaaataaatcttttatgatctttccttttatagataagaaaacatatggtgaaattttt

SEQ ID NO: 16574 - DNA, 434 bp, Homo sapiens
  source 1..434: mol_type = other DNA
cagtagctgggtgatccgctcacttcagcctcccaagattacaggcgtgagtgacggcgcctggcctcataacgacgtgaagacccagaggtgaaacattttagggtgctgcctccgtcctctaaattctttttggccagaccttaattttagaaacgaaaactagcttttatggaatttcaattaattacgtttatcaaaactacgctgagaaaagaaaatcagtatctcctagtctccggaacttcgcgtgccgggttcccgcagcaacacgtaccgggaagcgtttgggcgctgcaccgcgctgcgccgtgcccgtgagtccggcgcgcagaggaggagtctgagaccaggcctcaagtggaaacggcgtcacccggcggaacccagaacccttacggtttctgccggatgaggcccggagcctgcccccg

SEQ ID NO: 16575 - DNA, 166 bp, Homo sapiens
  source 1..166: mol_type = other DNA
tcaagaccccactctcccccaggctggagtgcaacggcgcgatagttgcccagtgctttttttatttttatttttttaagaaatgccataacaggccaggcgctttgtcacccaggctggagtgcaatggcgtggtaggtgatccacctgtcttgtgggattacag

SEQ ID NO: 16576 - DNA, 361 bp, Homo sapiens
  source 1..361: mol_type = other DNA
aaaattgcttaacagaattataaattccttctttcattactgcagccgattatgctgcctcccagtagctgggtgatccgctcacttcagcctcccaagattacaggcgtgagtgacggcgcctggcctcataacgacgtgaagacccagaggtgaaacattttagggtgctgcctccgtcctctaaattctttttggccagaccttaattttagaaacgaaaactagcttttatggaatttcaattaattacgtttatcaaaactacgctgagaaaagaaaatcagtatctcctagtctccggaacttcgcgtgccgggttcccgcagcaacacgtaccgggaagcgtttgggcgctgca

SEQ ID NO: 16577 - DNA, 275 bp, Homo sapiens
  source 1..275: mol_type = other DNA
ctggaaaattgcttaacagaattataaattccttctttcattactgcagccgattatgctgcctcccagtagctgggtgatccgctcacttcagcctcccaagattacaggcgtgagtgacggcgcctggcctcataacgacgtgaagacccagaggtgaaacattttagggtgctgcctccgtcctctaaattctttttggccagaccttaattttagaaacgaaaactagcttttatggaatttcaattaattacgtttatcaaaactacgct

SEQ ID NO: 16578 - DNA, 394 bp, Homo sapiens
  source 1..394: mol_type = other DNA
ctagcttcagcctcccgagtaggtggaattaaccatttttatctcctattttcaaaaataaataaataaataaaaattttaaaaaaagaaactgaggtttagagtttagtttgtccaagatcatacagtaaaataatgagacaagcctaattaaattgcatgtgcctcagtcattacgcaatctgcgagtttgttgggcctactgaatcagaatccgaattattttaacatgaaccgtaggctatttgtacactaagcgttaggaaactccgcctgcgcaggagcccttccggcccggggtgagacgcgggttgcagtccccggactggctgcgccgctcgccgcatgcgcgcagctagcgggcacggcttcagagggctttctccgcatgcgc

SEQ ID NO: 16579 - DNA, 569 bp, Homo sapiens
  source 1..569: mol_type = other DNA
ccagggcccagcacacaaaagcccattccaagcaatggtggcctcgggcccccccacccgcgcccagcccacgcttgagctggagggcccccctcttacgtgaggcccaggaggcccaggatgcacccagatctcccgactcccagccctgggctcgcaagtccagggttctcgacttacctcccggaccccggtgggccagagccggctgctgggcggggcgctcaggccgggcaggacgaggctgggcccggctaggtcagggctggtcctctgctccccccagggtggggacgccctcagccaggtcccagacggaaagcccgactctgcggcgcggccccggggctgcgggatgaagggggcggagccggagcgggggccaccccgcgagctgccactctgaccgcgtcccctttaaggccagccggccggacaccggcggggacgaggcggggcgcagagcaactcgctgcaatgcctcctgggagagttcgctctcgacgcgccgagctgcgaggagcccagacagcgcacagaccccggaccgccacgcccctgggctgggc

SEQ ID NO: 16580 - DNA, 299 bp, Homo sapiens
  source 1..299: mol_type = other DNA
attaagttcatctttaaaattggataataggtcaggagttcatgaccagtctggccaaatcccagctactcgggcacctgcactccagcctgcagagcgataacaactcacaggatttcccttcttattgaagaactgtagggaaattaccttttttttttacagtaaacaccaggaacattcagttggttgtgccctcagttcagggcatcttatgtaatgtgctgccctgtgacacagacctagaaaaagggctgttttcaagttgcagcaaggcatgaagctgatgtctatctcag

SEQ ID NO: 16581 - DNA, 419 bp, Homo sapiens
  source 1..419: mol_type = other DNA
gtcaatgagatcactggtgtgccgcagcccacgccgccacagcgcggccggcccagggctctccagagcggggatgccatccccatttcacagatgggaatggcgggcccacgtacctcgccggtagtccccgagccccgcgaccccggccgtgccctctccctccgcgagcggccagcgcagctttgcgaggggggcggagcccagcccaggggcgtggcggtccggggtctgtgcgctgtctgggctcctcgcagctcggcgcgtcgagagcgaactctcccaggaggcattgcagcgagttgctctgcgccccgcctcgtccccgccggtgtccggccggctggccttaaaggggacgcggtcagagtggcagctcgcggggtggcccccgctccggctccgcccccttcatcccg

SEQ ID NO: 16582 - DNA, 418 bp, Homo sapiens
  source 1..418: mol_type = other DNA
ccatggaaatgacttggctgagactctggacagcagcttctagatcctgctcttacctgcctggagtgcagtgggatgatctccactcgctgcagccttgaactcccaggcccaagcgagcctcccacttcgaactcctgggctcaagggatcctgctgcttgccccatttcacagatgagattgcttgccctaagtctcagcactgccctgtcctccgcagcgcgggcgccatggacaagatcttggaggcggtggtgacgtcgtccccgagcaggggctggttcggcgcgtgctggaggcggcgcggcagccgctggagcgtgagcagtgcctggcgctgctggcgctgggcgcgcgcctctacgtgggcggcgcggaggagctgccgcgccgcgtgggctgccagctgctgcacg

SEQ ID NO: 16583 - DNA, 346 bp, Homo sapiens
  source 1..346: mol_type = other DNA
ggcctcctacttgtactaaatacatgttctgtactaggaactctaccacacaagtctttttgtgatatctaacaagaagtgcccggcggatcacgaggtcagatggagaccatcctggctaagcgggcacctgtagtcccagctactcgggactgcactccagtattgtattttaaagatcaaggacaacagaaactgaaattgtaggttgaaatttttgtttctgcgagtatacttatttgcatttgcacagaagtatttatttctgctgtgcatcaagtggagataaataatttagggaggggaacacaacacacactggcctttgtctcccttccacacaggc

SEQ ID NO: 16584 - DNA, 484 bp, Homo sapiens
  source 1..484: mol_type = other DNA
tggggaatttggaccccaatttcttgtcccattaaggcaatgccctcacagctttgtacaagcccttgccctcccgccggagcttcttgctgggaaggggtccctcctttcagccggaacctgattccccgtcgacgctcggtgaaaaatcgatcgacgaccgagggcgcgcagcacacccgccagcgccaggggcgcggtcgcctccctggcctccgcgcccgcggcttggggcctcaggagaaagcgagactccggggcgcgccggcggcggtggctttctgtcgcgggtccctagccccgcgtccgcgtgcgcggcggcctcgggggcgcggcgggagcgggcgtggcgagcgagccggccttcctgctgcagctgctcccccggcggccgggcggagagtgcggattgcgcgcgctcggggcgggggagcgggcgcgcgcgaggctgccgggctcgcgccgcgccgcgccgcctagtccc

SEQ ID NO: 16585 - DNA, 272 bp, Homo sapiens
  source 1..272: mol_type = other DNA
acttagcgctggctcctgggctgaagccaaacgttttactttttaaattagattaaaaaccttttaatgaccgtcattgagttacagaattttttttttaataaaacgtagcctaatatataaaagggtcgaggattctggcaggaaacactcgagtttcctccaggtctgataccacacaactctctgcggagtactcaggaaaggatcaagcgaatcctgttaacagctaagagcctcctctggagacggtttccctcacctggaaactt

SEQ ID NO: 16586 - DNA, 360 bp, Homo sapiens
  source 1..360: mol_type = other DNA
aagaaatgcagcattccctcccttaatcctttctctgtagatatgttgggagaaggaactgtctttatctgacattctatcatgctctccaaaggatgtgagacaacacaccttccttacctcagtgtgtagaaaaatgggagagctctaaaacaatgtcacattacaagacaggattcctgctttaaatgtagaatgagtataaaagattatatataacacaaggcttgggctgggacctgaccccatttcttttttttaaaaaaaatatccaggcatggtgctcaagagcctgaggcaggaggttcacagtgggctatgatcacaacactgcactccagcctgggtgacagagcaaga

SEQ ID NO: 16587 - DNA, 205 bp, Homo sapiens
  source 1..205: mol_type = other DNA
atatgattgtttcccatctaatcactcagcagtgagcggagcacgtcgtcgcagaccgctgggtccaggtccaaagactgtgctccttgcaccgttcttgggtcaccccaaaactgtgttgctccgcccgtgggtagtgctagcccctaggacagcgccggccccagggcgctgcggctccccgctctgagtaatcagagccatc

SEQ ID NO: 16588 - DNA, 182 bp, Homo sapiens
  source 1..182: mol_type = other DNA
ccggcgctgtcctaggggctagcactacccacgggcggagcaacacagttttggggtgacccaagaacggtgcaaggagcacagtctttggacctggacccagcggtctgcgacgacgtgctccgctcactgctgagtgattagatgggaaacaatcatattgggcagggcttagcctgtgc

SEQ ID NO: 16589 - DNA, 506 bp, Homo sapiens
  source 1..506: mol_type = other DNA
ctcagcagcttgccactgctggctccggcagcctgcccattttacagagagccgactggtctgttttacagagtagatgcagagtgccaattgggtgcatccacaaaccggtccccactagactcaggagcccagctggcttcacccagtggatctgccaccggggcgcaggtggagctgccttacagtcccgcgccgtgagcctgcccggactcctcagcccttgggcggtcgatgggaccgggcgccttggagcatagggggagactcaggcatggcgggctgccgctcccgagccctaccccgcggggaggcagctaaggcccggcgaaatcgagcgcagcgccggtgggccagcactgctgggggacccggcgcaccctccgcagctgctggcccgggtgctaaaccccttactgcacgggccggcagggccggcgggccgctcccagtgcggggcccgccaagtccacgcccacccggaactctagctggcacgcaagcgc

SEQ ID NO: 16590 - DNA, 240 bp, Homo sapiens
  source 1..240: mol_type = other DNA
agtgtcattttaaatttacggacgcctttgttaatcattcctgtatgaaaaatcagtgaccccaactctgtgggtggaagtgggcttctccgaataaaggcgagggtcgccgcctcgggtcctcgcacgggccccatgcaaccccttcaggagctgagaccgaggctcactgggcctctggatgccgcttccagtcgcggaagatgtcattgcaaaagccccctgctgggcttgcgattg

SEQ ID NO: 16591 - DNA, 227 bp, Homo sapiens
  source 1..227: mol_type = other DNA
gtataaggttcttttgtaagttttaaaaaatcttcacagcagtccactgaagtagacattaattaattttttatttctataggatagacatttaaaagagtaactcctggcattggaccttcaaggacttcaaggtttgcaggagactaaaagggccctttatagttccctccttttcatgctgaaagaaaacagatttatagaaggaataacacctgtgtttctgt

SEQ ID NO: 16592 - DNA, 441 bp, Homo sapiens
  source 1..441: mol_type = other DNA
tcatttccaacctgggaagacagccccacaagtttaaaacaaaagtgcatgcgcgtgtgctagagctcatagtgggctccttaaagagctcctcctctaaataaaaggcattttcctggaagaaactctccagcagtgctttccgaagttccgccagaggggcagctggacccgccctggctctccagagcacctgagacgctaagggagagggggtgcggcggcagaaagcctccgctccctccaacccccgctccctccaacccccaccgtcggtagcagctacggggcaggcggcgaagaggggacggctgagtcttcttatggtaacaaatgaccgaacagtcccttatgaatcggccaatgagaagggccgtcttttgccagggcgtcctgcggaagggccgggggcggggctcgtgacgttgccgggacagccaa

SEQ ID NO: 16593 - DNA, 182 bp, Homo sapiens
  source 1..182: mol_type = other DNA
gcttccaggacgagttcattattcctgaagacgtttgcaacaaatggtgaaataattcattcctgttgttaagcaaaaaacagcggctgcagctgctaaattctcgcccggcccggcggcaccgcttgtgtcgctcagcgatggagggcgcgatcgatgacaggccactccagtagataggt

SEQ ID NO: 16594 - DNA, 359 bp, Homo sapiens
  source 1..359: mol_type = other DNA
gcccggcccggcggcaccgcttgtgtcgctcagcgatggagggcgcgatcgatgacaggccactccagtagataggtccctgctgcctctccagccaagtggctggagtcgggaggcggaaggcggccgccgctacggcgattcgcagagacggtggccgccgcactagccaccacgtgtggaggataagctccagggtcgctgcaggaagcctaagtgcagacgccggcttctcccgcagccactgccgcagcgtctagtgaagttggaggccagaccgaggcctccgcctcagtggtcctcttcggggatagagtcagtgacgatcgcagtcgccgcttcagtggctcctgggaggg

SEQ ID NO: 16595 - DNA, 429 bp, Homo sapiens
  source 1..429: mol_type = other DNA
cggaaggcggccgccgctacggcgattcgcagagacggtggccgccgcactagccaccacgtgtggaggataagctccagggtcgctgcaggaagcctaagtgcagacgccggcttctcccgcagccactgccgcagcgtctagtgaagttggaggccagaccgaggcctccgcctcagtggtcctcttcggggatagagtcagtgacgatcgcagtcgccgcttcagtggctcctgggagggggctacgcagccagcgactcctctggtgtgagcggcagtgaagacgccagctaccgcttggaccttgggccccgtcctagtgacgacggagaagagggccgctgccgctgcagtggctcggccgcagcatcaggggcctggactcaactcctccccagagtcggaggtgttgcgccatgcccgggg

SEQ ID NO: 16596 - DNA, 235 bp, Homo sapiens
  source 1..235: mol_type = other DNA
tttaaatagcaatttatatttcctcttcatgaattgctcacaaagctttgaatacatatagatagaaacctagccgtatacaacttacagagaatattcatgagtattagtgcattttaatacaactactgtgcattgttgctttaatggtgaaaattcaaggaatttctcctagaaacgttggtcctcccgtgcaatggccgctggctatccggggcagcgctgagccatgctc

SEQ ID NO: 16597 - DNA, 415 bp, Homo sapiens
  source 1..415: mol_type = other DNA
acatgctaagcatttagaatactgcatggcacctaaaatgtgttcaatagatattagctattattatccaaaacatattttagtctattaatgatttttggtcaacagtactgtttagcatggtagaatagaaaggcactgtactttgccatcagttcaaatcacactttgtgtgacctgggcaagtcactagggggtaggactccctaatctctaggactccttgcattccataaattcagtgaatatactgtagcactcctgataccttctttagtcactgagagactcagtgagagtgaaagtgtttggtagactgtgacaggctatccttactattaagagctttaaccctgagtaatacgcctcactgagctgggtggatccaccttaacaaggtgtagaccaattactg

SEQ ID NO: 16598 - DNA, 300 bp, Homo sapiens
  source 1..300: mol_type = other DNA
ctaaggttttgcgttttgtattttgaaactggtaagatcaaacttttttcccagctggagtgcaatggtgtgctgggataattttgtatttttaatatagacagttttaaatagcaatttatatttcctcttcatgaattgctcacaaagctttgaatacatatagatagaaacctagccgtatacaacttacagagaatattcatgagtattagtgcattttaatacaactactgtgcattgttgctttaatggtgaaaattcaaggaatttctcctagaaacgttggtcctcccgtgc

SEQ ID NO: 16599 - DNA, 284 bp, Homo sapiens
  source 1..284: mol_type = other DNA
cgctcctgcctctcctcagggcagctgggaactagctgcctgccccgtcagagcagccccgactagcctcccccgcgagaagacccacttgtcagccgtgtctcggggtggggggcactgcaaggcctggcgctgatataatttctagtgctgctgttgctcctgcctgaggaaacacttcacacggtggcaaagaaatgtcttgtcttttctgcaaaagatgtgaaagccaagcagctgcactttctcatttaggaaattatcaagtgcccattgagtagcac

SEQ ID NO: 16600 - DNA, 438 bp, Homo sapiens
  source 1..438: mol_type = other DNA
aataaccactttttttcctcccactatttttgctgcagtgaaaactgttcatttctgcttgcattttgccagatagctttagaattctagctgagccctaaattgtactttgtccttttgattaagtaaaaattgagttaaaagatagaaggatctgacggatgtttggagcctgctgaacattttacattcagcagcagttgctactgaatctgaggttatggattgtcatgtaccaataaaacatagttttggaaaattggccacatcattttattatgagaaggtggtacttctcagtcctctggtcctggtcctgttccacatggagaagcagaatgagcaccattttacagtctgcgatgcgatcccattgtaaagtatttaataggataacaccgggggaaatataagtaactcattggttaaatttcaatt

SEQ ID NO: 16601 - DNA, 371 bp, Homo sapiens
  source 1..371: mol_type = other DNA
tttcctaaatgagaaagtgcagctgcttggctttcacatcttttgcagaaaagacaagacatttctttgccaccgtgtgaagtgtttcctcaggcaggagcaacagcagcactagaaattatatcagcgccaggccttgcagtgccccccaccccgagacacggctgacaagtgggtcttctcgcgggggaggctagtcggggctgctctgacggggcaggcagctagttcccagctgccctgaggagaggcaggagcgggcgaggggggcaggcccacaggcgcctggacctcctctaagacgccgcgcccaatcacagtcaggatggagggcgcggcttcagcaccacttcccgcccagggcgttctgg

SEQ ID NO: 16602 - DNA, 538 bp, Homo sapiens
  source 1..538: mol_type = other DNA
agagacagtataaaaattatctggacaatgcaacactttatcacttgttcagaaatttgagaggatgagaataattaagatttctgataatgtgttatgatcatgtatttattgctacagttagttatatattttttggcacaatgtttacctgctaatcttaatggagttaagataaaattcaattgtaggcatttttcccttctattgggttaattagtccaagcgaactgagcgccccagcatggctgaggacttctgaacagatagaaatataatgcaagccacatatataattctaaattttctagtatttatacttaaaaagcaagaagaaataaagcagtactctggagaactcagaaaataagctgcagctctgaggtgctgaaagaaatagctcacctttgacttatttttggttgagggtcacccatatatctcgaaatttcacaatttctacaagttctgtcggcctcctagggccggaagcttctcagcccaaagccgctgctggctgcaacctccgtcttagcag

SEQ ID NO: 16603 - DNA, 518 bp, Homo sapiens
  source 1..518: mol_type = other DNA
aactatgtgtgtattcaggtggttacacattgttttgaactaattatcttagctacaaaggtcggcatacaagcacagtaagtcagtactgattggattttggctcaagtgaaaacatctacttacaaaaatggcaagaacaactgaagacaatttttgtaagcaatgttgtattctacattttggttttaattttttttaattgacaaataataactgtcatattcattgggtacatagtgatatttctatacatatggaatgtatattaaatagtattagtaaacgattgttaattttctgaagacttggtaatagtattatgattatgaaaaaaaagtccttatttttagagatgctgattcagcaaaatttacaagcatttatgtaaagataaagcaaatatagcaaaatgtctagagacttgttatttttgccgctgttattatgacatcactagaaagctggaattattctcgcgacactacggcctggtggcgcgcgaaacgcggtgggcg

SEQ ID NO: 16604 - DNA, 367 bp, Homo sapiens
  source 1..367: mol_type = other DNA
ccctttctgatcttacataatgtttaagataaaaaaaaaatccttattttgctaatgggtaaaaacagggggtgttaaatatctaataaagagtatttatgcctaagaacaacaaaagaaatttcactggtgttttctattttaatacttaaataccaaaagggagtgcagatatgcagggctctcagaataccactactactttgtattcatagactgaaattttttgaggtttccacaaacagtaatttgataaatatatcattgcctgcttcatttggcatctctgtgctgtacaggccagacactgagacagttgacaactgagagctggggagtgccaagagtccctagcaacaccctgcag

SEQ ID NO: 16605 - DNA, 476 bp, Homo sapiens
  source 1..476: mol_type = other DNA
agacaaatggactaagaaaccatgatttcttggggttttgttcttgctattttcaagctaaaatgcacccctgggattgcagatggtcataagaaaaattatcaagtgaaaagttaaccactgccaaactcatatgattgaaaattggccattgttatgtttagaatattttttgtgcatttgcaattaagaataaaaagtcagaatttaaaaaagtcctgactatcccaaggatcttggaatctcagggttagaagggatcttaaaaatcacccattttaacctagttcctgatgttggtgatgggccttgagaaaaagaaccattacatggggctatttccatgggctttaaaagcctcccagaggcatatgtgaatgatgatgcacacacacaaatatttgttaatgaccatgggtttgggaaggtgttagtcatggctagcatcatacccttagagaggctgttgcagcccc

SEQ ID NO: 16606 - DNA, 451 bp, Homo sapiens
  source 1..451: mol_type = other DNA
acaatttttaaattattttatttatttttttgagacagagtcttgctctgtcacccaggatggggtgcagtggtgcgatcttggctcacggcagtaagtagttgggactacgggcgctcgcttttttcttttctaattagaacagagttgcctgactgggattacaggtgcaatatttagctcaggcagtgcatgacgcctctatttcacatgtgaggaaattgaccggtggctgtccggagtgcagaggctcatctgggtgaataacaataacaacagtgctgctttatttgcacagaaaacaggttgtttcctggcaggcgctgtgtgccgggcgaggaggccggggcgggccggggcggggagcgggcgaagcgccattggcccgagcacccgggaccggccccaccgcaccgcccgccgggggcgggggtagcggggagggactcgc

SEQ ID NO: 16607 - DNA, 781 bp, Homo sapiens
  source 1..781: mol_type = other DNA
caatgtggccattgagagttactggcaaatatctgtttcttaggatgacagttttcagactttatcttaaccctctgccatcctgagggtttggaaataaatagcaacctcactactagctaactgtagtgactacgtttggcattcctactagattgtcttctaaaagttccacaaggaattatttataacttccctgatggcaaaatacagccataaaacatgctgtttggtatttctcaggcatctctgtggtggatgaatgagtcactcccagaagacttatctggcagaaaaatgaactaaataaatatgaattaatgttatactaaattttttctgcatatgcaagcagctgcaaacactaaggtcaacatattccaaaatatgtttgaattattagtatgtaggctggttaagaaaaatgatctctttagatagtattactcaaacattacttttacaagctttgtagaatgattcaaccggttaactcaagtctctgcttaagtgactcatcatagtaaacaggtttttaattaaaaaggaaaattatatttgcatcccatttaactatttacattctcttggcaccagttacaaaggaaaaccctggaaggataatttctccttagcaatttataaactataatcacatgcatgatttcatttgatccttctaagacaggtttgacaagaatcagacaatgccatttaataggggtacagccaaggccttgaacccaaggtttatgatcccaggtctatgttaatgtcatca

SEQ ID NO: 16608 - DNA, 411 bp, Homo sapiens
  source 1..411: mol_type = other DNA
cccacccgccctagcttagccgcgaacggcgggccgagcgcgccatctggtggcgacgcagggaagggtcccggccgagcgcccgcgccgccgccttggtagcagcggtagcgctctcccgcctggtgactgtagacacagggcccacgggcttcgtggactcgtggcgctttccgcacagttcgggctttccttttttgttcgtaaacctaaagaaaggaatttaactttttgctgttctttcctccgagagagaaaaagaaaatcctacacgtacagcctttaaacaagataatttttttttaatgagtggaaatattcatttattcagcacttagaaataacagttcttgataatattatgatttataatttatacatggtgtattttaatgaattgcaggtgtttaa

SEQ ID NO: 16609 - DNA, 480 bp, Homo sapiens
  source 1..480: mol_type = other DNA
cttagtccccctgcacagagttgtataacctaggccaagtctctgtagaatggaaggcattcttacattctgatcagattaaaaaggcctgccctccttctcatctcctgggtggagaagaggagtgggcctatcagagcccttcccagcagctcctaagcgcttcgtggacaagaccaggagggcgcgacccccaggctgatctcgaagcggcgcaagcccaggcgaggccagccagtctcctgacatcccctccacagcctgcaggggcggatacccggccctgggcggacagctcgcacttcctttcagcccgccggccaggcctaccggctccactgcagcggctgctgcgcccccacccgccctagcttagccgcgaacggcgggccgagcgcgccatctggtggcgacgcagggaagggtcccggccgagcgcccgcgccgccgccttggtagcagcggtagcgctctcccgcc

SEQ ID NO: 16610 - DNA, 373 bp, Homo sapiens
  source 1..373: mol_type = other DNA
tggacctttaatcaccacagcagtcagccatgtagggtcaagatctaaccccccacttcaggggaagctgtgaaggcagctgcacctcctttgtcaagctgggtggggggataaggggagaagcctgccgccccgccccaccccccgccccgccccgcccggcgtctgtgaccccgcgggccgagcctcaggcgacctgttggcagggagagtcacgtgatgcgccggctgtgcactcccctcgggcgggcctcctgttgcgcccgcctggcgagttccatcacgtaacgcgcgggcgccgcccagctcttccctcgctgagcgagggagggcgggcgtgtgacccggggcagcccggaaagctccgaggagg

SEQ ID NO: 16611 - DNA, 506 bp, Homo sapiens
  source 1..506: mol_type = other DNA
ccccccacttcaggggaagctgtgaaggcagctgcacctcctttgtcaagctgggtggggggataaggggagaagcctgccgccccgccccaccccccgccccgccccgcccggcgtctgtgaccccgcgggccgagcctcaggcgacctgttggcagggagagtcacgtgatgcgccggctgtgcactcccctcgggcgggcctcctgttgcgcccgcctggcgagttccatcacgtaacgcgcgggcgccgcccagctcttccctcgctgagcgagggagggcgggcgtgtgacccggggcagcccggaaagctccgaggaggagcctggcgccgccattttcctgcagcctcttaccctgcccggctccagctgacccgggaaggggtgggctgagacatcttgtccgactccgcgggtgacacgagccggttctctctggactggtggcagcgcgcggccccgaaccgcgccccaggccggcaggcggggaaggagccggtg

SEQ ID NO: 16612 - DNA, 419 bp, Homo sapiens
  source 1..419: mol_type = other DNA
aagagttctctctttatctacaaaagaaagagtgacttgcaatctgcatgtcctggttataaagttatcatgcagaaataattcaagtatactagaattttatgtttacagatgaggacatttttacaggaaaaacaaaaaaaaggtggcggatgccgtattttatttttcgttatggtttcatgacccatataataattttcattgtatctgatgtgcaaaaacagcctatcctttagcagctagtctcataatgttaggatatttctatttaagtcttaaccgaaggataatcattcattacaataaatagtcaacagaaattgcgctttgaaatccaccctgggattcggaaaccgggtagaaaactacctggtaacccagcgcaagagtacgccacggcgcctgcgcatcccctg

SEQ ID NO: 16613 - DNA, 346 bp, Homo sapiens
  source 1..346: mol_type = other DNA
tttacagatgaggacatttttacaggaaaaacaaaaaaaaggtggcggatgccgtattttatttttcgttatggtttcatgacccatataataattttcattgtatctgatgtgcaaaaacagcctatcctttagcagctagtctcataatgttaggatatttctatttaagtcttaaccgaaggataatcattcattacaataaatagtcaacagaaattgcgctttgaaatccaccctgggattcggaaaccgggtagaaaactacctggtaacccagcgcaagagtacgccacggcgcctgcgcatcccctgacgggtactttcctatcttcaaggaagaatt

SEQ ID NO: 16614 - DNA, 425 bp, Homo sapiens
  source 1..425: mol_type = other DNA
aagtcttaaccgaaggataatcattcattacaataaatagtcaacagaaattgcgctttgaaatccaccctgggattcggaaaccgggtagaaaactacctggtaacccagcgcaagagtacgccacggcgcctgcgcatcccctgacgggtactttcctatcttcaaggaagaattttctcgaggcggtggtgggaagggagacatacttaatactgccctctcaggaagccgcgcgggagggcgcgcgcgcgcgcccctttttcagcagtgtggcggggtcgcacgcacgcccgcctcggcggctgggcgcgatttgcgacggcggtggaggtggcggcggcagcggcaactttgcggcaagctcgggccgggcttgcttgacggcggtgtggcggaggccccgccccaggcggcaggaacct

SEQ ID NO: 16615 - DNA, 474 bp, Homo sapiens
  source 1..474: mol_type = other DNA
tttcaaattggacagagaccctttactatcctattcaagaagaaaaggaattgagtattggtggcaatcggtacttaatgatttcctatgaaacttttctgcagatccacatagaaaaaaaatagacatttttacaataaattaagtgtttttgtcttttgcaacaattgtacctactataaattgtagacaagtacaaaacaattggttaaagattaatacttctgagacactgtgtagccttgaattcagcctccaacatttactgctgtaaagatttgaggtgatcactcctataaaatttggattataatacttacctcatagggtttttgtaaagatctagtgcaccgttaatctctcagatgtcacagaaacgttagaagcatctcttcccaggattgtacatggaaatgaaggatccacagattttgtcccggttcttccttagtggggaaaaccgggtgtaagccc

SEQ ID NO: 16616 - DNA, 586 bp, Homo sapiens
  source 1..586: mol_type = other DNA
ggcactgtctgaaccagaaaatggtccttcaccttgatcttggacttcccaacctccagaactgtgagaaataaatttccgatgtttataagcttatggtgttttgttatagcagcctgaacagactaaaacaatatttaaataaataatgctcagaaacttctcaaatttgaggaaaaacattaaatcacatgcaaggatccttgctaagattaatagctgtctcatcagagaccccatagtcttctagacggtagtggattggttagatctccataaggaatgctaaagggagtcttctctattaattatttattcaatacatttcagaaatgtgacagcttcttttattctttgttaatatgctaaaaacgaagtaggcttttgcatttatctgaaaagagggacaaacttggacataaaactttttcatgtatataaattagaggttctttataaatttacaaaggaaattgtgtgactacaagtttaatttgaaatgtgtgtcatatgttaatttcttgcaggagaaggaagccaacatccttttggagcctccatctgttgctcagattggaatttcagt

SEQ ID NO: 16617 - DNA, 355 bp, Homo sapiens
  source 1..355: mol_type = other DNA
ttgtggtgtatgaagaaattattaccatagaaactatggatgaacctcataaacataatgtattcaacaggcaaaatgaatctgcagtatgtataattaccagcagagggaaatgactgtagtttaaaaaaagtcaattccctctccatttcctaggaagagagcccagggaatcaaacagatctggagactcaaatatcgatctctctgggcaatttattcgctgcccggggtcagagaagtaaaaacccattatttatttatttttaagttacttctcgagcttctgaatcgcagcgagcctttctcgcgtcccagcaacgcgccctggtctgcacactctgttcctgcggct

SEQ ID NO: 16618 - DNA, 626 bp, Homo sapiens
  source 1..626: mol_type = other DNA
tgtttaaaattccttgacctgctgaactgtaaagcacatcttttacagaacgttttccaaaagaactagtcctgaaaaatactctatgaatcagtcacggctggaaagcagtcagtttaactgcctgaatgtatttaatcatggaattgtaggttaatccaatatctcattagctctgtaagacacattttggaaaacagtaatgctgcttttattagaaatattttctatacttgggaattcacttcaaaggcttttgtaagtgatagcattcatgcaaaaataataattttatatattattctacagttaaaatgtgacaatgtgactattatgtttacagttacatgagaattaaaatagtcatttgttcagtatttactatgtgctagctacttacatagaggacctcatggaagtgctatttgcctaaggccacatgcctgttagcagtgtggggcttaattgcctaattttagttatttgggtcaagagtggaattagacagcttgctcactttccagatatttttacaaagtctgctatcttcttaaagacatctaaaagaatctgtcaactctgaaggcaattccctaaaaggaaatggtttgagtgtaccagggtga

SEQ ID NO: 16619 - DNA, 596 bp, Homo sapiens
  source 1..596: mol_type = other DNA
tgaaagtttggattttattccacacacaacaaagtgtttgctttaaaaggaatctcctagtttggggctagatggaccccaagatccctcccaaactccatggggtcctcagaagtcctcttagtaacttatgtcaatgatgcttaatagaagtatccgcaaaaggatgttaaattttattctatatagactaatttatttacgtttatatagccacacgtttctactccaaaggcacgcccttccccgaatgttgggagagtgcgaggattgtgcatttagtcttgccaagatggagagtctcaggcgggcattctgagctgcttcttgtcaaaccacgtgcacgcagtgctgaggcgccccacgcgcgtcctcaggggaagcaccagctccgcgagctcgcggccgccagcgcggtccacccattggcgggagaggactcgctcctcaccccgcctgctccgcagcgggaccgcgtagacctcagctccccgagcagcgcaggtgggccaggggattaggggtacggggacccctcgccgcgcagtcgccgggatgggggcaggggtggcgccggctgtcacccgcaccggatc

SEQ ID NO: 16620 - DNA, 624 bp, Homo sapiens
  source 1..624: mol_type = other DNA
agacaattatatctcttttacagataaggaaacctaggctcatgtaggttaaatgaactggtcagactgtcgcctctctccacgcataaaagggagaggaggcgcccgggaggatcctttctgggtccgggcggggcgcaattttccggcagccacgggatcgcaacgcgggccgtcctgccctctggccatgagggttcctggtgacatcgtatccgcgcttcttcaggggcacagggcgcgccgggccaggcttggagtggcagccttgggcgggcgcggtgggtgtccagcgcgggagggcgccgcaggcccggcccggccagggagccagccgcgtgcctgtccccagcgcggcacccatggtccttggcagacctgggtcagggcctccttccagccagccaggacccacgcgcgctgcggggcaccgggcctgatccggggacgcgccctctgggagagggcaggtgctcccggctgccacctgctcggctccgcgcggggcgccaggcctagccaagagccaggcagatccggtgcgggtgacagccggcgccacccctgcccccatcccggcgactgcgcggcgaggggtccccgtacccctaatcccctggccca

SEQ ID NO: 16621 - DNA, 406 bp, Homo sapiens
  source 1..406: mol_type = other DNA
ttgacaacttagtggatgaaagtttggattttattccacacacaacaaagtgtttgctttaaaaggaatctcctagtttggggctagatggaccccaagatccctcccaaactccatggggtcctcagaagtcctcttagtaacttatgtcaatgatgcttaatagaagtatccgcaaaaggatgttaaattttattctatatagactaatttatttacgtttatatagccacacgtttctactccaaaggcacgcccttccccgaatgttgggagagtgcgaggattgtgcatttagtcttgccaagatggagagtctcaggcgggcattctgagctgcttcttgtcaaaccacgtgcacgcagtgctgaggcgccccacgcgcgtcctcaggggaagcaccagc

SEQ ID NO: 16622 - DNA, 389 bp, Homo sapiens
  source 1..389: mol_type = other DNA
ttcacaggcaaagagcctctcttcatgaagctcaatcagaaaaacaagcgcgctactgactgtgttaagttctctaaagagaaaaaccccttcactctatagttgacaacttagtggatgaaagtttggattttattccacacacaacaaagtgtttgctttaaaaggaatctcctagtttggggctagatggaccccaagatccctcccaaactccatggggtcctcagaagtcctcttagtaacttatgtcaatgatgcttaatagaagtatccgcaaaaggatgttaaattttattctatatagactaatttatttacgtttatatagccacacgtttctactccaaaggcacgcccttccccgaatgttgggagagtgcgaggat

SEQ ID NO: 16623 - DNA, 414 bp, Homo sapiens
  source 1..414: mol_type = other DNA
cccaatctctgagtgaacttcatttccctgactggaatttgccttgaagtcagcaatcaacccttcaaagctaggctaagaaatcaaaggcttgtcatgtatttgtttatttaagattcaaacactgagagagggagagagagattgctatctcttgtcctgaaagagcaaatagcttggataacctcattttccaaaatgctatttatacaactgtgaggtcatggtagtttaggtagaagtgactttttcattttcacattacaagaaaaattgtcatgtcatcttgtcctcaaaccactgtattacctatcaccctgcttgtgctccagttttcccactaaatttagtctgccggaaatccttgaaggaagtccctacctgcagctgctggtgtcagtactggaaccagtg

SEQ ID NO: 16624 - DNA, 528 bp, Homo sapiens
  source 1..528: mol_type = other DNA
agctcttgacatggagaggaccaggaggtggctccaccagctggtgccccgatgaaactgaggccagtgggctccccagccaccgccgctcagaagctgccaagcacccccggtgctttgggccccacgcacagcactgagtgctgcctgccagcaccttaaggcgcttgtggcccgcggcgagctggcagcgtgctcccagcagcgaaggcagtctcgctcaggaggccgcgcgccagacccggggatgcgcggtcggcgcgcgggtcccgggcaggagagcccgccagagccggtgctgcctggcgccgagaggcccggactggcgactgctgccgcgccaccggggcccacctgcgcagggacgctcggcctcaggccctctgggctgctccaccctgctccggccgcaggcgagcggcgaggggagggagtggggcgggcggcgtccgcgcggcttccccgaggccggaggcggggcgggcgggcctcgggtggcgcggggggcggacccgccagctgcctgcg

SEQ ID NO: 16625 - DNA, 366 bp, Homo sapiens
  source 1..366: mol_type = other DNA
ggcaccctggtggggcttcctaaagcccaattaaagatggtggtcgaggggccagaatttcagtggatccgggtgaaacgcacccatgtgcccaagggttggatcaagggcaatgccaatgacatcggcatggattaagcagctgccacgcttctgtgacgtcaaagacgagacctatgactgcccagccaggggccagcgtaattattggcattttttcagggcaccagtgggtggacatgaaagggaggggtgacacagtgttccctcctggcagcaattcttacaattgcaattgaaaactggtttgtgtatcatatcatatatcatttaagcagtttgaaggcatacttttgcatagaaata

SEQ ID NO: 16626 - DNA, 443 bp, Homo sapiens
  source 1..443: mol_type = other DNA
gaagcacggagagtcccggtcccctgtggaatttcatttcatacggtgaggaaatcagagcgcgagaccgtcggcgggtctgcagctccgcagctctggggcgcctccccgctggcggctggaggtgggcggctccctgcgcaggtcgggcgagtctgggggcggggagaggccgggccccgatcgccgctggtccggaggcgcacttctcacctgcagaagggggcaggacggcgtggctggagccactgggctgcgtccctgcttggcccctgcgcgcctagatccgggtgggagggagggggccggagggcgggggcctgactcctcctgcgggagagcggccccgccccgccgcctcgcccctagctgcccaccgcgcccggccattggagaggcccgctgtccgtcccgccccgccgccgcgccgcgagcctccagcg

SEQ ID NO: 16627 - DNA, 695 bp, Homo sapiens
  source 1..695: mol_type = other DNA
agtaatgactcagtaaatatttgtagatgatgaatgaagactagaagattcgaatggaattcttctaaaggtagttcgtttctgctttaagagactatggaatttagaaatccaaagaaactggcaggtttgttacatgtggtttgactcaagcaacacaggacccttgtcttgcctagccaggttgagttctaacacacgactctgtgtgtgctgtttggttgataagcacctatcaaagatgctgtagacatccccacacagggtatgaacatagctgagacttttcaagccttcgcaggtatcacagagcttggaaagcccagcacttgtagttagttgcaactagcaggcagccctagctgtttattacctgggactctcgggaaggcaagctcccggtgctggggaggacgtttgtcccaggcagttggaagctgaagcacctgccatagcgcttgcgccccggagccgggcacggcgtcgcgggggtggggaggcggctcgtccccgagctgcgctccctcgcgtacagcctcggctctgggtgcgaagatcctctctgcctccgctcacccagccgcgccgccgcgcgggaacgcgccccagcggatgccctcttgagggagcgcgcacgcgccgcctctccccgcctccccggtgcgcgtcccgcccccttgagctgcgatacgccg

SEQ ID NO: 16628 - DNA, 618 bp, Homo sapiens
  source 1..618: mol_type = other DNA
gcgacgagggggcagcggccggctctccagcagctgcgcgcgactgtcccgggccgaggccgagggacaggctgcgagggtcatggctgcaggcggcgagcccacaagccggcgccggccgcgtccgttcggcgtctccgcgaggccagccagcagccagcgctgcgcagctctcaccgccggagccctgcgcggcgctggaggctcgcggcgcggcggcggggcgggacggacagcgggcctctccaatggccgggcgcggtgggcagctaggggcgaggcggcggggcggggccgctctcccgcaggaggagtcaggcccccgccctccggccccctccctcccacccggatctaggcgcgcaggggccaagcagggacgcagcccagtggctccagccacgccgtcctgcccccttctgcaggtgagaagtgcgcctccggaccagcggcgatcggggcccggcctctccccgcccccagactcgcccgacctgcgcagggagccgcccacctccagccgccagcggggaggcgccccagagctgcggagctgcagacccgccgacggtctcgcgctctgatttcctcaccgtatgaaatgaaattccacagggg

SEQ ID NO: 16629 - DNA, 475 bp, Homo sapiens
  source 1..475: mol_type = other DNA
agttgggaacctaaagacctatgtttgaatttggttttttccttagcttcctcatttgtaaaataggaagaaaaatggtatctattattaagacagctgggatgactaaatgacataatttataaaccctctggcatatagcgagtgctcaataaatgtttgccattattattatttgtaataatctgaccgattgttaaaactgtaggctaaaagtcaccagtgcccttggcgttaactgattaccagttgaatgggtgtccacctccaagctgctctcagcattgccattcattgagaaataacaggctgtgagagctcaaattcgcccagccagtcttgggcttcctaatactgacctgtggtcaacggggcctttttttcaaacgtgctgccagtccctgtctcctcccctctccaagaccgcggagtaggaaggaggattaacccctaggggaggagttccgccccccag

SEQ ID NO: 16630 - DNA, 490 bp, Homo sapiens
  source 1..490: mol_type = other DNA
aaaatttaccttcttgtaggtggagacagacaagacaaaataagtacaatttgtcatatattaattggtaataaaatgtatattggtcaagttgggaacctaaagacctatgtttgaatttggttttttccttagcttcctcatttgtaaaataggaagaaaaatggtatctattattaagacagctgggatgactaaatgacataatttataaaccctctggcatatagcgagtgctcaataaatgtttgccattattattatttgtaataatctgaccgattgttaaaactgtaggctaaaagtcaccagtgcccttggcgttaactgattaccagttgaatgggtgtccacctccaagctgctctcagcattgccattcattgagaaataacaggctgtgagagctcaaattcgcccagccagtcttgggcttcctaatactgacctgtggtcaacggggcctttttttcaaacgtgctgccagtcc

SEQ ID NO: 16631 - DNA, 244 bp, Homo sapiens
  source 1..244: mol_type = other DNA
ttcttggcttcttgaacaaagaatcatactacaaagtcatttactcagtctttcttggtcaaaaatctttcaaaaatgagtaagacagtgtcatttcacaaaggacaactccattgtgtaattgacacattgaatcactcataaaacaggtctgaatctagatcctagctatagctgaaatcatagaattatagtagagtttaggaaatcatcctcaaaggaaagattatatgttgatatcaaa

SEQ ID NO: 16632 - DNA, 343 bp, Homo sapiens
  source 1..343: mol_type = other DNA
ggtctgagccctcatctatgaaggttaaacgtatcattcctatcagcactaattggttttataggataaggttctaaactgtagagcctttgaggagaaaggtaccccatttcttctcaatggaaaaattgtgcaatcatagagcttcagccgaccagcgaatttttaaaaattatttttgtagagacagggtctgctgcattagagcaggaactgtttgaggcaacaagatggagcctctggtttcttcagcacaattaaaattgaaattgggggattctttcccctattgaaatccaaataattttcctttattgtgctttttttttttttctttaggacc

SEQ ID NO: 16633 - DNA, 270 bp, Homo sapiens
  source 1..270: mol_type = other DNA
cctctgtaacataaaaggggttgagcaaaaactgcaggtttgcacaaaaactgaattctgctgaatgcaaacaggcaaacagatgttagctagcacaggaacgaagtctgggcctggccgtgcaaaattttgaaacgtccccctagttctgggtccagttgcagccaagtgaggggcagcgcgcgctcccaagtccccgtttcagagacgcgcacgcgcctggcggctcagtgaccccgcccacgggtttccgggccggcgtagcaaggc

SEQ ID NO: 16634 - DNA, 440 bp, Homo sapiens
  source 1..440: mol_type = other DNA
caaggtgtggtagatacatctctttttcttgttgttaaatcctgaagctatcaaacaaaaacgaaaataatgagcattagtaatgaagctgctgcaagaggaaatacaatgggaataataatcatattactgcaatgtctttcttttctttaaattaagctatgcaagtaatttatacaatcgccttttcagaggcagaaatgaagtctgcttttgtacttaaagataacctcagcatagctgacaatcatgcaaaatggtattattaataagtaacatcattagaggccgttctctcccatggctcccagagggaacgtgaggctgccaacccccgccgcgcgctgcgggagtataagccagccctgcgctgcgcttccagctgcgtctgcccgagcgcggcacgtgctcccggcgctggcgcgagagagcgagcgcca

SEQ ID NO: 16635 - DNA, 374 bp, Homo sapiens
  source 1..374: mol_type = other DNA
aagtactaaaacttgttttgtgaattgcagtcaaagaaatacaaaaccaacaaggtgtggtagatacatctctttttcttgttgttaaatcctgaagctatcaaacaaaaacgaaaataatgagcattagtaatgaagctgctgcaagaggaaatacaatgggaataataatcatattactgcaatgtctttcttttctttaaattaagctatgcaagtaatttatacaatcgccttttcagaggcagaaatgaagtctgcttttgtacttaaagataacctcagcatagctgacaatcatgcaaaatggtattattaataagtaacatcattagaggccgttctctcccatggctcccagagggaacgtgagg

SEQ ID NO: 16636 - DNA, 366 bp, Homo sapiens
  source 1..366: mol_type = other DNA
cattcactcactaattgagaatgtctttgcacaaaacacattgcaaaaacattttcaaaaaaattcctaatttctagaattgataggaatctttagctatccttaggagttgtcagaaaatgcatcaggattatcagagaaaagtatcagaaagatttttttttctgatacgttgtataaaataaacaaactgaaattcaataacatataaggaattctgtctaactttcttaataagagaagctctattcctgacactacctctcatttgcggcattattattactaaccttattgttaatattctaaccataagaattaaactattaatggtgaatagagtttttcactttaacctatcccact

SEQ ID NO: 16637 - DNA, 369 bp, Homo sapiens
  source 1..369: mol_type = other DNA
ttgagaggattcctattacttacaacttaaaaccaaatttcgttaccaaggctctttgagatgaacttttttgaaaacaatcagtctaaaagagcgagcctggcaggcctgggtagaggctgcgggggacgcctccaaggggccggcgcggcggagcagactggtgcagcctgggccgcgcgctcagagcgctgggcgtctgggcagctgagtgggcagagctgacccggtgcgggtgggagtcagggcgcccggaaaacccggctctgggtagcagaccccgcccgggctggctcggcgccgggccttcgggcttagcggcccggcaggccgcacaactgtaaccgctgccccggccgccgcccgctc

SEQ ID NO: 16638 - DNA, 372 bp, Homo sapiens
  source 1..372: mol_type = other DNA
attagttgttaaatctagaaaagttattggtttaacaaacctttattggatatctattttgcatcagattttttttgagaggattcctattacttacaacttaaaaccaaatttcgttaccaaggctctttgagatgaacttttttgaaaacaatcagtctaaaagagcgagcctggcaggcctgggtagaggctgcgggggacgcctccaaggggccggcgcggcggagcagactggtgcagcctgggccgcgcgctcagagcgctgggcgtctgggcagctgagtgggcagagctgacccggtgcgggtgggagtcagggcgcccggaaaacccggctctgggtagcagaccccgcccgggctggctcgg

SEQ ID NO: 16639 - DNA, 378 bp, Homo sapiens
  source 1..378: mol_type = other DNA
ttaattggaataagtatattgcatgtagtagagtagtagtattttttgaaattttagttttaattatagtaagattttttattttaagagtttaaaagccattcgattaagcaactagtagtaaacttttctgtctctcattagttgttaaatctagaaaagttattggtttaacaaacctttattggatatctattttgcatcagattttttttgagaggattcctattacttacaacttaaaaccaaatttcgttaccaaggctctttgagatgaacttttttgaaaacaatcagtctaaaagagcgagcctggcaggcctgggtagaggctgcgggggacgcctccaaggggccggcgcggcggagcagactggt

SEQ ID NO: 16640 - DNA, 554 bp, Homo sapiens
  source 1..554: mol_type = other DNA
caataattattattattgtgtaaataattattatataattttaaaaatatgaatacgtaacattgttatagatagttatgtacatatatatgtaaagtttcagttttaaaattattgaaaagggtggataaataaaaaacagattttattttcatataaatccatcattaggaaatagtcataaaatagtaaaaataagttaaacaggccgatacagctaattatatcaaccattatatatacaattttgtgaaacacaattgagttccttgttatacttttttaaacaagagagtgacacatcccagttaatgttttatctttgaacatattcagacaaataataagcaattataattttaaaacagagtgagaaacaaaattttaaagttagcatgtggcccggtaaaaatagcatgtgataatatgtagtgaaataattgttatacttaaaatatttctttgaataaacagtgttaagtcaacttttgttgagctttgagccctcaagtctggttttcaatactttataaaggcccatacactttaaaagg

SEQ ID NO: 16641 - DNA, 449 bp, Homo sapiens
  source 1..449: mol_type = other DNA
gtagtagaatgattacccaataaccaatgaggtacagatgataatatacccatctttttagaggaaaggaagatattttagggaaattcaatgggcttgaagaatatgcaatggctggacaaagtctgttggccctacagggacagaaggctgccagttgtattgacagactgcagtccttctcgttaatgaaaactcaggaaagaaactctttttttttttgtttgtttgttacagctttattctggggaaattggtgtctgagctttagcattaagaacagactctcagtaactactggcagtgcaaggtcctttcagtgattacttttactaatgtgaacctaaaacattccagtgaggtaggtaaaaacctcagttaatgtggagttttgtttaagtaaaggttagtgatgttaacagctttaaccatttccgagtccctactat

SEQ ID NO: 16642 - DNA, 382 bp, Homo sapiens
  source 1..382: mol_type = other DNA
ctacagggacagaaggctgccagttgtattgacagactgcagtccttctcgttaatgaaaactcaggaaagaaactctttttttttttgtttgtttgttacagctttattctggggaaattggtgtctgagctttagcattaagaacagactctcagtaactactggcagtgcaaggtcctttcagtgattacttttactaatgtgaacctaaaacattccagtgaggtaggtaaaaacctcagttaatgtggagttttgtttaagtaaaggttagtgatgttaacagctttaaccatttccgagtccctactatcccatcgagggcccctggggaccacaggtccccagcgggtagaggccacccagagctcacagcctcc

SEQ ID NO: 16643 - DNA, 390 bp, Homo sapiens
  source 1..390: mol_type = other DNA
tctctaaataaccttgagatcaatggaaacagtgtatagatttttaggttcacttataagctgctgatcttattttaagatccttcagtatatgttatcaaaaagtgtttgcttttcttgcaaacgcccatgtttgggaaatatgcaagttgacattactgtactttttataatgcaggaggctcacatgaaatattaactattaccccagggcttttcaaagtaatgtgaccgcaactgttaagttattaaaattgcacttactgtgcacttatcccttagtgctaagggggctaccagctgtagtccgaccgtggcccgggctagtgccagcctcgcctgcgcgaccggaaaattcgcgaaggttcctgaaacgcaacggatcgtttc

SEQ ID NO: 16644 - DNA, 483 bp, Homo sapiens
  source 1..483: mol_type = other DNA
aaacaatacacaggttgagcactgtaacttatatataataaagttggggaaattagagaaaggttaaattacagtgcatttattcaacagaatactccgtcatttgtaacaatgactatgaaacaaaaacgttaggttaaacatacctatctatggtggatcacaatatgaaaatttaatacttctaggtatctctaaataaccttgagatcaatggaaacagtgtatagatttttaggttcacttataagctgctgatcttattttaagatccttcagtatatgttatcaaaaagtgtttgcttttcttgcaaacgcccatgtttgggaaatatgcaagttgacattactgtactttttataatgcaggaggctcacatgaaatattaactattaccccagggcttttcaaagtaatgtgaccgcaactgttaagttattaaaattgcacttactgtgcacttatcccttagtgctaagggg

SEQ ID NO: 16645 - DNA, 402 bp, Homo sapiens
  source 1..402: mol_type = other DNA
tataggataatcagtcattttgattttagtgttggggtcataagattagcccccattagaagttatctattattattatctttttaataaagcatacatctatttaagtattatgtgtaaatatatgttggtaaatatgttaaagtattggctaatagaatataacagtctacccactttgttctgagccctatgggacgtcaaacgacaactgatgggaggtcctggacgtccacctagacactatatactcagggacagaagctagacgcgctccgcagcctgaggtgggccaggcacctgctgggctcggggtggcagagacagctgtgcggtcccagctgttcctgagcgcaccgctgagggacgcacgcctcctcccttgcacacgcgagctgggca

SEQ ID NO: 16646 - DNA, 436 bp, Homo sapiens
  source 1..436: mol_type = other DNA
tttttaatctcagaattttaaatatttaacaccattgccatatagttatcagtgaaaaaaaaagaaagcgattttaaaattaaaataaatattttccttttaaaccaaaagcttgcttcatccattgattcatcgaatattcattagctccagctctgaaggcagaaggattctacttctgcctttagcgttaatgtaaatattagaattatctcacaaattgtagtcagaattaaagataatgtatgtagtgcttaggagtacttgaaactacatcagtacacttacattgaaatatcctgaaagtgaaattgtatatgacttaattaaattctatttaagtgtctcctgtaactctaactatagaaacagtttaagttcggattcggcccctcccgcccctcgccggcggtgcccgccgagccgggctgtccca

SEQ ID NO: 16647 - DNA, 457 bp, Homo sapiens
  source 1..457: mol_type = other DNA
tgatctaggtttacatcttgatgtatcatccatttcaagtgcaaatccatggacaaatccatggacatatcctgaaagaagctattaataacaccaatgttacattcccttccttgggttagaaaaaatacattgacccaacgttttcagaataatgaaaagtttcaagttaagataactgaaacacctgttagaactgatatatcaatttgtcaagaaacagcataatggttttataaaattaattcatagaatattaaatagcaaattagcagactttaagaattaagtagtcgactccatgtgttaggaaggaattatttggttaaaataaatcaaatacaaaattcaagtgcttaaaacaaatttggaaaacatatattctttcctattatttcctctatgaaatggagacagaaaatctaaggaaagaatctggaatcagtcccgttgagtt

SEQ ID NO: 16648 - DNA, 231 bp, Homo sapiens
  source 1..231: mol_type = other DNA
ttcagatcttcatttgattagatgaagtccacccagatgagggaaggctacccattcaaatgttaattgtatccagaataatctttggccaaaagtctgggcacccatggtcttaaaatattatatctgcaaagaccctatttctaaataagctcatattctgatgtaggttctaagttcagatggatgtagctgagagcagctgttggcaggtttttaaaaaatgttagt

SEQ ID NO: 16649 - DNA, 420 bp, Homo sapiens
  source 1..420: mol_type = other DNA
tagtcaatattttacatttcgaagatagtttttaaaatcacctactgcatcagtagtaatacaagctgcgtaaagaactttataggcaatcaattaattctcacaactctgtgaagtaggttttattattcgagtttaagaggtagatctcaaacctaaacgtgttatttatttatgctgagctgcgcacacatatgcacgtgtaagttacaaaaaaatctctgtccggtttttaagcacccgctgcgcgggagccggaggaagcgcgctgagcctgcagaggcgaacttcctggaggcagcggcagcagcaccgaggcccgggcgggggctcggcttcccggcggcagagggcgcctggcgctgcggtctggcgcgccagagtcgcccgcgcgggcgccgagaggagaggcgaggcggg

SEQ ID NO: 16650 - DNA, 376 bp, Homo sapiens
  source 1..376: mol_type = other DNA
gttttaaggtgaaaaggtagtcaatattttacatttcgaagatagtttttaaaatcacctactgcatcagtagtaatacaagctgcgtaaagaactttataggcaatcaattaattctcacaactctgtgaagtaggttttattattcgagtttaagaggtagatctcaaacctaaacgtgttatttatttatgctgagctgcgcacacatatgcacgtgtaagttacaaaaaaatctctgtccggtttttaagcacccgctgcgcgggagccggaggaagcgcgctgagcctgcagaggcgaacttcctggaggcagcggcagcagcaccgaggcccgggcgggggctcggcttcccggcggcagagggcgcctg

SEQ ID NO: 16651 - DNA, 433 bp, Homo sapiens
  source 1..433: mol_type = other DNA
ggccgaggcctgagagggcgaggccgtccgggcctggcgggcgggggaggcgggccccttggtccggaggatcgagactccgcaggccactccgcgccacgcggctggtatgagtcccacacaaacgtgaagtttaaccttattacgtgatttaaatgatttaaccttcgtcgggtaaagcgccgctctctgcccacgtggtctaaacacttcgaaaaagtgattattgagctagctttattttgataatccctacttttaaaaaaaattaactacaggtatacatatttaatgactttgtagaatcttgtacttaaaaaaactagtaagaccttgtaccaatattttaaatattttgctagttcatcctaggatttatatgtaatgactcaatgtacaataatgaaataagtagttatctttaatttttgtt

SEQ ID NO: 16652 - DNA, 180 bp, Homo sapiens
  source 1..180: mol_type = other DNA
aagatcgcaccgttgcactccagcaaaaattactttgaccaaaactaaactagtttacactgtttaatcttaactccacaggtctcacttgtgacatgttaggccttccgggctgagaggctgtttcctcacagttctcagtcctccctgcgcggcgagaaaaatggcgactattacttg

SEQ ID NO: 16653 - DNA, 369 bp, Homo sapiens
  source 1..369: mol_type = other DNA
ttaagtacaagattctacaaagtcattaaatagtatacctgtagttaattttttttaaaagtagggattatcaaaataaagctagctcaataatcactttttcgaagtgtttagaccacgtgggcagagagcggcgctttacccgacgaaggttaaatcatttaaatcacgtaataaggttaaacttcacgtttgtgtgggactcataccagccgcgtggcgcggagtggcctgcggagtctcgatcctccggaccaaggggcccgcctcccccgcccgccaggcccggacggcctcgccctctcaggcctcggccgatcgtggcccaagtaatagtcgccatttttctcgccgcgcagggaggactga

SEQ ID NO: 16654 - DNA, 480 bp, Homo sapiens
  source 1..480: mol_type = other DNA
gttggggctaaagttacagattaacagcatctcaaagcaaaacaatttttctttgtgcagatcaaaacggagtttcttttacaaaactatgtttaaaataatttaagtatgattatataagattatgccattgcactccagcctgggtgacacagcgagactccgtctcaaaaatttgggaccgttaataaacagttatatatatttgggagattagattacatgtattaaatcaagaacaataaaagctggtatttgataaagtactaaagtaaatataacatcctaaatgtttgcaatagaatgattatagaggatcccagtttctaagcaacctgtgaatctttggaaaattagaaaaaaaaatttggaagaatatttcaaatgtgctaaataggcatgttaagattaatgaagtgttctattaacagttttaacgagaactcctgcagtactcttagaaacacccttaagagtctt

SEQ ID NO: 16655 - DNA, 612 bp, Homo sapiens
  source 1..612: mol_type = other DNA
ggttattattacagtattgttgtagtagcaaaagaattagaaataatcagtgtcagttgatataaaagaatgaggaagctcttttatgatttcatatacaaagatctcaaaactatattgttacatgaaaaaaagttacatgcagaaaagtgtgtacaaaatactacatttgagtaaaaataaaagtaagtatttatggaaggatctttttactgaatacatcgttttttgaatttagaacatgtgaatgtattacctatttaaaaaataaaaactattgcaatctaatcaataatttgagtactaacatattgtttgtcactaccattatgacactactccagatatagtggaatatcgatcaaccaaaagagacgcattcaattgggcgagattaaatcagctgatacttatttagaaaaagaaataattaaggttaattaattgattgacttattaattaatactgatataaaaccaataggctcatgcaagaccctgtctatttttttaaaaaagtaaaaaatagaaattatctcactacttaaatcccatttttttcacttcatatgaaagaacatattgatagtatattctatattatttcataga

SEQ ID NO: 16656 - DNA, 517 bp, Homo sapiens
  source 1..517: mol_type = other DNA
tatatataattccttaaacgaaatatagaggtttgtaatataaaataatccatctttgtctgtggtgaaatacgttcttggagacccaaagatcttttaaatattatttgcaggccgcatagctcctcaggaggctaaggcaggagcatcgttggagcccaggagctccaggctgtagcgtgctgacagcactagcgagatcaacattatttattctgttactcgggcataaaataaatattaagcacttactacatgccagagtctattatgtctgctgcagatattggctgtcatagagttataactaacaggaaaccaaataattacgtagtataattttaagtggtgataagttcagatagtgtttctttaaaaaatttcttgctaatttaaaataacttttgttttgactggaatgcagcggtgagatctcggctcactgcagcccacccgcgtagctggactccactttttaaacaaacgcaggcttaaaaagaagcgctctagggaaccc

SEQ ID NO: 16657 - DNA, 512 bp, Homo sapiens
  source 1..512: mol_type = other DNA
aaagagtttactcgtaatagtctcaaatttatagaaactggattttaattatattattcaaaagcaggtaataaattctaaggactgtcgtcttagaaggaagtaggttttagtggtgagaaattccatcctacttctcatgggaagatttttacgcagtaagactgcctacctactcttattttaaaggaaaaaacaaattaatatatagctttttcaccagcagccatattatgtgtcaacagaatttgaattgttaaaatacgtggtagcttattatattcatcaagcagctgggagcctcccaacatgctgggattgcaggcatcttgatatacagatgttaatcatgaggtctgatcttcaagtttagaatatatcttttgaaaatgaactatgattatactttatgaagacagtttacttctttttataaatagtttgtgccattcctcaaatgataagaaatcccaaaaatttgctactaagctttatgtcctagagcataattt

SEQ ID NO: 16658 - DNA, 512 bp, Homo sapiens
  source 1..512: mol_type = other DNA
gtcttgccagagtctgtgaacagactagttttattttaggacatgttctacttacagatcatctcagggtaatttcaaaagaatatcctgtgaaatttcatagaattatatattaaagagttgtttttaaaaagctccttaggaggtaggattgttttacattttaaaacttgtaaaataaaaattaaagcttgagatccttttgtggttcaaaagcatgattgggctttcatgcttatgcatgagttgtgactccctcaaaccttattaggatgtcggcgcattacccatctgacatgagaaccatgttttgactaaatattatgtagcatttactatgtggatattggtatttaaaatggctgtttttgttagtttcataaacagacatcatgatgcctcatccagcaagtgcaccttttggccacaagagatcaagcttttgataaaaatgaaattaattcattacagtccagtgaagcttctggaaaaaataattaaacaagcaaagc

SEQ ID NO: 16659 - DNA, 326 bp, Homo sapiens
  source 1..326: mol_type = other DNA
tggccagaggaatggcactcatgctgtcccagcactactgccttcagcactggtgacaaaattgctgctagtagtagtaaccaggtaaccaggccccagggacttagtggtcagagggtgccaggggaataaatcagttggccaaatttatgtcatatgtctttgcttaagcggtggagtcctattccctccccctgggttgctgtagtatcagtgagcaccccaacaaaagtttacttcatggtcgtgatgttaagtcactgcagatatctctgctgactgtcagtcaagtgtcctttttcattcacagatgtcacagcaccagg

SEQ ID NO: 16660 - DNA, 341 bp, Homo sapiens
  source 1..341: mol_type = other DNA
tactgattagtatgtaaaatacaagaacatgacttgtttctgaatcatataaactttgattttcttgtgcacaaaacattttagcctgtatgttgtcatctgcagccagtgactttccaacgtgtaacaaattttgaaacatgcccaacatttagcttccaataaatcaaattatttctacttatgagctgttcagaagcagcttcacgcggagctcctggaagggtccagcgcgcagctccttctaacccggtgccgctcagtgggaaaatccctttgtcagagagtggcccgaggggcgcggaatgcagccgcgcccaccccgccccgcgtcaccggac

SEQ ID NO: 16661 - DNA, 445 bp, Homo sapiens
  source 1..445: mol_type = other DNA
atttagcttccaataaatcaaattatttctacttatgagctgttcagaagcagcttcacgcggagctcctggaagggtccagcgcgcagctccttctaacccggtgccgctcagtgggaaaatccctttgtcagagagtggcccgaggggcgcggaatgcagccgcgcccaccccgccccgcgtcaccggaccagagcgcggcgcagctggctgtgagcgcagggctatcccggcggccgcttcggcagccagggcggcgcggaggggcggagagggaagcgctttgttccgcgcgtggttcccgcgcctgggggtgcgcgggagaggcgcgaatccgagtgccgcgcgcggcccggggacttgcacgggcgtgcggggtggaaccgcaggaagcggagctctcgggttcccgccccgccccgccccgccggcggcggaggcagc

SEQ ID NO: 16662 - DNA, 242 bp, Homo sapiens
  source 1..242: mol_type = other DNA
gatcatctctgctgacatttcaggggcattgatttactgctcaattatcaagcaagcccaaaatggtcattcttccactggcatgccaccgccgcagaagctctggctgagcagcgggccccttaccgtgatcattatgtcggcaactgccaggttgacgatgaacacaatgagcagggctttcaccgtggggttctgggactcagcgccgtagcgcctcctgcccacaatctgccagtcgg

SEQ ID NO: 16663 - DNA, 396 bp, Homo sapiens
  source 1..396: mol_type = other DNA
agaaagccttttaaccaaggccaaaaatgttaaatggcttgcccaagatttcacagctaggaagtgaaagctgggattaaaccctaattacagagcccatggtctttactacagttttcaataatatcccttaaagatatagcttgaagagtttccttgaaaaacaaacccagagggggctgtcaaagaaactgatgtatctggatactccggggacttggagaatcccgggacgcagcgatccatttcgatattgaaactgccaacgcgctggggactgagcccccgaagcgaagccctgcggcgccacccggtagggtggggggggtcaccgtcgccgcgagagacgccgcgctgcccaataggcagaggcgctccctagcagcctggtgggag

SEQ ID NO: 16664 - DNA, 552 bp, Homo sapiens
  source 1..552: mol_type = other DNA
taaatatttaaaacattccaaataccctttttgatgactaatatttctgttcataaacaggttccttatttactgcttattaaataagttttcttttactgaagattcctgggaccaggttcttctccaagaacccctgggtactgtatcgattccaaattctagaaattctaaaaacaaaattacatcataaaacacattttttaaaagcctgtttaacctcttaattagactggcaaatttagaagtctcattttacttttttttaatgaactgagcatagaaaataatatatctccagtgtacattcccgtgctcttatgggaaattaatgtatgctaaataaatacacaaacaactctagatgtgcagatatttttaagttgactctggagaacagaggcaatcctgtatttcctattcaaaccccacgattttttttaaaggacctggctagtttggaacccgcgtttaaagcgagtggctgccaccgcgagacaacccccaccacatctggagctccagattccgtcgggattccaaggctgagcc

SEQ ID NO: 16665 - DNA, 534 bp, Homo sapiens
  source 1..534: mol_type = other DNA
tttcaataaaaactccctttatataaattttgagtttacagatccagatacaaaaaattatgtacaaaattttactggtatatttagtttaaaaagccaagcctagatgatattcctgatattccatcaggaatgtcagggtatgtttcctaacagaggttcagatagattaaaacaacttgccctagatcaaggacccttcaatggaactgaaagggcagacgttctaattcaaaagttctctgctctcagcacaaagcagtgcagatgtgctgagggagggagaggggatccagctccggcactctgccaccagccgggagctcacaggcccgtgagctccgcctgcggcctagcggagaagcggcttcggtcctacctggggaccacgaagcggcctgacctgcagggctcggcctgtgtccacaggctacccacccccacgggctcaggagttcttagactcaggattggctcctgcgtgagggcggggcctcgccgctactttccccgccccctcactgcgtgcggtag

SEQ ID NO: 16666 - DNA, 444 bp, Homo sapiens
  source 1..444: mol_type = other DNA
tacttttttttaatgaactgagcatagaaaataatatatctccagtgtacattcccgtgctcttatgggaaattaatgtatgctaaataaatacacaaacaactctagatgtgcagatatttttaagttgactctggagaacagaggcaatcctgtatttcctattcaaaccccacgattttttttaaaggacctggctagtttggaacccgcgtttaaagcgagtggctgccaccgcgagacaacccccaccacatctggagctccagattccgtcgggattccaaggctgagcccagaaacaggagacgaatgcgattcctgtcttcttttcgggaagaaagggcaggagagaacggcgtccgtttctctcctaccgcacgcagtgagggggcggggaaagtagcggcgaggccccgccctcacgcaggagccaatcctgag

SEQ ID NO: 16667 - DNA, 524 bp, Homo sapiens
  source 1..524: mol_type = other DNA
attcatatggctaacgcaaatttattttctgtaggcataagtgggactccactgatgcacagctgtgatcaaattcaacccgtaggtaaaaaatttctcaagtgactgtagacgtagatgtctccagttatcatccaaactattttgcataactttcatgggtgcagaaaatgttttttaagtgcttggtaaaattaatagtgatattcattcattcatctcactgataaattccttacgacttatttggtcaaaggaaagaacatgttttgattgctaagaaaacattttgttctctatcctttactgggctggcaggcaaaggaaatgttcttatgagcactcacattgaaaacttaagttaaggccacgccgctgcgggctgcctccccgtctcggcgggccacgagatcctggccacggatgcggtggccgcgcctctgctcgctcaatccctccctccggcgggcgtcgctggcgggtggctaggcccaacggcaggaagccgacgctatcctccgttc

SEQ ID NO: 16668 - DNA, 494 bp, Homo sapiens
  source 1..494: mol_type = other DNA
tggatacaatgctactgaaatttaagcaagatatttaaagaaacttgacgaacttattttaaaatttatatggaagaataaagtctgtgaataagtattagagaaagtatatgctatttaacagatgattcactatatggagataaagttggacttctatctcactcacattgcatgtatacttacatatgtgtgagtgtaaatacaagttaatgaaaagaaaatattatataatgtccttgtccttgtaattcttttaaaaagacaaaaagcacgaattttaaaatggctgaatttgacaacatcgaaatttaggattttggttaaagcatttcatagtaaaaattaacaagtgatagataggaagtagatatttgcatatttgcaattttttaaaaaaaagttttcttccaaatcacaaagatgtcaactttaaaaatgatttgcatgaaaaaaaaattattgtttgatgccacccaatgcccacgtgctcg

SEQ ID NO: 16669 - DNA, 340 bp, Homo sapiens
  source 1..340: mol_type = other DNA
gctaactctgtacagttacctagctttctcttctccaagcagtagagctgcccggaaaaagccagggcaggctcgggcaccccagattagggctccggcagataacagcctggggatttatggctgtggccactttctacctggaaattccacttcgccctcctaagtctcagggagacacgtcagccctggcagtctcgcggcccggggaggggcggcgggtgtctgcagacgggctctagggcccagcggccgggcgccacggcgggggtggagtgtagggttctagtgacgagcccgggcgaccctccccggcccgcgcgcggggagcggggagcgc

SEQ ID NO: 16670 - DNA, 411 bp, Homo sapiens
  source 1..411: mol_type = other DNA
tctttcttcattaaaaagttgcaaagaatttaggggtaagaaagcatttaaatattcaattttgtgagttccttacattttaaactaagttgaagttgaattttcatttgtttaacaaatattaattgagcagctactatgtcttattaaaacttaacacttaagtagccatcttaataattaaaaactaacgttttttaaataagaaattttagcaaacattacgaatacaacctttgctttgaagtgttaatatttttgcaggaatggtaccttttctttcttcatatccaattaaatgaaaacactagtttcccgctagccggggacgtggtgtcggctacccgggtccgtccacgcgggccgcacttcggccactgcggattggtcgcccgaagcgctagctctggg

SEQ ID NO: 16671 - DNA, 447 bp, Homo sapiens
  source 1..447: mol_type = other DNA
ttaaacttcaatgacagttacacagaaaaaaattcttaaacaaccgtttgttgagccaattttctcctacaacaggcatcatactataaattagatcgtttgtgggttataatttacagggactcattcctcaagttactttctgcttggagcagtcatctctcaactttcaaaaagggtagagacaatctggcgctgggggcgccgccccttcccacacacccactcttcacccgtgcccagcactgcaggggtgcgaagggtagggttcgctttacgcagaggcgagctgcctgtacgctgcgacgggcccaagagctccagacgcgcctgacaggcactcggttccggggcctacgtcccatcgcgataagaaagataatctcctatcctcttgcctgcgcccagagctagcgcttcgggcgaccaatccgcagtggccgaagt

SEQ ID NO: 16672 - DNA, 538 bp, Homo sapiens
  source 1..538: mol_type = other DNA
ctgaatgtagctgtcagggtctcacagatcttgcctatctcaggacctgttgaccaatgacgttggaacacttgcaccaagaaaaccacacagggttatactgtctgcctagtttaggaacttcctttaacagtatttctttactctctgagtttctggtgagctaaaaaaacataacaaaaaacaaaaaactccatcaaaattgtatgcgtgtgctgtcatgaaatttcagaggggaaccgccacccctctgcatcaccagggcggccgtggggcgcgcgcgatcagcaggcttcttggcgcccgggactaggcctcttggtagcgcgcgtcccccggactgctgagaccaggcggcgcggaggcaggtgacccgcgtctccagtcccgggcgcagcccagggtacgttgtcagcatcgcggagcgcggccctgggcctctgcagccatcttcagggagggaggcgcggcctcccgacgcggacccgcccccgccgcccgggccgccccgcccggctccgcagagcgccgcgcctag

SEQ ID NO: 16673 - DNA, 432 bp, Homo sapiens
  source 1..432: mol_type = other DNA
tcctgacgtctttctgtagtaggacctcttccctggtgacgtcacaaggtagcgcgtaacggggcccgctggggcagacaacgccggggttacaggccggctctgcggggattctacggagggtcgggcctccagttctccaggtgaagtatttaccttttggttcgcgaacatttgctcaattggctctcagccaaaatagccgctttcgcgcgctgagagctccgggatgtcattggccggcgacatcctgcgatagccttcgcagccaatcagggattctccctccgccgctatcggggcctaagcgggagcggctgcggagggagacggtggcgtcgtccgcggggccctgggctctcgcggcgaggccctggtgggcgcgaggcaggggaggaggaggagcccgcggcccgggcggcggcggctctc

SEQ ID NO: 16674 - DNA, 407 bp, Homo sapiens
  source 1..407: mol_type = other DNA
agccgcagagacagacgccgccgccatctttcagcctgcccagggggtctccgcacttcgggggggagccgcccaccagcggggaccctaggctgaactgctggtgctgggcttggaaacccctgcatcctgacgtctttctgtagtaggacctcttccctggtgacgtcacaaggtagcgcgtaacggggcccgctggggcagacaacgccggggttacaggccggctctgcggggattctacggagggtcgggcctccagttctccaggtgaagtatttaccttttggttcgcgaacatttgctcaattggctctcagccaaaatagccgctttcgcgcgctgagagctccgggatgtcattggccggcgacatcctgcgatagccttcgcagccaatcagggat

SEQ ID NO: 16675 - DNA, 442 bp, Homo sapiens
  source 1..442: mol_type = other DNA
aaaacaatatttaaaatcaattcccagggcatttccacattgaagttccagtaggtgcaggaagcggcgctcgagagacggcggactactattctgcaacgtctgcgcctcacctgatctggcgagttttatcccagccggcccttgggaatgcagaacaggggcggccagcccagtttcactgggagccagagcagcgggagcgcggggcaatctaggcattcccgccgacctccagaattgcagaggcgcttagggccgacgtggggcccactcgcgccaactgcttctagccgcagagacagacgccgccgccatctttcagcctgcccagggggtctccgcacttcgggggggagccgcccaccagcggggaccctaggctgaactgctggtgctgggcttggaaacccctgcatcctgacgtctttctgtagtagga

SEQ ID NO: 16676 - DNA, 424 bp, Homo sapiens
  source 1..424: mol_type = other DNA
gagccgccgccgcccgggccgcgggctcctcccctgcctcgcgcccaccagggcctcgccgcgagagcccagggccccgcggacgacgccaccgtctccctccgcagccgctcccgcttaggccccgatagcggcggagggagaatccctgattggctgcgaaggctatcgcaggatgtcgccggccaatgacatcccggagctctcagcgcgcgaaagcggctattttggctgagagccaattgagcaaatgttcgcgaaccaaaaggtaaatacttcacctggagaactggaggcccgaccctccgtagaatccccgcagagccggcctgtaaccccggcgttgtctgccccagcgggccccgttacgcgctaccttgtgacgtcaccagggaagaggtcctactacagaaagacgtcagga

SEQ ID NO: 16677 - DNA, 243 bp, Homo sapiens
  source 1..243: mol_type = other DNA
tactatactgcgcagtaatcactaattacgtgtgtataagctttccaatgccgcggttttcaaaaacctaagcattcgacactccaataaaacaatatttaaaatcaattcccagggcatttccacattgaagttccagtaggtgcaggaagcggcgctcgagagacggcggactactattctgcaacgtctgcgcctcacctgatctggcgagttttatcccagccggcccttgggaatgca

SEQ ID NO: 16678 - DNA, 694 bp, Homo sapiens
  source 1..694: mol_type = other DNA
agagctctaataatctgaccagttttcagtttagtttgattcttctctcagttaagtgatatttaaataacttgagattctgagaagctccttaaacgtgctggaactcaaggtccttcctgccctccatatttatttaaatttcccaataagttctttgaagaaacaatactctggagaaaaaacagacatatgtaaattattttctatacaaactggttgtttatgaaatcatatgcctgtgttatattttgggaaatgtaattaatagacctggaaataaattgataactgtgtccagggtcacatgtaccttagaaccttgggattttccaaactaagtgccaacatgctttctcggaagaatacaacatgttgtctcttatttctgtcaatcagatgccatgatgatcatttatataatcgtttttatcttatgaattaaacagcatttttaaacataattaaaaattataaattaatttgttttggggcaaatattctgacaataagtcttttgtgtctcaaatgttttatacacactgcaggccttttattattttttttaaataaaatcttcaacagaatgactaatagagcatgaacagtgcttatgatactatagtgcattgtgttaagtattgagagcaaaatttgcgttcctagaaaagcttgttcacaatcagaatataga

SEQ ID NO: 16679 - DNA, 291 bp, Homo sapiens
  source 1..291: mol_type = other DNA
aaggctaagccttttgtgcttaaacacatacaacataactaagctaggttgttcttcttgggaatgtacttgcaagttaatactgcactgcaactataaggttttttaaaagacatcagttgtacattataaattaaatctagtttaaatcaatataattcaatttatcctagcaaaataatatgagatgattaggattcaatctcaatcagaaaacatccagtagtatataattcagcacggagagtcgatgccggcgtctgagctgcgcagtggggtcttcccgctgcc

SEQ ID NO: 16680 - DNA, 411 bp, Homo sapiens
  source 1..411: mol_type = other DNA
gagtacctgtagttccagctactcaggaggctcaagtgggaggatcacttgagcccaggagttcaactccaaaaaactttttgaaactcagctgctacacattgactttcctcattgtatatgtatttggtttttcataggcaatcatgcattcccaaaaaaaaagcgtttttttctagaactggtatcgataattgtatcattctcataaaatattttatttatcccaaatgtcatttacaatatactgaaaaatgttcctggcccggaatttcttaaacatttagagctggtgaaatgttgtgtagaggttggggaatttccccagccttccccgcttaaccgagtctgatgctgagctgagccagggcagctgagatgcgcaggcgactcactcgcgcagtggcacca

SEQ ID NO: 16681 - DNA, 386 bp, Homo sapiens
  source 1..386: mol_type = other DNA
gagtacctgtagttccagctactcaggaggctcaagtgggaggatcacttgagcccaggagttcaactccaaaaaactttttgaaactcagctgctacacattgactttcctcattgtatatgtatttggtttttcataggcaatcatgcattcccaaaaaaaaagcgtttttttctagaactggtatcgataattgtatcattctcataaaatattttatttatcccaaatgtcatttacaatatactgaaaaatgttcctggcccggaatttcttaaacatttagagctggtgaaatgttgtgtagaggttggggaatttccccagccttccccgcttaaccgagtctgatgctgagctgagccagggcagctgagatgcgcag

SEQ ID NO: 16682 - DNA, 453 bp, Homo sapiens
  source 1..453: mol_type = other DNA
gattaagatcaagttcttatcacactgctatgaataaatttatcatagttcttctattggcaggaaaaccaatttcgcaaagtggatcctgccagcatggtatccgggataactatattattcattaaaatccgttaacaatgaaggttaatggaattaacacccggaagggtgactctgcctccaggagggaggggcacagtagctaggaaaccggaccctcgtcgcgcccactgcagctcagctgaggagggttagaggggcgttctccggcccacccaaagagcgcccgcgggatccgcgaggaggcacggcttcccccgccccgcgagcgagtcccagccgggagacagccccgcaccgccctcgcgcgctcaggacaagcgatgctcctcccccccttccggggaccaagggaagtcccgcctctgggtggggcgaggggtggggcca

SEQ ID NO: 16683 - DNA, 312 bp, Homo sapiens
  source 1..312: mol_type = other DNA
ggctggagtgcagtggtgcgatctcggctcactgcgcctcccgagaagctgggaccatttttcttaacaaaaattaaccatcgtccattgtctatcattcatttattcaacaagtaagaattgagtgcttacgcagacacctgcggaagttgagggccaactaactctgagcggcagagatctgggccatatagctggctgcccggcaggattccatgatctcacagcctgaatcttggtgaaatgtttcactttggccaagatgttacagtttggagtaacattcttgcctcctactttactataaaagaa

SEQ ID NO: 16684 - DNA, 344 bp, Homo sapiens
  source 1..344: mol_type = other DNA
tgggatttcctttccattaaatacagtgcaaaccacattctctatggaaatatattgcaaaggaaatgttatataatttatttaacaaatacccaattaccaactacctgtgttatttttccaattacagccattgtaatataaaaattccgaaaaaaaggttgctgagaccattccttcgcttttttttagaagcttcccattcaggacttaagaaaattctgcaaagtggatctcccgtgcctgctcaatgaaccttcgctggacgcgggcgccggtgacagcgcgggcggccggggaggggcgaggggccgccccgggaggacacacggcgcagggcgcgc

SEQ ID NO: 16685 - DNA, 475 bp, Homo sapiens
  source 1..475: mol_type = other DNA
caagaaaaacaatatggaaacatatctgtttacctgggttctaggttaaaaaattttactgttttatacagtatacagtattatttatgctctctggaggatatatatgaaccagtaataagccagttgcaagtacataatctaaagttaataataatcttttgaaagtaccaggacttaatggactattcatgaagtcagcagaaataacatatgaatgaattatgtcaccaagttattaataattattagttaatagttaatagttaattatattgaatatatttacagttatatataacaacatcaaaatcacataaaatttctagtaaatcacaaaaatttaaaaatcagtgcatggattgatcaatagattaacaaccaaattacaattactaaacctgaagataaatttgaagatattaatcagaatttttatttaatatgtttgtggctagaaattatccacaaagat

SEQ ID NO: 16686 - DNA, 502 bp, Homo sapiens
  source 1..502: mol_type = other DNA
atctattcatttttccaattagatagggcataattcttaatttgcaaaacaaaacgtaatatgcttatgaggttccctgctattggggtggaaatgccaactccagagtttgttagaaagctgtctggccagtccacagctgggtggcattctcaatgagaactagcttcacttgtcaagccgcactactgggatctgagatcttcggagatgactgtcgcccgcaggtccgacccttcctgggaatgggctgtaccacactcagtgtaaattgccgtcgcagccgcagccactcaagtgccggacttgtgagtactctgcgtctccagtcctcggacagaagttggagaactctcttggagaactccccgagttaggagacgagatctcctaaggccaagggcaggagctgaccagcgccgccctcccccgcccccgacccaggaggtggagatccttcccttttccctcctcctggagacgggggaggagaaaaggggag

SEQ ID NO: 16687 - DNA, 585 bp, Homo sapiens
  source 1..585: mol_type = other DNA
atggttgagataaactatgagtcaaaatttgcaaatcattcactctgttttgaacaaggtatatttaagatgatgttaaaatacccaatggtcttgggtcaaatacagtttatgactgtgtatctaaaatatatattgcaataatgaatttagcgccattttataagctcaaagataattacttttcagactaagaatatttagggtaaaaagtactgttcaacatctctactgaggatgttatgatgttggagctaaaggaaactttccttaaagtgctatttactaaaaattggaacacatgtcaagaagcattcacttttatggaactcataagggagagaatctcttatttagtatcgtccttgatacatttattattttaaaagataatgtagccaaatgtcttcctctgtgttaaatctttacaaaactgaaatcttaaaatggtgacaaaaattctacttctgatagaatctattcatttttccaattagatagggcataattcttaatttgcaaaacaaaacgtaatatgcttatgaggttccctgctattggggtggaaatgccaactccagagtt

SEQ ID NO: 16688 - DNA, 467 bp, Homo sapiens
  source 1..467: mol_type = other DNA
agagaaatcattcttgcattcgcagtgacggaaggaaaattttttctcagaacgttttttaaataactaagaggctcgtgtcccttttaaggaacaggtttcctggctctttgagagtggttcttaaaggaagcttcctacgaagtccgcagttggtatccttactaaagagagtctctgttgacatagtaactcttggccccgcctgtgccctctctgcccgggcgccccagacgcatcctcgcggggtctcctcggcctgacctgctcaggccccgggccagtgggcgagccacttgcggcgggcgtctgcaccccctgcgtcccctgggcaccggtctgcccaggtccagttcggccgctgacgcgaaccctccgcaccgggtccccgctggaactgcccactcggctcccccgggagcggggcccaggccagtcgggcgttcccgccatgagccagagcccgg

SEQ ID NO: 16689 - DNA, 393 bp, Homo sapiens
  source 1..393: mol_type = other DNA
gaagcaaaggcacctttgcagacagatttcagtctgatggctggctgcttgccatgcaacctccttggaggggcccgaattctgaaatgatttgaaacgcagttggcattcattaaatatttgttgacttaatgaatggattcttaattcatccttgttgacaagtttttacttctcacacgtatgcatattaatcagaatttaaaactaagtcttaaaaataaagagaaatcattcttgcattcgcagtgacggaaggaaaattttttctcagaacgttttttaaataactaagaggctcgtgtcccttttaaggaacaggtttcctggctctttgagagtggttcttaaaggaagcttcctacgaagtccgcagttggtatccttactaaa

SEQ ID NO: 16690 - DNA, 570 bp, Homo sapiens
  source 1..570: mol_type = other DNA
aagacattcatctatcaaccttcaaagagtggtcattttcaataatattatttctctgatgttcagaatttttacagttttaacaaaatagttgtaattagattacaactaattacagattaattacagtcttagaaatttgcaattttttttttgcagtggcgtgatctcggctcactgcaacctctagcagctgggattacagaggctggtcttgaactcctgacctcaggtgatcagatttggcattttaaaagtatattttaagtctgaattatccgatcaaatttctacttagcattttatagaaatagttccaaggtaatattttttgcaagcagtttgcaattataaagccattttttttcccaaggcaagaaaaggctgactcacaaaaattagatgaatttataaattcatgctttatttatctgtctacatctgtcatttatttatttatttacttatttatctatttctatattgcaaaagcttggatttataatacagacatgaagtgataaaaaaggaattgtacaatttaaaatgtcaggattgtttcaaaccagg

SEQ ID NO: 16691 - DNA, 410 bp, Homo sapiens
  source 1..410: mol_type = other DNA
tttgagtcattgcaaccaagtttgcaaagattgttttaaacagtttcaactggaaaagtttattatttgaaatcttaaaatgaacaaattaattcaccaatctgggaatttttccaagaaaacactgactgaaatacagtcagaatttatatatgcatttacattagtttttgcatagccaataaactagtgtctcaaaaatccatttaattttcaatgcgatgatctcttttggcatatcttcccaagagatccagaatctggcatttccacttcacaaagacattttaaagagacggtgtttggccggtggcaattaacaacccgggtccctagggatgcttgggttgccacccgccgctcgaagctggaggggccgccggagcctgcgattggctgcttcgggcaca

SEQ ID NO: 16692 - DNA, 396 bp, Homo sapiens
  source 1..396: mol_type = other DNA
tttgcatagccaataaactagtgtctcaaaaatccatttaattttcaatgcgatgatctcttttggcatatcttcccaagagatccagaatctggcatttccacttcacaaagacattttaaagagacggtgtttggccggtggcaattaacaacccgggtccctagggatgcttgggttgccacccgccgctcgaagctggaggggccgccggagcctgcgattggctgcttcgggcacaggctgcagggttgctgccgccccatctgctattgcccggcgaggtcgccgctgcctcagctgccatcgccgctacaggcaccagtgccgctgcgcgggagctagggctgtcgaggccaacccttccgcgcccgtgacgcggggcctgagagacgg

SEQ ID NO: 16693 - DNA, 558 bp, Homo sapiens
  source 1..558: mol_type = other DNA
taatcccaacaccttgggaggccgaggtcaggatgctgaagcaggagaatcacttgtgagccgagatcgcgccactggaagataattttcaatagaaaataagaaaagtgtgttttctattaaacagcacgcaaaacagcatgttgtaatgtactgtgtatttttttttttttttggccttcaagtgtacattttaaggaaaaaaaaaaaattcctaagtagtcacatagacatttgtcttccaaaatagataaacctaattaattcagaataatcttttcttcagaaacgtttgagtcatcaaacgtagataactgtaaatctgaggttatagctcttgagactagaatattaacccatgctgagtaattattattaaaagttaatgtcaacaagtatcgattggcaattttccctaaccgccaagcccggggttggggagtgctaacctccctccctgcacccgcggcggcaaggccggaactcctgggtccctagagacgtgtggccccgcccccgcagcgtcgctccgacacgacggccgccgcgtctccatgg

SEQ ID NO: 16694 - DNA, 584 bp, Homo sapiens
  source 1..584: mol_type = other DNA
catgaatgcttgtacctgaagacgcactaattttaaaaatgtgatttcactatttggatttgtttcttttaataagttacactgagttacagaccaaaataaagttaatgctgaaaacaatggatctttattaacatcaatgcctcgcacaggcgctccgctcggtcaagccggggtaacgcgaggaggaggaggtgggttcgcacatcctctctccacttcttggccctttcgcaggtccaggcgaactggaagcgcctttcccgagcacgggcggggaaaaggggccaagaacttcctgcagccaagggcgcccgcgttctccgcagacaccacacccggattggacccatcgtttgcggttcgcggggcagaatacggggcacgcttcgggcccctgcccggctgagcgcgggcgaagggcggaccgggccagggcgagcgggtcacgtgcggccgggagaggcgccgcgggccggacttgcagcgaaaagtttccctgcgctgccggccgggccgcggtgcgggcgggcgcgcagagcgagaggaggcggggccgcggcggcgcgggcgggcgcttctcc

SEQ ID NO: 16695 - DNA, 429 bp, Homo sapiens
  source 1..429: mol_type = other DNA
gccagatcatgaaagaattcctaaattataaattctagtggctacagatttttatgttctaagctcattattagcagcttcatttgagggtcacataaagaattcccctagggtctaaataaagtatttggaattttttaggtcaggccatgtaattctgaattctagaaaatgactagatgagttgggttttaatatcccctctataaaccaggcttgatttcaaaccaaattttattactcagttggaaaaagaaaacttttatacctacattgcctagcttctgggatcaagaaaccaggagagcccctccttaaagatgttctggagacagaaaaaagcctaaacaagttagtttgaacattgcttctgaaacagcagtttgcagggttagcgaataactgtgctgtcatccctatttaaaccca

SEQ ID NO: 16696 - DNA, 618 bp, Homo sapiens
  source 1..618: mol_type = other DNA
caaaataaagttaatgctgaaaacaatggatctttattaacatcaatgcctcgcacaggcgctccgctcggtcaagccggggtaacgcgaggaggaggaggtgggttcgcacatcctctctccacttcttggccctttcgcaggtccaggcgaactggaagcgcctttcccgagcacgggcggggaaaaggggccaagaacttcctgcagccaagggcgcccgcgttctccgcagacaccacacccggattggacccatcgtttgcggttcgcggggcagaatacggggcacgcttcgggcccctgcccggctgagcgcgggcgaagggcggaccgggccagggcgagcgggtcacgtgcggccgggagaggcgccgcgggccggacttgcagcgaaaagtttccctgcgctgccggccgggccgcggtgcgggcgggcgcgcagagcgagaggaggcggggccgcggcggcgcgggcgggcgcttctcctcgggcgcagccgccgccgcgccgcaggtccgagtgcctcgcagcccctcccgaggcgcagccgccagaccagtggagccggggcgcagggcgggggcggaggcgccggggcgggggatgcggggccg

SEQ ID NO: 16697 - DNA, 444 bp, Homo sapiens
  source 1..444: mol_type = other DNA
acgatgaagtctccaataatctttatgctttgatctactggaagatagaaaatcagatgagctctccaaatccatctgttggaaatatggcagtgcaattagactcaaagatgtcaggtttccctgagaatggcactgcaactcagaaacctgccgatttttttaagtagccaactccaccctacttattaaatttaccaagccatttcaatctttaaaatggtaaaataaactgcaaaggagaactgcatgatttttttcttcacctcttactttcttgatcagaacaaaaagtaaaaataaatagaaatatttcacaaagtttcgatttttttttttttaaatgctggacttctgcagctatagtagaagataaaaacctaacctttttacgtgtaaacaatgaagcaaatgtctttatggaaatccccgagtgggtttgcc

SEQ ID NO: 16698 - DNA, 573 bp, Homo sapiens
  source 1..573: mol_type = other DNA
aacagtacctcctgttctgtgactgactggcaggcagaaatgaagtggcttgctatttggaagttttttaaatatttgccccttggtcgttcgttggttgtcataccacaaacatttactgcacgacactgcaaaagccaagggtttttatttacaaattttctattacctaagcattaaaaaaaattgggcttctctggtttatgtacaattatatgtgcatgtacaccaatacacaggcagacgtatatatttcattttattgaaacattcagaaaatactgggagtgaagcctgacttgcaatacagttctctttgctggcaatgagcatctgaaataatgacacttttttctttagtgcatatgaactgtttgtctccagaacagaaatgacatcaagtcttcagaattattcatctaacggttacaattgtttacttaagcaaaaaatgcctgactccatcctcaaaatgcagtcatctggacggggggaggcatcacttggggagccttgccaggggccagaaaaccaccggcgccagggcgtttccgcagggtttcccaaaactca

SEQ ID NO: 16699 - DNA, 583 bp, Homo sapiens
  source 1..583: mol_type = other DNA
caaaagccaagggtttttatttacaaattttctattacctaagcattaaaaaaaattgggcttctctggtttatgtacaattatatgtgcatgtacaccaatacacaggcagacgtatatatttcattttattgaaacattcagaaaatactgggagtgaagcctgacttgcaatacagttctctttgctggcaatgagcatctgaaataatgacacttttttctttagtgcatatgaactgtttgtctccagaacagaaatgacatcaagtcttcagaattattcatctaacggttacaattgtttacttaagcaaaaaatgcctgactccatcctcaaaatgcagtcatctggacggggggaggcatcacttggggagccttgccaggggccagaaaaccaccggcgccagggcgtttccgcagggtttcccaaaactcaaacgcagcggctcggtttgcgatgagcgtccagttgcgccgggcatcctggcctcctcgccgcacggcggaaagcgctctcggttccgctttccggccccagcctcccgggcgccctcgcgcggcggctaacgctggtcct

SEQ ID NO: 16700 - DNA, 330 bp, Homo sapiens
  source 1..330: mol_type = other DNA
tctgagcacgatgaaaatgcagactttacaagcacttcaagtcaagacaagtgattagcattggcttggattaatgcagccgtgttttacgtttgaatttaagcaacaaatctgccttccgggcaccgcgaagccagcgtgctcagcattcagggaggcagcggcgctcgccttcatccaggggctcgcggtttctggggttcccaagcgcgcgcctgcgagggaggccgcgagccgagtcgccacgcccagaaccccgagcccgcccccgcgccacccagcccggccccgccgccccggctgcgcacgcgacgccccctccaggccccg

SEQ ID NO: 16701 - DNA, 244 bp, Homo sapiens
  source 1..244: mol_type = other DNA
atttaggacagattgtctcagttaacctgacatgagaaagttctacctctcataacacagttttcaaaagttaactgcaatgtatgaaatctggctcaggtgccaaagatctgcaacattaagaccttttctgagcacgatgaaaatgcagactttacaagcacttcaagtcaagacaagtgattagcattggcttggattaatgcagccgtgttttacgtttgaatttaagcaacaaatctgc

SEQ ID NO: 16702 - DNA, 504 bp, Homo sapiens
  source 1..504: mol_type = other DNA
aatggattcttaatacgtagaactacctgtagctgggcagcagccagagaattggatctccaagttgaaggatttttttgtgtttaattcaagaagaattagaggccactgctctgcgcttaattattatttcattatttacatgttttgtgcacttttccaaaccttttaattgttaagaatatatggtaccatgtatttaagaatacatggtaccatataataagaatatatatttaagaatatatattattctttaagaatatatggtaccataatgtcctgaatgatacctatgagagcagtcatttgactttggcaaaaaaatgaggtttctctttgaaagacaaatacattgtgtgcttcctgccaataacgatgtaatacttcctcgttttagttaatgaaaaataacacatactttcaaagttctgtagactctaaaaagaaagaaaacactcaaatgagtcacctatttccacattcggaagctatataaatttc

SEQ ID NO: 16703 - DNA, 330 bp, Homo sapiens
  source 1..330: mol_type = other DNA
tcatctgagaatatattgaaattaatctagtgcaagccccagtgcaggctgtatttaacattgcattcgaattcaataaacatttgaagtttatcttagttaataagggtaatctgactcctgattcatttgtctttttatgataacatcctaccaagatattctgagattgccttcaaaagaaaactttgcaaggaaaaaaaaatggctcacttcccagtatattcaattcagtaataagcactaactgtgtttactaaacaataaatcatgacacactttatggcaagtgtccctttctgttattaattaaatgatgatacaagccaa

SEQ ID NO: 16704 - DNA, 524 bp, Homo sapiens
  source 1..524: mol_type = other DNA
tgaagatgtacaaagctgttgaaggcctagagctgctgctccactatggcctaaacaggtcatctaaatgtctctggattatttcatctgtaaaatggagatagtacatctccctcccaaagtacaaatgtctgggcaatcataattttttagcaaatgttcattattatcatcatcagtattgttctctttatcttttccatggaaagtctaacttatagactagggattttctaatatgttgattgctttgtaataacacagtcactcattctctccacatacaatgagggagggtaagtacagagattctctagttgggctccttggtcccaagttgttccttttcctcaaccaattttgtaaaaggaaataactaattggagttttgaaagactgttgaaagactcccccatttgggggtactaaatcacattataaaattgcaaaactgtcagagtgtaattaacctatgttgcttcatattcctgatgcagcaattgtttaagacatggctttaaaga

SEQ ID NO: 16705 - DNA, 676 bp, Homo sapiens
  source 1..676: mol_type = other DNA
ctttagtgagagaaaaatatagttctttactataagaatttcagggttctttatattaacaggttaatttgacaaaacagttattgcagacttactgtgttactgcgtaaaaagcactttatttggcgaggatttgaaatcatttcccattacagatatctcctcctttgtaccttaagaggagaaagaaagaacatgcaatttaattttttccatttaacaagttttatggagcagttactttgaacataatgaacaccaaagcttctctctataatagctattgtaaacaaggactcaagaagtgaaatatttgttttaatatctttgtaaataacaactcccacatttagaccacgactatatttggaatttatttctcttacctgcttatatttaagtttaaaacataatcttcttaaaagaaaattgcactgattttaaaatgtcaaaacatttggcattttaccaagcttgtcagctctctttaagtaaatacagagacgtgaattatctagccaattctttttcgtctttacaaacacagaaatcatttcctggggattaatcattctttcaagtttagaaagttgaaggaaaatactgatgtaggctgtatcaccattacattaaatgtttgtgaacattcagacttaaaaaacacatgcatgaatca

SEQ ID NO: 16706 - DNA, 350 bp, Homo sapiens
  source 1..350: mol_type = other DNA
gtaatcactaaataataaagctgactgttaaattttgaagaattttgcaagctagctgtgaaccatagccattattaaaaattaaattataggccaggtgttgctctgagccaagattgtaccactacactccagcctgggtgagagagtgagactctgtctcaaaagataaaacttaaattatataaacaaaattaaattacattaaaataaaaggtaataaaaataataaaaattcatcagtttgtcataatttttactgcatttcttgaaattcatcataatgggagtatttcaatgaatgttaagagattaccagaaattagatggaaacttttcttgcttttttt

SEQ ID NO: 16707 - DNA, 366 bp, Homo sapiens
  source 1..366: mol_type = other DNA
tcatactccgcctgtggatgaggggtcttctcaggtaaggctcttaaatcctaggcctgagtaaattttttcaaattttattttagacagggtcctaggctggagtgcacctggaggggagctgaacttcagtcagtacaggtgaattccaccctctgccctgggagcaaggtgtgtgcagtctttttcaaaaagaccatggagtactctttacctttctcaaataggaaaggagaaatgtttgaattgcaacaccaagtgattccaaataatctgatttctaatgattgcctagtctattcatagctaatcatgagtcagacagcctctggctttctggaagggcaaggactctatatatacaga

SEQ ID NO: 16708 - DNA, 524 bp, Homo sapiens
  source 1..524: mol_type = other DNA
tgtttagagtcttgcattcaagcatttattatacaccaataatgtatgaagagaaaatttaggatggattctgttcttcaacttcaaagcatctgctaatttgaatttatttcagtccggtaagcaatgtaattcatttcaattctacaactatttatgccattaataaattggttacagattcagaaaaataaatcaccccttctaaatttcttctagatattatcttttatgttttgagtataattgtatatagtatagactatagctatgtatgtacactttccacttacatcttttatttgcttttataatgtgtttcttaaaataaaactgcttttagaagttctgcacaattctgaaacataaattgtctagtgaattccagtcaatttttccagaagaaaaaaaatgctccagttttctcctctacttaatcactgtgttgccttgcaaaattgggaaggttgagagaaattagtaaagtaggttgtatcatcctactttgaatttggaatactctt

SEQ ID NO: 16709 - DNA, 493 bp, Homo sapiens
  source 1..493: mol_type = other DNA
atcaggatgagtagaatctatcctcatggaattttattccctgacttgtaaaagtttttagtgcttaaatattctctattgagtaggcaaacttttcccatctgctaaagttgaaaagagtcgctagacaatctaggatgtagggaaagtttgtctctggaatctatccaggtacccagttgggactgagcttcagcttagatgtctgaagatgttaagttatagaataaacaatgaagtcgatgttacaaatttttttttgctacatgtaaaatctctgtatcacaaaagcactcatttactccaggaaaaggattttatttaatctttcaacatttactttaaaaacttttttttatctataatgaatataaggaaagtattataatgaaaatcaagaatatcaggctttaagaaaatatattttaagttctccttcttaattgatccaatcaagggatgatatcaactatgagtcactcataggattcat

SEQ ID NO: 16710 - DNA, 469 bp, Homo sapiens
  source 1..469: mol_type = other DNA
cagctcagcttttaagaaaatcctggtatcatttataaactatatgaccgtatacaagtatttaacttctcagtgtatcagattattcatatgtaaaatggaaaacaagctttctgacagcacctatgtggctgttgtaaggattaaatgagataatgccttttaaacctagaatgcagtaatccctgccaaccatggggctcaatcctgcggttgtgctagacatctctctgtagttattctagagaaaatgcagtttataatttacagtagtaaacattctagaatcagtactaagtttctctttatggaagtaaacatgccatcttgatacacttattattcgaagaagcaaaaaaaaaaaaaaattttgctaagtgaagtaaaaaatgtactactctaaatatgcaaacaagagatgtgtttaccttcagtggaaacctatccataagtgatgactcaccattgc

SEQ ID NO: 16711 - DNA, 402 bp, Homo sapiens
  source 1..402: mol_type = other DNA
caaatccataggaaataaaattgctttctggtggttcaatcatagtttcacaggaaccacttcaactattactcaaagacttttagtctcagagattattttaccaacagaattactaacgactttctactatgtctttacatacaataaccattatttaaaaacagtatttccacctaagggggaggttccttagaactgtccctcttatcggagaggtgagctctgtggagttgttttaacgtcaactgcaaagtattagtagtttcactttttggcggtgactgccccgcggactgccgcagtcgacgggtcagacagcttcgctctgcctggcctacctacgagtggcagaggctaaccggaaccacgccccttcccgggaccggctccgcgattgcg

SEQ ID NO: 16712 - DNA, 613 bp, Homo sapiens
  source 1..613: mol_type = other DNA
gatgaatgactacagcaaaaacttcctgagggcaggaactgtgtccccagggcctagttcggtacttgggcaaaagtaattacagttcttgccaaaaaaccgcaattacgtttgcaccaacctaatagcatgtagtaaatatttttagaagagaattactgaattgagaaagtgaatttagtagtgaaaatgacaaagaccgttttcatatctgtattttaatttggttgcggttgttataaaataaactaaaaagtatcattttacattttagctattttacaaatatgattgcaataaaaaattgctggttaaattattctaaaattaataatagaaaaaacaaagtaaattaacattgtattgaattcctagtctttataagcttctctaaaaagcgatttttaaatagtaatcttttacaatccgaggtgcacgtggcgagcactggacccttctgattatgcgtgataagaaatcagtaagaagagggagccgctgaagagctccgaggcggtcgatagcctccgcgagctttgcgtgcgcgtgccccgagagggcaacgcccaccgcgcgccgccagcgacgccgccgtagtgctccgtcgccatag

SEQ ID NO: 16713 - DNA, 497 bp, Homo sapiens
  source 1..497: mol_type = other DNA
cactgcaccacatggcccatcacgtctacagccctgtgtggtaccaggatgccctgactcatcctggagttcgcgaaaagagagtagctttctctgggtgatatacaagctcaaagaaaaggaagctcctttgtgattgtattttttcactataaacagtgaaattttaactaagtagagtctcattttggttattgtaaaataaacactcccaccaccatcaaggcggagagctgtggcttgtgggtggatgtgccagtcacctctgaagagccggcgattaaactgggcatgctcagtggcagagcaggtttaggcccggagctgaggtgctcgcgccgccgctctgagcccgagtgcgcgcctctcaggggccgcggccggggctggagaacgctgctgctccgctcgcctgccccgctagattcggcgctgcccgccccctgcagcctgtgctgcagctgccggccaccggagggggcgaacaaacaaacgtc

SEQ ID NO: 16714 - DNA, 576 bp, Homo sapiens
  source 1..576: mol_type = other DNA
acagttcttgccaaaaaaccgcaattacgtttgcaccaacctaatagcatgtagtaaatatttttagaagagaattactgaattgagaaagtgaatttagtagtgaaaatgacaaagaccgttttcatatctgtattttaatttggttgcggttgttataaaataaactaaaaagtatcattttacattttagctattttacaaatatgattgcaataaaaaattgctggttaaattattctaaaattaataatagaaaaaacaaagtaaattaacattgtattgaattcctagtctttataagcttctctaaaaagcgatttttaaatagtaatcttttacaatccgaggtgcacgtggcgagcactggacccttctgattatgcgtgataagaaatcagtaagaagagggagccgctgaagagctccgaggcggtcgatagcctccgcgagctttgcgtgcgcgtgccccgagagggcaacgcccaccgcgcgccgccagcgacgccgccgtagtgctccgtcgccatagcgactacccctggcaaccgcgaagctctgcggtcccgcggtcgg

SEQ ID NO: 16715 - DNA, 354 bp, Homo sapiens
  source 1..354: mol_type = other DNA
aggcaagtgagcacagtgttcactgcaccacatggcccatcacgtctacagccctgtgtggtaccaggatgccctgactcatcctggagttcgcgaaaagagagtagctttctctgggtgatatacaagctcaaagaaaaggaagctcctttgtgattgtattttttcactataaacagtgaaattttaactaagtagagtctcattttggttattgtaaaataaacactcccaccaccatcaaggcggagagctgtggcttgtgggtggatgtgccagtcacctctgaagagccggcgattaaactgggcatgctcagtggcagagcaggtttaggcccggagctgaggtgct

SEQ ID NO: 16716 - DNA, 429 bp, Homo sapiens
  source 1..429: mol_type = other DNA
cagcgctgagggcatttgctaccagaccagagcacaagtcctctgacagcactgcaacattcttaaacctcatccagtgtaaataaagtacattgaattctaaagaaaaacaagaaattgtctcatcaaaattagtggagaaatttctgttcaattttatccacagtaagtggcaaactttggaatggaatcattttcatgatagcttgatttgtaaatgttttacagaaattttgacataatttcatttgaaactggggccattatgtaaaacagcatccctttttcttataattattgatgcagtgccacttttgagaccaattgtctgatagctcttgggagctatttttcaaaagaaaacagattttttttctagaaaatggtaaattcaagatgatttcactatcagtaggcacattgttgaat

SEQ ID NO: 16717 - DNA, 437 bp, Homo sapiens
  source 1..437: mol_type = other DNA
gagttgctgaaattcctgcaagcatttcttgccgggagaggagggatggatcccggtccacagcggctgtgctgcactgtgaagactgctgcccagtccaatctgcccagcctccctagcaatggacctcttcagccccctttccatgggagtggacgggactcctgcagttccgggagctgctggattaattcttatcaggaaatgaaaaagagttgttagattaaacttcttcagtcattgtcgttctttgtaatcagagaaagaaaaactgcaacccacaggataatattttgtcattttatccccaagtcagaaactaaattccagtaattggatgccaatttgctgatgacaaggcacttcctgataatgagtctggaattctgagcagcagtttcacaatctgtaataataaggaaatacatagtttactt

SEQ ID NO: 16718 - DNA, 218 bp, Homo sapiens
  source 1..218: mol_type = other DNA
gatactggttattctaattaacagttcctgtaatcttgggttagaatataatcagcaaagtttgttgaaatcatttaatctttaaagcaggtctgctgcagtgtgctgaggatctactccagacacaatggaggctgcagaacagcaaagagtgctgcctcctccttcctccggaagcttcttcccagaggatcactgacctgaggtgtctggcaacc

SEQ ID NO: 16719 - DNA, 388 bp, Homo sapiens
  source 1..388: mol_type = other DNA
caagctttctaatgattgagaaactcttcactgtgtgaatttaattgtacacatacagttctgattctttaatgggaagaaaaataaagacatgcatatgcatgcacagtgagtatttcccaatacatgtacaggctcttttactgttccaagaacaggtccctgggaagaaagagttttggaagcattttgcaatcttaattaaactcttacttacatgttgaaagtctgacagaggaaatgggctatttctgcttcattactttattaaccagagttaaataaacatgcactcagtcttcaggtcactccatgcacatgtattcactgatgaaatctaaatgaggtcactttctgttgattacatgagaggaatatgaggctcatg

SEQ ID NO: 16720 - DNA, 476 bp, Homo sapiens
  source 1..476: mol_type = other DNA
caaaactgtgtaggtacatactattaataaaattatttcacatacagatgcatagggaagttcattatcttgccaaggaagggaagtttaaaatgctaagttcgacattctcattccagagcctatgctctgggcctctacactccaggatgggattggtctttagctggccatggtggcatgtgccagtaattgcagctactcgggaggctgagttggaagaatcatctgaactgcattccggcctgcaataagaaaagctttaattctggtgaaaaatgtttctatttcttaaagcaaaaatgtttcacagggaggtcaggggaacagtggttcactacaagctttctaatgattgagaaactcttcactgtgtgaatttaattgtacacatacagttctgattctttaatgggaagaaaaataaagacatgcatatgcatgcacagtgagtatttcccaatacatgtacaggc

SEQ ID NO: 16721 - DNA, 351 bp, Homo sapiens
  source 1..351: mol_type = other DNA
aagttttcgaatgaatgggaaactcttcactgtgtgaatttaactgtacaccaagggctggagaaaaaagaattagttctgattctttctctgggaagaaaaataaagatatgcatatgaatgtgcagtgggtgtttcccaatatgtgtacacgccctgccaaaaaaagccatggccggtgagtcttttactgttccaagaacaggtccctgggaagaaagtgtcgtaagtctgacagatgggctatttctgcttcattactttattattcagagttaaataaacatgggacacctcagtcttcattcactgatgaaatctaaatgaggtcactttctgttgatgacgtga

SEQ ID NO: 16722 - DNA, 439 bp, Homo sapiens
  source 1..439: mol_type = other DNA
tttatctcaatactgctcaaaactgtgtagatgtgtatgtactattaataatattattttacagacagaggaaccaatgtataaagaagtttattgcccaggaaggtgagtttaacttgctaggttcaacattctgagcatccaagatgagtgagtggctcatgtaatggaggctgcagtgagccgtggtcatgccactgcactcaaataagaaaagctttaatattggtgaaaaatgtttacatttcttaaagcaaaattgcttccccaaagctaagttttcgaatgaatgggaaactcttcactgtgtgaatttaactgtacaccaagggctggagaaaaaagaattagttctgattctttctctgggaagaaaaataaagatatgcatatgaatgtgcagtgggtgtttcccaatatgtgtacacgccctgccaaa

SEQ ID NO: 16723 - DNA, 441 bp, Homo sapiens
  source 1..441: mol_type = other DNA
tttttatctcaatactgctcaaaactgtgtagatgtgtatgtactattaataatattattttacagacagaggaaccaatgtataaagaagtttattgcccaggaaggtgagtttaacttgctaggttcaacattctgagcatccaagatgagtgagtggctcatgtaatggaggctgcagtgagccgtggtcatgccactgcactcaaataagaaaagctttaatattggtgaaaaatgtttacatttcttaaagcaaaattgcttccccaaagctaagttttcgaatgaatgggaaactcttcactgtgtgaatttaactgtacaccaagggctggagaaaaaagaattagttctgattctttctctgggaagaaaaataaagatatgcatatgaatgtgcagtgggtgtttcccaatatgtgtacacgccctgccaaa

SEQ ID NO: 16724 - DNA, 441 bp, Homo sapiens; identical to SEQ ID NO: 16723
  source 1..441: mol_type = other DNA

SEQ ID NO: 16725 - DNA, 596 bp, Homo sapiens
  source 1..596: mol_type = other DNA
atgtactattattaaaattatttcacaggcagaggaactaatgcatagggaagttcaatttcttgcccaagaaatgaagtttaagatggaaagccatccaggatgggtgggtggctcacagctgtaatcccagcagtttgggagggaccttgtctttcataaaaatattattagcatgtgcttgtgttcccagctacttgggaggcagagctgagaggatcatctgagccctgtgtgacagaataaaattctgtatcagaaaaaaaaatctaaataggaaaagctttaatttttgtgaaaaatgtgttcatttcttgaagtaaaattgtttcacagggacatacatttcccatgacgagcagtggttcaaattctctaaaggttgtgttacttttttctaacgaatgagaaattcttcactatgagtttaattgtacacatactagatacactctctgttgcagcctacagttcaggaatctgaatcttactctattaaaaaaatgaaaaaataaaaaaagacatgcatatgcatgtgcagtggtttcccaatatgtgtacatgcccaaagaaaggtggtgcatgctttcagtttc

SEQ ID NO: 16726 - DNA, 593 bp, Homo sapiens
  source 1..593: mol_type = other DNA
atgtactattattaaaattatttcacaggcagaggaactaatgcatagggaagttcaatttcttgcccaagaaatgaagtttaagatggaaagccatccaggatgggtgggtggctcacagctgtaatcccagcagtttgggagggaccttgtctttcataaaaatattattagcatgtgcttgtgttcccagctacttgggaggcagagctgagaggatcatctgagccctgtgtgacagaataaaattctgtatcagaaaaaaaaatctaaataggaaaagctttaatttttgtgaaaaatgtgttcatttcttgaagtaaaattgtttcacagggacatacatttcccatgacgagcagtggttcaaattctctaaaggttgtgttacttttttctaacgaatgagaaattcttcactatgagtttaattgtacacatactagatacactctctgttgcagcctacagttcaggaatctgaatcttactctattaaaaaaatgaaaaaataaaaaaagacatgcatatgcatgtgcagtggtttcccaatatgtgtacatgcccaaagaaaggtggtgcatgctttcagt

SEQ ID NO: 16727 - DNA, 588 bp, Homo sapiens
  source 1..588: mol_type = other DNA
ggtatgtactattattaaaattatttcacaggcagaggaactaatgcatagggaagttcaatttcttgcccaagaaatgaagtttaagatggaaagccatccaggatgggtgggtggctcacagctgtaatcccagcagtttgggagggaccttgtctttcataaaaatattattagcatgtgcttgtgttcccagctacttgggaggcagagctgagaggatcatctgagccctgtgtgacagaataaaattctgtatcagaaaaaaaaatctaaataggaaaagctttaatttttgtgaaaaatgtgttcatttcttgaagtaaaattgtttcacagggacatacatttcccatgacgagcagtggttcaaattctctaaaggttgtgttacttttttctaacgaatgagaaattcttcactatgagtttaattgtacacatactagatacactctctgttgcagcctacagttcaggaatctgaatcttactctattaaaaaaatgaaaaaataaaaaaagacatgcatatgcatgtgcagtggtttcccaatatgtgtacatgcccaaagaaaggtggtgcatg

SEQ ID NO: 16728 - DNA, 530 bp, Homo sapiens
  source 1..530: mol_type = other DNA
atacagtgcagctgctatggaaaacagcataccgatttcacaaaacaaaatgaaatagaattactctatgatttgtcagttccacttctgggtatatattcaaataattgacagcagaatctcaaaaacatatttgtataccatgttcatagcagtgttatttacaatagcaaaaaatgaatactgtataattctacttacatgagatacctagagaagtcactgtttaaggagtatagagtttcaatttcccaaaatgaaaacagcaatgtgaatgtacttaatgccactgaactggatactgtaaaatggctaagatggtaaattttatattatgtgtattttaccacaatttaaaaaaggaactcttagtacttgatttaggtggcacaactacctatactgtgattttactttccatttaaatctcagtgaattaaagattgtttaccatgctacaatctgagattcaattgtgcaataattataaatacacatgtgtaggtgtaagtattgttcattgatctgtg

SEQ ID NO: 16729 - DNA, 206 bp, Homo sapiens
  source 1..206: mol_type = other DNA
attgtatttactaactagatcatcactcacggctaccacagtgactgcttctgagtgtggttcaagctcagtccaggaaacaactattgacatcatcactgaagtgcttaagtctatgcaatgggccacagcatatagaaagcaatcgaaaagagaatgttagaggcctctttgctggtgagaaatctttgctgcagcgaggaccg

SEQ ID NO: 16730 - DNA, 385 bp, Homo sapiens
  source 1..385: mol_type = other DNA
tagaggcctctgctggtgagaaatctttgctgcagcgaggaccggagtcccccgcgcgcagcccagtaggagagggaggcagcccgtcctcctcacgaacctgcaaggatgcggcaggggcctgggggcatggggaggtactaaccccccggagcccccgattggggctgggcggattttctgcctagcgcagccgagaagcagagggaggggcgctgggggtgcccatccccagagtcggtccctctgcgaccagactggctccggagcgtccgggagactggggcgctccggtgagcacccagggggtgaagccagccgagcccaagggcagcgatgctccgggcggcggccgcggcctcatccctgcgagcagccactagac

SEQ ID NO: 16731 - DNA, 414 bp, Homo sapiens
  source 1..414: mol_type = other DNA
gctggtgagaaatctttgctgcagcgaggaccggagtcccccgcgcgcagcccagtaggagagggaggcagcccgtcctcctcacgaacctgcaaggatgcggcaggggcctgggggcatggggaggtactaaccccccggagcccccgattggggctgggcggattttctgcctagcgcagccgagaagcagagggaggggcgctgggggtgcccatccccagagtcggtccctctgcgaccagactggctccggagcgtccgggagactggggcgctccggtgagcacccagggggtgaagccagccgagcccaagggcagcgatgctccgggcggcggccgcggcctcatccctgcgagcagccactagacgctccatcttttgcatgtgcaacatttgcagccggacaga

SEQ ID NO: 16732 - DNA, 230 bp, Homo sapiens
  source 1..230: mol_type = other DNA
tgccttattttatggctgaggcactggagcagcacaagtttcctacttcttctttgcccttttaacaggtgagggtcaactgcagagctgcgcgccacggcactaacccggaaccggtttgggacttgattcccattgtgaggccaggcctagggcgggctctcagccagaatggctacaccattctaaccaatggatgagactcatcaaatgagcggcagccaggggga

SEQ ID NO: 16733 - DNA, 325 bp, Homo sapiens
  source 1..325: mol_type = other DNA
atgaaagcccaaaggccagcggtagtaattaacacaattccctcgaaagtagatgggattctgagaacgaattattggcttaatatatcatcttagctaactctgcttaccagctgcagggagcttacaatctggtctaatacccatatcagcaatgatcataactgttttaaactgatttttataactttgatacattacgtttctgtttccaaaactgcacatgttctgtgcactagttattactgaagaaagagaatttgtttaaattcaggaattcatatcccattatttttagatctatggtctagaatctagaatattc

SEQ ID NO: 16734 - DNA, 399 bp, Homo sapiens
  source 1..399: mol_type = other DNA
ccatcgcggcctccaaggcggttacaaaggccgtggaaaccaggccgtgcgtcgcccacaactccgcagcgccggctgctgtcgcccgggccggccacaggctccacagcgagagggtcgcggccagcgcgggagtgtcgggtctccacagcccggcccgcctgacgaactggccaatgcgctccttcactgccagcagccattcggctcggctcggcagccaagtgccgcaggctcgccgctatctcgggcctgatggcgcggacgcaaacgtggccccacccccttcttcccggcgtccgtgcgcaggggacgggccgtcgctacgcagactggcccacctcagccacctcctctcggagaaagcagctgggggcggagaccacttgcggaagagtt

SEQ ID NO: 16735 - DNA, 325 bp, Homo sapiens
  source 1..325: mol_type = other DNA
tgagaaaataactgagcaaagttatttacttgtttctgttgggaaactttctcgctagtgctctagcccaggcttggcaatagcaaaacagctcagctgctcgctggcagcctcggatccaggcggggtcagtgtgcacaactgcagggggcaccactgcagacccttctctgtgggtcacaggggccaactcagaccctgaagagaggactggaactcttccgcaagtggtctccgcccccagctgctttctccgagaggaggtggctgaggtgggccagtctgcgtagcgacggcccgtcccctgcgcacggacgccgggaag

SEQ ID NO: 16736 - DNA, 637 bp, Homo sapiens
  source 1..637: mol_type = other DNA
gggctcgctccgcgcccacacggcctcgcacgaggcggggagagctgctccagcaggatgggcgccaaaatgttgccccttcggaacttcctaaataaactcggcaaggtggctccagggggaggcctctcgccccccagccccgagccagcgccgccgggacccatctgctcccgagggccgggggttggggccctcagtccgacccgagctcctgtgcgcacctcctcggagcagggagggcgcgcagaggacagcaacgaagtgtcctcgttgctcctaggcgcgcaggcggcagaagcctctgcctctgcctccccttctgcttgggccgcagccctccccgccccgccgaccgcggtcacacactctcggagcctccccgtgagcgggagcgcggcgcacggcgatgcgccgaggcgggcgctgaggcggcgccgcgcgagcagcagcagaggcggcggcggcccccagcccagcccggcgccgccgccgagcccgggccccaaggtgcggcggcgccccaagttcccgccatgagcagccggctcggggggctccgcggccccggggactcccgccccgccgggcgcgaccgcagcgccccgcggccccgacgcgcttaacgttgtcgctt

SEQ ID NO: 16737 - DNA, 441 bp, Homo sapiens
  source 1..441: mol_type = other DNA
ctcgcgctgtggcgagtcggacgtgggatcattccccggtttcccccgggcctataggtggtgaggagccagcggagccgggagccccgcgcaccccgcccggctgaggctcagcaacagtgctgtcttgtcagagcagacgctgtcctcactgctttctgggctcgctccgcgcccacacggcctcgcacgaggcggggagagctgctccagcaggatgggcgccaaaatgttgccccttcggaacttcctaaataaactcggcaaggtggctccagggggaggcctctcgccccccagccccgagccagcgccgccgggacccatctgctcccgagggccgggggttggggccctcagtccgacccgagctcctgtgcgcacctcctcggagcagggagggcgcgcagaggacagcaacgaagtgtcctcgttgctcct

SEQ ID NO: 16738 - DNA, 387 bp, Homo sapiens
  source 1..387: mol_type = other DNA
tcaaaatctttagagcaagatctgccttatctgcagttttagatcaagggaaatctcaaaatgtgaatgtgagtaactacttgacgttggtagtcactgaagctctgtgtttgccttctcttggcttgataataaatggatgagaaaataaaaataatttggttgtgtttatatgttttttctttaaaaaaatttttttttttgagacggagtcagtggtgtgatcttagctcactgcactttaaaatttcattgccattttgtaaaggggaaatacagtgtaagaatttttttctacgatgttgaatttctaccacttaacagcacagaatttttatatcaaagtatgcaaatttgacaatttcacttatatgctaaatgttctta

SEQ ID NO: 16739 - DNA, 448 bp, Homo sapiens
  source 1..448: mol_type = other DNA
aacaagtaggcattgtgtgttcaagattcagactcatatggaaagcttcttgcaaacacacattaaattttatgaaacctgaagagaaagagtatttacctcaacctggcttatgttacttatttaagcacttcatcaccttagaatgtcttattcttctgaacttaaaagttttatgtttgggcgatacatgcgtaaaacaaaactaatatgtcagaggaaaaaatataatgtaaacttctaacaaattgtgaagtgcaatgcaaaattcacatgagtgtttcatatattaagtaaaaggcgacaaagggtacttccgcagaaaacttttgagaggtaccaacttaacttccaagagcttgtaacttactgttaatatagtaaaaagtgcataataaatatatacgggtattaatcttcgggtctttaaaattatccgagccctaag

SEQ ID NO: 16740 - DNA, 317 bp, Homo sapiens
  source 1..317: mol_type = other DNA
aatatctctgtgaaccctgaatatctgagacaggtctcagacaatttaggaaatttattttgccaaagttaaggacgcccgcccgtgacacagcctcaggaggtcctgatgatatgtgtccaggcatcaatcaatatatgtaagatgaacattggttccgaggcaatcagatatgcatttatctcagtgagcagagggatgactcagagggatgatttctcactaatagaaagaccaaagggcccaaacctgtttgaccttgtccatttgatgcactaccaattattgaattttcagtgcaaagacacttcccgcgg

SEQ ID NO: 16741 - DNA, 351 bp, Homo sapiens
  source 1..351: mol_type = other DNA
gcttctggggccccacgaagcaatgataattaaccccggggttacggtaacctaattaaagagctggctctttgagctgacccgactgggccaggtggaacacaccttgcccggactgtctgggaatcccagtcgtgggctcctccagggaggccacccgggagcacagattccggcactgggtgccgcgctctctcccccagcaccgcgcccgcgcccccggctcccggactgggcatgctcagtagccgcccgcttcgtgctcccagggaagctcctcgccgccagccgccccgggtgcatcccggcttgctccgctcgcccccgccccttccgcgcccgcagccagtg

SEQ ID NO: 16742 - DNA, 574 bp, Homo sapiens
  source 1..574: mol_type = other DNA
atttcctctattatctataaagaaaggatctgctgattaaagtacttaattgatctgctttcaagtctaatttaacacttcagatgtgataatttacaaactcatcttagtctaattttagttagtgttcatattagaaagttatataatacttttctttctttcagatatattctataattccaaataactgagttgaactgtgtgagtttactgctctattaatttattgccagagatatacatgtttcagatgaaactgtagatccacgtgtaaacttgcaatgcacagcttagctggaaagttactaaagtcagttttgaaagagccttcacatttcaaataactaaagatatgggtggtaaaatgaagtcacatttttacacctcaaaattagtctatcattcttggtttatgatgttttaaagacatgttaaagttattcatgaagatgtaaaagacacatttaaaactcaactggaaacagaaggtttttaaatcctggtggtggcaaattggcagccaaaggaccttcggaggtttgagaatcagtgacatcacagtgataggcgc

SEQ ID NO: 16743 - DNA, 351 bp, Homo sapiens
  source 1..351: mol_type = other DNA
acattctctctcactgtaaaagtgtaaaaggtacagagagcagagatagacaacaagcaattttatctaatccttattattcttgctgctgcaattgtgttattctgactgacagattcccagaagagattcagtgaaaataccctgtctggctagaatctccctggacagttcagtaacagcacatcaacagactgctgaattcttatttccccgtcataacaaagccaatctgaaatctggaagtgttctgacagaatcttattatagaacagaaatatacttgttccagagaagaggagtttattgttattataaataggagtaacacatattttttttggctctttt

SEQ ID NO: 16744 - DNA, 319 bp, Homo sapiens
  source 1..319: mol_type = other DNA
aagatctttttaggatcttacccatgttgaaaagcgacacagacctgaagcgccttcagcaggctggagtgcaaaggcgcgatcttggctcacaacgcctctcgagtagctgggagtctggtcgacctcaggtgatccacccgtctcggccaaagcgttgggattacagcttccagttaggagagtcccggcttcactgtatcttgtcctttctcctcctgccaccctggaggtgccaggttgtaatctgcagcgcagggccagagcggagccccagccggccgcacaggcaccgcctcccgtcttccgggacccggca

SEQ ID NO: 16745 - DNA, 411 bp, Homo sapiens
  source 1..411: mol_type = other DNA
gggttcctgaagtaatatttcattttcgaaagctgttttttcagaattgccagctcgtctgcacagcctgtctaaggaaaaaataaaaggtcccaacaccttttcttttgttttctctttccggaagcagggggtcagtgacagcctcggaaggcgtggccagggcagggcatccaagccgagcgccgggggttggcaccgtctctctccctggcacggaagatctttttaggatcttacccatgttgaaaagcgacacagacctgaagcgccttcagcaggctggagtgcaaaggcgcgatcttggctcacaacgcctctcgagtagctgggagtctggtcgacctcaggtgatccacccgtctcggccaaagcgttgggattacagcttccagttaggagagtcccggc

SEQ ID NO: 16746 - DNA, 316 bp, Homo sapiens
  source 1..316: mol_type = other DNA
cactcttctgtggtactcatagcagtgaagaacagacaagccagagcccttgctcaatcccagcactgggaggctgagcctctactcagtcatctctaaaaaaaaaatttttttttaacccagaagaaagtggctgaggtgggcagatcgcttgaggctgcaatgagccgagatctcaccttcctgccggcgcccagtgagcgtcggtcaggggcgggagttcgcggcagcaaacctgcttccccctccgccccgcccccgtccagaggccccgcccctagccgggcctggccccgcctctctctcccgagagggc

SEQ ID NO: 16747 - DNA, 360 bp, Homo sapiens
  source 1..360: mol_type = other DNA
caatcccagcactgggaggctgagcctctactcagtcatctctaaaaaaaaaatttttttttaacccagaagaaagtggctgaggtgggcagatcgcttgaggctgcaatgagccgagatctcaccttcctgccggcgcccagtgagcgtcggtcaggggcgggagttcgcggcagcaaacctgcttccccctccgccccgcccccgtccagaggccccgcccctagccgggcctggccccgcctctctctcccgagagggcgggcaccaggcggcggccgcagccgcaggaatatgctggaaggcggcgggcgggcgcccgcgaggtgctgcagttcccgccgccgaacttagcccgcg

SEQ ID NO: 16748 - DNA, 430 bp, Homo sapiens
  source 1..430: mol_type = other DNA
ccacggggccctatagggattataggcgttaagtaatatttgacttgcctagtatatacaagtgctcaaacaagtattaactacttgattggagtaaacctgcaaaatacaataccaggtatcctgcaggttccacatgtaaattatattatccccggaggcttatggtttaggatcttctaggataatgtgccttcagaaaatcgaagattaatattcattctctaaacaatcttttttttctgaatagaaatattaagagtcatcacgcttgtgcagtcaacacatatttacctcccttaacaccgagtccgggatttggggcggggtgccggaaaacgccaggtcccgccagcagagggcacggtcccggcctcgctgcagcctcgggacccaccgaggcttccaggctcccacgctcgctcccgag

SEQ ID NO: 16749 - DNA, 572 bp, Homo sapiens
  source 1..572: mol_type = other DNA
taccaggtatcctgcaggttccacatgtaaattatattatccccggaggcttatggtttaggatcttctaggataatgtgccttcagaaaatcgaagattaatattcattctctaaacaatcttttttttctgaatagaaatattaagagtcatcacgcttgtgcagtcaacacatatttacctcccttaacaccgagtccgggatttggggcggggtgccggaaaacgccaggtcccgccagcagagggcacggtcccggcctcgctgcagcctcgggacccaccgaggcttccaggctcccacgctcgctcccgagcgcgtccccgccctcgcgtcacgtgacgtggccgcggaacctgagctgcggggcctaagccgagctattcgttgcaggtggccgcggcgggtgcaaccacaaaggctagagcgcgtgcatgagtgggacgaggtcagcgctgtcggcgcgctgctccagcgcccaccacaccctggtgcgggccgacgggccctgggccctggtgggagctccggcctccggtcaaggcctggccgggagcgccacgaattctc

SEQ ID NO: 16750 - DNA, 363 bp, Homo sapiens
  source 1..363: mol_type = other DNA
aattcacgaggctgagtctggccgtctgcttgagcccaggagtcagcaaccagcctacaaaaaatacaaaaattatctggttgtggaggctttgcagtctcagcgagattacagtgagctgtggtcacgtcactgcactccagcttgggtgatctcaaaaaaaaaaaaaaaaatcctaaaatattttcatgagtttgtgctgggtcaccggccccggcaggttatcaggtgctcgttgaccccctggcccaggctgcggtgtcccagcgccaggctccgccccgcccttggctgccggccaatcgccgccgactgagaggcgactgggatgggcggtgcccgcgccgggccgctaggggtgcg

SEQ ID NO: 16751 - DNA, 305 bp, Homo sapiens
  source 1..305: mol_type = other DNA
actgacagaattccagatgactagtcaagtcgcgtagcgcagaagccgctgcgttgcctccgcgcagtagtatcaaccgcggcggtggctgcagcgcagatcccgactcctgtatgcccatgcgcatcggcccgtcggagcaaacgcgcctgcgccatgtccaccaatggccagcgacttagcgtttgcggctcgcccttcggctcgggctccggggcccctccaagtctgaggacggaagtgacgacaccgaaggcgaacggatcggcgcctttctttctctggcggaagcgattggctgccgt

SEQ ID NO: 16752 - DNA, 328 bp, Homo sapiens
  source 1..328: mol_type = other DNA
ctccctatttgccctattttggtcccaacaccccaaagcttccctaccaagggaaaacctttggcctcaaaggtccttccctgcgccgcatctcctggttccagtggcggcactgaactcgcggcaatttgtccacggcagccaatcgcttccgccagagaaagaaaggcgccgatccgttcgccttcggtgtcgtcacttccgtcctcagacttggaggggccccggagcccgagccgaagggcgagccgcaaacgctaagtcgctggccattggtggacatggcgcaggcgcgtttgctccgacgggccgatgcgcatgggcatac

SEQ ID NO: 16753 - DNA, 325 bp, Homo sapiens
  source 1..325: mol_type = other DNA
cctgcgccgcatctcctggttccagtggcggcactgaactcgcggcaatttgtccacggcagccaatcgcttccgccagagaaagaaaggcgccgatccgttcgccttcggtgtcgtcacttccgtcctcagacttggaggggccccggagcccgagccgaagggcgagccgcaaacgctaagtcgctggccattggtggacatggcgcaggcgcgtttgctccgacgggccgatgcgcatgggcatacaggagtcgggatctgcgctgcagccaccgccgcggttgatactactgcgcggaggcaacgcagcggcttctgcgct

SEQ ID NO: 16754 - DNA, 184 bp, Homo sapiens
  source 1..184: mol_type = other DNA
aggagtcgggatctgcgctgcagccaccgccgcggttgatactactgcgcggaggcaacgcagcggcttctgcgctacgcgacttgactagtcatctggaattctgtcagtgctgctgtatttaccaggtacagattgcaaactcagcctgttcctccagcagctgttttaacagtcataacgg

SEQ ID NO: 16755 - DNA, 464 bp, Homo sapiens
  source 1..464: mol_type = other DNA
catgcagttctgaacaagattttttcacattgcaataatctgtgaccaactaaagcgaattcaagcaagtcagacttgctttagataagcagtgcttgcattatttaaggtcatttgaaaactcattcaagaggtcgtctgttttcacttaaagcagtttagcttaaccagctgaagaaagtcatgttgtctcattttcaaatgaataaattaaactaattaaatagactcctacggtcccagctactcgggaggctgacgtgggagaatcacctgagccaggggagttccaggctgcagtgagccgagatcgcgccactgcactccctatctcaagaaaaattttacaaaaattaatagaaaatatttcattatatttctcaacatctttaaggttcttgggctttattatatactaagcccaactgctcaaagccactgaccctgcactttgtcagagccgg

SEQ ID NO: 16756 - DNA, 367 bp, Homo sapiens
  source 1..367: mol_type = other DNA
gcaaggcctgcccagctcctcactctgggcttggcccaaactccgtggatgttcccttgggaaaagatatttccctaaactacatcgatcttggggccggacccgtctctacaaatagtaatagtaataataataataataataataataataataataataataaattaaattagccagctactcgggaggctgaggcgggaggatctcctgagcccacgagttccaggctgcagtgagctgtggtcgcattgcactccagcctaggcccccttgtctgtataaggcgtgctccacccctttcctccacggggcctatggggctgcggggaggaaggggcgcacccatcgtcgacccctacagggc

SEQ ID NO: 16757 - DNA, 479 bp, Homo sapiens
  source 1..479: mol_type = other DNA
ccttgggaaaagatatttccctaaactacatcgatcttggggccggacccgtctctacaaatagtaatagtaataataataataataataataataataataataataataaattaaattagccagctactcgggaggctgaggcgggaggatctcctgagcccacgagttccaggctgcagtgagctgtggtcgcattgcactccagcctaggcccccttgtctgtataaggcgtgctccacccctttcctccacggggcctatggggctgcggggaggaaggggcgcacccatcgtcgacccctacagggcgcgcagtgggtgattgcggcactggctcgcgttcccgcccgagggagacgaggcgggacagcgggcgggaaagggagcctgcgccgcaatctttcccgcccgaaagacccgccccgcggtgggccccagtccccgcccggtccgcggcgctgccggcccctcctcg

SEQ ID NO: 16758 - DNA, 281 bp, Homo sapiens
  source 1..281: mol_type = other DNA
gatagagtctcactaagtggcatgatctcatccccaggtagctgggattacaggcacctgccattacacatggctcaccatggccaggctggtaggatctcagctcactgcagccttgacctcctgagctcagcacactagcaagcccagctagttttgttgtctcagtcatacaatggtcaattttttaaatacagaaaatattgctttttatcgtagaatgaaaagaacacatttttcaatggccgtgggctgaaccaaagagcaggctctgatgtcag

SEQ ID NO: 16759 - DNA, 418 bp, Homo sapiens
  source 1..418: mol_type = other DNA
aaacatgttttctgtaaaagccttgataattaaaaaaaaagtatatatgtgaatatctttataagtttctattattcttcattgcattgtggaacaattgactttctaggaaagctatttctgtggcttcataggattaccatttgctttcattacttctctgagtttattaagatgataataaaatcttacagaaaacttctaacaggtgttttctaaaataccataaacggttttgtttgtttggcaaataattcgtttccaaggacaattaattattgaaagggaggattagtcatgaatctcctttttcagcaaatactttggcgccaacacttagccttgccggacaagggagggcccgcccccttggaacgggattggtttgagagaaacatgtcattaaggtattgtcaat

SEQ ID NO: 16760 - DNA, 472 bp, Homo sapiens
  source 1..472: mol_type = other DNA
aatgatatatgtagaagtacattttatatgttagtaatcatcaccaccatcttcaaaatgaccaaattaacagagttatttagataaaaacatgttttctgtaaaagccttgataattaaaaaaaaagtatatatgtgaatatctttataagtttctattattcttcattgcattgtggaacaattgactttctaggaaagctatttctgtggcttcataggattaccatttgctttcattacttctctgagtttattaagatgataataaaatcttacagaaaacttctaacaggtgttttctaaaataccataaacggttttgtttgtttggcaaataattcgtttccaaggacaattaattattgaaagggaggattagtcatgaatctcctttttcagcaaatactttggcgccaacacttagccttgccggacaagggagggcccgcccccttggaacgggattggt

SEQ ID NO: 16761 - DNA, 417 bp, Homo sapiens
  source 1..417: mol_type = other DNA
aggcaggcagattgcttgagcccgggagttcaagaccttgcagtgagctgagatcacaccactgcactccagcctgggtgacagagcgaattaaaaaaaaaaaaatcagttgtgtatttaaagcgtcttctcctgaatgttcattttgagaatttggtaatcacaaaaccacctttattactatactgttgtggtaatgggcctcaaatctttaggaaagtaaaatttgaaaaccaaaaaacttgtggctacaaaccttctcatgcatatgcattgtcagacagtacttgttgactagtgagtctgattcagtaggtctgggtgatcctcagataatcttttgagaaatactagtatgtataattttaattgcttggcattaggcaattatacatgcaaattagacacatatatata

SEQ ID NO: 16762 - DNA, 511 bp, Homo sapiens
  source 1..511: mol_type = other DNA
aaattcaattcattgaaagccagttcacttaaatgtccctttcacccaggctgtggtgaagtggggcgatcttggctcactataacctccgcccccggggttcaagcgatgcatcaccatattggccaggctggtctcgacctcctgctggaattacaggcgtgagccaccgtgcccttttgtctccataaaagcattttaaggcaaattcaatttgattccgttccagtcttataagaagaatatagaatattcatttttattcctgaggaagtacaaccaccatggatggaaatcagaagtcactaactagctgtttacttcttcttttggctcgttggcccgaaaagtgcaaaacgagggtcacaattttcattcacagattgtatgtgtttacacacatactcacgaaacaacaacagtgcgcatgcgtttttttttaaagagccggcgtgctcccggctcggctcagctcgcccccggtttcaaaagctcgggggcgggcttctga

SEQ ID NO: 16763 - DNA, 358 bp, Homo sapiens
  source 1..358: mol_type = other DNA
ggctcctaaaccaatagttaactagtctcttccaagatttagggaggctggtgtattttgctaaaagttgtgctccaaacactttaccaagttgtgcaagctacaaatacttggaattttcataaggcagaataaaaaatggctaatttggattgtggggaaattttcatcaccaccggtgatgtgtgcaccgacagctctagaactgaagattcaactcttcctatcctcctagttcctgggagccctggcggtggctgcctgacgtcaccggcctctctggcaataggctgcgagctcagctccctgaagcggcggcgaaggcggcggcggcggcggcggcggcggcagcagcgcg

SEQ ID NO: 16764 - DNA, 453 bp, Homo sapiens
  source 1..453: mol_type = other DNA
atttgaacatttctgaaacagaagtagaaagaaagagatctacccgattttgacacgattgccatttccatcaaagccaatttcctcctcatcacggaatattgcgccgagcggaaaggcgccgtcctgcaccaggtcggggaggcggcgcgggaacctcgggcagccccagcggctgggtcgagcccgacaggttccagcactccagcagcaggtgctggtttgccaacctcggctccagaggcggcgacggaggagcggcgcggctgcggtggctgcgggcgggcgggcgggcgaggagcgcggagcgaggtggcggagccgggttcgctctcgcccgcggagcagcggcacggacgaagggcagggccgagccgagcccagcgctcgggcgcgcccgagccggggccctggcgtgcggccagctgtccgggcgggaggcatgagggagcc

SEQ ID NO: 16765 - DNA, 388 bp, Homo sapiens
  source 1..388: mol_type = other DNA
cttgtccttaaagaataaattgttcaataagtcataaaatatcagacttttcttatcaccaaaatgataccatttgccctaaatataccaatagggtacttgtgggatggaacgtatgattatgaaaactatatatatatatatatatattttcaagactcttgttattgcgcctataatcccaagacttgccattgcaccccagcctgggtgaaaaaacttcttttcaaaaaaaaaaaaagaaaaattgagtatagaaaacttgaatttgagttttcaaaaatgttcctttaatatcttaaatttagggaaagccttttctatggcaaaggaatatacgtatacttacatagttttgttcttctagacacaatgtgtatgttggact

SEQ ID NO: 16766 - DNA, 590 bp, Homo sapiens
  source 1..590: mol_type = other DNA
ttgctccctgaatcatcccagcagacaatactgaggggactcagcatccagacagctaactaaagtgagtgggctagacttagtcttaagatcgaatgcctaactttctctaaatctagaattatgtaggtttggaagcatgtcgttggtaataaaaaattagaaaattgtcgctgaaaaattaagtttttctagttaaccctctgggaagaattcctcctctgggggcgacggcaacgccctcagtgagtttgctggcaccagcggaggcggcgggcacactccgagctttgggctgggcggctccgcttccctcgaccgcaggtttagctggagcccagcgctctctggaagggctcgaccctccggcgcactgggcgctcccgagcccgcagccacccacctcgcgttggccggccccagaccgcgacccccggccacgcccggagccaggcctgcggctgcgagcctgcgggaggggcggggcgggggcggcccccagcggcggcgttggcgctcagtccgcggcgcgaggacggccggccggcagggggaggcgggggggcgccgggcagccccgccttttcccg

SEQ ID NO: 16767 - DNA, 307 bp, Homo sapiens
  source 1..307: mol_type = other DNA
gcacagtggctcacccctgtaatcctagcactttgggaggctgcttgggcccagaggtgagtggctggatccattgagccagggacagtgagccgtgattacccaaattgggtgacagaatcagactgggtgaccgaatcagtctttcatgtcacttagcatttaaacgtgacttctagactaaagtgaaagagatttgtcagttatcaatatgttctgatatttttctgatatagatagtttgataaatagataaatgtataaatattgttcaaactcagagtctcctaatctctcagcctggcag

SEQ ID NO: 16768 - DNA, 407 bp, Homo sapiens
  source 1..407: mol_type = other DNA
aaaaaaagaaaaaaaaagtatctgattgtgtttagcatattgagagttatggaaactctgatcctccatgagaataatttttccaaggtctcagatctctaaagcagtagatcttggatctgatatgaaccatgataaggtgtattttaaagttcatcttttctaaagtcttttagagatctcacttgccagtcttcattaatttcatttacaattttatagtcataattatttctttgtataatagcattctgagattttccaaaattacagtggtctagctaaccgatttccgctagacgtccagctatatattttgtttggcaaaggccccctgcgctggccccgccccatgggaccgggcggcgtgggcgtgagaggcggggcggggccgcgctctgcttgcc

SEQ ID NO: 16769 - DNA, 510 bp, Homo sapiens
  source 1..510: mol_type = other DNA
tgagagttatggaaactctgatcctccatgagaataatttttccaaggtctcagatctctaaagcagtagatcttggatctgatatgaaccatgataaggtgtattttaaagttcatcttttctaaagtcttttagagatctcacttgccagtcttcattaatttcatttacaattttatagtcataattatttctttgtataatagcattctgagattttccaaaattacagtggtctagctaaccgatttccgctagacgtccagctatatattttgtttggcaaaggccccctgcgctggccccgccccatgggaccgggcggcgtgggcgtgagaggcggggcggggccgcgctctgcttgcccggaaggcacgcggaacctcggcgcggtgcttccagcagggtctctccgccactccagccccgcgcccctcgccgcggccctcgggcgtctgcgccgcagctgccgcccccgcctctttggagtctctcgcggcctcaaagcg

SEQ ID NO: 16770 - DNA, 723 bp, Homo sapiens
  source 1..723: mol_type = other DNA
tacccgaacaggctagacgtgccaccctatccccagtggggtggggtgggggattccctccgcagtccgcaggtcgccaccgctccgcggatgcacgcgctgcaggggcgccttccgccgcgggcacggcgcgggaagggagagaggcgcgtgtccgtgcactagaggcccccgtgcgtgacacaggccgatgagctcctgcgggctgcacccacgcggagtggtggccggtgtgctatatagagagacgcccgccaggcgcgccgcaggctgggacgaggctaggagggcccaggctgctgaggagggctgcgggggcgggccccggcgcagggcgcccggagcggagggggcgggcccgaggcggggcgggccgcggcgctgacgggctgtcgccgctgcactcgcctccagcccgcggtgtcgagcgcaggcggaggtacatggccccgacgggaggcgcgcggcgagcacccggagctcggctccctgcctgagcacggcagccgcgcctccgcccgcgcgtcctcgcccctccggccggcagcccgcggacatgatttcttcatggaagcgatgtccccccagcaggagactctagggggacagccggggcgctcctcttccctgacaggagtgtctcggctcgcgggaggcagctgaaggtgaggacgctgagcgggggcccgtgccctccgccgccgcagcccccactgccggcgc

SEQ ID NO: 16771 - DNA, 482 bp, Homo sapiens
  source 1..482: mol_type = other DNA
tctcggcgcagatatctgatacccgtctctgcagcctgcagacagcggaaaccgcgggtgcaaatgtgcaggggccgctgacatgaccggctgcagaagccctacccgaacaggctagacgtgccaccctatccccagtggggtggggtgggggattccctccgcagtccgcaggtcgccaccgctccgcggatgcacgcgctgcaggggcgccttccgccgcgggcacggcgcgggaagggagagaggcgcgtgtccgtgcactagaggcccccgtgcgtgacacaggccgatgagctcctgcgggctgcacccacgcggagtggtggccggtgtgctatatagagagacgcccgccaggcgcgccgcaggctgggacgaggctaggagggcccaggctgctgaggagggctgcgggggcgggccccggcgcagggcgcccggagcggagggggcgggcccgaggcggggcgggccgcggc

SEQ ID NO: 16772 - DNA, 486 bp, Homo sapiens
  source 1..486: mol_type = other DNA
ttcctctagtggaaccactaatacagtgtataaatgctgcaatgctgtcaattttagaaccttggggaaacgttttaggttgttgatactacaaaccgacctaagtctggattccagctctaaatagcgtggcaatacatgtaaattgccaagcactacaacatcttcaggaagtgaatatagtaagtgctcaataaatatttgttaaatgaatgaatgattccttatttatccttgaatcaccgattttcaaaaacaaaacatttatttagtgcagtaaaccaataacaaacaactttcttcttaggaacgtaatcggcaggaatactgttatgctgtacctgaatcatacaatcatgtatttagaagcatcatttcaagttgcatccaatccttggacttgtgattaaagcataatttgtaaaccttgccagagtaaatcttgacagtctctatcaaagatcagagacacggctctattgaagc

SEQ ID NO: 16773 - DNA, 479 bp, Homo sapiens
  source 1..479: mol_type = other DNA
aagtccctcccccttccccaatgggagaaggcttgaacctaagtccacatcctttcagttaaaatgagcaggagccaaacttgatgaggctcctggcatccccagctctgtggggaggagggtgcagagcgaaggcctctgctaggccgctggcctgccacctgggcccagagcgacttcttgctgcgggaatcagtctggccagccagtctggctccggtgttcatggccagggcagcctaagtcactcatggcttcttagctgccctgaaggctgaaatacagagcatctttgaggacatacccaaaggggtctcacttctgcagaagatagtccattttgttaagcctttgaatattcaaattgaaagtatcgcgcaatcattgattgtcaaatcatgggtgtataaaacattaattctgtttgtctcctgttccagggacctgggtgcagccggatgctttgtgaaattttaaaa

SEQ ID NO: 16774 - DNA, 640 bp, Homo sapiens
  source 1..640: mol_type = other DNA
caatcattgattgtcaaatcattgtataaaacattaattctgtttgtctcctgttccagggacctgggtgcagccggatgctttgtgaaattttaaaaatgtcaggagccctcccaggcgctgagtccctgctgctgcagcatccagccaccgcgagccacgctgtggccgctcccactcagcgcctgtcccggagggcagaggcccagaggccgagttggccgctccggacgtccgcgtaccccaggcccgacacgcggtgcggaccctgcgcgcccagaagctgctacggggggagctagaggctcacagtgggacgggggcagagcgcaccgactgcactgagccgagctgtggcggtccctgcgcggaccccgaggggcgcccgctgcccgcggagtccggagccgatcggggaactggagcgcggagagggcgcggcgcctgggccctgcgggcggggcacgggattccctgggtccgggctaggaagagcgcaatctcctttcctggggagaccctaactcctggaacccggcttgagggggatccctgctgtccagctgcggtccccgcagtgagcgaggcgctggcatcctggcactatctccaggcgtccaggctgaacgcgcggtcaccc

SEQ ID NO: 16775 - DNA, 751 bp, Homo sapiens
  source 1..751: mol_type = other DNA
cgcgagccacgctgtggccgctcccactcagcgcctgtcccggagggcagaggcccagaggccgagttggccgctccggacgtccgcgtaccccaggcccgacacgcggtgcggaccctgcgcgcccagaagctgctacggggggagctagaggctcacagtgggacgggggcagagcgcaccgactgcactgagccgagctgtggcggtccctgcgcggaccccgaggggcgcccgctgcccgcggagtccggagccgatcggggaactggagcgcggagagggcgcggcgcctgggccctgcgggcggggcacgggattccctgggtccgggctaggaagagcgcaatctcctttcctggggagaccctaactcctggaacccggcttgagggggatccctgctgtccagctgcggtccccgcagtgagcgaggcgctggcatcctggcactatctccaggcgtccaggctgaacgcgcggtcaccctcggccgccgcacccagcgcacttcccggcgcgattcctggacgcacactgcagggtagtggtcagggccggagccgccccggactcctgcggccaccttcggggcccggggctgaggctgcccctgctcccagcgctcaggggtccctcccagcgaacccctttgagcgcgcccgccacctcccgcgagccggggcagtccgaccgggccccgccagccccggggcggcccctaccgaagggcggcctcccggcggagtgc

SEQ ID NO: 16776 - DNA, 380 bp, Homo sapiens
  source 1..380: mol_type = other DNA
ggccccacacctgctctagggggtgctgagtccctgcctgagcatttacttaaagaagcttccatcagtggagtgacccctgggaatcgcatttcccgctgagcaggcgcccatggcgggctgagtcctgcccatgccctggtggcctggaagcctgcatgggcgccgtgcaaatggggagggcttacacagcaggtccccgcggggccggtgcaggctgtggctgcccgcgctgcgctgttgctctgtcccagctggctagctccgagtgtggagcgctctgggccggggccgctggggcgcgcacagtgggacaggcggcctggctgcagaaacgttgcaccggtgccacgcagcgggaacccaggcctttaaaaagc

SEQ ID NO: 16777 - DNA, 587 bp, Homo sapiens
  source 1..587: mol_type = other DNA
cctagtaactgtctcaagttggtaccccaacacaattcattggttgagttggagctcaactgagttgctactactagacgatagtgaatcatacatggatggaggggcttcgagctaacagtttaactgtatctggagaaaccgcgggtttcctcgcacttgcagcgggcgctcgcggggcaggctgcgcaggacccacgccgacgccgcgcttccctcgaaggctgcgggctgcccgagccggcgtcttcttcccggccgggcggcggttagtgattgtaaccaccacagtacaatcgcaccgggcacccgcggctgcagctcccggacggtccgcagcgccgacgcggggtcggggcccgcctcggaccccatttcaccgggggacgccctaccatggctgggcgcaagcggcccccgaggacacccccgggcccagcgggacccccgccggcctcgcagcgcacaacacgcgtagctgggccagcgggcggcgctgccggggaggacccgcgccctcccaggccgggagccgcgccccgacccccatgaccaggagtgccaggcctcccaccccgtgcgccccg

SEQ ID NO: 16778 - DNA, 478 bp, Homo sapiens
  source 1..478: mol_type = other DNA
ttatatgaacatgtgattattaacttcttgagactatattgttagtaatattttgaaagtaatattgttagtaatatttcgaaagaataaagtataaagacataaattgtggttattggccacagtaatcttaacttttctatcaatgaagtggttaagttgttcttgttaatacttttataagaaatacattaacaaaatttttcatacttcttttttccatgaagagactctgtctgcaacttttagtgggagtgattagtaaatgcacttacactttaaatccagcttgtttcctaagatttaaaggattcagaattttaaaatcacagaaactgtacacatgggcacgaaccatagcaccaaagttgacgttttgactctcccatatccaagatttggactggtcctaaaacctgatcaccgcaggggtgggcttccgacggcccccacgcgcgtggcggatcccaacacctac

SEQ ID NO: 16779 - DNA, 456 bp, Homo sapiens
  source 1..456: mol_type = other DNA
agatggggcttctgctatgcttcacagcagcatggtgtggcagaaaaggcagaaagtcagattcaccttctgctattatatttaaaagcattttgtttacgaaaccaaagtgaaacaggttaggaaagcttttcctgagatacaagttctttggatgccatccgcccttcgtgctgggactgcggcctgctgagccccaggtaggagctctctccaggtgcacccgcacagctggcgaacttggctaaccagcgcctcgggcaaacgcgggatctcccagggaagctcggagggggacagggagctggttcccctctgcgactcgcccctctctggctggccgagtgtctggcgccaacctcgctggaggaggctgtcgggggcgggccagccagcggggctgccctcctcgcagtgacgtcccagggggcggaggggcgaccgactgactccgcg

SEQ ID NO: 16780 - DNA, 611 bp, Homo sapiens
  source 1..611: mol_type = other DNA
atatgatacatctcaaaatagtgaggtgtcaaaaaaattggattagagaaatatttctaaactttttcagagtcaccaagcgtttgggaatctgacagatcacctggcctgtgttttagggggttccaaactctgaagctcacatgaggctccaaatctctggattaagtgatctccaagatcttgacattctgtgagtctataagcgactgcgctgtcagaatcaacgcattgctcagccacagttctttgccgccaaaacgccggggcggggaaggagatcgcaggccgcatccaggtctctgcacccctccgcacggtccgccagggctcgctcttgcccttcgcctggaaggccgaggaacggagcgggccgagcagcgaccccgcccctggcagcggtgaggcggaggggcgagggggagcccggaaggagcgcgccggccaggctcgcgcccctccccgtgcgccgtcccccactctccagcagccgacgtcggcggtgcttcggtcgccatggtgaccaatccaggctcgggcccgcccccgcccccctgccccggccccctgacgtcggcgcacgtcagcggcggcgcgcgcctggctgggcc

SEQ ID NO: 16781 - DNA, 403 bp, Homo sapiens
  source 1..403: mol_type = other DNA
gagcttgtgatcaccatatgtagttatcactccaagcttaaaacaaacaaaacattctaattattctgtgctaccctgacaggggtaagtgaaaactttccattcttgggttttcttgctcaagaaagtagccaccccacccaatttggaaggattaaagcttctagttttgcttcattgttgtacttctagcatgctaaagagctaaaatgtttttaacagcttgcaaaaataagtttggacagcactgttcaagcctttccgcctgagtcttaagagggccaacgagctggatgaatccctgtccctgtttctttcggctggggaaaggacgcaggggttaactcctgcagtgggccagcgtggcggccttcgtccctactgcctgggcgcggggcggggc

SEQ ID NO: 16782 - DNA, 299 bp, Homo sapiens
  source 1..299: mol_type = other DNA
ggaattgcaagttgccaaatgacttcaacagcctggtacccactgctgaagaagctgtgacctgtaaagcagcagttctccaatggagcctactcaatcgaccaaggtagcatccttgcactccagatctggttgaccacccaggaattctgagtttgtggggtgatctagctaacaggtagctagagttgtaattaaacaggcaacatatttggtgtccttttctaataactaatatgatactgaagtacgctaatggatgttaataattaactgtagttgaatgactataattttgg

SEQ ID NO: 16783 - DNA, 608 bp, Homo sapiens
  source 1..608: mol_type = other DNA
ccttgacctctgaggctcaagtgatcctcccacctcagcctcctgagtagttggaactacagatatgtgccaccacacctagctaatttttgtattttttaaagagatggggcactcccaaagtgctgggactacgcatagttttaaatgaaatattttaatattttcctttgagcatctacaatattcttatcagcaactggctgactctgtttttgttaatatacaatattaatgtaatacatagtattaacaaaagcagagttctgatatctcacttttactaaatccaatgtctctgtaaattctattgaatatttgaaggagatgatatgcatgatatttctgtacccctgtgaggtgtagcgtaacctcccatggctgtgaggagaggcaggccttctcacacatgactagaaggatactcttatctgagtggagagaggcaacattgtctgaagacttggatgtttgttccaaagctctgtaaatttttaggattgcaattgctgttctctaccctgaagggaccttcaaaattactaatgaagagttggcctttctccatttcagattgatatcagtaaatgccattatttagtggattt

SEQ ID NO: 16784 - DNA, 427 bp, Homo sapiens
  source 1..427: mol_type = other DNA
ttagttgttcttgaatgaagaactcatcagctgcttcccagagatggtgaaaaagaggttaaaagtttttctaatggattatcctcttgattaatctggagtgcagcggcacaatcagctcactgtagcctcgaactcttgggctcaagcgatcccactgagccaatttttaaaaaaaatttttttgtagagacgaaaatgaagcctaatctgactgatacagttgcatattaattagttaccaatctagataaccagacctgtagtgtgcctggccagaaataagcataagaccctcagtgtctctgtcggcacttgtaaagcttttaaaaacttgtttcatgttctttgcaaagtctctcccctggaggaataggccatatgtagagacagatgtgagactgaagtcttttttacatataaataa

SEQ ID NO: 16785 - DNA, 403 bp, Homo sapiens
  source 1..403: mol_type = other DNA
tcactgaacttcctttaagagcatttttatgtttgccttgaaacaaactccgtcatttgtggcttgatgaaaaccagtaatgaatttgagaatccaacaattttgttttcctttgattaaaaccccagaaatgaatttatgttatgcttttgtttttccttcatctaacgtagaatttattaagttctattagccattaacttgacatttatatgtgtcctaaccaaatctggagagctaaggagtatattcttctctcctttggagaaagtagaaacattctatggagtgtcctagcatactcctaaatttgagatcaagataacactaaaactaaatatgttgttttgttctaatataatgaaagatgggtatttcacaaagaggagagatttcttttccc

SEQ ID NO: 16786 - DNA, 481 bp, Homo sapiens
  source 1..481: mol_type = other DNA
ctttttcctattggtgcttgacatctgtaatagataatagaaaggataaccccttttctgtcttcagatttccagaatcctgttaagaaaaaggtgagtcagaggttgctggatcctaaaggactcagtttaaaaaataatgttgttaaattctaattaagattcagaaaagacatttttgatttgaaaataaaaccatccgttagttttctataacccaaatgcatatttgtaaagaatacccaaaggtgacgcacagttgaacttgaacttttccttattaagcaatgctgattgcaggaaattgctatgacacacagtgattaaaacccgcatgtgtcattcacttcttgattgaagtaatcatacagtaaagaataaaaaatagtgtgagtaagacttgtgtttttagtgattttgcttcattctgaatccttaaagctgatctaagaaaaacgggttgttgctttataccaaacac

SEQ ID NO: 16787 - DNA, 561 bp, Homo sapiens
  source 1..561: mol_type = other DNA
cagggaaataacagtctgttatgaaatgttcacagcctagttggaaacttgatttatgagctctgaatacataaaaatgattgcatttataatacttttgtttcctcatctcagagtacagtatacctagataaaaagaaaattgtgttagagacaaatattttctggaagctaaagtgctttcctgaaaaaaacagtctgtatttgcaaatatgaaagagacaagtggctttttcctattggtgcttgacatctgtaatagataatagaaaggataaccccttttctgtcttcagatttccagaatcctgttaagaaaaaggtgagtcagaggttgctggatcctaaaggactcagtttaaaaaataatgttgttaaattctaattaagattcagaaaagacatttttgatttgaaaataaaaccatccgttagttttctataacccaaatgcatatttgtaaagaatacccaaaggtgacgcacagttgaacttgaacttttccttattaagcaatgctgattgcaggaaattgctatgacacacagtgattaaaaccc

SEQ ID NO: 16788 - DNA, 357 bp, Homo sapiens
  source 1..357: mol_type = other DNA
gcttcttcagaagtaaattgtcagcaatggctctaagtcttttaaagcatattccggtggttcacgcctgtaataggcagatcacgaggtcaagagctcgagaccagcctgtaatcccagctactcggaggctcagtcaagagaatcgcttgaaccagggaatcaggttgcagtgagctgagatcccaccactgcacagaaaaataagagtcattgaacttcatttttttaaaaaagaatatcactttgctgtttatgtacctgtttattgacattttataatgtaggtaaatttttaatcagtttttaattgatacctaattaacccatgactggatggtatatggacaagacttc

SEQ ID NO: 16789 - DNA, 479 bp, Homo sapiens
  source 1..479: mol_type = other DNA
tagctccaagtttatttagtttcctggtaaataaaacaaggttgttgtattaagtttaaaaaggataaaatatgtaactaccacaatatgacagtgatggaatgctacaggctgcctctgtcaaggtgttaaaaatgacattttaaggaccttttagtagatagctgtgctgtgatatttaactgaatacttcacatctcacgaagaaactcctcaggttctatttcttcgctactcggggatctgccccaattggcccagtaacgctgccagccaaagctatgtctgcgggcttgccatggctagtcgaggggctcggcagcgcctgaagggcagcggggccagcagtggggatacggccccggctgcggacaagctgcgggagctgctgggcagccgagaggcgggcggcgcggagcaccggaccgagtacgtgtgcggcgcggcaggggcgtggccggccggcggggcggttcggg

SEQ ID NO: 16790 - DNA, 377 bp, Homo sapiens
  source 1..377: mol_type = other DNA
cacttaagttattcacctaaaaaggtgaatagctagttgttttttctcagtaaaattaataaaaattcagatttttaagaaaaaatttttatgagatagtgaagaattgactttaataggcataaattaactcatacactttagctcaatgcatttatgtcactaggtgcaaggtacataggtatacggctgtgcccactctaggcctggcccaggagttttacagcgcagggagctcgggcctcccgcggtgaggccaggccggactgagccccgcgcgccacagctaagaccctcccgggggcagccccgaaccgccccgccggccggccacgcccctgccgcgccgcacacgtactcggtccggtgctccgcgc

SEQ ID NO: 16791 - DNA, 409 bp, Homo sapiens
  source 1..409: mol_type = other DNA
gagaattgagcaatatgatcaatctccattttcaatacttgggaatttttagtaggaaatcacaaccttctgagaccttgtcaagagatgtcccagttactggggggtatgatatcatcaatgtgccagtataaaaatgattagctccaagtttatttagtttcctggtaaataaaacaaggttgttgtattaagtttaaaaaggataaaatatgtaactaccacaatatgacagtgatggaatgctacaggctgcctctgtcaaggtgttaaaaatgacattttaaggaccttttagtagatagctgtgctgtgatatttaactgaatacttcacatctcacgaagaaactcctcaggttctatttcttcgctactcggggatctgccccaattggcccagtaacgct

SEQ ID NO: 16792 - DNA, 296 bp, Homo sapiens
  source 1..296: mol_type = other DNA
gcaagcttacttaatctgaggtgagcagatcacctgaggtcaggagtttccagcctggccacgtgctggcacgtgcctgtagtcccaggtacttgggaatcgtgccactgcactccagcctggattattttaaactagtatttgaaatatataggaactgtgcagatattgatctttctgtgacatatgcatgaatgacacaaatgcaaagcagaccctggtcagccaatcttatcagtgagtgggttgaaccacataggtatgattggattttaattatttcacaggcaaaccat

SEQ ID NO: 16793 - DNA, 217 bp, Homo sapiens
  source 1..217: mol_type = other DNA
ctgcactccagcctgggcgacagggcgaccaggcagtctgctcattattttgcactgtcaaaaataaatgatcctcttttacacacccaagagtacattatttgtattggaaaaatttggcacaatgcgggaagatgaaataaatttgatcaaattctctctcgtgccagctgggtgagcccaagtctgggcacaaagccggctttatgttttggga

SEQ ID NO: 16794 - DNA, 249 bp, Homo sapiens
  source 1..249: mol_type = other DNA
gcaacctacctgggtgcaatataccatttgtaaaataaaagttgattttttttaaaggctagttaagatgcacctgtgtgctcccagagcacacaccctgcacccaccagactgcagtactctttcttgaacgaatagaaaaaggttcaaaaccttctgcgtttgtgacctcatgcaggtgtgaagtcgctcaccatgcttgggctaaagacactttcggctcgtctagacaaccaggcgccatggtgc

SEQ ID NO: 16795 - DNA, 382 bp, Homo sapiens
  source 1..382: mol_type = other DNA
ccaggcagtctgctcattattttgcactgtcaaaaataaatgatcctcttttacacacccaagagtacattatttgtattggaaaaatttggcacaatgcgggaagatgaaataaatttgatcaaattctctctcgtgccagctgggtgagcccaagtctgggcacaaagccggctttatgttttgggacgcgccggccgctgggcggggtttcgcagaggggcgggctcgctacccgctcgcgcaggcactgcagtctcccaggccagtggatcccgagccaactcggccgggcgctggaggcacagagcggcggcgaaggagaaattcccctcccacaggaggcgccgaggggccatggcctccacggactcccggctcg

SEQ ID NO: 16796 - DNA, 271 bp, Homo sapiens
  source 1..271: mol_type = other DNA
tgagctatctcattcaagacggagttgctctggtataaatacctctgacattctcacttataagtgggagcactccaggctactaactagagtggggagtagcaaacctgcaacctacctgggtgcaatataccatttgtaaaataaaagttgattttttttaaaggctagttaagatgcacctgtgtgctcccagagcacacaccctgcacccaccagactgcagtactctttcttgaacgaatagaaaaaggttcaaaaccttctgcgt

SEQ ID NO: 16797 - DNA, 381 bp, Homo sapiens
  source 1..381: mol_type = other DNA
caatgcgggaagatgaaataaatttgatcaaattctctctcgtgccagctgggtgagcccaagtctgggcacaaagccggctttatgttttgggacgcgccggccgctgggcggggtttcgcagaggggcgggctcgctacccgctcgcgcaggcactgcagtctcccaggccagtggatcccgagccaactcggccgggcgctggaggcacagagcggcggcgaaggagaaattcccctcccacaggaggcgccgaggggccatggcctccacggactcccggctcggcaccatggcgcctggttgtctagacgagccgaaagtgtctttagcccaagcatggtgagcgacttcacacctgcatgaggtcacaaacgcag

SEQ ID NO: 16798 - DNA, 362 bp, Homo sapiens
  source 1..362: mol_type = other DNA
ggaggtgggggcggggtcgacaccacccaaaatagtgccgagcctcttgggggggagcaacgagggtgtgaccagcgccgcccggacccctcttcagctgtcgcagggggcctgagaggacagctgagggtcaggcctcgctgagaccctcacaaacggaaagcagatggctggtgctgacatgtctggggctcagcctaggaagattccagtccctgcccaggcccaagatagttgctggcctgattcccctggcattcaggactggaaaggaggaggaggggcacactacgccggctcccatcctcccccactctgtaccagagtactgggtatgtgtcacattgccaaatcccggatcg

SEQ ID NO: 16799 - DNA, 451 bp, Homo sapiens
  source 1..451: mol_type = other DNA
gccgggtgggcatgtggcactgagcggcccgacatggctgcagatgcagcagaagccctggtccgaggtgcagccccaacaggcgcagcgcgacccctccagctgcccggagagccagggctcgataggaggtgggggcggggtcgacaccacccaaaatagtgccgagcctcttgggggggagcaacgagggtgtgaccagcgccgcccggacccctcttcagctgtcgcagggggcctgagaggacagctgagggtcaggcctcgctgagaccctcacaaacggaaagcagatggctggtgctgacatgtctggggctcagcctaggaagattccagtccctgcccaggcccaagatagttgctggcctgattcccctggcattcaggactggaaaggaggaggaggggcacactacgccggctcccatcctcccccactctgtaccag

SEQ ID NO: 16800 - DNA, 382 bp, Homo sapiens
  source 1..382: mol_type = other DNA
cagctggctggtcagctccttcagctgcagctacagccagccgatccgggatttggcaatgtgacacatacccagtactctggtacagagtgggggaggatgggagccggcgtagtgtgcccctcctcctcctttccagtcctgaatgccaggggaatcaggccagcaactatcttgggcctgggcagggactggaatcttcctaggctgagccccagacatgtcagcaccagccatctgctttccgtttgtgagggtctcagcgaggcctgaccctcagctgtcctctcaggccccctgcgacagctgaagaggggtccgggcggcgctggtcacaccctcgttgctcccccccaagaggctcggcactattttgggtggt

SEQ ID NO: 16801 - DNA, 290 bp, Homo sapiens
  source 1..290: mol_type = other DNA
ctttccgtttgtgagggtctcagcgaggcctgaccctcagctgtcctctcaggccccctgcgacagctgaagaggggtccgggcggcgctggtcacaccctcgttgctcccccccaagaggctcggcactattttgggtggtgtcgaccccgcccccacctcctatcgagccctggctctccgggcagctggaggggtcgcgctgcgcctgttggggctgcacctcggaccagggcttctgctgcatctgcagccatgtcgggccgctcagtgccacatgcccacccggc

SEQ ID NO: 16802 - DNA, 297 bp, Homo sapiens
  source 1..297: mol_type = other DNA
atgtccggcctcgggccgccccagctggggagggcagcagggcaggggcctccgagcttaggctcagtgagggcaagttccaggcatttctgtgatggaggtgtctgcccggcacccccagcgcctggaccgccacgggagctcccatgatggcatcacagaggtcaatgaggtctacatctccctgctccctgcgcctcctgatccagaggaagaggaggaggcagcctatgggcagctgcccaccactccagaggtaatggtccacaatgtatggtttggtcccatgggacatgt

SEQ ID NO: 16803 - DNA, 302 bp, Homo sapiens
  source 1..302: mol_type = other DNA
taaacccagctgcttaggtgctttttaaaacattacagaaaatcattcttcaggccagaagcaagaccctatcttggccaggtgtggtgcctcacacttaatttaaaaaaaaaaaaaaagaccttgtctctaaaaagatttttttttttttaattagctgagaccctgtctttaaaaataaaagaaagaaagaaaataagatgctttgtaataataacaacaatgcctaactcttactgagtgtgtcccatgtgccaggccctgcacttcctgtaagattgtcactcttacccatgtttcat

SEQ ID NO: 16804 - DNA, 443 bp, Homo sapiens
  source 1..443: mol_type = other DNA
tcctgtaagattgtcactcttacccatgtttcatgggccctgaacgaatgatgggtttcacagattctcgtagagcccatgtagttctgaactttaagaagtgctgaggccatcctgatcatagaatcatctgattttataccagaaaggggattagatttttcacagccctagaaacttaggccctataaaggttaagtacacatcgatttcctgagtctggtaccaattgtcgaaagtgaaactcagttaaacctgattaggcactcatctattatagaggataaggtttctttttattgaagcttgaagctcaagttcatggcttcatcaaaagacgcttcaaatcctgaagttgagattttggctgggaacacagtcacctgggaatcattccagcaggtggcttcaaaagtccaacctgctaggttgaaatctgacac

SEQ ID NO: 16805 - DNA, 456 bp, Homo sapiens
  source 1..456: mol_type = other DNA
tatttcctattttttgcaatttaaataatgttataatgaatatccatatttgtacatgtataattatttcttaggatatggaattgctacatcagagggtatacacatttatgtttaaggatttttatactaaatgaatactcactccatttggcattgcacaatatctaacttgagaacaggctctgttcactaacactggatagccctagtctatgtattttaggactaatattttctgtatccatttaaataaaaataagtaggtaaatatctcgttcttaggataaggctgacacagaaaaacacaggagtagtttttcttctgaatggagactcaacgtcaaatatgtgtggaaaaatcctgactttttccccacagtatccggagtaagccccaaactatttagcctctctctaacagtcacgggcgccattggggaccccaggggctca

SEQ ID NO: 16806 - DNA, 198 bp, Homo sapiens
  source 1..198: mol_type = other DNA
tgcctccttgggacccacacaggtcctgacgtagaatgtaagtgctgagtaaatatttgctcagaactcagcaagagccaggttctggatggttctggaaggtggagtagtacatgccagggatgggattgtctaacaggctaataattaggccctttccttgtccttgtttttaattaacagagaaagtgagagatg

SEQ ID NO: 16807 - DNA, 280 bp, Homo sapiens
  source 1..280: mol_type = other DNA
tggagactcaacgtcaaatatgtgtggaaaaatcctgactttttccccacagtatccggagtaagccccaaactatttagcctctctctaacagtcacgggcgccattggggaccccaggggctcaaaagttctctaaaggatgttaaaggttaaacatctctcactttctctgttaattaaaaacaaggacaaggaaagggcctaattattagcctgttagacaatcccatccctggcatgtactactccaccttccagaaccatccagaacctggctc

SEQ ID NO: 16808 - DNA, 515 bp, Homo sapiens
  source 1..515: mol_type = other DNA
ccatctgggatcacgaggtggaatgtaaaatgaatgttttttcagcttcgagttttcctatagaaaaatgactagtattcctataataatcaaggctatgacttgaatagctagaaacagcctagagtctttattttaattaaagcccatttattttaaaacacattaaaatatgggttgtatattttagcagttattttataaagaatgaaataggaaaattttggaatgataccatcaataactagggggaaaatcctatgattcactccctcccagtgtgtgtgtgtgttgcgcaccctccccacgggcacacccgcctgcaagcctggtgtgtgtgtgcgcgcgcgcggctgcaagcgcatgcatacgccagccgggccgccgtgtgtgtgtgtgtatgcacacagcgcgcacatacagcagcacgtttgcctaaaagccgtgtgagtgtgtgtgtgtgtagcgcacgcacacacgcccgtgctgcggcccgggcggggggggggtgtgcg

SEQ ID NO: 16809 - DNA, 574 bp, Homo sapiens
  source 1..574: mol_type = other DNA
agtctttattttaattaaagcccatttattttaaaacacattaaaatatgggttgtatattttagcagttattttataaagaatgaaataggaaaattttggaatgataccatcaataactagggggaaaatcctatgattcactccctcccagtgtgtgtgtgtgttgcgcaccctccccacgggcacacccgcctgcaagcctggtgtgtgtgtgcgcgcgcgcggctgcaagcgcatgcatacgccagccgggccgccgtgtgtgtgtgtgtatgcacacagcgcgcacatacagcagcacgtttgcctaaaagccgtgtgagtgtgtgtgtgtgtagcgcacgcacacacgcccgtgctgcggcccgggcggggggggggtgtgcgcgtgcgtgcgggcgtgcagcgcgcgccctcgccagcccgcctggccgtgcggctttcccgcaggaaagcggggctgggggcagcccggcagcgccgctcaacctagtgcgcgcccagaggaaccgcgaccgcgccgggcccctccagcggaggcccccgtgcgagcatgcccagtgcaagccgc

SEQ ID NO: 16810 - DNA, 375 bp, Homo sapiens
  source 1..375: mol_type = other DNA
ctcagtgagtcctggggaaggagagggcttcttgctatctggaacccagcaggttcccgcacattctgagccctcgcccccagggagcccacttagtggctctgtgacccagatagcccctgggtgtctcattccctgccactgctcctccggagacgccctggggaagccggagcgtcagagtctccaccccgaggagcggccagagccccatgcgggcctgacctgtccgaccgacccctcgtccaccaagggagggctcatggtgcggggctccccagcactcagaccactagagccgtccagagcggtcggttggccagcggagctggcttgggtcggagcccggctgcctcgccgcgtgtgacagcccag

SEQ ID NO: 16811 - DNA, 311 bp, Homo sapiens
  source 1..311: mol_type = other DNA
tgtgtagatgactttttattcattgattcaaaagacatacattacagttaagtttttcaaacatttgaaacataacgaagcttttggttacttaaaagaattctatggtattagggacaacaccgtttgtaaacctatatcttcatacagggaatatgcttaatctacagtatactacagcctgcgcggggcgcggcccagtccatcccccttcggatgcgcaggcctcgattccctcgcggcttttccagaaagcttggccacgcccctcggcccagactctcggagagaaagagcgtgcctgtgcggtg

SEQ ID NO: 16812 - DNA, 293 bp, Homo sapiens
  source 1..293: mol_type = other DNA
ggttgtggatcagcaccactttaaccctgacaagtcagagtaatcattttggctccccagttctgaaattgccagagggtggggtgagggccacataagactatctctcactagctctgtgaccttgagcaattaatgttctgttcaaaatgaagacgataatacctctctcccattggagaggtgttgctaaacgggaaacttaactaacggataatcattccatggttggacgcctgttaccagggtaaccagcctgggcctgaaaaccctcggcctgaaaaggaagtctc

SEQ ID NO: 16813 - DNA, 297 bp, Homo sapiens
  source 1..297: mol_type = other DNA
ttatttgtaaaatgaagatagcatctattgtgaagttaagaccagggaacatctgcatgttccctactttatttaatgacacctcaggcattctttaataaattcaatcgccaaatccttatctcttgtgttttcctcatcagaatgatactacagtacctgaggtaatcctaaccctctttcccgactcagggtgggaattagcctcatcaggactgcgacttccagagggagctctctttctgatgactacagtggtcagaaccgccatctcgttcctgagggccggtgcacacc

SEQ ID NO: 16814 - DNA, 266 bp, Homo sapiens
  source 1..266: mol_type = other DNA
agaaatcagttctctctaaggtcctcaaggatagctgtcatcacctcccatttaagaggcgtgattatcgttagaaccatgtccgaagggctccaaacctacaatccagtgaggcagtggggtgacggcgacacgtcaccagggacaggagcaaggaaggtgaaacttcctttcccttctgcagtaaactgcgccttctgctgctcggcggccaccaggcgctgcaactccgcttcatcggccgcatgcgcgacgggtgtgcaccg

SEQ ID NO: 16815 - DNA, 500 bp, Homo sapiens
  source 1..500: mol_type = other DNA
ttcctagcaaagtaataacatgttcaagaaaaaaatggctaagaaattttgtttccactaattattttcaagaacactctgctcttcaaacgttacattttataagactattttttaacatgttgaacataagccctaaatatatgtatccttaaattgtatttcaaatattttaggtcagtctttgctatcattccaggaatagaaagttttaacactggaaactgcaagtaaattactttctgttgcagaaagtgtaaaaattattaaataaaattctaatgatattccactgaaaaaagtaaaagaaaatatttgcaaaatgttcctttttttaaaatgttacattttagaaatattttaagtgttgtaacattgtaggaattaccccaataggactgattattccgcattgtaaaataagaaaaaaagatgcttctgtgctttcttaaaaagatttcatgaaaatagtgatattacattaaaagaagtagacagca

SEQ ID NO: 16816 - DNA, 255 bp, Homo sapiens
  source 1..255: mol_type = other DNA
tattttctaggaacttatttaaaacaaccggcttcttcaccttaatgataactaacatttaataaccttagtaatgtatgtaaatgttaaatatagttctctaagatgtattggaatgtatatctttgaaattgcaggtcaagtgttatgcaacactttttgatagctgttgccaattaaagccttgcttgtgcagttttgcaggggctgctgggagtgcggcgcgcttcccacctccacccccgaagtccgagc

SEQ ID NO: 16817 - DNA, 449 bp, Homo sapiens
  source 1..449: mol_type = other DNA
tggagaaatgctattgcaggaatactattgccctttaatttacacttctaatgttactctttactatttcaataaaatatcacaaatttataagttatttttcattgattactaatcaaaatatataccgaactatcttcgtacttatgtattcttgaaatacaattttgctaggaaaacatgatatgttaatagtttcttcagtggcacagaagaacaaacgtatcatggtatgttagtcactttttgtagcacagtatttgctacattggtgctaaaaatgttaataaagtcatatacattttaagggcatactttcactcatgctagattgtcagaaaatgttctgtaaaattaatgaatatacctctagtggcagtctaaattcggacaattgatgctgtgcatcaggtctaattttaatatttcaaacagctgctttgacctgt

SEQ ID NO: 16818 - DNA, 455 bp, Homo sapiens
  source 1..455: mol_type = other DNA
ctaattttaatatttcaaacagctgctttgacctgtcagtgagggagggacagtttagtagtactcaaaactgccagtgctcaatacaaaaatgttttttcgatggtgcaccaggtagatttgcctgtgtggctcagatgagataattgtttcctcacagccttcacatttgtatattttatgcaatatttaaggatttgcaataagaagaatattcaatatttaggcttttctaaattgaaaaatcactgttaaaactcatttatgttttatagccttctattatagttaccattgttacatgattttatgtatagaaattgtctagagctttcagaaatcatactaatatgcactataaattttaaaattacttaatgtagtaatttaatgtttgcagtatgcactcaaggagtactggtagtatcatttatcatacaagacagataagataa

SEQ ID NO: 16819 - DNA, 231 bp, Homo sapiens
  source 1..231: mol_type = other DNA
tttgtaaatgagttcaaccattgtggactgggtatatacccaaaggattataaatcatgctactttaaagacacatgcacctgtatgtttattgtggcactattcacaattgccataaaaacgatgaattcatgtcctttgcagggacatggatgaagctggacccataggtgggaccggtgcgttgcgttgtgcacatgtctaacttaaagtataataataattaaaact

SEQ ID NO: 16820 - DNA, 337 bp, Homo sapiens
  source 1..337: mol_type = other DNA
ccataaaaacgatgaattcatgtcctttgcagggacatggatgaagctggacccataggtgggaccggtgcgttgcgttgtgcacatgtctaacttaaagtataataataattaaaactttgagtcaccagtcactgagaggtcactcaggacccaaagtgtgcccagatgaccaggtatgcttaggtatcccaaatcttgctctccgaagagattcagatagcgagacccttaactgtctcccgaggccgggaagcggagacgcacttcctaggggcgcgtctggcacgcactgcgcagccgcggtgggaggaggcaccggccgcgcggcgggagg

SEQ ID NO: 16821 - DNA, 395 bp, Homo sapiens
  source 1..395: mol_type = other DNA
gcagctagaggctgcaagattctaattgtaaaacctaagatcagtgcttaagatattgtggcaccacccagatgaataaactggctcatctgagactgatttgagtaataataaaactccggtctccctcactaaatcgactctgtttaggcagcactttaaccatccttatgagaaagtgccatttctccatttcacaggtgagaaaactgaggattaaaaaggttactcaaataactttcctaaggataaatgtgtgagtcttctaactcacacatttatcaataaaaaggcgagcagcaggcgctgctttcccgtccttggtcccgccccgggccctggctcctggccccgcccttggtcccgccccgggcccctggctcctggccccgccc

SEQ ID NO: 16822 - DNA, 456 bp, Homo sapiens
  source 1..456: mol_type = other DNA
ccccctacttttgaaaacacgggtggaattttaattaaagcctattgtgttggtacctcagtaatattatacattaatatctttaagaattaaggtcacgtccccatgtaagaaaatattatttaatgacgcttctatatcataatacctatataaaagcctggctattttaataaagagaccacagatttcagaatttataaacaggaaaacattttcttcgggttatttctggaaatcttctctgtgggagcttaaagtcctgggctatccttgtgttgcaaggatcttagcaactttacctaaccaaatctaaaattttgcttttattatttactagttatcaaaatatgcaaactgcctctcccagggagactgcgtgtgaaagagcccggctcccccaaaagctccatggccggcgtggtggaaggacacagtgaggttctcacccccgcc

SEQ ID NO: 16823 - DNA, 478 bp, Homo sapiens
  source 1..478: mol_type = other DNA
ggctcctcaaacctaacagtgatcactctgagggctcctttgtctctgggcaatggcccacttggtcagtgcccctggggagggtgagagggcaatcccatggacccaggacccaggggaacctaagctcagcactggtcaggctccagctagaaaggaggccacctcccccgtggccaccccgaggctggggtccatccctctgaggttggatccaggaagggagtcccctgcagacagggggcaggggtccaggcctgaatccttcataaccttgaatgcactgaaggaatgcataaaccgatttcacttagcgctctaaataaactggattctcccagcatccctccctagggggaactggggggagggacataccctcttccccaggcccaggtcgctccatccctgctggggcctcagggctcatgcccacctttgcggggcaggagcggctcctcttgggcggggaaggagg

SEQ ID NO: 16824 - DNA, 557 bp, Homo sapiens
  source 1..557: mol_type = other DNA
acctgctcatcagttatttcaggcacaaataagggacataataagtgagaagactcctctgttgttgagcctcaccatgagttttatgaatgacatatatcaatatttagtcacctatttaaaccctttaaaaacaacaccatatggtaggaattagacttccaggatttgaatcctgactctaagcaagttaattaacctctatcacctgggggttctcacctgtaagtggatgttaataccaacataattgggtcacagtaattaattaaggtaatccctgggaaaagtgagtactctttaaatgttaactgtaatgattgttattgttattattaagatgcttaagtaagaaacaacactttgagctgttgtccttttgcagtaattcagcacctgattttacatttctgaaatcatgtttctaaaacgttcacaaaattcaaaggtgcagctgaattcatttcgcataagttatcctggtctggcacaggccagtttttattaaaaacaaaaaacaaggagaatgtactggtgtacaaggacaaggtgacttt

SEQ ID NO: 16825 - DNA, 333 bp, Homo sapiens
  source 1..333: mol_type = other DNA
gggtccccggattgccaggtgtgtgacttctgaatctgacacagaatctggcctctgcaggggcagtttggagtcaagggtgagctgttttcctttggatgagtccgattccaagacctgaagtcagaaaacggatgcggacctcttccaacacctcggaacccttggcttctgagtcctcaaaggagaagacccagcctgcaatcacagcttattaaagggatggcggaatcccccaacccctcctacccgttcaggccgggggcgggggcggggcctgtctcaggggcggggaccggggcacctccctcccgcgctccccgcgctcgggcg

SEQ ID NO: 16826 - DNA, 462 bp, Homo sapiens
  source 1..462: mol_type = other DNA
aataatagcagctactgtttgcttacagtataggcaatatctcaatgaattctgacatcaaccctatgaggcatcctcatttggcctgactctaaagcctatattcttaactgtcccttctgaggggtttttgagcagccagttggaggaaaggaagccccacctgtgtttgccttctcccaggtgtgtttagccccgtgtgggctcacttgggtcacctttgaaacaagatagcactgagggctcctgctgcaactggctcccagggcagacaggggtagaggccccacttccctggcattggggagacagatgtggccctcgggcaagagtcagcaggaagggagaattctgccagcatgcatgcatggggcacactttttggcacaagggaccttgttgcgggaggggctggggttgcctagcccagcccagcccttgtccccctttacaaggggaacc

SEQ ID NO: 16827 - DNA, 628 bp, Homo sapiens
  source 1..628: mol_type = other DNA
ggttacttgtaaacattacatcattttatgtaagagcaggggaggtttctggaaccaatccccccataccaactgtgtatgtttgatgtctgtctgaccaatggttatacacttaagtttttaaaaaggaatcatagtatacatagaatattgtgaacatctttctgtatgcaatgcattaaaataatgaaaccatttttaaaagcttttgacacatttatatatttataatatgacagaaagtactaagtatcttgttcacacaggactaatattatgtatatctaagtaatataaatatgtaatgtaggtaatgtaaatgtgtaatgtatcacgtagatgtaatatatgtacatagatgcaattataagcaaccttttatttataatgaggtgacgccactttcagttagataattttacaagtaagccttttgaagtttagaaaggttcagttagacctggttattaaaaacgtttaatttcctcaatcccatctcgggattggcgcggtgcctgctgggagttgtagtgcgcccctcgccttccgggcggcggtctgaggcccgcgagactccgtttcccggcaggcctcgcgtcaagacggccggcgggacgggagctgcggc

SEQ ID NO: 16828 - DNA, 533 bp, Homo sapiens
  source 1..533: mol_type = other DNA
aaaccctgggtgacagcgtgcctaatcccagctactcaggagaatcgcttggtgcggctgcactccagcttgaggggacagagtgagactcttttaaagtaacacaaaattttagtttgaacttctgaaaatcgaaaatggaaaaactgcaattttccttatcatgcccaggttaagagccttaaagatggtgaacacttcttcattcggcagtttcccacggcgggggaacagttttaactcgcccgtggggaggcggctcccaggattcgcaaacccagttcccggacactggcagcgcggcccgcagcctccaccggctgtgaagctgaccaacagcgacaggcggggccgggatcacgtgaccgacgtctggtcagccgggcgtgcgcgggagcacgcagaactgttcggccccgggccgcgcgccttgcgtgcgcgcgcatgccgggggcggggcatgtgggccaagcctccggcgcgcgctgcgggcgggggcgggacggagcggggcctagtcctgagaggctggg

SEQ ID NO: 16829 - DNA, 272 bp, Homo sapiens
  source 1..272: mol_type = other DNA
ataagccagaattggagatataaagctgaataacacaacatacacacctgaatgagtactgtaatgtagttagatgttttgaaaacaaattttgtcatcagagcctcactctgttgctaaggctagagctctcagcctcccagctagctggggctccaggctgttgaactcctgggctaggctgactgatttcaatttaccaactgatatcactggaaacaaatgaaaaaacaatggtctttttgatcagtgagagctgcgcacgtgaccat

SEQ ID NO: 16830 - DNA, 354 bp, Homo sapiens
  source 1..354: mol_type = other DNA
tgctcattagattcccagttccgacggtaatgaaagtacctgtccaatgactgagtgaagcattgaatcccttgtgaacaaaatatctttttgcaatttcacaaatttgtcacttccaaacaaatcaagatttttgggtcagaagaaatggttgttccctggaaccagagagaattttctcaaaacaaagatctcattttctgacaagtgcattttatttaaggacagatggggctctcgttaatccctttatctagaaatctatacaagttttttgggttatgatttttctattgaatttttgaattacgcatgaaaaatcaaaagaaaaaccaacgcgggagttaagttttg

SEQ ID NO: 16831 - DNA, 584 bp, Homo sapiens
  source 1..584: mol_type = other DNA
ctagtccctttgggggactaccaaaaatacaaaaattagccaggcatggctcgcatttgtagtcccagctcttcaagagcagtgattgcgccactgcactctagcctgggtgacagagcgagactctgtctcaaagagggcacaaaattatatgtatgtgatatttacttcattgtatacacattactgaagaaaattatggaagaatatatacgtcataagtttacagatgattttaatttttcttcatatttttctacaaagtgcatgtattattattatttttactatatgtatttattatgtatggcaagaatgcatgaaataaatatgtatagtaaaagtttatttttattatatattttattatttttaatatatattttactatttaagtataactaattagatgaggacaaagtggtgactccagttaccctaactacagaggtgccagtcaccttggttggagtaaaagcagcgtggtgcacctcccaggggtcaggctgcacccttgtctcatgggctactccttggggaaacaggagctcatgacatcagctagggcgggctcccctctcagc

SEQ ID NO: 16832 - DNA, 464 bp, Homo sapiens
  source 1..464: mol_type = other DNA
cctcgagggctgactggcctgagaaccctggatggcgctctcggccgggcttcggtcagaatccacagcccgtgcccgaagagcgcttcccgccggcccctaccttcgctcagcaaaaggggagagggcagcgtcagaggaagagtacattttctttggctgctctaccctctgaagtagggcggccagctgaaggaggacacacttttgaggggcccagaggttgtccaagcttccccctgccccctgaagactgtgcactgagctgggcgcagttctcgggaactgggagagagaaaagtttctcccagtcgcgacagctaaaaacgggtgtctcgcttgatccccgcggaccttctggcacctggttcactagcgcccgcgaactctgcctcgggagacttagagtaggtgggggctgctgcgcgcccttcaccctcagttcctctccgctcggccggtga

SEQ ID NO: 16833 - DNA, 455 bp, Homo sapiens
  source 1..455: mol_type = other DNA
aaaaggggagagggcagcgtcagaggaagagtacattttctttggctgctctaccctctgaagtagggcggccagctgaaggaggacacacttttgaggggcccagaggttgtccaagcttccccctgccccctgaagactgtgcactgagctgggcgcagttctcgggaactgggagagagaaaagtttctcccagtcgcgacagctaaaaacgggtgtctcgcttgatccccgcggaccttctggcacctggttcactagcgcccgcgaactctgcctcgggagacttagagtaggtgggggctgctgcgcgcccttcaccctcagttcctctccgctcggccggtgagaggcggccgccggcgccccagcagcagctagatgtcaggcgaagcccgggcggggagcgcgcgcgggctcggccagtgcggggtggtgggcgggctgagcccgg

SEQ ID NO: 16834 - DNA, 361 bp, Homo sapiens
  source 1..361: mol_type = other DNA
agccacacatgaggtgtcagtcatttgccaggtcactggtgggacactggcttttgagatctaaaaaggagaatttcaccctcccatcttgtagtgagtgaggccgaactctgatgtgtatcttccagaaactctggttctggatcagctttttgttttgttgacaaaggagaaatcctctctgggagggcagccagtgtgctgttctccgtctgataagaggtactaaataaaactgtacaccatggcctgttgtaattatgtaagcaggcgtgcagatctcatcagaacattcaagatgtttattttaaaatctcaaggaattttgaaaaaatctcccttcttattattagcatggggg

SEQ ID NO: 16835 - DNA, 392 bp, Homo sapiens
  source 1..392: mol_type = other DNA
cctgccccctgaagactgtgcactgagctgggcgcagttctcgggaactgggagagagaaaagtttctcccagtcgcgacagctaaaaacgggtgtctcgcttgatccccgcggaccttctggcacctggttcactagcgcccgcgaactctgcctcgggagacttagagtaggtgggggctgctgcgcgcccttcaccctcagttcctctccgctcggccggtgagaggcggccgccggcgccccagcagcagctagatgtcaggcgaagcccgggcggggagcgcgcgcgggctcggccagtgcggggtggtgggcgggctgagcccggctgtgggcagggagccgggctcggccgccagcactaagccggggcgcggcggaggcgcagc

SEQ ID NO: 16836 - DNA, 301 bp, Homo sapiens
  source 1..301: mol_type = other DNA
tatcggggatgtggtgcttcagcacctctgcctgaggccgtctgattgtcgtgctgggtcactccggtagggtaaacccacggggagccaaacaaggcctggcctgccaggggtggcactgggagggttaagacccgggtctgtctgaccctggggttgcaccggacaatcttcccaggaggaggaacaggtgcagcctgggggcctccagcccctagaagctgggaaaccagtccttaaccaaccctcaggcctcagctttctcttgacagatgggagggcagtgagcactcttaaaaca

SEQ ID NO: 16837 - DNA, 326 bp, Homo sapiens
  source 1..326: mol_type = other DNA
ctctcagtgtatagaaattgacacaaggccaaaacaaaagagagagcgaattctctggcttgctgactccttggaaaaaaccggtagggatttttttattgcaggtcagcccagaatcaattattcagcccttcccaagcggggagtgagctgaagccaagccccatccctactctgtctcaaagtgagttcagaaaaggggatttaaagaattctttttttttttttttttttgctctgtcgcccaggctggagtgcagtggcgccatctccaagtagctgggactccttaaataattcttaaaggaagtaaagttaactttgaa

SEQ ID NO: 16838 - DNA, 167 bp, Homo sapiens
  source 1..167: mol_type = other DNA
ccaagtagctgggactccttaaataattcttaaaggaagtaaagttaactttgaattttacagaaagccttatccaggcttttaaaattaccatgtttaaatttaaattgggcaagcattgcccaaccatctgttctaaaagaagggctgaacgcctgagactcagg

SEQ ID NO: 16839 - DNA, 282 bp, Homo sapiens
  source 1..282: mol_type = other DNA
gtaaaattcatacagtgtttgttagttgaatgaacaaaattaaatagtaaaattacaaatataaagtaaaaatttggaacctttgccaaagaaaggaataataaattgatttaataatttgaaagaactgtaagtaataaaaaggagcacttctttttcgccaacaattcatataactccacgtattaaatgaaaataaggattttaaaaaggcctgttcacctgagctgcgataacacctctgttgcaggcggctccggccccggccatctggttcccttg

SEQ ID NO: 16840 - DNA, 393 bp, Homo sapiens
  source 1..393: mol_type = other DNA
attcatataactccacgtattaaatgaaaataaggattttaaaaaggcctgttcacctgagctgcgataacacctctgttgcaggcggctccggccccggccatctggttcccttgggctccggccgccggctctcggcccgaacgcgccgccgaggtcctagatgaatcgcttcaggcctggaaacgaggaagccgtctccggagaccatcgccaacgctgacgcccgcggtctgaggtcgccatgggaagagcggtaggccaccctgctcctctgatcaccggaggacagggacacattgttcagggcaaacactgcccgcagtactggcgagcatgcgcagaccgtccgcgcacgtcgtcgcccgctgagagcaagcgcaacgggcgttt

SEQ ID NO: 16841 - DNA, 352 bp, Homo sapiens
  source 1..352: mol_type = other DNA
aatcgccattattttgccactccatgaaaatgaacatttatcaagaacaagagaatgattttctttaactaaaaacggacttttgtattgattaatcaaacaataccagttactttttaatacagcaacactaaaatgctgtttttctacggagtacttaaccattttattttacatattttaataatgctgcaatttgataagcaaactgtgtcgagggtggccgctggccaggccctaggcgagaaaagctcgaaaaggagctcctcggtcactttcgtttcaaaaacgcccgttgcgcttgctctcagcgggcgacgacgtgcgcggacggtctgcgcatgctcgccag

SEQ ID NO: 16842 - DNA, 289 bp, Homo sapiens
  source 1..289: mol_type = other DNA
tgacaaagtgacctctagtcattttcactactcattatacagtaattacaatacattagcatgcgccatggcaaccttaggggtccaagaacccactcctgatacgtgctaaatgatttctcagacaagatcttatttaaatatttctaaatgatttgatgataatgttaattctggcccccaaaagcacacttaagagttcttttttaactgcgcggttacagcaaccgcaggtgagactctaaccaggctgttgagggcgagccggcgcaccgtacgctgggacgtg

SEQ ID NO: 16843 - DNA, 288 bp, Homo sapiens
  source 1..288: mol_type = other DNA
gacatgaaagaaggattaataggcctaattattcatatacacccatataagcagaagttacagcaacatttactgtattggtgaattaaataatgtttatgataatgacgagttaatgaacctgtagcccctaggcccaaggcagaaggatggcttgggcccaggtgatcacgccactgcactccagcctgcagattttctgaggaaagcctatccatagagtcacttggggtatttttacactatggctgtggaattatctaattgtcagttaattgtactactgtg

SEQ ID NO: 16844 - DNA, 328 bp, Homo sapiens
  source 1..328: mol_type = other DNA
gtacttagcacagtactaataatacttgtgatcttcaaaattagatttatgttacagagctgaagtaacagtcacatgacgtagtcagtaaaatattattcagcacctacacactgtatgattgcagctatgtgacattctggaaagaaggattaataggcctaattattcatatacacccatataagcagaagttacagcaacatttactgtattggtgaattaaataatgtttatgataatgacgagttaatgaacctgtagcccctaggcccaaggcagaaggatggcttgggcccaggtgatcacgccactgcactccagcctg

SEQ ID NO: 16845 - DNA, 601 bp, Homo sapiens
  source 1..601: mol_type = other DNA
tttcttattataggctcctcagtgaaaaatttaacaatcctacacccagttttataatgttaaaacagcttttccaaaggtcatcaagtaaagacataaaggatgttggaagaatttcaagatctgaaacaagtagaccagttgtgaaactggtcttgattccatctttttaaaaacataagactggggcatgccctcccacagggccagcagctactgcttcctgtgggcactggtgcagctgtccagcactgttttcatcagatcaagaatacaaatcccagatggattttagtctcagatgcaattaatattatttgaagttcttttagttcaattcagcaaattgtattgaaacctactatgtatgagataatacatggaaactagaaagtttgactttctgttgatgattactcaatcaatcagttatttattgtaactataatatttatcaaattgtattaactaaatacaattatttatcaaacactctttttctcatcagttatttattgtaactagaattagacttataaaacttcaggaatttgaaatcatataacctactatgcagagcacttcaaaggtggagctgacg

SEQ ID NO: 16846 - DNA, 372 bp, Homo sapiens
  source 1..372: mol_type = other DNA
ttccatcataatcctcattatatagtagagaattgtgtgctgaaagtgttggaatctcactctggacactgaatttttgactgtacaaatcaaggaacaggatgccttaagggcatcatttccaggtctcagagcattggccagtgtgtgaaacactctagattaaaaaaaaatttaagtattggtgtaggttttagaaaaagtaaatagctttatcattaacaaatgctttggagttccaattgagtttcaagttccacttcaacctgggatgcagcataacagcaccctaataatttgaggtttgtaaacacaccagtaaaaacacaccaatcagcgctctgtgtgtaactaaaggtttgcaaacacacc

SEQ ID NO: 16847 - DNA, 436 bp, Homo sapiens
  source 1..436: mol_type = other DNA
atgtgaagttgagcaacttccttaatcttgccacgcttcagttcttatctgtaaaatatgataatgaaacgatttgagaattgtgagggttaaatgagataattcaggtaaagcagaataaagtcttttctttccccccaaaacttgagtgttagaattcattttactatgctaaaaaatgacttgtaatagaacaaagagttacacaggtcttagaaactacgtttttcatagtaattacctttcttggacggtaggtacctggaagcctagtgcgcacttacagctagccagctatgcgtcgtcccagggctgtggagcgccccgaaggtgcgcacgtccctggctagcctgcgagcgcgtcccggtggccgcacctgccagccgcgccgccacttccggccgtggccccgccctgtcgggtggctggcgtccg

SEQ ID NO: 16848 - DNA, 381 bp, Homo sapiens
  source 1..381: mol_type = other DNA
tccttaggaagttgttgtgtaatcttaaatatctaatattacaaatatttcacacatatattcaaaagcggaggagcctgagcataccctcctgctaggctgttgagcgggctctcccgctccgccggacgtgcaaagcacgcatgccctggagcccgagtccttgcacgccaggcgcccgggagaacactttttccttgatccggggaaagcaaaaccctccccttggccccgcccctaggtggcgcgggcgcgccgccgaacgccagcgccagggggcggggtgggggagggagcgaggccctccgagagccgggttgggctcgcggcgctgtgattggggactccgcctccagcgcaattagctgtccgctcgggctc

SEQ ID NO: 16849 - DNA, 225 bp, Homo sapiens
  source 1..225: mol_type = other DNA
ggggcaccaatgctccctatagatcccctgggaacatatgtaggctcatcatgcctgcaggctggtcaatgttggcaacagaactgggttgtaaaaggtgtttttgttgtaacactggaaccaagcagcccggctccgggcgcaccttctcgcagccccttgtcgtcaaggctctcgagccatataaacccgggaaccgggagcccttgacgacattgttccccg

SEQ ID NO: 16850 - DNA, 532 bp, Homo sapiens
  source 1..532: mol_type = other DNA
tgcggaacctgtagtgaaacactgtccatcttgccggctgggacacagtgactctgtgtaagagaggggcccttggcagacaaacaggttcttctctgttggtgggccaaactgggtgaggagttcagccccatcccccgcacttctctactggggcagcccctgataccagggcactcattaaccctctgggtgccagctgaggtcaacttcttttgaacttccacgtggtatttactcagagcaattggtgccagaggctcagggccctggaagcagaatgtctgctctctgtgcccagacgtgagcaggtagcgcctcaggggagagcctggggtggcccctaagacgtcctcttggcattataccatgaactgttcctggggtctgggacctttgcgaaggagcacgccctcttcccatgtctgaggaagacctcacctaggtcagtcctcttgagccccaacagctctgtgctccccagcgggcagttgcccctgcagaggccccctgggcaagtcccctgcgccat

SEQ ID NO: 16851 - DNA, 312 bp, Homo sapiens
  source 1..312: mol_type = other DNA
atatatttcaaggcctcatccagttcctggggctcagagtccctggcccagatgtgcggaacctgtagtgaaacactgtccatcttgccggctgggacacagtgactctgtgtaagagaggggcccttggcagacaaacaggttcttctctgttggtgggccaaactgggtgaggagttcagccccatcccccgcacttctctactggggcagcccctgataccagggcactcattaaccctctgggtgccagctgaggtcaacttcttttgaacttccacgtggtatttactcagagcaattggtgccaga

SEQ ID NO: 16852 - DNA, 554 bp, Homo sapiens
  source 1..554: mol_type = other DNA
atcctcagaaaattgaggctctgagacaaaggcatcatttaagcctaagatgtcctggctccaaggtgtcagcatctggaagacaggcgccctcactgcggcttcactgtgggcccaggggacatctcagccccgagaagggtcagcggcccctcctggaccttgctcccacagccagggggcagtgagggctgctcttcccccagccccactggggggctggggagggccccagacatgagaccagctcctcccccaggggagaggggcaaaggcctcgggctctgagcggccttggcccttctccaccaacccctgccctacactaagggggaggcagcggggggggctgctgggtgagcagcactcgcctgcctggggaggggctgtgagagctcagccctgtaaccaggccttgccgactgatgcctggtcttcccctctactccaggctgtgttcagggcttgagatgggcccgaggcccctggcctatgtccaccagcctctccctggggagccagtcagctaggaaggaatgagggctccccaggcc

SEQ ID NO: 16853 - DNA, 300 bp, Homo sapiens
  source 1..300: mol_type = other DNA
agacttttttggtgattacctcctaaacaatacagtatatatgcaaatactatgccattttatatcaaggacttgaacatccatggattttgatcagaaccatcccattgttgacaagagacctccactggggtagagccagcagggcctcgaggcatcagtcccgggctcatcccctcctcccttccatgctgaggttggtggggtgggggtgggggtgcccacgcacggaacagccaccactcacaaaagtccaagaggcctcttgggaatgtgtcaccttccagcgtggagtcacac

SEQ ID NO: 16854 - DNA, 537 bp, Homo sapiens
  source 1..537: mol_type = other DNA
tcagccccgagaagggtcagcggcccctcctggaccttgctcccacagccagggggcagtgagggctgctcttcccccagccccactggggggctggggagggccccagacatgagaccagctcctcccccaggggagaggggcaaaggcctcgggctctgagcggccttggcccttctccaccaacccctgccctacactaagggggaggcagcggggggggctgctgggtgagcagcactcgcctgcctggggaggggctgtgagagctcagccctgtaaccaggccttgccgactgatgcctggtcttcccctctactccaggctgtgttcagggcttgagatgggcccgaggcccctggcctatgtccaccagcctctccctggggagccagtcagctaggaaggaatgagggctccccaggcccacccccagttcctgagctcatctgggctgcagggctggcgggacagcaccactggtcagcaggtgacctttgcccagcgccctgggtcctcagtgcctgctgccctgg

SEQ ID NO: 16855 - DNA, 385 bp, Homo sapiens
  source 1..385: mol_type = other DNA
cttgcccacgatcttcctccagcaagatggaggccaagtgaaatgagaaagcaggtctcctgccacttcctttgcccagaggtcacacctgtgcgtgatcaaatataagtgtgaacagacaaaattaaaagttggcagctccgaaaagaggtctccgaaacctcagtctgggagccacggagggctctcccctctccccaggtttaccagtggaggagtcccagcgtcccctgcccacacactcccatggaggggaaggggatgagtgcagggaaccccgaccccacccgggagacctgcaagccccccagggacagagctgatccttgaactcttaagggccggggctgggcttatcagcctcccagcccagaccctggctgca

SEQ ID NO: 16856 - DNA, 549 bp, Homo sapiens
  source 1..549: mol_type = other DNA
gctggagttattaacttgatgaccctcaagaaggatggaatttttattatttacttatgactgttgtttaaacacgacgtggttcaacagacatccctgtaggaaggaaaatgacgtaccttctttggctgtcacccacccaatgactgggactggcttgtccaattgttgttaccaacttggttacagttgcttcaagagtgtagctattcctgcatttgtggcctcaagggctaaagggtcacagcaggtggggggttggctttgggtcgggcatcctgcgccccccactcgggaaaggtggcggagacttcgaggttgggggcccatcgaaggttcccaccgccagctcccggaggggggcacccgggagccagcgcctcaggaaccggggcccacgcgggaaggtcgagcccgccggtgaggtcacggttgccatggctccgggcagtgacgcgcgtcggcacgtgacccgcggttgccatggagccgggcgccggtcggcgaaagcgccccgcctccccgagttcccccgagccggctccccgc

SEQ ID NO: 16857 - DNA, 272 bp, Homo sapiens
  source 1..272: mol_type = other DNA
acctatgtaacaaacctgcacgttgtgcacaaaaaaaaaagaaaaattacttgacatatcttgacattttaggctcccaggattttagatccttaaagggccagttcagggcactgctccagcaaccgttgcgcatttatttagcatataatcttttcaatattgaccttttaaggaaaagatggcgtcagtgtgacttcacgccacagccaacggggtgtggcgggacacctgggcgcacgccgccagcgcccgggagagcgcggaagcca

SEQ ID NO: 16858 - DNA, 445 bp, Homo sapiens
  source 1..445: mol_type = other DNA
tcccaaatgttgggattacacgtgctctatatactgtttatttagaagtcttaagcatcatttttgatgccttcatgatagtgcatttatcattatgtcctttttgctttatattataaatatcacagtgataagcgtagctgaagtttcttgaaacagtgccaaaatattttgtagaaaagttttcaccaatttacactgaaggtcagtatctttcaatgagtttttggaaagctcggaaggccgtccctgcagttgtgtggcccctctagagggaggtgggaaaggcatggggattcctcctgcagtgctgggagcaaatgtaagagttgttcagcaaagctttccccttcagctagacagctgcagcccctttaagggcaaatgcgggacctggtccttctgacgtcagcgggcgggccagcagccctgctgtttatcgccc

SEQ ID NO: 16859 - DNA, 409 bp, Homo sapiens
  source 1..409: mol_type = other DNA
cattatgtcctttttgctttatattataaatatcacagtgataagcgtagctgaagtttcttgaaacagtgccaaaatattttgtagaaaagttttcaccaatttacactgaaggtcagtatctttcaatgagtttttggaaagctcggaaggccgtccctgcagttgtgtggcccctctagagggaggtgggaaaggcatggggattcctcctgcagtgctgggagcaaatgtaagagttgttcagcaaagctttccccttcagctagacagctgcagcccctttaagggcaaatgcgggacctggtccttctgacgtcagcgggcgggccagcagccctgctgtttatcgcccagcggcgcgtcgggacggcgcgtccgcccgcccttaaagggcggccagcccccg

SEQ ID NO: 16860 - DNA, 445 bp, Homo sapiens
  source 1..445: mol_type = other DNA
cctgtgtggcccctctagagggaggtgggaaaggcatggggattcctcctgcagtgctgggagcaaatgtaagagttgttcagcaaagctttccccttcagctagacagctgcagcccctttaagggcaaatgcgggacctggtccttctgacgtcagcgggcgggccagcagccctgctgtttatcgcccagcggcgcgtcgggacggcgcgtccgcccgcccttaaagggcggccagcccccgccgccggccgtctccaggctcccggcaaccagccgccctccttctcacggccctggcccggggctccagggtctcaggtcgtactcagcccctcgcgagctgtcccggccgccccctcccctgcggggaccctgggagcctcttcggggctcttggatgctggaagctgcggccgcagccgcaacccgtcccggaggtgt

SEQ ID NO: 16861 - DNA, 386 bp, Homo sapiens
  source 1..386: mol_type = other DNA
gggaggaagggatgataccagcgtgtctcaggccctgccaggcctagctcttctcaacctgagcagggtggtccaattgaaagggtgggtctgaccacctctcctgcacccatgcgggttggcagaggtgtgcaggaaagacgcactcggggcctcagtttcctcatctataaaatggggatgtaattacaccctcacactgtagctgtgagtacctcaggaaaggttggatcccatgtcccatttgtccccacaaacccctgggattcccggcgggcagggtcctgtccataaaaggcttttcccgggccggctccccgccggcagcgtgccccgccccggcccgctcgcagagaatgtctcggcagcggagccggcttcctcta

SEQ ID NO: 16862 - DNA, 378 bp, Homo sapiens
  source 1..378: mol_type = other DNA
cttgtagccaggccactctgtccgtggagtggagaggagccaccctcctgccctctcagaggtccaggtgtgctcactcgagaaggggcacagcagccctgcaggggcccctggctctgctccacccactgggcagctcaggggaggggtcctggcaggagccacagggcaggagggtccatgcctgtccatgctgtcctgggagtgtcttgagatgcccctgggggggccgcccaggactcgggaggcttcatcagaggactctaaaggattccggaagctgggggtaggggacacactctccttccatcctgttcctcaggagcccagcaggggtgcagaaggccaaaatcacctggtcccagctgacttgggggt

SEQ ID NO: 16863 - DNA, 603 bp, Homo sapiens
  source 1..603: mol_type = other DNA
gggggaagcggcgctgggtggccttggccaccccccacaggggactgctaggctggccgctggctcggaccagacccccctccgcacacacctcccgcgccgcgcccccgggaggaaagtgggggagggacgggcggccgagccacggggggaggggtcgagcgccggcccgcgcgcggcacctcccacttccggcggcacgagcggagggggcgaggctccggccgcgagaggagaggccgcggtggcgccgcgccgcccccgacggcgccctctggcggcgacagctggcgccgccggggcacggggatgctgcgggagacccctgagatacaagtggactctcccggggcgcgtttaaaccctttacagaggacgccatgaaggagagccttctgaagagggaccatgtggaagatgccccgaggactcggggaggcggagcccgcgggttcagcccccagcgcccgcacggcccctgcctgcgtaggccgcccgcgggagccggaccccgggcgccggttgctgtggcccgcgggggtcgccgggccgcaggcgccgcgctgattggctgcgccgcgggcggaagtgatgctgctgtca

SEQ ID NO: 16864 - DNA, 421 bp, Homo sapiens
  source 1..421: mol_type = other DNA
gctgtgtcaacacctcagtcacagcccagcccagggctggggggtcctctgcgcccggtgaacgaaaccccaggacaagggccatgcatgcaactccgtggcaccagcgaagcaggggcgccggagccacgggtcctcgggcggggggaagcggcgctgggtggccttggccaccccccacaggggactgctaggctggccgctggctcggaccagacccccctccgcacacacctcccgcgccgcgcccccgggaggaaagtgggggagggacgggcggccgagccacggggggaggggtcgagcgccggcccgcgcgcggcacctcccacttccggcggcacgagcggagggggcgaggctccggccgcgagaggagaggccgcggtggcgccgcgccgcccccgacggcgccctctgg

SEQ ID NO: 16865 - DNA, 272 bp, Homo sapiens
  source 1..272: mol_type = other DNA
tgaacaggcctcagtgacggctccccttgcgtccaaggacatgaaggaaagggtctttcataaacccctctcagggtgccaccagttggattcagcttgagacatcaggtgtaccacacacagaagccctggttagtggtgtgatttcacagaagtggtgtgtaataccaacctgcttttcggatggtaccactaggcccactagctgtccctgcagcagcagcagcagcaggcacaatgagcccaggcttgttcttcacagggcctgagct

SEQ ID NO: 16866 - DNA, 246 bp, Homo sapiens
  source 1..246: mol_type = other DNA
tctttctcaattacttaaaagatactggagttaaagtgaggcaaaggaattcgaatcttgtactattttgcttttgctatctcagagaattaggaatagggctggctggtctagaactcctgagctcaagtgatcttaacacttccagcaattgtctttctagagagcctgagtcagttcagcagtaaaaataatcctttttttttttaggaccaatttaaacggagccaagctgagcagccttcc

SEQ ID NO: 16867 - DNA, 635 bp, Homo sapiens
  source 1..635: mol_type = other DNA
ctggagtccaagatcctgctcccggctcctagaagccagcttgggtaccgggtcagtttcccatccaggaattctgggccctggggccccatctccttggtcccccacgccagcgccgctggggcggccccgccgcagctgccgccgcctccctgcggaaactcgcggcttcccgggagccggaggagcagtgacagcagcatcacttccgcccgcggcgcagccaatcagcgcggcgcctgcggcccggcgacccccgcgggccacagcaaccggcgcccggggtccggctcccgcgggcggcctacgcaggcaggggccgtgcgggcgctgggggctgaacccgcgggctccgcctccccgagtcctcggggcatcttccacatggtccctcttcagaaggctctccttcatggcgtcctctgtaaagggtttaaacgcgccccgggagagtccacttgtatctcaggggtctcccgcagcatccccgtgccccggcggcgccagctgtcgccgccagagggcgccgtcgggggcggcgcggcgccaccgcggcctctcctctcgcggccggagcctcgccccctccgctcgtgccgccggaagtgggaggtgccgcgcgcgggccggcgctc

SEQ ID NO: 16868 - DNA, 533 bp, Homo sapiens
  source 1..533: mol_type = other DNA
actgcactccagcctgggtgacagagcaagtctccttttcaaaagaaaaatgaagattccctttcattttttaaaaaaattaaatcagagtaactgctgaattttatcaatggctttccacatttgataaacaatatattgttaaaaccataccggcttttttaagctattagaactctaacgcttttggttcaaggctttaagctcttaccagttaatatagagatacttttcggagtgttaacactttaaagctatcaacagccattctcctcagtgctgattcttacctgcccacctggcagtgtgcctggcatacagtgggtgctccttccatgctgaaagaaagactgacagacgggaggtgtgcccctctccatccgtctggcccttcccgccagggccttgcagggcggactccacctcggcagagggcatcccagacccctctccagccccggaagccggattgcctgccatgggaagactacacttcccagcgatcccagggaaaagcgaaaaccttttggctt

SEQ ID NO: 16869 - DNA, 338 bp, Homo sapiens
  source 1..338: mol_type = other DNA
tttgccctcaaaactaaaactcctgcccgacagggtgtgtggaggagctacacattgtgtcactttttttcttcttcaatagactctttgaaatagttatgacagacattactcctggtcaggtgctggacgcgtctcctcacatttgttttgttgattaaagtaacaatgggttgattattgatgaccactgtattattcacctgatgttaatcatactcctaacaaatgatcaattagataattagataattcacattagtataaatactctaaatagtgacctcaggtgacccacccgggggagagccattggctcctgctggaggcgggactcc

SEQ ID NO: 16870 - DNA, 390 bp, Homo sapiens
  source 1..390: mol_type = other DNA
tcatggacgcgtctcctcacatttgttttgttgattaaagtaacaatgggttgattattgatgaccactgtattattcacctgatgttaatcatactcctaacaaatgatcaattagataattagataattcacattagtataaatactctaaatagtgacctcaggtgacccacccgggggagagccattggctcctgctggaggcgggactcccgcgctgcagggcaacaccccggcgtccctggaagctgggggagcgggtggcgttgggggagctgcgcctcgcccagagcctcgcccggagcctcgcccggagccttccggggtggggggcgtggcgggggacccgaggcacgctctcgagccaacgagcgtgatgcgctcgagt

SEQ ID NO: 16871 - DNA, 316 bp, Homo sapiens
  source 1..316: mol_type = other DNA
aagaatcacgtttctagaatgttctagaatgttccggcaggtctgaacctgaggggcaacgagccccatggccccaggtggtgttcagaggcctgggacctgcttcctaaccaggcacttcactttgggattttccacaattcagaccaagaggaaattattgggtgaattactcttaatcagacaactccgaccatgacagtcttcgtctgaggagcacgtggcttgcgccgaatcccctccagaagggcctttgccgggaggaggggctcctggctcctgaatggtccgcccggtgccgtgaccccactctggg

SEQ ID NO: 16872 - DNA, 534 bp, Homo sapiens
  source 1..534: mol_type = other DNA
gatacctggatcatcctcttattttggaattaagacgaaaggagggcttcagacctggctcagccatgcctgagtccccagtgcctgagccagtgcctgacacagcagtcataaagatgagggaataagccaatttctgtaactgctcattgtgaataaccgtttaaatagtcacaatgtgccaagcccagagcgtccatgctcctcctggggagggtgtcccaggtgacttaggccagtagaaaccgggcgtccttggctgaagcatggcaggctgttgcacatgcctgtctgcgaccacaggctccaagccggtgggtgacagggacccctcgcctctcagacagcggagccgggtcggggcggtctggcccgggccgccgctcctgttccgctggggtccgtctgggctccgggctcgcgcggcgctcaccacccggggtgccgcgggggggcggggagagcggccgcctagcccagccccgcggatgacaggagccggggagccgaggagggaggagccgccgccgcagc

SEQ ID NO: 16873 - DNA, 341 bp, Homo sapiens
  source 1..341: mol_type = other DNA
aacctgcagggtgcacgttgagctcctagggaccactgcaggaaagcctccagtaccacataaggaacaccagctgcagcggcggcatccatggtggctggtgcggtgggccctgcctgggctgggggccactgtgggccactgcccccagaaactcccaagtacagtgtacactgaagagattgtgcaacttcccagctgtagcttccccagctggcagtctttggaaatttcctttgggaaggtttgggcagaaggagcccgtaaatattacctggcactccccggccaccccgtggaggcagcgcccattcacctggggaattgcaacttaaaggagg

SEQ ID NO: 16874 - DNA, 410 bp, Homo sapiens
  source 1..410: mol_type = other DNA
ctgcctgcgaggtgtggaaagcatctgcctcctgcagcaggaggcctgatctgtgtgaccctgggcaaggcccctacctctctgtgccttagacatccttaaggatcctgcatgctccatggtaacctgcagggtgcacgttgagctcctagggaccactgcaggaaagcctccagtaccacataaggaacaccagctgcagcggcggcatccatggtggctggtgcggtgggccctgcctgggctgggggccactgtgggccactgcccccagaaactcccaagtacagtgtacactgaagagattgtgcaacttcccagctgtagcttccccagctggcagtctttggaaatttcctttgggaaggtttgggcagaaggagcccgtaaatattacctggcactccccg

SEQ ID NO: 16875 - DNA, 648 bp, Homo sapiens
  source 1..648: mol_type = other DNA
actgcctgggcagtgtagtgggctgccctgcatggtaggacaccctgcctagtggcctgccccgcctggtggggctcatgccctgggcccagcagcccccagaggactcattaggctgctggtgtctccagctgagccctctgaggtgtggcaggcaggcctgacatcacagcctgggtgagtcactgtgggctgggtgagtcactgccacaggagcggcccccatcacagctccggctcccagccccgcagctgtgccaactgccagaacgacacaggaagctggggccggtgcctcaggtgccacgacagggtcctggaaaccattcccacccctctgagaggctgcagctgtgcctcccagtctcaggggatgcctagctacagaccggggtcttgggcaggatacctccggccaacggcccagctggactggagggcagaggtgcagccctcacatgccaccagcccaggggcctggggaagagtgggctccttgattcctcccggctccgcaccctgggctggctgcagtgtggagcccctcgaggctgcatctgacagcttgcccatcctcaagtgccaggtggaggtcagaaaatgcaagtgggcacgaggtaagggctcctttgccagcccctccctgaa

SEQ ID NO: 16876 - DNA, 624 bp, Homo sapiens
  source 1..624: mol_type = other DNA
accagggtttgtaaacttctctaaccccagcttggggaatttccactcagccgctctgggctgagtgggcagggacaggcccgcctgccagccgagctgttatccaccccaggacaggtctggccctgcctccagggtggtctggagcctggagtcagggctgtgctcaggggccccagcgccgatctcagctcctggtctctatttcagccctgagagggctccctgggacgtcatgagtcctcccctcaggaccagagcccgggtcagaggctggggccagagccagcccctcctaactccgttggggtggccgtgccagggcggctacaggaacctgacggagaccctgtggtcccaagtcagccacacagagactgctcactgtggctttgctgtgggcaaggccttggtggcgactgcctgggcagtgtagtgggctgccctgcatggtaggacaccctgcctagtggcctgccccgcctggtggggctcatgccctgggcccagcagcccccagaggactcattaggctgctggtgtctccagctgagccctctgaggtgtggcaggcaggcctgacatcacagcctgggtgagtcactgtgggctgggtgagtcact

SEQ ID NO: 16877 - DNA, 392 bp, Homo sapiens
  source 1..392: mol_type = other DNA
ggtcaagagaccagcctacgcctctaatgccagctactcaggaggctgaggcagaagactacgctctagcctgggcaagatagcgaaaaaaaaaaagtcaactgcttgtgcttaggttgtagtgcagagcaaagctggggatttggcttggcccctggtcaggctgatgctggcccccatggtcctggccagtggtaagtacccctctgggacctggctgtgacaagatgacaaccctgtccagccctctctgctggaaggtcccagcctgccccctcgccccctaagggtccggcagggagtagagccccgcaagctcactgcgcctctgtggatttgtggcctgaaccctgggattcagacctgcacatcagtctcgtgtcacaagaggt

SEQ ID NO: 16878 - DNA, 348 bp, Homo sapiens
  source 1..348: mol_type = other DNA
ctctgcccctaatagtaagagccaattttcccacgtgaggaaatagactattcaaagttcgtcatcatgaattttgtctagctgaaaatgacaactacaactggagctggctcctgcgcccacgcagagagacaccaggtctgtcattgtgcctgtctttctctccgcccctcgagaggagagaggagcagaggggtctgcgcgcggccgctacccagaagccagcggacggcagcacggagtgggctgtccccgagcccagccccgagcgagccccccccccgcctcccagccagcccgactcctaggaggaggggaggcgggaaagcagctcaagcctcacccacc

SEQ ID NO: 16879 - DNA, 227 bp, Homo sapiens
  source 1..227: mol_type = other DNA
cctaggcttgactgaggctggacagcctctctgcccctaatagtaagagccaattttcccacgtgaggaaatagactattcaaagttcgtcatcatgaattttgtctagctgaaaatgacaactacaactggagctggctcctgcgcccacgcagagagacaccaggtctgtcattgtgcctgtctttctctccgcccctcgagaggagagaggagcagaggggtct

SEQ ID NO: 16880 - DNA, 415 bp, Homo sapiens
  source 1..415: mol_type = other DNA
tttaaaatctaacctcaacaggaactcctttcagcagcagctcagctggaacttagccggaggtgctaaggactactctgaggatcagaattattgttttcaatagagggcaattcatgatgtgcataattaaaggtcatttgattttcatttctttgttaagagtttcataaaaacaaacagaatgcgcccagagaccatgtgccctgatttgggatttggacacctggtcgccataggtggggctctgcccctggcctggaacgtcccctgtggggatagggcatccctcagaaggctctggagcatctgtttcagcagggcccctctgaagaagtagctcagaacactcctctgcttctaaggcagcttcaggttcccggtatttggttccccgccccatttggtgggggct

SEQ ID NO: 16881 - DNA, 300 bp, Homo sapiens
  source 1..300: mol_type = other DNA
agcctgaacgccagcacccgggcaccgctctgccagagggccagccagccagggctctccactggatggagacagggaagggccgcgtcccggagccttaccatgagcgtcaggagcgccgccagcagcactacgaggcacggcagcatcctgggcgcgccgcatcgtccggggccggagcggagccggcctgcgcgcctccagctcccttgggctgggactgacagctccgccgcccgctccgccagcgccccgcagggctgacgtcagcggggcgaggcctacagacgccccgccccc

SEQ ID NO: 16882 - DNA, 493 bp, Homo sapiens
  source 1..493: mol_type = other DNA
ggtttaaggctgtcacccctgtaaatcacctgaggagaccagccgcttgttgcagtgatccgagattaaaaaaattttaaaaatcgcggtttgaggctcagctgctgagctgctggttaaactgcttagttgtggacccccctccaacaattaggtaggggactactcagtgtccacggggaggccctggggcaacgccaagactcacaccggcgtcctggcgcccctcaccccaccttccgcactcagggccgaggctgtgcctggccacctgcttcccagcacatgcacacacgcgcgcgcgcaccacggccggccgggctacccggaccactttgatccgaggggtggccggagcccgctagcgccccaggacagcctcgggttgccccaggcggtagccctgtgggacagtggttccccgtccgcggcctcgggggcggggcgtctgtaggcctcgccccgctgacgtcagccctgcggggcgctggcg

SEQ ID NO: 16883 - DNA, 281 bp, Homo sapiens
  source 1..281: mol_type = other DNA
agagactcctgggtgtgtagtcccagctactcgagaggctggagcacgagaatagagcaccaatgatttacattggctctgtgcaggacagctggtatcttacctccctaagagaagaaactccctcctgggagggggggcggaaacttctggcatcaccctcagccaacacccacgccttaggtgtgtcacctgttctgaggccgaaggcccatgaatgacttcaggtcacataatcattccagtttggcaacttcacttgtagggctgttttaatcaag

SEQ ID NO: 16884 - DNA, 667 bp, Homo sapiens
  source 1..667: mol_type = other DNA
ggtgaggcaggcatccacttcccaccctccccgcccccgcctccaccgaccttgaggcgagtgggggggcggggtggcggggaaccaggcccccttacaaggactccggagcgggagccgcaggctgcagggctcaggaggggaccgcgggtccagcgccctccccgtcccgcccccgcgcgcgtgcactcgggctggcccggaatccctccccagggccctggctgcgcccgcgcgcccccgcggctgccaagctccaagccccgcgtcggtccccacccccgccgtgccgtcttcctgcggttcccagggtcccgtttggcggccagagggcgtcggactcggctggcccagcgaggtccagcccgaacgtgtccttctgcctctctgcccctggggaccagggaggagcctccagggcggtactggacggcggcccgggactgcggcggccgcgttcccgcccgtcagtcctgaaaacctggcgagagggtgtcctaggggaattcccctgcaaacagaagggagcccgccctgcgcgtcctggagtgggtgcggcaggagcgcttccaggcactgcgtccccaggtgaggggcggagccggggcgcggttcgcggcagtggccaggggtgacccctggtggtcatccagagcgcaacaagggc

SEQ ID NO: 16885 - DNA, 503 bp, Homo sapiens
  source 1..503: mol_type = other DNA
gaccaacctgctcccttggcgggagcgggtcccgaggctgcacgcgcgccatgtcgcacgccaccgaggaggcgcaagctgcagtgggcaagcccgcacacgcccacccgttgcggcagcgtccgctgcggactttaaagcggtcccttggcggtcctgggagagggagccgctaacgctcctaattggcagctcagcgcatgggatgatgcgggtggctgcaggccggccctgcagtgccagccgcagcagcccagccccactggagagggagttgggggcacggcgtggtcccggggctccgggaccgcgaggcggggtgcggcaggcagggtgcgcagcgggcgggggctccccggcctacgcggcggccaccgcccctcctgcggctggagcgcttccagagcagaggcgcagcctcgctcgccgctgcgctcgcccgccgttgctccagcagccggctcccagcagcgggcgagcgcgcctccccctccgctccctct

SEQ ID NO: 16886 - DNA, 365 bp, Homo sapiens
  source 1..365: mol_type = other DNA
ccctgacctcaggtcacccatgtgtgtctttaacagatagagatgttaaaggaaaattaagaatgattcattaatacaatctactatgtagttcatatttaacttgtttgaatcaggtttatccaaaggcctgtgttacattcaattgtaatgttctgttttcagaggaaacgctagaatgaggaaagcattaccccttgaaatcaataacacaaaaacaagcatctcctttttttttttaggttttttggataaatgataaaaggtgtttccctttccagaatctttaaaataaatggattcctctaatagctttcttgttttagagggtaaaaatttctgggattttgttcttttcaaaatga

SEQ ID NO: 16887 - DNA, 371 bp, Homo sapiens
  source 1..371: mol_type = other DNA
aggagcctgacctggccatctcctcagaccagattaaggagaagaaattaatcaggtgctttgctctcatactttggacagtaatttaaatccagagtgtgtacaaacatgcacacaggcacgcacaggtgttcattagataatttttctcaaagaagatctcagaaggtatttagacattttcctagaggtctgtggagcagcctgcaggagaggttttcctttcttgcagaaaatctcatctcacacagtgttcttaatattaaattcaattcttccttacaggaaaattccaaatatttgttggagctaattttgatttctttcaaaataattccctctgaagggtttagagcctactgttggggcag

SEQ ID NO: 16888 - DNA, 331 bp, Homo sapiens
  source 1..331: mol_type = other DNA
atgtattcggcaaatattctaaaatctgaaaaaaatatgaaatctgaaacatttctggtcccaagcatattggataagagttgttaaactgttagcacatcacttctcggaccatgcagcgtagtgggtcaagccaatctcttgaagtgaagaaaccttgagttctaatctaggattgctgatatcacatggccagaggaaactttcatgtctacaataaaagaggttgctgtatctttaacacagaaggttttgtgttaatgaaattcagagggcttgtcataaatgagaaccttgatttagaggttcctgtttgcatctctgcaaccac

SEQ ID NO: 16889 - DNA, 583 bp, Homo sapiens
  source 1..583: mol_type = other DNA
tggtaaacagaagtatacggatttccacagaattttagtttgagggctctttcaaagaaaagtatcaaagattctatttagtactttgcattacacttttaatagggaaaactactggctttcaagtctagtaaaggtaaatggaaacttattaattcttccccagcgaaagcatacttttttcattgatggcaatttccagggaagaggcttactgattattaaagcagtgtacttagtgacgccatctcacttcaagtactgtgataacataactttcatacaggctgtaatgatttgatcatcattgccaccgccaaaagtaatttaataaacacccaattttggaggctgcaatacttaagcacctaatatatatttatctatactgtatgattctgaactctaaatttacagtagtgtattctgagaacctttgacatgcagtcagagcatcaaaattatttagttctgcagaattccataaaaacaaaattgtaattattccaatttcaagcaaaagagagcatttagctcccgcctgaaagttaattcaaagaagccaggttcctatggtaacttc

SEQ ID NO: 16890 - DNA, 411 bp, Homo sapiens
  source 1..411: mol_type = other DNA
attaatctgtaaagatgacccaccctctttccagacaaggaggcatcttttctcgtttagatagacttctcagtcatttagctattcaaaaaatgaaagttatcatgaaaaccttttccttaaagaacgctagatttttaagaaaagttctggttttgccacatggtagctgtgcaaccttgggcaaatttaaagtcttcaaaggtaaaggattgttaactgccaggtctcctggaaagctacaaactagaagaagtgcaggaatccttgtggtaactcccgttttgaaattgtatcgaatccagtcccaagtgcaggcaagcctaaagcctgttttaaaagggcgtgtgggggaacagtctgggacatttcagactggcaccattgggagctgaggccccacctttcatt

SEQ ID NO: 16891 - DNA, 422 bp, Homo sapiens
  source 1..422: mol_type = other DNA
gaaattatgagtgactgaataatccagggataaacgcaatattaatctgtaaagatgacccaccctctttccagacaaggaggcatcttttctcgtttagatagacttctcagtcatttagctattcaaaaaatgaaagttatcatgaaaaccttttccttaaagaacgctagatttttaagaaaagttctggttttgccacatggtagctgtgcaaccttgggcaaatttaaagtcttcaaaggtaaaggattgttaactgccaggtctcctggaaagctacaaactagaagaagtgcaggaatccttgtggtaactcccgttttgaaattgtatcgaatccagtcccaagtgcaggcaagcctaaagcctgttttaaaagggcgtgtgggggaacagtctgggacatttcagactggcac

SEQ ID NO: 16892 - DNA, 583 bp, Homo sapiens
  source 1..583: mol_type = other DNA
ggaatacaggtgtacaccatcatgcggatataactacagtacagtagacagaaaatatgtattaaataagtgaatttcatcaaaatgttttctagagtcccagctctgtaatctgcaacttagataacctgcctgagcctttggaaataaaaataaaaataatacttaccttagagggtcgttttgaggattaaataagatatatcagaaaagctcttagaacggtgcttggatatagtaagcatttgattaatgcatgcttaaacataaagaaaggttttgagtcttgtgtttttaaatatttttgtaaagaatataggtaaaaagtggcattttttctttggatttaattcttatggatttaagtcaacatgtattttcaagccaacaagttttgttaataagatggctggcatctccctcttcctgtcagagcatattgtattacaattacttttaatggcaaaaactgcagttacttttgttctggacagctaaatgtcatgtattttttctaggaaggctgtgggacccagctttcttcaaccagtccaggtggaggcctctgccttgggcccagagg

SEQ ID NO: 16893 - DNA, 357 bp, Homo sapiens
  source 1..357: mol_type = other DNA
ggggccagagcccggactgaatgtccaggatctcaggcccctatctcatgactctgtccgtgacagtctaacaggggaaaaaggtccatttgtctcaccgggaggctcaatattgcctgtcagtcaattatattattattaataactaccccttaatgagcacatatgatgcgtgaggcaccatgcaaatatcttgtttgaatcctaataatggtactaatggaataagactgaaaaattttatgacccaggattcaaatctctggctgtgagaagcagacatcttctacctcccccactctcctctttccggtacctgtgagtcagctaggggagggcagctctcacccaggctga

SEQ ID NO: 16894 - DNA, 254 bp, Homo sapiens
  source 1..254: mol_type = other DNA
ggacagagtcatgagataggggcctgagatcctggacattcagtccgggctctggccccgtgaagggccgggcttgctggcacgcacctgtaatctcagctactctggactgaggtggctttccatttggagcagggacatttatctccctcatgaagatctgcacctgcagccctgctgaggcccctgctgctcacacttgcagcagagggtggaggctctgggttcttgccttctctcaaaggccccagccc

SEQ ID NO: 16895 - DNA, 320 bp, Homo sapiens
  source 1..320: mol_type = other DNA
cttggattttggtacccaagggggtcctgaaacattctcttggaatgtatcttctttggagaaatgtctattccatattctagagatgaatcctttatcagatatatgagttgcaactattttctctctgtgaattttcacacaaccttgtaggatgtatactgtctccactttacagataagaaaacagcacaacaataacaaacttgtagttgttattgctgttagtgttatccctttgaataatagagagtaacagaagcagggatcacagagttttatcccccccggtgagcctgcacaccgtgcttccggcgcgg

SEQ ID NO: 16896 - DNA, 298 bp, Homo sapiens
  source 1..298: mol_type = other DNA
ctcaatggggacaatgccttacaggctttctttaaattccaaaatgcctggcaccaggcgcggtgattcacgcctgtaatcccagcaccaaggcgggtggatcatcccatctactagggcacaacaatcgctggaacccgggggacagaggttgcagtgagccgaagtcgtgccactgcactacaacgatcgtgttggactagaagaatctcagcgaatccttctgggcgcatgctttctcttccatgttgaaaaattaaattgacaggctggattctgcaaagatctttggacatta

SEQ ID NO: 16897 - DNA, 328 bp, Homo sapiens
  source 1..328: mol_type = other DNA
tgtatatatcctcaagcatttattctttgtgttacaaacaaactaattatactcttgtaattatttttaagggtacagtaaattattgttgactgtaatcacatcaaatactagatctcattcactgctcccacaaatgagattttctttatccattcatctgttgatggatgcttagattactttacatgagagtgcagatatctctttgatatactgattttgtaattctattttaaataaaattattctcactatagacagatgatgttgttgtgtttttccctcagctgtgaaaaagaaagagaaaaaggactctagtcagaaa

SEQ ID NO: 16898 - DNA, 537 bp, Homo sapiens
  source 1..537: mol_type = other DNA
accggaggaagaaggggcgggggcgcttttgcccgcctcttccctcgttgtaacaccgcgtcgttagcggagcacgccgtggcctcagtatgaaaatgggaggggctccttttttacatatagtaaactgggcagcgcttctgttttgcatgtagtacaataagggctcttttattctagaagcgttcagccctggggcggaggagaaggctcactgctccccgacccagccgcagcgcgtcccgggaaccggcgctcaaggctgcaggcggcccggctccctacgcctccatgcctctcccggagggcggggcatgccaggttgcggggccggcgggcgggcaggaggcggcggcccgggcctcgggatggagttgcagcgcccaggcgtcagaggcggaggcccgaggccgctatacagattgcggggctggcgggcgcggcccggcgctctgcatagcggccggcagggtgcaggcggccgggcggcgcagagctggttaggcaggttccggggccccgtgcccccccctccgc

SEQ ID NO: 16899 - DNA, 568 bp, Homo sapiens
  source 1..568: mol_type = other DNA
ttcaaccaagaaaatagaattgtggtgtttcttttattgaacttttaacagtctctttagtaaatacaggtagttgaataattgtttcaagagctcaacagatgacaagcttcttttctagaaataagacattttttgacaactttatcatgtataacagatctgttttttttccttgtgttcttccaagcttctggttagagaaaaagagaaaaccctgtatgaaggaaaatactttaatagttcaaaaaataataaaagtgtacatagttgtaaaaaaaaggagtttttaaacatgtttattttctatgcacttttttttatttaagtgatagtttaattaataaacatgtcaagtttattggcctgtgacctggtcacaaagtaccttccacacctttactttaaggtggcatcactaaattattccctgttgatgatagaggacaaaggaacagggcctttaccttctacatagctcccctgtttatcggttttctcaactgtgaatataataaactgaagctggagaacaccttctctagctgcactccaccttaaggctgaa

SEQ ID NO: 16900 - DNA, 494 bp, Homo sapiens
  source 1..494: mol_type = other DNA
agcttcttttctagaaataagacattttttgacaactttatcatgtataacagatctgttttttttccttgtgttcttccaagcttctggttagagaaaaagagaaaaccctgtatgaaggaaaatactttaatagttcaaaaaataataaaagtgtacatagttgtaaaaaaaaggagtttttaaacatgtttattttctatgcacttttttttatttaagtgatagtttaattaataaacatgtcaagtttattggcctgtgacctggtcacaaagtaccttccacacctttactttaaggtggcatcactaaattattccctgttgatgatagaggacaaaggaacagggcctttaccttctacatagctcccctgtttatcggttttctcaactgtgaatataataaactgaagctggagaacaccttctctagctgcactccaccttaaggctgaacgaaggggtggtccttcctgctggaggctccac

SEQ ID NO: 16901 - DNA, 352 bp, Homo sapiens
  source 1..352: mol_type = other DNA
aattatgtccacagtttgaaaatatttgtcttaaaaattaattagacacaggtcttgctttaaataagttaaaagtctactttagcaaatagagtgaaaaaaaattttttttgagacggagcagtggtcggctcctcgagtagctgggacgagacggggtttcaccgtgttacgccttggcccaaatttgaacctcagatacccaaggaataatttattgctataagtatgttccattccatggcaccctgtaaaaatttcccctggaatgtgtctacaggaacgtggagagccttcgcgggtgaggcttaacgcgcaggaggtctcacgagagtggaagcaactctcgcga

SEQ ID NO: 16902 - DNA, 714 bp, Homo sapiens
  source 1..714: mol_type = other DNA
gacattcagagtcagtcacctggcacatagtaatcaacgttcatgtttcgagacctggacttcagtcccagctctgccactaagtggcttggctgtagagcttcgcacgcccgggagccgcaagaaccacggtgatccgcgcggccgcaggtgggctggggctcgggcaaggccgccctggcctccgctgacccccgccccgcccgtctcgtcggtcccgcaggcgccctggaggatctggaacgcgcggtggagctgagcggcggccggggccgcgccgcccgccagagctttgtgcagcgcggactcctggcgcggctgcagggccgagacgacgacgcccgcagggacttcgagagggcggcacggctgggcagccccttcgcgcggcgccagctggtgctgctcaacccctacgccgcgctgtgcaaccgcatgctggccgacatgatggggcagctgcgccgcccccgtgacagccgctgagcgccgcggacccgggcgtccgcgggcgaggggacgggactgggccctgctcctgcgtcctgcccgcgcccggagagaagggcactcgggggtactcggcgcgggctggggaccagccggggggtggtgagccgcggccgcccacctgccgggtaagggcccctcgggcccgtggtcgggcatcgattggccccgcctggcgcagcccccgcccctgcagcggactgc

SEQ ID NO: 16903 - DNA, 322 bp, Homo sapiens
  source 1..322: mol_type = other DNA
cctctacctcctgaagtgctgggattacaggtgtgaattaattatgtccacagtttgaaaatatttgtcttaaaaattaattagacacaggtcttgctttaaataagttaaaagtctactttagcaaatagagtgaaaaaaaattttttttgagacggagcagtggtcggctcctcgagtagctgggacgagacggggtttcaccgtgttacgccttggcccaaatttgaacctcagatacccaaggaataatttattgctataagtatgttccattccatggcaccctgtaaaaatttcccctggaatgtgtctacaggaa

SEQ ID NO: 16904 - DNA, 357 bp, Homo sapiens
  source 1..357: mol_type = other DNA
caattattatgatagccatcctagtgagtgtgaaatgacgtctcaatttccctaaggatattcaacatttcttaatgtgcatattagccatttatatatcttctttggacacatatctattcaagacaggaatactgtatttgtctttttatttaagagttctgctagcctggtaatcccagctactccggaggctgaggcagaagaatcgctgcagtgagccgagatcacgccatctcaaaaaaaaaaaaaaaaagttctttatatattccggatactggttacaggttatcctgtatattaaataatagggagggtgaacgccccctacacctcctgggcttccggagcggggta

SEQ ID NO: 16905 - DNA, 312 bp, Homo sapiens
  source 1..312: mol_type = other DNA
gaaagtctgaagcaggcctggaaagctgttttctgctttccccctgagtgctctaactgtgggaacatagaatagcctgaatattactgttgtgatctgcctcatgaaggttcatcagaattactttcatgacttcaatatgaagagaggaaaaactagagtctcgctcctcaaatcctaggacttcctggacagcatattctggatcttgagtgttccacctccattagctatagcaggtggcagcaaagggcggcctctcccctccccctccagtctccagccgtggggggtcccctgctaaggccagcc

SEQ ID NO: 16906 - DNA, 186 bp, Homo sapiens
  source 1..186: mol_type = other DNA
ggaccaagagctggctttgcacatttacccctcagtagatgttctggagatgttacaccctctcaaaagcgtgttaaagcaaagcgggcgctgtgcggggggaccttgggctccagccccacaagggcgtcttctttggctggccaggcggacgggaggggggcgggacaggctcgctctcctcct

SEQ ID NO: 16907 - DNA, 330 bp, Homo sapiens
  source 1..330: mol_type = other DNA
cagcaagttctggcagagctagaattggaacccagtcatcctggcccaggcagagcaggataggcaaccctggcctgaccgttatgtccatgtgcatgcacgtgggtgcatgcaggcccagatagctcagggagcttaaggggctctggctggtgtgtacacagtcgagcccatgtacagaagaatctctgtcatggccaggggcagtgagcctggcacaggcagagtggcaggcacagcctcccccagcctcccacctcaaccaggctgcttatctgggtcctggggcaggggtggaggcactggcccagcctcccaggtgccgaggct

SEQ ID NO: 16908 - DNA, 671 bp, Homo sapiens
  source 1..671: mol_type = other DNA
ttcctcggccgctgccaacgccaccgccagagggggccgtgacgctctcccccccttgactctcccgccggcacccaggcggccgggcggacactcgcggggtatcgggcggcgagcgcgcgcgcgggttttcgtcctccagcgccccacacctccccctctccgcccacagcaggaccttggggcgggggtatctcctgtgacgtctccccgcctgtccccaggccggccgccttgatggaccaggaagggattcggagtccggctcagagtctggggtgtccaggagatgggaagcccgcctggggcctcccaggcactccccaaggccccacgtcctcgggggccggggaggccgcctggggcgccttgccacgcccgcgcggtccctattggaatccctagcggagttccccgagcggaggctgacccaagtcatccgggctcccccgggatacgggcggctgggtaggggcgccggcgcagggtggccgagtcgcccgctagcgcttccgccgaggcaggctcgagtggggacttggccgggcgaccgcacagccctgccggggacccacggctctggggcggggctgcattctgggccgttagctcagcggtcctggagcctcccgaggctgactcatcgggcggcgggctcaccccccagccgt

SEQ ID NO: 16909 - DNA, 307 bp, Homo sapiens
  source 1..307: mol_type = other DNA
tatgcggtcatcaagactcattaggactcagtgagctgagatcacgccactgcactccaagagtgagactcagtcatgacacactattgtgtcttgagccattccatttgaaatgttaagggaaatgggtcttggggccacccaaggaacctggcatccaggttacaggtgtgtggtgcccactccccacccccaccaccatgctctgagggaagggcctgagccattggcaccagcccactgtgccctgagagcaggaggggcagcacttggacaggcaggtgagccaggctgtgcccagcaagcc

SEQ ID NO: 16910 - DNA, 558 bp, Homo sapiens
  source 1..558: mol_type = other DNA
cggagcctacccgccgccaggcgcgccctacaggctcgccccgtcccaccgcgcagcgccgcctggtgcggcctccgggcccggtcggccccccttcctgcccagacgcgcgcccggcgtctccgggtcgctagttccgcgccttcctgcatggaggcgcgccccgagaggctcggacgcggccccttaggcccggcatcagcctccccggccagctggagaagtcaggtcagcttcctgtccccgagcagctgcccgggggccagttttcaaaacatatccttagcagtaatggaggggcgaaggcaggcctacccttgccagccaccgtgagagaagggccctccattttctcccaggccaggaaggcagtgacgccgcggcgaatatagccgcggcggccgaggtttcccgcggtcgccgcagccgagttagctcagccaggcggcgacttcggcggcgccacgagagcgggcagcggctggacagccgggggagccggcggctcgggcggctggcctgcgcgcccctcggagcggggcgggggcgggggcgaga

SEQ ID NO: 16911 - DNA, 523 bp, Homo sapiens
  source 1..523: mol_type = other DNA
ccgaggcgcaccctcaagctcggtgcctctgcgccccccgcaggggcgccctcaagcctggtacccttcacatgagagccccccgggcgcaccctaagacggagcctacccgccgccaggcgcgccctacaggctcgccccgtcccaccgcgcagcgccgcctggtgcggcctccgggcccggtcggccccccttcctgcccagacgcgcgcccggcgtctccgggtcgctagttccgcgccttcctgcatggaggcgcgccccgagaggctcggacgcggccccttaggcccggcatcagcctccccggccagctggagaagtcaggtcagcttcctgtccccgagcagctgcccgggggccagttttcaaaacatatccttagcagtaatggaggggcgaaggcaggcctacccttgccagccaccgtgagagaagggccctccattttctcccaggccaggaaggcagtgacgccgcggcgaatatagccgcggcggccgaggtttcccgcggtcgccgc

SEQ ID NO: 16912 - DNA, 347 bp, Homo sapiens
  source 1..347: mol_type = other DNA
aaagttgtttaacttggaagaagacagcagttctattatttctgtcaagggggaacatacataaatatcttcatagtgagggtcaggccggagagtcaccctagtggagggcccggcctcctccgccagtcttgcccttcgagggcaggagaagacgccgaggcgcaccctcaagctcggtgcctctgcgccccccgcaggggcgccctcaagcctggtacccttcacatgagagccccccgggcgcaccctaagacggagcctacccgccgccaggcgcgccctacaggctcgccccgtcccaccgcgcagcgccgcctggtgcggcctccgggcccggtcggccc

SEQ ID NO: 16913 - DNA, 173 bp, Homo sapiens
  source 1..173: mol_type = other DNA
tgtcctgaaagccgtcttctttgaaagcagcttctaaaggcagtggaaactcctcaggctgtttaatcctaagaatgatgaggtcaggaattcccagctgagatctcgccattcagatgctcgggctgcagatcatgccattgcactccagcctggtcaagagaggaacggct

SEQ ID NO: 16914 - DNA, 335 bp, Homo sapiens
  source 1..335: mol_type = other DNA
ctagcttggtagtttatgaggttaataatttatgagcaaacaaagttaatttatagatagaacatcattatttttgagtcagaaaatgactctgtaactaggctggtaaattctaacctatcttttctgaacttgagctgagaagccctaacttgccaggacttaggggtttcccaagtcaagggacttttcagtccttgggagctcttctacaattattgccgggaaagaagctgaaatgcttgaggggattttccctctttcttcaaaaaaacagaaaagtgcgcagctcatttgcttaaatttgcagctgacggctgccacctctctagagg

SEQ ID NO: 16915 - DNA, 492 bp, Homo sapiens
  source 1..492: mol_type = other DNA
gagaagctgggggtggcgggctgcttcccaggcaggtcctggactggaaccttcccccaggagccttcctaaggccaatccccgcagggtggcaggtggggccccctcacccccaggtccccgcccagcctccagcagccccgcagggagcatccgggcctgtcaccgggacgaagctcctgggcccaagactcctcccctgggtccggcgctcccactcagccctcgggcagccccggtgtctgcgcgtgccccaggctgtctccgcgcctcccgctccggcggcgcttccctggcctcggcgggtctctgagcctctgctggcagcacccggggctcgccaagctcttgccggctggcgcgcgcccagcccctggcgggacttgtccgtgtgtctgtccgcgcgcggggcctggagaagcacgctgcagtcctgtccgcctcccgtctgcctctccgcccgggctctgccgaagggggcggggtgggggt

SEQ ID NO: 16916 - DNA, 466 bp, Homo sapiens
  source 1..466: mol_type = other DNA
aattcttacaggttctcaatttttgaggctgtgaacttgccctgcccctccccccttatgggggacctgggcatgcagtgtctggaatgagggtccgtccccacactgccacatactggattgcctgagatgcatgccagccaggagcctgctcagagccctggtatctcagtgctcttccctggttgtgatggagaagctgggggtggcgggctgcttcccaggcaggtcctggactggaaccttcccccaggagccttcctaaggccaatccccgcagggtggcaggtggggccccctcacccccaggtccccgcccagcctccagcagccccgcagggagcatccgggcctgtcaccgggacgaagctcctgggcccaagactcctcccctgggtccggcgctcccactcagccctcgggcagccccggtgtctgcgcgtgccccaggctgtctccgcgcctc

SEQ ID NO: 16917 - DNA, 275 bp, Homo sapiens
  source 1..275: mol_type = other DNA
ggcttaccacagttaggatgtttttaaaaagtgatcacctgaggcaggtgcctgcaatcccagctaccagaggttacagtgagctgagaccgcgcctttctcaaaaaaaaaaaagggctttacattttctttttcattgtgtgtgtgtgtgtgtgtgagagagagagagagagattgagaagacaaaggtttcacttccacaaacattttctgaggattgagatgaaaaaactcagtctgtgtcctcaaggacctcatggtctactaggagagac

SEQ ID NO: 16918 - DNA, 331 bp, Homo sapiens
  source 1..331: mol_type = other DNA
gagttgtttcactttgtgagggctcaaacacagggacactatccttctcagaaggagagagcagccctctgtctcttctcagggactggaagaagagactcctcagtcacagcccccgctactcacaggcagtgcctgggagaaaagggtgacccccagctctcccccctccttctggaggctcctatcagccagaggaggaggggactacatctcccagaagcccccagggcgctccagctggcccaaggccggccgcagggtcaacctgattgggggcttaagagtagcctccactgaccctgggggagtcccccacaccttaaacagc

SEQ ID NO: 16919 - DNA, 318 bp, Homo sapiens
  source 1..318: mol_type = other DNA
aactgtgcctggcctcagttctaccagtaccagctaccacccagggtggctgtagggctacaatctttctgatgtagcccagggctggtgcccacccccaacccctgctggccaggacccttctgaggggtgggggaaagacccccaccacatcgggggagcagtcctccaaggactggccagtctccagatgcccgtgcacacaggaacactgccttatgcacggggggcatcccccctcctggcctgagggccagccctttgaggctatagggcccaaggggcaggttggactggattcccctccagcccctccca

SEQ ID NO: 16920 - DNA, 541 bp, Homo sapiens
  source 1..541: mol_type = other DNA
ccttgtttttaggaaatacagaaatatttttgggtaaaaattctcaaattgttaagcaaaacataatgtatttgtagtatatatggaaataaaaatataaatgtgataaaatgataataattggtgtaatttgaaaaagtatacaggaattttttgtagcattcttgggatttttctgcaaatctgaaattattaaaaacaaaatttttattttaattttattgtcccccaggctggagtgcagtgctgacctcaggtgatcaaagacaaaaaaaaatttttttaatcaaatcagatgtgatcgtggataaaccataaacctttcataacttctagaaagtaactactaatactattatggtagaaaggatttgaccatggcgccttttcaatgaaataaggggcaaggggtggggtcccttccggatccccaggtcctcgaaggagggtcttcttaagcgttcctcggcgcggtccaaggcgtcaaatggaccgctccacacctggccggcgcatttgagaaggcgcctgtgagggtcgc

SEQ ID NO: 16921 - DNA, 377 bp, Homo sapiens
  source 1..377: mol_type = other DNA
cagagtctggtgtagcgctgaccgtgggcaggccctacagacaggctgtgtagcctcccttacagctttataggaaccacggcgagcacaccctgtgggggcgattgagtttatgagtgacggggatcaggtgctaacctcagcgagatgacacagtgaggtggttaacgtcaggtcctggccaatgctcagagttgcgtgtggcctatgagcctcacgttgcggcgggcgcgcgtccccgcacatctgcaggacggcgccatcctcctccttaacccgcccagctctgggatgttgttgcctgctgcgcagccgcagaagggcttgcagtggcgcctgccgggcgctgagggccgcgggagccgccgggttagccc

SEQ ID NO: 16922 - DNA, 281 bp, Homo sapiens
  source 1..281: mol_type = other DNA
gcttctcattagaagtagcagggttacctgccattcacgtccatgccattgatggccagcactgcatgacccactgcagcgccgaggggacaagacccgccacgggcccgagcctagcccacctcggatgccgtccgctcatcgtgtagcttgagcgctgtccaactggtaaatcaagccgccagctccgtgcagccacctgctgcacttgcgcactgggagcgacacgctcgtgccgcgtcacaactagcgcagactccggcagtccaggctagagggcg

SEQ ID NO: 16923 - DNA, 161 bp, Homo sapiens
  source 1..161: mol_type = other DNA
tatcataggtagctttgtcaaacaagactaagttattgatctgcgtcagagaaatctgttcgttatcattttcatgatcctaatgggaaaggcggctgtaggaggcccgccctgcaaccgaggccggcaggccaaggagcgctcccgcctgcgaagctcgg

SEQ ID NO: 16924 - DNA, 291 bp, Homo sapiens
  source 1..291: mol_type = other DNA
gtggcacgcgcctgtaatcccagctactcgggaggctgaggcaggagaatcgctaggctgcagtgagccgagatcccgccactgcgctccagccgcttctcattagaagtagcagggttacctgccattcacgtccatgccattgatggccagcactgcatgacccactgcagcgccgaggggacaagacccgccacgggcccgagcctagcccacctcggatgccgtccgctcatcgtgtagcttgagcgctgtccaactggtaaatcaagccgccagctccgtgcagcc

SEQ ID NO: 16925 - DNA, 187 bp, Homo sapiens
  source 1..187: mol_type = other DNA
ttttcatgatcctaatgggaaaggcggctgtaggaggcccgccctgcaaccgaggccggcaggccaaggagcgctcccgcctgcgaagctcggcgccctctagcctggactgccggagtctgcgctagttgtgacgcggcacgagcgtgtcgctcccagtgcgcaagtgcagcaggtggctgcacgg

SEQ ID NO: 16926 - DNA, 426 bp, Homo sapiens
  source 1..426: mol_type = other DNA
ctgagaacacagtcatcattgttgtaaaatagcatcactactgttactcctcacaactcttaactgggatcagtgaaaaccattgttgttgagaactcttatagaatttctgagctcttatctaagtctaggactagataaaattccaaattgtgggctggtgagcggatcacgaggcccgtagtcccagctactcgggctcagactgtgagcaacttgggaacaatgattatcaccgagggcactcactaaaaactggtttgttgaatgcaaccacttaagaattccagcccctaaggggcgctatgctcgttcgtccaaggagcagcgcgacgtccccggcatgtggggcggggaactccactggccggcaagcgaagcagcaggcgaagaccacgcccccgccggccgcgcttgcgcagcctt

SEQ ID NO: 16927 - DNA, 396 bp, Homo sapiens
  source 1..396: mol_type = other DNA
tttcccaattgagcggaaaagccggggcgccggggccctgggcgggacggttgtgccctgcagcccgaagcccgccggggcaccttcccgcccacgagctgcggacccagaggtagctctgtggggccccatcaggacctcagcccggcaccgtgggacctgaactggggaggtcccccttgcattaaatctatccacggattgaggccctctctagaaggcttgtaagttaataaaccttccggcagggctagagagggcatctctgctcatcccacccctgcctcccggttgaacctttaatcaaagctggtttcggacacagggtgctggcctggctcacaggcatgcctccactgggtccccttggagcctccccaggcttaatgattgtcc

SEQ ID NO: 16928 - DNA, 583 bp, Homo sapiens
  source 1..583: mol_type = other DNA
ccaggctggtctccccaaaatgctgggattacaggcgtgagccaccgcgcccgggcgactgcgcacatttctgtcattctatgacagaaacctcacaaataaaagtgtcttttgtgtgtagtactaaatcctggccagattctgcgacgaatgcattctttttctgtggcttcagtttcctcagtaaaacagagggggttgcgacggactcagtccgagggacagcaggccagcgccccctccgcggggctgcggacaggacgcctgtccattcctcggccgggctctacaggtgaccggaagaagagccccgagtgcgggactgcagtgcgcccgacctgctctaggcgcaggtcactcctccagcgccggaaaaggtcccgcggtcgccccggggccggcgctggggaggaaggagtggagcgcgctggccccgtgacgtggtccaatcccaggccgacgccggctgcttctgcccaaccggtggctggtcccctccgccgccccattacaaggctggcaaagggagggggcgtacgcgcgccggggcggcgggggcggggccgggcgcgcagcgcagggc

SEQ ID NO: 16929 - DNA, 396 bp, Homo sapiens
  source 1..396: mol_type = other DNA
tgtagtcccagctactcgggaggctgtggcaggatcccgccactgcactccttacctcctcgccaacgataatattagggcaggggaaatcatgtcactttacatattcatcttaatgactgttgataacaagttaggagatggacttccttctttcttcccctcgatctcttcgggatcccgggagggtcggcctgagtcgcagaagcaggtgtggccccgggagcggccccatcatccttgtcgaagaaaacgaagcgccgctcaggggccgccttggcccagggctcccacctccgggagctttgtcacgtgagctgagccagcgaatcacgtggtcggcagcttccgggagcccgcgggcccaggagctcctgagtcggggtgacagcgtcc

SEQ ID NO: 16930 - DNA, 736 bp, Homo sapiens
  source 1..736: mol_type = other DNA
cacacaggcagtgagtggcgcaccgcagcactgtgcctgttgtcagacacctggggtgcggccagggatccccgcccagggctcaaccacctccccacacctggagctcccccgctgacggggaaagccagctaaaggcctatcccggccccgctgtgcccacagacgcagtgccaggggcggtaaggttccccgcccggcgggtagccgttacccggtgttcacctaaaccccacgacgaaggcggcggctcccactcccggaaacggatcccggcccgccccagcaagtggggacagaccgggggccgagctgcgtgccccccggtgcgaggccgagcgcccggcgtccgcgcggccctcccttgcgctcccgacccgcccccggagctcgcacgctgtctcccctaggaggggtggccggcccgcacctccatccaccccctccgctcctgcggccccagctctgggacagacgcggcacgaacgaggccggcagcgcggcggcgtctcgcgcaccagccggccccggacgcggcgcgcgctcattggagcctcggccgcccggccctgcgctgcgcgcccggccccgcccccgccgccccggcgcgcgtacgccccctccctttgccagccttgtaatggggcggcggaggggaccagccaccggttgggcagaagcagccggcgtcggcctgggattggaccacgtcacggggccagcgcgctccactcct

SEQ ID NO: 16931 - DNA, 299 bp, Homo sapiens
  source 1..299: mol_type = other DNA
tctcaaagctgcgaaagggggagaaagcccagggccttgggaattcctgccccaccaaggctcaatcgatcctccaagtagctgggattgcccaggctggtctcgaacacctgggcgtttccttaagaaacgttttgagcgtctgttagaacattgactatggttggcgggtgacagttcacgcattttaggcgcgcggccggacgctgtcaccccgactcaggagctcctgggcccgcgggctcccggaagctgccgaccacgtgattcgctggctcagctcacgtgacaaagctccc

SEQ ID NO: 16932 - DNA, 367 bp, Homo sapiens
  source 1..367: mol_type = other DNA
agctgggtgattattaataatcatgattgttaattatgttcatgattacagcctgtactcccagcacttccaggtgggcgaatcacctgaggtcaggagttcaagacaatcccagctactcggggggctgagaaaaaaaattatgttcatgggaaagcacttttcctaacaagccgtttcctcattttaagaattgaaatgctggctgggccagtggctcacgcctgcgggaggtcaaggctgcagtgacccgtggtcatgccgctgcactctagtctggggacatgcctatttcaaggttgtagcaaagctaagtttgaacagagcaaattcccgcccagagggagggacctccccttcgagggag

SEQ ID NO: 16933 - DNA, 398 bp, Homo sapiens
  source 1..398: mol_type = other DNA
attcgagaccagcctggccaggtggaacatgcctgtagttccagcttgaacccaggggtggaggttgtagtgagttagactgaagaattcagttctacgtgcttagcagtgaatacttttgtccagggcacgaactttaggcagcgcagcctcctagtcttatggaacatctgaggcagacattttatagatgaacaattacctcagtccttaatgcatgcagtccagccagattaagggacccttaatactgtcagctttcccctgctggagaaggtggcagccatgtggcagggtcctggctgccctgcccctgccagctgcaggccccacccttcctgtggccaggctgatgggacctggctgtgcacagcactcccactgacaactgccttggt

SEQ ID NO: 16934 - DNA, 173 bp, Homo sapiens
  source 1..173: mol_type = other DNA
tggtaggactacctacccaacttgggcaccacaatggtcgtgttgccaaagttggtcagcagcggggaggctcgggcaggtccatgcatggtgggggaatgccttacactgctccttcacaaagcagttcaggaatgatcactccctgggattctgggctgtggcccagcagc

SEQ ID NO: 16935 - DNA, 251 bp, Homo sapiens
  source 1..251: mol_type = other DNA
gcaacctgcaggaggccatgactgggagttcctcagactcacaggaaatcagtttccctcagtgaagtgctgcgctgggttgccgggcaactaactgctacagctgatctacgctttagaatttacaccacatcccagattaagggagaggtacgggccctttgtcagacacgtggtacaaggagaatgtaggatgaaatttggaatcacactttattaaaaatggcggccgccgccttccgcagtaatgg

SEQ ID NO: 16936 - DNA, 343 bp, Homo sapiens
  source 1..343: mol_type = other DNA
gtgaattcccccaggattccttcctgtagaggttgaatcaactccttgagtctaggaaaagatggcttctgaggccagaggagctgttactatggaaatacattatttttaaaaacagacacacagctctccagaggaattcaaattcactctcaaggagggacgctctgcgtctccttaccctgggcctagcttcccccaggaaatgggcggtgatttccacaggggtcacctccttcttaacctgtgaagttactcttgccagccctcccgccctcctccagcgagggagcgccaggctgtcctggccccgcccggcgcgggtgcggctcctttaagggcg

SEQ ID NO: 16937 - DNA, 366 bp, Homo sapiens
  source 1..366: mol_type = other DNA
gaaaacctcagtatggttttggagctttgccctgaaagcaatagaatgcctttgaattgtctgaagcatgatcaggtctgctttttgcaaagtaaatttgaaatatcctgttttaaaaggagaggaatcagtgatgactgccagctttctgagagccgagcggggccgacagcgctgggcagcatcccacgccttactgcgcaccaggcgcgagccctgcgcatgcccgttgggtcccggaggccgagcctgcgcagttaggggaactcaggcccataggctccccgcctttgcgttgccctgagcagcgaggcgcggtcacgtgctaccagacacagctaccattggctgtcagtcggatccgac

SEQ ID NO: 16938 - DNA, 312 bp, Homo sapiens
  source 1..312: mol_type = other DNA
ttgactgctagtaaccctcaactgccggtggcagtcacaccagcagcctcagagcttggctagctaacctacttactgagatgcccagggcatgtctgcgagccctgtgcatgccctggcacacaggtccctccaggatatggcatgtgcctgtcttgaaggcctactctggagctactgcagttagtgtcctaactcagagaaagccaatgtcccaaggctcctgcgtttttgaaagccttgcgccgtgccgtcctcgccccccgcgggctgccgggcggcgcgggccctttaagaacggcgggaccggcg

SEQ ID NO: 16939 - DNA, 351 bp, Homo sapiens
  source 1..351: mol_type = other DNA
atatttttattttctattttcattttaaatagagacagggtctcactatgtcaggcagcccagggcctagtgctggacctggcttgtgggggtgaggtgctcagtgctacccaataccacagtctaaatgaaacatccacattctgccctggagagcctctctgtgggtgccctagtgcacagctctcccaggggcaggttggggtgcaagttgtccttcagccctctacccaaggaagccttaggctcaggtctctgcctgaagatcccctggacaccgcgcctcagggaggcccaggggttcatccagcctaacaagcagcccagcctgggaggtggttagtgaggctg

SEQ ID NO: 16940 - DNA, 181 bp, Homo sapiens
  source 1..181: mol_type = other DNA
actgcactcaaaaatttataaacgaaaatctcatgagacttattcactatcatgaaaacagcacgggaaaacctgcccctgtgatttaattaggtacctcccatgacacgagggagcaaaccatactatgggcccagctactcgggaggctgaggcaggagaagcgtcttcaaggaggcgg

SEQ ID NO: 16941 - DNA, 236 bp, Homo sapiens
  source 1..236: mol_type = other DNA
acagtgtactgaagagagacagggtctccctctgtcatccaggctggagtgcagtggtgcaatcatagctcactcaagtgattctcctgcttcagcctcccaagtagctgagacgtcagttgatattatctcagatgtgtacatctgaatttggaagtctccaaattgcaggccatgtctacatggcaatgaatcatcaaactatacttaggaccaggacccaggccccgcctctg

SEQ ID NO: 16942 - DNA, 395 bp, Homo sapiens
  source 1..395: mol_type = other DNA
gggcagggcacttccctctttggaagggaagttcctattttcaaagttcttccaacggaacttttacattagagaagtaacagcatttctgttccctgggcgggagagagaaccccctcgggcggagccagcagcaggtcagcttctgagggggccctcatgctggcggcgccgacatacatgtttgagattcaattaaaaaaaggaagtgatttcttttcaggggtggagaaataactttcctttttctcccatttctggggaaagacttgacattggtttctggctactgcgcagactcagagggcgcaggcccaaaggttccgccgaccccgccccagcctggccccgccccgccccggcgtaggggcggggaagacgggcacagaaacctg

SEQ ID NO: 16943 - DNA, 435 bp, Homo sapiens
  source 1..435: mol_type = other DNA
gtcttttatcttcgtgttacatcttaatgagaaaggactatctgagagctgcccacgcccccggccggtcaccccggctccgcgcctcccaccctgcaacagcgggcgctcagcttgtccaccgtccccggcgggtgggggctgaggtggttgcggctggaaggcgtccttcatgagcccaatcaggccacccgaacccgagcccccggagccgctgccgcccccggccccagagctcttcttcacgttgccggccatggcctgggcagggtcggagcccaggcgggtccgccggctcggctcgactgcgagcgagggagagaagcagggcgtgaaggaggggcctctcccggccgccgccgccgccgccgccgccgccgccgccggctatccgggcggagggaggagcggccgtggagtgggcggcgccgggag

SEQ ID NO: 16944 - DNA, 530 bp, Homo sapiens
  source 1..530: mol_type = other DNA
cagcttctgagggggccctcatgctggcggcgccgacatacatgtttgagattcaattaaaaaaaggaagtgatttcttttcaggggtggagaaataactttcctttttctcccatttctggggaaagacttgacattggtttctggctactgcgcagactcagagggcgcaggcccaaaggttccgccgaccccgccccagcctggccccgccccgccccggcgtaggggcggggaagacgggcacagaaacctggccgcggctttccgggagctgtgggcacgcgagctgctcgaagccggtggcccggggatcgtcgctgcccagtccggccgcggccggccgcttccccgagcttaccagtaagccggtccgcctccgggacgcgccccgcccgccccgggctcgcgcgctctgaaggggcgcgtcccgcgcactcccggcgccgcccactccacggccgctcctccctccgcccggatagccggcggcggcggcggcggcggcggcggcggcggccgggagaggc

SEQ ID NO: 16945 - DNA, 550 bp, Homo sapiens
  source 1..550: mol_type = other DNA
cagagctccccaagcaggtctgttgatcctcaaggcccaggtctggacaagtgtgaacaccttgggccctctggtcaaaggctagacttgcaggagcttgcgtttgaagggacagcccagaaggcatcgtctgcactccccagctgccagcactgaggctgaggcagtgtcaggccggcggcagcggcagggggagcccaagtgggaggccccttggggacaccgaggaccaggtccgctactgctcctcccccaggaggtcccctaggggctacattggctggcaggggctgagcagcggtgagcctggctggcttcgacccggggcgactccgggcatccgggacagcttctcctcgctccaagccaggagcctgggagtccggctctggcctacctccggcagcgctcctaggcgcagctcccgggctggcggcgccggggcccgccccctagggctgcggcgcgcggggcgggggctgggggctgcgcggggcggggcgggcccgggcgctccgggccccctcccccgcccccctgacgtcagccc

SEQ ID NO: 16946 - DNA, 677 bp, Homo sapiens
  source 1..677: mol_type = other DNA
ggcaccgccgcggctatcggtggcgatgtccgagcaggcgcggccgcagctccagctcccggtgtccgggactcgggtctcccgccagggggcgccactccccgcgctttgcagccctgagcgggggaggggcccaggcggcgggagcccccttggccagccccccagatctgccctgcgggaaggggtggctggccgaagctcaggcaggggcggggaggggtacggtgaccttagagtcgccgccccgctgcgggctgagccgccgctactctcaccctgccgccccgcttaccccgcaggactgccgggacctcgaggggaccccgggccgcgaggagaggcgggacccgcggggcccaccgggcctgccggggagtgctcggtgcctccgcgatccgccttcagcgccaagcgctccgagagccgggtgcctccgccgtctgacgcactcgaccgcgtgctggtgaacgagcagggacattacgacgccgtcaccggcaagttcacctgccaggtgcgcccaagccagcctcgctctcggggggggccatggtgaggctggttggcatctatgccagcattagtgcccactgcaaagtgagctcatgctctcactcctagaaggagggtgtgaggctgacaaccaggtcatccaggagggctggcccccctgg

SEQ ID NO: 16947 - DNA, 602 bp, Homo sapiens
  source 1..602: mol_type = other DNA
aggcccctgtcctaggccctagggatccaacgcctctcctctggccctgggaacaggaggtgcctttggccggccgccgggcgacaccacgagtgctatttcccggtccgggagctcttggcccgaacgttggcagggcagggggcgcctggccggggagaagcgcggctggagcaccaccaacttccggagtagcgagcgccccgaaggaggctggcgcgggccggcggtgggagggagggctggccgctcccaccctctcgcgcctgcctgtgctctccggatgctcggccctgcgagcgctcagcctcaggggcacggcagtggggtggggaccgactgggccgcgccggggtggggagagaggcaggtcccaggattctgggtcccgactccagtcctgcctggtccacagactgcgagaggaccccggcgtccgggctcccggtgccagcgctatgaggccactcctcgtcctgctgctcctgggcctggcggccggctcgcccccactggatgcccggggcaccccggccttccaggcacgccgggccaccatggcagccagggcttgccgggccgcgatggccgcgacggccgcg

SEQ ID NO: 16948 - DNA, 422 bp, Homo sapiens
  source 1..422: mol_type = other DNA
tgcccgtcctcttttgccggtcagggctggcacgcaggggaacaaaggaaggagcatcagcagggtctctacccatccttctctggggctcccagggagggggaagagcaggctgctgactggccccacactgtggcaggcccctgtcctaggccctagggatccaacgcctctcctctggccctgggaacaggaggtgcctttggccggccgccgggcgacaccacgagtgctatttcccggtccgggagctcttggcccgaacgttggcagggcagggggcgcctggccggggagaagcgcggctggagcaccaccaacttccggagtagcgagcgccccgaaggaggctggcgcgggccggcggtgggagggagggctggccgctcccaccctctcgcgcctgcctgtgctctccggat

SEQ ID NO: 16949 - DNA, 421 bp, Homo sapiens
  source 1..421: mol_type = other DNA
agcctgggagcaggtgcctgaaggccactctccctccgcagagcctgacaagcctgccctgctaccagcattccgggcccccttgccgctctgtctgccaggaagcggagcaccagtgccagtctggcctggcactactgggccccttcaactgcaacaggctgccagaggcagctgatgcccgtcctcttttgccggtcagggctggcacgcaggggaacaaaggaaggagcatcagcagggtctctacccatccttctctggggctcccagggagggggaagagcaggctgctgactggccccacactgtggcaggcccctgtcctaggccctagggatccaacgcctctcctctggccctgggaacaggaggtgcctttggccggccgccgggcgacaccacgagtgctatttcccgg

SEQ ID NO: 16950 - DNA, 309 bp, Homo sapiens
  source 1..309: mol_type = other DNA
gtgaccttgggaaagtgacataacctctcagaggccagccatttgtaaaatggtatccctttcctttctccctgaggacagcagggctgagaaacagatctaccaggggccttccaaagacccggcctggccaatacccctgtcctggtggggaggaaaggtgggcagctggctttgtccaccccgcgaccccctaagtgctcactcagtgccttgggtgatggggtggagagctcccctcgtcacatccccgcacagagcacctagtttcctctgctgggtgttctcagccaccgcctcagctgagtt

SEQ ID NO: 16951 - DNA, 421 bp, Homo sapiens; identical to SEQ ID NO: 16949
  source 1..421: mol_type = other DNA

SEQ ID NO: 16952 - DNA, 537 bp, Homo sapiens
  source 1..537: mol_type = other DNA
ttggagtatttttaaatgctaaaaatactggctaaaaatagctgaaaaggttcttttcaggagccaaatgagaaggtgacctattggaccttataaaactgcctctcttgaaagaagccaaacaggactgttttgaggagggcgctcagcccctaggccgtgaaggtccatcttcttacttcacgaaggcctgagtacccccggaactctagacaaaagtttgtgcatatacgtatttgagaagagctttcatcacgtgggtcttggggagacgtcctctgcgggccccaaagatcactgagcctcaaccccgaggccggccagggcctcagggctccggtcctgcctcccccgcgggcctgcctggccgggggtcagcgggctgggggcgccggggagcgcggggaaggcccggcgggggaggaccgaccttgtcgcctcgttcgggtccgcgtgccggcgccgggggcggggtagaggcgaggtggggcggggcttagggcctggccccgccccagcgctgacgtcgcggggccc

SEQ ID NO: 16953 - DNA, 427 bp, Homo sapiens
  source 1..427: mol_type = other DNA
gctactggaacacttccccaggagtaaccctccttttctccctaggaaggtaggcgctattattaataataccactaattataataagaagtggaagtattcaatataatcatcaatgtttattgaactctatgggccatgaaatttacaaatattattttatttaatcctcacaactgagatagaccactattattactattagtcctagctaaggttcagagaacttaagtgacttatccactaattggactgaaacctgagtactagtccgagcaagctaggtctactctatctcaaaattaagagtggtccttggctggcactggcccgaaagggcagcccctcgggcttggaatgcaagtgagttgcactcgccatctctgccagtaacctgagctccggattacccagcccagagtcaggc

SEQ ID NO: 16954 - DNA, 323 bp, Homo sapiens
  source 1..323: mol_type = other DNA
gagctgagatcgcgccattgcaccctgataagaatggattcagacatgtttgtaggtagaaatcgtctgatttctctgggaaatagaagagaagggttgatggagcagctgaggagcagcaaaaattcaagttttgtctcggctttttcttgaaaagaccaaagagaattctcagtcaggcagacctcccccagcccagtgagaaggggagtgggggacgtttagccttccctaaaagttgatacgccccagggctcaagttccgagccttgtggccccagccggaggccgggccgtgacgcgactcagtgacgcgagacgcg

SEQ ID NO: 16955 - DNA, 357 bp, Homo sapiens
  source 1..357: mol_type = other DNA
tctctcttctcccactaggcagggatgagcaagaggaacttgagagctggggtccatagcccaggtcagttctccatgtaatgtgcccagcacagtgcctgttccagctgtctggcaagcgcctgcagccccctgaagggctggtgggtccagcacctgcctcgctaggcgtgggcgctcccggcctgcatcccacagactcctgaagaataggtcagaagaaagggttaagcgataatgttctttgggctgccgcaccctgatccccggggtcccgaaccctcccgtccctggccaggcctgccagccacagggtgagggcccccttccgccgcaacctgccgctgtgaaactgcg

SEQ ID NO: 16956 - DNA, 249 bp, Homo sapiens
  source 1..249: mol_type = other DNA
cttccaacagtggcttccaacagtgccactgcagtatcagaaactgcaggcttcttaagtctctcttctcccactaggcagggatgagcaagaggaacttgagagctggggtccatagcccaggtcagttctccatgtaatgtgcccagcacagtgcctgttccagctgtctggcaagcgcctgcagccccctgaagggctggtgggtccagcacctgcctcgctaggcgtgggcgctcccggcctgca

SEQ ID NO: 16957 - DNA, 477 bp, Homo sapiens
  source 1..477: mol_type = other DNA
tctgtcttcctcccccagggggaggggatggggattcctaccacacccggggatggggcggagagtccctgccctgccagggacactgactggacgatcccgctgcctctccgtggaacgtccaagtggtgcatgggagcagagggcttgcagaagccctgccagctcccacgctgctagccgcacccccacccgccgcgcctcggcgccgccggccgctaggggtcactgcctgcctttgtcagcggaggaggagggcagcccgcgctccagccggctccccagctggaaggcggccgaggggtagctcccgagcgagggtcctgagccggaccccgcagcccgcgctcgcgatccgcctctgcttcggtcgggaaggcgcgtgcgctcgggctccgaccgggccccggcgggcgcgcatcgaggccaggagggggttaacgctaacccctcccctctggctgacatcacgggcga

SEQ ID NO: 16958 - DNA, 308 bp, Homo sapiens
  source 1..308: mol_type = other DNA
tgagtcacacagtgtttgggccctgaggacccacatccacgcaggtagactctcagaagccatcttctgatgagatattcaggtgactgcctgttttctcatctgttaaaaaggggtaattgaacaggaagtagggttcaatactcagtagccaaatcaaatggaacccatccttcccccttaaggtgaaaagcagcgatacagtcccctctgaaactcaggcctgcaaattacaaggctatttggcttgtgtgagacccttctgccccaggggcctctgggctcagtgagcactcccttcttttaaa

SEQ ID NO: 16959 - DNA, 285 bp, Homo sapiens
  source 1..285: mol_type = other DNA
agaggccgacctgccccctgttggagcgccagcgtcccgagtccctggaaattctcccaagtttcatagtctataatagagagactgagggccgcgtcccagtgggtgacctgacccatcaaggtctaacacctggccgtggcaaagctgcccgatccaccctcccagtgtggggcagggaaaagggtctgattttgcagaagctttttagaaattcgctgtcagagaaactgcagggcgggggaagagtcacccgtcctgcccctgctggaaggaagggatttg

SEQ ID NO: 16960 - DNA, 441 bp, Homo sapiens
  source 1..441: mol_type = other DNA
tggagcgccagcgtcccgagtccctggaaattctcccaagtttcatagtctataatagagagactgagggccgcgtcccagtgggtgacctgacccatcaaggtctaacacctggccgtggcaaagctgcccgatccaccctcccagtgtggggcagggaaaagggtctgattttgcagaagctttttagaaattcgctgtcagagaaactgcagggcgggggaagagtcacccgtcctgcccctgctggaaggaagggatttgccccgggagatgactccgcctgggtcgctgactccgcgcggccgggcgggagggaggtcgaggaggccgctcgcacaaagccgcggagccgctgccccctctccccgccccctgcccggccaacgccgaagtgcggagagcagccgcgggccctttaagggccgcgaggtgcgcggt

SEQ ID NO: 16961 - DNA, 447 bp, Homo sapiens
  source 1..447: mol_type = other DNA
gctttctgggcttccatgcaggccatctggcaagccgcttccccgctctggaaggtggctgtcaccaacatggggggtgagcttggtcacctgctcagcccaatagggaacccgagcacctgtcctgtttcaggtgagtttgagccttgtcccagccacactgctggtaagcggttgggaggcgagatagaaggaagctcgggctcaggctggagaacccgccagggcttggagttggcgccactccgggcgcggtgaggagcaggcaggtgttccgcgggatcgagacccgccccggcagcaccccccactgctttgcatgggcctggggccaggcgcggggctcctgccagggggcgtggccggcggcccccgccccgcgccgcgtgctcacctggggagtgtggcaatcctggcggcgccgagtgttgcccgggccggagcagc

SEQ ID NO: 16962 - DNA, 411 bp, Homo sapiens
  source 1..411: mol_type = other DNA
aggtaagataaatgaccaaaactagaatatttactatcagcacccgggattgcctgtcctgatcaatcaagacagacattactctgcttggtattaaaatagaaccaaacagttggtatttatgtgacttcctgccagtcattgttcaaagcactttacacatgtaatattttaaaattctcaaaataaccatatgagataggtgttattactatccccatcctcaggatcgaggactttactgacggaatactgtaacttctaattctcaggcctgagcattcacgacttaaattcactagtaagggtgcaagtacttagtaggtactcgataaatccaggtctcgctagatggaggaccctcccgcgccctttcggagcgtcggtggcccggctccggctctgcgctcc

SEQ ID NO: 16963 - DNA, 503 bp, Homo sapiens
  source 1..503: mol_type = other DNA
tatatatgtatatatgtgtgtatatgtgtatatgtgtgtgtgtgtgtatatatatatatatatatatatatatatatatatatatgaatgggattccttctgcatgtaaacactcaatttaagagtcttcaggtgtcctggtctcatagggaagtgctaatctgcttctattctttccaaaaagagcaataaagagtcgtctctggtctctgtttatcctttcatgaactgttgcggaatgactttttgcaacagcattgttaagaggttggattccacaaaatggctgaaatccctaccaacataggtttaagctcaaattgccaaaatactgaattattcaatcataaaactagatgagagaaccgtaatgctatttactggataaatatacttcgttatggaaagcaccatgctttatcaatttggcaaataacacatttcattttgccaaggcagaaaaatcctgcgcctccggctcatgcagcgctctccccccggag

SEQ ID NO: 16964 - DNA, 663 bp, Homo sapiens
  source 1..663: mol_type = other DNA
ggataaatatacgttatggaaagcaccatgctttatcaatttggcaaataacacatttcattttgccaaggcagaaaaatcctgcgcctccggctcatgcagcgctctccccccggagccggcaggtgcccaggtgagcggggcctgcggaggcagcgaggggcgccggccgggaaccggcagagggggctggtaattttcaaagagcctcccggcacgatgtcctcgggtcgacttagtacatctcggcactcaggggcccaggcgccgcgggaggtgggtgggcctcccggggctgcacgggtcccacctccctctgcgctctcccaaaccgggctccggcggaggcgtccgttcaagggcgagagcgcggccctgagcggcggagggatccccttcgggacgggaagcgcgagctcgcgccggacgcggccagggccgggaaaccagaaccggaaccggaacccgcgcgcgcgcccgcggttgcgcggcccccacggccgccggcctcctccgctgtctgcgcgcgcgcccgcgagggcctccagaacccggcgagccggccctgcgccgggagacgccgccgcctccgcctcccggaccagggcttccaggccgggccggacgggcatctcccgcccctcgcggggagcgtcggggagg

SEQ ID NO: 16965 - DNA, 385 bp, Homo sapiens
  source 1..385: mol_type = other DNA
taacttaaaattagatgtattcaaatgttttaaggaatatgttttgtaaaacaacatgtttttcattcgttaagcatttttcagtgtttgaggcaaattattttcgcaaaattacatggcttctaggggttaacagaatgccagacataatgcctagggcatagtttgagacctgggattaggcttattggggcagaaaatatttttcctccccccatgggtaatactagcaacaaaaggagatttttttttttttttttgtaaatctgtatttgggaaattcccaatttaaaaatcatgctgtactcaagaagaaaattagggtttttttgatcaattctttatattatatatattttcctgagtgatattctagggaaatgtc

SEQ ID NO: 16966 - DNA, 827 bp, Homo sapiens
  source 1..827: mol_type = other DNA
tcgacttagtacatctcggcactcaggggcccaggcgccgcgggaggtgggtgggcctcccggggctgcacgggtcccacctccctctgcgctctcccaaaccgggctccggcggaggcgtccgttcaagggcgagagcgcggccctgagcggcggagggatccccttcgggacgggaagcgcgagctcgcgccggacgcggccagggccgggaaaccagaaccggaaccggaacccgcgcgcgcgcccgcggttgcgcggcccccacggccgccggcctcctccgctgtctgcgcgcgcgcccgcgagggcctccagaacccggcgagccggccctgcgccgggagacgccgccgcctccgcctcccggaccagggcttccaggccgggccggacgggcatctcccgcccctcgcggggagcgtcggggaggagccgccgcctctggcgattgcggaagagtccgggcctcaaagatggggagcagtccgcggcgctgagagacccgggtccctgtcacctcgggccgcgggacctctccgccggcgccagcggctcgtcccagcaccgggagcctggtgagggcggcgagcacagaaggagccccgggcccgggacatggaatcgcgcgagcccggcgcgggacggccggagacgcggccaacgctgcggccacgagcagccggcagccccagccgggagggagggccccggcccttgccgcggcggggagttcgaggccccgagactccggaggaggagccgacacccgtccgtgagctgatcccgccccagccccggcgggagtcccgggtccccttcccact

SEQ ID NO: 16967 - DNA, 615 bp, Homo sapiens
  source 1..615: mol_type = other DNA
gtttctctttaaatatatagctggcaagttgcccatatggcacacttttcctaaaactatgtaacgggatatgaatacctttctacctaagtatcttgtcattatactagaagcttttggttaactattaataaaaaactgtacaaaggcttctactagttatataacttgtatatgttacttaacttaataaaacaaggctaaacattttacttatagaattattgttaaaattaaatgaattaatgcataaaaagtacttaaagcagatactaaagctactcaagttttagctattattgtaaccattttaattgttaattattgttcttatagataatggatgatgtgtttgaagctatcacctagcacaatttctgattcttcccaaatgaatatttttcagggaagcaggaaatgtgacacaatttactgtattgttcccttatatacaagttccacagaatgatttttttctaataagaattaagaaacctttgttctgatgatgagcttatttaaatttgggtttaatttgatagaaaattaagctgtttccttaatggggaatctggccaatcactcccagggtagaattttttccaggaattaaat

SEQ ID NO: 16968 - DNA, 558 bp, Homo sapiens
  source 1..558: mol_type = other DNA
cacgtgaccgcgcgtcagaaagcggggtcccaagatgttggtatgtatacaatggcccccgcccgaatgccaccagggggcgccccttgctcgctgaagccgccgggaactcctcggggccggggcgggctgcccctttgcgcagggcggtggagtgtgcgggctgcgccgggttccccacctgaggtccgtacctcgcagagcccgcttggccgcgcgcccctagcctctgccgggcgccgctccccagccgggcgcctctcgctcggccccgggcccccgggcagccgcaagtttgcccccggccgcgcggacccgcgcccgccctgcccgcagcagcccccgccgttcccgccgcccccgccgcccccgcgcctgggctcccgggcgacgctccgaggggcgctggggggcgcgtgcagctgcccgcggggctccggcccggccccgaaggggcgcccccccggccggccgtgcgcggggccgcagcagttccccagctgcccgccgggcggcgccccgcgcctcgctgcgctcctcccgcgctccccgcgccgg

SEQ ID NO: 16969 - DNA, 229 bp, Homo sapiens
  source 1..229: mol_type = other DNA
atgtatgccaggccccgagcctgcatgatggtggagtggggacagccccccccctttttttggatggatgaggcgtgggaatttggattttattctaaaataagatcacttttatgatttatatttgaaaaagttattttgacagcttaaaggtatgttttacacacagtaaaattccccgtttataaagatgacttttgacaaagtcctgagttgtcatataaataga

SEQ ID NO: 16970 - DNA, 250 bp, Homo sapiens
  source 1..250: mol_type = other DNA
ttcacttggggttgagccagcaccacgcctattccatgtatgtttctgcaaaagaaatgctatgcatgtgccagcctgacctggattcaaatctcaccctggtcacatttactaactgggtgagtctctcactgggtgggcacgagagccatccccgtcgccatggcaaccccagcgcggttggggaggacccgctcctccggcgccccctcccattcacgcagcggacgtgacacgtgcggcggggtca

SEQ ID NO: 16971 - DNA, 456 bp, Homo sapiens
  source 1..456: mol_type = other DNA
ttccaagaatgtattcttaattcttccataaattctgtgtattacacctgaaattagattggaacgttcaaacaaggcatctctgaaagagcttggttaattagtaacaaagaactacatgtttttgtttataagttaaaggggtacatgcctagatacctgcccttcttgatgatcaaagagagattgaacttctagcctgttcttatgtaataattgattaacagaaaatgattccccagttttactgtggcctccctagggcactcatattagatcacagagtccataggagtatagaataagattttttaaagatttctaggtatcatgaactgatcactaaagtccactttaacgatggaaatgaagtacagctctcgggcattgcattccttttggagataaaatttacgtggaatccaaaatacacataaggacttgttgcagggcatt

SEQ ID NO: 16972 - DNA, 478 bp, Homo sapiens
  source 1..478: mol_type = other DNA
gaagtaatagtaaactaatatttattaagtgctttctatgtgtgagctaggagttacaggctactaccccttcctgggtagacttagagaacttaagtaacttgccatacccagggcgttgtacttactaccattgggcagtattgccatgtgaaaaaaaaaacaaaaacaaacgtggatttttttttttttaatgagcgtgattgatgtttcaacattctggcaatccctggttattagccagggtggtttgtaaatggcttctgtagctgctcaagagcacagataatggatctgttctgtaaacagctaagtaatgaccttaaacttgtgtgttcacagcggaaagaaaacatgcatatatgattttcttctgatgaaacctaatgtattcaagaaaaagaatcttgctttttggaaggatggaaaaattgggaataattttttcccctttgataaaatggatttcatacatttt

SEQ ID NO: 16973 - DNA, 418 bp, Homo sapiens
  source 1..418: mol_type = other DNA
accatgatttttcaaagaatgcagttattatctgcctcctacaaatttaatttttttatgaaatttttaggtgacttgtaaattcttcatgtacagagtcaaatctacattcagtgtaacattaaagacgaataaggcctattctccttctgctgcagactttatctttcaaaatcataaaagacaagaataattattttgcaaacacattttcctgacagatttttggaagtagtttgcttttgtcacctggactgtcccacagcagaaaacacttatgttatgctttaatcataagtggaatggtcacaattaataagatattttatatatggcaaagttttatgaaatgcttttttactattagagacctgtttcttctgttattacagaacacagtgtttatcaactgcttatt

SEQ ID NO: 16974 - DNA, 495 bp, Homo sapiens
  source 1..495: mol_type = other DNA
acactattttaaattcatttgaactttgtccagtatcctatgtacatttgaagtttaactacctttgaagaatcatgttatttttttcccttaaaaatttccccatattatttatgtaataggtaaagtggcccagtttgccactttgaagttgctgagctggtatcatttaatctctgtttaaggaaagtcactctgaaacgacagatcttttcaggaaatcggagctagcaaatcaaagccaattagatctgcgttaaccttggttttcaacaactgaaagagcctccagcctcctcccttggtcaaaggaatgtttgggatggggcgcccgccctccccttagtcagaggacaaagggggcgtggccgagcgcgcggcgcccacgtgaccgcggagagctgcgcgcaggcccttcgcgcgatctgccgtcatatcagcttatggcgccggtcgctgattggctggccgctccagcctcccggcccgcttgct

SEQ ID NO: 16975 - DNA, 365 bp, Homo sapiens
  source 1..365: mol_type = other DNA
ctgcaaaaaaaatattttccttgggcgtggctcagtgcttggtcaccttgagccgccgctggggccctgtgccacgcacaggtattcatgcgtgcgtgcaagcacaccctgtaataattgtccaggtgtggggcacgtagcttgacccctgcaaatacgttgtggcccagtgagtttcccaataaagtggcctcttcattcctgcagggagaacaaggaggtgtgcccgccagggaagggacgcacccccaccggcgctcgctgccttaacttccccatccccgcgccagggaggggccggagtcgccgccgaggccgccgagcgcagaaagtgcgcgaaagggacgcgctgcgagcctcacacg

SEQ ID NO: 16976 - DNA, 487 bp, Homo sapiens
  source 1..487: mol_type = other DNA
ggctcagtgcttggtcaccttgagccgccgctggggccctgtgccacgcacaggtattcatgcgtgcgtgcaagcacaccctgtaataattgtccaggtgtggggcacgtagcttgacccctgcaaatacgttgtggcccagtgagtttcccaataaagtggcctcttcattcctgcagggagaacaaggaggtgtgcccgccagggaagggacgcacccccaccggcgctcgctgccttaacttccccatccccgcgccagggaggggccggagtcgccgccgaggccgccgagcgcagaaagtgcgcgaaagggacgcgctgcgagcctcacacgtgacggcgccgcgccgaaccgagcgggacctggcggcagcggcggcgggcgcagcggggcggcccggagcggcgcgggcggcctggagccccgggagcggcgcgcgcggtcccggcccagcggctctcctggcctcgcgctctcctggcg

SEQ ID NO: 16977 - DNA, 342 bp, Homo sapiens
  source 1..342: mol_type = other DNA
cttgtccctgactgaagacaatgactttgtttccaaacgccccagccaaattcaccaggtggggcatggggcatcaatatggttgtggcttccttttattgacaggatatccactgattgggccgatgtcctaacaaccctttgggttttgcaggatctttgagaagcaaaaccttcctaggccttacggcttggccttctggtccattagtataaccgcatctagaatcacatgaaacttgagatgggttgatctcctgtcttgaggcccagctgggcgggtatgccagccacggagcagcctcggacagcgcggccgctttaagagaggggcggggcccg

SEQ ID NO: 16978 - DNA, 404 bp, Homo sapiens
  source 1..404: mol_type = other DNA
tcatggacggatggatggattggatggatgggtggataaatggatggatggatggatggatggatggatggatggatggatggatggatggatagatggatagatggatggataaatagatggagacagatatatagatttcaaaaatgagtatatctatatgaatgaatgaattcctcccgacaacaattataaattgatgtcagcatagaaataaaatattcccaaaggttgagcaaaaattatctaattgtatttatctaataaactagaaaagtaaaaataagttgatttaccagtactacccacttgtggtaaaacaatttttgtcaccaccccaaaatgttccaccaggaggtgttctgggggcattgatacacatgaggtcacagatctactgcctc

SEQ ID NO: 16979 - DNA, 348 bp, Homo sapiens
  source 1..348: mol_type = other DNA
agacacgaccgcgtcctgaggcggttctgctgcctcccgacagttgccgtagggaaggtgctgggaggcctgccgagctaacccgccccaccccgcggcggcctggcggctccctccaatcccaatcctggggggccgtgagcgagcagccctagtggcacccccggccaagatcccggctagcgccgctatccgccccctccctcccgcggaagctgggggcgcatgcgtagaggtggacgctcccctcccccgcccggggtaactgaggactcccgcgcgcggactcgctgcgccccaccctccctttccccggggccgtccggagagcgggggcgagcttgaaag

SEQ ID NO: 16980 - DNA, 414 bp, Homo sapiens
  source 1..414: mol_type = other DNA
aggggcgggccccttctgggcggaaaccggtctcattgaaccctacaccccaggtaaaacctctgctcaagagttgggttgtgggtctgggagcgtgcagcctccacacaggcctgtttctcgtccgcagtggccccaggggaggctgggagacgcccggcggccgcgtggcgggggagggttccctggcgcgcggggaagtgcccgttgactcccgggggcactggcacctggcgaggcgtgttgagcaacgccccacgccgtctgggtagatgggtgcggttggcacggcaacctggactgcagcactagttctggacctcgcgcgttattacctcttggggaaatattttgattaattgaatttttaaaccagatttttatgtccaagggacctgcagttggtatactctt

SEQ ID NO: 16981 - DNA, 338 bp, Homo sapiens
  source 1..338: mol_type = other DNA
cccgtccggccgccagcctcctgccctccgcgagcctcctgggccgggttcccggagcccgggcgcgcaggccctggcaccagggggattctgctccctctgcggggtggtggtgcagagcactttgttccacggggctgtgggtccccttcccctggagctctgctcgggacctgagggagcggtcggtggggagagccctggtcggccggccgctggctgccttcgcacccacttccgcgccccgccgtcggcctggtcagtctggtggctttacactaacagcaaggcctcgtccatgggctctcagccgaggccccaaacgccgcgcgggaggg

SEQ ID NO: 16982 - DNA, 350 bp, Homo sapiens
  source 1..350: mol_type = other DNA
gttggaactcccaggccccagcctggaggatctgatttaggaggagcctcttccccattctcagtgaattccagctagagaggattggtgatcatgaaagagagagctgtgcattctgtgtgcagcacactgcctgggagcacgcagccctgcttgccccgccttgcggggtcccaggcactcaccacgggcctctgagttaggtgtgcagaggacctagggtccaggttcccctcccccgcaggggtggggcattttaacgcagcttctccccaaagcagctcagagctggtatgaggtgagggtggggggcagccggccagcctggctgttgacggcaactccagggc

SEQ ID NO: 16983 - DNA, 191 bp, Homo sapiens
  source 1..191: mol_type = other DNA
atgctttgtaagtcatgaatgactttcaaaatattattaatatcgttgcttgagtactaatactcttgctgtctgtgagagcctgacctacactgaagaggccctcgtcccaggcctcgggccgtgagagagccgccatcctttgaaggatgcacgactctctttagagccaggcagaaatacgggcctgt

SEQ ID NO: 16984 - DNA, 425 bp, Homo sapiens
  source 1..425: mol_type = other DNA
ggaaagcttccccttttggaaagtgtcaatttgagtttatagttgaatgtaaagtttcaggtttcccttctatctgctttattaaaaaggagtaatgggaagggaagaggagtcctcttgggcccccctccccttgtggatcacctcactgagtgatgaggtgaagacaggaacaggtgcgcctcatccctaccttgctgtgtccggggccaattaatcaaggcgcgtacggcgcctcttcccggagctacacccggcaagtccgtgcgggagcagccgagggcggcggtgcgcccgagctcgggggaggtggagcgcgcgagcaaagatatcccggctggaagtgtctgcgccgctcccggctccgcccccgctcggcgcggcgctgggcctgggaggggcacgcccatcagggggtagccgcc

SEQ ID NO: 16985 - DNA, 368 bp, Homo sapiens
  source 1..368: mol_type = other DNA
ctctaggggtgggccccagcaatatgcgtttaactagcccttcaggtgcttatagtaagtttgagaaccaccacgttcatgaaagccattgctggcctaaatagaactgtttcacattttaaatctgtgccaaatttactgggaaaaaaaaatgttctactgcaatatagtatatacacagtttggtcctaggaggaaaaattgaagtagcttcctggatcaagccccacggggcagcttggaagagaactgctccactagcattccttctctaattgagagcctgggatctagcgctgctccccaggaccaaggttgttcaagaaaggctgggtccattcattgttcagaaaaacaaaaattagact

SEQ ID NO: 16986 - DNA, 202 bp, Homo sapiens
  source 1..202: mol_type = other DNA
taatcaactttggttcgaaagaacagtgataccataactattttctttctctcagagtaacggtattattatgcccgttttatatgctgcccttttctaccatgttgcagcggaccctcttctccttggggagcactgagccgcaacccgcggagggcgcctcctactcggcgagaaggcggggcgagcgatcgcttccggt

SEQ ID NO: 16987 - DNA, 389 bp, Homo sapiens
  source 1..389: mol_type = other DNA
taaacaaaatccctaggtagtaggaagcattattatctctaagaccacacagctactgagtggtagagcaccctaaagccttcctcataagattaagtgtattgttgagtattgtgcttaaaaatgaaaacgataaataataataataataaaaaaaagtctattttgagccaaaaggcaaattttttttttatcgaaaactgtaattctgtcaagaaatgattgtccatgccttataaatgagattgggctataatggtgggacctcccaatgggaactagctagctaactatttatctcaatgaaattggacctctttagtcatgcacgtctaacttaattcaactacatgtgatgtcagatccctatatctgatagctctctcagg

SEQ ID NO: 16988 - DNA, 297 bp, Homo sapiens
  source 1..297: mol_type = other DNA
ggccttagagagtgtggtgcacagactgcaacactagagacaagagtgcccgtaagcttgttacatatcacaatttgagagatggggaaagacttgcctgaagtcacacagttgagtactcctaggtctccagtggaggagtttctcctccgactttgtaaagaaatctgggcccagagcgtggggactccattcctacatggaggggggtcctggctccacagccctccttctccgtggcaccaggcccaggtaaggcccgaccctcctcccctctaattagcagggcctggctca

SEQ ID NO: 16989 - DNA, 637 bp, Homo sapiens
  source 1..637: mol_type = other DNA
tatatataaagtatattgtgtgtgtgtgtgtgtgtgtatatatatatatatatatatatatataaaacttttatagccactaagattcattagatctcaaacttggggagagttatttgtatataacaaatatctcacaaaaacaagtatataaccagtatataacaagtataagagaccaaaatcaagctgtgttttccatatgtatcatctttatcctatagattctcgacagcaatatgacactttaagtctcagatttaatacttctaatgtcctttagccaggtaaatgagcatagacattctcagttacttacatcgttaacccaaacatttggtttcaggatcccataagcgacccatgacaggaagacttgggcttccctggctagagcttctctcatatctttccccctgctgtaggggaggggcaacttgagagataaggtgtcaatgatataatctccataaagctttgattaacagcgcttttacaaaaatatgcagtttttaatgtcattcctgttctctgattgttccttagcaaagagcaaagaaaaaaaccaaacgttccaaagtcgaagacttttcctttgatacaaacaagcgaaagttcgattatttgttcaataatt

SEQ ID NO: 16990 - DNA, 413 bp, Homo sapiens
  source 1..413: mol_type = other DNA
cttttcttccccctagatgtgatacatgtatatgaaaataaataatacagaacagcaaattttttttttgagagaaaaaactagagagttactgaatgccatccagccctatcttccctaattttaaatagaccttggttgtaaagttagaaccatatacatgtacatattatgtacagaaatacacttctggtttcactagacaaacatttactgagtgcctacttagtgctagtattaaaactgcgtgttaccagctcctgggaagatgatagcattaggaggccctgcaaacacatttctgagtcccagcacttgggctcactttgtcctacagtctgggaaagcctgtctcgttggttcaactatagtacccttcagctaagctgccgacaccgggacgtaacttccgg

SEQ ID NO: 16991 - DNA, 283 bp, Homo sapiens
  source 1..283: mol_type = other DNA
gattttgaaatcccagcctctaaagttttagaattcttatatttctaagcagcgtacaggcgcgcgccagggctgcctcggctcccaaacggcccagggctccgaggctgtgtcagaggaagtggggaagcggcctcacctcctttctctccgagctccgctgctgggtaaccgttttttctttaaaaaaaaaaaaaaactacggcccagtcctgaggtcgcgggaggctgcgaggactgcaaaagggtggagtcggcctcgcccccgcccaggccccgcccc

SEQ ID NO: 16992 - DNA, 500 bp, Homo sapiens
  source 1..500: mol_type = other DNA
tattcgaatggcaagaggggttgtatttcttagccctgataacctccccaagggcaccactgaggggagattcagtcacctgtttccaaataggaccccgaaggctgggcacatttgggtccctgctcacaggctgcatgtcaggggttcaacccagcagactcctgcagaccgggcctcggtcggagacgcgagcccctagcctagctaggttccttcgtcgaccggaaaggggcgcggatccgtgtcccgcagaggacacggggtctcggagcccgcacaggctgaggggcaggggtccggccgagccgggccgcctcacctgcacttctgtccccggcgcgaccatgcttgcaaggatctgaccgccgccttgggttcccggcaggggcggggcctgggcgggggcgaggccgactccacccttttgcagtcctcgcagcctcccgcgacctcaggactgggccgtagtttttttttttttttaaagaaaaaacggt

SEQ ID NO: 16993 - DNA, 323 bp, Homo sapiens
  source 1..323: mol_type = other DNA
gaattctctacacttggcagcttttgtcttattctgaggcagcagatcaacttcttccaagtctgtgcccatatataaatacatacaaaataggtgttgtgcatatatgatgttgtttgaattgtccgtgtgcgtgcgtgagcgcgcgggcgcccgcaacagggtggtacatctgcctggcagtctgccgcctagcaagccaggggattgcagcgcggcgcagagagccgcgagagggcgtggccctccctccacttctccccgccccctgccggaggctgctcctgattggcttcccggccgcggggctcaggttacattcg

SEQ ID NO: 16994 - DNA, 431 bp, Homo sapiens
  source 1..431: mol_type = other DNA
atgagggctgattctagcaaggggttcctggaaagtccctatggtcgtgtgacttctcccgatccctgagggcctaggcggctcagagtataggggtgggtttcaacctaggtgcccctccacttcaccccaccagcccattgttgggcaagcggaggccttgtgcggccacagccccaggagcccggcgggggggagggcgggaccgacaggggcggggcggggccgtggaagactcctcctaccgagcctcccaggcgctgccctcaacagtgcgctgcttccccccggatccaaagtcttggggctaggctggagggcgccccttttagctgcgcacagaacgaaagaactcgttttttctttaagtgcttagggcgccctccgcagtgcgcgcaggaaagcgcactgaggctgcggaggcagagctg

SEQ ID NO: 16995 - DNA, 427 bp, Homo sapiens
  source 1..427: mol_type = other DNA
ctcttattaaaactaacatgaaatatgtgttgttttcatttgcaaatttaaataaagatacataatgtttgtatgagataagaaacaagttgccttttcaaactaagaattcttgaaattgagcttcaggaggatgcaaagtggaccccttcccaagctgtgtacccaggaggcttccccccacaggcttagagcagctcttctagtgtttagaagggtacctcatctgcttcctcttcagggacaggggagaggaagctcacgtgggctcctctcccaagagatctctgttctaaaatggagtggctctggaaatggagagatgctcatttctacagagactgcctggggctcacactcacagtgaggctccgaggtggggactccccttgccagctctcttttcccaaggccggacagcttcaga

SEQ ID NO: 16996 - DNA, 544 bp, Homo sapiens
  source 1..544: mol_type = other DNA
agaagaaacggagggactgtcctgtcttccttcccgtacgccgctcatttcaggggctaagctgggagcagcacgcagtatgaggcacaggccggggtaatcctccagcctgggctggcggagcgctttttcctgcccgcgggtgaagattccccgctggcgcgtcccggggcgccctgggctcccgcgcgacctctgccgtcgccctcgctgccgcgctccggtggccgcgcagcccccgcctccaggaaagccacccgctgtgccagggagcccgcgcggccggcgctccggcctctccctgcagctggaaaacgctcttcctccttcaggaagaccgccctggggccggggatgcccttcctatcccaccccggcggaagggaaggttacggctcaggatagttctggagcctcctcccctccctgcgtccagacctggaggaggccgcagggtcccgccgtccgcgcgctgggggcgcccccgggcggcggaccccgcgcgccccgcccgggaggacggcgacctctccgccccctcgaa

SEQ ID NO: 16997 - DNA, 469 bp, Homo sapiens
  source 1..469: mol_type = other DNA
ttaagattttcagctttgaaaaatatggaaatacggtacagctgagttccagcactttaaggtcacagagctgtcataattgacagtgttcggagtttttatatgctcaatagactaatgtaatctaaaacaatagtttataactggaattaaatagttgctgttctttaattaatgagatacgtcagcctctgcacctagaggccggcttagagggagagagagaaacggtctattcctcccccctcgagggcctcacccctcctcccgggggctgagattggagaggaagtgggaaggctccaatctcggggcttcggcgcgcctcgtccccgcccttcgccccgggagaggagcgggcggcgtgggaccaggggagtggacgacctccgcccggcagcccggagccatccgcccgcgggcgagccaggcccgagggcagccccggagaccgcggtggccggatgcg

SEQ ID NO: 16998 - DNA, 383 bp, Homo sapiens
  source 1..383: mol_type = other DNA
ccgatttgaacagatttgcactaattttgcagcaatcatgcctttacaaaaataatattatctttgtttttgtccaaggagcaggactcccgggtcagggcgcgccgctccatcctctggcctcctggctgcagaccaaaggaccagagggcagagaggtggacctgtcttgttccgtcgccaaacccctagacttgggaggcaaggagcattgcttgcgctttgcctcagtttccaaaaggttcgggaaaagagaggtctctcgccgcgtccagaacggaacgctgggcttggggtgcggggcggggactccaactcgcgcgctaattaatcccttaattacgccgtctgcccagctcccaggggactccggcactaggggg

SEQ ID NO: 16999 - DNA, 433 bp, Homo sapiens
  source 1..433: mol_type = other DNA
atgttactggcccagcccccagtggccccccacagggagtggcggtggccttggggggttggagccttaagtttcccggtgaggctaagaatcccatttctgactctaaatccgggactcggcctcccaatgctccgaggactggtgcccggaccctggtcgcggcggccaccagcgcaggcgtgggcgtgcccagtgccccagtgctggtgcagctgcgtgacgggggcggggcaagccccccactggggtagctgtgcctgccgggtcgggaccacagcgtccccgccggacctggagcccgggctggaggtgggcgcggggctgcggctggcgagggtgctgcgggagcccgccttcctcgcgggcagcggcgcagcctgcggggcgctgcttctcgggctctgcgccgccctctactggcgccggaaac

SEQ ID NO: 17000 - DNA, 476 bp, Homo sapiens
  source 1..476: mol_type = other DNA
tggagccttaagtttcccggtgaggctaagaatcccatttctgactctaaatccgggactcggcctcccaatgctccgaggactggtgcccggaccctggtcgcggcggccaccagcgcaggcgtgggcgtgcccagtgccccagtgctggtgcagctgcgtgacgggggcggggcaagccccccactggggtagctgtgcctgccgggtcgggaccacagcgtccccgccggacctggagcccgggctggaggtgggcgcggggctgcggctggcgagggtgctgcgggagcccgccttcctcgcgggcagcggcgcagcctgcggggcgctgcttctcgggctctgcgccgccctctactggcgccggaaacagcgcaaagagctactacacgggtgagctcccggcctcggagcggacggatccgggagggagccaggcgcgcttagccgcactcgaggagctgccaggaccc

SEQ ID NO: 17001 - DNA, 240 bp, Homo sapiens
  source 1..240: mol_type = other DNA
gcgccgccctctactggcgccggaaacagcgcaaagagctactacacgggtgagctcccggcctcggagcggacggatccgggagggagccaggcgcgcttagccgcactcgaggagctgccaggacccaggatcccaggcggtccagggtgcagcctcacaccggcaggtaagccatctctgccccagtggggttcagaccccccgggacgggctcagagggcctctctggagcccccg

SEQ ID NO: 17002 - DNA, 368 bp, Homo sapiens
  source 1..368: mol_type = other DNA
attgtaggctcaaaacctgcaaggccgactggaaagactcttaaaaggtcttttactccaaccacctttccagaatgttggctcagctttacggatcactcataatgagtcaggcactggatgccagatccctcaaggtaggaactactattattatttccatttggacacaccctgtggtaatctcccagcttgtcccagagtccatctggcactggggaaatggatgagggtgttacaatccacccattaggagagtttctctggtctcctcccaccaaggcactgagggccaggcaggaagcatcggtttcctcaaagccgcttcccctcttcactgtgagctcagagcagcaggacaaagtgct

SEQ ID NO: 17003 - DNA, 211 bp, Homo sapiens
  source 1..211: mol_type = other DNA
gggagccatagacatatgggaagaggtgatctccaggcacggggcatgtgcattcctcgggctgcaggagcctctggggctctgtccctgcggtgcactcaccctgctgaggttattttcccctgagggaaacctagtggagtaaaatccagttggccttaattagtgtctgctgacagtgacattcttgataagctgatagtcagggaga

SEQ ID NO: 17004 - DNA, 378 bp, Homo sapiens
  source 1..378: mol_type = other DNA
ttccccattttacagatgagaaatagtagagctagagtgtttctcctcttcacagcctcaaaacaggagggcacagctaggctgttaagctggtaaccagacatgttctagaaaattgcctgaataacaataatagaattcaagctgttttccatggcatgtaccctcctcctcagggagaagtaagtgtgtgtcccagctcagtgctctgagcccagatcctcatctccctgggtagtgaggctcagcacagacaagcaaccaactgctgggctgccggtgccccccatgttggaacctgattatctcctaagcagatacctgcttccaaactggggatgtagggcttatacacagagctctgtgtattcagaggga

SEQ ID NO: 17005 - DNA, 385 bp, Homo sapiens
  source 1..385: mol_type = other DNA
ccctctgccgaggctcagaagggctatgtaataatgcttcagttctagaaagttgacctactcaggctttctccagtatgtaaaaagaatatttagagagataattgctgcacttacagaagtttggtctcccaacaaggcaatttttaaaaagtttaaaacatcatctctgtaacaaaggatttgctaggtactttccccattttacagatgagaaatagtagagctagagtgtttctcctcttcacagcctcaaaacaggagggcacagctaggctgttaagctggtaaccagacatgttctagaaaattgcctgaataacaataatagaattcaagctgttttccatggcatgtaccctcctcctcagggagaagtaagtgt

SEQ ID NO: 17006 - DNA, 467 bp, Homo sapiens
  source 1..467: mol_type = other DNA
gccaagcccagaccttgcgcgtagggcctgggcactcctaggactcaggggaatacttccctgggttcatgtacaagctgaaatcttcaggctagaggcaggtccctgcctggtggctgcttgcctccagaaaggagagcagccccagcctgagcctgtggtgtgtttggggccgaatattgtcccccccccgcccctgcagggccgctgagtgtgacttcgcggggtagtgcgggcaggcaggcacgtcacaccggacagcgtttgctgctttcggttccccagcgggtggtgaggcagaaagtgctgaggagccccagcacctcagagctgtcgggcagtggcgggcgctgtcgactggcgggtttgcgctggacccgaccccgagggcgggcgcaagggggcgggcgctgccgtactcaggccgcggggccagggcgggccggccggcggggcatttaaacccc

SEQ ID NO: 17007 - DNA, 508 bp, Homo sapiens
  source 1..508: mol_type = other DNA
cgagcgggaaccggggctgcatgcagcgcttgcgggccagctggagttccgggtgggcatgggcttggcgggcctgcactcggagcagccggccggcccttccggccccgggcagtgagggacttggcacccgggccagcggctgcagagggtgtactgggtcccccagcagtgccggcccacctgcgctgccttcccgcggggcagggctcgggacctgcagcccgcggtgcctgagcctcccacccgctccatgggctcctgtggggcccgagcctccccgacgatgctccagggcgcccagtcccatcgaccacccaagggctgaggagtgcgagcgcacggcgcgggactggcaggcagctccacctgcagccccggtgcgggatccactaggtgaagccagctggtcctgctaacacaccatagtgtgtatctagctcaaggtttataaacacaccaatcaacaccctgtgtctagctcagggtttgtgagtgcaccaatcaa

SEQ ID NO: 17008 - DNA, 439 bp, Homo sapiens
  source 1..439: mol_type = other DNA
tcttttggtctaacaggccatagcctcaaagcaaagtcatggcaagctttagttggcagttaggtaacagcagtctgccaatagcgtgggccagctccagttccagcagcctggcggcagaggggttccctccaggagggttgttggggacacttaatgaccgctacaccacatcttgcgccccactcgagctagtgggttggggcattgatgtctagatgactgtgcagttctctggagtgagatctgagctgcctggccctgctgcttcgctgcctggatgacagcgagtgaggccggaagaagtctctctcttccgggggggcggggagtgcagctcggaccgctgctacccaaccgaactgaggtcgggacgagccaacccaccgcgctcggcgttgccgggagccgcgctaggcggtgaatcttaaatcaccta

SEQ ID NO: 17009 - DNA, 475 bp, Homo sapiens
  source 1..475: mol_type = other DNA
acatgcctgcttttgtcttccactgtagagggcatgtaaggagcccatttctccctgatagcaggcccaggctgaaacagcccagctggtccagaactctgggaactcactgagtttcttgaggactttttattagaacttgcctgacatttgcaaagaagtgctttaatctgacaccttttctggggccagggtaatgagaattattcaaatgcatgggagttctcttggggtccacagaaaatctcacctggagggtgctccagagttcctgggggtccaccgcactccccatccgaggctcctcgcgagcggagccgcttctccaggccgcccgcctccctgccgcaggagcaggcccgcgcccgccgcccgagagcctccggtagagggagacactccagcggctcctccgacttggcagcggccgggccgggagtgccggggggcgggtccctgtgccgctgacgtcccg

SEQ ID NO: 17010 - DNA, 450 bp, Homo sapiens
  source 1..450: mol_type = other DNA
ccttttctggggccagggtaatgagaattattcaaatgcatgggagttctcttggggtccacagaaaatctcacctggagggtgctccagagttcctgggggtccaccgcactccccatccgaggctcctcgcgagcggagccgcttctccaggccgcccgcctccctgccgcaggagcaggcccgcgcccgccgcccgagagcctccggtagagggagacactccagcggctcctccgacttggcagcggccgggccgggagtgccggggggcgggtccctgtgccgctgacgtcccgctgatgaagattggcatcaggtaagctgtcattcaccgcttttgcaggcggcggcggcggcgcggcggcggctgctgctgcgggcggctgcctcagagcagcgcgaggggcggcgaggccgggcacggaggctgcgagagccccgcgggcc

SEQ ID NO: 17011 - DNA, 664 bp, Homo sapiens
  source 1..664: mol_type = other DNA
cgtccagctcccgcgcgtgccagttgggtgggtgcccgagcgcgggcgcgcccccggagcccgggcacgagcgcggggaaggggtggggtggaggcgggagcggagccgggcgccgccggagctgcgcggggagcgctcgctggctggctggctggctggctctccgctgcgctgcgctgcgctccggccgctcccgcggcccgtggatgggggtgtccggctgagccccgggatccgcctccctccgccaggacccgcacaggtgccgtcgcgggggttgcccccgggattctctgacaggacggtctggggtcgccgcagctcccctcacctggtcccattctgggattagaaaggaacaacgggaggccgtcgccttcctgcccagcccttcagggagcgcagctgggacgccgcgccaggccctggaggggatgatgggcacttccagtatcatctcagcatcggccctccagccaggcctgtgcccgcgtgtgtgcgcgcgtgtgaaggcacgccgcccgatcgcgctggggcagtgggtcggtacctcgtcccgggaccgttatctggtccagtcaccgtaaacgccccaagtgcggagccttccccagaccgcgcattcctgcagtgtcagaaccgctggcagcggccgcagacgcc

SEQ ID NO: 17012 - DNA, 312 bp, Homo sapiens
  source 1..312: mol_type = other DNA
gacaaaagtacttggggattattagattttttattgacaacttctataagcacaggcctatgcacagtagacaagataaattaataatttttcacaagaccccagttggagctgggagacgtcgctgggcctgcccgcctcagcctccagtaagtccaaaagggtctttgagtgtgtctgccggcatccgccagcagccatcgtttctgaatatcgtccagctcccgcgcgtgccagttgggtgggtgcccgagcgcgggcgcgcccccggagcccgggcacgagcgcggggaaggggtggggtggaggcgg

SEQ ID NO: 17013 - DNA, 352 bp, Homo sapiens
  source 1..352: mol_type = other DNA
ctagctgtgtcacccaggctgaagtgcagtagctgggaccacagttatttcattttttaaatttattattattattattattttgagactgagtcttgggtgcagtggtgtgatctcggctccctgagtagctgggaccaaaaatgctgggattaaaggcatcctgttactaatttcacaggagaggcgacgcggaggggtgaggggtcctctccgccgccaggcggagttgggagccggacgatcccgcacgcagcgcgaggcgggaccccggacgcgcggcccaccccttcggctctgggccccgcctcgtggtgccggctggcgcgctcgcccgacttcccagcggccc

SEQ ID NO: 17014 - DNA, 188 bp, Homo sapiens
  source 1..188: mol_type = other DNA
gcggggctccctcagccaaccctggcaggagccgggtccgcctcccggaccgctcccccgttggctggctccaggccaatagaggtctgtatgctcccgccgagctgtcataggccggcgcgtaaagcagtttggttgcggacccacggggagtcgcagtgggaaggcgcggcccactgactcccgtc

SEQ ID NO: 17015 - DNA, 418 bp, Homo sapiens
  source 1..418: mol_type = other DNA
gagcggctctctggccgccgggctgcctcccggtctcccgaggaagcccgcttgctgctggggagggctgtgcctccgcggcggtggctgtctcagctgtgaactctgtcaaggttcccaggtccatcgcagacgaactgtctggaccagtccgcgtttgattatgagaataaataggctttcaccttgtattaggtaacaatttctaccttaaaaacggctccgcattccgagttactgggacttggagcaagggccgacgggagtcagtgggccgcgccttcccactgcgactccccgtgggtccgcaaccaaactgctttacgcgccggcctatgacagctcggcgggagcatacagacctctattggcctggagccagccaacgggggagcggtccgggaggcggacccggctc

SEQ ID NO: 17016 - DNA, 360 bp, Homo sapiens
  source 1..360: mol_type = other DNA
cctcccaagtagctagggctactggaattacaggcaggagccactgcgcccggccagtgctttgcacattaaaaatgaaaaagtttgtagtcttcctgcaaaaagaccgggctaaagcattgttttggagctggttcaaaaagcaaaggaaacttgccccgccacacacacttgactgcgtggccacagcagctgctgctggtttcagcactctgcttcaccgactgtgatcctcacagtcctgtccaggcccagagcggccaggagcgaagcccgcagccccgcctggaagcgcagcgcggtcggtcgcgcgcccctgaggcttggaggcctgggcttcccccagcagcgctcgagcac

SEQ ID NO: 17017 - DNA, 461 bp, Homo sapiens
  source 1..461: mol_type = other DNA
ctttgcacattaaaaatgaaaaagtttgtagtcttcctgcaaaaagaccgggctaaagcattgttttggagctggttcaaaaagcaaaggaaacttgccccgccacacacacttgactgcgtggccacagcagctgctgctggtttcagcactctgcttcaccgactgtgatcctcacagtcctgtccaggcccagagcggccaggagcgaagcccgcagccccgcctggaagcgcagcgcggtcggtcgcgcgcccctgaggcttggaggcctgggcttcccccagcagcgctcgagcacttgggcccagagcttctccccgactgcaaagcagccctgggcgggagcacgtcacccttttggagccgccgacattcagaggggcaggacacgggaacgcgcgctgtcttgctttacggcgcgggtgcgcgagtttgcggcagcgtgacgccctcaagtt

SEQ ID NO: 17018 - DNA, 370 bp, Homo sapiens
  source 1..370: mol_type = other DNA
cagcagctgctgctggtttcagcactctgcttcaccgactgtgatcctcacagtcctgtccaggcccagagcggccaggagcgaagcccgcagccccgcctggaagcgcagcgcggtcggtcgcgcgcccctgaggcttggaggcctgggcttcccccagcagcgctcgagcacttgggcccagagcttctccccgactgcaaagcagccctgggcgggagcacgtcacccttttggagccgccgacattcagaggggcaggacacgggaacgcgcgctgtcttgctttacggcgcgggtgcgcgagtttgcggcagcgtgacgccctcaagttccccggccccgccccggcctttgggacgggtggggc

SEQ ID NO: 17019 - DNA, 258 bp, Homo sapiens
  source 1..258: mol_type = other DNA
gctgcattgtgccctgttgcaacctgcatccttccagttgctgctcttctcatatagagaagatgctcctagcaatacacgctttgccctaagcatgggcacaagctcttctatgacaatgaagactaagctgcaacgttcattacaatgcactgaatgcatagcaatacagtgagaaactttactctcctcatggtgaatgtctgtagttacagtacagtatagtgaaaggaagagaaataacagagtcattgattt

SEQ ID NO: 17020 - DNA, 224 bp, Homo sapiens
  source 1..224: mol_type = other DNA
ttgctaccaagttgcagctcaaaacgcagctttaccatgttgataaaggtctgtatgaaaagactatttacaccctaggcctaagtagactcagtacatctcattgtcaaaaacacttttaaaagacagtagatatcttttaaactttattacaaaaaatatgtgctttttggtaatactttttttttttttttaatgggttacttctgaggttctagaagaag

SEQ ID NO: 17021 - DNA, 306 bp, Homo sapiens
  source 1..306: mol_type = other DNA
aagaaaccccttgctttgttctagcttatcattttctagagattaagcagaaaatgctgctctgtctgagattgctcataatgacaaagccattgccggctatgataaaaactctggattttctttcaaaggtaataaaaagttgcttggtccaggcaagacatataaaatgaaagttgaaaatactttttaaaactctgcaatatttcaggaacattaccatttcattttcattagaggatttgcacaaaatcaaagtgagtaccctctttagaatgctgtgcaattttatgattatataattta

SEQ ID NO: 17022 - DNA, 611 bp, Homo sapiens
  source 1..611: mol_type = other DNA
ctgatgtctaaaaaatgtcagactcaatatatttcaatgatcatatcattcctacaactaaagaacatgttgttaaatcagtttaatatggaatacttaaccaagcaccatcagccattgggctggtggtttaggtgaatcttaactgagttagctttcataaagatagacatctaaatcatgaacaaaactagccagattcaaaatataaatttgctaaagatcaagtcatggaataattctagagaggatttaatggctctacaaagtaaacagtcgctggccttgaaggacagatttcttgtaagtagaagagttctcataatgtgaggagccactgtgttgtatatacaatttctcaacaaatatttgttgaatgtatgaataaatctcagagaggcattgaatcacggtgtctagaaaggaagtcatactttgagtaacagcactatctcaggtaagcttctggaacctcaacaattgaaattgggataagaataataatatcaaaagtatatgtttttaaaaaggttagctccatgcaaacctcaacatttattaattttcttttttctctgccttggtgacaggctgaagaaagttttctctct

SEQ ID NO: 17023 - DNA, 111 bp, Homo sapiens
  source 1..111: mol_type = other DNA
catttttgcatcgctataaagatataccagagagctcacgttctgcacatgagggatttacatttcaacatgagatttgagagtgagaccctgtctctgctttataaagca

SEQ ID NO: 17024 - DNA, 218 bp, Homo sapiens
  source 1..218: mol_type = other DNA
gccagggtggccccttcaatctcaggtgtttagattaaaatctccttactaattaagtactgttttattttcctgctgattatcagaactaaaatttggctttggaggtaggaccaacgctgtgcctcgaggattcctgctctttgctcctagaaaatgacagaaaacagcattcccttgtgctatattctcagttactattttcctgaactgtaaaa

SEQ ID NO: 17025 - DNA, 425 bp, Homo sapiens
  source 1..425: mol_type = other DNA
ctccaggcgggagccccccggactccccgccgcgctatctgagaagcagaactgttcaagctctataggctttttaaagcttttattctgaaatgtggtctcttgttaaaaacaagatccctggatccctggtactaatgctaattgtaattttgagattttgatcagcatttctggaattgggggcaaaaataattatcatattcatttcagcttttaatttgaattctaatagtaaatgttatttaactaggtataaaatcgagccaagatcttcaatcttttagttttcgtataaggatagcagaatttgaaaaattaccttttttctattattttacaggcccagattctgccctgtgggcggagaatcaggtagattctagcaccaagctcggttctcagaactggcgcctgcgcagaag

SEQ ID NO: 17026 - DNA, 341 bp, Homo sapiens
  source 1..341: mol_type = other DNA
cgtgtgttaattaaaaaattaaaaactaggctgccgcctgcagtcccactgcagtgagcagtgatcacgccacttcactcataaatagcattcctcttgataaactttatattaatccaaagggaagaacaaaataatttgaaaattgtctaagtggggcagcagagcacttttgtactccacagtctcatttccatacggcaatgctttcctgaaaagcagacaaccgttcagcagtgtgtccatttgtcccttcccctgtggaaccggcagccggccgcgccgcgtttccgagaaagcttctgcgcaggcgccagttctgagaaccgagcttggtgcta

SEQ ID NO: 17027 - DNA, 406 bp, Homo sapiens
  source 1..406: mol_type = other DNA
aaaataatagaaaaaaggtaatttttcaaattctgctatccttatacgaaaactaaaagattgaagatcttggctcgattttatacctagttaaataacatttactattagaattcaaattaaaagctgaaatgaatatgataattatttttgcccccaattccagaaatgctgatcaaaatctcaaaattacaattagcattagtaccagggatccagggatcttgtttttaacaagagaccacatttcagaataaaagctttaaaaagcctatagagcttgaacagttctgcttctcagatagcgcggcggggagtccggggggctcccgcctggagggctgtgtgagcggcgggccgcggggcggcgcggggggcgctctccactctgcggaagctgccccct

SEQ ID NO: 17028 - DNA, 434 bp, Homo sapiens
  source 1..434: mol_type = other DNA
acatttactattagaattcaaattaaaagctgaaatgaatatgataattatttttgcccccaattccagaaatgctgatcaaaatctcaaaattacaattagcattagtaccagggatccagggatcttgtttttaacaagagaccacatttcagaataaaagctttaaaaagcctatagagcttgaacagttctgcttctcagatagcgcggcggggagtccggggggctcccgcctggagggctgtgtgagcggcgggccgcggggcggcgcggggggcgctctccactctgcggaagctgccccctagccttccagcgcctgcgcgccgcaccgcggtggtcgcgggcgcggacgcggacgcctgccccctaaggaagcccattggccagcggatggggccagcaccgcctcgcgccggtggtggaagcac

SEQ ID NO: 17029 - DNA, 549 bp, Homo sapiens
  source 1..549: mol_type = other DNA
tggcctccagactcccctgcctgggcctgggggctgcagggcactggcagtggagcctgctccagcctcacccacttccccctgagggacagccctcctgtgcagtgcatcccagccctgaggctgtgaccctgctctgtgcctggcctggggggcttccgcctgcccaactgcagtgggaagggcctcagggacctggccctactgcccccagcaacagccgtccccagtggcagcgtcttcacctgcactggccagcacccagccctggcactgccctctgcacagtctgtgagtggacacaggaaaccccagggctctgcctgggatctgggtggctctccagaccgcaggctcgaggtgggcggcactcagctctcagtgtccctgcctgcagggtcagcaggctctcaccgctctctctgccaagtgtgcagagagaaaatcaaatcataataattgttccctggcacatgatcaataaatgatgagtgtgtgaatgagtgagtgacagggggatagggtggaactgccaagcccttcctcctt

SEQ ID NO: 17030 - DNA, 454 bp, Homo sapiens
  source 1..454: mol_type = other DNA
ttcacaaagtatcgtatttacgcttcacagcaacattttgaatagaaatttatttttcctttttctgtttgaacaactgaagttcattgagttcagatacgggcctgaacgaggctagggcggggcccgaacgaggctagggcggggcccgaacgaggctagggcggggcctcgacctgccagaagagccgtctctccgacttggtaaggcaactcacccaatgacgaggagagggtcctgcccagagcgtgcccccctccgtcacttgtacggcccgtgcccccgccgctgatctggcaggctgcgcgcgcacactccggccgggtgcgggccggcggggcacagcggcctctacggcccgcctcgctgctcgcgtgctccgggccggcccagcaccctccgagttacgtgcccgcgctccccggcggggaggagcgcagccgcgggggcgcg

SEQ ID NO: 17031 - DNA, 368 bp, Homo sapiens
  source 1..368: mol_type = other DNA
cattgcactccagccactccgtcttaagaaaaaaaattgtgttttttttttccgtcctgttctttccaggggctttacaaaaaccctcacactttcaaagcatttctttttaaaattcatcctgaagttcagtactgagtatttataaacttaactattattagggatccttttgtagttaagcctgagtgcttttcacaaagtatcgtatttacgcttcacagcaacattttgaatagaaatttatttttcctttttctgtttgaacaactgaagttcattgagttcagatacgggcctgaacgaggctagggcggggcccgaacgaggctagggcggggcccgaacgaggctagggcggggcctcg

SEQ ID NO: 17032 - DNA, 281 bp, Homo sapiens
  source 1..281: mol_type = other DNA
taaggcaggtatatcccaagttatttttaacacggagtcgcctgcaggaatcccaacatcgcatctcgtgagaggaggtatggtaggaaaagtgaaggtctgtgctccgttctttcagccacagtgcttcctaaggtccccgacgcgtcccgcaggggactggcgcaggagaaacgtttctcagaccagtgctcttcttcgttgagactgctccagctgcagctaccggccggcgcagccgcactgagcgcgcaccgtccccacgtgcgtgacctgcaggg

SEQ ID NO: 17033 - DNA, 218 bp, Homo sapiens
  source 1..218: mol_type = other DNA
agcagaaagcagctgcaggttcctccaccagggcttattgatgaccacaaggttcttgtcctggtggacgtaccgacgcagtgctaatctctgggcatttatggccgtagaggcagcggcagcggcccggatccaggggcccgacgcctgggcgccgccatcttacaaggaagggcgccctgcaggtcacgcacgtggggacggtgcgcgctcagtgc

SEQ ID NO: 17034 - DNA, 336 bp, Homo sapiens
  source 1..336: mol_type = other DNA
caggatcttctgaaaaccaaccccctggctaggttcagctacctggccggtttccctgtcctgagaggcagccaagctccctgcctgggcccagtagcgaattaatcagagttctcttaaaaatcagggctatgttaacaccagctcaaactggttgtccagtttatactcctccccgttcctggagaaagagtatgtctcagtgtgaaaacccaggtttgggccctgggtttggataacctttgggaaagagccaaacatttcccccaaactcgtaaacaatcagattactagcagctatacaccatttagttttgtaaaggcgccggaattcgg

SEQ ID NO: 17035 - DNA, 346 bp, Homo sapiens
  source 1..346: mol_type = other DNA
gaactcttgagctcaggtgatccaccacaggccccgcgcccggcagtacgtgccaccgattatcaatcagtctgactgtaagcttaaatggagacccactgtcctgccagtgtgggccatggtttcgggtcctgcctctgcgcgtgcctggcctccgggtcaagaggccccggcccatgccgtgcggcaggaaagctgcactgctgcctcgctattatcgcagccgtcagcgcgccaattggccagcggccctcagggctctgccccggccattggctggcctcgtcagtcctgcgcgcccccgggcggagatggggagggcacccgagcggaagtacggttgagc

SEQ ID NO: 17036 - DNA, 367 bp, Homo sapiens
  source 1..367: mol_type = other DNA
gtaaacaatcagattactagcagctatacaccatttagttttgtaaaggcgccggaattcggttctgatcccacggggacggtacctgcagcagcacggaacgaatcaacgcgttaacgggtccggtgcatgagtcgctaacgccctggaagcacggcagcggcagaggagctggggccggcgccgggaattcaggccgcgttcgccgccgcttcctgctgcgccaagcgcgggacacgtcaggcccgggctcaaccgtacttccgctcgggtgccctccccatctccgcccgggggcgcgcaggactgacgaggccagccaatggccggggcagagccctgagggccgctggccaattggcgcgct

SEQ ID NO: 17037 - DNA, 554 bp, Homo sapiens
  source 1..554: mol_type = other DNA
tcccaaactcacatttctgaaacaagtgtggggaatgctccgttccgctcacgaacatctgaagagctctcagaagccacgctgtttgcagcggctctgcagcatactgcagcgctgttcataacgccgttggcagaagacggggtttccaccctcctcggcctgggacgggaactggcggccgctgcggcctggcttcccagctgccgcccgggtctgctgtgacctttggaaaagttccatctctccaagcttcatgtttctcatttgtataaaaggaaaaaggtacccccttgcagggtgttagcccccgcctagaacaaaacccaggtttcaggttgtcacggtgggcgccgggggaccctggccacgggctcctctccgagttgctgcggaccgccccaacgcaaaagccaggctggcaggggctcgggccgcagtggacacaggggctgccccgtcccgcgtctcccgcagccggattgtgcccgagagtctcccgggtctggactgggcctggaggggcagtgcggcgggcggcgcttccggagagc

SEQ ID NO: 17038 - DNA, 529 bp, Homo sapiens
  source 1..529: mol_type = other DNA
cagggacatcctctgtcactacggtgggaaaagaacatggcaggttgcctttctaagggattgggcctttgtatttccatataaatttagaagcagtaatcttctagactttagtttgggaaacgttaacattacaagtttaataaaccatgaacataatatacccctccaatatctagattattttatatacatagtagcccacattttctaagcatttattacatgccaggcaccattaggactttacataaatgatttcatttaatcttcacaataatgctgagtacttccatttcacggatggacttggaggaaaagtctcccaagatttctggatacataattatttgtccaaatagcaacgccatttcaggccttacataggaagtccttctaaagagctgcctgccagctgcccttccccagatcccgaatatcctcctggccaggtggagcagagaacagttcctcagctggtcatgctgagctcataccctgtaagtctaatcctaatctcatgctcatg

SEQ ID NO: 17039 - DNA, 459 bp, Homo sapiens
  source 1..459: mol_type = other DNA
tccacctcgacctctcgaagtgctggaattacaggcgtgtcacaaaatttagatctgttaaacaagtaataattttatatggcaaaaaaaaaataccttttttgtcagcagaaaagtactgagtctacaaagtaaaaaactgaccacgatgaaaatttctgcaaagtaattaaaacgttgcttccccgtaattggtcaacgtcggtgtaactatgattaaaatgtcagtcgtggcccaagggcgtcttcggctcccaccccggggcgtgggcctgggggtccctcttcactgcgcttccctgagggccggccggcaccacaacggggcggcgcgccctgggacaggtcagcgggctccgccatgcgcggcacgcatcccgcaggagcgggtgccagagcagggtaggccgggagttagcagcccagccaggccgctggactcgggctaggggcggggcc

SEQ ID NO: 17040 - DNA, 271 bp, Homo sapiens
  source 1..271: mol_type = other DNA
taataatggcattaaacccattcatgagaacagagcccttgacccattcatgagaacagagctgttaacatttaggatcaagtttctagcatgcttttgtcacatgtagaatacatttgcttctgaatcaaattctgtgaaatcaaaactcgggtagggacttgggcccccaaggcctccggcagccctgcttccctggccggttggagtctcatgcttgcagctcccccaggttctggtaggcagttctggggtgtcaggatggccttac

SEQ ID NO: 17041 - DNA, 603 bp, Homo sapiens
  source 1..603: mol_type = other DNA
cagcctgggcagttcccaggtttatttggggggatgcctgggtccaaagaaccagggtcaggggcccaggggtttcttcctggagacaggatgcctggcgccttcagaggaagggcccacgtctgggcccaggggactgactggctgccttgcgtgcatggggcacgggaagcataggctcccggaacaggaccctgccccagtttccccagtgagggaaggacaccgttccccgtgggagcttggctgcgctgggcatacccaccctggcgccattcacaggcagtgcctgccctggccctgcgcccctgcttgcctctgtccgggtctcggaggcgcgaacaccatcccaagcctgcgacctcccgggagctcctgggagtcgggccgccgtgtgcgcaagcgtgtccagccccttccccgcccccaacccgggcccgggtccccgcctcccctgcaggcggactcgcccgctcccaggccggacccgcgcccgggacagggacccggccgagtcgagccgtcgcgccagcgctgcgccgccggtcggtgcgcctagcggatcggagctgcgcgcggaaccgtgctgccccgccccgctcc

SEQ ID NO: 17042 - DNA, 411 bp, Homo sapiens
  source 1..411: mol_type = other DNA
aggactcttctgatccagatcatcaggggtgcctctgtgtggctgtagaagctacagaaatgtcttctgcagtgactgcagcgtggcttgtgtgcaggggtgaacagcagctcaccccccctccctgagcttagcccatggctgggtgggatcaaggaggcctcatgaggaccatgagcaaacctgtttggctggatagccctcacacagtgagttggctaactttttgtgcctcctggagctggcccttccagagaggctggagtaggccagcctggcttgggaccgagtcccgagtccctggctggaccctcggactcaccctcaggatgattgccccagggagcagcttcctgctttctggtggaagggaggggctgtcctgctccagtgtctaggcaggagagttcc

SEQ ID NO: 17043 - DNA, 268 bp, Homo sapiens
  source 1..268: mol_type = other DNA
cttgcaaagacaggctgcaccaggataatgataataaatgggtgtgtgtcacaagcctagtccttccgagggaaagatgcaaaggcagggcgtgcatgtttttgtgcacatgcatgtggatagtctttggtcaataatggtgacaaaagctgaatttttccctatttagggaaaagaaagaacacagagtgaaaggagtctcactgtgggaggagccccctagatggatcttctccgagtcagtttgtgtcggctggctgcagatacc

SEQ ID NO: 17044 - DNA, 289 bp, Homo sapiens
  source 1..289: mol_type = other DNA
ctaaatgtctattaagtaaatagacccagataaattcatgttgatatcctggaggaagaggctctgaatgcaaagacaggctgcaccaggataatgataataaatgggtgtgtgtcacaagcctagtccttccgagggaaagatgcaaaggcagggcgtgcatgtttttgtgcacatgcatgtggatagtctttggtcaataatggtgacaaaagctgaatttttccctatttagggaaaagaaagaacacagagtgaaaggagtctcactgtgggaggagccccctag

SEQ ID NO: 17045 - DNA, 558 bp, Homo sapiens
  source 1..558: mol_type = other DNA
ttattaaaatgtcagtgagatgttttataatattttcccacatacagacctgggaattctctgcagtgtgcccaaacgccagcctgctccgagcacagcagggcttggacgctttccgggggagccttgccctcctgtcacttcttggccagccagcagcagaacctggggccggccggcatcctctgtaggctcccgcctccgcgagggtctgggtcacccagctccggctcgccccgctggcggaggtggggggcgggccaggggctcacaggacccagcacttggcaccggaggcttggggagggggctggggactgatggattcggcctccggactccacgcctggcgggatgccacctgctggcatcccgccggcttgcacggtgggcacaagagacctggagccagcctggatgtgcagaaacccagaattcgggcggttttccaagctctctgtagggctgccgcctccaccgactcccttcccccgcgcgccgcccccggacgcgaaggcttccagcaggggcggcggtcaggtggagccgtcggctcct

SEQ ID NO: 17046 - DNA, 599 bp, Homo sapiens
  source 1..599: mol_type = other DNA
tcctactcaaagaagatggaatcttttaggataaaagtcttagattaagcagccaaatactgacttctcaaaaaaaattgtaataactccattcatagaaatgagattatgctgtaacattcttaccatagtcctgaatatgtgaataaaagatgctgattttcacttaggacagatgtaagattttcatattgtttacattttccctaaatgagaaatgtatgaacacttctgcccttttattcctgcaccacggaccatgagtcagggctgctaaaagtatccttattttagagattgcctaaaaccagacttatatgaaaaggggatttttagctttacttttcagaaatcacaaaattattttcttttctttagaaaatatcacatttcatatcaagttattagctaggttaatggttgagaaagtcaatgaagcatgaatatttacatatgatgaggtgagatacagtgttatcccactgaacgagttatattcagctgaagcacaatttgaaacagtgcttccacctagactgctgtgcctgtgccagtggctgctgtcctggtgccaggggcaagaggaagactgccttttt

SEQ ID NO: 17047 - DNA, 455 bp, Homo sapiens
  source 1..455: mol_type = other DNA
aaaattcaaaaccacagagcctctgcgaataattagaaataaatcataacttccccttcaaccatgctggaggtaaattgcgggcctcgagtctaaagccctttgaggacacgggctcacgaatcccctgcgcctgcctgcacgctcagtcctgtgtgtcagtctttgtgaatgaatgatgtacacgcacccgaaacggtggaggcggcctgtgcacccagcctgcacacccgctcccggcccttcccgcccctgcctgggctccgaggcccggggctccacgcactgctcctccgcggtcgcggcccggccccgcgctcgccagcctgggccgcgggcggagattggccgcggtgctcggccccgcccccggctccccgccctgcccctcccccaagcggacatcgcccggcccagggcgcgcggacccagcggccgagacgcggcgccgcgag

SEQ ID NO: 17048 - DNA, 317 bp, Homo sapiens
  source 1..317: mol_type = other DNA
aatctctgggcccgaggaatataccttgtgtgtgttctcttgtggcttgaggagccaaaaaaaaaaaaaaaaaagtgctttatcagaaacacattggctgccagagaagcttaggaaaatgaggacctgacagtcattgtacccgggccaccagcagggaagagcagcgcagctggaggggcgagtgttgggaggttgtccccagttcgaaactgcccaggccctgggggaggcggcagtctcagttctcaccgtcccctggcctgaagcccggggacgggactgaggcgtagggagggactaggcggatctgagct

SEQ ID NO: 17049 - DNA, 374 bp, Homo sapiens
  source 1..374: mol_type = other DNA
gaccaggtggcctagggcgccgcggatctccgccctctgcgggcaccgggagcccagggtcgaggcgcgccgccccgaggggccccttctcctaacaatgcgcccggaatggagtccgcgccctgacagcgcgggtcagcccgagatgagtgggtgagccgctctgggagtctgccgcgtctcggcagcggaggggtaggcgctgggttacccgctttgtctccggctggaaaaagcattggaaaagcaaagaagccaaaggtctttggctttggatttcagggcgcggacgctgggcgtggaccccgtcattgttccgagcaagtatcctgtgtgcgcagcgcatgatcttcgcgaagattagctgaaaaaaa

SEQ ID NO: 17050 - DNA, 407 bp, Homo sapiens
  source 1..407: mol_type = other DNA
gcttgttttgccaagccactaaaaataccttggtaaatattagctaatgtgcagccctttgcttgctattaagatttactgatttcaatagaaaggaacctaaaaattggttagattaaatgccattatctaaaaggatgaatttatcctgtatcattgcattctctaagaataacccagtgcatgtaaatttccaacaataaagacttcttttaagtctgtttcttacataacgatatgtacttactgtatgtttgaacccttggaaaactcagtatttcagtgggtttcagttattaggcacaaggcaatgctggaacccaatccatgcctggtctgagaacaaccaattgccttggtttaaatcaaaattagcgtcagtccactgactgtcgcctacaataaat

SEQ ID NO: 17051 - DNA, 523 bp, Homo sapiens
  source 1..523: mol_type = other DNA
cggtcctcagaggcacctgcccgggaggtggcgcggaggacgccggctctgcccacgcctgggcaaggcgtgcagggcgcgtttccagccatcgccgcccagccgccgccgcacgccggggagagatcgtccggggtgagcagcgagcccggggacagctagcctgggtcctgtccctggacctactccccctgcagctggcggatcaggcccccggaccctcactccacggcgggaatcagagccgtcgggcgggggatgcagcgcccagactgtggctcccccgcaaccgtccgcttagcgcaccgcggagcgactgagcagccccgccgaggctccgagcacgcgtgacaggcgctccacaggcatgggacgctcacacgcgcgcgcgcgggtctccgtccctggcaccccgcagcaggggtgcagccgggggcagggggggggccgcggggacgcgagcggagggctggatgcctgccgggctctctctccgcccccccgccgccaacgccggtggccc

SEQ ID NO: 17052 - DNA, 703 bp, Homo sapiens
  source 1..703: mol_type = other DNA
tacagaatatatattatatattagaatataatacataatatatattatatattagaatataatacagaatatatattatatattagaatataatacagaatatatgttatataatatattagaatataatacagaatatatgttatataatatattagaatataatacagaatatatgttatagagtatattagaatataatacataatatatgttatataatatattagaatataatacataatatatattatattatatattagaatataatacataatgaaataaggaatataatagaatattatttcatagaatagaatagaatattatttccttctataatagaatagaatatttcattatttcatcccatattcattatttcattctataatattatagaatagaatagaatattatataatgtaatagaatattatttcattatatattagaatataatatataatgaaataaggaatataatagaatataatagaagtaaagtaattattataagtaaacaaagttcacaataaatgtcatgtgtttgaatggtccatggaaaaaatgtctcccatgaagaggggctccttggggacccctagttcaacttcatgcctttgacttagacacatcaagccagggttccataaacaaatccttcttagttagccttggttgttctttgagaactgtt

SEQ ID NO: 17053 - DNA, 537 bp, Homo sapiens
  source 1..537: mol_type = other DNA
ccgggaggtggcgcggaggacgccggctctgcccacgcctgggcaaggcgtgcagggcgcgtttccagccatcgccgcccagccgccgccgcacgccggggagagatcgtccggggtgagcagcgagcccggggacagctagcctgggtcctgtccctggacctactccccctgcagctggcggatcaggcccccggaccctcactccacggcgggaatcagagccgtcgggcgggggatgcagcgcccagactgtggctcccccgcaaccgtccgcttagcgcaccgcggagcgactgagcagccccgccgaggctccgagcacgcgtgacaggcgctccacaggcatgggacgctcacacgcgcgcgcgcgggtctccgtccctggcaccccgcagcaggggtgcagccgggggcagggggggggccgcggggacgcgagcggagggctggatgcctgccgggctctctctccgcccccccgccgccaacgccggtggccccacacacacacacacacagagagagagagagaga

SEQ ID NO: 17054 - DNA, 354 bp, Homo sapiens
  source 1..354: mol_type = other DNA
gacctctgggagctgagagcagcccccagatgatgggccctgagttccacatgagaatgctggcctcgacagacagccactatgtctgttcatctgttatggcagaaatgctgactctggcatcagatgacctaggttcctattttgcctggagctgaggcacatttggaaaagttacttctcgccctcctgagaggtagctcttaggattttccctcccactcccgggaggtgagagtttaaaaacctcgcctagtgctgcaggctccccggattccgcagcagctgctctagatgagggcatgcctagaggctctgctccgctgcagcgtctacgagaccgggaacccgtga

SEQ ID NO: 17055 - DNA, 363 bp, Homo sapiens
  source 1..363: mol_type = other DNA
aggtgttacacttgaatgtaacaccatacatgcagtaggctgaggaaccccaggaaatcctcactcccatgactggggcatgtcatatggcagaggttcatctggggtgagcttgacccaatcacaagccctttgaagggattgggctgacctctgggagctgagagcagcccccagatgatgggccctgagttccacatgagaatgctggcctcgacagacagccactatgtctgttcatctgttatggcagaaatgctgactctggcatcagatgacctaggttcctattttgcctggagctgaggcacatttggaaaagttacttctcgccctcctgagaggtagctcttaggattttcc

SEQ ID NO: 17056 - DNA, 375 bp, Homo sapiens
  source 1..375: mol_type = other DNA
gtgaagtctgcagccatctgagtgcttattaaaatgacaaattgctgtgtaggcccgccattagaaaatttgattccctgtcctctaagatttgtgggggtgcctaccacacttccaagagatacccacacacctgcaatacaggtgtctgatagtcccctcaaaacccatttaacgagctttaagactctcatccattggctgatttaatcctcacaacatggttagataaataccattattatccccccatttttcagaagagaagaatgaagctcaggagaaacaccaggcctgagccctggaaacattccctggcaaaatactgaaagattaaacatgttgctaaacatgtaggaattagcccaaccttgg

SEQ ID NO: 17057 - DNA, 422 bp, Homo sapiens
  source 1..422: mol_type = other DNA
tccaaaatagaagcagcttttaaggctaaaaatgacaattctgcctgtgatactatgtctaccctccaggcgggagctgatgcagactcagggtcaaggtaaacaccttcaagtcaatttcaagaggctggctagaaaccgccaggacttcagggggccctgtctcgcgggtctccctggtataaggccaccttgtccctgaagagaggcctgagctggcccagctcccggccacgtgccccagcagcactggttgtgaaaagggtctgccgccaccccaccactgcgggcctgccaaggacaggcaggcatgccccgcaaggagcccaggggcatctccagggacggctccccagcctatgggctcgctccctgagaggccgtgctcgggctcgcctgctcagctcactccgaaagcctct

SEQ ID NO: 17058 - DNA, 596 bp, Homo sapiens
  source 1..596: mol_type = other DNA
tctggcacatagtaagtgctataacattattttgtaaattaaaaaatacctgagggtagaatttacattaatattagtaaaaagtcattggaatggaaaatatgtaaatattttccaattcatttgtttcttcaataaatacataattgggttaacacagttcagtattattatttagtagaagtattgaatctcagtatttatattgtatttatgcaaataactaataagaatctttaaagctttaaaaagtcacgaattgagattgattgtcagtttgataatagttgccaaagattttcacttttgctaatgaatgtctcatatttaacatcgaaaacttgtttaattctggatttcccattctgaagaaaccttttttatttttttccctaataattgcataagagattgtcttagaatttttcacacagagactgtgtaagttgatacttaaaaaaatgtgttagtagaataacaatcttagctcagtatcagcaaagatattaaaagatttgttttctcagccttaaaagcaattaacttttaaaaagagaaaagacataatttaatatcaatttcatactggtgttttc

SEQ ID NO: 17059 - DNA, 550 bp, Homo sapiens
  source 1..550: mol_type = other DNA
cggtagaatgtcaagatatctttctgctgcaccgccatccacaggcagggggttcccagggagctccttcccttggtccataactctgacccccggattccaaataataaccggggcgcgtccgcgaggatcttcctgacttgaggcaaagccccctctcctccgcggcgcggtgacagtgttcactgccgtagtctcggaggatgcctcttcccggtgctactgctgctgctgcggcggcggccggtgcagcacaatgccggggccgaggcaacagcctacgtcgggtcccctaggggcacccgccgaacgcccctcggcgccccaccgcagcgcacgtgcgctcccgggacaacagcaggcgaggcttcggcgcgcccccgccccctcggccgcgcgcgcgctccgcccgccgcccgccctcctcgcgcgtgctcgtgcccgcggccgcggcggcgcgcctcttctccccgctgcgggcgtcgcgggtgcaggaggaggcgggcggaggctgggcgggcggcgggctccggcgggggcacgcgccggc

SEQ ID NO: 17060 - DNA, 366 bp, Homo sapiens
  source 1..366: mol_type = other DNA
ggaaacgggcgtgcactgggctgttcccgccgaacaccgggcgcgactcaggctgccggaggcttcccgggcgcggaggctcggcgggaagtccgtacagattttgattggaacagagtagcccgcatgggacaggctgccccagtgcccgccggctccctagaaaggaaaaaatgtttttataaacaatgttttaaaaaaaaccgcacacttttttaaaaagtcagaatctggagtgcagtgacgagatcccggctcactgcagccgcgaactcctgggcacctctccagtagctgggactacaggcgttaaagacagggtcttatagttgggatcaagtttgcaacttcagctcaaaagtctta

SEQ ID NO: 17061 - DNA, 488 bp, Homo sapiens
  source 1..488: mol_type = other DNA
aggaaaaaatgtttttataaacaatgttttaaaaaaaaccgcacacttttttaaaaagtcagaatctggagtgcagtgacgagatcccggctcactgcagccgcgaactcctgggcacctctccagtagctgggactacaggcgttaaagacagggtcttatagttgggatcaagtttgcaacttcagctcaaaagtcttacgctcggagcgcgcaggctcagcgcgggctgcgagactgcgagtggtgggtcctcgggggcactggctctgtggcccgaagtcccgggagcctagtgaggactagacttctttctccctcccgctgggctgcggacactgggagccgggccggcgggtggcaggacggaacactgccccggggagctaccggcctgggccttggccgcgggctggggcggtgcgcgctccccgcaccgcgcgcacactcctgcacacacacctggagcgcgtcccgggggggagggg

SEQ ID NO: 17062 - DNA, 474 bp, Homo sapiens
  source 1..474: mol_type = other DNA
acctctccagtagctgggactacaggcgttaaagacagggtcttatagttgggatcaagtttgcaacttcagctcaaaagtcttacgctcggagcgcgcaggctcagcgcgggctgcgagactgcgagtggtgggtcctcgggggcactggctctgtggcccgaagtcccgggagcctagtgaggactagacttctttctccctcccgctgggctgcggacactgggagccgggccggcgggtggcaggacggaacactgccccggggagctaccggcctgggccttggccgcgggctggggcggtgcgcgctccccgcaccgcgcgcacactcctgcacacacacctggagcgcgtcccgggggggaggggtgagagccgccgggcactaggcgcgcaggtcggcgccggagtggcacgggcgggcgggggcggggtgggcgcggacgcccctcagcacacactccgcacccg

SEQ ID NO: 17063 - DNA, 360 bp, Homo sapiens
  source 1..360: mol_type = other DNA
atagacatatgctccaagtccccaccaattagctggacacagagcactgattggtgcaggtgtgtttacaaacctttagctagacacagtgcccacctgtcagatctgttatcagatgggaacatggcagatttgttaacaaagggtcctcgccgcctcccaggccctgcgatctctttgcatctcaggaggtcggtgactcaggaaccagcctctcctgaagcacacagcttagggagttcctgaggcagatgccccgcacgctggccgggaccgggaagggcggtcggctggcggctgccaggcctggcggagtggagcggggcggggcgcagcggggcggggcgggcctggagctgc

SEQ ID NO: 17064 - DNA, 448 bp, Homo sapiens
  source 1..448: mol_type = other DNA
ccaaggccagagccagctccctcagcttgcagggaggtgtggagggagaggcgccagctgtaaccggggctgcgcgcggcgcttgcgggccagctgggggtgggcgtgggcttggcgggccccacactcggagcagccagccggccttgccgccccgggcagtgaggggcttagcacccgggccagtggctgcggagggtgtactgggtcccggcccactggcctgccttcccgcggggcagggctcgggacctgcagcccgccatgcctgagcctcgggtctgtgcagcccaccatcgaccacccaagggctgaggaatgcgagcgcacggcacgggactggcaggcagctccacctgcagccccggtgcgggatccactgggtgaagccagctgggctaccctgtgtttagctcaaggtttttgagtgcaccaatggacactcagg

SEQ ID NO: 17065 - DNA, 476 bp, Homo sapiens
  source 1..476: mol_type = other DNA
tgccctttgtgaagagtcactgggtaaccagtgttgaataatgtttctcaatgtctgaaacactcacttcctttcgggtgataggcggcgcccggccgctccctgggggtcctgagggcgagaccccggcaggctcccgactccgggagccgggcgggagttcggttttcgccggcgctccacggccaggccacaatctgtggcggggcgggcggacgcgagggccgcctcacccccgcgcgtcttccgggacaccgggccctcgggcgcgcgggaggcgggcttagcacgggcgcaggctgccctcggcgcccgagacacccaggcacagctggaagcttcctccccgttagcacgcgggccgcagcgggggcttgaccccaatgcgcaggcgagcgccgcctgagacccgctctgcgattgggtttaggccttcagtcattgggccattatgtgaatctccttttggcgcagac

SEQ ID NO: 17066 - DNA, 577 bp, Homo sapiens
  source 1..577: mol_type = other DNA
gtaagttatattgtcagtacttctcatttaagttccagacagtgtgctaagcaaagcactttactcggtaaagtaagagctcacttaatcttcaaaataacgtagcatgccctttgtgaagagtcactgggtaaccagtgttgaataatgtttctcaatgtctgaaacactcacttcctttcgggtgataggcggcgcccggccgctccctgggggtcctgagggcgagaccccggcaggctcccgactccgggagccgggcgggagttcggttttcgccggcgctccacggccaggccacaatctgtggcggggcgggcggacgcgagggccgcctcacccccgcgcgtcttccgggacaccgggccctcgggcgcgcgggaggcgggcttagcacgggcgcaggctgccctcggcgcccgagacacccaggcacagctggaagcttcctccccgttagcacgcgggccgcagcgggggcttgaccccaatgcgcaggcgagcgccgcctgagacccgctctgcgattgggtttaggccttcagtcattgggccattatgtgaatctccttttggc

SEQ ID NO: 17067 - DNA, 313 bp, Homo sapiens
  source 1..313: mol_type = other DNA
tttaaaaaaaaaaaaaagctctcttttctttccacgttgtttcagctactagagaggctgaggcaggagaatcgctcaactgcactccaaaaaacagtaaagagaatactattgagttaattttacagtttgtaagttatattgtcagtacttctcatttaagttccagacagtgtgctaagcaaagcactttactcggtaaagtaagagctcacttaatcttcaaaataacgtagcatgccctttgtgaagagtcactgggtaaccagtgttgaataatgtttctcaatgtctgaaacactcacttcctttc

SEQ ID NO: 17068 - DNA, 409 bp, Homo sapiens
  source 1..409: mol_type = other DNA
cctgtctcccgctagtgcgtcccctgcctgggcaagcgcggccggactcagaggcgaggacccggcggaggcctgggcggagcggagaggcgcgccctgagtagggctcgggggaggacgatggctgcctcctgcggtcctccccctgcctcgggggacggcccttggcagaccgtcctgtttttaataaaaccatttctaaccgcgccggggggcggaggccagagccagccccgcgcccacagggttgcggccccagacccgccgcgcgcacgcccccgcgcctggcggccacagggtccggagcgggggcggggccatccgcggccgggggcggggccgggcggggggcgcgcggttggaccgggcgggaggagcaggctcttccatctcctgccggcacccccgg

SEQ ID NO: 17069 - DNA, 338 bp, Homo sapiens
  source 1..338: mol_type = other DNA
aatgttcattttcctgtctgaatcagatgcactgggcctccccagggtagccgggcgcaggccagcaagcgcctcccgcctggagaacaggaggctgcgtagccgacggggagcctgggccagggctgccctcccggggcagggcccctggagggccggcgtcgtggtgatggtgagggccttagcgaccaccacccgagtgaggccccctcaccttcaggcccagagccgaggggaggagcctcccccagggccggcgggggcgggcaggtgagccgggcaggtgcgcaggcgagcgcggcgggctgggcgggccgaggccacaccctgaaactacc

SEQ ID NO: 17070 - DNA, 382 bp, Homo sapiens
  source 1..382: mol_type = other DNA
tgcctaagctaatgtctagaagagtttttctgatgttccagaatttttatggtttcaggccttaagatttaagtctttgtttgtgtaagatgaaagataaagatccagtttcattcttctacatgctatagaatggtattttgatgtgaattgcattaaatctgtagattgcatttggcagtaaggtcattgtcaccatattgattctacccataggtatattcctaagtattttaatagcagtgctactgatttgtgtacattaattttgtatcctgaaacttcactgaattcatttatcagatctaggagcttttcaaatagcttggtataaaattctttaaattttgctgtatctaaaagttttcaaaataaaatgtta

SEQ ID NO: 17071 - DNA, 490 bp, Homo sapiens
  source 1..490: mol_type = other DNA
atgtcgcagtccgcccaggacgggggcgcgggctcacctgtctgcggggcggcccttggcaggcctgtttccatgggtgaacaatgggcaccttaccaactacctcgccgaagagggggaagtgaataggagttatgtttttagttcgaagaaaaaaataatgctataaggagaaatgcttcttgtgaatgtaaatcggcacatgtgcgcacatatgcaaaaatacgcaggctccaccgtctaaggagacggagtcgagccccgcccccgagcgcgctccgccttccccagccaggccgccggcgcagagcattgtggagtgagcggagcggcaacggcggcggcgccggccgcacgcgcgcggcggcggctccctcccacgccccgctgggaacacgcgagccgcaaccgtccccaacggtcgccagcgcgcggctcccgggccccctcgctcctcccccctccgagcgctgggggtgcgcactcccac

SEQ ID NO: 17072 - DNA, 382 bp, Homo sapiens
  source 1..382: mol_type = other DNA
tcatgtcgcagtccgcccaggacgggggcgcgggctcacctgtctgcggggcggcccttggcaggcctgtttccatgggtgaacaatgggcaccttaccaactacctcgccgaagagggggaagtgaataggagttatgtttttagttcgaagaaaaaaataatgctataaggagaaatgcttcttgtgaatgtaaatcggcacatgtgcgcacatatgcaaaaatacgcaggctccaccgtctaaggagacggagtcgagccccgcccccgagcgcgctccgccttccccagccaggccgccggcgcagagcattgtggagtgagcggagcggcaacggcggcggcgccggccgcacgcgcgcggcggcggctccctccca

SEQ ID NO: 17073 - DNA, 297 bp, Homo sapiens
  source 1..297: mol_type = other DNA
acagctgtccctctgtgtttctgagaaagcaaagagagtggcagcactttcccctgggcaagagcctccacagggccctccacccaatccagacctgtgtcattgagactgggatgggcccccttccctagggggcagtggtgacagtgaaagggcctgccaccttacttgaagtcccgggcactggaggtctgttttaccaccacctgccctctaacaggacagtgagagtccctctagaggagggcatgattttagcatgaccttttcctcctcttccggaggcatctgcaggga

SEQ ID NO: 17074 - DNA, 430 bp, Homo sapiens
  source 1..430: mol_type = other DNA
tgagctgagatcgcgtcattgcacgtctcaaaaaaaaaaaaatatatatatatatgtgtgtgtgtgtgtgtgtgtgtgtatgtatatatatatatgtatgtgtatatatatgtatgtgtgtgtgtgtgcatatatatatatacactttgtttaattgtaagtgtgtttagtttaatttttaataatgttggcaagattcctgagaactagagtttgccccagcccatccagcacaccatgggcccagggcagaccttggggctaggcggtcttgggttccagagggctcccatgcccctgtcctattgctcttctggcaatagttcttcattccccaagtggctctccgctctggaggcgggaccgagttctccggtggcccctggaggctccggcagcgagctctgggggagggggcctttaataggct

SEQ ID NO: 17075 - DNA, 449 bp, Homo sapiens
  source 1..449: mol_type = other DNA
taatttttaataatgttggcaagattcctgagaactagagtttgccccagcccatccagcacaccatgggcccagggcagaccttggggctaggcggtcttgggttccagagggctcccatgcccctgtcctattgctcttctggcaatagttcttcattccccaagtggctctccgctctggaggcgggaccgagttctccggtggcccctggaggctccggcagcgagctctgggggagggggcctttaataggctcgcccagcgcctggcttgctgcgctgcgagtggctgcggttgcgagaagccgcccggcaccttccgctagttctcgtcccagggcgcgcttgaagcgcgggctgccgggtgcacgctcgccgccctgggaggagtctccctctggcggttccagagtgcgggctgcacggagaccgcggcagcggccggag

SEQ ID NO: 17076 - DNA, 408 bp, Homo sapiens
  source 1..408: mol_type = other DNA
ctgtttccttttcactcagcagaaaggcaccttttctgtgagctagatagccaatcgcgtcgaggtcctggagtcaaaatatttgattgtttgtgtaatgccaccagcaaataaccctcaatcacaaatttgattttgtgatacagtatatgaaatgtacaacataaatctatctctgtatcgtttcatgccttatattctgcaattcctgacaacaaataggacgcgttttaaagcgcctgtctgcgccagctcttggcgagcacgcgccccgtgcgcgctcaggctcacgctcaggctcagagactacctcgcgcagggccgtcagggcggctcctcgccagcagagggcgccgggcagcgccgctcctcggggcgcgcgcggacgctctcccagcatgcctcgct

SEQ ID NO: 17077 - DNA, 436 bp, Homo sapiens
  source 1..436: mol_type = other DNA
aaagtttatccaagcaactaacttaaaaatgaactttttgattacaacttggaacaaagcatatacattggaaagtgcttgctcatgaataacaaatggcaattggtcatgctgggcaatttaggacccctactttacttaaggaggatcctggttattcttatagaaatacaatctacagaagggctctgaagtcaatttcggaggaagcgtcttataatagccaacacccaagtagcttatatgggtaatcttaaactagtcaatttaacttttcagactcttcataagcatgatatgcatacaggatattttccatggattggagactttaatcttccaagcatttacctccagtgatgatcatctggggaaaaaaggcatacacttaggaagaaatgtgatcacctcatgcaatgtggtgtatccaatccat

SEQ ID NO: 17078 - DNA, 423 bp, Homo sapiens
  source 1..423: mol_type = other DNA
aaatcattaatgtcttcaactgtctgaggaactcaaagtttacactcagttagtggatgtggattgaccaagtcatggggaatattcttttgaagaaggttctccatcttcagactatagagtaccaggtactttgtacctttccattgtatcatatacacatggatgaatttaggaaattgacttctaaaagaaaatagaaagttatttactattttcaaagcaactaagtagaaaactgaatgatatttccattggaggggaaaatagaatttacaagtttcactgagcatgaaaaaaatttcccataagccatggctggctatgggatttttccagttttctgatactcagaagactcagagactgtcagtttaaaaaatgaaaggaagtggcaatcttggattagaaccaatgattaca

SEQ ID NO: 17079 - DNA, 748 bp, Homo sapiens
  source 1..748: mol_type = other DNA
ccccgcgccccgcgccctcccgccgggatgagagcgcagtccgcgccgccagcccgcccgctcgctccgaggcggcaccgggagaaagtggcggtcagggatggagctgctgccatgacaaccccggcggtcggggcccgcgcgcgtcggggctgctcccgggaggaaggcggcgcggaggccgggggcggccgctgagcttggcgtccgcgcggctccggtgcgggctgcgccgcgccttccccagcgagctaccgagcttggggccgccgcggtccgctcccgccgcccggcctctcggccaccgccgcagcccctgccccgccgagccccgccggacagcggcggccgcagcgcgcatttgggctccgagggttgaccgaggcggctgccgcaggatcccgggcccggatcgcacgaagcccgcgcggccgtctcctccgcgcgccacccccggtggcgagcccggctccgaaacttacaaagtgttggatgtcccccgttcgaactgagggactgcagaccgcctccgtgtctgaactgccgctgggaagaagcggctcctgagacgcgccccccctcctcggccaccttcccggcggaagcagcgaggagggagccccctttggccgtcctccgtggaaccggttttccgaggctggcaaaacccggtcgccgcgggttcaccgctcagtccccgcgctcgcaccccacccacttcctgtgctcgcccggggggcgtgtgccg

SEQ ID NO: 17080 - DNA, 548 bp, Homo sapiens
  source 1..548: mol_type = other DNA
ggagagggcctcccgaggggcccaagggaagcgggctgtcctcggaggtgggtgcactccacctctgcgcgggcccaggacagcgcgccgtcagggctggacttggctgggcggggagccgttcgcagcgcgatggacacgcacaccggtgccccatctggcgtgggcagggtagttcagttctgcgctggcatcggcgagggaaggtgccccccccaccccgcccctctgtaggggaagccgctgcgaggggcgccgcgttctctccgctggcgcgggtgtcgggacggagcgaagtgggcgcggtgcgggctcatccccgcaggcatccccagcccggtgggcgcggcggaggttaaggtgggcgcccgcccgtcgggatgagcgcgcagtccgcgccgcccgccagcccgctcgctccgaggcggcaccgggagaaagtggcggtcagggatggagctgctgccatgacaaccccggcggtccgggcccgcgcgcgtcggggctgctcccgggaggaaggcggcgcggaggccgggggcggccgc

SEQ ID NO: 17081 - DNA, 343 bp, Homo sapiens
  source 1..343: mol_type = other DNA
gtaaactgccggtgtaaactgccattccagaagaaggaagccacaggtatccttctgtggccttctccttgtgaagatttccgatgacttcagcaagtttatgctgtaatcatagcaattgtttggccaattcttcctgctccatccctgcctggagactaggaagaaggactgagccctgctggcagtgccaggccctctccactgcctcgtgtgtgttcacgtgtccacgtgagccccacatggcttcgactccccttggagtcaagccttccaagcaggaaagtctccttggaggactgctctgagccctgtgcagattgctatcagagacgctgcctgc

SEQ ID NO: 17082 - DNA, 369 bp, Homo sapiens
  source 1..369: mol_type = other DNA
gaatccaagccacttgaggtcttcggagagcacctgggacagagcaccactcagccagcaaggtgtgctgcttacaagcacgtgttagtaaactgccggtgtaaactgccattccagaagaaggaagccacaggtatccttctgtggccttctccttgtgaagatttccgatgacttcagcaagtttatgctgtaatcatagcaattgtttggccaattcttcctgctccatccctgcctggagactaggaagaaggactgagccctgctggcagtgccaggccctctccactgcctcgtgtgtgttcacgtgtccacgtgagccccacatggcttcgactccccttggagtcaagccttccaagcagg

SEQ ID NO: 17083 - DNA, 352 bp, Homo sapiens
  source 1..352: mol_type = other DNA
cctgtgggtccctcacagacctcaaggtgtgggggagctgggaaggaatccaagccacttgaggtcttcggagagcacctgggacagagcaccactcagccagcaaggtgtgctgcttacaagcacgtgttagtaaactgccggtgtaaactgccattccagaagaaggaagccacaggtatccttctgtggccttctccttgtgaagatttccgatgacttcagcaagtttatgctgtaatcatagcaattgtttggccaattcttcctgctccatccctgcctggagactaggaagaaggactgagccctgctggcagtgccaggccctctccactgcctcgtgtgtgtt

SEQ ID NO: 17084 - DNA, 293 bp, Homo sapiens
  source 1..293: mol_type = other DNA
ataaaaggttttctataatcctgagaagaataaacgtgggaaaatttttggaatgcacatgacaagttgaccgttcccattggttacttggtatataccctatgtaaatgaagtaatgatcagtctgattggttgcgaagttataaagttatatctctatgcctgattgtgggaggggagtactttcagtttttcatctgccatgcagaaaaggcctgcctggaggtgagctcgtgctttcccaagaaaagaattcaagggtgttctgctccttgaagcagggcaggggctct

SEQ ID NO: 17085 - DNA, 568 bp, Homo sapiens
  source 1..568: mol_type = other DNA
aaatgattcagacatttaaagaacattttgacggtacctcaaaatgttaaacatagggttaccatatgacctgggaattctacggctagatacatatgtccatacaaaaacctgtacacaaatgttcataggagcattattcatattgcctctgtttatagagataatccaaatgtccatcagctgatgaatggataaacaaaatgtgacacattcatataatggactacactgcagtaacaaggaatgaattgctgatatctgctataatgtgattatcttcaggaccagatattgcatgattctattcatatgaaatgtccagaataagccaaaaatattctaaaattaggtcgaggtgatggttgtacatccatccagtgagtatactaaaaactattgaattgtatattttaaatgggtgaattttatggaatatgaattatgtctcaataaagctgttaagaaaaagtaaaacatgttaagcataaagttatcaatctagtcctaggaatttacccaagagaaacaaaatatatttccattccacataatattttttcagatg

SEQ ID NO: 17086 - DNA, 371 bp, Homo sapiens
  source 1..371: mol_type = other DNA
ttttaaaactcttttgaaaaataccgggatgctgcctgtaatcccagcacccagtgagtcgtgatcgtgccactgcactccagcctggacaagcggccgccacacggtggcgcagtgaggctgggaaacggtgcaccccgcgcaggagggggcactccccgtcgcggccacccggggtgggcaggaggcggcgcgggctggctggtctctcccgagaaggttctctcccgagaagggtgcgtctcagggcttgtcagtggacccctggaacatggggaagacgcacagacaagggtcctctctccttgtcagacctctgtgaccaagagaggcccaggggcacctgaaggccaccacggttgatccctagg

SEQ ID NO: 17087 - DNA, 646 bp, Homo sapiens
  source 1..646: mol_type = other DNA
ggcttttacatatataaatttggtatacataatatgtaaatatacttctattttgcatgaaaactaaaaatactaaaaaagtaatgaaaaagttaaacattaaaaatattagttggaaactggcttattttactaacaattatattcagaattctgttgctagtactttctatacttgctaaaatacaagcttttcaagtattttccatagtattaagtgagactttaaatactcttgcttttttacagtattcagaaatcagagcaaataattagtctgcttttctgcagaataaactattgggtatgccatcatgcttttgatctaccacataaacaaattattttagcaagacatcacttttatatgctgtataatgtatgtattgcttatgtcatcaatttggaattgggggcccaaaagcttccaagataactgggctgcatccttatttgtaaaataagaaatactttatttcccaaattttaaagatttattctatagctatggcatgtgccggtccagagcatcgctgcatccgtaaggtgccggctcggctgggcccggcggtcgccatggtaactggggcgggtcgcagggtcctggcaggctgggcgcatgcgcgcggggactacaagccgcgcc

SEQ ID NO: 17088 - DNA, 616 bp, Homo sapiens
  source 1..616: mol_type = other DNA
ccggctccacgggggaggggcacggccgggggaggctggcggctgcgggctgcggcgcccgagcagcaatgcaccgaggagcagtgccctcggccgagccagtcccagccagtcccgcggccggtggcagtgggcgggcgagggtcggccgtgcaatgctgcggggggcagccgcacagagccgggtgtgggtggcctgcgcctgccgggtggggtccagcgccgagcagcgctgcgagctgcccagcctccggcggtgcaacgcaccgaggcgcttcggcggctccgggcgggggagggggcgggcgagctccagcccggatgcgctggagcagcggcgcgcaggcgcaccccctaacgctcctgggactcccggcagcccggaggagagctcgctgcgcatgcgcagggagagcgcggccggcgctccagcggtcggcatggcagctgctacctcgctgggacaggctctgggcccacgcgtgccgcgcagtccctacagaactgcagtttttcccccattgaagaaaaacgaggcgggaaaaacgctgttagggtttaactcaggccctggctccccgcccagttctctgagcgtgcggcggacgactcggcg

SEQ ID NO: 17089 - DNA, 592 bp, Homo sapiens
  source 1..592: mol_type = other DNA
cctggctagccgcaatcctggcgtggcacggccctggggaccccaggcaccgccgacagccgggcgcccccaccccgcccccaccggcaccccggcccgggcttaggcatcgtcggggacgcataggaccctcgccctggcccccgggcctcccggctgatccagcggacaccagggctgcaggccgctaccaaggccccgcaacgccaccatgatcccagggcaccggctcgccgccgccgtgctcaactttcaaagctcgctcccgcgcgcgcgccgagtcgtccgccgcacgctcagagaactgggcggggagccagggcctgagttaaaccctaacagcgtttttcccgcctcgtttttcttcaatgggggaaaaactgcagttctgtagggactgcgcggcacgcgtgggcccagagcctgtcccagcgaggtagcagctgccatgccgaccgctggagcgccggccgcgctctccctgcgcatgcgcagcgagctctcctccgggctgccgggagtcccaggagcgttagggggtgcgcctgcgcgccgctgctccagcgcatccgggctggagctcgcccgcccc

SEQ ID NO: 17090 - DNA, 437 bp, Homo sapiens
  source 1..437: mol_type = other DNA
ggagtgctgtggtgttatcacagctcactgctgcagctaattacaaaaaaatttttgggggtagaggcaggtcttgctatattgcccaggctggtctcaagtgctgggattgtaggcatcagccactgtgcctggcgctgtctagttccaatgattaataatcatgtttaaagcattgagaaactctgatcacttaattgtggtttttagaaacaccatttctttgtctttaaacagaaaatgtggtaagcagcctaggtagtcagatttagactgaagattatgggtcttctttctggaaacatgtaggtaagagagaactggttagctctctcacaccagcctcactttgcgtctggcagttgcagatggccgggcgatgggaaagccagtattggcagagcggtctccccctagcgcgctgtccgcccacgctg

SEQ ID NO: 17091 - DNA, 618 bp, Homo sapiens
  source 1..618: mol_type = other DNA
cttatagccagaggtgttaagataccaaatctttgggtgaccggccgcaggaggacccgggccggaggggaacctgcggggggatgaccggccggaggggaacctgcggggggtgaccggccggaggaggaccggggcgggggtgaccggccggaggaggaccggggcgggggtgaccggccggaggaggacccgggccccggatggtggtgaccgaccggagggggcagccaggccgggggtgaccggccggagtaggccatgcagcccctcgcggacatatgtccgccggggttctggacacctgtcctactgcccgccaggagatccttacgccggtggccggtctggacgaggacccggagaccgccgggcaggcagccgaggcgcgccccgaaacgccggcagccgctccacagcatagccgccgcagctgactccgttgcgctcgcactggcgggacctgcgacccggcaacgcctgtcccacgcaccctgggggttgtagtcctcccacgagccctaacaacccaggtgccaggcgggctcccaaggggcccagaagtcctcggggcctcggcgccgcagagatgcaccgcccaccaagcgccgcgggggt

SEQ ID NO: 17092 - DNA, 447 bp, Homo sapiens
  source 1..447: mol_type = other DNA
ggtatctcaaagagtctttgtgcacaacaaccattctaaacaggctcttcgagaaaagttttttcttgggctgcctttgtgcagcctaggggcagctcacctgaaccagagcctcttccggggcagacgcctacgttttcagtatgtagttcactgggaagtggctccacagagacatatccttgctaattaggatcaactgaatggataatctagatgatctgcagactcgactgcggtccgcctccgctgcgccgcaggctgtgcagcgcgacccccgcggcgcttggtgggcggtgcatctctgcggcgccgaggccccgaggacttctgggccccttgggagcccgcctggcacctgggttgttagggctcgtgggaggactacaacccccagggtgcgtgggacaggcgttgccgggtcgcaggtcccgccagtgcgagcgc

SEQ ID NO: 17093 - DNA, 393 bp, Homo sapiens
  source 1..393: mol_type = other DNA
cgtttaggaaatgaattcaaagcatgtgtaagttgcaccgaaatactacatcatgttctttgggacatacattctgtttcagaataagaatgatattcttcctttcctaaaatgtgagagttttatatggacctttttaaaataaaaaatttccagatacaattcttcaaaatcctggcttttcacaggatgatttgttattgaaaaagttgtttgcttcagaatctgaattgttttaaaagatccgcctgcgcctcgcgagcagaaagggacccgccccgccagacccgtcccctaccgagaccttgtccccgccccgcccccggccggggccccgccccgccagccccgcccccgccaccccccgacagaggccccgccccggccccggcc

SEQ ID NO: 17094 - DNA, 397 bp, Homo sapiens
  source 1..397: mol_type = other DNA
aggcctctgattcccactggtgagcttacagtggaaggctctgagtaggtcccaataccagaatttcactctgaaataaacacagactcttccttaataaaaagaatccctgtttctctagagcccccctcagaggtgaggggctgcgggatgggtgctcccctctacagcctggggcacctcccggatttgtctcctggcagttgacaagcaggccaagacctgctgagaggggcagccactgctgggcctcccttttgaggagccccggtcaccttgggggtcatccggaggtgactgccagccaggtgagaactggtctggtgatcccttctggcaccagggccccctagtttttctcagacacttgcccctggtgccgccagagctgctggtg

SEQ ID NO: 17095 - DNA, 689 bp, Homo sapiens
  source 1..689: mol_type = other DNA
cggcagaggcccgggaaactcctggagatcccgctgcccccggcctccccgcgcccgtccgcccacgcaggcctcccgggcctctctccggaacgccgggtgcaccggcccggaaggggaggctggggtgaggctgacgcgcggcggctcgaggtgcccttccacggggcagcagaccccgtaccccggcacggcaccgtcccaccggccacctcccatccggggtgcctggagccaaggaaggagccgtcccagagcgccgccccccgccctcctgcagcagcccggccgggccaagctgggcgagctttaactctcgagagccgagatctgggggtgcgctcggcccctgcccgccacccctgctccgccgcctgaagcgggagccgcctccgcgggggacggtgccgggggaggggtgataccaatcccgggggggggtcccctcgccggcctccctcctcgcgcccccgcctaggctggcgaggttggtaccgaccattagcagctcgggtcccgccggcgctggcgcgggctcggggcgggggcggggcgggggcggtgggggcggggcgggaggcgccggcagagccgcggcggcaccggcgcatccgccgccacctcggggactctgcgccggcccggtcggctcggctccggccgcgcgcccccctcgcccccagccttcg

SEQ ID NO: 17096 - DNA, 388 bp, Homo sapiens
  source 1..388: mol_type = other DNA
ctggtggaaaactccagcgtgtgattcacgaggcaacctggctctggtaagagagggctgtcccctgtgctgcacatacccgtctcctcatccctgggaaggagatgggaggtcagggtgtgagtctctgagccccttcccctgcccaagggagcagcagctcagcccagctctggaggggccatcatgggactgtgcccacggggagggcaccggtctggagacagcacatacacacacggcttctttctgtctgggagtccacgtggagggcagtttccctttcaggccttgggactctcctggagagccaagctgaccacaggagccggtgctggggtctccaactgctgctcagaggggctggagaggggtgccccctagctcc

SEQ ID NO: 17097 - DNA, 388 bp, Homo sapiens
  source 1..388: mol_type = other DNA
cagaggtgcctgggaccagattgacagactgggaaaccaaggctgacccttgcctagctgtccaggtctgtctggtccctctgggtgctttctctaggaaaatcccaaggagaagggaaggtccagggccttgcctggtggaaaactccagcgtgtgattcacgaggcaacctggctctggtaagagagggctgtcccctgtgctgcacatacccgtctcctcatccctgggaaggagatgggaggtcagggtgtgagtctctgagccccttcccctgcccaagggagcagcagctcagcccagctctggaggggccatcatgggactgtgcccacggggagggcaccggtctggagacagcacatacacacacggcttctttctgtc

SEQ ID NO: 17098 - DNA, 389 bp, Homo sapiens
  source 1..389: mol_type = other DNA
cggcttctgctttcatagaggcaatgggtctgagagctgagacctgctctgccttcctcttcatgtggaaccccacaggagaggctgactgagagtctcacttcacaccccgaagcacatgtaaaaggaaatttccctttctccctgacagtgctgtaccccacaccaggtgggcgtgctcagggacagtgaccaggacgctgttctggaggagctcagaggtgcctgggaccagattgacagactgggaaaccaaggctgacccttgcctagctgtccaggtctgtctggtccctctgggtgctttctctaggaaaatcccaaggagaagggaaggtccagggccttgcctggtggaaaactccagcgtgtgattcacgaggcaacct

SEQ ID NO: 17099 - DNA, 428 bp, Homo sapiens
  source 1..428: mol_type = other DNA
gtaggactcagaccccacactctctggtgtcaaagtctgagcgttccactacatgtactgtgcttcagcacatggctgaggtgctctcacagccgcctctgtgggctgttcctgcagacttttctctattgatttaaaaaatattttaaaattctagcatattaaaaaatctaaacaatattgaaaaaaaatgtaactactattaatcatttagcgaagattttttcagactttttctatatgtgtataaatgacatctcaaaacggtaagataaatgtatttttaaattaatctacacagcaaaaggaatacgaggcaggatccctccagagagaccctgagctcaccaggtgggaagcgcacatgagctccggggcgacctgccagggcgtgcacactccccagactgcgaaatcactcatgtgtg

SEQ ID NO: 17100 - DNA, 315 bp, Homo sapiens
  source 1..315: mol_type = other DNA
tatttaaattaagagcagaaagaattaggattatttcttgattttttttttttttttttttttttgctcaggcaactgaatagatgaatgaacaattaaagtactttgagttatcaaagttaaagccagctggcagcggtgcttaagattaagcccggcgtgttttcgagtgcatcctccgcgccggaagaaagcgtcacgtcgcgtcgcgcctcgccccgcctcgttgcgcctcgccccgcctcgcccgtcgtgcagctgcggaaggattccgtttcctgcagggggcggagggatttgacagcacggtaactt

SEQ ID NO: 17101 - DNA, 324 bp, Homo sapiens
  source 1..324: mol_type = other DNA
tcctaaacctctaaattttagaattattcaataaggagttcttgtctagtaataccatccctatgcaaatatttgatccaaccaggtcttgaataaagagataagaatacgtcacgtcataatacttttcagacgaggtaccttgggcggccgaattttgcagatgccggttttctccgccaaaggccggatgcggccgataaagctgagccggtggcacgaactccgccgcgtagccccccggccccacgcccgccattgcaacggccgggggggggggggggtccccaggacttttccggaagttaccgtgctgtcaaatcc

SEQ ID NO: 17102 - DNA, 318 bp, Homo sapiens
  source 1..318: mol_type = other DNA
cccctgatttgttactcagaggggttctaaagtcaccacaaaaacttctgtagatcatatggaaaaagatgtttgtatttaaattaagagcagaaagaattaggattatttcttgattttttttttttttttttttttttgctcaggcaactgaatagatgaatgaacaattaaagtactttgagttatcaaagttaaagccagctggcagcggtgcttaagattaagcccggcgtgttttcgagtgcatcctccgcgccggaagaaagcgtcacgtcgcgtcgcgcctcgccccgcctcgttgcgcctcgccccgcc

SEQ ID NO: 17103 - DNA, 303 bp, Homo sapiens
  source 1..303: mol_type = other DNA
ttaaagaactgcctttgaaattatctacaagtcccaaaggaacaatgcctttgtttataggtaaagcacctatctccaatacccttgcttagatatattcttatagcttgtctactaacaattaacatttgtgtgaatttttttcttttagccacgtgacaaatctgtacaatttcactatcccttatttcacaaatgaggaaactgagagctaggagcggcgcggcgccactgagcgtcccccctttggaatgcgcaccaatgggaagggccttcacacagaggcccgccccgcgcagaggt

SEQ ID NO: 17104 - DNA, 483 bp, Homo sapiens
  source 1..483: mol_type = other DNA
ccatcttatatgggcatggttcatggtgcccctaaacaattataatagtaatataaaggataacataacatatacaataattatgaaaaagtttgaaatattgtgaaaattaccaaatgtggttgccacaaaccttacatttgtaaaaacagtttagcagatgcacgttaccttgctttctggaaagataagaccataatggattttgaacttgcttttatcattaaagcccagtgtatttctccggaaaaggaagcagtgtttgctatggaacaaatagtagaattttaatacagaagaaacttttcttagaatctttatctcttgagacaagcttggaaattacaaccctggaggagcgggttgcagcccagctgcgtcgccccgcgcagagctccagacctctgcgcggggcgggcctctgtgtgaaggcccttcccattggtgcgcattccaaaggggggacgctcagtggcgccgcgc

SEQ ID NO: 17105 - DNA, 512 bp, Homo sapiens
  source 1..512: mol_type = other DNA
caggacctgtgtctcctcaggggcgggcccgtgggcccagcagcgaaagactgagcattgtgtctaaagtggactgtttaccatttaaatgattaaatccaactatgcttcatagattagactaaaaaaaggcatttcatagaactgaagaaatcgcctttttttttttttacatggtaaacgtacaagcttgtgtctaaaccttgcttcaggaacaagccagaaaaactttctaaaaaaagactccctcctggtaattttattttaaaagtagggagaatccctgctccctctatggctaatcaagggaggagttgaaggaatcaaacaatccgtcagtaaaaacgtattgttcactcactttgcagaacaaagcctatgctttggagcctattaggtaaactacaatttttttaaaaacttttagggattcagtattgagactgtgctggaggtcactccacccgtggcgactggggactggacccagcggcaatttgcttgataaacat

SEQ ID NO: 17106 - DNA, 239 bp, Homo sapiens
  source 1..239: mol_type = other DNA
tttattatttttcagacaaagcaaagatagggaggaggatggaaggtaatcctccgtgtctcctcctcaatattaatttcatgcaagatgaacaacagatcatttttcattgcatggcaaccctaagagctctctaataatgatttccctttcagaagggagtcccagggtgcctcggggctagcacgcctgcgcaaaagccccggagcgagtgggtggggctgctccgggcggcgggg

SEQ ID NO: 17107 - DNA, 215 bp, Homo sapiens
  source 1..215: mol_type = other DNA
cagagtgagactccgtctcaaaaaaaactatgtctgggtgtggtggctcacccctctaatcccagcactttgcggggccaagtcagcagtgagctgtgattacaccacctccagcctggccaacatccgagatggcgccactgcagtcaattgcaatatcattaacataccataaatacttgagttatttgtcctcccaggtgggtgtatgagac

SEQ ID NO: 17108 - DNA, 583 bp, Homo sapiens
  source 1..583: mol_type = other DNA
aataatgatttccctttcagaagggagtcccagggtgcctcggggctagcacgcctgcgcaaaagccccggagcgagtgggtggggctgctccgggcggcggggtgtggaggcttcagactcccggcgccatttagcgcggagagtttcccgggtggacgcggctcctctctcggccactccgcacccccatcttcggtgacagaaggcgcctgcttgcctcagagaagcagcggagctcgggccccgcggtgagcggccctcccctccccgccgttccctcctccgtcagcccccggcaccggcccgggaggagacgggtttgccaggcctggggcgggcggggaggcctcggggaagggggggcccgctcctcaggcgccgaggctccgaggctccggcccttcgcctctgggcgatgggcgacctgtgaggccggtccccatcgctgggggcgcgtgtgggaggaggcggccgcccgagtgaccgggagccgggccgcggccttccctcgcccgcctcggcccctcccactcctctgccccggggccgccaccgcccgggcgtcggacctggtcccgtgc

SEQ ID NO: 17109 - DNA, 387 bp, Homo sapiens
  source 1..387: mol_type = other DNA
cctgtcgctacaaaaacttttttttttttttttgagacggagcctcgctctgtcgcccaggctggagtgcagtggggcgatctcggctcactgcaggcccaggctggtctcgaactcctgacctcgtgatcagcccgcctcggcgtcccaaagtggtgggattacaccccggtcgtcgctaaccgaaggcgccatccggtgacgactggaggaggccgcgagaaccaccaggtccaccgctgcctcggcccgggcggaatctgggaagaaccattcatcctcagattttcccaattgtgcatgggtgggcgggccccgcatcctaatgggcactgggcagcccaccagggggcagcagagatccgacggccgcggaccgagggaagg

SEQ ID NO: 17110 - DNA, 274 bp, Homo sapiens
  source 1..274: mol_type = other DNA
acatattttaaggacatgatgtatctcagacacctacttcaaacctcactttacagttaagtaagaacagaaatatctattgactcctatagtcaaaggatgacttttcctgggtaaaatcattattttaataaacactggaaggctgggaataaatataattcacaccattcttagagatagcttatctacatccttaaattaaccagccgcccgccgattcgcttagctgtcggaggccccgaagcaggcgcagggtcggaacgtggacact

SEQ ID NO: 17111 - DNA, 625 bp, Homo sapiens
  source 1..625: mol_type = other DNA
tttatctcaccatttcatcgaaaagaaaagaagcctcggctcccgcccgatcccggagcccggctgggtggagcccgcgggtgggcgccggtggtctgggtggggcccgcccctccccaccccccgggctgccgaggagggggagggggtcgcgaagcctcacctacagctccgcccctccccgggggcgcgttgccctgcccagcccagcccgggccgtgagcacgacaggggggaagctctgggtcccgcgcgacttccgcgctgtcgccgccgccgcggccgtctcaccgtcctcagggctgccgctactgctgctgctgccgcccaggcaccgccgccgccgccactaccgccgccgccgccgccacagcacggcccaggcgcccgcgacgtcaccgcgccccgccccctgcgcgagacacctagccccgcccccagccccgccgcggggcgcagcgcgcctccccgggctcccggctcggctgcctccctttccctcagcctcccgggagcgtgacgcggcggcccgggggcctccgggcgccttccggggcacgcgggtgaggcgcggagcgtcacacgacccctgcggccacgggaggggagagccggggtcggctcc

SEQ ID NO: 17112 - DNA, 475 bp, Homo sapiens
  source 1..475: mol_type = other DNA
tcttttatctcaccatttcatcgaaaagaaaagaagcctcggctcccgcccgatcccggagcccggctgggtggagcccgcgggtgggcgccggtggtctgggtggggcccgcccctccccaccccccgggctgccgaggagggggagggggtcgcgaagcctcacctacagctccgcccctccccgggggcgcgttgccctgcccagcccagcccgggccgtgagcacgacaggggggaagctctgggtcccgcgcgacttccgcgctgtcgccgccgccgcggccgtctcaccgtcctcagggctgccgctactgctgctgctgccgcccaggcaccgccgccgccgccactaccgccgccgccgccgccacagcacggcccaggcgcccgcgacgtcaccgcgccccgccccctgcgcgagacacctagccccgcccccagccccgccgcggggcgcagcgcgcctccccgg

SEQ ID NO: 17113 - DNA, 393 bp, Homo sapiens
  source 1..393: mol_type = other DNA
tccaaggaaaccttgccctctaattagtggggtatttgctacaacagctcttacctgttgtaatgccccttcccccactgaaagggggaggctgtcaccttgtttggttactaattttaaaaaggcaaagcctttgattattactattgtagcattcgaaggcaatttctttagcagggcgacctcctcctctgggatcccctgttacctgggtctggagcagggaccagcagctcctgcctccactgtcttgggcagctcacccagaggtgctatgaactaaggccgagccctggactctagagaattattacgaaagtattgagagaacacgtttgcttctgagctgggctctgtagggaagggcccagtcactctacttccttgggggat

SEQ ID NO: 17114 - DNA, 610 bp, Homo sapiens
  source 1..610: mol_type = other DNA
agagatagcttatctacatccttaaattaaccagccgcccgccgattcgcttagctgtcggaggccccgaagcaggcgcagggtcggaacgtggacactaatttccgcccacgctccgacgtccattgctggggtcctcggcgatgcccgtgtgcgcagccccgcgagtctcaggtcacgcggccgctttcttgggacaaagcgtccccccagcagccagggtcgatcccggcgctgctcccgcggcgcttggctgccccgggcgtaacgggccacggacacgaagcggctcctcgggcttccagcgtccacttcctacggcaagcaggaggagacaagcgccaccctgcgctcgcggagccgaccccggctctcccctcccgtggccgcaggggtcgtgtgacgctccgcgcctcacccgcgtgccccggaaggcgcccggaggcccccgggccgccgcgtcacgctcccgggaggctgagggaaagggaggcagccgagccgggagcccggggaggcgcgctgcgccccgcggcggggctgggggcggggctaggtgtctcgcgcagggggcggggcgcggtgacgtcgcgggcgcctgggccgtgct

SEQ ID NO: 17115 - DNA, 678 bp, Homo sapiens
  source 1..678: mol_type = other DNA
cgggtggggaggcgctctgctgacagctgccgctcccccgtggcgcccacaggcagggcaacggctccacagttccggcagcgcaggcccgtaccattgcgcgggcgcgggggagcgggagcggcggaggggacgcgctgcagggcggcggagccggggccggcccgggcgctaccaaacgcacggcccgcctgctcgcccggggtctgcgccgagccgcgctccggccggacggccgcggcgtccttggtgcgggggccggcagctcccaagtggccgcggacggcgggggagaaggaacgcacgccgccggccgggattggcctcctggtccccccgcctgggcggcggagtgcgggcggcccggggctgagcctcctccgcgcccggagcccgtgcgcccggcccccggggccccctcgccgcccgccggcccgcggagcagcggcggcggcaggaggcggaggatgcggcagggggcgtgggcgcggcggcgcgggcggagcggcgcggcccgggcgcggcgtgggtagagccgaggcggcggcggcggccggcctccgggagcgagagcgaggcgccttccccgcccgggatgtgagcgccgtgcggagcccggggcgggggagggccgggccggaggcgcagccggcaagcggcggcggcggccggagccgg

SEQ ID NO: 17116 - DNA, 218 bp, Homo sapiens
  source 1..218: mol_type = other DNA
tcccaagtagctgcgactgcaggcatgcaggtacacttgcctcttacactagtgacccacaaacaggggtcccaatgtggcaaacagctgcctggcttcagttctatggccactcaagattggctcgcatctgtctgccaggacagagagcgtctgtgtgtgcacgcgcgcgtgcatatgatttttaaaaaaaaaaacatttttaattatatgtttat

SEQ ID NO: 17117 - DNA, 636 bp, Homo sapiens
  source 1..636: mol_type = other DNA
aaaggtaaggacagtaagccgtgggcacagactttccctaaatcgtatggatttcctttagtcaataacaagaattttgatagttaaggcatttacgccttaagaatgtgataaagaatgtaaagaactatttttctacgcagactaactcttatattcacttttcttatagaataagtacgtaaccaaatctgttcttggcttctaagaagttagaactcaacgtaaattacttactaagtaggttctgatataccattacattaacatcattttaaaaatcgctctgaattatatgtattttaagagtgactgggttttaaaaaaaaataaatcataatctttaataaggtaataaaaggcaaacactatttgggcaaaactgggctaatgtcttcacagacgacggcctaaatcctcaaattctggctcttgcccaaagtgtgtagccagtatccatagagccgcgagccggggcggccccctcctcctcagagttgtgtgagcgcctaaggagcgcacgctcctccggccctcactaagttcctggctggctcgaaccgcctcgtgcgatgcgcgtcacggcgacgtgcggtcgtgggggcggggagacgcggcggcggcggtcgctgtcgc

SEQ ID NO: 17118 - DNA, 327 bp, Homo sapiens
  source 1..327: mol_type = other DNA
acaagctggtgacttgggcaagccatgtgactctgaaaagtctaaagtcagaatatggagctctttgtcccagattttgcttgggttctccaagcctatttgggaaccaaacagctggtggtgcctgtagtttcctggaacccacctgcagccctgggcaaacccgaacctggctttgagctggaaaagagcctccttcggccctgaattccagggtgccactcttggtccctctatattcccatctatgggaaaggggagactgagctgttcccagagatctaggatgaatcttcttccagtgggaacgagagaggctgccgtctc

SEQ ID NO: 17119 - DNA, 361 bp, Homo sapiens
  source 1..361: mol_type = other DNA
cctccccaccacacatggccagggtgggtgtgacagcgtgcgctcacatcacggcccagcctagtccctcagagacagtctcaaccggttatggttaaactatctcaacttttgcatattttacaaaaatcaggggtcctgaagcttcatcagttgcacagcaaccccagccccgcccacgagcagctgagatgtggaggcgtgggtccagccagagtcccagctctgcccctgggactccccgggcctcaagagcctctgctctggccatagtcacagcaagcccttcctgggtccagaaggtggttccacaggaatttccccctgccaccccctccctgctgtcaggagaggattagag

SEQ ID NO: 17120 - DNA, 435 bp, Homo sapiens
  source 1..435: mol_type = other DNA
caggctggtggggccctggctcccctctagcttggtaagaaagaggcctccaagttcttgaatgaaacggtctgcaggctgctgctgcaggctgccctgtgcccaaactcccagcctgccaactctggcattctgcggtggtcagaccctgaggctcagtgacctcggtcatctggcacatggacatgcctgtgtacccttctttcgtatgaccgagagaagggaggcaggatgggagactctgcctcaggggggcctccgcgcctgtccctctttccccagatggaggggaagagaggagagaggtggtggtgaaaccgctttcctcctccctggagcgtggccagggtgagcgctgccctcgcggccggccgtggtgctgtgctgctgccgctgtcatcacagatgcaccccagctcgcgcacacgcgtgcgc

SEQ ID NO: 17121 - DNA, 370 bp, Homo sapiens
  source 1..370: mol_type = other DNA
cttagttacaaaactaggagcctggcctatttttttggttattttccttgaagactgacttttccagttgttgtctcatgaataggtctattaataagaatattctgtttgacagtgtcatcaccattgaaggaaagattgagtttgcagtaattatttaagacatcgtgaagacttctttaggacccaaccatttatctccaaagcaacatggctttaaaaattaaaatgagatcattttgagataactcttttgatcccagtttagtctggacagaaaatttagttttgcgcattcccctgggaaagaggctgtgaattccatggaagtatgcattccaagtttcctgcccttagccctaaggtttcc

SEQ ID NO: 17122 - DNA, 325 bp, Homo sapiens
  source 1..325: mol_type = other DNA
gcccatctttctttcaagtaaaaatgttttatgaaaataaaaataaaaacctattttttcatgcagaatgttaaaaagaattgtacccaaggattaagcttcaatgaaattaataattcttactgcttatcaagatgggttaaaccaccggcgcttttaaccacctgtttttttgaccttgcagatcccctgaaagggtctcagaaactcccaaagggttccagcagagggcaggcctgggcttgtcgttgccagtggcaacgatcctcagtgggcggggcgcggccatcgaggagccggaaggcctcccgggccgtgtggtcgc

SEQ ID NO: 17123 - DNA, 388 bp, Homo sapiens
  source 1..388: mol_type = other DNA
agttccgagctgggcgggccatgccttgccaaccccgctgctcgcagcatctgcaggcgctgagcgaggcatcgctgcctggccggggtcgctttccccggctctctgcagcggggcagcgctgtccttgccctctttcccccaagtagggaagggtctacgcgggaggccacgccgcccgtggtgacggccggtcccggggagggggcgccgccactgccatcccgcagcctgcgctccccacaccccgccgcaggcgcagcggactggtggagtgatgtcgggagatcgatcgagaagatcccgagtagcccgaaccggctcagtcccgcctcccagcccctccctcgcggcggggcgggaccaatcgctccccgagccgctcctg

SEQ ID NO: 17124 - DNA, 806 bp, Homo sapiens
  source 1..806: mol_type = other DNA
tgatcaaacagaatcacggaattcatcttgccgttttgttcagtggcccgatccgaaacgagaccacagaggccttcccggcgtggccggcccagcagggacgcgccgccgcagcggaggagagaacgcgggcggggggctgcaggccggcgcggggggcgcgacgccgccggcggggcgcgagggggtgtgtccgcgccgcggccaccgcggccaccgcggctggcgcccgggtgcgccgcgcgccccggcctccccgggggctcctcacgccgcccctcgcccgccggcggccggggcccgctccctttgacgtcatgcgggcggagggctcgctcgggcggcgctgccgcgggcgccgggagggggcccgacttcgggctccagtccgccgccgtgcgccccgcgccgtgcgcccggctccctgcgcgccgccgcagccacatctggaagcgttcagcgcgtctgcctccggcgcgccgggcgggcgggcgggcggcgcgggcaggggcgggcgcgggcgcggcggggctgggccggggggagtgagcgcggcgctctcgcgcgcccggtgtctccctctcgctgcctctgcagaaacagctcctgccagagcggcgctcggcgcggcgcggcgggcccggagcggcggcggcggctcttcctgcctccgcgcccaggagttgccggctccctttgacagcagagagccgggcaggggcctcaggaggactcgctgggagtgggcagaggcgcctcggcccctgccggcccaggcgggccccgcgcgccccccgcccctcctc

SEQ ID NO: 17125 - DNA, 443 bp, Homo sapiens
  source 1..443: mol_type = other DNA
attgctgaacctgttttcctcagccaaaaaaaaaaaaagctcgcatgtggctgaactaattatgtgaatattcagcaggtttttaacacatacactgaaaaaaaaaattttttttacattataagccagtatacacatataagtatatacaattgaaacaagagtttcattatattactattgtatttaattttttatatgctgattgcaactactaatgggtagttttttaaaaacacttttcaaaaccatgcaattatcagttattacgaagattagtaagattctcaggaatggtctgatggctaggaatcttcattgcctgttgccaagggaacagattacccacggtctgcagccctgtggagaccgtgggcctgtcactcacatcagagttgggaagcccgcctccaagcccgcctcctctgtggttcaggcagtga

SEQ ID NO: 17126 - DNA, 374 bp, Homo sapiens
  source 1..374: mol_type = other DNA
tcaatgtcatgcatgcatctaatggaatatgcttagaatgcatatgtaagtatttgcataaagaacaatttcagcaggcggaagtggaagtgcacacttcaacagcttataacttctgtatatttgaaatgcaacattttttaaagatggaacccagaatccagagtcaattagttaaagactctgagaggagggaaggacgctctcatgctgcccctcccagttactggcctgcgcgccagccctgggctgcagataatgccaggagaaaacagctgggcagtcctgggaagccgctgggaggtgcactaaggctgctgccccaggaccccagcgttggggatgcggccaagtcagccagctgtgggccctgc

SEQ ID NO: 17127 - DNA, 470 bp, Homo sapiens
  source 1..470: mol_type = other DNA
ggtctcgaactcgtgacctcaagtgatccacccacaattccaggggaaggaaagaatcaactagactggttgactaagtcaataaataaagcactacggtctaaaggcttttgtagtctactgtgggaaaatggggtacgatttcccccagtgagtgtcgcctggcgtgaccagcgcggcaggaaaagcgggcccagggacccgggcctgtcacgccgcttccgcgcgcccacccacgcggcggggacccctccggcccctccccggccccacgcacaagccggcctgcggtccgccttaccagcccgggccggacggggccgcagctcctggcagaccgcacagccttcgagcccggaatgccgagagccggcgccgattggcgacgttccgtcacgtgaccttaacgctccgccggcgtccggtgccagaccccacccccggccccggcccgggaccccctcccctcc

SEQ ID NO: 17128 - DNA, 391 bp, Homo sapiens
  source 1..391: mol_type = other DNA
atcaatgtagtacaggcctaagaaggtaggccaccccagccctcccgaggccgcgggcagggtgcggaggtcagacttgccctgacctccgcgcccggaggccttgctccccgcctgtgcccaggccaggcctgggactctccagactgcagtcgccgccgccgttaggccgtagctccgaaggcgggctccgggctcctccaacctgggggccgagccagggccccggacgggggctcgcgccggaccggccgggtccccggcggtgcgggcggggtgggaaccccgggggatcccgggaggggagggggtcccgggccggggccgggggtggggtctggcaccggacgccggcggagcgttaaggtcacgtgacggaacgtcgccaatc

SEQ ID NO: 17129 - DNA, 270 bp, Homo sapiens
  source 1..270: mol_type = other DNA
cctgccgcgctggtcacgccaggcgacactcactgggggaaatcgtaccccattttcccacagtagactacaaaagcctttagaccgtagtgctttatttattgacttagtcaaccagtctagttgattctttccttcccctggaattgtgggtggatcacttgaggtcacgagttcgagacccaaatgttgaattattgctgtaaattgaaacattagaggttaatgatactttgagtatttacaataaggtgtgagatctgatgcctt

SEQ ID NO: 17130 - DNA, 245 bp, Homo sapiens
  source 1..245: mol_type = other DNA
actacagtaagacattggggatcccccaaagctgtggagaaggaaaacagccttcagcccagagcctggacctgttctggtcctgcttgcttacctcagggagagagggaagctattccttgtgaaaagctgactgccatcagtaatctcaatagaaaagagatatgttttctggagtcataaaggaattcaattcctagggcaggctggagtgcagtggtatgatctcagtagctgggaaccag

SEQ ID NO: 17131 - DNA, 303 bp, Homo sapiens
  source 1..303: mol_type = other DNA
ccgcctgtaacaggcagtagtggcccctgcctgtaatcccagctactccacaggctgaggcaggagaatcgccgggccactgcactgcagtctgggcgagagagaaaccctgtctctctgtagagcaggtctaggaatcctcacagggcagacctcgggaagcgctctggataggagactcctctgaccggactcgcctgctggccgcgcggcgggcgaggcccagggccccgcgaggcgctccagaggaccaagcctccgcgcaggcgcgttgttggacgcggttgccaggaggcgggacgc

SEQ ID NO: 17132 - DNA, 596 bp, Homo sapiens
  source 1..596: mol_type = other DNA
tgtctgaagtccagacaactctgagctctttgagggcaggtgctgacggctgatcctgatcttcacagtatctggactcatcacacatcttagatgaatattcattgagtcactcccatggcatgccacatggactatctgggaatggagcccgcgagttcctgcttcctggttccccggagcaagtgtccggtgggagccgcaggaagggagcagcccttcctgcgcgccgggagcccgccccttccccggcctcccagggactcgtgcggagggacgccgggtggcggggcgggagtctgggccccgtccacccccccgcccccgggacagccccaccccggcgaagaggaaggctctcggctcctggggggagtcgggaccccgccaggaggggagggcgcggggcgcgcagcgtgggggccgcagccgaggcccgggtggaggggtccccgccgtccctcggccccctcccccgccgcccgccccggcccggcccggccccgccccgccccggcggcccggcccctcgcccgcccgcgcgcggcgcagtctcctccccgaggtgccggtggccccgccgccactccctccgg

SEQ ID NO: 17133 - DNA, 690 bp, Homo sapiens
  source 1..690: mol_type = other DNA
cttccccggcctcccagggactcgtgcggagggacgccgggtggcggggcgggagtctgggccccgtccacccccccgcccccgggacagccccaccccggcgaagaggaaggctctcggctcctggggggagtcgggaccccgccaggaggggagggcgcggggcgcgcagcgtgggggccgcagccgaggcccgggtggaggggtccccgccgtccctcggccccctcccccgccgcccgccccggcccggcccggccccgccccgccccggcggcccggcccctcgcccgcccgcgcgcggcgcagtctcctccccgaggtgccggtggccccgccgccactccctccgggtcctcctcgcacactcgaggccagggggcgggagggccgcagctccggcgccgccgcgtcccgccaggtgagaggcgcccgcgcccgccgcacccgccggcgccctcacgggccgcgcgccccacgccgccgcagccgaccgctcgcgccgcgtgctcggcggacctctgcgctccgacgcgctcctcactcctccaggaatagggatcccccctccgcgcgctccgctccgctccgctgggcgcaccggggccggtcggcgcggggtgggcttggccccgcggccccgccttcactgcgccgcccgtcggccccggccggagcccggctctgcgc

SEQ ID NO: 17134 - DNA, 355 bp, Homo sapiens
  source 1..355: mol_type = other DNA
ctatgttttccaatagtcttagcaacaacacagaatataaatttgaatttcagataaacaacaaatacgttttttttttaaaaagaataagcatgtctctcactttgagcgggagctccagcggaaggaactgtttcctcactctggcatgtgcttctttaaaatagcagctccagtgggctgtttttttaaaaaaattatcattttttctctttttcttaaaaaaaaaaaaagctacaaaaagtcctgagctcaatttattttttctttaaaagtaatttatttgattctgattacaaaatataccctttgtacaacagcaagctcatgctgtccccaagcgcttgcgcattct

SEQ ID NO: 17135 - DNA, 594 bp, Homo sapiens
  source 1..594: mol_type = other DNA
gcttgggcccactcccaactactcaggcgggatcacttgagcccgggagtcgaggctgcagtgagccgtgatcgcaccactgcactcctgcgccagacatgcctagctggagttaggcacacggtgccctgtagtcgcccttggaggccgccagctcctggggaggcatggccctttctgcgggaggtgtctcaggcaggctccacgaggccaggcagcctggcgcgagggagagagccgaggcctgggccaggaaggcccttgggtgccgtgtgggcgcagagcccaggagagcgcactgccaggcccggacctccccgcccctaccccgggaagaggcccgttcgccgcagggggaaggcgggtagcacctcggaggagcggccggtccgggcatgcgggcggcggggcggggagggaggcttccggaaccccgagagagcacccgtgcctcgcgggccccgtgccccgtccccgggctccccttcctctaacgcaggggacccagcccggggcagtgccgggcactggcgctggcgccccgctcagccccgctccgcccccgggccgccccgccccgcaggctcgccattc

SEQ ID NO: 17136 - DNA, 488 bp, Homo sapiens
  source 1..488: mol_type = other DNA
gcaaagtgtggtgtcccggtcggcaatgcagacttctgcactagctcgtttctctgacctcacgggagagcacccagacagtgggcctgcctggggttccagccgccgcagcgtcccaaccgagaacgcggggcaagggttcgcgcagctgcaggagcctggcggagcgccttgtgtgcgcgcccgtgcgtgcgcgccgagggggcggggagggcggcgcgcaccccgcagaggcccccggcgctttccgatacccacgtgtgcaaagccgggagaccgcgtgccctggccggacaggcccccaagtgcatagggggcggcggccagctcgacagcggccgcgcttctgtccccctggttcacccctcagctgcagggggagggggtggctccccagcggggccgggaaggcctcgcgcccattggtcgaatgcgcagggggcggggccgagggcccggggagggggctccaggcgatttcagagtcg

SEQ ID NO: 17137 - DNA, 390 bp, Homo sapiens
  source 1..390: mol_type = other DNA
aaagggagaggcagaatggggtcccccgcttttgttctatctcccactgcccgacagatggccagtgggggggcactgcagtctcgccctctcagcctgaaaggggcttggagtcccaagggctttgggtccgagggtgcgagttaactgtggcccggtctcgcccggacctcgccctaggtgggagcacgcgcaccgggtctgagaacctgcaagagcctcgcccggcgccggctttctctgggccccccgcgcgggcctggcctccacgtaagttgtgtgcagcgccagggcggccgagaccctcggagactaggggagggggcgggcccgggggcgctgggggccctcggtctgcgcccagccgccgccggctccagcccctaggag

SEQ ID NO: 17138 - DNA, 206 bp, Homo sapiens
  source 1..206: mol_type = other DNA
aggtttgtcaaagatactatttctatgcaccaccatggaggggctttcttcccaaggcaggttttgtgagcagttcagcagaagaacctctagatctttcacagacaccccggatacaatccacaggatggagatctttctgggtgcacagacaagggaaggccattcactgtttcattgtgataaaatatacataacataaaatg

SEQ ID NO: 17139 - DNA, 427 bp, Homo sapiens
  source 1..427: mol_type = other DNA
tataacagctgctctctccaaaaaggtgacatttgaagaacagctggtgtttggcaacagctagctgcagtttattaacaaatacgtattgggtataaagaataaggatcccctttagtttctgctcccagaggtaacagccggagtgacgccgggctgctgccgggttttcgggggtgcactcccagacaccgagggccggactgatgccccaccttgggagcctgaatcggggcaaggggcctaccccggaagcccgaccagtcaggccggctaagtcggcagccgccccgccctcgccacccagcctccctggcggcctcaggtcgcgcctgcaggcccggaccccaccgcttggcgcgcgcacgtcccggagggcgtccagggggcgccgcttcccgttcagctccgctgaggggctggtcca

SEQ ID NO: 17140 - DNA, 414 bp, Homo sapiens
  source 1..414: mol_type = other DNA
atggaagtacatcagtaggaatacatcctcatggttttaaacatcttgagggagcttggataaatcatattgcactttttaacttttctaaactactttttgctttcttttctagattataaaatcttgaaataaccgtcacttattgaactctgtgtgccaaatactgtgctaaatgctttcaataatctcactcatagggagatattactaccatctccattttgaggatgaagatattgaaagattaaaaatttgtttcatagccaggacgaccgcccgcgcgcgtatggataagcgtgcaggggcggctgactggccaacgtcgggcggaagtcaggccttatctccgtcccttcgctcccggggacccgcgggaaaccgcggctagccgcgggagggggtcaccggaac

SEQ ID NO: 17141 - DNA, 520 bp, Homo sapiens
  source 1..520: mol_type = other DNA
tcaggagcctgaggcacgggaatcagtgagccaaaatggcgccactgcgctccagcctgggcgacagaaatctttaaagtgaaaaaaaaatcaggttctaaatctataggtattctttgattacatttttttcaatgtgtagaggcatagaaaagtccagaaggatctataatgagctgtttaattttcatggaagtacatcagtaggaatacatcctcatggttttaaacatcttgagggagcttggataaatcatattgcactttttaacttttctaaactactttttgctttcttttctagattataaaatcttgaaataaccgtcacttattgaactctgtgtgccaaatactgtgctaaatgctttcaataatctcactcatagggagatattactaccatctccattttgaggatgaagatattgaaagattaaaaatttgtttcatagccaggacgaccgcccgcgcgcgtatggataagcgtgcaggggcggctgactggccaacgtcgggc

SEQ ID NO: 17142 - DNA, 416 bp, Homo sapiens
  source 1..416: mol_type = other DNA
gcgcggagaaggcgggactcgaactcgcgctgctcccgggccttgagccgaccgcggaatcacctggctgggaggcatcctccagctgcaggctcctgcagaaaagtggtcctacatgggatatatatatatgtatttttttttccgtgaagggttggacttcaaagccagagcacaggctcttgcgctttttcttgaaaccagtctacactgaaagaaagtgtgcacttttgcctagaaggcaacatgcgtttcgccgagcctgccacgcgggaagcgcccgaacttgcgggtctcccagagggcgccgggaagggggggcatccggccgcgaccctctctgcccctccctggaatttctctgtaaagcaagacggaggagggaaggggcgagagggccctcggctcactcccga

SEQ ID NO: 17143 - DNA, 442 bp, Homo sapiens
  source 1..442: mol_type = other DNA
ggagcgagggggagccggacctaatccctcactcgccccctccccccggtgtggccacgctcagcgcagacacctcgggcggcttgtcattcctgcgtggccgctggccgcgggggaaccgctgggagccctgcccccggcctgcggcggccctagacgctgcaccgcgtcgccccacggcgcccgatggtttctgctcgaggatcacattctatccttcttcctctgcacacactctgcaggggggggcagaagggtttcgaaacagcttcgaagtcggacatgaccaaatcaccccctcccttatttttcacttaagggacctatttctaaattgtctgaggtcaccccattctaccctacattcctggatcttaaatacaagggcacctgtccggggcccctggcatgcagggctggatgaggagagctaactgcccag

SEQ ID NO: 17144 - DNA, 509 bp, Homo sapiens
  source 1..509: mol_type = other DNA
tttaaaagtaaaaagcaaagaattgaacatactgacatattgattctttgaaaagaaatttagaactcatatctaagagactgaattcgactctagaatacaaccgggaccagtggagagagcatcaacagtgaggtctctcttgataaacaggcttagcaggattctctaagtctacagacctggccgacgctacgtccctaaggttagggactaacagacctcatagaacacagtctgtgccggcttccttatctgccccgaacgcaggctgccggctatcgagggaaggaatcctaccgcggactccgcgggcggggcctcccgcacctgccgcgcgccaatcacaggccggcgcgcaggggcgcaagcgccgcagccctgggcggggcccccgtggctccctcgtctcccccgccccgtcggcctcgcccggccctgagtggccttcggggatgacgtgcgaggccgcctcggcctatggcggcggagccggccggctgcttggc

SEQ ID NO: 17145 - DNA, 226 bp, Homo sapiens
  source 1..226: mol_type = other DNA
tcaggtgtagcttcccagagggctcactgtgaacagcatctgcagaaatgtggggacaccctgtcctgaggctcggatccgaatgagtctccttactactggagagactactagtttattcccaaaatggcaactttggctttttcatgaagtgggtgttcttagaggatgccatctgccattaattgcccatttctttgatgtcacactgctaccctttaaaagt

SEQ ID NO: 17146 - DNA, 228 bp, Homo sapiens
  source 1..228: mol_type = other DNA
ctgcaaatatagaagttctcatgtacatcaaagacactcaagttttttttaagaaataaatcattttatgctactgaaataactctgtgattatctgcaagcattagacatgggaataatatcagtcacatgccagggatactgtgtcaaaggccagacacaactgggaccaggacagtgagcaggcaaaccttgcccttgccctggctcccagaacccctggggagt

SEQ ID NO: 17147 - DNA, 228 bp, Homo sapiens
  source 1..228: mol_type = other DNA
agaatagataacgtagaaatgttaaatcaatacaacaggaatgcttactctttctatatcaaataactacagtgataaacaaataaaatgcttgcggcggcgcacgcgctgtggggaaagcgaatttgctcccgccccgtatccggtccaccagtgaaatacagaataatacaccttattgcacctttcaaattgttaaattgaaacaggttttttctcgcggatccg

SEQ ID NO: 17148 - DNA, 346 bp, Homo sapiens
  source 1..346: mol_type = other DNA
attagtaggagaatagtaaacttgtttattttatgagataaatactacacagcaataaaaaatgcaaaaatatgaatgtcaacatttagacttgtgtttcaagaaactgataactttagaggctctgagttcagccgggtgaggggactaatccctctgtagtccgctcactcgagctgtcagcgcgtcctgcactgggaccagctgcggatccgcgagaaaaaacctgtttcaatttaacaatttgaaaggtgcaataaggtgtattattctgtatttcactggtggaccggatacggggcgggagcaaattcgctttccccacagcgcgtgcgccgccgcaagc

SEQ ID NO: 17149 - DNA, 245 bp, Homo sapiens
  source 1..245: mol_type = other DNA
tcaactcagctctttcagaaagctccagactgtgcacggagtgcagtggcgcgatctcggctcactgcaacctcccgggttccagcgattcagtagctgggcagtttggtctcgaactccagacctcaagtctgggattgcaggtgtaaaaccacttcttgccctatactttaaagaactggacgaggagtatgttcttcaggctgctacgcgtttcagcgacgggaggagggcgtggccgtccc

SEQ ID NO: 17150 - DNA, 432 bp, Homo sapiens
  source 1..432: mol_type = other DNA
cagttttggccaatttatcataaaatgtatcataacatgatgacaccacatgatttttaaaaatgtttttattttaatttttgtgggtatatagtaggtacatatatttatgggatacatgagatgttttgatgtagatatgcaatgtgtaataatcacatcatggaaaatggggtatttgtcaggcatttatcctttgtgttacatacaataaaatacaattaaattactattgattatagtcaattaaattgtttggatttttagatcccataaataagtgagaacatgtgatatttcatccttttttatgactgaatagtattccattgtgttcctgattaatcagtcaatcagtcattatgttgcactgaggaagatttgtgtgatataacaggaagaacttccacagaatactctctatatattgac

SEQ ID NO: 17151 - DNA, 436 bp, Homo sapiens
  source 1..436: mol_type = other DNA
agctgattttctcttctttaaattggaggcaataatactacttgcttcacagaattaaactaaacataatgtaaataccattaaatccatgttctaaaatactctgtgcatgtgtactttgcaaagtaccacaaacacatggcaggatataaacattatttttattaaatctctattttgttttaaatcacagaattatgttctgacaataaccaatttaagaattttctttctatacaataagtgcacatgctatattgaatacagactttgcatggataactctcttgccaagtcaaatcaatctgacagtttgaaaacttagtcttatatttgtcaataaagcagggacagtcacacctcctttataatttctaagtgctggccagctgcacttccctttcactgccagcgggggcgcagtctaactgagaag

SEQ ID NO: 17152 - DNA, 408 bp, Homo sapiens
  source 1..408: mol_type = other DNA
caattcctttttcccctctgagacaaggaaggacaagacagtccgggaattaatattctagaattctgtaaatttttgaagccccatctgtagtctggaaattaaaatctttgtttttaatattctgtttaatatgctgtttaagcatttctgaaggatttgctctgtcagtgccagattatggcattatgcaaatttttatatgcaatatagcctagtggttaggtacatggtcacaagagtcaggttacctgggtaaatgtacagtgcttagaataatgcccggcacattggaggtgctttacaatgaactgtttttatatcatcacgtaagtgaaaaggacaattaacatataatccacatttgaatctttctctctcctttagcagatgagatcaccaaagaga

SEQ ID NO: 17153 - DNA, 424 bp, Homo sapiens
  source 1..424: mol_type = other DNA
tttgaagccccatctgtagtctggaaattaaaatctttgtttttaatattctgtttaatatgctgtttaagcatttctgaaggatttgctctgtcagtgccagattatggcattatgcaaatttttatatgcaatatagcctagtggttaggtacatggtcacaagagtcaggttacctgggtaaatgtacagtgcttagaataatgcccggcacattggaggtgctttacaatgaactgtttttatatcatcacgtaagtgaaaaggacaattaacatataatccacatttgaatctttctctctcctttagcagatgagatcaccaaagagaagcaggactgtcccagcacggagctgacactgttcagctgcctcaactgggcggggcggaggtgtccatgacctccccaggacagagcaa

SEQ ID NO: 17154 - DNA, 368 bp, Homo sapiens
  source 1..368: mol_type = other DNA
tagatggctctttgtagaacaatgcagattctatctgcagttaagaactcctagattcatatgctagttggtgagtatataaacttaaaccaaaaattggtggaataattacagttttatccgaagaggtcacttttgagcagagacttgtgggccctggatctcctgagcgcggagggctacgcctccttcttcctcagcttagcttacattttcagggaacaggaaactgagagtcaggaaaggtgagctcttctacctgagtcagtcactggttaactctgaacttcaggttcctcggcaattagagattataaatagcctatacagcctataaaccgtcgtttcttggttagcgcttgcgcacg

SEQ ID NO: 17155 - DNA, 437 bp, Homo sapiens
  source 1..437: mol_type = other DNA
cattttctatccctgcgaaacagaagaagtgattccttttcattctcagcacatgtcaccatgtgctgtgtttgggacgtagtaaatagtccaaaaactttgaacttttagccttggggaacaattttatgtgtttattctacaatgatgatcactggtgatttgtccaaaacatattataaggtcatcccctgaggctcaaccccgggcaccgtgcttctaggcagtgaagtcctaggaactagcaagaaagtccttaagtttgtgggacaagcatttgttgcacacctactatgtccaaaacgttaggtaaaaagacatcttagatcccagctctaagtctcccaggtggtttttcacccaggcagcctgagctagctgcaggagcaagcattcttctgacttctgagacccaggtgacttacctgtcactgggc

SEQ ID NO: 17156 - DNA, 377 bp, Homo sapiens
  source 1..377: mol_type = other DNA
atcccctgaggctcaaccccgggcatgcttctaggcagtgaagtcctaggaactagcaagaaagtccttaagtttgtgggacaagcatttgttgcacacctactatgtccaaaacgttaggtaaaaagacatcttagatcccagctctaagtctcccaggtggtttttcacccaggcagcctgagctagctgcaggagcaagcattcttctgacttctgagacccaggtgacttacctgtcactgggcagctgccttggccggagaacacctaggtccaggggaccagagcgttggaggcttgctcacggcccagagctctgggctccacaatcagtgagtcattctaaactacttaagatctttaatgacttactc

SEQ ID NO: 17157 - DNA, 207 bp, Homo sapiens
  source 1..207: mol_type = other DNA
agaagtcacaatattctagtttaaaaatggctctacatagtagagaatgatctttttattctgtcttcttaaaaatacacctttctttaggtctgaagtctaccagactgccagggacctgggagctgcctgcagatcagcctgctgcagcacaatcttcaggttcccagaggacctggagctccctcctttgaccagggcgagaag

SEQ ID NO: 17158 - DNA, 334 bp, Homo sapiens
  source 1..334: mol_type = other DNA
ccctcctttgaccagggcgagaagtcatggtgctgtgtggcagcctcttctggccctgagccttgcgagggaccgcaggaggtgacgcccctgggcctcggtaacccccatcatctctgcggccggttggtccaaattctcaagcaatttcaaggtatttggattttttgggaggaaacgggatactcgctgcccttcccagtcgcgcgtgagtcaaaaggtcctggcaggacccccttctctcgatggcaaatgggcgaaatcaagatgacttaacttggtaaacgggcagctaaaattatctccaaataagagatttccaccggtggggaag

SEQ ID NO: 17159 - DNA, 378 bp, Homo sapiens
  source 1..378: mol_type = other DNA
tccaccggtggggaaggcgccacgagcgctgtccccgcgtgcagactggtgggggtgaaatgggaggctgcgatccatctccctctccctcgccgacacagcgtcctgggtgcgggtccccgggagcggggagttcgggaggaggagtttacgcctcagacctgatcctcctgaggaaacatgtaacctgttacgatacatttaacgtttcgtttttactacaatgaccccttccccgccacgggtcccgaagtgagggcggggggggggctctggggcgcgggcgcgcgcggcgcggcgcgggccggcgggggagggcggcgcggcgcggaaggggttaaggcgctgagcgcggagccatctggccgggtggcgcgc

SEQ ID NO: 17160 - DNA, 569 bp, Homo sapiens
  source 1..569: mol_type = other DNA
ctaccttacaatataggagagaaaatcttcatgcctgaaggtcagtgatcacaaatgcagaagggccctttggaccatccccctgcccaggtccgtgaactgtcccggggagatggcactcctcttcccctctggggatggattttgttctgcttaacctaggggaaggtgaggacagctggtctccacctagtatggagcaggtgtgggagatccgccgtccaggggctcgcccccactcccgccccagggctaactcttgggcagtggatgagctggcaggattggaaactaatcagccagacagttcatgagataatccgactgaatttctctgggggagcagggagcgtttactgtctcgcccctcagccccacggacccgagtgtgtcctggactcaacccggccgcgggaccgcgctccattctcgacgccccgctcccagcacccgggcgcccagggcgcagcggggagagctgggctgtggctgcgcggcgccggcggccggggcagccggcgaggggcgggcgcgccgggacggagctgagccgcgatggaattagcccc

SEQ ID NO: 17161 - DNA, 528 bp, Homo sapiens
  source 1..528: mol_type = other DNA
tttaataaggacaataagccaggctcagggccttaaatccacagcaacatagtatagtatgctggtaatgtaattggcaggctttccctttacaatgaaattatctagaaattaggaggcgacagaaaactcccagtgttcttaaatttttgaattcccagtgggccaagtagagattcagatctgcttcacaaaggtgcctagggatcttctcggtcccgcaggaatgaagagatagtaattatacttattgactacttcattgcccattagcttctgaatgtagttacaagcacaagagggccatgtggtttttagagtctacaatgatacaaaggcaagttttcctgcaattaaaattgtaccattaagtgagttaagtccagcaataactatatctctgcatatttcgggaggtgagacctatttccagcccagtgagggcactggggctgaagagtgttctctagaaccccacctgtcctgtaggtgaggagcctgtgccaggctgaagtctgaagtagaggt

SEQ ID NO: 17162 - DNA, 323 bp, Homo sapiens
  source 1..323: mol_type = other DNA
accaatccttcaagcatttaactggtcggaagagtctacacccaccctttgacaagtgtctggctgagggagtgagtactcattcttctctaagaacaagattcttctgaatagtgtggataaaattctctgcaatataggatgttttaaaaaaatattttccttaagggaaataaaatgtgagatcaaactgatttttagtctccctgggaatgaagatcctgatgactcaactggaagagaattcagaatcatcaaaattcttttacatctgggcacttaagcacagggctgtgagttcggagctaaaaattcccggagtg

SEQ ID NO: 17163 - DNA, 357 bp, Homo sapiens
  source 1..357: mol_type = other DNA
tcttcctctcctggggcggtaaagggacatgccgggtgcttgtctcagtgcctggaatcctacttatagaattattagaatgtagcaacagtagaagtattagactcaaatcaccattttacaaaggcttaggcttgtggccaagaccttcatctttagccgatccatcaaccctggccaggatccaaatggactgcagggccaggaccggatcctgggtgcataggaagtgttagtactccctggctcaggttgaggtttttctcaacttccctggagtccagccctggaagctggatcattcctggttatcccacacaggtggggcaacaaagctttatcagcttggaggtactt

SEQ ID NO: 17164 - DNA, 220 bp, Homo sapiens
  source 1..220: mol_type = other DNA
catagaactcagttcagttgtacctcttcagggaggacttctctgccagacacccagcaagagaagtctcctctctgaatgagtgcggtggcgtgacctcgcttcaccgcaactgggattagaggcatgagccgctgcacctggccagaaaaaaatctttaatcctgcagctgaggagtggagatgggagcccagtctcaaacccatctccctgacctac

SEQ ID NO: 17165 - DNA, 273 bp, Homo sapiens
  source 1..273: mol_type = other DNA
tgggttttacccccaagaaactgggggtagggcagtcccaggaaggagccatcttgacagtgaattcacgagaaacctggttttcatcttaagtttaaattgagagaggcctcagaaggcaggctggcctggcagggtgtgtgttgtgagcacatcttccccagctggcctcacaggccaagaagcagataatgcacgtgtgtacaggctggcacacgagtcacagaggcgtgagtgagtgcgctctcaccaggtgctgaaccaaaggccatc

SEQ ID NO: 17166 - DNA, 493 bp, Homo sapiens
  source 1..493: mol_type = other DNA
gatcagtgctctgtacagggccttgagggcaagacgacttaccctcaggagaagcgctccgagctcggcatctggaggtctaagccctttttccgcaggaagcgcttggggactgcccagccctcagtaggtatttgctaattacttccatgtgcccaatgaaaagtataagggcccctcactctggcagcaggccttggccaaggggcctttagccctgacgacccggggaagaccggtccggcgcccagaccaaacgcgggggaaccggaagggcgaggcctccacgagggagtggctgcctgccccatcgggctccgcggggcagctggggccggggctcgccgacctgggcgggggcggggggcggggggggtgcggcccgggcggggccggtggggcggggcccggcggggggagtgggggcggcttttcccggcacatgcgcaccgcagcgggtcgcgcgccctaaggagtggcactttttaaaagt

SEQ ID NO: 17167 - DNA, 456 bp, Homo sapiens
  source 1..456: mol_type = other DNA
tgaggggctgggagcctcagacctgccacctgcctttcatggttgtgagattataatgaccacacatccacatggagtccatagatattgtctctattttctttttaaaaaataaattttaaaaataaagaaaataaagtatggtcctttcatgcaatgctggagtgcagtagtgcttcaagcggcctcagcctcccaagtagctgggacaggctggtcatccgcccgcctcggcctcccaaagtgttgggattacaggcgtgagccatcgcgcctggccccaccagccaccgcaagggctgggtgaccctggtgctgggagggtgcccccacctgagtcttaggtcataggagaagtgcgggtcaggcctcagctgcctatccctgccaccaggcaggccagccggtcctctgagagataagcagcgacggggccccctgcccctccagctggca

SEQ ID NO: 17168 - DNA, 192 bp, Homo sapiens
  source 1..192: mol_type = other DNA
attgttacccctgtttaataaactccactctgcaaattggaaaacagcagacagtcagttatgtgtctgagaagttcatttatgtgtccaagacacattcttagctaaaaagctaagcattctgaattggaacccagagaatttgactcccagactctggatcttttcactcaaggcagccagatctgggac

SEQ ID NO: 17169 - DNA, 632 bp, Homo sapiens
  source 1..632: mol_type = other DNA
gctggagtgcagtagtgcttcaagcggcctcagcctcccaagtagctgggacaggctggtcatccgcccgcctcggcctcccaaagtgttgggattacaggcgtgagccatcgcgcctggccccaccagccaccgcaagggctgggtgaccctggtgctgggagggtgcccccacctgagtcttaggtcataggagaagtgcgggtcaggcctcagctgcctatccctgccaccaggcaggccagccggtcctctgagagataagcagcgacggggccccctgcccctccagctggcaggcgggctccctgcctgcttaggggtctaggccgaggcagggggaggaccggacggccggccactcgccgcgaccagcaggagagaggggtgcctgccacaggttgtcaccctcgccgcctcccccggcggcgccccgagcgcctcgcgggggtctggcccggagtggagggcgcgcggtcccagccctcccgctcggccggcgggtgtcgaggcaccgccacgtgagctgtcctctccggggaaggcggtggctgcgtgagggcgggggctgctcggtccccagggccccgcccctctgcccctctgccccgagcggtgctggcggtagggag

SEQ ID NO: 17170 - DNA, 357 bp, Homo sapiens
  source 1..357: mol_type = other DNA
tgggaggcctaggcgtgcagatcacctgagcccaggagttttagaccagcctggttgtagttccagctacttagggtgagccttgatcacaccactgtactccagctggggactggagtcctagtcccagctcttgctggccatcagtgaaatgggagggaaagtcttgctccttccaccctaggcaaagtctctgtgtccagtgcaaccagaacaaatcggactgcttctaccagacatactcaggggtggatgcggtgagggagtggtaccgcttccactacatcaacatcctgtcgaggctgccagagactctgccatccctggaggaggacacgctgggcaacttcatcttcg

SEQ ID NO: 17171 - DNA, 362 bp, Homo sapiens
  source 1..362: mol_type = other DNA
tcccacctgagtgcgctgctcccacttagtgagcggggaggagacctgcagagacctcttctctcttctctgcagggcctgagggtgaggctgacctgtgggtgcccttggagggctgcccacttgctgagccggaagctctcagcctggctgggcttccatccctggccggccagcgggcgggctccccagccaggccgctgcacctgtcaggtgagggggaggccagattcaactggaaaggaaccagtcccagtccagccgcaacctgggagtgggaagctggaggcagcccagacctcctggagccctgcagtcctggggcaacagctcgaggtcagggccagaggctggagctgagg

SEQ ID NO: 17172 - DNA, 336 bp, Homo sapiens
  source 1..336: mol_type = other DNA
tctgtgaccacagccattcctggcctggcaccccgcctagcccccagcttcacctgggcccctcccgggtctggacaaggttggagggaggaggcagacgcatcccacctgagtgcgctgctcccacttagtgagcggggaggagacctgcagagacctcttctctcttctctgcagggcctgagggtgaggctgacctgtgggtgcccttggagggctgcccacttgctgagccggaagctctcagcctggctgggcttccatccctggccggccagcgggcgggctccccagccaggccgctgcacctgtcaggtgagggggaggccagattca

SEQ ID NO: 17173 - DNA, 450 bp, Homo sapiens
  source 1..450: mol_type = other DNA
tcatttatccataaatacctattgggcacatggtatgtgccagactctgctaagcatggggaacacagacttgaagattcagcctgggccatggtggcactcacagcctgcagtcttcacctcagtggagaccaggccaccctggaatcccggttccctctccctctccatgcttaaggtgaggggggggactgagtgcccaggtccagcctgctggccccaggacccctccccctctctttgggagggaggttccctgaggacagggagcagggcaagctgcacagctctcaagggtctcctaggtgacctgtgcccactaacgggggaggaacccgggcatctgccagccggttctcctcggtctcagagctgcttctgcggccttgcagtccccgcgccctgccatgactgcccgtccggtccaagggctgaccccgggcccgccgc

SEQ ID NO: 17174 - DNA, 517 bp, Homo sapiens
  source 1..517: mol_type = other DNA
gagaccaggccaccctggaatcccggttccctctccctctccatgcttaaggtgaggggggggactgagtgcccaggtccagcctgctggccccaggacccctccccctctctttgggagggaggttccctgaggacagggagcagggcaagctgcacagctctcaagggtctcctaggtgacctgtgcccactaacgggggaggaacccgggcatctgccagccggttctcctcggtctcagagctgcttctgcggccttgcagtccccgcgccctgccatgactgcccgtccggtccaagggctgaccccgggcccgccgcccttccctcggctgggccagggctgtccgcagtccgctctcccgatcgggcttccgaagaagggaggaggccggttccggccccgcggccctcacgtgctttcccgcatcgaggcagacaagcctgttcctcttccctgggctgcgattgcgacaggccggcctggctcccagcgctccctgtccccgccccgc

SEQ ID NO: 17175 - DNA, 288 bp, Homo sapiens
  source 1..288: mol_type = other DNA
tggcacccacatcagtcaattgaggctatttaagcttcctcccagttggtgtaaatattcaatagttttgctgcagaaaactaccccaactccccaagggtgttttgtggtgctggtttctgtataaacctgaaaaattctgaattccaaaacttatctgacccccaaagtttcagataagagcttgtggacttctttcaactgttgtctgtgaaaggagggatcctttgtgcacaagtgtccatcacctttttgtcaaagaagcaggagtaggtctcacagagtttc

SEQ ID NO: 17176 - DNA, 360 bp, Homo sapiens
  source 1..360: mol_type = other DNA
ccttctgcagacaaaggagaaagtcctgtggagcctgcagagccttgtcatgccccagggaggaggagggcagcaccatcccccctgcctgctccccctgagccagcacctgcgggagctgcactacagcccagggccctttcctgtgtacacgtgacagagtgccttttgaagcaggagcccagccagctgcgcctgcgctgcaggagggcgggggctctggttggccgcctcctggctcaggtcaggatctggcagaggctgtggatcctgtgtcctccacttttttgggacaggtggtcttgaaatcaccaggggatttgggctctggcagctgctgcagacggcttcacggctgcc

SEQ ID NO: 17177 - DNA, 334 bp, Homo sapiens
  source 1..334: mol_type = other DNA
gcgggacataaaatatgatgaacgaaagcttcgtgcttgctttggtgggacggaaccccgcatccggtatctggcaccaggagcttgtggctgtgtctcgaggctcctgcaccctctcagagcgttaggagggccagagcagggcaccagggctgggcgcgcaccaggaagccgccgcctccagctgaatgcgcgagtcccggcgcggggtggggcaggggtgcctagcgattggttgggaggcaccacaaatgcgatccagcaaccgctcctttccggagtcgggcggggcgggctaggcctgtagcgctgggcgaccgtcctggtaaaggcg

SEQ ID NO: 17178 - DNA, 437 bp, Homo sapiens
  source 1..437: mol_type = other DNA
ggtatgtatataaacccatattttcaatacatgtaaaagtaaggaaagcatttgtcacagataatttgcaaccttttttcgcccaggctggagtgcagtggcgtgatctcggctcactgcaaccgtcgtcaagcgattctcttatctcagcctcacgagtagctgggattacaggcgcccgcgcgggacataaaatatgatgaacgaaagcttcgtgcttgctttggtgggacggaaccccgcatccggtatctggcaccaggagcttgtggctgtgtctcgaggctcctgcaccctctcagagcgttaggagggccagagcagggcaccagggctgggcgcgcaccaggaagccgccgcctccagctgaatgcgcgagtcccggcgcggggtggggcaggggtgcctagcgattggttgggaggcaccacaaatgc

SEQ ID NO: 17179 - DNA, 522 bp, Homo sapiens
  source 1..522: mol_type = other DNA
gcccaagactgggtcacagatccggccaatccccggcaggcagaggcaaagggccgcctctgagtctggcaacgcgcgggacggccaatcgcgacgcccgccggagcggccggccaatcacagcgccgcccgggggcgggccaaggctccggctccggcccccgctcccacccccggccccgcaaggtccccctttgcccagtcggcggggaggaggccgtatttctgctggccagagacgtcgcgtccctggctgggcattcagtcacccccaggaaaggacgtccagcaagtcacttcactttcaggacctggaagcgggttccaggttctcaaccttcatttccttcacggttgaaggacaattttcttgaaatctcagttttggggaatcttagcgacgagtcgcggacctcagcttgtccggcgctccaaaacttccggcaggcggaccggaagcactgaggcgggaagggtggtagaggcccctcctgccggaacccggggggcggggctcgtggc

SEQ ID NO: 17180 - DNA, 276 bp, Homo sapiens
  source 1..276: mol_type = other DNA
aaagtttcctgtgtaatgtgagagaacacattagtctgaactttggaaaaactgtttatttttacttatgaagtaaaaattataaatgtaaacagctacataagtgtttgctcttactattagcttctgcacgccagaggcacccagtcccacaggcgcctaccgaagacagccatcttgggccttacccaggcagctgtgggcgcaccgcccaccgccacgagccccgccccccgggttccggcaggaggggcctctaccacccttcccgcctca

SEQ ID NO: 17181 - DNA, 554 bp, Homo sapiens
  source 1..554: mol_type = other DNA
cgaagacagccatcttgggccttacccaggcagctgtgggcgcaccgcccaccgccacgagccccgccccccgggttccggcaggaggggcctctaccacccttcccgcctcagtgcttccggtccgcctgccggaagttttggagcgccggacaagctgaggtccgcgactcgtcgctaagattccccaaaactgagatttcaagaaaattgtccttcaaccgtgaaggaaatgaaggttgagaacctggaacccgcttccaggtcctgaaagtgaagtgacttgctggacgtcctttcctgggggtgactgaatgcccagccagggacgcgacgtctctggccagcagaaatacggcctcctccccgccgactgggcaaagggggaccttgcggggccgggggtgggagcgggggccggagccggagccttggcccgcccccgggcggcgctgtgattggccggccgctccggcgggcgtcgcgattggccgtcccgcgcgttgccagactcagaggcggccctttgcctctgcctgccggggattggccgg

SEQ ID NO: 17182 - DNA, 521 bp, Homo sapiens
  source 1..521: mol_type = other DNA
tgattactcaaagttgctctgatgatcaataaagaactataaagtggcatattaatgtgcaaagtactattatttccatttttatgtaggccaaaacagtgccccagcagccagaatggtaagagcattaacaatgatgatttatttatcctgcatgtatcatatctgatctaagtatcctaacctcaatcccatgaggtgcataatagaaagttaagcgatttgcttaacatcttccgttgcggatctgttaagcgatttgcttaacatcttccgttgcggatctgttaagcgatttgcttaacaacttccgttgcggatctgtcagacttacagtttttgcccaagactgggtcacagatccggccaatccccggcaggcagaggcaaagggccgcctctgagtctggcaacgcgcgggacggccaatcgcgacgcccgccggagcggccggccaatcacagcgccgcccgggggcgggccaaggctccggctccggcccccgctcccacccccggccc

SEQ ID NO: 17183 - DNA, 518 bp, Homo sapiens
  source 1..518: mol_type = other DNA
gctgggccagcaaagaggcccgggatccccctcccatgccctcctaccagaagaatggatcccctgtgggagggggcaggggacctgttcccaccgtgtgccgcgcagccagtgaaagggagtccctggctcctggctcgcctgcacgtcccagggcggggagggacttccgccctcacgtcccgctcttcgccccaggctggatggaatgaaaggcacactgtctctctccctagggagtgcctttgtgggaggcctctgggcccccaccagccatcctgtcctccgcctggggccccagcccggagagagccgctggtgcacacagggccgggagtgcccagtgcccagtgcccagcccaggcctcggtcccagagatgccaggtgggggctgggaaggaaccacgggcccccgcccgaggcccatgggcccctcctagctttcccgcctctcagcctttgaaagaaagaaaggggagggggcaggccgcgtgcagccgcgagcggtgctgggctc

SEQ ID NO: 17184 - DNA, 563 bp, Homo sapiens
  source 1..563: mol_type = other DNA
acgtcccagggcggggagggacttccgccctcacgtcccgctcttcgccccaggctggatggaatgaaaggcacactgtctctctccctagggagtgcctttgtgggaggcctctgggcccccaccagccatcctgtcctccgcctggggccccagcccggagagagccgctggtgcacacagggccgggagtgcccagtgcccagtgcccagcccaggcctcggtcccagagatgccaggtgggggctgggaaggaaccacgggcccccgcccgaggcccatgggcccctcctagctttcccgcctctcagcctttgaaagaaagaaaggggagggggcaggccgcgtgcagccgcgagcggtgctgggctccggctccgcccacagtccagtcctgggtacgtcggggcccacacgctcggtgcgtgccggcccggctactagcggttttacgggcgcacgtagctcaggcctcaagaccttgggctgggactggctgagcctggcgggaggcggggtccgagtcaccgcctgccgccgcgcccccggtttctataaattg

SEQ ID NO: 17185 - DNA, 435 bp, Homo sapiens
  source 1..435: mol_type = other DNA
ttggccagggagcagtggcccgagccgccccatgcccacacagtgctgtggggaggccaccgctacccaggaagaggggtgctgaggaccttgccaggcctaattcgtccttgtcgagaagcgcctcactgttccctgggctccctggacagaacctgtcgaggtggatatggacatctgccgccgcatcgacatcaccgccaagctctgcgatgtggctcagcagcgcaactgcgaggacatccaggtgaggacggagctgccctctgctctcaggggtggatgcttccgtggcggctggcctggaacgcaggccctgcctcctgcttggggagccttacctggcaactggggccaggggcatcgtggaagctgtctctaaccacagaagaagctgcttttttttttttagttgagtcatttaatcaaaaagac

SEQ ID NO: 17186 - DNA, 380 bp, Homo sapiens
  source 1..380: mol_type = other DNA
ctgcccatgaaatttaatacacattttaaaacctctgggcatccttgggttttcccaggaagggaaagccctggactgtaatcccagcactttctgtcacctgaggtcaggtgttcgagaccagcctggcttcccagctacttcgcttgaacctgggaggctgaggttgcagtgagccactgcactccagcccgggcgacagtgagacaacccatggggtactggaggtcctgggctttacgccaccccggctggagtccaggcggtggcgggctcggcctcagacccggaaaggtccagggtccggcctccaattggagcctgtcattggccccgctgccgagccgcctgattggtcggctctgtcccgccggcgccgc

SEQ ID NO: 17187 - DNA, 301 bp, Homo sapiens
  source 1..301: mol_type = other DNA
cacctgagagaccagcctggcagtgagttgagatcacgccattgcactccagcctggaagacaaggaaacttgtatacagttattaaataataacagggctgagatttaaatggactccttttaattagtgtacttttttcttttttaaacagtaagtgacgaaaaaacttaagtaggttaatttgacaattctagactctcacatttaaatggcagagcctggaatcagggcagccaagaggagcctaagacaaacaggctcccagggtgggatctctgcaggagctgtccagacagctg

SEQ ID NO: 17188 - DNA, 280 bp, Homo sapiens
  source 1..280: mol_type = other DNA
ccgaggctggtctcgaggattacaggcgtcactgcgcccagcctggaattccgtgatcttgacgctggactaggtccacccgccgcgggtgtaagctgcccctactcgccgccgccggctccgctggcgttcccagggcgagcgtaagttccgggtgcggcggccagaggcggggccgcgaggctagcgctacccgtgcgcctgcgtgccggattgcacgtggagggccgcccgaagggcactctcggatcaggtggcacagtaccatggggcgcaagtt

SEQ ID NO: 17189 - DNA, 212 bp, Homo sapiens
  source 1..212: mol_type = other DNA
ctttcaacattttgtttctaattaaagtaaaaggttatgtttaggtgactttaaaaagcacaaaatcacagagggagctcagtctgggccaccacagatgtgactcgactcccctgtgaggttacacagagcgcattctcagccgcaccgctgagggggcctgagagactggtgcccttcctgcagaagagacatgcagcagtagcgctggc

SEQ ID NO: 17190 - DNA, 341 bp, Homo sapiens
  source 1..341: mol_type = other DNA
ctggagtacagtggcgcgatctcagctcactgcaactgcctcagcctcccgagtagctgggactacacgcactaatttttgtatttttaatagagacaaggttggccaagatggtctcggatttcttgacctcgtgatccgccccgaggctggtctcgaggattacaggcgtcactgcgcccagcctggaattccgtgatcttgacgctggactaggtccacccgccgcgggtgtaagctgcccctactcgccgccgccggctccgctggcgttcccagggcgagcgtaagttccgggtgcggcggccagaggcggggccgcgaggctagcgctacccgtg

SEQ ID NO: 17191 - DNA, 207 bp, Homo sapiens
  source 1..207: mol_type = other DNA
gctggagagcaatggcgcgatctctgctgggattacaggcgcctgccaccatttacagtcttttaactttaaacatattggaaagcgaataatacagtgtcatttgcaccctttcaacattttgtttctaattaaagtaaaaggttatgtttaggtgactttaaaaagcacaaaatcacagagggagctcagtctgggccaccacag

SEQ ID NO: 17192 - DNA, 199 bp, Homo sapiens
  source 1..199: mol_type = other DNA
gggccaatggcaccattttctgggtctgagagacacatttttcttccccatattctgtagaagagaagaaagaagaaagaagaaaaatattaaacaacgtttcatgtttaacattgcaggtcagaaaccacggtacagggactttacctctttaccactccctttggcagaatgagactactggctgctagccggcata

SEQ ID NO: 17193 - DNA, 370 bp, Homo sapiens
  source 1..370: mol_type = other DNA
ttactacattagaaaagttgctataaaaaacaaaaatatttttaaatagcaaaataacccctttttttttgagactcaggctggagtcgatcctggctcacgagtagctgcagttacaggtgctaaatgaaaacataatatgggtatgtatatagtatgatctcagttatgtaaaaaactaaaatatcaggatgtatttctagaaggtgattatctgttgttaaaaatttttgatattctattttctaaattgagtttttatcgcttttgtataagagaacctaaagggtaaagttttaaccatgaagttcttcataggttcttattaccatctgaccagctcttagaacaagccacaacacccgctttg

SEQ ID NO: 17194 - DNA, 189 bp, Homo sapiens
  source 1..189: mol_type = other DNA
cgcccgctttggcctcccaaagtgcggctctgtcacccaggctggagtgcagtggcacgatcttggctcactgcgccaggctggtcatgaactcctgacctcaagagatacattactgtaattgcagacatttagatgtgggtctatccaattggataatagtgtgcaacagaggagaatgttcttcct

SEQ ID NO: 17195 - DNA, 214 bp, Homo sapiens
  source 1..214: mol_type = other DNA
agactagcctggtcaacatggcgagcacctgttccagctactcaattgggtcttcaacttcttgtcccattgctacaggttcaggagtttgaacatgttaggcacctgctggtatctaacagggtagtctggcaggacacacagcacctctcagtttaggagggccgtcctaagaataggtcttttattgttctgcagaagatgggataaaaat

SEQ ID NO: 17196 - DNA, 254 bp, Homo sapiens
  source 1..254: mol_type = other DNA
ccctgagcctcttgccattgtttctagggggccaggcgcaagactagcctggtcaacatggcgagcacctgttccagctactcaattgggtcttcaacttcttgtcccattgctacaggttcaggagtttgaacatgttaggcacctgctggtatctaacagggtagtctggcaggacacacagcacctctcagtttaggagggccgtcctaagaataggtcttttattgttctgcagaagatgggataaaaat

SEQ ID NO: 17197 - DNA, 249 bp, Homo sapiens
  source 1..249: mol_type = other DNA
tgcttttactacccagtggcttgtaagagaccctagcttccctggaagagaacctgggtcttctggtgggctttacctcaaggtggagccataaatctaagagtcagcatgatccctatttaccctgagcctcttgccattgtttctagggggccaggcgcaagactagcctggtcaacatggcgagcacctgttccagctactcaattgggtcttcaacttcttgtcccattgctacaggttcaggag

SEQ ID NO: 17198 - DNA, 292 bp, Homo sapiens
  source 1..292: mol_type = other DNA
accgaggtgtgtgtggccggccccgccccccacccatgggccgttccactagagcagtgggccccgctcatctgccctctctccctccagattggcaggacgaccagtccgactccgattactcagtgcttcagaggaaggtgaccccgtaggcccagtcgtaagggccttgcttttactacccagtggcttgtaagagaccctagcttccctggaagagaacctgggtcttctggtgggctttacctcaaggtggagccataaatctaagagtcagcatgatccctattta

SEQ ID NO: 17199 - DNA, 344 bp, Homo sapiens
  source 1..344: mol_type = other DNA
gggttagaagaaagcattctgtctcttcattgactgctaatctatatgtaattatgaggagctgtgtactctcaatcaaatttcttctctggtggtgctgacttcagcactcctgagtcctggccctccctctgtcccaggaggaagaggaggtttgctgcggcaccattatggaccgaggtgtgtgtggccggccccgccccccacccatgggccgttccactagagcagtgggccccgctcatctgccctctctccctccagattggcaggacgaccagtccgactccgattactcagtgcttcagaggaaggtgaccccgtaggcccagtcgtaagggcct

SEQ ID NO: 17200 - DNA, 105 bp, Homo sapiens
  source 1..105: mol_type = other DNA
tttgagcctctagaccctggcctgcagggactgatgggcggttgcccaggtgacgcgcgcgcgcccgctgcgaagggggcgtggccagtggccaagaggcgacgc

SEQ ID NO: 17201 - DNA, 297 bp, Homo sapiens
  source 1..297: mol_type = other DNA
tgctgggattaggagtgcagtggtgccatctcggctcacttcaagtgattctgctggaattagagattcttccttcttggtcctcaaccatcctgaagatggaattccctcgaggctgccacctggagtccccatgttgtccttgaaatcctggaaggtgatcagggtttggggaatcccaaaggctccagaactttggaatcaaacaaagaaatggggctcataatatcctttgaaaggtactctagatgccccataaggcattgatcaactctgccagtgatgcccaaggggagc

SEQ ID NO: 17202 - DNA, 262 bp, Homo sapiens
  source 1..262: mol_type = other DNA
cagcacagatacagagatactgagtcttcatgatgaagcctgtctgtggggaaagggtgcatcctcccagcgctgcctgaacacagaggaagtaggcttcgctaatttcctgtgtcggggctgagacactgatgggcccttcttttcagacctctgaccctaggaatttcaggccgcaccgttgcactccagctcaggcgaaactgggcaaagaggaggcattcccctgcccctgccctgggaatgatcatgattgcacctc

SEQ ID NO: 17203 - DNA, 394 bp, Homo sapiens
  source 1..394: mol_type = other DNA
tatgttccagggacactgtagagtctctctccctcagtaattaacagcattttgttaaagcttgcttactatgacagttcaaacatgcacaaaaatagaaaagtataatgcactgtcatggtaatagagaaacctgaccaaaaaacttgaacttgtttttatttattgagcatggacaacatgcccagccctgtgcccacagggccacttgtctctgtgttgtctggcccgaggacacaagacaacctagtgactgctcgattcatgggcactgtcggccccgggcagggtggggcacaagccacgagtggcatggactaagccacgagtagcatagttcccagacacaggtgggtgtgtcccctcccgccctgggagcaggtcctaccagccc

SEQ ID NO: 17204 - DNA, 305 bp, Homo sapiens
  source 1..305: mol_type = other DNA
cagctacttatatgtaattatagctttattatgagtcattctttgtatttataagtagaaaggtgatcatctttctcaagttaaaaaagaaattcagacggtttaaatgtctcaaggcctaagaaactaactggcttgaaaaaagtcattctgcaagcgggctacagccgcctcactgtgggcgtaagggcggaagttctcctttaagggcggaagttctccttttaagggcggaagttctccttttaagggcggaaaggctttagccgcaaaatggcttcggcccctgtcgcgttacagtcact

SEQ ID NO: 17205 - DNA, 285 bp, Homo sapiens
  source 1..285: mol_type = other DNA
tttcccagatagccttatgggattcctatggcaattacgtaagaccagcctggcacaaggtcaagagatcgagaccatctggcctcccagctactcgggaggctgaggcaggagaatcacttgaaccggttgtagtgagccgagatcgcaccactgcactccagcctgggcgacagagtaggactcagctgttgggctctggccactttagggccctgagagcccggctgtcgaggccccgccccggcccgctctttgtgacgcgtgggcggtgcccgcgtgcgc

SEQ ID NO: 17206 - DNA, 299 bp, Homo sapiens
  source 1..299: mol_type = other DNA
ccagctacttatatgtaattatagctttattatgagtcattctttgtatttataagtagaaaggtgatcatctttctcaagttaaaaaagaaattcagacggtttaaatgtctcaaggcctaagaaactaactggcttgaaaaaagtcattctgcaagcgggctacagccgcctcactgtgggcgtaagggcggaagttctcctttaagggcggaagttctccttttaagggcggaagttctccttttaagggcggaaaggctttagccgcaaaatggcttcggcccctgtcgcgttac

SEQ ID NO: 17207 - DNA, 455 bp, Homo sapiens
  source 1..455: mol_type = other DNA
agatgtcccttccggaagctcagggccggagtcctccggtttcagcttttgcccctagcggaacccggctgggcagaagctatttccgccccgagttatcgtaacttctgccctgaatatctcgcagcgctagcggcgccggaagtgttccagccactcccggctccgcagagctcttctctgagcggggttcgcgggagcacgagctgcagcaccacttccggagggcagcaaggagggggggccacccactacctcgcgcccccgccctgcgggtgtctcgcgcgcgttccgtgcgtgtgcgtgcccgcgcgctctcccgcgccctggctcaggctctggcgccgccgcagccgtcgccgcccggtgagtctcgcgccgctacagccggcgcgcgccaagctgcttgctcctcccccctccccttttccttgggcaggcggggaagggggggt

SEQ ID NO: 17208 - DNA, 296 bp, Homo sapiens
  source 1..296: mol_type = other DNA
tatttccttccatgatgtatgaaatagttaaaatatcaataaaaggtacgtattaaatactatgggagttcatatttaggtgttcataatgaactatagttcatttatacaacgctgtgtgctatattgtcctagatgtcccttccggaagctcagggccggagtcctccggtttcagcttttgcccctagcggaacccggctgggcagaagctatttccgccccgagttatcgtaacttctgccctgaatatctcgcagcgctagcggcgccggaagtgttccagccactcccgg

SEQ ID NO: 17209 - DNA, 294 bp, Homo sapiens
  source 1..294: mol_type = other DNA
agggaaggcctcccagaaggccacttaatgcatggtatggtagtggtgactcacgcctgtaatcccagcactccgggaagctgagcgggaaggatcgcttgagcccaggcgttcgagaccgttgagtgactcagaatctcagaaactgactgaggaagcggacggtcgctggaccctgccagcctcttcagccctccgcctggcttgactcctgcagcgcggcagcaggagggttaaaccgtgcgtggcctccggcgcgggggggaggcggagacggagacggagcggtcccag

SEQ ID NO: 17210 - DNA, 426 bp, Homo sapiens
  source 1..426: mol_type = other DNA
ttattttctatcacaaaccaaaatatgcggaccataaactgcatctgcagttcctttgtttttccatctggaaagtggagataacaattactagatcgttgtatcagatgaattaagtaatgctcatggcttaacacaaaggccaagatgtcatgtgaaatataaaacactatagaaatgttagttgtttttgtttttattaaagtatcatattgaagtagaaagatggttttgagtttgaaaagctccagataaatccttggatttttatgagcctcaatttccttttctgtaaaatgagaaccacatagggttttccatgtactgaaagcatcattctacaagtattaatacatatgtagtaataaaattttaaaagatgtctgaccaatagtaagcactcaatacatgttagtgaaccacctg

SEQ ID NO: 17211 - DNA, 445 bp, Homo sapiens
  source 1..445: mol_type = other DNA
gtttttccatctggaaagtggagataacaattactagatcgttgtatcagatgaattaagtaatgctcatggcttaacacaaaggccaagatgtcatgtgaaatataaaacactatagaaatgttagttgtttttgtttttattaaagtatcatattgaagtagaaagatggttttgagtttgaaaagctccagataaatccttggatttttatgagcctcaatttccttttctgtaaaatgagaaccacatagggttttccatgtactgaaagcatcattctacaagtattaatacatatgtagtaataaaattttaaaagatgtctgaccaatagtaagcactcaatacatgttagtgaaccacctgtcttccactaataaagttttattgaaataaagcatttaaaagccgaaatttgcgtccttagagcggaagtacggcc

SEQ ID NO: 17212 - DNA, 389 bp, Homo sapiens
  source 1..389: mol_type = other DNA
tccagataaatccttggatttttatgagcctcaatttccttttctgtaaaatgagaaccacatagggttttccatgtactgaaagcatcattctacaagtattaatacatatgtagtaataaaattttaaaagatgtctgaccaatagtaagcactcaatacatgttagtgaaccacctgtcttccactaataaagttttattgaaataaagcatttaaaagccgaaatttgcgtccttagagcggaagtacggccggaagcccgctgccggaggtgacggagcggcggccccgcccggtgcgctggaggtcgaagcttccaggtagcggcccgcagagcctgacccagggtacgacgaagcagtcggcgggagcccacggtcgctggg

SEQ ID NO: 17213 - DNA, 501 bp, Homo sapiens
  source 1..501: mol_type = other DNA
gccaggttcagtccaacccttcacagatgggtaacgggggagggtccaggtccctctccaacgcgagttctcaagggcctccggttccagcctggccgaggagcgccatctggcggccaaccccccgaactagatctgggctggaggcgtcactccggggactccgccctgccaggaacgctcctcctcaagcggggacaggcccaagcgcctcccccgcaggtcctccctctagggtagactgcttctccagtagaggggcatctgcccctcgtcctccagtttccccttgaggagggagagagaacgccagggtgcccaggggacccctctcggcctcaggctctgctcccctgagcttggcccatggccccggcgcccctgggactcggccccagccatctcaccacccgcgccagggggcggggctcccacggcccggccccgggtgggcgggtctatcgtgacgtcacttccgcccgggcctggccgaggttcggg

SEQ ID NO: 17214 - DNA, 393 bp, Homo sapiens
  source 1..393: mol_type = other DNA
tattgttttttcctctttaataatgatcaagtccaaagaaacgtcccccagggaattactgggaacaagtctttctcaaaccaaaggggaaggcccttctctccaagacatttagtatgtcaaagtatcaggtgccaggttcagtccaacccttcacagatgggtaacgggggagggtccaggtccctctccaacgcgagttctcaagggcctccggttccagcctggccgaggagcgccatctggcggccaaccccccgaactagatctgggctggaggcgtcactccggggactccgccctgccaggaacgctcctcctcaagcggggacaggcccaagcgcctcccccgcaggtcctccctctagggtagactgcttctccagtagaggg

SEQ ID NO: 17215 - DNA, 134 bp, Homo sapiens
  source 1..134: mol_type = other DNA
tcctgggtggggccccaagatttttggtgtatttaagcactcaaacacaaaataatgataatgatcatcaacgtagttttttattaataaaatgaaaataataagatgagggtgcacgcactccagacctggac

SEQ ID NO: 17216 - DNA, 254 bp, Homo sapiens
  source 1..254: mol_type = other DNA
ccagggggcctgactccccccggctcacagcacggggccaggaagggaggaatctggcgggacagaaggctgggccgccctttctgccctcccatccctcctcaaggccatccagagaatgtggatggaccccttggcaaaatcccagggctttttttggggtcagtaggactggttgggatttggaaaggtgcctccccgcaggaacacccctgggaagcccctcccgtcgggcagcgccgccttataagcgg

SEQ ID NO: 17217 - DNA, 518 bp, Homo sapiens
  source 1..518: mol_type = other DNA
aatctggcgggacagaaggctgggccgccctttctgccctcccatccctcctcaaggccatccagagaatgtggatggaccccttggcaaaatcccagggctttttttggggtcagtaggactggttgggatttggaaaggtgcctccccgcaggaacacccctgggaagcccctcccgtcgggcagcgccgccttataagcgggttcccttcccgggggcggcagcggctggtcggcggcagctctgctggtgcgggggcggcgagcccgggatcgagctaccgcggccgagcgcgccggccaccgcctgcaccgcccttccgcccgccctccggacggccgcagccctgcgggtctccgctcccagcttgccgagcggccgccgctgccgctgtcgccgccgccgccgccaccgcgccaggttccggccgcggccaccctccgccgtccagggcccctccgtctcggccccgggaccccggctccccgccagccccggccccggccccggcaccat

SEQ ID NO: 17218 - DNA, 125 bp, Homo sapiens
  source 1..125: mol_type = other DNA
aggagatttctaaagcattagatttcatgaattactataagtaaagtgtccaatacagtgcttagcacgtaatgaagcctcaatacaatgtagccaccatgttcccagggacagctgcaccccct

SEQ ID NO: 17219 - DNA, 258 bp, Homo sapiens
  source 1..258: mol_type = other DNA
gcacactcacatgtgcatctttaaatgatcacacacccaaggtgagcttcccagtggagatgtccaatgggctgctggttaacagtcactcctggtgtctcagatacccctggggcacccactggacacatgccctcagggccccagagcaagcttaacagtggcagtgacagtttgactcctgatttaagcctgggggaacccagctccagctggtgacgtttggggccggcccaggcctagggtgtggaggagcct

SEQ ID NO: 17220 - DNA, 256 bp, Homo sapiens
  source 1..256: mol_type = other DNA
cttacttgtgtgtgtgtgtgtgtgagagagagagagagagagagaccccttctctggggaccaggaatcttctggtctttggggtcggacccagaggagactgtggaggctggctacccacctccacaacccacagggctctgtgtgggcctgtgtgtgcaaattgtatccccaacatatgtggtgtgtgtctgtgtgcatgcatgcgcccacatccttttcaacaccagctgcctcttggagcttgtgttcgtgt

SEQ ID NO: 17221 - DNA, 297 bp, Homo sapiens
  source 1..297: mol_type = other DNA
tgtgtgtgtgtgtgtgtgagagagagagagagagagagaccccttctctggggaccaggaatcttctggtctttggggtcggacccagaggagactgtggaggctggctacccacctccacaacccacagggctctgtgtgggcctgtgtgtgcaaattgtatccccaacatatgtggtgtgtgtctgtgtgcatgcatgcgcccacatccttttcaacaccagctgcctcttggagcttgtgttcgtgtcttccctctggcctgggctcactggcaggacgaccccgggagagagg

SEQ ID NO: 17222 - DNA, 332 bp, Homo sapiens
  source 1..332: mol_type = other DNA
attctggccgagagtagggcagctgcctccagactctggggagacgggcgctagatttggggctcagaaggccctgctctctcccaagtgttgccatggaaacctcagtgtccagtgtactgaccaggcagcctcgcacagggaaggctgggaggagcatatccttttagagcgtggctccagccccagtgcccaagatgcagtgtcccgggcctggacaccgcgtccacactcctttttctggacccagaagcgtgtgtgtggagggagtagttacccccagacctcaggggctgaagtcaccgctggggctgaagtcatccttcatggat

SEQ ID NO: 17223 - DNA, 210 bp, Homo sapiens
  source 1..210: mol_type = other DNA
accaggcagcctcgcacagggaaggctgggaggagcatatccttttagagcgtggctccagccccagtgcccaagatgcagtgtcccgggcctggacaccgcgtccacactcctttttctggacccagaagcgtgtgtgtggagggagtagttacccccagacctcaggggctgaagtcaccgctggggctgaagtcatccttcatggat

SEQ ID NO: 17224 - DNA, 344 bp, Homo sapiens
  source 1..344: mol_type = other DNA
ggcctcccagaggcggggcgcctggagcctgtgatttgtcgctgacccctgctttcacagcctcgagagggcaaggagggggccagaccccagcctgggagcagcgtgcgggccttcggatcagacccagaggcagctggttgggattatccagatcaccaccaccctgagctgaggagcacagtttgaggtactgacaatggggccaggggggccactggagctgtagtgcctgcagagactgaccagggaagcaccccttcaccccctcctctctcagggcttgtggtgggggctgcccctctcaggcccccccaaccccccgccggtcggggccaggccag

SEQ ID NO: 17225 - DNA, 384 bp, Homo sapiens
  source 1..384: mol_type = other DNA
agggacccggatcgtcggtaatactgacacgtccaatgagcgccactcgttaggggcatgcgccgcggagaccctggacggagcctgcctgccggtgctccgcccctgccccgcgcttgactgacgccaatgagaagcgccgggagcgcacgtagagcagctaggtgggcttcggggttgcagctgctgcggctccgcagctgctccggctccgggacccttagagtcccgtgccttctattgaagagcaggaactgatccagaaagtttcctggggacctgtccggtcggaaaactccagatgtgcgcataatagtgtaatcactcatgattctattttgtttaataattcgttcaacggctactacgtcggctcagccaata

SEQ ID NO: 17226 - DNA, 387 bp, Homo sapiens
  source 1..387: mol_type = other DNA
tctaacttatttattaaattattcaaatcacttattggctgagccgacgtagtagccgttgaacgaattattaaacaaaatagaatcatgagtgattacactattatgcgcacatctggagttttccgaccggacaggtccccaggaaactttctggatcagttcctgctcttcaatagaaggcacgggactctaagggtcccggagccggagcagctgcggagccgcagcagctgcaaccccgaagcccacctagctgctctacgtgcgctcccggcgcttctcattggcgtcagtcaagcgcggggcaggggcggagcaccggcaggcaggctccgtccagggtctccgcggcgcatgcccctaacgagtggcgctcattggacg

SEQ ID NO: 17227 - DNA, 499 bp, Homo sapiens
  source 1..499: mol_type = other DNA
tctccacttttcactggttctagagctctaggaaaagatggagtgaagaacccttccctctctttattcacacaggagtgttcaggctgggactcagtccctgcagttcctgccaggccttgccagccggggcgagggttgggatgatcctggcggcactcaggtagactccctgggtacaagggtgcctgctcagcaggctgctcgaaggaggttgtctatcccacagttggagaggggccctctctgccccagtgggcgatctgggctacggccaagttgccacaaaccacttctggccccgtgggggactcaagtcgccaagcgagggttcccctgagcgccggagctcacaggtctcgccttgtcccgaaagccccgcaatcgaggcggaggcgaccgagccccgtcatcgggcggcggccggggcggcggcaggagggcgggcggggggcagggctccgggcgaggaggcggagttccacttcgcggcgctgtg

SEQ ID NO: 17228 - DNA, 586 bp, Homo sapiens
  source 1..586: mol_type = other DNA
taaaaataaaaataaaaatatttttttaaaaattagctgggtgtggtagcacatagtcccagatcacttgagcccaggaggtcaaggctgcagtgggctgtgatggcgccactgcactctagccttggtgacagcagggcaacttccccaagatcgcgcagtttccagtacacagcctcagaggtggcacaggctgacttgaccccatgctccttaccctcaggggcgcaggagttagtcgctgtggagaacaccatcccagggattcccgacgcggtgatgccatcaaagcgctgccccgggccttcgccgtgggggcggggcctcggggagggtcacagcccgggactgagacccgaggttaaccgcccggggtgggctccacgggggcggggcatgctctccgcggctgctgccggtatagagcggtaactgcccaggagggggcggggccccacaggggcgtggcctcggagctgcacggccgtgggcggcgggttaagccccagagggccctggaggggcggggccgcgggacgggctcggcccaagggaggagctgggggcggaagcggccggcggtctg

SEQ ID NO: 17229 - DNA, 605 bp, Homo sapiens
  source 1..605: mol_type = other DNA
tcgctgttgctgcccagcagcgccgcgtagtggtcagtctgcagcggggcgagggccgtggccacgcccaccacggcatgcgtgcccctctgctctaggggccagctgatctcccaggcgtgcaggcccctcccctcttaccccgggccccatcagtgctctgggccacgggccgccgctcgttccaaccgtggcgccgctgggcccccaggtcaggagggggtgcagacagcagctcttccaagccctcgggacaggagaggtcagggtacagggcctgtggcgtgggggtgctgctgctgccccctgccagagctgtctggcccatgagaggactccccgaaagaggcttgctggggcgtctttctcaagttgagctccagtttgcagagactctcgcgagtggttgacttcccagccctggaggtcgccgggcctctgaaggagccgggcggaaagaagccgaggcgcgcagggcgcagaccgccggccgcttccgcccccagctcctcccttgggccgagcccgtcccgcggccccgcccctccagggccctctggggcttaacccgccgcccacggccgtgcagctccgaggccacgccc

SEQ ID NO: 17230 - DNA, 324 bp, Homo sapiens
  source 1..324: mol_type = other DNA
tgccctgggcaggaggtaatataatacttcctgattttatataaagtctgtgggacaaagagattaaatatcagttgtaaagatgtttgacataatgtctcgcacaaactccagaaatatttattcagacaggcctgagtgcctgttactgatataacaacgttggatcaggagtattttagtcatcaaaccagtccaggataactcatactggatccctgtcagttgatatagttaagctaattctacagataacaaagagtcttggaaggggaaaagaccccttatcttggtgttctgaattcacaatacttttgcattgaa

SEQ ID NO: 17231 - DNA, 362 bp, Homo sapiens
  source 1..362: mol_type = other DNA
agagattaaatatcagttgtaaagatgtttgacataatgtctcgcacaaactccagaaatatttattcagacaggcctgagtgcctgttactgatataacaacgttggatcaggagtattttagtcatcaaaccagtccaggataactcatactggatccctgtcagttgatatagttaagctaattctacagataacaaagagtcttggaaggggaaaagaccccttatcttggtgttctgaattcacaatacttttgcattgaaccgcgcctcatccgggttcccgggacgggaaagtggcgtggtaaccaggcaactacctactctcaacggtggcgagctgcagttgccaagtgcccc

SEQ ID NO: 17232 - DNA, 58 bp, Homo sapiens
  source 1..58: mol_type = other DNA
acagcctcccgagtagctgggactacaggcgcatgcgatggtctggatctcctgacct

SEQ ID NO: 17233 - DNA, 279 bp, Homo sapiens
  source 1..279: mol_type = other DNA
agcctcccgagtagctgggactacaggcgcatgcgatggtctggatctcctgacctggagatcaaagacgctggttcagacctgatcagactcccaggggcagctttttgccccaaagctggaaattccaacctgaggcccaggatctgctctgtgcctaggcctgagcgttgcctggagcctaggccgggggccgccctcgggcaggcgtgggtgagagccaagaccgcgtgggccgctgtcgctggggccaggtcgtgggtgcccccacccttcccc

SEQ ID NO: 17234 - DNA, 393 bp, Homo sapiens
  source 1..393: mol_type = other DNA
agcctcccgagtagctgggactacaggcgcatgcgatggtctggatctcctgacctggagatcaaagacgctggttcagacctgatcagactcccaggggcagctttttgccccaaagctggaaattccaacctgaggcccaggatctgctctgtgcctaggcctgagcgttgcctggagcctaggccgggggccgccctcgggcaggcgtgggtgagagccaagaccgcgtgggccgctgtcgctggggccaggtcgtgggtgcccccacccttcccccacccgcgctcgtacgtgcgcctccgccggcagctcctgactcatcgggggctccgggtcacatgcgcccgcgcggccctataggcgcctcctccgcccgccgcccgggagccg

SEQ ID NO: 17235 - DNA, 275 bp, Homo sapiens
  source 1..275: mol_type = other DNA
ttgtcccgttggtccagcacccctgctttcttagcagaattaaggggttcaagagcccctaaaagcataaaatattttgtgtgtgtgtgtgtgtaaagggcttgtggactggagcagctcctgtactgggcctctgcttcatggccatcacccactgcaagagagtcctcaataaactgaagattcgagacgtactactccttagctataactcgttaacttatggggcctccccagggggaccttcctagtggctcggatgcaaggttgcgtcc

SEQ ID NO: 17236 - DNA, 77 bp, Homo sapiens
  source 1..77: mol_type = other DNA
tcccgcgccgggcccgcgggctccccacggctagccctccccgcgccccggccccctcggcctcggcctcggccaac

SEQ ID NO: 17237 - DNA, 508 bp, Homo sapiens
  source 1..508: mol_type = other DNA
tcccgcgccgggcccgcgggctccccacggctagccctccccgcgccccggccccctcggcctcggcctcggccaactgtgcgagtcgccggacgcaccgcccagcccgtccgcagccccgcgccgggtcggggcctcgggccgggccatttcggagggaccgcaggggcgggggccgcgggcgaggcggccgaggggcccgggatcgcgcgggtgcgggctgcgctaggcgggcgcgggcggcggcgggtcggaaccgcgccgagggccgggcgggccgcggggccgggcggcgcggcgggggcgggcggcgcggcccggggcattccgggcggccagggggaggcggcgagcccgggggctccgggggccggcgggggggatgggggccgccctccgggggggtcggggccgccgccgccgtcgtcgcggcggcgactgaggccgagaagaggagaggggggcgggggagctgccgccgccgccccccagaggcgccggagcccgg

SEQ ID NO: 17238 - DNA, 374 bp, Homo sapiens
  source 1..374: mol_type = other DNA
caggactttggggccgaggcgggcggatcacgaggtcaggagttccagaccagcttggccaacatggccgcgctcccagcggaggtggaggttatggtgagccaagatcccccccagctgcactccagcttggcgacagagcgcatccttaaccacctacagtttgagaagggagtggaggcctttaggaaactgcgacaacggcttttgctctgggctttactgaatccggcgctttctcaaccaatcagcactgagaacaaatgttcgcgaactctagaaatgaatgacttaagtaagttccttagaatattatttttcctaatagattgttttcactgtgcaaaaattatggccacgcctgggcgcttccg

SEQ ID NO: 17239 - DNA, 536 bp, Homo sapiens
  source 1..536: mol_type = other DNA
cacgggacagaggcctgcatgcgtcctgtttggcaaacagctgcccagccagtgggggagcagttcatgtattaggcacgccttaggagaagggtcctacgaagcccaggatcctgagatcgccagcctgtcaggcaagctctgccaccccatgggcctgctgctggtggcagcgtggccgcctcctgagagttggccctcccttgtgccactgccaggggaggaaaagccttggtgtcagtctctatggtcctggctgggcctaaccctgccccagggcctaaccctacctgaggctcctccccttcccccggggcaggttgagaggctggagtgggtccctcagcgccctgggtgggtgggcctgcacagggggtacctgtcagcttgagctccaggtggagctccaggtggctcctcctctcccgggggaaggcggccctggaccagcaggcgggcctgctgtactcccgctttggggctgcagggaagctggccgctgtgggcggtctcgggccagccccgccccacctcca

SEQ ID NO: 17240 - DNA, 335 bp, Homo sapiens
  source 1..335: mol_type = other DNA
tagttcccccagccccccaggagataggccccctggtgggagtgctccatccctctgccacagtggcaggttagaggagggcacccttctctcttgcaaggagttcaaagcactggctttggaaccggactgtctgggttttgactcactgatggactcaggcaatgccttaaactccctgagcctcaggttccttgtctcgatgacagttgtcaccgccatagtgtgcaaggcacacatgtgtccttactgcatgtgttgtcacatatgtgcaatgccatgcagacgtgtgggaagtgggccccgtccccacccccagtgcttcctgtccccgc

SEQ ID NO: 17241 - DNA, 444 bp, Homo sapiens
  source 1..444: mol_type = other DNA
attcacagtcccccgacctcctggaacttaggaggctggataattgacccaatagctccctggggctgtggccctccagggcacgggtggggcaatcacctgtcgggcccaggtttacctgcccttggggtggtccgggagcagctcggtccggagagtggagcgcgatcgttccctctgcaggcctcaagggtagcggtgggtaacttcacactagcgacacctgctgggacccgcctgcccttcacaggcctggcggggcaggggatcccagcacaggctgggcactgcggggcggcacagcccaactcctgcccagctgacccctcgctgacctcagggatctctctggcctgcagctccgctgtgggcagggccacaccgcagcatctgctgtggggaggggacctgtgcgcagggtggcaggcggggcccaggtaagga

SEQ ID NO: 17242 - DNA, 600 bp, Homo sapiens
  source 1..600: mol_type = other DNA
ggagagattctcttgtccctctggaaaacaacagtttgtatgctgctggaggttctcgcagcacccactatcctaggggcagggatgaggggtcagggtcagcaggctctgcccgccattacctgaagtgaaggccctcggccaggatagtgtcctgctgcactccaccgatccgtgtgcaggccaggccgctgctcagaggagctaggcccgtggcggaggttgctcaccggtgaacacagattcgcgcacaccgtaggccacggcgccggcccccagcaacagcttcagggccgtgcccatgccccggggcccggcgggcagccgtcccgccaagtccttcaagttctgggccatgtcttgaggccggcggcactggaggtcagaagggggtgccggcccgcctctaccccgctccggcttaggtactgcacccttcacacgagggttcgggcccgagcggaagtgcgctccctttgcgaacttcgcgcacagtcccgcccctttctggaaggctgccctcccagggagggcagcgcaagatttcctggcccactttcaaaatggcagccggaaggaaatttctgttcttatttaaga

SEQ ID NO: 17243 - DNA, 267 bp, Homo sapiens
  source 1..267: mol_type = other DNA
aaggactgttatgtttgttcctaacatttcaggagtccagtctagatataaagcacacagggaactccgagcagctgatggcccccagaagcttttgttaggtaacaataaggtctgggctcaaccctgaaattcttggtagagctgaacttagtatagaattcattttaagggctgctgccattattcaacagcacagctgaaatactagctcagccatagttttcctgccctaagagttggcgacaaaactgttctttaccacag

SEQ ID NO: 17244 - DNA, 422 bp, Homo sapiens
  source 1..422: mol_type = other DNA
tctgaaaacaaagtctctgtcttttttttggctggagtgcagtggtgccctctgcagcctcgacctctcttgcctcagcctcctgagtagcgggatttgttttcaagtttgggactaaaactcaatttggcagcatccatttaccgtaagatcaattattgggtccatggactacatagctatgaagaggaagcctcacgccataccaccttgggtcttggtgttaagtcattatcaaccattacatgctttaaagcagagatgacttacatttagcattaagcaatcggtgaaattccccattcctcctttccccgctggagccctggatagagggctctctggcctgggaggaggacgctgtccttgtttcaaaagcagagggagctccaagatcaaggctgagtttccctaagtcatgg

SEQ ID NO: 17245 - DNA, 576 bp, Homo sapiens
  source 1..576: mol_type = other DNA
ttcccaagcccagcacagtccctggcatatgcaggactcttctgttttacatttctatactgttataacttttatcataaacatgtattactcagtgcaaaattatttgaatttttaattaaaataataagtgttaaataggcatatcttaatttcccatgttcctggctgaacctccgggcgttagggggcgcgcgaaaggcggcgcgggcgttcccgcctccccgttacatgccccagtaaccccagcgccggcgaccgggagtaacctcgcgcgcgggcggcccccccgcgtccagactctcgcctgctcccgcctcagccaatgggaaggcagcgaaccggccggccggacggtcgccccggagggctcctcctgggagcatttcgggttgaactgtcgccgggccacgggctcagacctttccaatggcagctctgggtcccgacgccaagccccggctaggccccgccctctgcgcaggtcggccaataacggggtgagctggcgccgcggggcgggcctccagccaatgcgcacgccgtgggcgggccccgagccggaattgggggtga

SEQ ID NO: 17246 - DNA, 134 bp, Homo sapiens
  source 1..134: mol_type = other DNA
ggttaaagctaggaagttttcccctagtgaaagaagctcctgcctccatcggtgggcgttgggagcatcagatgatcaataaggtgacacttgcttgtgtttgtcagacaaatacagccaggcctgaagtccgg

SEQ ID NO: 17247 - DNA, 305 bp, Homo sapiens
  source 1..305: mol_type = other DNA
cagtggtatggccgtctcatcccctgttctgcagggcaggaggctccattcccatccctcagaagttatttggggaggtgacttcccagggtgaagctcgtcttccagcagtttgacctggagccttctgggatctgggatctgtatggcatgcgagctgatggccaacggcctctctgagagcccggggatgccctggatgggcgctgctgagagtctttgggaaaccacatggctgccagtgtgctcagaaccctcacctctgtggcaaccaagggtaccacgtcttaccggctcagaagact

SEQ ID NO: 17248 - DNA, 249 bp, Homo sapiens
  source 1..249: mol_type = other DNA
gtctcccactgctttggtaggaaccttggaaactcagatcttttgtttgtgcatgacgcgggctccctctgcacacagtgcacgaagacgctgtgtgcacacgcgtgtcctagggatcagaggtcttccctctgggctcttggcagggagcagcgagaggaggggaccccttgcccaggacgggacactctgtgcctgtgtcctgaacctgtggcccaagccagtcctattcctggaaggggaggggag

SEQ ID NO: 17249 - DNA, 307 bp, Homo sapiens
  source 1..307: mol_type = other DNA
aaacaatgaaattgttttttaatttattttaacttgaacctgggctcaagagataggacactatggcctgatggacaggagagactagggtccctcctccctcccagcagatgctaaggagatggggacattttaccccctccgcagccgccccagagggtctcaaacccagggctgatttagggttgccctgacatggccaaccctattctattcctgggcattgaaacccgggccattcttggaccagggctggtctcccactgctttggtaggaaccttggaaactcagatcttttgtttgtgc

SEQ ID NO: 17250 - DNA, 336 bp, Homo sapiens
  source 1..336: mol_type = other DNA
aggaggggcaggacgtcgtgcacccctcgcgcacgcacctgtcgggaccggccgccctgggggcggggcacaatattatttaggcgcctccaccccctcatcgatgactcagagggagcctaatggctctttaggaccaagagtctggaatgccacagctctgagtcccaggatctcagggcccctcaggccctgggacggttcccaagcctggatcctgctccaggttccttcctcaggaaggatcctgctccaggttccttcctcaggaaaagccaaggtcaggcgcaactttgccaactcttattgcaacagggccccagccttataaaaagc

SEQ ID NO: 17251 - DNA, 340 bp, Homo sapiens
  source 1..340: mol_type = other DNA
cttgatctcaagactgtagatagaaaaaccaaagatgcagagcacaccctgtttggtaacttgcctccatattactatatgcaaaatgggggaagcaatagtcttctctgagaggtgtgtgtgcgcgcgcacatgcatttgtgtgtgcatacaacgtaaggccttccggatggtccataacctgggctcgaccccagccctgaccacatgtcccccacccctgcttggggaggagggaaatgattgaaggcagcagccatagacctctgagggccagcgagctgcggcgggcccgctgttcctgagtcagctgtggagttgcttaacatttccaggaact

SEQ ID NO: 17252 - DNA, 243 bp, Homo sapiens
  source 1..243: mol_type = other DNA
acacctgtcaggtgccagggagcctcgatgcggcgtggggcagggcagggccaggcgtttgcctcccctgggagcctccagcctgcggattccaccttgcgggaggggctgaggcggtggacttgcagcggcttccctggggccgccggccaatcaggtgactggggggctggagagtttcaaggctccttcccctgtgagggcggccaggaggggtggcaccgcgtcaccccgccccccaac

SEQ ID NO: 17253 - DNA, 436 bp, Homo sapiens
  source 1..436: mol_type = other DNA
catcaaactgcacagtgtagtttcggaaggtgctgaccggcttcagcagcagcgcgatcttccgcacagccaagctgagtaggggtgctgctagccagccaggagctcctctgcctgcagcagcccctcagggctgtgacctcctaccaatgcctggttagaaatggatcccaggtctggtgccagccgcctgagcctttccacaggcattccctcttctccatgggaccaagaagcaggaaggcctggtgaggctgagagattccagccagctccacgtgtaatggccgggttaccagggctttttataaggctggggccctgttgcaataagagttggcaaagttgcgcctgaccttggcttttcctgaggaaggaacctggagcaggatccttcctgaggaaggaacctggagcaggatccaggcttgggaac

SEQ ID NO: 17254 - DNA, 335 bp, Homo sapiens
  source 1..335: mol_type = other DNA
gtggcattccagactcttggtcctaaagagccattaggctccctctgagtcatcgatgagggggtggaggcgcctaaataatattgtgccccgcccccagggcggccggtcccgacaggtgcgtgcgcgaggggtgcacgacgtcctgcccctccttggcctgcggaccgccctgtggcttcctcgcagccctgggctacaaatgccaggatttctcaggctcagactggttggggggcggggtgacgcggtgccacccctcctggccgccctcacaggggaaggagccttgaaactctccagccccccagtcacctgattggccggcggcccca

SEQ ID NO: 17255 - DNA, 168 bp, Homo sapiens
  source 1..168: mol_type = other DNA
gggagggggagctgtgcagagggcgcccagccctgcccttccaccggaaagccttcccatgccaaaggctttcagggtttcttgctcaccgtgaatgtggaaggggaggaaatatgcttccccacagcccctcaccaggctgaatctggtagaagatcccgcatccat

SEQ ID NO: 17256 - DNA, 285 bp, Homo sapiens
  source 1..285: mol_type = other DNA
cgggggcgggcccctgtctccatggagacagtgacgctaccccgcttccccagccattagccagccccattttagagggtgaggccccttaggtcacggatcgactgagcctaggatctcgcgtcttcgggggcccgtggccttttcgagcgctcctaaaggcgactctccaagacccgctctctaaggctgcgtcgcagtcttaaggccccgcctttcagacagcttccgctgggcctgggccgctgcggggcggtcacggcccctttaagcctgagccccgcc

SEQ ID NO: 17257 - DNA, 401 bp, Homo sapiens
  source 1..401: mol_type = other DNA
tttgaccctgagctgcatctctcccaaggctctttgcaaagagagcaccgtgtggggccatggacagggctttccactgtcctcgcaatttggctctggaggtcattcaaggccagaattaactgcaagaaaagctgaacgcacttcttaaattcttgatttttatctgctgatttaaaaacttaaactaattaaccagacttgtttgcttaaccagctttagctcgtcatcctccactctgagggtggggtcaccaccccttctggagcctgggcttagccactgggcccatctgccagctgcagatgggcaggagagacagctctgtcccctcctcgagggggatggggaccaacttggcagacagccatcagggtggcctcagggaggtgtgtggcct

SEQ ID NO: 17258 - DNA, 681 bp, Homo sapiens
  source 1..681: mol_type = other DNA
aatttatcaatggagatttataaggacttatttatctaaagtatttagatattttatatctcattttaatttctgtatatatttttttactaataggcctactcgacatggaagtataggacgaattcttaacaatcactatgagctcagaagccactcatggttttctacctaatggttgaaatcatttaaatgaatgttttccaaactcatttgatgactaagctttattttcttttacataatcattaacaataaaaaactaattttaaaggactccattttgttaaacatttttatagacatgaaattttttcaaatatgtttatctgtgctcatgtttctaacctcttctgatccttttagcataactggttgaaatatgtatgctaaagtaaacaaacctgatgatatattttatcttttagataaatatctataaaactgtgctgacaagatcacatttatggaacaaaaatttttaaatgtgaaacatgagtctttttgaaaatttagagtggcaatttacagttttccatatcctaacgtgataaggaagtagcaaagaaaaaacaacagcttttataatgacttcttggaaaactatgaactcaattttacagtattgtcatttccaaatagcagatctgttttcacctcatgagcagttctgagattata

SEQ ID NO: 17259 - DNA, 504 bp, Homo sapiens
  source 1..504: mol_type = other DNA
catgatgaactattagtagttcttttgagcttatatgtttttatatacaaatattcatttgtatgtgcggacacaatttaagcctgtcctcagagaaaatagttttctgactgttcattcctttctctcaatagataggtcttacttgaatctgagttatatagagctaaaatcatgtgttgctaatttttgtttcaccatttgtaatatcagtaatagtcatggctaattctcttggacaaatgctgcacatttgattatggaaataaaattaaaagtgcatatgataaaatgttatttaattatgttttgccacataatttttctacatgacaattagtaattttttgtgtcttatatatttgtccaaaatgaagttcaaaaatgtaaaatatttaattcagcaacagcagcatatgagttagtatttcctctaatttttcgaaatctgtgggaagtttgtttcatgtgctatattgaagaaaacatgagtatgtcattttc

SEQ ID NO: 17260 - DNA, 304 bp, Homo sapiens
  source 1..304: mol_type = other DNA
taaaaattttcaagctatagttacagattaagtctctcttgaatgatgcatcctaggctaggcacagctacgaatcgcttgaaccagaggttgcagtgagtgccattgcactccatgatgcatccttcaaaaaagaatgatggatccaccttgccttaatctttatttaaagaaagagaaagtttaccaaattcagatgtcattgaagaactttggaatttggtaccatccaccctacaaaattcatgtcatttgcatcataggcagctcagattcccataactgcctgagatgcgggaatgag

SEQ ID NO: 17261 - DNA, 532 bp, Homo sapiens
  source 1..532: mol_type = other DNA
ccaggagttcaagaccagtctggatctcaactactccagaggctgaggtgggatgatctcttgagctcagggggtcgaggcttgcagtgagccaagatcaggccactgcactccaaaataaaaataaaaataaaataatgaaatctacttgagtatttgtctaatccaccaatcttttggcttccctgggaagaagaatttctactaatgatagctgatgagcttaaaaaaatcacaagaaagtttcataatgttttacggaagtttatgaatcgtgagcctcatgtgaccctccggccgcaggttggacaagcatgattaattacaagtctatgaattattcactgctctatagcaccgtgcacataatagatgcttagtaactgtttgttaaatgaataaatgcatgtctttctttttcctggaagagtagagcaagagaagagaaaaattccctcttcacatccaatggcctttgaggagctgggaagagagcaattcacacttgattatcttacatcagataaattag

SEQ ID NO: 17262 - DNA, 332 bp, Homo sapiens
  source 1..332: mol_type = other DNA
cactgaaaatatttcttaatcataacttcaatttttgctttttaccaaacccaaacaagatgttgttgtgctttgctacaaatacaagcatttttttgttaggtactgtttatagtttataaagcaaattaacaaataaaaaatacctatgaaagtgttcataacagatacttcttcattattcctctcttcttagtagcagcaaaggtttaagatgaagcatttaataaattttctagcagatatgacatccgacagattatttttcctctaatcatgggatcattaacattcaaatatcctggaagattggcttatctgtattttaaaag

SEQ ID NO: 17263 - DNA, 419 bp, Homo sapiens
  source 1..419: mol_type = other DNA
ttgcagagtgagctcagctgagatggaaccgatccgatccaatccaaaccactaattgaatagctgtgtattttaagttttaagttaattgattatacagcaaaacctaactcatgttaaaagagcatcaccggccaggcatgctggtttacatctgtaatcctagaggatcacctgagcccaggtgttcatcacttgatcccactgcacttcagtctgggcaacagactgatatcctgtctcaccaggcattgtggctcacacctgtaatcccaggtgagctactcgggatgcagccaagatttagccactgcactcactctccatctcaaaaaaaaaaaatatttctgtttctcactcagcctcagctgggccagctgcactccacctggtcctcaagctaatagatttgaaggaca

SEQ ID NO: 17264 - DNA, 162 bp, Homo sapiens
  source 1..162: mol_type = other DNA
agcccaggtttcaacaacagtattggaaacaactttacacttacaattaacattataattgtctttttggtctatttgatcggagtgcagtggcgtgatctcggctcgcgggattggagacagggttcaccatgttggattacaggtgtgagccaccaaaaa

SEQ ID NO: 17265 - DNA, 475 bp, Homo sapiens
  source 1..475: mol_type = other DNA
gtgctggcagtcctcacagccctcgctcgcttgtgggagcccctttctgggttggccaaggccggagccggctccctcagcttgcaggggagaggcggggctgcgcgcggcgcttgcgggccagctggagttccgggtgggcgtgggcttggcgggccccgcactcggagcagccggccggccctgccggccccgggcaatgaggggcttagcacccgggccagcggctgcagagggtgtactgggtcccccagcagtgccagcccaccggcgctgctcgcggggcagggctcgggacctgcagcccgccaagcctgagccgggctcctgtgcggccgagcctcccctgcgggcgcaagggcgcggactggcaggcagctccacctgcagccccagtgcagtgatccactgggtgaagccagctggacaaccaatcaacaccctgtgtctagctcagtttgtgaatgcaccaatc

SEQ ID NO: 17266 - DNA, 404 bp, Homo sapiens
  source 1..404: mol_type = other DNA
aaaacaagtaccattttcaacattaactgatgccttggcttcatgctataatgccatgttgtgtttcactataacctcagagtgaatgaaagaaaatggagctagttgaaatttctgcctaaactagccagattttgagacactaagttatctcaaatcaagaaatcaccctaatgagaatttcaataacctcaggaatttaaggtgcatgctggagtacagtggattctcccgcctcagcttccagagtagctgggactcggcctcccaatttactgggattacaggggtgggccaccgcgcccggcctttttcttaatttttaaaaatattaaagttttatcccattcaaccatattcctgatttaaaagttggaaacgtgtagagccttcattataaatct

SEQ ID NO: 17267 - DNA, 255 bp, Homo sapiens
  source 1..255: mol_type = other DNA
tgcctggagtcccagctactccacagttagtgagggtccctcccccaactaggggaattaaattctatcctgtccaagactgaagatggagacaatcaaaggaaaaaggtcattttacacttcctgtattatcccttaggggttagttaccaagctatgaaaaattactattccagggagagttaacattaattccagattctctagggaggaaatagctatcataaaggaatttatcaataaaactttgacgga

SEQ ID NO: 17268 - DNA, 486 bp, Homo sapiens
  source 1..486: mol_type = other DNA
aacgaccgcggggcttttcatccaaaaagagctcagttgggactatagccctgggccttcccagcccagccggcccgcccgcggggatagcccgggcactatctccctgctgcaggcggtgaggggctcgggtatctttgaaaatagatacgttcacaccctcctaacggcggcgccaagggtggtgggtcccaaaactgtttccccgtaaagagttcccccgcccggtcgcaggaagacgcctgagggggcgctcggagggatccccagcagccgccggggctggaccgtgcggtgcgcacgggaggggccggacaaccccgaccgcgagccggacccctgctctgaccgcaggtgggtgggtcccaacggctgcaggcggggccggcgggggcgcagcggcccgggaggtgcgtggttgagcgaagccgcggggcccaaccgcagtcgcggggtctgggaggtgggtgcgccgcgccgtccctg

SEQ ID NO: 17269 - DNA, 301 bp, Homo sapiens
  source 1..301: mol_type = other DNA
ctgatcaacaattcagttgacatgtttattgttgacatcctcatttaagaagtgcagtatagacccttttaatggccaggggccttaccctggatggcaccaatgtggagagaacgaccgcggggcttttcatccaaaaagagctcagttgggactatagccctgggccttcccagcccagccggcccgcccgcggggatagcccgggcactatctccctgctgcaggcggtgaggggctcgggtatctttgaaaatagatacgttcacaccctcctaacggcggcgccaagggtggtggg

SEQ ID NO: 17270 - DNA, 261 bp, Homo sapiens
  source 1..261: mol_type = other DNA
gagaccagcctggccactagtcccagctactcggagccgatcgcaccactgcactccagtggattgtattccataaactcagattttcttccctccaggtgagattatgcgaagaaaggaacactggcaaaattatttccctgattttcttcagcctataaattcataggatcaagaattcttactaacactctttctaacaaatggatagatttattctaatctctctgtagattgttttaatcgagagcataaaatagt

SEQ ID NO: 17271 - DNA, 480 bp, Homo sapiens
  source 1..480: mol_type = other DNA
aatggacatttggattatttccagtttggagctgttatgaatactgcagacatatgtataggcatatgttctaataaatattgccaaacaatttatgaatttataccccattaacaaatgtgtgagagttctgaatgttccacattcaatttgaagttctctgatgaccaatatttgagaagtgcagtatagaccttttcaatagagccttacgcaggggccttaccctggatggcaccaaccccaaaactctatagagtcttttccaggagtttcatccaaaaagagctcgtgagtccgaaagaactctttttcttcccagcccagccggccagcccgcggcgatagccggggcaccacctccctgccgcaggcggtgaggggctcggccctctaacggcggcgccaagggtggtgggccccaaaactgtttccccgtaaagggttccctctccccggtcgcaggaagacgcctgaggg

SEQ ID NO: 17272 - DNA, 434 bp, Homo sapiens
  source 1..434: mol_type = other DNA
gtggcgcgcgcctgtaatcccagctgctccggaggctgaggcatcccagctgctggggaggagtgtgccattgcactttcacgctcatttatcatgtatccactcattcaaggagcatttactgaattcggagatcctttataaattattctgtatacggagtttaacctctcccgacggggagcagtgagttgtcatcccgggtagacggcgaactcccggagccacgcggccgcaggtgggcgagggcggcgagatccctcgccggcgtgagagcggccgtggctctccaggcggagcgcacaccgggtagcgaggctcgcggctcggcgctgcccgcggctcggcgtctcccggctcctccttaacccgcgccgggaggcggtggcggcagcggccggcgggcggggggcgcggagcgcggcgcggaggcc

SEQ ID NO: 17273 - DNA, 430 bp, Homo sapiens
  source 1..430: mol_type = other DNA
gttgaccactggagagatttcacttctgaggagtatataaagtttccttccagaaaagtattcataagctagggaattatcaaagtccagaatcttcagtcctgtctccagcaaggacaagttgtgaaggaggctgctataggacaacatgcatatacttcttaattcatgtgaatactagaattgtatgtttctggtgcctctagaagcaggtgcctctgtacaaggacatggtggtagatggccacctgaggggaaaggcttggcctccccccagtcaagccctcgtgacggtctacaggacagtcctggatcatttcttctaggactaatagaacctctggtctcagaaggatgaggatcaaaagaggcctcgctggttaacagcagcctgtttcttataaagtacttcaccagatgctggcgtgca

SEQ ID NO: 17274 - DNA, 372 bp, Homo sapiens
  source 1..372: mol_type = other DNA
tgagaccgttcttccaccactgattaagagtggcagacttggtgaccttgccagctccagcagcggtgaagactgctgctgttgtaatgaggcatttatcattataatagaactgggagctaatatagtctatttaacaggatcaaattttccaaaaagataatcacattttaacattttcagcgtttagactctggagagttgaaatccacggctcttttctgccaggagactacagtttccaggcacctgcctagagtaagatggcgcttttcgtaagcacctctccaggacagagatttccataacgagagtcacgcacttgcaggctatccaagacggtgagccgtgcagcctcatcgtttccaggtt

SEQ ID NO: 17275 - DNA, 503 bp, Homo sapiens
  source 1..503: mol_type = other DNA
tgaagcctatatcacagacaacagtgttcaaatacatttgacccaaataaactttattttatatgcatatatctaaaagagtatatgcatatatctaaaagaataatataagaattatttacagcatagtattcattaagcaggaattaccttcagttgtactgaattcctacaggtacttaattaagtacttgtgccctgggttatatatacccctggtgtatatgtatgggtacatattcccactcgattgtgaatctctggagattagaatatagcttaattcatcctgttcacatatatcaagcatttcagatatgttatttgagattaattaaatgagtttattcaggtcaagagtcttttttttttcatttctaaacaaaacctataaagttgaaccctatgtacagaggtaccctctctctgctgcagaaaatgtcggatttctaagccatttagaaatgactcactttgaaaaagagaaagctcagcaaattttc

SEQ ID NO: 17276 - DNA, 390 bp, Homo sapiens
  source 1..390: mol_type = other DNA
gcaggtttcttagtgtcacactcatggtgttcaatatatttagatatagaaataatatagaaatatagacgtgtgtgtttgtgtgtgtgtgcatgcatgtatgcagattccacaattcctttggaaaaagtcatatttagtacttgtattctatataattctcctaactgttaaaaaatagtcatatatattgggaagcatggaataaaggctggccttccctctcctccaacatccagtaaagggagctgctttctggagattctagcaatactcttagaatgtggtactaacaagttgcctgatcagtcaaaattgcaaaagtaattacatttgtgtgtggaagcacagaaattgtattttttactggtgaaaaacgcagttctccag

SEQ ID NO: 17277 - DNA, 347 bp, Homo sapiens
  source 1..347: mol_type = other DNA
gattccacaattcctttggaaaaagtcatatttagtacttgtattctatataattctcctaactgttaaaaaatagtcatatatattgggaagcatggaataaaggctggccttccctctcctccaacatccagtaaagggagctgctttctggagattctagcaatactcttagaatgtggtactaacaagttgcctgatcagtcaaaattgcaaaagtaattacatttgtgtgtggaagcacagaaattgtattttttactggtgaaaaacgcagttctccaggagtgaaaggaaggagttggttcctgtttataagatgttttaagaaagatctgaaacagatt

SEQ ID NO: 17278 - DNA, 347 bp, Homo sapiens
  source 1..347: mol_type = other DNA
ctgagatcgtgcacgccctcctgcaggaaggaagacgtggcctcctcaaaccccttggtaaagggcctctggggccacctggcagggaggggctggcacaccaggaagtagcctcctcccgggagttcagctagagcccaggtcctgtccccaagtggcctccagagccaccttttctgaaaacctccctgagcctcctgctggcctctcacctagaagcccctccagccagggggtgcagtaatactccctcagaggccctgagaaaagcagacactgccatggacccgtctctctccgtgccacgtggccccaggcccaactccccctaggagggatccttttca

SEQ ID NO: 17279 - DNA, 448 bp, Homo sapiens
  source 1..448: mol_type = other DNA
ccgggccccaaactcggactccgccccgcccgaagctccggatcctggggcccgcccctggccccgcgtaggcagaccgtgggctcgctcctgggccccccgccccaagcccagctaggtctcggaccctgagcccagccccgaccagcctccctcccagggcccgcctcctgagcgcagcccagccgggactcggcaccgcctcccggaccctgggcccctccccacgtgggcccgtcctagcgcaccgcctggccatgtgccaagacgggtctggccttagccccgccctaagacctgtctcctgggctctgctctgagttgcctccaggacgccaccaacctggacgcttccgaagcccagcttccaggatcgccctatcctggccccggtgaggcttatcctggccaccttagccccgccctagagtccgcccccaggaggccg

SEQ ID NO: 17280 - DNA, 565 bp, Homo sapiens
  source 1..565: mol_type = other DNA
agtgaggcatgactcctgtcatatctctctcatgagtccactctggacagtttttagatttatggctgtttgttaacatactatttaagcaagaaagagataaatacatttgaactgagttctctcctgagtgatgggtataacacacattgataaatcaggacagtgtctctactaagaatctatgaggacaagaaaacatcatatattttctgtgctacaatataaaattcatgaagcctgtttctgattttataaatcagggagattacaaaatatcactgacatctgcccaatattagtctggatgcagtaagaatgtttcatcacctttgcagactgatttcagaatgtttcattttgcagtcacattccttaacaatgttcatgggttttgttatttaataagcagccaatgaggttagttagggagcacttaatttaaccaagttctctaaatagatgtcttttaggagataaaaaattttctattttgcatgccagaatgaataggaatcagacagagaaattttaagtattcttgtcaaagttctccacttaatgt

SEQ ID NO: 17281 - DNA, 394 bp, Homo sapiens
  source 1..394: mol_type = other DNA
tacccttcatctgtagatatgcatctcaatagctatagtacttgaccacttataattccatcatgaggaccccattctcatgacccaaatgccattacgttggagggtgtcagggaccctgatggtgtctttatcacagaatctctagaaagttcttttcacatgccatgtacacacaaggtatactttaaaagtttttgttcattgttcgaactttttagtatagataactgcctttgaaaatataatattcacaaaaagaatttaaaaagaggggacatttactaaatttttattgggcataacaattatttcttttagggcgttgctaaattttttgtctaaatgaaaaaaaaaacaaattgagaaattccacatttcacactgatctagt

SEQ ID NO: 17282 - DNA, 243 bp, Homo sapiens
  source 1..243: mol_type = other DNA
ctgttatgttgtgaaaaactaagctgagtttcaatgagggggactctagtagtcagcctagtagtagcagcctagtagtcagcattagaatattcaagagctgcctgtagtcccagctactcgggaggctagtgagcggagatcatgccactgcactccaggcgagacatacactaattccaataaacttccttgtcctccttatgcaagaaaggaaatcctgacttaatattaaaagacaaa

SEQ ID NO: 17283 - DNA, 482 bp, Homo sapiens
  source 1..482: mol_type = other DNA
tcatcacattgcttagcataggcatgaagtatctactcagtgaataaatagaatgcataagttctatgagagcacaaaattaaagtcttttatttgaagatcttagagttagacactgaatctgtcttccaaattaaggattttttttttttctaaaaaagatggctcatgcaaaaatcactctttggtgtacaagcaattcttgtaatgcaaaaaaatccatggtttggaggcaaaatttttgtgttctaaattctatataactgagttcatttgcttactgcaaagcaggagctgctagtgcctgtctgtactgagtcagcccaagaagctatttaaatgctctttaaggtatttacataaatattactattctcattgttatttatcatgattataaaacattaaagcagagctgccctcaatggtttaacctgtgtgactctgcctatgacagcccaccatccaaatcaggagcaaga

SEQ ID NO: 17284 - DNA, 204 bp, Homo sapiens
  source 1..204: mol_type = other DNA
attttgttgacattttagatatggtgactaggacaaatctcaaatattgaataaggacataaaatatatgatggtgtaagccacatattccagaatactctagttgccatgtggaccaggttagacactctgctttgccaagcaattggacaggggttctgtttacacttgtcttgagttttctcacaagatctgatataaagg

SEQ ID NO: 17285 - DNA, 226 bp, Homo sapiens
  source 1..226: mol_type = other DNA
tcagagaaagtgttatctacacattatatgatctaaggaaaaatattggtagaaaatcaagcataataaccttgcctttgagcttctctacatttgaaaatgatttggagagttctgaaaagttcctcaactttttataaccctaaggtagctgtgttgtgagccaagatcacatcattgcactccagcctggggaatgagggtgtgagcaactgcaaattcccat

SEQ ID NO: 17286 - DNA, 411 bp, Homo sapiens
  source 1..411: mol_type = other DNA
cttaaaggaattttagcagtaagactgtaaaagttatttcacgtaaaacatatataatttatatctacaataattagtgcttcttacactgttacaggtttgatccaggtttaagattctgctcaagttcctgaactccatcttctcattctacctgccaaaataaaaaagagagagagaaactctggaatttgcaaatatggtttaaaacaggaaagttcaatgtatatagttattaataataactcatataattagtaatttcagcacatctatataatatagttttataaattatatgtattaatactaggtctcatgccttagcctcccgagtagctgggattacggattacgggcgtgagccactgtgcctggcctccgatcttaggtactactagcaaatagaac

SEQ ID NO: 17287 - DNA, 407 bp, Homo sapiens
  source 1..407: mol_type = other DNA
actgccgatcttcctgagacagccagggacttcatctattacggaaaggtcttctaaaaagttttgtgtgctacatctaaaagatccatctaaaggaaacaaacttacaatgaagcattgtgtattacaagccctgagacagggtctcactttgtcacccaggtagctgggactatagtcaccatagcatagggacaccattcttaggctggtctcaaaaattgtacaaaaaaaaaatatgttgaataagtgtggtatcacagagatcttaaaatccttggaatttcctgagtgataagagtgtcttttgttattcacaacaagcccctgatgttgcggctacgttaatgcatgacgtaagagccccacccactgaccttcgggaagcaggctggagagtaaaaact

SEQ ID NO: 17288 - DNA, 326 bp, Homo sapiens
  source 1..326: mol_type = other DNA
aacacacaaaatcaagaaaaataatcattattgttgttttagtcactaagttcttcaaatggaaaggtatcagtgattcacgaaaacttgtcagtaaggagttcactgctctcagcatagctctggaaatacccggtcagaggccaggcatggtggctcaggcctgtaatcccagcactgactagcctgggcacctgtaattccagctactctatagacaaaagaggtttaattggcttatgattccaaacaaccagatctcatgagaactgatatggtttggttgtgtccccacccaaagtagtgattaagtctcatgagatctg

SEQ ID NO: 17289 - DNA, 433 bp, Homo sapiens
  source 1..433: mol_type = other DNA
agaatgttgcttgagctttataaatgttgagggctttaaataaagagcattttacaaatggttattttggtctctaagacaaaagatcatttagtatgcttattccaaatgcagataaattgctgattttagatgctttgaggtcaaggaatctgcattgcattttcttagcatagagagaaagctcaggctggttctagccggctggctccaggagctagatttactgcagctgccgctacttataacgttagataatccacaaagaacactattttaggtactgatgataactatctcaaagattaaattcttgtttacaaaaatccccgctagtttccttgtcttcaaacccagggggaaatgatttgcaacttttcgcttgacctgcaacagacaaacaatttattgttatttcatttgtaaattatgt

SEQ ID NO: 17290 - DNA, 597 bp, Homo sapiens
  source 1..597: mol_type = other DNA
atacttttattttttatacatagttttagaatttacaaaatgctcttaaaatatctcattagggggcagagctggcgctatccaccccggttttaaatttgcctctcaatatacagaggtactgtctttactccgataaagacctaccggagggaggaaccaccgtaagcggagactccgggcggcggccggcggaagggctgggcgggaggcgtcgggatgccggcaggaccctgcgcccgagggggtagggggctccccatccgtttccctttctcagtgaagacggtttgggggcgggtggggaggcgcgtcctcggagcgccctcgcgctcccttttcgctccccgcgcgcgatccatcgcctctcttcccccgaggccagcgatggctcgggtgcgggcgaggaccgctcggcagtgctcggcgcgctggcccggcccccagctcctccggccgccgccccccgcccgccgcgccgcggcgccaggagggcggggccggggcgcgcgccgctcctcagcaagcgggcgggcggcgttcggtctgagggagcggggcggtctccgccggcgtcgcgcgcgctgtgtgtgagcg

SEQ ID NO: 17291 - DNA, 390 bp, Homo sapiens
  source 1..390: mol_type = other DNA
atagacaaggcagtgtctcaaggaccctgtccttcaaagaagaaagagagatttctgtttctttgaaagatttaaagttagaagagtcagaggattacattaaactttttctgacaactgtaacccagcttatagtctttgaaaatgagtcatatttatcatcagtagcacatattagggactcagtcatatgttattaagtagcttcatatgtgaatatcttacgttctgaaatgtttcccttgaagtcaaagaaaacacaggtttcttctgataaaaaaacaagcaaactatatacacatatacaaactatatacatatatgtgtataatattatatgtatatagtattatatatattatatatatgtatatatatacaaactgtcag

SEQ ID NO: 17292 - DNA, 305 bp, Homo sapiens
  source 1..305: mol_type = other DNA
ttcttaactttaatgttgtataatctgaaaattatctatagatgctttttttttccattaaacaacgaatgctttacctcgttttcaccactagttctgactagttcctagaagcctggcagaaattgttctccgattttaatctggctgccaaatctaaatggatataatttataagcaaagataacacttctgtttttttctctataaacaaaccatgcatgggcttttaaaggctttgtttcgtgcactgatgcaatccaagtagacgctctataaatatttattgaatgttgaacgatgag

SEQ ID NO: 17293 - DNA, 365 bp, Homo sapiens
  source 1..365: mol_type = other DNA
tcctcattaagaaacatttccagagtaggagttgaaatgcaaatctcaaaggcttcaaaattgccatgagaaagttatccacatttgtgtgtgtccctatttccatacagtcacaacaatactgagtagtattaattttttttttttttgcccaagtagctgggactccaggctggtcttgaactcctgacctggtgatctgcccacctcatatgttctgagagcaaaactggctgaaccagtatggatgttccaggcagaaacaactttaccctggtccaccacctaacctggtggttacagaaggaggaacacagtcctcctgtgttccaggtgccaggaggactgatagtatataaagctac

SEQ ID NO: 17294 - DNA, 243 bp, Homo sapiens
  source 1..243: mol_type = other DNA
tagacgctctataaatatttattgaatgttgaacgatgagctatccaaaggaagttacattaggttgctgctttgaaaatgaagtcaactcctaatggaggtccctgggcctggagcgcagaggcccgggagctgcgtcgccatggcaacggggagggacggcggggggggggtccggctgccccggaagcacctccccgcagccccctcctccagcccggcccgcagcccctggcctgcggc

SEQ ID NO: 17295 - DNA, 349 bp, Homo sapiens
  source 1..349: mol_type = other DNA
ctatccaaaggaagttacattaggttgctgctttgaaaatgaagtcaactcctaatggaggtccctgggcctggagcgcagaggcccgggagctgcgtcgccatggcaacggggagggacggcggggggggggtccggctgccccggaagcacctccccgcagccccctcctccagcccggcccgcagcccctggcctgcggcccccaccttctcggccgggcaggaagtgacaggcccggagcgagccccggaggcctggctgagccgcggccgggcccgcacccggagcggcgggaggggcggggagccgcggtcgcgccgggcgcctcccaccccgccctcggcgc

SEQ ID NO: 17296 - DNA, 289 bp, Homo sapiens
  source 1..289: mol_type = other DNA
ttcttcctactttgcagaagtaacctctggcgaacagagtgcactactctcgtctaggggtcaacagtggagtcgagactcgaagcttccacgcggcggaacagcgtccctctcaggcggcgggagacctacgtgagaactacaactcccgcggagcccgagggcgagctgcctgcgtaacttccgcttcccctacccgggagcggtcaggcgcgtgaccccgcgtgaccggggtgcgcgagccgagaggccctggaagcgggactctgggacccagcggcctcttggc

SEQ ID NO: 17297 - DNA, 360 bp, Homo sapiens
  source 1..360: mol_type = other DNA
atggagactatttaaatactggctccataacttaatagcttgggacccacggtgtttaatttactcatctgtaaacttgggataagatacttcctcataaggttggtgtgaagaccaagtgaattaactttcttttattattattagactcaaaacactgtagtagttcttcttcctactttgcagaagtaacctctggcgaacagagtgcactactctcgtctaggggtcaacagtggagtcgagactcgaagcttccacgcggcggaacagcgtccctctcaggcggcgggagacctacgtgagaactacaactcccgcggagcccgagggcgagctgcctgcgtaacttccgcttcc

SEQ ID NO: 17298 - DNA, 270 bp, Homo sapiens
  source 1..270: mol_type = other DNA
cagacgctgtcgtgggaaacgggatgggagacggggccagctaggggccggccgcagaccccggtcccagagctagtttcagaggccagcgttccccctagcgcctcgctgtgccccactctgggaaccggaaacaggaagcgccaagaggccgctgggtcccagagtcccgcttccagggcctctcggctcgcgcaccccggtcacgcggggtcacgcgcctgaccgctcccgggtaggggaagcggaagttacgcaggcagctcgccc

SEQ ID NO: 17299 - DNA, 521 bp, Homo sapiens
  source 1..521: mol_type = other DNA
tagatagagtctggtcttgaattcctgacctcaggtttttattaacttttcacctactaaaaacaaattactaagatgttagaatgtatttgtttactttgctcttctttttagttatctttgcatgaagtataataataaaaaaaataagacaatggaatttctgatactgtgtaaagaccatcacacaatttggacaaggttttggggaagatgtggtcatgtcatattcacaaaatatatctgggtaatagtctatatcacttccaagaaatgatgaagtcagtctcatttggcatacatctactttttcagagaaattcatagctagtaaccactctcacttttattttagtttccataactgaaattgctggacttgagagcaatttttccttgctcaacagaattaggtgagatggggaatcaatttaatatatatttagtaaaaatagcaacttacaatattaatttctataggcagcccccaaatttgaatcatttcctgaaaaattacttct

SEQ ID NO: 17300 - DNA, 271 bp, Homo sapiens
  source 1..271: mol_type = other DNA
tatattgtattttatactgtattttatacagtaggtgttatattgtattttatacagtttttgccccaacaagaatgtaaaatctttaagtgcctgttatagctacatgaatagatggatgaataaatgcatgggtggatggatggattaatgaaatcatttatatgacttaaaaaaattcactttcttaaaacaggaaactcccatttaaaagcttattagctgctggccatcaatgacctttccagagaatgttcagagacctcaactt

SEQ ID NO: 17301 - DNA, 458 bp, Homo sapiens
  source 1..458: mol_type = other DNA
ccacatgcaactgtggctggagacccaccttctcaaagaagcagcctggctgctttttggtagagcccagcaggttggagtggcagaaaccctgccccccaggagctcggtcccagggagagatcaaagctctggtctgatcacaatctggcaaggcagctgtgctgcatcgtgggggaccgttcctcatccaagccttcaggctggagtggctgagccatctcaggtggactccaacccactgccgtcggctggctgagattccaagacagtgagcctagggatatatacaggggctgctctgccaagactccactagctttgtgtatcagacccaagaccctggtggcatgggctcacaagggtatctcctgatccatgggttgcagagatccttggtatcactcaccgcttcccttggctgggggtgggggttccttccgttgccctcccccacc

SEQ ID NO: 17302 - DNA, 313 bp, Homo sapiens
  source 1..313: mol_type = other DNA
tgatttaaaaagtttcaagcaatacagtatgtaaacagacaccaatgtctgtgatcatcattgtactacaagttctatgagagcatggatactgaatatcctgttcaatattgtattttcatcaccagaatagataaagtcaatgacatggtttaagggacttaagaatctgatcaggtcaacaagtgtgatctttgataactcctttctaaaatcttactatcatggtaacatgtccctgacattctttgtcagcatcctttgtcacctgcttgtaaggattttgaaagagccttatcagaggtttgctaaa

SEQ ID NO: 17303 - DNA, 432 bp, Homo sapiens
  source 1..432: mol_type = other DNA
accacacaccggggcctgtcgtgcacaccaacatggcacatgtatacatatgtaacaaacctgtacattgtgaacttaaagtataataataataaaaaaaggtaagaaagtctttcaaagttccaaatacttttacttatgtgaaaatgctatcatatccaagagtgcctttagagctaagctaacagtaggctactgatctttagcacagatatttcaggaagattttagacttttttgcattaatttttacttttacaaaattgtgctaaatattatttctgttaatttgggggccccttaaaactctggtcctggccctgagagaggccagttaattaaggaaagtagatattacatagctaggtataatgaaccagtcagtggattgtctcagtaatttatggagataaccaccaacaaaaagtgtat

SEQ ID NO: 17304 - DNA, 473 bp, Homo sapiens
  source 1..473: mol_type = other DNA
gcccagggtgggaatcggccccgggtggaggcctccattgggttccccctaatcccggggacaagggcatcctctgggtccttatcacagggtaaggggtccaccagacccggaggaggtgcgttcctgccggatgtggaaaggaagtccaggaatccccttcctgtctttcggtcacaagcgccagaagcgccggcggctgcggggaaacggtaggcgggggatccagccccaagcaaatctcccgcgggcgcgtgggaggtggggccagtgctgggcgcagccgcgcctcgcgcctcccgccccccggggctgcggcggggacgcttctctctgcagagctccgccctggagtgaaggaggagagaagaaggcgctttttcgccagggccttctcggttctctccaccaggccatgaacctgagaggggagtgccccctggacgggccacggctcctgcttcagggccacc

SEQ ID NO: 17305 - DNA, 512 bp, Homo sapiens
  source 1..512: mol_type = other DNA
acttcatttctatttgataaaggcaatagctgtccaatctggaacttatttcagatatacttcatctaggcacttgttacatgttatattttttatgatttgtgcacattactataaattatattttagtaaaaggtgcccttactggcatttatatacaagataaagagcctctgtgctatttttgaaaagttgttgtagcagccatagcagcaaattcccaaaatatcttgaagaaattgaaaacaagatattttttgaatgaaatgaattttaatttgagattaaaattgctaattcttattttctatcataatattgctttgtaccgcacaaaatacaattataatttttaatagtcaaagaaattttaagttatcaaacattagtttctttcgtaaccaaaatactgttagagaagtagcttcaactttttaaaattcttacaaacaccagtttattctgttgtgatgagctgatttttgaaacaatttatgcttcataacttaaag

SEQ ID NO: 17306 - DNA, 503 bp, Homo sapiens
  source 1..503: mol_type = other DNA
acaggcatgagccagggcacccggcccatcagtcatatttttcatatgaataaaagtctactttttagtgaaaaatgattattctcattctggaaaactgttatagcctaattataacattcagcatagcataactgatttggtaattcaacacataattactgagcggctgttatgtttcacacaaaactaagtgatgaaaataaaaataataaaatgtgagtcttaccttcccagctactcgggatcgcgccactgcactccagcctgggtgacagagtgagactccgtctcaaaaaaaaaaaaattattggttatgcaaccacctgcagataataaaacctctaaaagtcagtttttcatgtatgtagttctgttctctagttatttaattaacctaagttaaatttcttggatttagattaattctgcagaatgcacttgagtgggtattgaaaaaaccagtttttccatatgcagatttccagttaatctactagtca

SEQ ID NO: 17307 - DNA, 600 bp, Homo sapiens
  source 1..600: mol_type = other DNA
tctgttctctagttatttaattaacctaagttaaatttcttggatttagattaattctgcagaatgcacttgagtgggtattgaaaaaaccagtttttccatatgcagatttccagttaatctactagtcatttccaggaattagttgaaatttttcatcaactaataggaccctttgtgttattgttttagactaacaaatttttattcacttaattcaattttagtggaattttagaagaaataggagataaaatctatgtttgctatgttgtattcgatagtaaatttctgaacacctcattttaaaattagatttttttcttttatgtcattaccttgaattattttaacagagttatttctgtttcttaaatatatattttttagttcagaagtcctcttaattcatgttttacctcagtttaatgttaatattataaagcatacaggaaagcaaatagctttcagaatttttaaggtattatctagacaatacaatgcataagacatagggcccctttctgaaatagctatcctactttggagaagatgctggaaattcagagtttccgccagagatggtattaataaaagtta

SEQ ID NO: 17308 - DNA, 479 bp, Homo sapiens
  source 1..479: mol_type = other DNA
tacagctcacatacagcgtgaccgagcgggctgccactgctggcttgggcagcaggagcccagctggcttcacccggtggatcccacaccggggctgcaggtagagctgcctgccagggcgccgtgaagcagggggcggcgctcatcggggaggctccggccgcacaggagcccacggagagggtgggaggctcaggcatggcgggctgcaggtcccgagccctgccccgcgggaaggcagctaaggcccggcgagaaatcgagcgcagcgccggtgggctggcactgctggggggcccagtacaccctccgcagccgctggcccgggtgctaagcccctcattgccccgggccggcagggcctgccggctgctccgagtgcggagcccgccaagcccacgcccggaactccagctggcccgcaagcgccgcgcgcagccccggttcccgcccgcgcccctctccctgcaagctgaggg

SEQ ID NO: 17309 - DNA, 322 bp, Homo sapiens
  source 1..322: mol_type = other DNA
gtgatattaataataaaatttggggcaccaagattattaatcagagtggtattttgatttccctccttaacgatgttttaaataataatcatacctcaaaagactgaagatttaagataaattactacgtgatacatctagtcacgagagagatccatgagcatagagatcttaaaattcatgttcagcaataaatcctggggccccagaatgtatgcatacctaaactgtttatgttttctagaaatttaaggcaggatgtctcagagtctgggaaaatcccacactatacattgtctggtccactggaggtataaactct

SEQ ID NO: 17310 - DNA, 543 bp, Homo sapiens
  source 1..543: mol_type = other DNA
atcccattactggtatatacccaaaggaatataaatctatcataaagacacatgcatgcatctgttcatggcagcactgttgacaatagcaaagctatgttctcactaataattgggatctaaatgatgagaacacatgtactatgtagtactagtaaaagttaaaaaaaatcaaattatactgttaaattattagcatgatttataaacaatattgttttaggataaagaatttaattgcttggcaattgcaaattattaaattaaatatcaatatgttagggaggctaattcaaatgatataaatatttaggctataacaaaaggcagctatatattattaactaatttccattcccttgactttaagggtaaattaagagaaatttgtaaagcactcaaaagaatattcaattcaatatgtgtgttatctatgtcatgggaaagcaacttttaaaaagaaaacatttcctctgaggttttcacaaataagtgaaactgtgaaccctcatatgtactgtgaaaggacaatttgaggagcat

SEQ ID NO: 17311 - DNA, 577 bp, Homo sapiens
  source 1..577: mol_type = other DNA
caatcttttgttaacaacaaaggtagaatatattcatttcctcatgaattttctgtcttttttttctgtccaaaaatgaaaagagcaattttgttatctgtcctttcccgaagccgcttgcgggacccctaatatatttgttgagggatttgaagacaaaattgtggcctggtaacatgtgatatgtgtgtttgtgtgtgtgctcacacccacacgtgtgactttgcacgcatttgtctttgagagagagataatagtttttgtttttctttcagtagccaaagtttaaaccattgctttttcttcttttaaggtgatctttcttaacacaggataagaaagcagtaatgtcctaaagaatgctgttgaattaattagtattctggaaggatacgtggttaagtaccactccttgtgttctgtggttcagatcccagttgagaaagtaagaaaatatgtgtttattcttcagctttaaattgaagctttcttttttgacgagaagaaaattgtaataaacaacagtatgactaatagatagtcacatggttacttccagtttgcaaaatgctattta

SEQ ID NO: 17312 - DNA, 402 bp, Homo sapiens
  source 1..402: mol_type = other DNA
cagaaacagaaccattagcatgtgtgtgtgtgtgtgttaagtcaaaattctgcaaatgagcatggacagactgggtacctaggaaagaatcaggatgctgcagttcacctatttaaatataactatctggactctctgtgactcagccaagttgaacaaacaaacaaaaaagtttaaaaagttaaattctttgcaagtgattccgattttcactatttggactctactagtcaaatatgtcccaaataacaaaattgctattttaacttttttaatttgaatttttatttacctttttattttattttttctcttactttattataaaagacatgaaggaaggaattgaaattcacagaattgtagccagatattaacaagcttatatccattttcatacac

SEQ ID NO: 17313 - DNA, 391 bp, Homo sapiens
  source 1..391: mol_type = other DNA
tacagctttttataaagataaacatacttatatgatgcagcaattcaatttctgggaatttatccaagagaaaacttgctcatgatcaaagagataatttctggtataacatgcaataggaataatctcaaaagtaaagacactacatattatatgataccatttatataaaattctatgaaaggggctgctgtaatcttgcaatgggccaagttttccccactgcactccagcctgggcaacacagaaaggaaaaactatgttgatataaagcaaagtaatgatggatgagttaatttttaaattccttccttaaactaacaagtctgcctacttttatctttgatctaaaattagtactactgaagcttgctcagtgcctaaataagtg

SEQ ID NO: 17314 - DNA, 366 bp, Homo sapiens
  source 1..366: mol_type = other DNA
aatattattcagccttaaaaaggaaggacattctaagcttcttttactagcaaagttactttccagaaactatcctgatgccagactaagtcactcttctcattaaaagaagggcttatggatatgctggccatattaacaaattaagacacaagatttccagttaaatttgaatttcaatcgaccactaattgcaagacagcaaatacaaatattgatgagcaatacttacattaaaaataagtcatttttacctgaaattcaaattctgtttacccccaatttcagtcacttggggagatgaatttgagactgatctgcagttcttctcagctgcagcaactgaataatacttgcctcagtgat

SEQ ID NO: 17315 - DNA, 569 bp, Homo sapiens
  source 1..569: mol_type = other DNA
tatgtataataataatacctaaccattttatgatttacatgtggcaatgtcaagaagaattttaaagtaagatttactaacgaatattagagaacaatcaagaagtgaaaaatactaagactattgagtcaaactaataagacacagcttagctgtgattatagttttcctggcctgcaaagctgtttccagagccctcagtatacagaccttggccatcagtatgcatactctctggttctgggcatcagatcccttaatatataggttggcgctaaagtaattttgtaaacttttaatggcaaaaaccacaattacttttgcttttaatggcaaaaaccagaattactttagcacaacctatatattgttatttagagaaactaggcattccctacctctcttaggcaaacctatagctatgtaaaagtgaagagaacccttctatcaggaccttcatctgaaagtttttcaccaataatccaaacacaatttcaaaaactactttctgtagttggtaaatatatagaaattgatctgttgcaacagttcaatgttcttaactgaag

SEQ ID NO: 17316 - DNA, 504 bp, Homo sapiens
  source 1..504: mol_type = other DNA
tgtaagagttctgttcttacaactactttcagtgcaagctaaaataatgtaaaagcccatttcataaagttaagtgtgtgcaatacatattatattgtgatgaaaaggtgctaggaaccattcagtctcaaatattcatctaagcacagctgtacttgaaatgaagtgatttcatcaaatcaaaattcttccattccaggaaacttttattgtttaatctaagcaataatatgcaagaagttgtgtaaattctaggtcataattattacacttgcttctcacaatgagataaactatatatctgctggtgagctatatccatgaattttcagcagaaatctctcatttgagcaatgtaatttagactaagctagggctaagataaagatgaacccctttatttagtgttgaagataaaaaaaaagcaggaagcaaataccttatctactcctttactaaactgacagatactgaaattgtaaagttggaaactacattttgcaa

SEQ ID NO: 17317 - DNA, 434 bp, Homo sapiens
  source 1..434: mol_type = other DNA
acagctgtggggtgagtgcacctcacgctaaaggaaagctttagaggagattccttaactacatattgctgctgtaacaaattaccacagatgtattaacttccggtagtgttaggaactttcccaactagctaagtactgtctctctctgtctctctctcacacacacacacacacacacttttctataatagcagccaggtgtgtggtagctagccttagatagatgtaaagaagacaacctgactcttttctgaaacattcagagcatcctctaccccgaggatcatgggaattcccccttctttgctgcacagcaagaaacagttctgacagagcagacagtttgagatctgtaacattctaatgagaatatctctaaggagaatatttggcttttctcactttctctgtagagaaacaaattgtcattc

SEQ ID NO: 17318 - DNA, 492 bp, Homo sapiens
  source 1..492: mol_type = other DNA
aaaggaaagctttagaggagattccttaactacatattgctgctgtaacaaattaccacagatgtattaacttccggtagtgttaggaactttcccaactagctaagtactgtctctctctgtctctctctcacacacacacacacacacacttttctataatagcagccaggtgtgtggtagctagccttagatagatgtaaagaagacaacctgactcttttctgaaacattcagagcatcctctaccccgaggatcatgggaattcccccttctttgctgcacagcaagaaacagttctgacagagcagacagtttgagatctgtaacattctaatgagaatatctctaaggagaatatttggcttttctcactttctctgtagagaaacaaattgtcattcttctcttacagaggggcaagctcccagccttgaaaaacacatgctgttcccaggcctcaagatattgaaacattaattagataattt

SEQ ID NO: 17319 - DNA, 441 bp, Homo sapiens
  source 1..441: mol_type = other DNA
gctaggataatatgatgtaatatgcatttaagattcctccatgtttttcatagtttgacaacatttcatttgttgtcgaatgatactccattgcatgaatgtaccacagtttgtttcttttgaaagacatcataattacttctaatgtctggcaattgtgtgtgttgggagcaagccccccaaaatcccatgatggccctaacacccatgctggatgagcaatttatgccttaagggcgtttcccataagggatactttcagttaacctaatatctacagaaaccatgctaatgactgggaaggctgtgagaccgtcccagaccgagctctgttaatactatacttacctctataagaaactgtcactgcgcagatggtgtggtcctgcgccccgagggccgcagcagctcatccggcagctcccaccccaacaacctgga

SEQ ID NO: 17320 - DNA, 620 bp, Homo sapiens
  source 1..620: mol_type = other DNA
cttgaagtcttctctcttgaggatggtattaaggcctttataaaagacgctacatgtagcaactggaatgctgagaaatacatttctattgcttataatttaagcacaaacagactaagatgggaatataattctaatgtactgattcaggaagaattttttcacattacctaaaacattttcttctcagtttaggagatttcatggtggttagtaatagttttaaaagtttttacttccagtaaattgtataattcctcgtgatcataatgtaccaaatgtgctataaaatgttgaatcaagttcagatactataagaaagaccactactctgttcttggagaaaggaaggggctaggtcctataatctcttctcttttcacaaagacacagagaggcttccaagttattattattctgcagactctgaaggaaccacagtgctacaccgtgctattgtaagttcttgcaaggccaactttttgacaactgtttagactgagacggcctaaacaccctcagcctgactgatttggcattcagagtacaagctcacagggaggggctgggcctgtccagtcaggaattgcagtcagagactttccctgcccctcggaaag

SEQ ID NO: 17321 - DNA, 619 bp, Homo sapiens
  source 1..619: mol_type = other DNA
aacacctcttacataatatttcaaagctgttccttgcaatataagttttgcagcaagagtcagctttgatttgattccttgctctaaatttttaaaattagcttcttaaacctgagaaagaggctaaattttctgtctcattttttcatttgaaaatagaaataataatgcctactatatagacttggatatgtacaacatgtggtacttagctcatagtaattgttcaataaatgttattttgtgttaatatctgataattcccaaagagatttgtatatatttcctttattaagcaatgagtttagctcctaccaattgaagtacctgtttatgtaatttaaaaaatacatgaataaatacatgaacaaagttatggtaaacttggagcaccaaaactgaaatagtttgcatcggttaaattaattaatgtcagacttaatgaaggcagcataagacattaatgtatgcatttttcttacatttggtctgaaacaaagactttagttttcctgagtcagcagtctcagaaacaggatggaaaattaccacagcatagtttcatttcctgctcttgaatatctggttgaactacttaagcttaatttgttaaactggt

SEQ ID NO: 17322 - DNA, 546 bp, Homo sapiens
  source 1..546: mol_type = other DNA
tatacaccacgtgtacacatgtgcacaaacaagctttcttcagttaatcaactgagattacctcaaataactttatgaataattttatgctattcaattatgagatgaaaccttgatattaatttagcttatattaacagcatatcctacactcacgccaagtgtaggcttgattttacaagagaaatattcaccattttgaaaaaaaaatcacatagctcacaggtgtatgaatatacaattatgtgttccaccactaaaaaaaaaaaaatcacagatattactggttgtgtaggaaaacatcccatacaatgtatttggtttcctcaccttgtgagataaacaaataaggtactcctatcattatcctctgtatgcaaataaggagactgaaaggtttagtgacttgcttgctaaaacccaaaaataagtctttagtctaattgtcagtagctacatgacttgaaatattataatacaatttccagtgtgaatgtataatgatccagtcataagttttcatatgtcaaaggtagtgtgttagac

SEQ ID NO: 17323 - DNA, 357 bp, Homo sapiens
  source 1..357: mol_type = other DNA
cacacagctaataggctggtctcaaactcctggccgaagttatcagcccgcctgattacaggcatgagccatggcacccggcactcccagctactcggggccactgcactccagcctgggtctcaaaaaaaaaaaaaaaaaaagtattctatgcttttgcatgtgtgcttgttttcctgagtgacaagacttatttctcaatcacatcactaagaaagaaagaaacctatacatttgcttttttaaaatttggttttaaaaaaatgtctttctcagttatctatttcaatggggataacacctgaaaattctaatcttccgacttgatttcttaccccaatgcttagggatataaat

SEQ ID NO: 17324 - DNA, 358 bp, Homo sapiens
  source 1..358: mol_type = other DNA
ctcaaaaaaaaaaaaaaaaaaagtattctatgcttttgcatgtgtgcttgttttcctgagtgacaagacttatttctcaatcacatcactaagaaagaaagaaacctatacatttgcttttttaaaatttggttttaaaaaaatgtctttctcagttatctatttcaatggggataacacctgaaaattctaatcttccgacttgatttcttaccccaatgcttagggatataaatgggtgactttcaccctgcaacagtcgttttctgatgaagaaaggaatatatttggtcaccagcaatctgcctttgaccttcattcagaggacacatatgtcctctttgaattgataaattcc

SEQ ID NO: 17325 - DNA, 537 bp, Homo sapiens
  source 1..537: mol_type = other DNA
agtcaatcatggattttactgaaatacattatttgatgggtaattcaactgtgctgaatattagtactatactaataattattatttattggcttcttattatgctccaagtacaaagcttgtagcaacgtgacatttttcacaaacctagtgtaaaaaagcttattatttttacccagcatgtcatttgaattcctataacaatgttatcaggtagacattatccctaatttatgtcatttgaattcctataacaatgttatcaggtagacattatccctaatttccagacatcaaagtattaagattgcactgctctgattcgtaaagacatatagaaacagtctgctatgaaattagcaaacaaacattggaatcaaatattttggcccataattctggcacattttttacaaatgtagtgtgacttactcctgatgctcatgaaaaatagttttccctttcataaattacttagcgaaatacaatgattgagtcattcttctattagataacagtagctatttaaatacttct

SEQ ID NO: 17326 - DNA, 461 bp, Homo sapiens
  source 1..461: mol_type = other DNA
tttatggcagaaagtgaatcccctggagtgcgacgccgtgatctccgctcgccgcaacctccagtagctgggctcctgacctcaggtgatccgcccgcctcggcctcctgggattacaggcgttgcggcaccgcccaaacactgtgacgccagcgcgggagggccaaagggatcccaggaggcctggccctcttttctcctgaggctggatcccaaccagcaggaaaaggctggattttcgccttttgtatttgttttggggcccaaccaagaaaaacagtggagggggaataaaacatgtttaaatcttttttttgtcttaaaaccatctttaatttcacagtcacaaaataaaacataactcgaatgttttgatgtttgcagacagagcgctcggccaccccctgccctgggcgcctggcgcatggggggcggggcggggctcgcggggtgacgtcaca

SEQ ID NO: 17327 - DNA, 377 bp, Homo sapiens
  source 1..377: mol_type = other DNA
gtgcattcatggatcgggagcccagctggcttcacccagtggatcccacaccggggctgcaggtggagctgcctgccagtcccgcgccgtgcgccgccgtggagcacggccgcacgaggctcaggcatggcgggctgcaggtcccgagccctgccccgcgggaaggcagctaaggcccggcgagaatcgagcgcagcgccggtgggccagcactgctgggggacccagtacaccctccgcagccactggcccgggtgctaagtcccccattgccccgggccagcagggctggctggctggctgctccgagtgcggggcccgccaagtccacgcccacccggaactccagctggcgcgcaagcgccccacgcagcccc

SEQ ID NO: 17328 - DNA, 521 bp, Homo sapiens
  source 1..521: mol_type = other DNA
tacatgttgaataaagattttcttgctgttcaggagcagctcttttcctgatatagataattttactaatatagatttcctttacagatgtaattttcctttacaaaagggcagcttttcacgcttgaaatatgccaacaaagataaatatttttaggggacatattttagtctccccccaacaacacatttctttttctggcatgcatccccaaatagcccctgcatataagataagcaaaataatttgggatatttatatatcaagtcctgagagaaaggcaaggagtgtttgcttctatacatgtaattgtatgtatatttctcattatctatgtggacaaaacttaacctcttcaagaagattggattatcatgctttactcataatttcagttatacaataattgtgagatggtttgtgacaaaaggagatgttggttatgacacatctccattttatactcaatgttacacatagcttatgtgacatttttccaggaagccagcctccataaacc

SEQ ID NO: 17329 - DNA, 607 bp, Homo sapiens
  source 1..607: mol_type = other DNA
ccatcttttacaaaagggtttatctatagtaatattataatgcttgaacataaacaatatacaaaatataatacacaaaacgtttatttgagtgtctgcttttgtagattgtatttccagatactaaatcatggatcgaaatctccacattggaaatttgacctgttccacatttgatattcctattaacaaggttactcttctgtagatgaaaaagtgtatatcgaagtatcagtatagtatctgaattagataacacactaaacaatataataatgtattagttaaagaactttaagaaaaaaaagcttcctgtcgtggccaggatcaatttatgtgctttgatagattgaagatatttatatatctttactatcaagccatttacagaaataaatgagctaagatatgccaagtgctttaaattgtgttaagtacaaggtaaataataaatgtttattattaaaagaggaaaattctgtaagtaattttgttatgctaagtaaatttacctttggtttagataaccctttaaaatgaatttgattttcaaacaataaaaaaccttgccaaagtgttaatattgcaaaagtactgtgagaatttc

SEQ ID NO: 17330 - DNA, 703 bp, Homo sapiens
  source 1..703: mol_type = other DNA
tatagaaggctttttattattcaagatatgagaaattatatttcaacctcaaaaaaataaaaatatttacactataaggtaattctaattgtttcttactcctgaggatacggaatgcttatcatttctgatgtatattctatcactgtatctgatgataggtaattaggatatacttattgaagaatcagaagttgtaatattactataagaagaagccttgtctctaagcaaaactagaaaaatgaatctttacatttaggatgagaagaattgagattcaatttaaattgtcaaatttttgagttacatgcaaggtgaatatatctgtttccaactatcataatcaaatatgaaatagcttttatttttgaaatctaagcactatgcttatttattaaactgctgtgcattgctaagatgttactatataaacatgtgatggtgatgataatttgttgatgatgatgaaatgcacgaaaaggacattcaacaaaagtgcatataacttacctgagtttagcttgcagaaagaaaactaaattattgccttgatcttagcgtgtgttgttatctaatatcagtaaagtaaaatattggtattaaatatctcaatgtaggtgaattaataggttcattatattgttatgacattttgaagtaattggcgattattttacaaccaagagaaatgtataaaatt

SEQ ID NO: 17331 - DNA, 677 bp, Homo sapiens
  source 1..677: mol_type = other DNA
agaaaaaaaatgttgaataaatttattgtccaactttaattcagagttttaagattaatagcttttttttgttaaaatgttataatgtgttcatcttatattactttatatgatgtcttatgttagtattttaaattaataaacataaaatatatatttagcttatcttgttcattggtatcaattcatatattattcttatgtatactggggtatatatttaagtttctaattctcctgcatatgatgtagatatgacagagatgcaatttcatgttttttatattaaaatttaaaaattcccaggactaattttttgtaacttaaaacaaattattgaataggagctaatttcccactttatctgcaatgttattaatacggttttaacataggtcttactatctagtaaaactacatgtagaattctgctttgtaagttctacaacaaaacctgaggtattaactggaattgaattgaatctctaaaatatttaggattaaatggcatcatttaaattcatcattttcaaatcctaaaatgttatttaaaataatggcaaaactacaattacttttgcaccaacctatcttttaccaaattaacaatatttttgtagtgataaggcggaaaggaagatgagattataatatttgtcacatctttctcaaagata

SEQ ID NO: 17332 - DNA, 721 bp, Homo sapiens
  source 1..721: mol_type = other DNA
cattatgagtttcaaagctgtaattaattttgctcattgactagattattaaattatattttctgatttattacaattacttacacaagcctcgctgccttttaaaacaaccacagggtctttctgaaagtttgaacttaaagtgttctttcatagatggtccaaacttatatttatttcctattttagtcattaaatcaattaccaatcaattctgtaaaataaagagttaaatctttttcagtagtatttagtttatgcataagttaatgtaatgttttacaaggtataaaatatttctttaaaattttaacaatttttctgttttcctcaatcattcagaataaaaaacattttttagtaaacgaatgtaagtcactaacttaatgtattttagtattaaaagttgttctatatgccaacaaattaaatccttacattaatgaattttaaaattgtcatacaattagtgcattttattttcaaatttcaattttagttttttacacaggtattctattggtgataaaatatttctgtagaatctgattttaaattaataaagatatttatattcagttacttcttagttattgttttttattgttcccattaataatattatgtcaaatatagaaggccttttaaaaagtgacctattgtttaaagagatttcagtttaaaactttaggaaattagtaccagacttttatattggtca

SEQ ID NO: 17333 - DNA, 764 bp, Homo sapiens
  source 1..764: mol_type = other DNA
ttagtagacactaagtaatttagtacaggtcacatattacaacttgcaaagctagaattaattgtagtctcactgactacagagctcattgactagattattaaattacattatctgaactattacaattacttatatatacaatcataggagctttctgaaagtttgattttcctattttagtcattaaatcaattaccaatttcttgtgtaaaagcagcaatttaaaaatatattatgttttcaatagtatttatgcatacagtaatgtaatgttttacaagatatatttttaaaattttaatgatttttctgatttcctaatttagaaaaataatcagttgacaatacctcaggtccttttaataaatgaatgtaactcactaacaatgtatgttagtataagaagttactctgtatgctgacagaactattttatcttatggcacacaatcattaaccatcaatgactcttaaaactatggtaaaattagtgtatttctaaatacagtattttaattgttaaagtatgcagtctattggtgttaaacatttttgaagaatctaaccttaatttaataccaatttttttcatgaacttcctagttctcacaagtttaatgtttttattgttcccactagtaatattatgtcaaatacagaatacatctaaaaaatggccaattatatcgtgtgatttttgtttaaagctttaggaaattagtagcagaattttacctaggttaacagcaaagtaaacatta

SEQ ID NO: 17334 - DNA, 820 bp, Homo sapiens
  source 1..820: mol_type = other DNA
tctacatacattatactttataaattatttttcccaatgtagattagtaaactaggttagtagacactaagtaatttagtacaggtcacatattacaacttgcaaagctagaattaattgtagtctcactgactacagagctcattgactagattattaaattacattatctgaactattacaattacttatatatacaatcataggagctttctgaaagtttgattttcctattttagtcattaaatcaattaccaatttcttgtgtaaaagcagcaatttaaaaatatattatgttttcaatagtatttatgcatacagtaatgtaatgttttacaagatatatttttaaaattttaatgatttttctgatttcctaatttagaaaaataatcagttgacaatacctcaggtccttttaataaatgaatgtaactcactaacaatgtatgttagtataagaagttactctgtatgctgacagaactattttatcttatggcacacaatcattaaccatcaatgactcttaaaactatggtaaaattagtgtatttctaaatacagtattttaattgttaaagtatgcagtctattggtgttaaacatttttgaagaatctaaccttaatttaataccaatttttttcatgaacttcctagttctcacaagtttaatgtttttattgttcccactagtaatattatgtcaaatacagaatacatctaaaaaatggccaattatatcgtgtgatttttgtttaaagctttaggaaattagtagcagaattttacctaggttaacagcaaagtaaacatta

SEQ ID NO: 17335 - DNA, 597 bp, Homo sapiens
  source 1..597: mol_type = other DNA
actcctgagctcaagtgatcctggagtgctgggattactgacccggacattcatgcatttttaagtaggtgatgttttaaaaattgctttaacctcccttcatagtttaacttaggctttagtcatttacaacaaatatttctattaaaatgcagacatgaacaatatagtaggtagtttttttattatttcagtctctggcatagagatatagctcagtattgtttaatattttattctttcaagagacatttattttaatcaggaatctggttaacttatataaagaagaaaaatcagttacaattaagttgaaaatgcagcattttctcaaaatagtgacaagtacattaaattcctattgataaaatcattatttaaattttgttattatgatagcagtgatattataggggtatatgataaaaaagtatataatgtcaagtttcagtctaaatgtacctaagatccttttgaaaagttacaaaactttggtgtttgtgactgagatggaaacaatcaccagtaaaaataatttctaagaggcactttaaaatgtaaagtgtgtcccttcaaagggcagtctgtgaagatcac

SEQ ID NO: 17336 - DNA, 748 bp, Homo sapiens
  source 1..748: mol_type = other DNA
gtaaactaggttagtagacactaagtaatttagtacaggtcacatattacaacttgcaaagctagaattaattgtagtctcactgactacagagctcattgactagattattaaattacattatctgaactattacaattacttatacacttatacaatcataggagctttctgaaagtttgattttcctattttagtcattaaatcaattaccaatttcttgtgtaaaagcagcaatttaaaaatacgttttcaataatatttatgcatacagtaatgtaatgttttacaagatatatttttaaaattttaatgatttttctgatttcctaatttagaaaaaaaatcatttgacaatacctcaggtccttttaataaatgaatgtaagtcactaacaatgtattttagtataagaagatactctatatgctgacagaactattttatcttatgatcaatgactcttaaaactatgataaaatttgtgtatttctaaatacagtattttgattgttgacatatttggtgttaaacatttttgaagaatctaaccttaatttaataccaatttttcatgaacttcctagttctcataagtttaatgtttttattgttcccactagtaatattatgtcaaatacagaatacatctaaaaaattgccaattatatcgtgtgatttttgtttaaagctttaggaaattagtagcagaattttacattggttaacagcaaagtaaacattatt

SEQ ID NO: 17337 - DNA, 800 bp, Homo sapiens
  source 1..800: mol_type = other DNA
tagttttttacatacattatactttataaattatttttcccaatgtagattagtaaactaggttagtagacactaagtaatttagtacaggtcacatattacaacttgcaaagctagaattaattgtagtctcactgactacagagctcattgactagattattaaattacattatctgaactattacaattacttatacacttatacaatcataggagctttctgaaagtttgattttcctattttagtcattaaatcaattaccaatttcttgtgtaaaagcagcaatttaaaaatacgttttcaataatatttatgcatacagtaatgtaatgttttacaagatatatttttaaaattttaatgatttttctgatttcctaatttagaaaaaaaatcatttgacaatacctcaggtccttttaataaatgaatgtaagtcactaacaatgtattttagtataagaagatactctatatgctgacagaactattttatcttatgatcaatgactcttaaaactatgataaaatttgtgtatttctaaatacagtattttgattgttgacatatttggtgttaaacatttttgaagaatctaaccttaatttaataccaatttttcatgaacttcctagttctcataagtttaatgtttttattgttcccactagtaatattatgtcaaatacagaatacatctaaaaaattgccaattatatcgtgtgatttttgtttaaagctttaggaaattagtagcagaattttacattggttaacagcaaagtaaacattatt

SEQ ID NO: 17338 - DNA, 546 bp, Homo sapiens
  source 1..546: mol_type = other DNA
ttccaaactccctcaaaggaacttttgtctgtgagtaagattttaaaattactatagtttgacttcagtttttgtcatttacaactaaatatttctatgaaagtcgacataatttgttatataaatgaagaatgtaatgaatagctatttaatatttcaatttctggtatgctaatatatttcaaaattgattaatattttacctatccaagatatttttatcaagggtaatctgaagattaaataatctatttttaaaaattaagtgcaaaaatttaagaactaagagaagttaataatataactttggcaatgatggtgccagctacaatcaattgagtaattactgcagtaatttttcagaataattaaggaaaaaatcagtagatatcagttgataatattactatgagttttagaatgttttctattataatggaagtgacataataaaataatataaaatgacacactttcaaagtcaaccttgtacttttaatagaccaagtatccatgagataaaactgatttcacagtaacacgttg

SEQ ID NO: 17339 - DNA, 598 bp, Homo sapiens
  source 1..598: mol_type = other DNA
tatgattatactatatgagttatctaaagtagtcaaattactgtaccacatagtacgtatagttagcaacaatacgttgagtagatctcatgtcaagtgtcttacttgagaaaaactttgtagatgataaacatgcctactatcttcattgggtgatggtattacgaatgtatgcatatgtccaaactcatcaaattgtatacgttaaaaatgcacagtttttttgtatataaactatacctcaataaagctattgtaataaatctccaatatagcatctattaatggtcatcactccaacataatttgaagaaatgaaaattataatataaaccacgacatagctatttgtttcgaacaaaaaataaatatattaataattaatcttcttaaagaagaaaaatatttagtgtagaattattcaatgtaatagcaggctgtatatacaagatccattttcatataaatagattacaatggtccattaattttttaagtatttatctgtggtcaactgaaaatatattttcgacccgcctcgcatgggcccagggggcgggggtgccgctgctgcaccggcctgcagacgatcaggcgg

SEQ ID NO: 17340 - DNA, 513 bp, Homo sapiens
  source 1..513: mol_type = other DNA
gctgtatatgcattaggctgatgaacaaacaggctgggattgaatcccaggtcttctctccaccacatcactgaaggttgtcaaccgacagataggattactctgtgtgttgataacaaaagggtgatcaataatatctgaaaaggaaactttgtgtaaaagtctttcccttaccttatctttcattcccccaatttaattctatctggcgagaaacaataatgggctaaacttattgtatccttattgaatgaattaagaaccttagaagttctgctgttaaaaaaagcacggtgactgtcaattataggcttgaaaaatagtttatattcttctaagctttatctttatttagctcacagttaacataaaaaagactatcatatgctcacatttctaatctttgctagtataatgtaatctttattttgaaaacaatgtgctgcgaccgactctcacgctttagtctagggctgcactgcaggaggaagagaagcgcctgtggtgacgcac

SEQ ID NO: 17341 - DNA, 461 bp, Homo sapiens
  source 1..461: mol_type = other DNA
ttgaatctctgtcccaagttaacctggttaataaaaaacaaagccagaatttatacctagtctgtctgaaccctaggggagacatcccagaccctctgggcccattctcaaagggcatgtgatcctcgaggctaagagggctcagttccttaagctttcaccagctggcagaggcaactggagaatatatattgacgttaaattggtgtaaactctgaatttacattaaatctgtgaggtcaatttcctcatctgcgtgttacagatgaaattatccgtatattacctttcaggagtaaaggtcttaacagctgtgctacgaatagctgctgggctcctcggaacgctccagaagacaacccgggcgccccgttcaccctggctgcaacgcgacccgcgcgctcgcgtcccggcggattggagcgcaccgggcgcctttaacctcccgggccggtgcgccg

SEQ ID NO: 17342 - DNA, 488 bp, Homo sapiens
  source 1..488: mol_type = other DNA
agatcaatgtaatactaaggctatcatactatctaattagattgtattattgtgtccactcaataaccagtgtgattaaagaatcatatagaacattcttggcttgttcaaggaactgtgtattcacactgttctgatattttgccttactaacctccagggtattaataaagatagaatgttttaatacctgtgttctacaacaataaaggattaggagaatcttaatcgtagcccccaagtgtgtgttgtcctcacacaactcaacattaaacagaaatgatctctatattattatgaaattaagctacatatcatccatataggtatatatgctataaaaatggaatttatgctacactaatagctagagatattaatcattttcacttttgaaaatcaaatgatgaccaaacttcaattgtagtatttgtttgcttggatactgtttcttcagaaactatgctcaagtcacaggagctcaaagg

SEQ ID NO: 17343 - DNA, 395 bp, Homo sapiens
  source 1..395: mol_type = other DNA
gcatttgaggcttgaacaggcattacaaatcatcaagttgaatatataagtatggccacttagttattagtggtgaagactacggtatttgttagaagaaataaagtagatgatgaattctatagaatattcgttttgctttaataatccctaaagatattttttaaaatacaaattttttagctttcctgtattgtacagcacgctgcggggcagccttctgtcatctatgtgtacccagcagtgtgctgtcctcacacaactcattacatgaaaaatttagctaaatatacaaatgtctttccaaacagattgaaaaaactgtgctgattgcttggacacagttccgtcaaaacatttgtccaagtcatagttgtacctttttgctaggctag

SEQ ID NO: 17344 - DNA, 778 bp, Homo sapiens
  source 1..778: mol_type = other DNA
ctatttataattaggaacttacagcttttatcaggaaatcattgttgttttccattgtaatttgtaccacatatatgtacttaactatcattgtttgaacctctaattttttggatggtaaaaacattcaattctaaattaatgatgagaatggattttatttcattatgaattcttattttatatttattataaagcaaatagaatggttgttagctaatgatgcataaaatttgagtgacaaacatacatacataagtagagtaaattttgtatgtgtataccaaaaactgttctaaaggatactggatttaatagtagtatgtgaatagattagaaaaaaatcatttctataataggaatgaagatacatgatcatgatactttcagtgctgttataattttttaatgtgtagttagaaaagttgtttcttccactttttgaattaaagaaaacctttttttttttgaaattgacatcaatatttctcaaaaaaattcaattattccctctcttaaaataaactcaatgtaaacagggtatataaactatggatcacaattgaatgaaacattctgcaaatattgaaaattatctgtctaatctatatattgatgataggaaatgtattaatcatatgttcagcatttggctcaaggccccaagggcacatgtgacaagaaggcgccagctttttaaacattggaagttcttctgtgtcagttctgtgacagaacatttacttaacacatcatgaaggatgtggaggggaataga

SEQ ID NO: 17345 - DNA, 334 bp, Homo sapiens
  source 1..334: mol_type = other DNA
taccgttttagaaactttatggctaccctgtaagtaataaagtatttttaaaacatggtaaataacatttgcacactttgtaaccataattaagtatgcttaaacaataaaaaccataaacaacatttgtattttacgattatttaaatgttattcactgaccgaaaatttgggatgaaatatgtaccttctatatcacagccttaagtcacattctgaaattcgtttccggaacaggctcccggccgccccctgaggagctccgctagcagctaagagggcagccgctgagcactctcgcgagactgtggggctcgccattggctgctccgcc

SEQ ID NO: 17346 - DNA, 264 bp, Homo sapiens
  source 1..264: mol_type = other DNA
tataatgcaatttaggctttaacgaggtatctgattatcctatagaatttaccacttaattataagtggtaggaattcaatacaattattaaaagaaattatagaataacatgatatctgtacattttgcattaataacccctaaaggtactttaaaatacacaatttggccttctgtgtccttgctgtgtgttgtcttcacaccaattgtgatactatgagccaggatcaatcctctgggctagagtcctctttataaaggga

SEQ ID NO: 17347 - DNA, 446 bp, Homo sapiens
  source 1..446: mol_type = other DNA
ccacttaattaacagtggtaagaatttgatacaattcctaaaagaaatgaagcagtgggtgaattttatagaatatatggctcctcaaagaactatgtattcagttttctcaggtctagaaaccctaaaaatactttagaatacaaaattttagacttcctgtgttatcctgagcaggctgcggggcagctttctgtcatctatgtgtgcacagaagtgtgctgtcctcacacatctcataattgagctaaatatgaaaatatctgtacatgaccattttcagattgaaactctaatgatatctaaagttcagttggacacagttccttcaaaaccattgttcaagtcatagttgtaccttttggaaataagacactatctctctgggctagagtctctgaggtggtgaggcccacccagtgtggagctcaatcctctttataaag

SEQ ID NO: 17348 - DNA, 586 bp, Homo sapiens
  source 1..586: mol_type = other DNA
ttcccttcccggagcgcgtgctcggctcgggaagcgcccgcggccgccgcatccccgagcgggcgcgtggcgccacctctttccggggcgcccaccttccccgggaatccccccgcccgacggtcccccagcgtctgcggcgcggccgccccggctttgtctccggcgtcgcgctcgggcgcccgaagcagaacaaaggctattgttttatttcctccttcaacgtttcaaaacccttgtgcacatcgatgttttttggggccacaatgtaacgttttttgccagcgggaggtctcgcggcgtggagggcgggcgcccgcaccgggggccggcctggggggctgcgccgctcgccccgctcgcagccgcggccccacgcggccccgctacccgggtttcctccgcccgcgcccccgcggccgcccctctcagtgctgggaattcacgtcagtttctgcactgaaactctcaagatcaatgagcaaagattcagtttctctcttccaggaaggaaaacattcgagaggcgggggcgccggctgcggaggagagaccgggaggccggccgggctgcgtcccgggtccc

SEQ ID NO: 17349 - DNA, 594 bp, Homo sapiens
  source 1..594: mol_type = other DNA
ccccccgcccgacggtcccccagcgtctgcggcgcggccgccccggctttgtctccggcgtcgcgctcgggcgcccgaagcagaacaaaggctattgttttatttcctccttcaacgtttcaaaacccttgtgcacatcgatgttttttggggccacaatgtaacgttttttgccagcgggaggtctcgcggcgtggagggcgggcgcccgcaccgggggccggcctggggggctgcgccgctcgccccgctcgcagccgcggccccacgcggccccgctacccgggtttcctccgcccgcgcccccgcggccgcccctctcagtgctgggaattcacgtcagtttctgcactgaaactctcaagatcaatgagcaaagattcagtttctctcttccaggaaggaaaacattcgagaggcgggggcgccggctgcggaggagagaccgggaggccggccgggctgcgtcccgggtccccgcgccgcgccgcgacctgcagaccccgccgccgcgctcgggcccgtctcccacgcccccgccgccccgcgcgcccaactccgccggccgccccgccccgccccgcgcgctccaga

SEQ ID NO: 17350 - DNA, 147 bp, Homo sapiens
  source 1..147: mol_type = other DNA
aagccactgagagcagacctcacagcgttgatcatcacgcctgtaatcccaacactttgggaggccgcgcctgtagccccagctactcaggaggctgaagcaagagaatcgcttgaacccgaattctagaaatagtttcccgtagaa

SEQ ID NO: 17351 - DNA, 302 bp, Homo sapiens
  source 1..302: mol_type = other DNA
atatatcctggaaagagcataaaatcagatgtaactgtttcctatttcatataatagggaattccatctctaaagttatgacatgttccacttgaacatatacctgagcctcagtcaatgttaagattaaaagaccacctgaggccgtaatccgaaactcaggaggctgagatatgaggcagtgcgccaagatcgcaccactgcactccagcctgggcaacagagtgaaactctgtgtacagtacttagcggtcagtaaacatttgtttaactaacaactgatagcagggcgtaataaggaa

SEQ ID NO: 17352 - DNA, 307 bp, Homo sapiens
  source 1..307: mol_type = other DNA
agaccacctgaggccgtaatccgaaactcaggaggctgagatatgaggcagtgcgccaagatcgcaccactgcactccagcctgggcaacagagtgaaactctgtgtacagtacttagcggtcagtaaacatttgtttaactaacaactgatagcagggcgtaataaggaagtggttctccttctttaagcctcttttcaggctgagtcctaaacctgaagaaagtttagagcctggggctctcctgaagcagacaaaatgacattccaggaaagacgaagaaaggttatttaggtttctctttcat

SEQ ID NO: 17353 - DNA, 627 bp, Homo sapiens
  source 1..627: mol_type = other DNA
tctcaagctgagaattgataatcgaagcatgccaaacattcgttattatatgcaacttgtaaaatcctaaatagtcttgtccaccaaaaatgacaatctcagttttgaattggcgttttaatcaccccgcaacgggatccgccgtggctccccgcgcgtgcaccgcggctgggcagtctcaggtggctgggggcgcgagaccggagccccacctggccctgccggcggcggccgcacaaagagcggggcagacggctgcccggccgagccgcaccgcctcacgccctccgcggggagggccgaagcggccggtccgggaaagaatcccgctggaatgcgccaccgggaggaggctttccctcccactagcccagaacctctcccagggtctcaggcagaggctgtgcgtgcggttgccgactcccttccctggccgtacaggaggcagtaccgggagaaggggctcgttgcgcgcagggacacggtcgcggcgaccctaggaggcggtgccgaccgtatccctgcgccgctgcgcgaggcagaggctgaatgagagcagacgctggcgtcgcgcgagcccggggccgagcggcgcggtagagagggcggcggcggcgcgcgcggaac

SEQ ID NO: 17354 - DNA, 566 bp, Homo sapiens
  source 1..566: mol_type = other DNA
ggccgtacaggcctagacttaacttgcaattgcatagcgcttcaggtctgcaagctctttcaaaacagagtcaaaggttagaccatatggcaaactattcattcagtcaacaaaaatattttagttaaatatttactgagcacctattgtgtactatgctaagtgttagacagttttaatatatgttacagactgaagtttgtcttgcagataatatttaactcaagaattgccatctttaattgaggactccatcctccaattatggaaagaggattctcatcagtggttgcctggccgcgaggcaaggctcacctgcagaccctcgggccaccagcagggaggcacgcactccccctcgcagcgcgcccagcccggggtcagcggtgtggctgagctgggggggagcgcggggcggtggggggagccacctccctgcggggctcagcgctggggccgggagcccggagcctccgcggggagggacgcgctatgttgccgggaagcagctccgggttgcagggcaggaacgtgcccttcccccgcggcaaacttgccgtcgctgc

SEQ ID NO: 17355 - DNA, 407 bp, Homo sapiens
  source 1..407: mol_type = other DNA
gccagagactacattttatacatataaaatctcaaggcatttacttgaaatttcttgacgcagacaatgtaatataaaatgcaacttggcattgcattgctaagcaaaaatttctctttaaagatgtgcactccctaatacatgaaacagcattttctatttctattcaaaatgagctttgcatctttctccatctgtaaaacagggttaaaaatacctattttgtaaagttgttctcacgcatccttacaacaggaaagggcttaccctcttccgcaaagccctttaaggccctaagtcgcaggagcgggtctctccgcccctccctcgggccggggggcggggcctcctaatccggaactgaaggtctcgtagccggcaccgcccatctgcgtcccggaaggagc

SEQ ID NO: 17356 - DNA, 521 bp, Homo sapiens
  source 1..521: mol_type = other DNA
tgaaatttcttgacgcagacaatgtaatataaaatgcaacttggcattgcattgctaagcaaaaatttctctttaaagatgtgcactccctaatacatgaaacagcattttctatttctattcaaaatgagctttgcatctttctccatctgtaaaacagggttaaaaatacctattttgtaaagttgttctcacgcatccttacaacaggaaagggcttaccctcttccgcaaagccctttaaggccctaagtcgcaggagcgggtctctccgcccctccctcgggccggggggcggggcctcctaatccggaactgaaggtctcgtagccggcaccgcccatctgcgtcccggaaggagcgagcttgcggtgaaagcggcgccgcccgccggccgcaggtgcggcaaagggctcccggaaagaaggagggctagccgcgtgcgttcgcgccgcgcctccttgcctcccgccgcccaggcccctgcgtgggctggacgcgtcagccccacacattagcct

SEQ ID NO: 17357 - DNA, 619 bp, Homo sapiens
  source 1..619: mol_type = other DNA
gtgcgggcgggagggtgcggggcccggggcgccctcccgcccggccgcatggacgctccgcagcgcgccccgactcccggtgccgggcgccgcgctccagccccgccgtccggccaccctttcgggaggcggcgtgggggcgaccgcggccgggggccgcaggagcgtgccaagggggcgtgcggccgggcgcggggtcgcagtgggtgcgctcccggccgctgcgcggcgcttggaccgggccccgccgagaggagcggccgccgcgggacgcggcacctttgcgggcgaagctgctcacttccaggcgcgactgttacacaacacgcctgccaagtggggccctggcctgaaagcagcgaggccacctgggtggtgacggtgctctttatttacactagctgcaaaacgtgagaaataaaaaagcccagggtctgtgtatcacgtgtagtttcatgtaatgaaacaccacagagggaaatattttcagatgctgggtttatttcctaaagaataatcctaaagaagtttaggaaacatcaactgcaaggattcttggcgttttgtccatccccttgaaccaaagggaagtgagttaagatgcagggttttaaaactc

SEQ ID NO: 17358 - DNA, 467 bp, Homo sapiens
  source 1..467: mol_type = other DNA
ataaacatatagatagctgaatagtacctgtaacttctctcctgagagatggcagagccttgagtgtaagcactggaggcggacaccccggcccgggggtcggggccgcgagcccgggggtagggggcgggcgcgcgggcgcgggagaggtgggggaggaggccgcggggccgcctcctccggcagctccggctcctcccagcggcgcccgcggaacctgcctcagagtcgccggactctggaaggcctgacccctccccgagcggccggaacgaggcgcggagccgcgctccgggctcgggcggccgcgggatgggcgagcgcgcggccccgcccggcgcccaccgccctgcccgagcactgggattggtttcaagtgacgccatctctttatttttaaaccaatgggctttaatcagtttttaaacgattattaccgaagaaaagttgcgagcgtctcctctctt

SEQ ID NO: 17359 - DNA, 529 bp, Homo sapiens
  source 1..529: mol_type = other DNA
tagaaaacatttttaaagaaaatgtaggctgcttatccttgtatttgtaaatataagcaaagtaaagtaatttatgtgggggctttcaaccataaacatatagatagctgaatagtacctgtaacttctctcctgagagatggcagagccttgagtgtaagcactggaggcggacaccccggcccgggggtcggggccgcgagcccgggggtagggggcgggcgcgcgggcgcgggagaggtgggggaggaggccgcggggccgcctcctccggcagctccggctcctcccagcggcgcccgcggaacctgcctcagagtcgccggactctggaaggcctgacccctccccgagcggccggaacgaggcgcggagccgcgctccgggctcgggcggccgcgggatgggcgagcgcgcggccccgcccggcgcccaccgccctgcccgagcactgggattggtttcaagtgacgccatctctttatttttaaaccaatgggctttaatcagtttttaaacgattattacc

SEQ ID NO: 17360 - DNA, 426 bp, Homo sapiens
  source 1..426: mol_type = other DNA
ggctggagtgcagtggtttcatgtcagcctccccagtaactgggattacaggcatgtgccaccacactcgactacactggtttatccactattatgaataatgctgctaggaaagaacatttatatacaagtttttgtgtagtggccaatattctgaagaactgccaaatttcttccctttcgtttttttttaaataaagaacctttaggtcagcgtcccagaggagggcctgcttccggcaccccgccttcagggctgcctcccattccaggccctggcacttaggagccaaaacctcaggtcaggcgctgggccttttttttccagtcagtagcgcagagactgtgataagaaatgccgcggtgctacggcagccgaaggggccattccgtgtgcagcgctcccgtccggtctcggcggctctc

SEQ ID NO: 17361 - DNA, 512 bp, Homo sapiens
  source 1..512: mol_type = other DNA
tggtgttttaaaaatcatttcatcatcatatttccctctgaaagcattcactagcatctgaatattgttctggtccatggccttaactgtgcttgggaaggaagatcctgggccaggggtgtactgacagctacaaagtttattaagggacttgagagacccagcctccccagggatggcagaaacttctgggttaaggctgagcgaaccattgcccactgcctccaccagcccccagcaaaggcacgccggcgggggggcgcccagcccccccagcaaacgctccgcggcctcccccgcagaccacgaggtgggggccgctggggagggccgagctgggggcagctcgccaccccggctcctagcgagctgccggcgaccttcgcggtcctctggtccaggtcccggcttcccgggcgaggagcgggagggaggtcggggcttaggcgccgcggcgaacccgccaacgcagcgccgggccccgaacctcaggccccgccccaggttcccgg

SEQ ID NO: 17362 - DNA, 602 bp, Homo sapiens
  source 1..602: mol_type = other DNA
gtccatggccttaactgtgcttgggaaggaagatcctgggccaggggtgtactgacagctacaaagtttattaagggacttgagagacccagcctccccagggatggcagaaacttctgggttaaggctgagcgaaccattgcccactgcctccaccagcccccagcaaaggcacgccggcgggggggcgcccagcccccccagcaaacgctccgcggcctcccccgcagaccacgaggtgggggccgctggggagggccgagctgggggcagctcgccaccccggctcctagcgagctgccggcgaccttcgcggtcctctggtccaggtcccggcttcccgggcgaggagcgggagggaggtcggggcttaggcgccgcggcgaacccgccaacgcagcgccgggccccgaacctcaggccccgccccaggttcccgggcagcagtacccctccagcagtcacgcgaccagccaatctcccggcggcgctcggggaggcggcgcgctcgggaacgaggggaggtggcggaaccgcgccggggccaccttaaggccgcgctcgccagcctcggcggggcggctcccgccgccgcaaccaat

SEQ ID NO: 17363 - DNA, 498 bp, Homo sapiens
  source 1..498: mol_type = other DNA
ggtgggatggggtggggtccgcctcaggccgaccccgcagaaccgcgagttgacaggcccagcccctctgcggccgcccgcgcgcccggcctgtcacgcgtggggaccagggcgcgcggccgggggattgcatcattgcggctccccctccacgggccccgaaccgcggcgaccatcatggcgctcgcgccgggctgcgctccccgcgcgcctgccccgcgctccggccgcggccccggagcctcggacgcgcgcgcgcgccccgacgctgagtccgctgaagatttaaggtggatccgagaagctgcagcttcaggcggagtctcaaccgggcgcccgccgcgtttgccgaatctcccgcggccccagcccccgcgcccgcccggggcccctccccgcctcgcgcgccgcgcgcggcctccgcccactttttgatgcttgttttcttgtaaaaaatacagttgtgacgaaacctgcttcggcggcccgaggtggggg

SEQ ID NO: 17364 - DNA, 458 bp, Homo sapiens
  source 1..458: mol_type = other DNA
cagcccctctgcggccgcccgcgcgcccggcctgtcacgcgtggggaccagggcgcgcggccgggggattgcatcattgcggctccccctccacgggccccgaaccgcggcgaccatcatggcgctcgcgccgggctgcgctccccgcgcgcctgccccgcgctccggccgcggccccggagcctcggacgcgcgcgcgcgccccgacgctgagtccgctgaagatttaaggtggatccgagaagctgcagcttcaggcggagtctcaaccgggcgcccgccgcgtttgccgaatctcccgcggccccagcccccgcgcccgcccggggcccctccccgcctcgcgcgccgcgcgcggcctccgcccactttttgatgcttgttttcttgtaaaaaatacagttgtgacgaaacctgcttcggcggcccgaggtggggggtgcgcggggcggtcagcg

SEQ ID NO: 17365 - DNA, 286 bp, Homo sapiens
  source 1..286: mol_type = other DNA
gagatatctacagaagctacattccttttctgtgctgaattatcaaatgttgaaagtgtacaaccacgcagcacttcctgtgggtgtggccttgcattcttaggactgcagggtacccgctgctttaaaatatgattttgtctgtggttctcttccaggggaaagcgaacacacaatgttcgttttccaccatgtcacgtccttctagatgaaggcagcgggtcatgacaggaaatggcaaattctcagaatgagacaaggctttcccagggcagccattggttct

SEQ ID NO: 17366 - DNA, 412 bp, Homo sapiens
  source 1..412: mol_type = other DNA
cttagtagcttcacagtcttggcactgtctcagagaagggttccaggctggagtacagtgtcaactgatccctcaacctcagccccctgattacaggcatgccaccatgcatgcctgcacttgcccaggctggtctcgaacctgggacaggcgtccacaatttgaaatgctctgtgatagcgctgtcctattcaccagccatctagcatagccttagcaaatggtaggttctcaacattattgaataaagtaatgacataataaaaaaatagtattgtaatatcaatccgttccaaactctatggaactggagtccctggtgatcagccccttctgcacccacctgcctagcggacgggtgcaatccccggcaagcccgcagggggcgcgcagagcacgtcgtccggggaga

SEQ ID NO: 17367 - DNA, 427 bp, Homo sapiens
  source 1..427: mol_type = other DNA
ctttagaatatagtctgactctgacttcagaaatgggaaatatcaaaaccggattttcttttccaatttaaactgttcttttctcagaaaggtattttttttaatagtatttggtagggtatcagatagtaaatattcagtaaactttagctgaatcaaattgaattttcgagtcccaaatcttcacagtgatatatttactacctagaggatttgcagctcttccagtctgaatatcatattggcataccaagaaggtgaacttttgtttcttctttatgagaattgatacataaagtaaatagtaataacaataaggaaaaataaattgctttagtccgttttcacactgctataaagaactatctgagactaggtaatttatacagctcccgtgacatgtggggcaaaccatgtcataaataaa

SEQ ID NO: 17368 - DNA, 275 bp, Homo sapiens
  source 1..275: mol_type = other DNA
ccagttgaacccaggaggttcaattgtgccactgcactccagcatcacgaatgactttgtaagccatacatggttttctgaacttgtaggctgcagtgcagtggcgtgagcacagctcactacagcctgcccccactcagcctccggagtggctgggtctctacacaaaaggcttctagagctaattacataagaatttcctgccaggaaattagcctttttttcttgtttatttaggcatgaatttaatatatgtgctacttgatagaaacata

SEQ ID NO: 17369 - DNA, 403 bp, Homo sapiens
  source 1..403: mol_type = other DNA
ctgcctccccgtggcatggggtagaacctggcttgagccccgacacaggcgggcagccactctgtctctcagccccagggcagcactaatggtgcctgtcccctgagaaggtggctgcctcctttttctgaagcctggcttccgctggcttgtcccgctggacttgacggcggagctgctgcaatctcgcgggctgggcccttgccccgggtggacccgagtgcctgcggggaggcgggtgtggctcccccgggaggtgacagctggcggggcccgtaaggagctggtctgctccggctcccctctcgtagccggcgccctgggaccagcgcgtgagcacgtctcggaggagtccgatgcgctgggcagggccgggtggtcacccccgcccagcttccagggg

SEQ ID NO: 17370 - DNA, 479 bp, Homo sapiens
  source 1..479: mol_type = other DNA
tgggaacccaaatccgcaggaagaagctggagatgcccagggttaacagtggaactccatagatgggacagcctgctccaccgcgaagggaacctcaggtgaccatcaggtgatggtcaggcgtgataagcagcttcccggtaagatcttagcagttgggcgagtgtactcaagcatgagcactaacaggcagaatgccagagtttaactggtatatgaccttctagggacattcgactgataagggaagaacgcctcacgtgagcatgtgtacaactcctgcatgcgtacaaacacactgcgcatgctcccctcccaggcgctggcaggccacacactgcgcatgctcccctcccaggtgccggcaggcctgcgcatgctcccctcccaggtgctggcaggccacacactgcgcatgctcccctcccaggtgctggcaggccacacactgcgcatgctcccctcccaggtgctggcag

SEQ ID NO: 17371 - DNA, 219 bp, Homo sapiens
  source 1..219: mol_type = other DNA
ttgtgtcaccatagagtgacctttaattgtggccatttttttgaattaaaacccagctactcggctgaggcaatgatcgtgccattgcactccagcttgggtgatggagcaagactctatctgtgtagcttccctgaatgtgttgcaatacacagggaggaagcaagaattattctcacccttccggttctttttatagatactgcaggaacctcagtg

SEQ ID NO: 17372 - DNA, 411 bp, Homo sapiens
  source 1..411: mol_type = other DNA
ggacctcggaccccgacggacgcccgggacgcgcgggctctcgggcgctccggcggggctcggcccgcggctccacagcccgctgcacccgcgcggctcggagcaatggaggatcaggcagcggcagaagcttccgtttcctccttgagtaaatggtgacaaaattgacagggagcctggccgccgctgtaccagcgggatcgagccggagcccaggcacccctaaagccactccaggcgagaatcgcgcggagggggacggcctgaggcccgcggccgggttccctccccagacacccgcacggcccagcggctcgccacggcgggcccatcccttctcgcctcaccgcactgctgcactgctgcactgctgccctgctgccccgccgggctgaattgccgccccgccct

SEQ ID NO: 17373 - DNA, 388 bp, Homo sapiens
  source 1..388: mol_type = other DNA
cacagtattagcattcctgcactaaaatgctgatcacttgcgtgtgggaaagaagcaagtcagttcttccttctacaccacagagctgctttgaatttttttctttaattgaaaagaaagtacattaaatttgagaaatactattctaagctgcagttcctatgttgaggaattcctgggcctagctggagatgctgcatctattggatgtatgtatctacacccttcaactagaagctgcagcgtttcgagctcttactgaagcgtaatagaaacactcttactaggactcattgcaattgtgaagtaggtagtatgtctttaattaaaaaaaagcagcggcatgattcaggcaggattcaaatccagtctgcctgatttcaaagcc

SEQ ID NO: 17374 - DNA, 357 bp, Homo sapiens
  source 1..357: mol_type = other DNA
ctgctttgaatttttttctttaattgaaaagaaagtacattaaatttgagaaatactattctaagctgcagttcctatgttgaggaattcctgggcctagctggagatgctgcatctattggatgtatgtatctacacccttcaactagaagctgcagcgtttcgagctcttactgaagcgtaatagaaacactcttactaggactcattgcaattgtgaagtaggtagtatgtctttaattaaaaaaaagcagcggcatgattcaggcaggattcaaatccagtctgcctgatttcaaagccctgacgagggcctgcggagcgtgtactctggctgcaagcgggtcccaacttccc

SEQ ID NO: 17375 - DNA, 278 bp, Homo sapiens
  source 1..278: mol_type = other DNA
taatagccatggcattccagatcctggaattcatttatgagacagagtctcactctgtcacccaggctggagtgcagtggcgcagtctcggcccgagtagctgggactggaacaaggaagctatttcctgttcatggctccatgaggagagtttcttcaaagggatacctactcgagggaaggtaaacttctgcagtgatggtgtaaaccatcatttactttttaaagaaaatttcctctgcaaattgcaggtcccagaacagctgggccagcattca

SEQ ID NO: 17376 - DNA, 524 bp, Homo sapiens
  source 1..524: mol_type = other DNA
tttcacagagggccccatccagactgttagctggaatcctggatgaggccctcttccagtctccaaacactaattatgtattcattaaaatgatgttagtgatatggatagtgcaactgagcaactgaatttctaattttatgtaatttgaattcactaaattttaattttaaaatgaaagtagtataaaatatttttcattaaacccaactttattgtctacattttaaacatagtattgtataacatatgattgctgtatcacagtagtccaatttactttttttaatgtggctaccagaaaattttaaatgacatatgctgcccacattgccacaactcagtgtggtctggctggactcacgtgagagccatcccagactctgcacttgactaagtcaggatctgcacttgactaagttccccaggtgaatcttatgcacaataagactgatctgtgaccccccccaatccttatgggaggaggctgaggtcacccaaccccgccctggctggtgtctggc

SEQ ID NO: 17377 - DNA, 420 bp, Homo sapiens
  source 1..420: mol_type = other DNA
cagcagggctgtgggatgagatgacttcacaggcctctcccagctccagagttgagccaagttcaagaaagtcaattgtagactagaggacttcctcctggataatgaaagaccaggaattctctgctgttcaatcagtgctccatcactcagaggcagggctgcaaattcctgacagtgagcagcagctgatgcttttaatgacctaggacttcagtcagcaggactttggtgaggaggaatgggcttcagtaaacagatctatttgtgtgagtggtctgtgtgtctgagtcagagagagcctacactcactcccagccactcttgactgactgccagcttagcagggcgtagcttaccaacaaatcttttttttttttttaaagccagactgattcatagaaactcctttaaaacacg

SEQ ID NO: 17378 - DNA, 468 bp, Homo sapiens
  source 1..468: mol_type = other DNA
agctagttttgtttcaaatatctctatcagctagttttatagaaaataaatataaaatacaaaggttaaattccccatatcttttctttctattatgaaagaggatatatattggactttaccacatgcatattttaaaaaggcctttcagtaatttctcctggactgtgtgactcaggcaactcacttcctcatctgtaaaatgaggtctttagtaatctcctcaaccatagcgtaatatacacatgggctatatgaaataataattaataactgcatcctgctccaaatagccagttttcaatgtatgatgtggccttgaattcaatgcatccactctcagcattctgaatgcagagtggcaccttcacagtattttattgagaaaactagataaatacttgtcagaaaggagagcaaaactaatctttctagcatcttttatctttacatgatccaagaagtaaa

SEQ ID NO: 17379 - DNA, 334 bp, Homo sapiens
  source 1..334: mol_type = other DNA
ctctccgcagactgcaaccgcggaggcgctcggagcctcccttcacctagcagaggggcagggcagcggcgccccgggccggacccacgcgccgagcccatccgtccatcgacacgttgcaggtgaagccccgtgcgctgcacctcagcgcggcggcagcgtgagtgtgcgcagtgcgcgcggggcgcgtgcgcgtcgggggcgtgtgtgcgcgcaaatgcccagtgtgcaccccgtgcacaatcagaacccattcagcacaagcccggcctgtcccaggaatggtatagcctgtgggaaatgcggggtttcctcccccctttccttaaaacga

SEQ ID NO: 17380 - DNA, 417 bp, Homo sapiens
  source 1..417: mol_type = other DNA
cgcttctcaggaatgctggtgagaaaaatgttccaccactgtagtattctagatatttgaaagacaatggatgagaatgaaaatgatgcatatacaataatattaatgttaaaagtaaacaatactactattaaaatattcaacatttaaataacaggatccactttaataaatcttaagctccttgaaggcaaggtcccagactgcgtccgacacaatttcgaactacagctccgccttggagatgctttccgcagcccgcgggccgcccacggggggcactgtctagctccgtcggtgctgttccccgctgcggccgggaggaggcgccacggactcgggctaagcttcttcccccacttccccagcacatgacgtgggaagctgcctccgccagagtctagaggacacgcgcgc

SEQ ID NO: 17381 - DNA, 306 bp, Homo sapiens
  source 1..306: mol_type = other DNA
tcttgatctcctgacctcaggtgaacaggcctgagtggccaaaacatatgtcatgaaattgaataaaaaaagtgcttgctctgttaccaagcaactgaaagaaagtatgtttttttcattccttcattattaatacaattcaaagtacattctgtgaatttaaaacataaatgatgaataaatcaacatactcatagagggcgctcacaaagtgctacttattgattgaggaagatcattcaaataaaaaaccagaatttgcatggggaaccccccggagccccgcccatataacggccccggcgc

SEQ ID NO: 17382 - DNA, 494 bp, Homo sapiens
  source 1..494: mol_type = other DNA
ataatattctatagcaattaaaactttttagtaaatacctatatttagtgatagatagaacaagatacacagtttgttggagctctttcaaatttgtcttgctaatatatctattagactgagttttactcttttttaaattcactcacatcaaaaaactaaacactaatgtttgtgaccatctgtactactgaagagaagaaattatttttatatctatggtaaattactcaataagctttttgccatcttctagagattctgttatcaaggttcaaaaatttaattgtaggctttaactgaaaatctttagccttctataaattgaaattaacttaatcaatcaagtcattttcaggatttaaacaattttctagaaattataaaattgaaattcttttcatgataaaactataaaaggtaaaaaaaaaaaaaaggccttgagcaaggtttaactttttttttttttttaaatggaggctttctttcaagcg

SEQ ID NO: 17383 - DNA, 486 bp, Homo sapiens
  source 1..486: mol_type = other DNA
caaatttgtcttgctaatatatctattagactgagttttactcttttttaaattcactcacatcaaaaaactaaacactaatgtttgtgaccatctgtactactgaagagaagaaattatttttatatctatggtaaattactcaataagctttttgccatcttctagagattctgttatcaaggttcaaaaatttaattgtaggctttaactgaaaatctttagccttctataaattgaaattaacttaatcaatcaagtcattttcaggatttaaacaattttctagaaattataaaattgaaattcttttcatgataaaactataaaaggtaaaaaaaaaaaaaaggccttgagcaaggtttaactttttttttttttttaaatggaggctttctttcaagcgaacattgcagccatcacacttttgtgcaactgagactgtgcagctgtctcaaaatggctgctaacctagtctttgtagct

SEQ ID NO: 17384 - DNA, 429 bp, Homo sapiens
  source 1..429: mol_type = other DNA
gtgttagccaggatggcctcgatatcctgacctcgtaggcgtgagccacggcgcccggctggttgcctacttcacaatgtcacctagggcacccggtgccaatcactctcctgtggtggctccagccaacgaagcacctgtggaggcctctccagaaagcgtgtaggcagggcgcgcatgtcaccctggcccgggcgcctggtccgctgcgcccaagccttgggccgcaaaactgcgaaagaaagcggcaggcagcctctgcatttcccagaagtgcagctggggaactttcccagacccgcctttcctaggcggggtgggccccaggccaccacgtgaagcgtcctcgcccctcagagcccggagcaggccgggctcgaggacgccccacctcggagaggcggcgcccctgagtaggccaggagcctc

SEQ ID NO: 17385 - DNA, 319 bp, Homo sapiens
  source 1..319: mol_type = other DNA
tttaattaaaccttggcctcccaaagtgttgggattaccacaaaattgtgacttgtgtttcacaatttgcactctctccttgacacctaggttaagcttagaagaaaggcatctatatggcttagttcttttttaaaaaaattattattgttattattattatttttttttgtggagtagagtggcgcgatctcggctcactgcaacaggcgcccgccgtgttagccaggatggcctcgatatcctgacctcgtaggcgtgagccacggcgcccggctggttgcctacttcacaatgtcacctagggcacccggtgcca

SEQ ID NO: 17386 - DNA, 116 bp, Homo sapiens
  source 1..116: mol_type = other DNA
tctatgaataatacagagtttctttataactgttgtaggagaaaacaggaagagaagaaaatttaacagatttttcatctatccttgacaagtctgagcccaagccaagcaagtcc

SEQ ID NO: 17387 - DNA, 507 bp, Homo sapiens
  source 1..507: mol_type = other DNA
gtatatacccaaaggattaactataaagacacatgcacacatatgtttattgcagcactgttcacaaaaaaaggatgagtgcatgtcctttgcagggacatggatgaagctgcaacctgcacgttctgcacatgtatcccagaacttaaagtatatatatatatacactttatatatatatatatatatatatatatatatacactttatatatatatatatatatatatatatatacactttatatatatatatatatatatatatatacactttatatatatatatatatatactttatatatatatataaagttaaggatttcgtttcaatgtgcagctaaaacttaagcactaatagtcaattgtagctgtcacaaagtttgttacatatatgatgtagatgcatcacaaattattgcatttttattgggtgattctgggtgcaaacacaaagtgaactttggtttatctcctgccagtagctgctaattactggcaagcagg

SEQ ID NO: 17388 - DNA, 566 bp, Homo sapiens
  source 1..566: mol_type = other DNA
tcctctaaataacagctgctttttaacacagtagacaccttacagaaactttcgtttttgttcagggattctcttgagacaacctcctgaggggatttgcagtagaaatcattattccaagtcatgattgtggcatccattgttttacaagaactttgaatttttaagtggaaaatgtgagatgaactgagatttgaatgacataagacattgacaatatttcaactaaataaccacaggaagttacttggtttcttttttcaattgaaagaattttaattatctgcagggccgtaaaagagaaaaaaaagacccacgtgtgaaaaattttaaattttaagtaattgctttgaaatctcggatgtaaagcttttcattttatagagtttcatagtaagtcaggaattccgtttgacttttatttaagcgctgagaaaaggcaatataaattcttttagctcatactgttttaactttaaaacgtatcaccatgaacagaaaaaattttcacaacaaaaaaatcaggctggtttcgctgactgcttgagctccgcccacttttttga

SEQ ID NO: 17389 - DNA, 384 bp, Homo sapiens
  source 1..384: mol_type = other DNA
gcaagccaaggccaagactttggcctctcccccatagcctcaaagacaaaagatattttggctaggcctctagcttcagactcaaaagtgaagtccacggaccctgtcctgggcaggcagaattccgcggactgttgtttcgcctaagcagcacgggctgcggagaccccaaagactgagccggctattggagagagctggaggaggcggtctctcttccagagcgctaggttcgggtgcggtacgttgcattccggtaccggacgccgagagcggtttgtctccgtctcgcccgctcctcccgcgcgggcctgcagttcccggtgggccgagtgcacagactgctgcgcaaagggaactacgcggagcgagtgggcgccgggg

SEQ ID NO: 17390 - DNA, 358 bp, Homo sapiens
  source 1..358: mol_type = other DNA
atacttatttttgtttgaggaaaaaatattttgtaagctaaaacttttattaacacagtaccctatttattccaaaataatggggcttaattttttgaagcgcagtctttccagtaataaaggcggacaaatttgcttccttttgcaagtagacactttttaaaggtaagaaaggcacagctgttctggtggcaattacttcaagacagcggtatcaaaggctctgatttttagcttcctcatctaaaaaatggggacatcaattactttataacaaagctctgatgatacaatgagattacaaataaaatatcctgtgatgtttgacttggagcttaagtctgcagattagtttttt

SEQ ID NO: 17391 - DNA, 269 bp, Homo sapiens
  source 1..269: mol_type = other DNA
ctaaaaattagtatgtatctccatcaatattttgaaatatttataactggtggtaagaatagcctagattagaaataaccaagcgtatcctctaagatagttttttaaatgtttaaacttacctttaagggattaaatttccacacgtactaggcgctcacatgggataacctgggtattcgtttacagcagaacgcttctttatctgcagaatgtaccgttcgctactattgtactagatgagcgcaatggagactctggtcctggaa

SEQ ID NO: 17392 - DNA, 199 bp, Homo sapiens
  source 1..199: mol_type = other DNA
tggagcttaagtctgcagattagttttttgcgcaaccactggtcgccgcgccaccccaggcccaggcaaaggggctgggtgtcccccaagccgctgcgcgggatagtaaatcaattcaatacactcacacttcttacgagaagcgggtagggggcgactcccggcctctttcttccaggaccagagtctccattgcgct

SEQ ID NO: 17393 - DNA, 429 bp, Homo sapiens
  source 1..429: mol_type = other DNA
gatactgttgttaatatatgaatagctaccgtttcataagattttgccacaactttataaacactatcccatttaatccataaattattaactaatactctaagtcacaaaaccaggactgtctgagtgtaaagcctgctgtctttcactaactgagtgatttggactttaaggtttttatattgtcaagacaatttacaaaaaaattggatgcaagtaactgcatttatatatcttgagaatttaaataatcagcaacagttagaggtgcaaatgcaacagaagctaatatctactaaattgaattagctcagttatatagcgctaaagtccattaaagaacagaaatttaaaaataagttttacacactattagtcttccagtttatataacttaatactgtatactaagtttttattaataggaaa

SEQ ID NO: 17394 - DNA, 349 bp, Homo sapiens
  source 1..349: mol_type = other DNA
ttttcactgccagttgacaggggcaggggcaaaggactggctgtcacgactagtgttggcaactagatcaaaaggatctgcccggcagagcccctgtgccctagagcccaagatgggagaattatctgatagtgattttatatattcagtcgcttagtctacctaatgctttatccagtatttttcactacattgaatagttaagggtagtatccttgagtgtagtgtaattcagtatatcaatctatccatatattcgggatccagcacccagtatttgatattatttttattgaagcatagtaccatttttgtttcaacgtatgtatagctttcctgcccttggcag

SEQ ID NO: 17395 - DNA, 476 bp, Homo sapiens
  source 1..476: mol_type = other DNA
gtataaatacaaaatatttgcaagaaaatataattataatagaactgtgctggattaagtttgcacagtggaccctaaacttatgctcctgacagtcgtcattaggattcactggagactggaactgtgcggacagagggcctgtcttcagaggtacaatctctggattggagactttttggcccgtcctgggcagggcctatcagcagggccaggacacggtgccctgcgcagcctggggctccagatagcatgctttttcgcctgagtctgacacttaaagaatacagactagatcagagattttatttttttaattgaaaagtaacttgggttctctttagaaacctgcaaagaagtcggagttgatttcttccctcagacaagctattggttgttggtgggcaacacctcaaaggagaactctgagaattcatctcaggatgatgatcaacagatgcaagaagattcttctc

SEQ ID NO: 17396 - DNA, 580 bp, Homo sapiens
  source 1..580: mol_type = other DNA
tagtgaacctttgtttaaaaaatgtttcaataggtattaaattatatagggacatgcttacattaaaatattaaggggaataaacagtatgcaaaactgcatactatattatttctaaatattctgaatatttgttaatgagacagaactgctgtgatcatcagaaaatttagattaaaaaaattcagggtgccaaaaaattctagaatacttaagaacagcacttagtttaccttaaaagttaaaaattgaatccagaagtaaatatttgcaagaaaaacaattatcaaggattgctaacttttagtttcttaaataatgaatccagaagtataaatacaaaatatttgcaagaaaatataattataatagaactgtgctggattaagtttgcacagtggaccctaaacttatgctcctgacagtcgtcattaggattcactggagactggaactgtgcggacagagggcctgtcttcagaggtacaatctctggattggagactttttggcccgtcctgggcagggcctatcagcagggccaggacacggtgccctgcgcagcctggggctccagata

SEQ ID NO: 17397 - DNA, 592 bp, Homo sapiens
  source 1..592: mol_type = other DNA
attcaagagtccatgttctggatccacccatgctgtcccattgtgtggcagcacctatgtaatggaatatagtgaacctttgtttaaaaaatgtttcaataggtattaaattatatagggacatgcttacattaaaatattaaggggaataaacagtatgcaaaactgcatactatattatttctaaatattctgaatatttgttaatgagacagaactgctgtgatcatcagaaaatttagattaaaaaaattcagggtgccaaaaaattctagaatacttaagaacagcacttagtttaccttaaaagttaaaaattgaatccagaagtaaatatttgcaagaaaaacaattatcaaggattgctaacttttagtttcttaaataatgaatccagaagtataaatacaaaatatttgcaagaaaatataattataatagaactgtgctggattaagtttgcacagtggaccctaaacttatgctcctgacagtcgtcattaggattcactggagactggaactgtgcggacagagggcctgtcttcagaggtacaatctctggattggagactttttggcccgtcctggg

SEQ ID NO: 17398 - DNA, 292 bp, Homo sapiens
  source 1..292: mol_type = other DNA
aaagtgaatagtaagtagctattacttacctccttagggaggtgtgactaaaaagtctatcaagttagttaattatcagaaatgagagaacagtaccctcttatccttgctgcactttccagcactgatacgagatgcatatccccaggcaaatgcctgattagtctgggattgataggtctaggattcgatgtctaaattatactagggctctgtctgtggaccaaacccaaaagccctgcggtcagggccaggaggttgcccaggtccccaatctgcacagtgtcagagt

SEQ ID NO: 17399 - DNA, 191 bp, Homo sapiens
  source 1..191: mol_type = other DNA
tgcaagtagctgggactcatagccaggatggtcttatgtattgtcatagcaccctatgaattttttaatatttaaatatctaagctggcagaggctggatcagatcataattaatagcatatttacattttttatttaaataaactgacctgactagagtaggctgccctgagtcggcctccccaacacaa

SEQ ID NO: 17400 - DNA, 592 bp, Homo sapiens
  source 1..592: mol_type = other DNA
gctaaatataagatatttattaaataaactttggtgcaaataataataattggttttatttgttggaaaagtatcaacactaaaatgaagttggtactattattatctattcaagagtccatgttctggatccacccatgctgtcccattgtgtggcagcacctatgtaatggaatatagtgaacctttgtttaaaaaatgtttcaataggtattaaattatatagggacatgcttacattaaaatattaaggggaataaacagtatgcaaaactgcatactatattatttctaaatattctgaatatttgttaatgagacagaactgctgtgatcatcagaaaatttagattaaaaaaattcagggtgccaaaaaattctagaatacttaagaacagcacttagtttaccttaaaagttaaaaattgaatccagaagtaaatatttgcaagaaaaacaattatcaaggattgctaacttttagtttcttaaataatgaatccagaagtataaatacaaaatatttgcaagaaaatataattataatagaactgtgctggattaagtttgcacagtggaccctaaacttatg

SEQ ID NO: 17401 - DNA, 551 bp, Homo sapiens
  source 1..551: mol_type = other DNA
aacaaaataaacgtcagtttctccaaatttgtgtcagatctaaatatattgatgtagtgtaaatactgaatattgaaatattaacctaaataagcatttattattggattacttcataaaccatttcctcaaatatggtacaaagtctattttggcacttgttaagttgtcacaaattctgagttggaagactatgaattaatgaagttttacttccttttgtaatttctttcctaggtttcatcaaagacagtacttgcttgtttgtttcatttgaagaaaaatcagccaaaactattaaaaacaatatttgactgtttgtagtgcaatacaaagctacgtcttgactccaaaaatctgtttaaggacacatttttaaatttaggaccgtagtatatgcagttaacaatcatcatttcttagcactctacattcactgccagcaaactttcaacgtatctggttgaactcttgcgtgtacattcatgcatctccacgtcacacgggctgtcatgctcgcacatgtgccattaatttaaaacatttttttt

SEQ ID NO: 17402 - DNA, 551 bp, Homo sapiens; identical to SEQ ID NO: 17401
  source 1..551: mol_type = other DNA

SEQ ID NO: 17403 - DNA, 450 bp, Homo sapiens
  source 1..450: mol_type = other DNA
cagacatcttggtctctgtctgctttgatgtagtgcagcacaaagacaattgaatatgcaaggtacttccagcttgaataggtcacttaatctttctatgataaatttatcaaaagagcttactgataacatatgggttgagatctatttaaaatacaaaaagtattaatctattaataattaatactagtggatcaataaaataggaagactgagtcaaggagtctcagtatgtcctcagttaacaattcctagctgttcagatatcagttttgactctgaggttccatctcaaccagttagggagacatactgtgtgtttcccaatgtcactattgaatcacaaactgaaatttacccttggatatcaacactttttgtgtttttgtgaatacaatacctatttattgactggaatgaagttttgaaagggcctctaattattggaaa

SEQ ID NO: 17404 - DNA, 400 bp, Homo sapiens
  source 1..400: mol_type = other DNA
tggctgcagtgaccttccaggtcagtctggacttctatataacactggggtatcttgaaaggctagtaattataatactagttcttacatgaggaggacgagaagcttttggaactttctcaaatatatgaatagaatttcaattgaattccttgtttgtcttgggtatcatggagataattaaagatacttcaaagagatattgcgaggatcatttgaaaacaccacgtagtgatgctttcttaggcaaggttttgaccgaggaaagccgcccttcggtgggccaagctcgcaagcctgggaggcagcgcggcgggaggagcctgcccctgcccccagtagggggcgccgaagcgccgcactgcagcatcctggccgctgagcgcagcggccttggccg

SEQ ID NO: 17405 - DNA, 406 bp, Homo sapiens
  source 1..406: mol_type = other DNA
tctaaaacatcccagtaaaattattcacagataattgtttaaaaatataactgtacattaacataataaacagttgattaacacacattttgtgttgtatgtattgtatactgtattcttacaataaagtacgctagagaacagaaaatattaaatacatttatattcattgagtggaagtgaattatcataaaagtctttaacgtcatccttttcaggctgagcaggcagaggaggaggaacagttcaaacccgtgttgttcaagggtcatacatgtaaaatacttttggtatcaaaagatttcaaatggagttattgatcctttataactgcaattgagtacagtcaagagaggtcagggaaacccctcagaactcctgagagcaagcagcgggccgatcctgg

SEQ ID NO: 17406 - DNA, 491 bp, Homo sapiens
  source 1..491: mol_type = other DNA
aacataataaacagttgattaacacacattttgtgttgtatgtattgtatactgtattcttacaataaagtacgctagagaacagaaaatattaaatacatttatattcattgagtggaagtgaattatcataaaagtctttaacgtcatccttttcaggctgagcaggcagaggaggaggaacagttcaaacccgtgttgttcaagggtcatacatgtaaaatacttttggtatcaaaagatttcaaatggagttattgatcctttataactgcaattgagtacagtcaagagaggtcagggaaacccctcagaactcctgagagcaagcagcgggccgatcctggtgggcagccagagtgagagtgtccctgctgccagaggactacggcgggctgggcgcggggtccccgcctctcgctcaccacacagaccccgcgcctcctctggcagccgcggtggtggcggcggcagagcctcgcccactccaa

SEQ ID NO: 17407 - DNA, 441 bp, Homo sapiens
  source 1..441: mol_type = other DNA
tctgctttgcagagatatatgttaaatgggggctattataaaacattgcagctggagcaaactagatgcaaattattccatattatacatccaaatacattttgtgggacagaaaactagtatttattacttaaggacccatcttaaaatggtttgttctcactatttcttgaagtataaaacttatatacatctactataagttttattatactgtatcggtattaaatctgttttgcaggtcagactattctatggtctttaaaaatgccataaaaaagagacattaattaagaatagctctttattgttgtgctgcattagttttctactgctgctccaacaaatttatacaaatataatgacttgaaacagatgtattatcctacaattctataggtcagaagtctatgcagtggcgcgagctcggctcacggcagg

SEQ ID NO: 17408 - DNA, 379 bp, Homo sapiens
  source 1..379: mol_type = other DNA
actcttacgaatggatttatttattattaagataaaatgtctaagataaaaaatttatctaatgttttattaatcttcctatcaattcttttcttaaaaaattatattatcagccaggctccagtaatcccaatactttgggaggccaaagctgcactccagcctgggtgacacaaaaaaaaaaaaaaatgatactatctgtttagctttatctttttaaattttgactaaattttcaagcagccatttttctgtctgaattgttccagatagtttccagagaaaggaagacaggttgttggctaaataccaaactgcatcttattttccaccttttgctaacttcagtataaatgacacagaaactattaatagatta

SEQ ID NO: 17409 - DNA, 307 bp, Homo sapiens
  source 1..307: mol_type = other DNA
aatcattcatctggataaaatggaatggatatttcttctaaaaggtatatctaggctttttaaaggtgccaagatactatttaatgaacaatatgatatggattggctctgtgtcacccaaatcttctcacgatactcatgagataggcctctctttataaattacccaatcttgtgtagtatctttatagcagtgaaaatggacgaatacattatatttctttccagtatgtggtagtcatgactacctaggtctacaagaaaacgttatattttcctatgattaacaacatgtcctttaatcttc

SEQ ID NO: 17410 - DNA, 428 bp, Homo sapiens
  source 1..428: mol_type = other DNA
gtttaatttataggctttcgtggacttctggaagtcaactgacttcgaaaacacaatgtctatgagaacatggacttctcttttagaggctccatgagctactcagagaggaaggcagcctggcgaggcgggtctgggcttgcaggctgggggagactctcagggacccgatggagggccttgggcacctgggtgttgcaacccgagcgctccctccgcccggggcgtccatcctcgccgggggcgaagctctccacggccacttcgcctcaagcgctggagtcgaccagaactctgcggctcggctgccggcaagacccggatagcggatttcgctcctggctgcggggcgcgcactcgcccgcccgcccgctcgctcgttcctcgcgcgggcactgggcatgcgcggcgcgcggttggcactggct

SEQ ID NO: 17411 - DNA, 274 bp, Homo sapiens
  source 1..274: mol_type = other DNA
aatctcagtttcccatttgaaaaatgaggctaatacctggaggtaatgtttctacaaaccaccgcttcggcactggagcgtgcgggtcccgatccctttcagcccagtcccagccgtcgaggaccaggattgcggcctcggcgtctgtctcattgccatggcggcggcgaagccagcgaccgtgcagtgcctcgggctgctccaggcccccgccctgacactagggctgggctgggctcagtgacgacgtgaaatgacgattggcgggagggcg

SEQ ID NO: 17412 - DNA, 560 bp, Homo sapiens
  source 1..560: mol_type = other DNA
agtggtgctgcagacaatatcagagtttgtttatatttaaatattattttaatatttctatttttgtccatgtattataatgcacatctatgtaatttgcaaatcatcactcatatatacatcatatcaaaaggtgtaaaagtttttgatagaattcagcattcattcgcttataaaatgagtgaaggctcactttacggatgagagtatttcatcaaaaatagtaacttgaatttaatcgcatttaaaactatatagtatccactgcggtggcgcgagcaccgcctgcggtgtcgacctctcggctatggtttttaaataagacaaattgcaaaaaacgttgccagacagcgttcgctggtgtctagatattcagaggccgagcacagtcctcagtagggctgctcgaactttcaactcggccgcggaccaggaaggcgttctgacccgctagagctcggggacagggaccccatcccggtgcctagagcgtccttagtcggcgtgggccagcgccagttacctcacgagcactgcgccctcccgccaatcgtcatttc

SEQ ID NO: 17413 - DNA, 404 bp, Homo sapiens
  source 1..404: mol_type = other DNA
taacttgaatttaatcgcatttaaaactatatagtatccactgcggtggcgcgagcaccgcctgcggtgtcgacctctcggctatggtttttaaataagacaaattgcaaaaaacgttgccagacagcgttcgctggtgtctagatattcagaggccgagcacagtcctcagtagggctgctcgaactttcaactcggccgcggaccaggaaggcgttctgacccgctagagctcggggacagggaccccatcccggtgcctagagcgtccttagtcggcgtgggccagcgccagttacctcacgagcactgcgccctcccgccaatcgtcatttcacgtcgtcactgagcccagcccagccctagtgtcagggcgggggcctggagcagcccgaggcactgca

SEQ ID NO: 17414 - DNA, 504 bp, Homo sapiens
  source 1..504: mol_type = other DNA
attaaatggaagctcataactttgatgtctaaagttacagcaatggagataaaatacattattggcatacatctatatatgatgtatgataagttaactatattgagattgtggagtgactcgacgattttaacctctttttacctttatagaatcatagtattttgaagaaccaagaaattgtcaaggtcttcttttacagatgagaaaaatgaagctcggaaatgcccagggtcacacatttaattattgcccgagcttggctaagaaaccaggtcttctgactcctaagccagtgtgccccggggcccaggatatgggatccctgctgacatttcagaccttaagttgcagagctctgttatataatcttacagttaaaagtttctaggaatatttttattacgtgcaattgcttagcgctccggttcggtaccctcgtagcccgggcccgcgactccgccccgggagcgggcaggggcggggcgagcgctccagctggcg

SEQ ID NO: 17415 - DNA, 390 bp, Homo sapiens
  source 1..390: mol_type = other DNA
ctttctttaatagaacatgaacttgtcacatcctagaaagttagtcctagggatatcctttaaagcctaaaggagtaaaatccttaaacatttctaaagatagatccataaatattggactaggaagcttggaagtatccctaatctagataatctaacacactaagctgattgtgtaatgagctaccgtaagtgatctttactgagggttacattctgtcattgtcagcctttcctggagattttaactttctgcgaagtttttaaaaacaacttccaaaactctgctgatcctgaaatgttcgagaattcagagttcctagacaatggctactgtcccccttcccactgattaggggagttggcgaggggcggtgcctgcgtccggcc

SEQ ID NO: 17416 - DNA, 429 bp, Homo sapiens
  source 1..429: mol_type = other DNA
gcataaactggagctgcaacccagctccgcactgcaactttcactcgggctgcagaatcatgtgaggcttcattatttttatgatgagacatgaaatagactcgagtggataatagtcaaagttcaccatgaactgcagtatttccacacccctgactcccggggagagaggggcatcctgggtgggtttccggacccctccgaattcatgaacccccacttcttaaagagttgatattacaaataacaaaatgttgttcctttgccgtggaagaaggtccctggaccaaggtgcctatatcctaatagattgagattcaaactgatgcctgttatgaaatacaagtcagatttatgatctttttcatattgaacatgatatgctatgctaacgctgcatgtgacagtttaatcaaatccattgttacc

SEQ ID NO: 17417 - DNA, 202 bp, Homo sapiens
  source 1..202: mol_type = other DNA
aactatggttctttgaccattagaaatggctttggaaggcaatttgctttcaaaatgccgagctctctcgcaggagttcttcttttggactggtccaggaggtagggtccttcctcagtcgactcctgagtagcatatgcatgtggttgtgctgactgcactcgcaggcttgtaaattttcaccctgggaaattagcaacaa

SEQ ID NO: 17418 - DNA, 377 bp, Homo sapiens
  source 1..377: mol_type = other DNA
atgcctgcctagacgggccagaaagccaaacgagttttgttgccttttaaagggagaggaaagcaaaccaatgttgtgcctttattctttatgaagaaaaacaaaatttagcttaaatactttgattttttttttaaaactagagctagattaaaactgatggtgaagagaagaaaaaaagttttttgtagttcaacaattgaatatttcttggctcttaaacatttcattgtctttcaaatgtggaccatttttaagcttgacctctgacaaagctttgtaaaatctggttttgaagtttgaaaacttagaaaaataataaggtattttaaagctaccagtggcctttatagatgccaaactatggttctttgacc

SEQ ID NO: 17419 - DNA, 424 bp, Homo sapiens
  source 1..424: mol_type = other DNA
atgattttttctgtgaataattcatatgattatgaagagaaaaactgctattttctatctctctcccttctgtagcacagattaaaaaaaatagcctgctttcaaataatttaattcatgacaaaacctaattactgtcaggtaataccctgtcagctttaatgcatttcatcagtcataatgaaaagaagagcattttatgacccatctaattatcattacattttaggggaaaatgaatggcatggagctgaatgttaactattccattttattcctttaaaagggaataatcccatcatttaattagttgaatgatttaaacaaagatttgcatagatgcactaatcagttgggaaaaaaaatctcatctccttgaacataattaatttaattgtcctcattagtgcattggctgagacag

SEQ ID NO: 17420 - DNA, 332 bp, Homo sapiens
  source 1..332: mol_type = other DNA
taataatagcaaacacttttatagtactgatcatgtgtattaactcatttaatctaaaagggaataaaaggcatggatagctttttttgcatgactactacagaataaaggccatgatccttaggatggaatatattttgaattcaatcccttgtacacaatattatttccatgcctttttaaacatgttaatataagttacatggacttggctgaaatgtctgataccaggctagcatgtgctcaccctttaagagcccagataatggtcatgatatggttttggttcccacccaaatctatgatagtgagtgagttctcacaagatctaa

SEQ ID NO: 17421 - DNA, 740 bp, Homo sapiens
  source 1..740: mol_type = other DNA
tgaaactttttcacttgggcctcaaaatttagtacacacatgtagacttattgtatttgttgtagaatttctacatatctaaattgggagataaaaaagaaatatgaaaaactcatcattttgcatactaaatttatctctttattataaagcaggaatgaatcatgccagattctcttttctaatttcaatgtactacagaaggaaatatgacaggtttatatttatttttctaacaaatgacattgattgctttatttttctccagaaatattgctgttttctattgacaaaacatttttaaaggagaaattacttattaaataagacattggataagttaaaactctccatttttgcttcttgagaatctcatatgattcacaaacatggtctagatatttatttgcattggtatccaacctaaacttctaaattttatgattgaatgaatggatttcccttttttttcacagaagaaaagtaaatttacagagatgtttacccatcctctaaaaattttctaaatgaaaagagattatacttttttttaggtcctaggagaaggtagattccaggcacaaaaatagagacttgtaaactaaggttctgttataaatatatacatattttcttcataagcctttgtgtctaaacagtaactccagttttttttttaaatgttatatgaaaactgagttgaaaactactctaggaaaacatttttaaagttattgttg

SEQ ID NO: 17422 - DNA, 711 bp, Homo sapiens
  source 1..711: mol_type = other DNA
agttaaacatccattgcaagatgaattttaatgtaatagtttaggaaaactttatcagtacagttagagcttccatattgcaactatcatttgaaaaactatcacctaatgaattttggtgaaataccaaataacaatatccacaattatctaaaaatactttctcttttcatatcctggattcaaaacagtatgttgcagcagactgaattcagaagcagatgtcagaatccatttgtctattaagccaaacacaaacaagttttgcaaaaatgtgaaaaaactcttctcattattatttttttaataactatttgtaaaattaaatatatgatttattttgccaagcaatagtttattattgttgttttaaaataaaatgttaaatacgtattttaaatatttctgaattttaattcctaatgtggcaaatcttaagtcttttcagaggtttttatcttttagattataaaagatgcccatgaagccaatatattcttaataaggtgagaatttcaaataatcaactttctaagataaatttataaaagcccttttataggtttaaacaactaaattaatactagtaacagttaagttgtatgaattaagtgtgtcaatagtaagtgttaacggaagagattggaaaaactgattttcccagtcactctagttttatttgtgtagcaactgataagataaaatcaacag

SEQ ID NO: 17423 - DNA, 297 bp, Homo sapiens
  source 1..297: mol_type = other DNA
ccttgcaaaacttagagccagttgagcttggttaactatttctcaatatggttaacttggaaaatccatttagatttccaaacatagttgtgatcttcaatgcaagctatcaagtactcctttctgcctcattctgaatgatcagctgattttgaagcaggtcatatttgaaagaaagtttgctttgaattaccaaaggcatttacaaattcccctggaggggcctgtaataactaggtgttaacattcaagctgaaggtttttatgtctatcaggtcataagaagctttccttgat

SEQ ID NO: 17424 - DNA, 217 bp, Homo sapiens
  source 1..217: mol_type = other DNA
gtggcaatagctgaggtcactcatccagccaggaattggtgcttgcaaaaagcgccagcgtagggccatggagctccatggcaaaaccaggtgggggctgggtcaggcaagtccaccctccggctcccctgctggagtaatgttccagggaaaagcacagctgcctctgtcccccaggccggcggggcgggctacacggtgaaaccccgtcctggct

SEQ ID NO: 17425 - DNA, 736 bp, Homo sapiens
  source 1..736: mol_type = other DNA
tacaaatatacttttgaaatcctacagccagtttgaatccaggctttggcagttattactatgactgggcaaactacttgtttttaaacttcatttttcctatctgtaaaatggggattttttatagattgtgtgtgtgtgtgtatatatacacacacacacacacatatatatatatacacacatatatatatagttgttgtgaagatttaaaaatgtacaccgtcacaaggactccataaaataagctattattgtaatctattggtgatgttaagtgaatctttaaaaacaagtaccagaaaaagacgagtttttattttataagatataaaaaacttgttttgtccaaacaaacaggaaaggcctttcgtgtgctttaataaaaacagctttccattttaaaacgataaatatattggaaaaatctgttggctctccaacagctcttataaaacaaagctcagacgctgtgtttttgttgtttgaaagagagaaatcaggggccttcgcgcggcggagggggcgggcgcgccgcaggggcccgagggaggggtctggggcgcggcgccgcttgcccatcccccgagcgcgcggcggggcggccggccggcggccgccgggatgcggaggggcggcgacgggggccggaccctgccggggcggcggggcgggcaccgcccgagggggtagggcgcgcgcgggggcgcgccgggccggggaggcgcgctcgctc

SEQ ID NO: 17426 - DNA, 707 bp, Homo sapiens
  source 1..707: mol_type = other DNA
aatagttcaaatataaaatatattactaggataaaattctagagatatgagttccagaaaacaatatttggaaattgtattttccaaactgtattttaaaaaaatggatattagtgggtgttaaatccctatggtatttagaatccattggctatacagtatttaaacaatgcgacagatgaaatatttataagccggaaaaatgtagctgtcattctaaactgtataagaacatacacagctttatgttttagaaggctcatgaagtaaaaagtttgaggaccctgaaccaagatgtttgctctgggttcagaagtattaaaataaaaatttagtaccttacaccgtagtgttttaatttttgctgctaaaatccccggccagcgttggagttttcagtccgcgtgtccctgggcttcgaagcccggcagggcgtgggaaggccccgaggaaacgctgagcacttgcaggcgccggggcgggggcgggggcgggcactgggcagcggggcgggcgccgggcgggggcgggggcgcagaacccgcagccgggggaggtgctgcctcgtgccgccgcgcaggcgcgcagcagtctccgtgtgagtgcgcgtagtcgcgcgcctgtccccgcgcgggctccgtagcgcgtgtgcaggctgacgcagctcgcgggccctcctcctgctctgcagcggcgtcggcggagtt

SEQ ID NO: 17427 - DNA, 672 bp, Homo sapiens
  source 1..672: mol_type = other DNA
aatatgtgtatatttaaataataaaatttaatgaaatattctccaaagccagcatttttataatatctattaattttaatatcttttgaaagaagataaatttagaggaaagaggttgtgcacatactacgtgaaatagatccaggaccagtacctaaggtttcattttgaagatggagcagtctgcttctcaatgtgaaattttccatgaatggaaacaattgttgcagactacagttttccactaatgggtttctttggggtaaccaaaatttagctgtaaaattgaagtcccacttcgaagaaatacattcagtattcatccctatatactttctgtggaagtgatccacagtattaatgatgtagaaatgtctgatagagtggaaatctctttaaaacatcgttgtagactggcatataaattgtcatctatctgcaacatattaaaattaatatgctctggcattgctgcaacttttgataatcaataagcaagactgaataaaaaagcagaattaagacagatttattgaggtttatttaatgctaaaagagagactatatcaaacatttctatgtttcatgtttatttaagtaaagccatatcttatttctgtttaagctcaagcattgcagattgtacaaattgtcctctgagtaggcagattt

SEQ ID NO: 17428 - DNA, 342 bp, Homo sapiens
  source 1..342: mol_type = other DNA
ttttaaaggtttctatagatatatccttaagaatagagaatcttttcttataaacccattaaaagcattcttcatttctgtgaatgctctactttatccattagagtgctcagcgtagtaatcgtatttgttttaaattcccagtctgattattctagtgtgctttaaaaaaatttttaacatctggacatgatacactgggttaaagaaacattgataagtcagactttaataatgtggtagtatctccccactcagaagggattctgaggtcagacctcgttaagaaaaagattgccttggtgtatttcaaaatgatttattttcagctcctggaggtaa

SEQ ID NO: 17429 - DNA, 432 bp, Homo sapiens
  source 1..432: mol_type = other DNA
ggataagaaacacttgttaaatattaataattcttcatagtcattgctattagaactgaggactgaggacttaattatataatgttcatggctaaataagatttactcgattatttttttttactcccaggttgaagcaattctcctgcctcagcatcccgagtagctgggattacaggcacctacttgatttttttaaatgcaaatagaagagcattttcaacccttaatagaaaattatgggaaatgattaccacaacacttttaagttgtttatttacaatattcaaaattacaattttacaatatccctgtaactctcaacctaaaattggaaataataataagcttcaaactgggaatcgttcttgttcttgaattgaaactgtctgagacgggcagtgtatatcagaattagaaaggtccctctga

SEQ ID NO: 17430 - DNA, 470 bp, Homo sapiens
  source 1..470: mol_type = other DNA
ctgccaagtaggcaaacacaatcttttttttttttttttccagctcagcctcagggctagccgcagccccccacaccccggggctgcggtgggctgcgcggtggatcagcctcagcagcccctgctccagcctgtagggtgaaccggccgctttcccagcatgagggtagcgcctcctccgcaggagggggcgggagctcggccgatcactccagttgccagttttatacaattttactttgcaaaactagtggggagggaaaaaaaaagcaaatctccttctcccttctccatcctttgccatgaattggattgcgattcgcgtcctggggccgaggagaagggagacctccatctgccgcgggcccggcgcgctgcagcgcagcgcagcgccgagctgcgcctcggaatggcccggagcccgccctgcgcccccggctcctccagcgtcagcggctcctgcgcgcggg

SEQ ID NO: 17431 - DNA, 309 bp, Homo sapiens
  source 1..309: mol_type = other DNA
cgatcactccagttgccagttttatacaattttactttgcaaaactagtggggagggaaaaaaaaagcaaatctccttctcccttctccatcctttgccatgaattggattgcgattcgcgtcctggggccgaggagaagggagacctccatctgccgcgggcccggcgcgctgcagcgcagcgcagcgccgagctgcgcctcggaatggcccggagcccgccctgcgcccccggctcctccagcgtcagcggctcctgcgcgcgggacttgaagaagtctcattggagcatcttgcgcgcgcgcgcgt

SEQ ID NO: 17432 - DNA, 567 bp, Homo sapiens
  source 1..567: mol_type = other DNA
aggtttaatataaacccaaatgtgcttgaataatattaactattctgaccattatgtgaactaaatatatatatatataaaatgatgataccttccgctcatttgcaatgtgcttttgaatacattatataatttaatccttaaaacagccctataaatctgttttttttttttttaaacaaaaaaattctgctttacaaaggaagaagttgagactcagtaaaattaagtgaccatcccagagtctcagccaggtagcaaatttatttattggtagaaaataaatgcaaactatcctctaaagtttttctcttggaaaaagaatgtattagaattgtggactttctcagtgcaaggatttatttatccttggaattaggcagaataaacaattgaatgccaaaaattcaacgtgtttcttttctgttttcaaaactcatagaaattgtaaatatgagcaactgatcatgtctctgagaattaactctttttgtacagagcgcttggtccttaaagattctagaacatcccagcaagtaagatcacaagtggtcttttccttgcagc

SEQ ID NO: 17433 - DNA, 283 bp, Homo sapiens
  source 1..283: mol_type = other DNA
ccactaagccgcagaccctcacggtgagtgagcagatttcaatgctggcttgggcagccttggtcccttttgaaggttctccaagtcctggctagactcaggagcccagctggcttcacccagaggctgcctcacctggggctgcaggtggaactgcccgccagtcccgcatgccctgcgccccgccctcctcagcccttgggcggtctatgggaccaggtgctcctggagcagggggcggcgctcctcgggcaggctccagctggcgcaggagcccgtggtg

SEQ ID NO: 17434 - DNA, 447 bp, Homo sapiens
  source 1..447: mol_type = other DNA
agcagatttcaatgctggcttgggcagccttggtcccttttgaaggttctccaagtcctggctagactcaggagcccagctggcttcacccagaggctgcctcacctggggctgcaggtggaactgcccgccagtcccgcatgccctgcgccccgccctcctcagcccttgggcggtctatgggaccaggtgctcctggagcagggggcggcgctcctcgggcaggctccagctggcgcaggagcccgtggtggggaggctcaggcatggcaggctgcaggtccccagccctgccccagggggaggcagctgaggcctggcgagaattccagcgcagcgctggccggccggcactgctgggacacctggcgcactttccgcagctgctggcccaggtgctaaggccctcactgcccggcgcggcccgccgctctgggtgcagggctt

SEQ ID NO: 17435 - DNA, 825 bp, Homo sapiens
  source 1..825: mol_type = other DNA
aaaaactagtttatcaaataactgtgatatagaaattaaatacatattgctgcaactgtatcaacaactgtcctgtcagtggggtaacaatgttttcatacatgcattctgctatatacatacacacatacacataaatacatatatacatacactcatgcatgtgtgtgtatatatacatgtgagagaagactccgtttattatttatatttttatagtacacttctaaaacacagccatgtgcctgagatatagtagggagtcaaatatgtttgagttactgaattaattaatttgacttcatccttactcaagaaaagtttcaactgagtgaaggtcttccattctctaaagagcaagtcaatagaaggagatcattcttcctttacacattgatgtaaggaatatatcatacaaactagtcttgatttttgtcatttagaagactagtcttgtaattaattggcaatttagtattccatgtggattccatgtacgtcatattagatccatacacatgtaacaagcaaagagggtatgttttattttttgaatgctaatgtaacatgtagggacattttaaaaaatcgccttgacatattttctatttggaatagttttaaatactttggataatgtgttgtatttgtatttctaaagaagaaaatcttatgcaaccaacttaattgaataagaaataaatcattcccagaaataatttattttctaatgttaacataatgtgtacattctgagaaattattaataaaatgtttaaaagatacctaggacaatgacctaataagatggttaatcatcattgg

SEQ ID NO: 17436 - DNA, 254 bp, Homo sapiens
  source 1..254: mol_type = other DNA
ggggtacttgcccctcccccagttggggtacttgcccctcccccagaagaaggaccaaggcaggcatccctgcgtggtctgacaccttcagagaggcatccctgcaatgattaaacaccaagggaaggctgccttcccagtccgtgaccggcaccggagttttgggtccacggataaaacatgtctcctttgtctctatccgaactcccaagggaggtcccacaggctttgtgtgagcaataaagctgtttatt

SEQ ID NO: 17437 - DNA, 465 bp, Homo sapiens
  source 1..465: mol_type = other DNA
aaactgtatatttactaaaataactcattgacatttgagatataatttacacattactcttatacatactttaagggaaatatagttgaaataaaatggttaaatgatttctaacatttagagtccaatatttctgggttactcttaaactcagatcttaaattttgacctcattagatgattccaacattttcagacaactcatatttcttccatgaacagttattaaatggtcatgacagctgtccagtcatttgcatgtcatcaacctagtttcaaaaagaagaaaatagtgttttagaattgaaagtaaacatttggtttactttcttcatctatggaggactgcaatcatttctcctaggcactatcagaataactcctaattttttttcttgccgaaaaatccaaataaaccacaaaaagaaagaaaaatttcactatcattgcatgtgctgaaaacaa

SEQ ID NO: 17438 - DNA, 434 bp, Homo sapiens
  source 1..434: mol_type = other DNA
ccctcaaaattttgaacaaattacctattcttaaaactaggagttaatctcagaatttatacttctcctataaactatgtatccctggaatgcctcacagtcatccatttactttttaattatcttaaaatagtattaaaatctcctgcctttacagcagtttagaagttataatttaactgtcatcccctttttaccaatcagacttaagttaataggtattgtaggaagaacagagtatataggcatataatactctttcttccctctgtatatagggagagaagagtagatcaaatacatctgtgacattaccatatgatttaagccagccaaaccaatggaataattttccaaaactttaaacttgtattaatccaaaatgtatcaatatcgagcatttcacttggattgattctcgcaggaggaattct

SEQ ID NO: 17439 - DNA, 751 bp, Homo sapiens
  source 1..751: mol_type = other DNA
attttgctgcagggtaaccatattctcatatatgcatcctcacattaccacatatatatatgtgcatatgtgtatacaggtaaaagtgtgtatatatgtatacatgtatgtttgtgtgtatatacatacatatatcttcacacttttctgaaatatatatatttatgtgagagaagggtctgtactttatttctataattgagagtctaaaatgtttgagttattgaattaattaaacttcatctctactcaagaaaacttttaactgagttaagctcttcctttctccacaagtcaataaaaggaaactgtgatattaataattctttcctgttttgatgtaaagaatctatcgcataaagcagtcttaattttcatcattcagaaaaatggtgttagaaccatacttatgtaccaagcaaagagggtatattttaatttttaaatgccaatgtaacctgtaggcatattttttatttgtcttaaattatttcctatttggaagttttaaatacctggaataatttattgtactcatatttttaaagaaaaaaatcttatgccaccaacttaattgaataaacaagaagtaaggtttacttgttaagattaacaaaaaataatgtgagaattctgagaaatataatctttaaatattggtgaactcttaaaactaactaggttttatatgtttgactagagcaatgacataataaggtggttaatcatcactggacttgttttcaaaaag

SEQ ID NO: 17440 - DNA, 401 bp, Homo sapiens
  source 1..401: mol_type = other DNA
gatcctccaacaaaagggccccatatcagttttctgcatttgccccagattggggaaattgaaaatcatttttcaccagaaaaagtaaaatggtctggaacataaaaatgtacaggttgataggattatgaaatttgagatgtctaaacagcctttatgtaaggtaattttaacttcttcacgaatgttaattggacacactaaatctgagcctacacaatgtagggtagaagctgaagggcacaaattctccacttcatatctcccaatgacaaatactagactagagaatttccagttgagggacctaaaggaaataatggtaccccaaagagttccataataaagtaaaaattgtttgctcatataacaagaactgcttagcatgtgaattaaagagt

SEQ ID NO: 17441 - DNA, 433 bp, Homo sapiens
  source 1..433: mol_type = other DNA
ggttagtactccaaaattttaaaaagcaaatcattttaaaagacaaactacaaagtactgtgaaacaaatctgttctttcaaaataattgtaaaatttctgtgtaagaatgaagactacatatacctatggatctctatctaagtgctgaaaaatgaatttttttattcatttgtatctctggtacctagaataatccctgaagcttcatgggagtttagatataccaaaagtctgtgatttctctgtttgcatatatgcacaattcttggaaattcactcatgtcttacaaagatggcaaattcaaacttctgctgtgtatgacacaccattaactgcacaaggacactgtgtatttgctacgttaatatttactgatgagttaatgtaataatgaccggctctctgagctgcctgatgtcagagctgagaa

SEQ ID NO: 17442 - DNA, 524 bp, Homo sapiens
  source 1..524: mol_type = other DNA
gtaaatagtaaaataatatgaatagtgaataatatagtaaaaacagttaaaaatgatttagcaatttcttaaaaacaattgttgactggaaatttaagaaatgttcatttgttttgacaaaatggaaagcaactgtacattcttcctggaaactttagctgaggtcaaagttgtaaatgaaaaggatgattttttagagaacaattcagtagtattgttttgccttgtcatgaagaatttttgtgcttccacaaacaaaaatcttggattgtcagaagactcaagtttcttcatctaataagagcataaaatctgtgcctctaatttctcgcagaaacaaataatgagaacttcacaccaattcatttattatatgaatgttttgtcccgtgagaacactggtctatctttagatatgtaatttatcaaactaaattttcatggaataactacagagctcccgagcacccgtaggtcgaaggcaccggaagtgaccgcctcgcggctgcttcctctcctggagt

SEQ ID NO: 17443 - DNA, 352 bp, Homo sapiens
  source 1..352: mol_type = other DNA
tctagccccggcatcccgaaggcagccccttagggtcctcccaacccagagcttcatcattgaccccggcggaggggcgagacccagccgggcgatgggtgtgcgcggctcgaggcgggggccccggagcaggcagtggtggggacagcggcgacagcacccacgtcttccggaaacacgcagccaccctcactgccgctttaagagtgaccacaccccttgaccaattatatgctctcagctggctggcgggaagattttactcccgagtagtgtcggagatccgagagtcggagatcggagagtcggacacaggacagtcggacaccgacctgctgcagggcgaggccgg

SEQ ID NO: 17444 - DNA, 442 bp, Homo sapiens
  source 1..442: mol_type = other DNA
ttttctctactgcttgaaactttagcaggtagaaaagtgagaatgtttcaagagacttctaaaaggttgcttacagtactggcaaaaagcgaatattcaaaatttaaggacattttcaaaaagagcctactgtaggtgacatttaaaataccgggccgcgggcaccacgcaaactttctcttgtggcaagccccttctagccccggcatcccgaaggcagccccttagggtcctcccaacccagagcttcatcattgaccccggcggaggggcgagacccagccgggcgatgggtgtgcgcggctcgaggcgggggccccggagcaggcagtggtggggacagcggcgacagcacccacgtcttccggaaacacgcagccaccctcactgccgctttaagagtgaccacaccccttgaccaattatatgctctcagctggct

SEQ ID NO: 17445 - DNA, 338 bp, Homo sapiens
  source 1..338: mol_type = other DNA
tgatgtgatttaacagcaaagatatctcaacataaaatcagaaattgaacatttagaggcaatagtaatttaatattaataacgcccgcccttccgctactgtgaagcagggggtgtaccaacaaatggcagctgctaataaacaggctttgggcgaacgtgcccctaaaggccccggcctcgccctgcagcaggtcggtgtccgactgtcctgtgtccgactctccgatctccgactctcggatctccgacactactcgggagtaaaatcttcccgccagccagctgagagcatataattggtcaaggggtgtggtcactcttaaagcggcagtgag

SEQ ID NO: 17446 - DNA, 460 bp, Homo sapiens
  source 1..460: mol_type = other DNA
tacttttacttaacaatttaaaacattctgtcatggtttcagttacccatggtcaactacagtctgaaaatattaaatgggaaattccagaattaataagtttaaattgtgagctttaaatctgagaatcagttagtaaccatcttggtgaacagatagtggttttgtgggccttaactagtagtgtcttttcagtgcatggctgtcccttgaaatacaaggattgtgtgtctcataggcactcaataaatatttgctaaacaacagaatgaattgataattaagtgaatgactgatgtcaaattccattgcatcagtgatagactgatgtagttacccaagaaaagttttctgattgactattgattgttttcattaataataataataacatgttactacattctgaaggcctcctgggtgatgcaatcagtatttaaacaaataatttctgccctga

SEQ ID NO: 17447 - DNA, 515 bp, Homo sapiens
  source 1..515: mol_type = other DNA
catggtttcagttacccatggtcaactacagtctgaaaatattaaatgggaaattccagaattaataagtttaaattgtgagctttaaatctgagaatcagttagtaaccatcttggtgaacagatagtggttttgtgggccttaactagtagtgtcttttcagtgcatggctgtcccttgaaatacaaggattgtgtgtctcataggcactcaataaatatttgctaaacaacagaatgaattgataattaagtgaatgactgatgtcaaattccattgcatcagtgatagactgatgtagttacccaagaaaagttttctgattgactattgattgttttcattaataataataataacatgttactacattctgaaggcctcctgggtgatgcaatcagtatttaaacaaataatttctgccctgaagctccctggaggagtcatcagattctcaatcttgcttgaagatctactccagatggggaggtgcccttaacaccaagattttaaa

SEQ ID NO: 17448 - DNA, 314 bp, Homo sapiens
  source 1..314: mol_type = other DNA
tatttcatgtttaataaggattttagagtttaaaggatatttgaacgatacgcctttagaataacagaatcatttgattttactaagaaaaaaattcacgtatttacttattcttcatttgggtgaagtaatacaaataatatgtttctaaatacgttttttcaagtggactctttgtgaattaaccctttcttccaaaaaattttaaaacaatgcgcactgtgtgtccactctgctagggcttcctactcgagtttattcccttaaaattctccatccaaaactggaggcaaagcgcccttgcggcgtccggt

SEQ ID NO: 17449 - DNA, 441 bp, Homo sapiens
  source 1..441: mol_type = other DNA
aaaattttaaaacaatgcgcactgtgtgtccactctgctagggcttcctactcgagtttattcccttaaaattctccatccaaaactggaggcaaagcgcccttgcggcgtccggtcaggcgcggggctttcctccagagctccagggcccctggctcagcccggggttgcgctgggagcgctggaaactcggcagccccgcgcgctgccccctccccacgcccggggactgcgctgtgccgggaggagctgaggtttaagcccgggttgtcccgggccaggctgtcgctgagcgccgcttcatctccgaccagagccggagaaaggacctctccgaccggccactgccgggtgagtgctgccggctccgcgctgtgccgaaagaaagcgtctcctcaccggaaagacgcggctctgaggcgccctcagatacagtccgcc

SEQ ID NO: 17450 - DNA, 643 bp, Homo sapiens
  source 1..643: mol_type = other DNA
agaccaagtatatagaaaataatttaaaacctaataaaaggtgctaaaatagtattatcaagtaacaaattacaattctgattgtaattctaacttaaaggatattttgtatgagcttcagttctgctgctttagagaataataatgtaaaaatattgattttagctacatctgtaaagatggctcaaaattaagcttgcttgtgaatgcaccaactctctgtaatatatgtgtatgggtgtgtaaataaattggaacatatatatttacaaacatagaaacaaacatatgccatttatctgcagtctacattgactgaattattctttatcaatttgataatatttgaaggaaatgtacaaacatgacaaagatttatttttactacctcattaaaattattgactgatgattattgaccagtcaaaattatgttttttttcatgttacacccaaagacatactcaaatttatgcttttttatagggaaagttttaagaaaagtattgtaagtgtagaataaaataactaggaatattttttaaaagctctagaaataggaatttgtctacatgtaatctaaggaggcctgactttggaaatgatgaaataagcatggtcatgccctgcctatcccaggaag

SEQ ID NO: 17451 - DNA, 373 bp, Homo sapiens
  source 1..373: mol_type = other DNA
ctcatttcccctagagggcaaagcctgaccttgagaccttgtcaggcaacgagtaagcaatcattgcgtgtttgttgaaacaggttgaaaaaaatagtcattttcatcaaatgaactttaaaacggagatgatctaaattcagatgtatttttttaagtcctttaaagtttaactgaaatgcaacatagaaatttatttctcccagctactgatcgcgccacagagtgagactccgtctcaaaataaaaaaaagaaggaaagaaatttatttctatttgtactaaatctaatagaacaattttataaataacttggcctcggaagcctctggaaggagacctcctcatctggagaggctgcggtggttgtggg

SEQ ID NO: 17452 - DNA, 300 bp, Homo sapiens
  source 1..300: mol_type = other DNA
ttttcaaaaagctatagatgtttattgtataaccttttttgtgcgcaaatgcaggaaatactttactatctacctagattacaaaataaaattaaaattaaatctccttacgtcagtgaacttggagtcagaaagttctctcccctgagcagagagccttttaaagaaggagctggctctgcaggtcccgcccgcggcttccgaggtctggcgtgcggggaggcctccttccactgaagtggccaagggagttgagctgagcagggggaggggaagatctacacccatcccccttcctct

SEQ ID NO: 17453 - DNA, 265 bp, Homo sapiens
  source 1..265: mol_type = other DNA
tggaaaatacgtggaacttccaagaattaaagtttccattacttttcaaaaagctatagatgtttattgtataaccttttttgtgcgcaaatgcaggaaatactttactatctacctagattacaaaataaaattaaaattaaatctccttacgtcagtgaacttggagtcagaaagttctctcccctgagcagagagccttttaaagaaggagctggctctgcaggtcccgcccgcggcttccgaggtctggcgtgcggggagg

SEQ ID NO: 17454 - DNA, 481 bp, Homo sapiens
  source 1..481: mol_type = other DNA
acatgaaaatctcattaagtattgagagtaggtgactcaagtgtccaatcctgctgtgtagccaacttggcttcatccctaaatatatctaggcttacaaagcctagatcagatgccaaataatccatggatttttgaattcccatgacattttaaaattttatttgcttgtattagagaatatctctcttaacaactatgacatatatttatatatctctagacacataaacctaaaaaaagctttttattcttcatagacttgtaaaactattatactacataaattactgcaaaaattaatgggagaaaaaaaaagttcttaatttgccttcattaaagactaattttaggtctttggctaattaaatgaatacattgtttatgctccatatggaaaatacgtggaacttccaagaattaaagtttccattacttttcaaaaagctatagatgtttattgtataaccttttttgtgcg

SEQ ID NO: 17455 - DNA, 508 bp, Homo sapiens
  source 1..508: mol_type = other DNA
tcctagcggccgcgggttcaagtcccagccgctgacgcagggcagcgaccttcccaagagtggggcgccggcggagaaatcccctgggactggcagggctggagtcggcctgcatcagatctggggaccagcgccagcagaccgcagtcctgcagcggcgccccttgaggacggcatgcggagcctcaggggcagaagtccgcccggctgactgactcaaaactggctcttgagaaaatccggtgttaattaaagagggttatcttaatataaacacgttatctcgagagttaattaggacggtgggcaagggtcgcccttcgatagcgcggcggctggtccaccagagaaaccaagttttctaggtcgccggggaaaagcggaaaattagacttgagtgggtgtacctagaatgagcccttcatttcccggatccgttcagggggaaaaagaaacaagaataccttgagtgttttgacgtttaatcatggaatcatattccatcgcg

SEQ ID NO: 17456 - DNA, 485 bp, Homo sapiens
  source 1..485: mol_type = other DNA
aaaaaagagtttaaatgatgcctccagaattctttctctgcttcaggttaacaaggtccttagcacccagtcagcacgagaaagatcctttctttccaagactctctggaaaggactgtccctagaccacaggtgtgttaaggattgggtcacacacgaatgtgagggaaaccctcactcctatgaaaaatggagtttttaaaacgttgagttctggtcagtaatttcttggaaaaaatgacccaggggcattaaaaaaaggtgtatgtttaaaatgtacattttaaaatataaaatggattcgtcacaattctaaagtggggaagttcttcagcaattataaatactttttttcttttttaattttagaaatttacagacacttgcacagagcctacttggcctactggccccagacgaggcggccgcggactacaatcccagcgagcaccgcgaggggcgggggagggggcggggcgagggac

SEQ ID NO: 17457 - DNA, 549 bp, Homo sapiens
  source 1..549: mol_type = other DNA
tgcgataagcttatcgcttatcacaaggaaccaacggtcctttaatctaaaaggccgcgcgggcaccagctgcctgcacatctggatgcagcacttcctttcagggaggaggcgaggcggaggaccccggagtgcacgcacctcctcgtgcgcgcgctcgcttgcgcccgtgaacgtgtgtgtgtgtgtgtgtgtgtgtgtgtgtgtgcgggcgcgcgcgcacacacacgggccgcggctccgggaccggctaatgggggtgggggcccagggaataaatctccgccagcctcctcgcgcctggctgcgggttaatatcggcagcagggtgacagcctgggcacaccggcgaggatattagccagtctccgccacactcagggactgatataggggagaccttgatttccaccaatccccgggcgtttgtctgcgaagtccggggcgcagcggaaggctgcggcgcgccgctgaattggcggaggagcccggggcaggatagcggtcccgggccgccgtggaaatttccaaggacttggtgcggcgcag

SEQ ID NO: 17458 - DNA, 491 bp, Homo sapiens
  source 1..491: mol_type = other DNA
cagcctcctgagtagctggaattagaggcgctcgccacgctggtcttgaactcctgacctcaggtgatccgcccgcctcggcctctagcagtccatctatcacagcccatccgaaaagcggcggtagcagctgggaaggccgcggccggaggctgtcacagagcttcggcccgcaagatggagcgtttccctccagggaagcagcgccgcaggtggatgatgcctcggcgagtttagtttcgccccgccaagtgggcagagcgccgaacgatcgatgctttcttccgcgccccgagcgtcccagccttgtggggccgggacggaagaaccctcctcccgccgcctctccggaatgaggtctcagcacccgcgcgggacagcacccgacagtgagtggcgacccgtggcgcgactgccgggcgcccgcgcgcgcccccgcgcgctccttcgctgtcagcccgcgcgcctccgcccctctcccgccggccccg

SEQ ID NO: 17459 - DNA, 359 bp, Homo sapiens
  source 1..359: mol_type = other DNA
gagactttggatgactgaataaaatatttcactaaatatttatttcactattgaggagtgatctcggctcactgcaacccagcctcctgagtagctggaattagaggcgctcgccacgctggtcttgaactcctgacctcaggtgatccgcccgcctcggcctctagcagtccatctatcacagcccatccgaaaagcggcggtagcagctgggaaggccgcggccggaggctgtcacagagcttcggcccgcaagatggagcgtttccctccagggaagcagcgccgcaggtggatgatgcctcggcgagtttagtttcgccccgccaagtgggcagagcgccgaacgatcgatgctt

SEQ ID NO: 17460 - DNA, 468 bp, Homo sapiens
  source 1..468: mol_type = other DNA
cgttatcggtgaagtaattattttgttaattacaaaggtaagtaggttctttctgaacaatcaggatgtaaacttaatgctagtgaagtaattaaacattttgaatgttaattaaactcagtccagttaagggttttatttactactaacatcccagcccgttttcctccatctaaaaggaaaattaggaggtcccaatactttacttgtagatttatcaaggcccactcggggtaccctggcatggacatcgagctgaactcagctttacttactgctaacctagactcaggccaagttcggagagtgatatgggggcttggcagggctcgggctcatcccggagaagcagccccgctttccagggatgggtgtgtgctaatcgcaggccaacaagcccatgaccggggccccgcctcggcaccctgacgcagcgcaggacccgccccgcgcgtgacgccagcgtca

SEQ ID NO: 17461 - DNA, 477 bp, Homo sapiens
  source 1..477: mol_type = other DNA
catttaaattttattttgctaaatagttcctgacaatggctttgttagcagacactttcaactcttttaaatatggaggcatatgttcctattctgttattcacaagtcaaaatcacatttgctcgatgtgtatgtgcattgtacgtaaacgtaaataacctttgaaatgctatattaaaaacaataggaaaaacttagaatttatcgagttagttattgattaatctccactatccattaacatttagtagttaatagtatctagtaaatttttttctattcataaagagagtactcagatcactttaaaaatgaaaattgtcttaaactgtttgaaatttgattatttagccacgagatgttcaagaataacactagggtgctgccttaggcttttctaatgtttaatccattaaacaaaccaatgcatggtttatatcagttaactgtcgtaactgtcattactcattaaacag

SEQ ID NO: 17462 - DNA, 319 bp, Homo sapiens
  source 1..319: mol_type = other DNA
ttcccctccacatcgcacccactttgcggaaagcacgagctaacataacaattctttgtgtaaaaatgctattactaacattaaattttttgcttaattagttaataaatgcagtttaatcgagcttctgttattatatagactaggtttttaatcagcagcaaatacgttttacaaaatcatactgttctgtgttaaatgagttgacttctcacattcagtgatgtctagaagccctgaggcggagcgtgtggctccgcggaggggggagcagccagactccgctgctggaagtgcactacccctttaagagactggt

SEQ ID NO: 17463 - DNA, 614 bp, Homo sapiens
  source 1..614: mol_type = other DNA
ttttttttttttttttggcttcgcttaacacaaaaccaaaccagttcccctaccccaatctccgaggagtaggtgggtgcacagtgccggcggcggcggggacgcgcggcgcggagcctggctctgggaggcagtggccgcttcagcagccgaacctctcgcggctccagcctccgcgcccagcagcccgcggctcgcctcccggaaaggttccacggaccccgcagccccccgcgcgcgccctccctgccggcccgaccgcctgaccactggactagggggccgggaggggccaggtcctgggcgcagagcagcggctgaggctcaggcgcccatgaatgcgtatttatagatgcgagctccatcgagatctagagatatcccgctctcctttttatcgctcctttaagtggagggcagataaaaaaagacggggaagtctggggctccttcccttcggatggatagagagggcggccggcgggagctcgggggcgacctggagggagcgggagcccccggcaccgcccccgcgccccccccccgcccccgccgcaccccccggggcgggcgccgggccgcggtgaccgccggctggtgcgctgccctcgcct

SEQ ID NO: 17464 - DNA, 333 bp, Homo sapiens
  source 1..333: mol_type = other DNA
attgagaaattacatttgcttactaactgccgtttagaaatcagcccgaaaaagtctgggagagatcgcccagagacagccaagccccgagcctcgctcccaagctcctccggagaagaataaatagagtctctgggggtgcccagggacgcggcgcagtccatggttgcgaagaaacgtgttgctcgaattgtttcctagcccgggagctgtccatcaccgacggagtggggatgggactctgagggtctctaagagtcggagcccagttttttttttttttttggcttcgcttaacacaaaaccaaaccagttcccctaccccaatctccg

SEQ ID NO: 17465 - DNA, 498 bp, Homo sapiens
  source 1..498: mol_type = other DNA
agcccgggagctgtccatcaccgacggagtggggatgggactctgagggtctctaagagtcggagcccagttttttttttttttttggcttcgcttaacacaaaaccaaaccagttcccctaccccaatctccgaggagtaggtgggtgcacagtgccggcggcggcggggacgcgcggcgcggagcctggctctgggaggcagtggccgcttcagcagccgaacctctcgcggctccagcctccgcgcccagcagcccgcggctcgcctcccggaaaggttccacggaccccgcagccccccgcgcgcgccctccctgccggcccgaccgcctgaccactggactagggggccgggaggggccaggtcctgggcgcagagcagcggctgaggctcaggcgcccatgaatgcgtatttatagatgcgagctccatcgagatctagagatatcccgctctcctttttatcgctcctttaagtggagggcagataaaaaa

SEQ ID NO: 17466 - DNA, 365 bp, Homo sapiens
  source 1..365: mol_type = other DNA
tggaggctcctccccaagggatgctggaggggttgcgtcgtaccctgcgcctggccctggcgcgcggccccaggtcgtggtacccagcgccctatgggccgtgcgccggggcttggccacaccgcctccatggccagcccgcttcgctccgctgcggcccttgcccgccaggtacctcgaacccgggcgttgtctcggtagctcgcgggcctggccgggcgccgggtaacccgctccggagcgtggcgaggaccgccacgggggggagctgaatctctgggctgccagaacccacagccacatattgtgcgtctgtgattgacaagaccacgaggctgagcgcgccctggagatttttctataaa

SEQ ID NO: 17467 - DNA, 390 bp, Homo sapiens
  source 1..390: mol_type = other DNA
ccattaaaaaatgataaaataaaataattgattttgagaaagggcagcacatagaccaagggcccagttctgtttgagggcattggaagcaacttccacagcaaagacttgggttgaaatttctactgggcaatttcacattataaagaattttatatgctcaaattaaaggattaaaaattttcccccatgtacataataaattggcaaaaatggttatattttcttgactactgcaaaagtacatttaaagtagccgcgggggatacatgtatacttccacagtggctgattcggggggagagactccaccatctgggggcggcctgggggagcagcccgcgccgcgagagggccggtctgcaatccagcccgccacgtgtactcgcc

SEQ ID NO: 17468 - DNA, 319 bp, Homo sapiens
  source 1..319: mol_type = other DNA
tggcattctgactaaatgttaaagtactggcatgtaacacacattaaataatctcatctgctaacagagatatttttggatccaaataaggtcatgaaacaaagctctctttcctgtaaaagctagctgtgatgtgtaaatgttgcacctgtgtaactggcaactggcaactgatgctaaaagctttgcttaagattttatatttgtgaagcatttatatgtaaatactttcacttttagtttgtcataatttcacagggtgactcttagttgaaatgtcactgactttttttttttttttttttaactccagtcagaa

SEQ ID NO: 17469 - DNA, 299 bp, Homo sapiens
  source 1..299: mol_type = other DNA
aaggtcatgaaacaaagctctctttcctgtaaaagctagctgtgatgtgtaaatgttgcacctgtgtaactggcaactggcaactgatgctaaaagctttgcttaagattttatatttgtgaagcatttatatgtaaatactttcacttttagtttgtcataatttcacagggtgactcttagttgaaatgtcactgactttttttttttttttttttaactccagtcagaaacaactagaagcgctggcatccattcaggggacatctcctcagatgccgtcatcaacagcctgctga

SEQ ID NO: 17470 - DNA, 306 bp, Homo sapiens
  source 1..306: mol_type = other DNA
aaggtcatgaaacaaagctctctttcctgtaaaagctagctgtgatgtgtaaatgttgcacctgtgtaactggcaactggcaactgatgctaaaagctttgcttaagattttatatttgtgaagcatttatatgtaaatactttcacttttagtttgtcataatttcacagggtgactcttagttgaaatgtcactgactttttttttttttttttttaactccagtcagaaacaactagaagcgctggcatccattcaggggacatctcctcagatgccgtcatcaacagcctgctgacttccct

SEQ ID NO: 17471 - DNA, 271 bp, Homo sapiens
  source 1..271: mol_type = other DNA
aagctttgcttaagattttatatttgtgaagcatttatatgtaaatactttcacttttagtttgtcataatttcacagggtgactcttagttgaaatgtcactgactttttttttttttttttttaactccagtcagaaacaactagaagcgctggcatccattcaggggacatctcctcagatgccgtcatcaacagcctgctgacttccctgagaagaaaaccagggtaaggatcgagtctttactgcataaattagaggaagcaattt

SEQ ID NO: 17472 - DNA, 351 bp, Homo sapiens
  source 1..351: mol_type = other DNA
ttagtcctactacttatctatgttataaacttataatcagagatggtaatttaaaagtatttcataacagcctcacttaatgccaggaattgcttcattttcaattctaatcttaaaataactctctctttaaattgcggaatgagccccatccccctgctggattaaaccgcagaggcccaggcctcccaccgggtgtccgctgcatgaaccagtcgcatgcctgcagaccccaggatccgggaaatggggcggcggcactcacgcactttccggcacgccggagccgcaaaagcctcggggcggggcgccggccggaagagcctccgcgcggctgcgctcttttcctgg

SEQ ID NO: 17473 - DNA, 481 bp, Homo sapiens
  source 1..481: mol_type = other DNA
ttggcttctagcccagtgccaagtacaaagaatccacatttttcccttaattaatgaattaaataagtaattacattctccacttcctctggttttaattatagaaaatgtcttgatggaaaccacatttaagaaaatcagagatactctcataagccttatcatatttaactaatgcaggatgagcgacataaaatattttttcaaagcagagtaaattgcattagcttttaattaactgctggagaagtactaaaacatttccgccaagttaaatttagtgggaacgtactgaaagttactaggttaccaattttcaagaacactggtgaagcagaatcaactgcagtagtccgcagagtcggagcagaaattgtgtggacaaacgctcccgggttgcccggacgacaggccccgcccacttgagctccaggaaaagagcgcagccgcgcggaggctcttccggccggcgccccgcccc

SEQ ID NO: 17474 - DNA, 641 bp, Homo sapiens
  source 1..641: mol_type = other DNA
cctgtttagagaccttgtgatgggttcaaaatatcaagttgggcctggggctaaattcccagcccaagtgctgggcggcgatcagacagccccggtgtgggaaatcgtccgcccggtctccctaagtccccgaagtcgcttttggtgactgcttgtttatttacatgcagtcaatgatagtaaatggatgctcttcgcagcttctctgtggagaccggtcagcggggcggcgtggccgctcgcggcgtctccctggtggcatccgcacagcccgccgcggtccggtcccgctccgggtcagaattggcggctgcggggacagccttgcggctaggcagggggcgggccgccgcgtgggtccggcagtccctcctcccgccaaggcgccgcccagacccgctctccagccggcccggctcgccaccctcgccggcccggcccccgctcctcccccgccggcccggcccggcccccgctctgccctctgcggccgcccggccccgaactcatcgattttcctaggcggcggccgcggcggcggaggcagcagcggcggcggcagtggcggcggcgaaggtggcggcggctcggccagtactcccggcccccgccatttcggactgggagcgagcgcggcgcag

SEQ ID NO: 17475 - DNA, 563 bp, Homo sapiens
  source 1..563: mol_type = other DNA
taactgattaatctgtccatctctacttaaaaacagttgtcttttgtttgtggcctgtttagagaccttgtgatgggttcaaaatatcaagttgggcctggggctaaattcccagcccaagtgctgggcggcgatcagacagccccggtgtgggaaatcgtccgcccggtctccctaagtccccgaagtcgcttttggtgactgcttgtttatttacatgcagtcaatgatagtaaatggatgctcttcgcagcttctctgtggagaccggtcagcggggcggcgtggccgctcgcggcgtctccctggtggcatccgcacagcccgccgcggtccggtcccgctccgggtcagaattggcggctgcggggacagccttgcggctaggcagggggcgggccgccgcgtgggtccggcagtccctcctcccgccaaggcgccgcccagacccgctctccagccggcccggctcgccaccctcgccggcccggcccccgctcctcccccgccggcccggcccggcccccgctctgccctctgcggccgcccggccccgaactcat

SEQ ID NO: 17476 - DNA, 294 bp, Homo sapiens
  source 1..294: mol_type = other DNA
actcctttgaaaagaatttccctgttttgcatttgaatcacagaaatgttgatttgaaaggtcctgagtcagatgtaacaaattctgcttcaagtttaatattcttgttttgatgatgtttaaaaaaagaaaaataaaagcgcggagttggggtatgtgtgaccacaaaatccaaaggcaatattgaaaacaacatacacatctgtatttccatatgaaagcacccgtttcctttttgcctgctgctaagagggacgctgaatcacagcttcaaacccagtccttggagggggg

SEQ ID NO: 17477 - DNA, 425 bp, Homo sapiens
  source 1..425: mol_type = other DNA
acagaaatgttctgtgtaagtaaagttttaattgtatttaattaattaaaaattagtggctggagtgaaaccctgtctgggcgcctgtaatcccagctacttgggaggctgaggcaagagaatcgcttgaacctgggaggcacaggttgtggtgagccgagatcgtgccactgcactccagcctgggcaataatttaaatagccacatgttgctaatgtaaggaattcacttaggaaaataatcattgcaagttctttgcttgctgactaatacagggtaaaagtaaaaaaaataaattttctgtatgattaaactgggttaccaagcagataagatcctataaaacccataaaagcttgttagatccctgccagggcagcccctctgggtgaggcagaagccattccctgagtcagcggcaggc

SEQ ID NO: 17478 - DNA, 657 bp, Homo sapiens
  source 1..657: mol_type = other DNA
ttgcctgctgctaagagggacgctgaatcacagcttcaaacccagtccttggaggggggagattttgcccgtgggaccgtcacgagccaccggtcatctccccgcgcccgcgggtcctcaggcctcggtgcgtcgcgggccaggcgacagcgggggggcgtcgcgggccgggcgagcgtggcccggtgggcccgagggtcgcgccgagctccccgccgctttaaagcagcgctggcgcgttacgaggtctctcccggcgccggcgagcgggccaggcgcgggcggggcgcggaggagcggcggctgaaacccgagcgcccggccgaggggggcgcccccgcgccgctcctctcgcgcgctcagccgctgcccggcgaaggggcggagccgcctggccgcccggcccggcccggcccggcccggcccccagcccggcccccagcccagaggcaccggccgcgggagcgagcgggtcgccgactcctacgcccgcgctcctcctacgcccgcgctcgtccggcgccccgcgccgcgccccgctcagcgtctgccgcccagctcctcgcccagcctcgccgagcctcgcccttcccgcccgcggcggcgttggcgctgggggcggctcccgcggcgtctctgccgctggccgagcgctcg

SEQ ID NO: 17479 - DNA, 488 bp, Homo sapiens
  source 1..488: mol_type = other DNA
tatatgacaaagtaaaaatttctgctttgcttataatgcagccaaaacaaacggttaatgtttatattttttgaataactcttgtaatttaagaaaactatcaaaccacagttcacactgttcgtcaaaggaattcgttagctgagtaagatactttgacaactgttcttaaatttgttaatagtattggcaaaacactgcacactgcaaagtggttcaattttattgataattcctaaaatgacaaactttttttctttagttttgcctcagaaattatcctaatgaaataatccaaaaaataggaatttttaatgtaatggagcatgagttcatgattaaaattatgataaaaatagttgtaacatgaaacactgtcatgatagtttctgtaaaataatacttcagtaagattatgatatgttaaaatttgttttgtgtaatacttacatacttactagaagaaatgttgattcattttattacaa

SEQ ID NO: 17480 - DNA, 823 bp, Homo sapiens
  source 1..823: mol_type = other DNA
tggaggggggagattttgcccgtgggaccgtcacgagccaccggtcatctccccgcgcccgcgggtcctcaggcctcggtgcgtcgcgggccaggcgacagcgggggggcgtcgcgggccgggcgagcgtggcccggtgggcccgagggtcgcgccgagctccccgccgctttaaagcagcgctggcgcgttacgaggtctctcccggcgccggcgagcgggccaggcgcgggcggggcgcggaggagcggcggctgaaacccgagcgcccggccgaggggggcgcccccgcgccgctcctctcgcgcgctcagccgctgcccggcgaaggggcggagccgcctggccgcccggcccggcccggcccggcccggcccccagcccggcccccagcccagaggcaccggccgcgggagcgagcgggtcgccgactcctacgcccgcgctcctcctacgcccgcgctcgtccggcgccccgcgccgcgccccgctcagcgtctgccgcccagctcctcgcccagcctcgccgagcctcgcccttcccgcccgcggcggcgttggcgctgggggcggctcccgcggcgtctctgccgctggccgagcgctcgcgcaccgcggcacccccgccagtggcgtccacactcacctagcgcgggccgggaggtgcgcggagagggaacgccggggggccggggcctccagccggtgcggggcgcgcggcgcggggagcgccggggagtgccggggagtgcggcgcggggacgggcgctgggcggccgcggagctccgggtgccgccgcgtccccagcgccccggccggccc

SEQ ID NO: 17481 - DNA, 449 bp, Homo sapiens
  source 1..449: mol_type = other DNA
aacagaatatgaagttcagtgcacttttttttacagtaagattacaaaaatttaggaacttgagatgtgtatgtatagatacctatctatggataaatagaaatctgtacagatagatatctatctatatatggacttagaagaaattaagatgagtccattaattcatggtcaatttctcaataaagtgttagcaaatgtactagttaaaggttgcaacgcctcacttctttgaaaaatatatgccttttagaaagctgaacattagaaaatactgaagagtaaattcaattctaaaagagcctcaatctgtttgtggaacgcctcctaaaacaggcaggtgccaaagacgtcaaaggtgttaacatcttttcgaattaggttccaattttaagagataatggaactcttgaatgtacacataacacctgttttgcccttaaagacct

SEQ ID NO: 17482 - DNA, 325 bp, Homo sapiens
  source 1..325: mol_type = other DNA
cgccgcgttcctccaggagcacacgcggccccaaacgtcgtcatctgctgctgtgccgtgtcgacattcggacccagtgacaacgttttcatgtatcttaaatccttcaaggagcgcaagttgcttcttctcgaggcatgatcagtgccaaaatttcctttggttgggaagatgaatcccggcccggcccctcctcccccgcccccctccgggctggaccgcggatggtacgttccgcacgtgagctgggtgctggtctggccggcgacgcgcgtgccctgtggccaaacactgcctggaccagcgcagtgctgcttcacacttt

SEQ ID NO: 17483 - DNA, 294 bp, Homo sapiens
  source 1..294: mol_type = other DNA
ctctgcacactccgggcgtcaatgctgccgccgcgttcctccaggagcacacgcggccccaaacgtcgtcatctgctgctgtgccgtgtcgacattcggacccagtgacaacgttttcatgtatcttaaatccttcaaggagcgcaagttgcttcttctcgaggcatgatcagtgccaaaatttcctttggttgggaagatgaatcccggcccggcccctcctcccccgcccccctccgggctggaccgcggatggtacgttccgcacgtgagctgggtgctggtctggccggc

SEQ ID NO: 17484 - DNA, 691 bp, Homo sapiens
  source 1..691: mol_type = other DNA
acattcagaaatctagaaggggacctggtgttttaatttttaaattattcacctaacggcattcccatttttagtcaattaaaaagaggtaaaaatgatacagtactgcaggaataggtccttttggaaatagcggaccgagatttaaaataaagtcagcattttaaaaatactttttaaattaagaaccatcgtgattaaattaatgagagaccttaaaaggccctcttctcctcacgccggggtgatcctgggccgccgccgccgcccgagtcacgaagccagacgcagtgcgcgtctccgcccaggactccggagactgcagcagcgcgagcggccgccgcggcccgggctgctcctggagtcggggaggagacgcgactcccgcagacacgtgacccccgcgacccagatccgtccccggaacccgtgcccggcggggcgggccgggggacacgtagcgggcgccccagtccctgctgcgcggggataaatgtgcaggaaaaaccttggtttttttctctatgtctttatgtatatctagagaaatatatatatagcctcccctgggagtccctcaggacatgccttcccctgggctggcagggcggcgtgggcagtgcgcatccccgggcacctcccggtaactctcactagcagtgagtcatgctcccagggtggctctggggaa

SEQ ID NO: 17485 - DNA, 540 bp, Homo sapiens
  source 1..540: mol_type = other DNA
ttaaaaagcttcatgtgtcatttgcagctgagcccagacttagcttctaaggtgccttgtgtttttagcccgacgaggccaaaatgcaatgatcttttttttcaagtgaaatttagctctggagcaaatatttcctccaaacattcagaaatctagaaggggacctggtgttttaatttttaaattattcacctaacggcattcccatttttagtcaattaaaaagaggtaaaaatgatacagtactgcaggaataggtccttttggaaatagcggaccgagatttaaaataaagtcagcattttaaaaatactttttaaattaagaaccatcgtgattaaattaatgagagaccttaaaaggccctcttctcctcacgccggggtgatcctgggccgccgccgccgcccgagtcacgaagccagacgcagtgcgcgtctccgcccaggactccggagactgcagcagcgcgagcggccgccgcggcccgggctgctcctggagtcggggaggagacgcgactcccgcagacacgtgacc

SEQ ID NO: 17486 - DNA, 505 bp, Homo sapiens
  source 1..505: mol_type = other DNA
ccacctcggcctcccaaagtgttgggatcatggtggctcacgcctgtatatgagatcccatctctatgaaaaaaattttaaaaaattagccagatgatggtgacaatgcactccagcctgggcaacacagtgagcccctgtttggaaaataataataataattaataacatatgtgaaagagagttcacaattagtccaatatctttagaaagattcaaaaacacctaaatgcgaaaaatgcctttattcatttgtcagctggattaaactgtgtattaattaagctcaaatgcattgcacttcacagaaagcaaaaccaaaacaatcctggagtttcgcagcctgtctgagttcaggcggccaagggacccgcgccggtttccgcgggcgacctgcaaatcctgcccggggcccggcaggcgctgcgtcccggcgcgttggcagttggcgacccccctcgaatcccccctctgctgcgggctccccgtggcctttggaggctcg

SEQ ID NO: 17487 - DNA, 409 bp, Homo sapiens
  source 1..409: mol_type = other DNA
aaggcttttaaaatcatgttctaagaaggcttataacggctggagctttaagagtcagcagctttacgaagcgcaggaggcgcggcctcggaggcttaaagctcagctccactgagccctcaccgcggccaagtgacgtttacctccttggaggctcgcgtccacctggacatcagtgcgctcgcccgaggcagcgactgtcgcgccccaggtccggcctctccagggcggccgcacgcgcccgctcccccgccggggtcccccgccgcccctccagcgccgcccagcgtcgcgtccccgcgcgggccggtgcggcggcagcagaggcttcccgggtggcccggcctcccgagggtcgccccgccccggcccagctccgcccccggccgctgctccccctgaggggacc

SEQ ID NO: 17488 - DNA, 539 bp, Homo sapiens
  source 1..539: mol_type = other DNA
cttttcattgaactccgcaccgcatctccattaagaggagctcggagtcggggggcgcggagaggaagtccggctcccaggagcagggagcccgcggcgggaagcggacagggccgggcgccggtggttcaagaggcgcaaggcaccggccccggcgaaggactgccccggcaaaggacgcctccgaatccgcctcctcagcaagcagacgcagaatcggacgaagccagtggcgttcaacgccatcaccggcggggtagacacctccgccgaccgcctccgaccggcgctcccggagaactccagcctcgcgagatttctttcctcgcgttactgtggggcagaaccgaccactctccgctttgccccagaaggcagggcggggcccttctatgtctctcgcaaagtctcgcgagtttttccaggggaaacccttcctgttcggcgactgggacgcctggccctacgagggggaggccgggctatcggagagcgctgtgcgcacgcgcgagcccgagtgcgtgtgtgtgtgtgcacgc
